United States Patent Application Publication US 2008/0050393 A1 - sequence listing, part 3

SEQ ID NO: 6390 - DNA, 1193 bp, Homo sapiens
  misc_feature (1)...(1193): n = a,t,c or g
caaggagactgaccaaaattatattaaaaggtttaaataaaacaagnggatccntgttataacatgaggaagagagctgccccactagatgtctgacattagataactcagagtcccgcctctccaacaagtctcccttactagagaaacggacagattctgttttgtgggatgggataaggagacaatctgaagtagagtttgacacaatattattctgcccatatgaaattctggtagccagggtgccaggtgtattcataatccagatgctgtcaattttaagcctgaagccccaagaggcgagcagtgtttaatacatcatctcttgttaaatagcagccacacagttggcggtacagtgaagcattccctgccatgtaggacacgccagttgtctataaataggaccctgccaggctttagtttgacccaaaactcattctcaggtctcctcaactctatcgttagagtccggtgtgctgtataccagcgatggacgacatcataaggaacggtattgatgacagcccggtcatagttgttgtacctgatcaaatacagctctttattccatgggtagatatttaagactggcccaatcccaatcatgtggttgtgacattctccaacatcttcaatatattcatgcttcaatggcactttactgaggagttcaaattcctcaggtgccttttgaagtacctgttctgctgcatagaatccatctactagcagtgtcctgccaccagttccttcatgtttaagacaatgaaacacttgaatgccacagggctcttgaaaataggtagtgtcagtgtgccgatccagagctagcttggtgtacgcagtgtcacctctggagaagtctgaagtgaaataccacatcctcccataaatggtttctctgattaagctgatcctttctgccaacttctctgtgtgctcttgagtgggagggacattttctacgaatgcaattccatagagcagaaagttttgcagaaacttcttcagtccctcgttggtttctaagaagctctggcaatctacccgatggaacttgggcttgctggtaagatttcagcattccatagtattctaggctggatgactttttgtttctgcccttcatagctgtttttcaccagccaattcaaatcatatttagtcacatgaccatctggccaagt

SEQ ID NO: 6391 - DNA, 900 bp, Homo sapiens
cgtcggataaatatattagcaaataaatatatttcttaacatagtgcctgattcaagcgtctgtctggttcagatataaatacccatgtgggtacctaggtgctagtctccccactaactgagggaaaaaggttcccaggtggggtcctctgcccactttgccaccacattcacattccaaatgggataatgcctgaggggccaagagtggtcaggctgccctggggtgaatgtcaccctgatgaggcccatcagctcttgtccactcagtgacggccagacttgtgctctaatccactctcctgtgggtccctggcctgtatggcttatactggggaagctggggcctctgggctgttccaaacccaaggggtcacactttgcttttcctttgttgtccccattttccatccttgctctaagacaaaacttttcccagagaagaactctttgttgtccccgctcagctgtaattctgccttttctaccttcattccatccttcctctgccccagatgaagtccagcagaaattcctcctttctacctctctgggactctgagacaggaaatcttcaaggaggagtttttccctccccactattcttattctcaacccccagaggaaccaaggctgctgtacccacctcagggacagaacttccacactatagtgggaaagcttcagggacccctccttttagtgctcagggctcacctatgctactggtccttttggcaaaaaaggaaaatgatagagccagggttgcccctgatgtagcagccttactgtggaggggccaaagctggtgttcagagctcacccaaggagggaggtgataaggtgtcatgcgttctgctgaacccactggctggtatgaacatgaggcttggggtgagc

SEQ ID NO: 6392 - DNA, 664 bp, Homo sapiens
agcggacaacatggcggccttcatgctgggctcgctgctgcggacgttcaagcagatggttccttcatcagcttcaggccaagttcgaagtcactatgtagactggagaatgtggcgcgatgtgaagagacgaaaaatggcctatgaatacgcagatgagaggctacgtattaattcactcaggaagaataccattttgccaaaaattcttcaggatgtggctgatgaagaaattgctgccctcccccgggatagctgtcctgttagaatcagaaatcggtgtgttatgacgtcccgtccgcgtggtgtgaagcggcgctggaggcttagtcgtatagtcttccgtcacttagctgaccatgggcaactttctgggatccagcgagcgacatggtaaatgagctccagaacctattgagcttgcagggaagccaagcttgcagttccagcaagcaaagattttttttaatagaccaaaccctaatctctacaggggcccagtacagttgtttggcctacctgatgctatctctaaactacttttaaaatgaagacatttgggtgtttcatgtcagtgaattatcttttctcttggacttaacaaacatactgttcccatacatagtacaaagagtagcataataaatattttctgtgaaaaaaa

SEQ ID NO: 6393 - DNA, 413 bp, Homo sapiens
  misc_feature (1)...(413): n = a,t,c or g
aaatattgaaaataaaggaacttagccttcagatcaaataatcagaaggaccccccatacacttgaggcaagcagaaagaagagataaggaagataaagatcataaggataaaatcaggtgggtcacagtggcccatgcctatannnnnnnnnnnnnnnnnnnnnnnnnnnnnnnnnnnnnnnnnnnnnnnnagtactcttttgagtctggcttctctcactcagtgtagtatctgtgacactcattcatgatggattcttgtttcattggcatttattgttgaattgtgttctactgtatgaatatgctatactttgtcaatccattcaccagcagttgtcctctgtgtgagctacaagttattctattatagccaggactggaagtcccttgtttaaaaagaaaaaacagc

SEQ ID NO: 6394 - DNA, 947 bp, Homo sapiens
cctgaaggtgcagtacccccctgaggagttcacgaaggccaagggcctgcctggtgacagcttctacatcagggccctgtatgaccggctggcagatgtggagcaagagttgagctttaagaaggacgacatcctctacgtggatgacaccttaccccagggcacgttcgggtcctggatggcttcgcagctggacgagaatgcccagaagatccagcgcgggcagattcccagcaaatatgtgatggaccaagaattctccaggaggctcagcatgtctgaagtcaaagatgacaatagcgccacaaagacgctgtcagcggctgcacgccggtccttttttcggaggaaacacaagcacaaacgcagcgggtccaaggacgggaaagacctgctcgccttggatgccttttccagtgactccattccactctttgaagattcggtgagcctggcctatcagcgggtccagaaggtggactgcaccgctctgaggcctgtcctgattctggggcctttgctggacgtggtgaaggagatgctggtgaatgaggctcctggcaagttctgcagatgtccccttgaggtgatgaaggcctcccagcaggccattgagcggggtgtcaaagattgcctgtttgtcgactataagcggagaagcggccatttcgatgtgaccactgtggcgtcaataaaggagatcacagaaaagaaccgacactgcctcctggacattgctccgcacgctattgagcgggctccaccacatgcacatctaccccattgtcatcttcatccactacaagagcgccaagcacatcaaggagcagagagaccccatctacctgagggacaaggtgactcagaggcattccaaagagcagtttgaggcggcgcagaagcttgagcaggagtacagcaggtactttcacaggggtcatccaggg

SEQ ID NO: 6395 - DNA, 737 bp, Homo sapiens
  misc_feature (1)...(737): n = a,t,c or g
tttttttnttttacagaaattgacctttatttgttgtactaaagcctgtttaacttttgatacaaagtaacattttagtacagaaaatcccagtctgtcagctcagtacctgtctgtgcacactgtaccatctcagtcccactctgcctgtaacttagaaaacagcccctacccccagagggtctgcgagttaataccttgagaatagtctacagtttttcatagtttgtctgagctagaaaacttgtacctgtaaaacaaaggacagcattgaggactgaaacttgtctcttttttgaacaactgtgcaagaaaatatatccctttttaaaaaacatcagttatggctaaactacaatctagtgtctagaattacaaagaataaaatgaaatcaaagatttctcgctagtaaaatgaaatgttaggaacagtattaaaatataggtcctaccccaacgacacttacacagagcccagtacagtacctattattaacaggacgcatagcttaaggaggaaccacatcaaatcttcagccagacatatctagcctcagaagtgcaaaaaaaaaaaaaagcccccaaacgaagacacccacactgagtagggtgcatgccgtgagtgctgtaatcaagattaaaaagacctcagtttttctttttagactgttgatagtgacaataaccattatgcttcccctaaaagctctcaattcaatgtctgaaacatgaatgtt

SEQ ID NO: 6396 - DNA, 516 bp, Homo sapiens
ccaaataaaataaaaccagaaaagagcagtgccggcctgtgtcccctgaattcctacaattgtcagattgacatggatgttccactgggggccgtgagctggaatcccgggggcaaaaagcctcactcttttagttttctgttctattccgatgatgctgacacttgctggttcatttggccttcctgatagcaaagaaagggcttgagactccaggagataattttccatgaaaaggagaagccttgtcatccacaactcagcgtaaggcagagttcaaagtgaagacttcccagagcagcccaggcactgttggtcctctttgcctgtctcatttttctccatagtgcttgttactgcgtgccttcatatgcatgtatgtgtctgcttatttttgtcttcactaaattgtaggcaccttaaggggagagggctttgctttcctcattgctctgtgtcaggatcctgcttaacctatagcacgtgctcataaacccagttgacagactgtgtgga

SEQ ID NO: 6397 - DNA, 174 bp, Homo sapiens
gaaaacaaaccctgagttttaaacaaattgaaacttgtaaaaatgtagcccatgggtaaactgggcattttctgagaattttgtttcataaaatatgtatataagaacttagagtttcaatttctttaacttgtctgggtatgaagttcagcagtctccatctcttagaagtag

SEQ ID NO: 6398 - DNA, 294 bp, Homo sapiens
agccggcacacccagccaatgtgccgaagaaagaaagaaaaacatgctcatcctttgagtcaggttcaaattttttctcctctttaacccccagtcactccagttataagtgatttttaactcttctcacactttaatgcatctggcaagaagatccacgtggtgttaggaacaatacaggaccttaaggatgggggaatcagcaggtgtcagcgtgccctgtatgctcagggcagctgtttccactggacattctccctttgcctctctggggagcaactcctaggccagccg

SEQ ID NO: 6399 - DNA, 452 bp, Homo sapiens
ccactcacacacctacggacacacgctactctgggaggtgatttgcgacttagccaggcccccaaagctgggctcctgtagggagaaagtctgcccaggtccacatccaagccttcatcgtttgtcctccgggttctgggatcctgctggaagaggggagcttctgcaatgggagttgccacaaccctgcagcccccaaccacttccaaaaccttgcagaagcagcatctaggaaggcagtggggcgcctaccaatatgtgctcactttcctcttcatgggccctttcttctcccttcttgtctttgtcctcctcttcacgtcactctggcccttctctgttttttacttggtgtggctctatgtggactgggacacacccaaccaaggtggaaggcgttcggagtggataaggaaccgggcaatttggagacaactaagggattattatcc

SEQ ID NO: 6400 - DNA, 236 bp, Homo sapiens
gcgacgagcgactctctgtcttaaaaaaaaaaaaaaacaaaaaaacctcagcaggccatactgcatcttgagaagtctttttgaagctactttagtttgactttagtgttaaagtagctaaaaatttttgactcccgcccacatattcagataccctcactttgtgcataggatttgtccattacacctcagtcatctaatttgttggtataaaagataccctcggctggcgtgaa

SEQ ID NO: 6401 - DNA, 149 bp, Homo sapiens
cttctgtcacgtcacaagggctgtacagtgcctggagctgggcagtcttctcagagtggagcctggtaaccgcgacctccccgccagttcctgtgtgttgctggctggaaaggggtagttgacaaactcccacccagcacagtatttat

SEQ ID NO: 6402 - DNA, 917 bp, Homo sapiens
gtaacagggattgaagaagtagtaattccaaaaaagaaaacttgggataaagtagccgttcttcaggcacttgcatccacagtaaacagggataccacagctgtgccttatgtgtttcaagatgatccttaccttatgccagcatcatctttggaatctcgttcatttttactggcaaagaaatccggggagaatgtggccaagtttattattaattcataccccaaatattttcagaaggacatagctgaacctcatataccgtgtttaatgcctgagtactttgaacctcagatcaaagacataagtgaagccgccctgaaggaacgaattgagctcagaaaagtcaaagcctctgtggacatgtttgatcagcttttgcaagcaggaaccactgtgtctcttgaaacaacaaatagtctcttggatttattgtgttactatggtgaccaggagccctcaactgattaccattttcaacaaactggacagtcagaagcattggaagaggaaaatgatgagacatctaggaggaaagctggtcatcagtttggagttacatggcgagcaaaaaacaacgctgagagaatcttttctctaatgccagagaaaaatgaacattcctattgcacaatgatccgaggaatggtgaagcaccgagcttatgagcaggcattaaacttgtacactgagttactaaacaacagactccatgctgatgtatacacatttaatgcattgattgaagcaacagtatgtgcgataaatgagaaatttgaggaaaaatggagtaaaatactggagctgctaagacacatggttgcacagaaggtgaaccaaatcttcagacttttaataccattctgaaatgtctccgaagatttcatgtgtttgcaagatcgccagccttacaggtt

SEQ ID NO: 6403 - DNA, 1030 bp, Homo sapiens
attcggcacgatggggtgctaccaccgctgccgtcgccgccgccattttgatggcaggaagagtccggttctgggacagctggagacagtggtggtgactgaaataactttaccaaaggaaagctattttgcgaactatcttctccagcggagatggccaatgtgctttgtaacagagccagactggtttcctatctcccaggattttgctctttagttaaaagggttgtcaatcccaaagccttttcgactgcaggatcatcaggttcggatgagtctcatgtgggctgctgcacctccagatatatgctctcgaacagtgtggcctgatgaaactatgggaccctttggacctcaagatcagaggttccagcttcctggggaacataggttttgattgtcacctcaatggggactgcttcacagaaggaaaagcctgggttcataaaactttgcctggatgttcttaggcagaacctttatcaagtggaaagacattgagttttgttgatgggcacaatatgtgaatgaatttcagggtaatgatgcacctggttgaacaagaaattaacagtgcagaaacttactttgaaagtgccagagtagagtgtgcaatacaaacatgtccagaattgctgcgaaaagattttgaatcactgtttccagaagtagctaatggcaaactaatgattctgactgtaacacaaaaaactaagaatgatatgactgtttggagtgaagaagtagaaattgaaagagaagtgctcttagaaaagttcatcaatggtgctaaggaaatttgctatgctcttccgagctgagggttattgggctgactttattgacccatcatctggtttggcattttttggaccatatacaaacaacactctttttgaaactggatgaacgctaccgacatttaggattctctgttgatgaccttggatgctgtaaagtgattcttcataatatggctgtctggtgttgcattagtgaagatactccctacaactacatggtaccccag

SEQ ID NO: 6404 - DNA, 301 bp, Homo sapiens
catttcagagtcacattttttgcattgaggaaattcaaaatgtcataaaaataactgagtataattttttgtaatgtataattaatgagaagaataaactttttttttcttgggcgtttgcttaattgagattcaaagttagtaccccataatgaaattgggtacaaatgttcacctgtaaaatctattcttaacttgaaagacataggaaaaacaggcaggttgaacaatagggccatagcttccctgaccctggggttaggaaaatcaaataaatcatggggtatggaccaccaaatat

SEQ ID NO: 6405 - DNA, 260 bp, Homo sapiens
ctctcgggttcaagtccttcctgccacatttctggtccactcagcagcattcctgagggaagagtgggcaggcagggctatggtgaaggcatgaactggaactggagggcttcttttgcagaccctttgtggtactggaaagaaattcctcaaggacctataggctcattagtgccatgctaaactgacccagctgactctgaatttcagtagtattgttccagaaaaaatttccagccagggatggtgacttacatctg

SEQ ID NO: 6406 - DNA, 642 bp, Homo sapiens
  misc_feature (1)...(642): n = a,t,c or g
gattataggcgtgcacgcacacctgaccgcaagatacttcttacacagaggctgccatcgcagaagcttgtgttgtactatcgacccccattttgggtcattttttatcagaaagatgagttgttctgcagctacagattgcgtgtataatcctggccagcatctctaaagcttgtcagctgcttcacgagtgagtacccctgttcacagaggagatcaggtgagtgtgcaggtctgaacttactactgcaatgggaaggtcagctcagagagcattaactttggatacagatgataacacaacaaaactattacctcatatctacgtcgctatgagcagactgggaatagggtaatagtgcttggagttggcagaggtgcaacagtagatggccatgggtgctgctttggaagggcctaaggatacagttgttgaatgattgtaagaacaagagaaaggtggagtctcaataaggcagccgtacaatatgtttatcaagccttcaataggtttagtatatactcctttggcgcatgcttacaagtttactgaactataaccaaacatcccactgggaaatgttttgaattgatgtgagaatttgacattaagtagcaacttgggacatcagagacnnccct

SEQ ID NO: 6407 - DNA, 147 bp, Homo sapiens
agagagctagcagaatagaaaggattaaaatctaactagcagccccagggtaggccggcgtgagtcacctatgagctgggcctgggcctggactatcccctaggtttcctcttggcgctcttctcccttccctcaaggctctgtgcg

SEQ ID NO: 6408 - DNA, 365 bp, Homo sapiens
caaccctgttgatatcttgattttagatttctagcctccagaactgtgagaagacaaatttattttgttttaaaccacccactttgtgtacttttttacagtagcccttggaaactaaaatactctgtttcagcctctctagagaagaaagtcagacttctaatagaatgtgagaaaactttgtatcaagtaggagacctgtaaatctaatgattttataaacttttaaccagtcattctattttcttcacatcttcacaccctctcctcctgcaagtaatacctttttctgtcattttctgggctctttgggggttcatcagtgacaatcaggttgcttttctgggtctgtcccctattgaagt

SEQ ID NO: 6409 - DNA, 325 bp, Homo sapiens
cgagccctgatattgtttaaaccaccggtatcagagccaattcccatacacaggaagtctccccttccaagatctaggaagccggctacaaatgatgtaagtatatgtatcagaacacatttttcatacagtaaactaactatattttaataaaacagaaaagaaaatacagctttaattgtggagcttgggaaaccaacaaatttttaaatgttatttaatctatttttaaataaattacaaaaaatatagaggcagttcaaaaatagattaactttagaatgttgagctttacatatagtttcataaaaaaaggatgccaata

SEQ ID NO: 6410 - DNA, 346 bp, Homo sapiens
tttttcagtagattagaccgtgccaatcacaatcctgggtggatttgtgtaagtcacttaacctctgtgtgcctaaacaagttgtgcttttttaaaaggagttatgtttgggcaaagcctttgtcttcaagcagaatgtcacagaaggcagctactttataagccccaatgggccatggagaccactgtcagaaatgggatattagtctagagagaaggtgatctattcccacatgtcatttctaatgttgagtttccatgactgaacaaagagaatatatttattcagcttcacttgcagatccactagtggaatgtggaggatttaggagctcattggagtata

SEQ ID NO: 6411 - DNA, 920 bp, Homo sapiens
agtattagagataagaaagtatatgaaaatatactgggaatattggattcttggagaaaactgttcagtcacagatatattcttgcctagcagtgaagtgcctttattttcagcatagcaaataaatattagacctgttccaatttgatctacaatttttttctgtgtttttcaccagattgtactcctaaaacttaacaggccatcacaagcaattgtcttttgtttacaagattgatttaatatgagaggatacaaaatgtcatcgttatcctctcttatgaacaactgtagtcaaaataaggtggcacaatttaattgttttgtatcagaaatacactgacccaccttttattgagtcctgccacatgttaggtaccgtgctctgctgtggagacagagcagtgaccccaaggagctcacggtccctgaaggaggtgctagagaagagacttaggcttctgatactgccaatttaatgtgagaacatggggtatactgcatcatttccattttcatcaataacatatgttttatgcaccttctttacctgaaacttactaagaatctaccagtaaacaaacatcctgtctttttgcaagtatgaatcacttaacctgctgatagttgaagaacactttaggagttttgtattcttgtatatagtttattttttccatgtgctagccaggtaaagattacacagttcttctggactgttaaattgtgcatggttttggaccccttctgctctactacagagagtgaagaagaaagtattaaagctcactttaccattccatatacttactaaaagcctgtgtaaacatgtcttaatgaatgttgttggaaaggcaatgtaaatagttggaaaatattaaatttattattacagttttaaggaaaaccttatggggggc

SEQ ID NO: 6412 - DNA, 128 bp, Homo sapiens
cttatcaatagtaatatctataattgtacatcatttgaccgtgagataatatataaaatctttctggagtatccctacacacttttcaagataacaacaaaactcaaggaattattgaaaagaggatg

SEQ ID NO: 6413 - DNA, 117 bp, Homo sapiens
catgggtataaattaacaggttaatgtcagtcatcagatcttccttcttcttcctaagggatgcttgtgtttgcctcaatctatccaatctaatctttcttgttttggggtggtttc

SEQ ID NO: 6414 - DNA, 409 bp, Homo sapiens
  misc_feature (1)...(409): n = a,t,c or g
tcacccacagatacgagctgacctgactgaaatgaagatgcaagccttccccaaataaaacctcaaaaatccctaccaatgatccaacgaaancctctatgcgcacaaactagaaaacctagaaggaatagatcnattcctggaaacacataacctcccancgttgaaccaggaagaaatcaaaaccctacagagaccaataataagttatgaaattgaatcagtaataaataacctgacaactacaaaaagccttagaccagatggattccagcctaattataccagatgtataangaagagcagnatcaatcatattgaactattcaaaaaattgaggaggaagtactcctctttacctcattccatagaatgaggccagcatcattgtgataccaaaaacctggca

SEQ ID NO: 6415 - DNA, 1397 bp, Homo sapiens
ttttttttgtagaaagagacatttaatacttctgtttacaaaattcaggcgtacatttcagtttgccctggaccgtgcccaaagctgtgtgctcatctctgcgcccctcatgtacttctgacgaggggggtgcagggcagggcagagcagagcctggggtccggaggcttcactggaccacagggggaggggaatgtgaatgtggcctggcccagagaactccccatttcatcgattttgcattgggcgatagaggaagcagatgtcggggctgcctgccttggtctagaggagatggctggggccacttcccacagggtgaagtggcagcggctcagcaaggggagcctggccaccaggggctgggacatgcgctcactggaacctttgtgcttggccctcggcagcgcggctgtggtcccgtgtgaggtgtgctggggtgggtgtgggtggctggtggtggcagcttgtgccagagtgacacaggcctccctgggttgggatgggggcagttaaaaagctgaaaaggtacttggctttctgagggcggggcttgggaggcagggccctgcaggagaccatgttctctgtcctcaggcagatcccagctggcctctgtccccgggctgcaagctgacagcaggcccgggaggcggtgaggccctctgccctggccttgaggagaaggagtgcgtgtgtgaggcgggggtgcatttgcccctggaagttaggccagggcccatcaccagcacccaggctgggagggatttaaaaccagggtcctatctctgagcccaccccatggggaccctcgatcccatcctgttaaggctgcgggactcgagggtaggcagtgggccgggcccccgtcgggtcaggacggaggtgggggctgccccagaggaacattagtgtttctaagagcaccttagtgttgccccgcctcggccagctgggcgagaagttggggagcgggggagcgagggcgccatggagtggggaagggagccgtcaccgttgggagtcagcgctagtgtaaacaggcatccccacccacccagataagcccccccacccaagtgtggggtcctgctcagggagtacctcaagggctggggcccaggtggcgccggcacgtcagacaccgccctggcagcaggggctccgtggaatgcaggagacccagcagggggtgccggccagtgtggacggaggggcggggcggggacacgggtgagtcactgcggcaggggcacaagcacctccacgtagctgagctggaagaagcccgactggccgtccagcatgccctcgtaccagttctcatcgatctggttggtcagcgtgatgacgtcgccctcatggaagcccagctccccgtcgttctcgggctcgaa

SEQ ID NO: 6416 - DNA, 304 bp, Homo sapiens
gctttgccctgcccaccccaggaccactacttatcctctgagatcttaagggacactcaccagaaatagccatggttaagatggtaaaagtctggctctcaccaacccttcctacagtaatctccagcacatctgaatattgctgggaaaacacaggggaaacaagatgtgtaccatgtgagtgagcaggctgcccaggccagagaggcaagcgtgaggcagccctcaacccccaacgtgtggttactggcctcagctggaggctcctcctgctgagcccttttgcagcccgacaaagacaaaa

SEQ ID NO: 6417 - DNA, 212 bp, Homo sapiens
  misc_feature (1)...(212): n = a,t,c or g
ccaggcagtgactttcagccttccctctacacatggaaaggaatgtgcccagtattacctggaaatcagaatgccaattactcaataaccatgtatttaaatagccatgatgaaacaggaatttagcagaggttacctgggaaaaaaacaaacccattaattatgtctctcaaagtccttgtaccttttgtaacttttttgtacctanntcc

SEQ ID NO: 6418 - DNA, 213 bp, Homo sapiens
aattttgaaagtccatatgggaaacttagatctttgcttatttccttaaaccatcatgaatgtcttggtgcctgatctcatgtttatgggatgtatctggatgagagagattgcaaatttagaggtctgtgactggatatgacccacaaatatgttttgtttggtctccttagtgctttaaaattctttggataagttgccagggtttaaaat

SEQ ID NO: 6419 - DNA, 321 bp, Homo sapiens
gttgttagctattggaattctggacagaacagagctcctgagtctgttcactgctgtaagaagtaagaagtgtcatgactctttttcagcagaggaattagtctattaatgacatgtggctggaaatagacctgccgctcagaacctgttctggagttaagtccttccaagatgggcctagggaatctgagaagcacagcaggttcctctcagcaagtgctgctgaacccccaaactaagctcacacattcttcttgggttctgcctggagagtccctattagcctcatccctaagcaaccactatgctcctttttttttt

SEQ ID NO: 6420 - DNA, 297 bp, Homo sapiens
tttctagtgagggcttcaggctgtttctactcatggtggaaggtgaaggggggagcctgtgtgtgcagatcacctggcaagagaggaagaaggaaagacggatgaggaggagaggaggtagtgggctttttttttaataatcaaggaaccaatagagggataactcattactgaaaggacagtggcaccaagccattcattagggattggctcccatgacccaaacacctctctctagaattcacctcaaacattggggatcaaatttcaatatgaaatttgggaggacagatatct

SEQ ID NO: 6421 - DNA, 699 bp, Homo sapiens
tgaaaatcatggtgaggacatgaggaaaatgtccttccagcgctgcgcccggacagacaagggtgtgtccgcagccggccaggtggtatccctgaaggtgtggctgattgacgacattctagaaaagatcaacagccaccttccctctcacattcggattctgggactgaagcgggtcacgggcgggtttaactccaagaacagatgtgatgccaggacctattgctacctgctgcccacgtttgcctttgcgcacaaggaccgggacgttcaggatgagacctaccgcctgagcgccgagacgctgcagcaggtcaacaggctcctggcctgctacaagggcacgcacaacttccacaatttcacctcgcagaaggggccgcaggatcccagtgcctgccgctacatcctggagatgtactgcgaggaaccctttgtgcgggagggcctggagtttgcggtgatcagggtgaagggccagagcttcatgatgcatcagatccggaagatggtcggcctggtggtggccattgtgaagggttatgcccctgagagcgtgctggagcgcacgtggggcacagagaaggtggacgtgcccaaggcgcccggactcggcctggtcctggagagggtgcacttcgagaagtacaaccagcgctttggcaacgatgggctgcatgagccgctggactgggcgca

SEQ ID NO: 6422 - DNA, 638 bp, Homo sapiens
  misc_feature (1)...(638): n = a,t,c or g
caacatctgaagaacaatgcatcacacttgggaaaaaaacatttcttcaccttataattggtaatgtgctacaattaccttttaattaagatctgagccttttacaagtagattttcttcacatacttaaaatagatnnnnnnnnnnnnnnnnnnnnnnnnnnnngataatgaagactaaatgttgattctgtattaacaaatggaggcagaggagagtaaatgactctagggcagacttgccaaaccctagcttggagggagtcccatattgccgttcatgcagaaagcagacactatcattagtctgaggactaaccctaaaggggccacacccattaaagctgaggagtgtccaaataccagggcaacaaaacgtcatggcaaatagtcttctccagatatgaaaacccaagactgtggtcttcacatctttaatcccccaaattcttaagttggtgttctgagtcaggactctatttcaaaatagggtctcacatccaaggaaatatgtccttctgtagagcagttcttacttgactatgcttcagggaaaagagcagcagcatctataaacatacatgtatgtgtgtgagagtgtgtgtaatttaaaaggggatccagagccccttcttgatt

SEQ ID NO: 6423 - DNA, 491 bp, Homo sapiens
ataccatctacatttcactaaagccaggtcagcagcattgttcctttgtttcttattaggcaatcaccaatatatattggatgcctattttattcacgaagtgttttaccacactggttttgctggtgtttcctacctcctcacacattgtctatatgatttgctcagtaatgtagggataatgttttcagagtccatagtatatataactcctgatcaggtgactagatggtgtgacttaaggaaagaacacgttgccagtaattcagatgtgccattgacacaggaggacccatgcctgagaaagacttttatctgagttactgagattaagatgttttgaagctcccaagcagagggatgctggatctgctgtggaaatctggctgagcagctgcagggacagctgggggtaaagcatccacctcccccagtttgggaaaggatgcactcctcagctgttctggaaggcagacttcttatctgctgtc

SEQ ID NO: 6424 - DNA, 444 bp, Homo sapiens
gagagttcttcccttagccctgactttacttgctgtgggaagagagatgagggtcagataggtgggaggactaacttccagggtgccaagaaggaagaaaagccccaggttctcttttcttattgaggaacgatccgaccacctcacaggcctgccctgcagctggaagactcggcgctctaaggcctgtgccgtgtccagctgtgactgtgcggtgggctccatctgctggacaaaaggggaactgcaccatggcacttggcccatgggaaagagggtgtggtggtgtgccgatacctcctcgcctgccctccaagccccagctgccttccttttggattcccaagcttcaggatgtgttccctcttccagctgtgggaccgctgtcccttatttcaacccgttagcaacaatggatagagaacacagtggctattaatgaaa

SEQ ID NO: 6425 - DNA, 4439 bp, Homo sapiens
  misc_feature (1)...(4439): n = a,t,c or g
atgttaatttcagttttttttattgtatgcttgatgcatttagagacaattccaagggcaagcactggatagggatattatctgctttgtagatatttgtacaaaagactgttaagactacatggccagttcccactgcaggaaacagaatgattttcttttttttttattattattccctgccaatagcattttccatctaacacatttaaattctcacagcataattgcaaacatgtacatattggttcccacgagaaatctgcaggtgacatttcgggatgtttggagtcaatcagataaagcacattatgacagaaaccataagaggggagctgggacctgggactgtgcagaatgaaaagccacggctacgggaagcataagcttgtgctgcaacggcatgtgcacatgacctgctgctcctggccctctacgaagcatgcccagcaagggaacctcctccgtccctcctccacgtgcttccttcctaaggctgagagctcaactgaagaccttccccaataaatgacagatggctcttcagtcaggaatgcagttagtggtttcatgacagacacactggtcccacccggcttccctgctgaaccacccagtactgaataacacctgtaccaatgtgggatgacatcagctaggaagcaaagtaatttgcctggttgatgattattttttatacctaatgattcacccaatagtaaaggaaccccacagctaaggtctaacaggcatatacctgctctgttagtttataagaaagactcgttctaataacaccaggtcttatattattgagcactaaggaacctccataatttcgattatattctacctaaaatttcaaagcacctccaagaatgaaagggtactatttctgctttgctaatttactcctgccagagcttctggtccttgaatatgagggctatcttcacctatagtaaatcccatctattagacaagactagctagcttatgtttggttatggggcaagggagtgggggagagattctgtcctttctggctatggcttctttctgcacaagcatgctcagcccccaccccagtctgaaaagatacacaaagggtttcctaggaagctacttatacactatgacccttaaacataatttttgtatttcatcttgaatattcatgttccctatactgccttcagaaaagcaatccctggtccacaaattattcatgtaacaagcatttttcaaaagcaaaatctgttaggaacatttaaaaatgaacattcctcactataacagcctgctcaaaacccaacaacctatttccagctgttaatataagtacataaagtcactaaaagtaagcgcagccacatcagcagattctctgctctcttgtcgtctttctccacccatcccaatgcacaactgtcaactgtgcttatagaccacctccagacctgatgggagctgccacaccccttttaacttttgccagggctntaccatgccctctagtggtaggactaggacatcacaattgtggtgcagagtattagccaagacagctctcaattagggttgccttctttaagatgcttgaccaaggtcaatgtaccctaacagaagtagccattgtgtttcccaatgggtaatgacataaagcgggtagggttatccatggcctttgtttggcccatagaaatgaaaggaggcttctgtgtaattaattcttactagacttcttttgatcaaatcctgaatcaccttggttatctcagacatgtcaggtctgatgagacatttcatagtaggcgaaggtgaaatcactcagtgagattttagagcagctttctgtatcatcttgctttacatagccacttggaacatggacttgggaggggagagttacctacgtcatcctcgaacctcactttcccccccccttaacagtgatagaaagacacttttagaatagccgccccacctaaaaggacactctaaattcaccaacagtgaaagcccaggccaaacctgcgtgaagctcttagcagctacaggccaccattattggttgccattaactctgtcagctgaaatcgtcttcccatcacccacaatgtgtggttaatgattttatatacagagtttacaaaactgctgactaaaaagctcatggcactcctatactcacgctctggagagttggtagaaaaaaagaatgtgttctgataaaacctctgatcctcactgttcacatccatgtaacagggctcggtcccctcaaaatctcatgatacagcttctgggaaggagttattaaccctgtcacttcccagattgctgatactcacaatgtttccatttgcagattcctgccaagaatgatgaggcaggattaggcccaactggtgctctcccactagctgctgtatttacatacacttctgttcatcatctctgcccgtttcaggagtagctgagagcttgaataggtggcggtaagctcccaccaccaccccatgcccagtgcagctacccgcctgaatgaaggcagctcctgggacatgtgaggtgtgaggagtggggggaagatccagggaagtcagctgctttgtatttgggtttgtgggatgtaatggccttggcaggaatggtggggcctgaactggtatcctgcagagaaatgcttctatatccatctatcacctccttgccctctgtcttcccaatgctaagcccatctggtcttccttgcatgcttttctatgctctggtggtaagtcaaatcctttaagtgaacccgacattggaaacaaatcagtttaattaaagtctctctgctgagataatgtagtgactgctaggattccagatatttaactagaatctaaatagtcaagagttcttccttttctttccctccttggctgagagattcactactctgtgggtggaactgtgccatagggccattcaattactcctagactagctgttggtaactagactgggaatcatttctacacaaggaatcctgtgatggctgtgctgctgtgtggggagagctgcctcctgggacatccatgcagtgattcagaaggccaccagcatggctatgtctgaatctcggaagtgaataggttccagctaacaaattatcagctctcctgtaagtggaagcagctctgcagtccaccacacataagcacagcgcatggaaaatgggaagacagcttcttcaggagcccaggatgtaggaaggagccaggactggagaggggtccctttcttccttccaattggttctgccccccagaagacacctgtagagacactgtgcactacaggcatgcactcacgggaggccacggagggtccccttgacaacacacacaagagccctgtgtgtgtgcacaaatgcctcttgttaacctgaaagaaaccgctactgagggaaagactaagacttcaaaagaatttgcttttcccgccaactcggcactgtgaagcctgcctttcaaggcttgatgaactctagtcctcttgtaaaaggctaatgtgtccattgccactgaaatacaataatagcagcttaaaatccacaattagtcacacaaccgaacaacaggcaacgggataccatgttacactgcacaggaaggagacctacattgcagaaggggacgctgtgagattcaaggtggaacacaaggtaacagtttgatctggcttcagaaaaggaggccacatattaactttctcattttactcaaacaggagagtggtttgttttgctggtaatttagtaaggtgggaagtcttaaataagaaggggaaagggaacgcttacttcacttaaagaacttaatctccgtgtcaacacagtcatagaaaaggtcccccacttccgcagggtccagtggctcggagctggtcaggatttcttccatggcttccaggccttgcttctccagctccagcatggtgctcctcagcttgcgaccttgctcctggtcactttcgatgatggcacgtgctcactcgtcgtttgtacagctcatgccggcggtctggtttctcctggaaccgaggctcctttttggcagggtcgtcatccccaaaacagggagactgtgttttggggacaagttttacgtcatcaacaaagatgaaaggcttgaatatggacctggaaggatcaggggttccagtgaagtagtgaatgcacggagagcttctattctgcggcaggacagacactccactggctgtggtgaggaaaaactcagagtctatgcacactccgctggctttgtcccgtaaggtgttcatcatagtctgcactgtgatgcgttcttcatagtttttctaaagcatgtctttgcgagcacctgcagtcctagatgatcctcaactggagagtagacttcgggaaa

SEQ ID NO: 6426 - DNA, 581 bp, Homo sapiens
ctatcaccccattccccagaccttcttgcccccgccctcctggtctgtggacttccctctgctctgagcccaggggagggggaagaagccagggggtagggtggccctgggaacctggctctgggtccccacttcctctcccagtgccgggctgggtggggtgtcaggtttatttatgtacctcttgcacactcatcaacctatgcaagtcccccaccccggccctccatgtttctgtgcctttgctcatcccctcaatctcccagggcttctccagtccccctcccactagctgcaggaagtgggatggatgggccacctcgtttggaatcagcagggtgtccctctcatgggaccctcccctctccccagcctgtcctgtcttgttcactctccatcagggtgagctgactgtgcctggcactgggaggtggtgagggacaccgtctcacacacacagggaggcaagagcttgccccccaccccacctgacagcagagtgttgcaggacgcaggcggccccactcttgatggggcagggacccttgaccctctccccgcttccagccccctccccaggg

SEQ ID NO: 6427 - DNA, 591 bp, Homo sapiens
caaaggagacagtcaatggaagatggaaagaggggaggttgggaggattgtgtttcaagctacaatatctggagcatattttactgattagacaatttatatgagtaatagaaaatagtccaacttttaacaacatgagctgaaactaaaccaaagtactcttctttccaagtcatgaaaaggaaaccttaaatatatttccaagaaatcctgaccatagtctgtagatctgtttttaaaatattttccgctatcttcatttctaagtttcaatattcctaggatttgggtagtttgagagatgtaacttcatttagggaaaatgataataggaattttctatgttagggctttgcccttaaaaattaaatgtgtcctggggcagatggagggatttcctgggtgtgcatcactttctagcatcagctcttcagggagcccacgggagggaacccctgtattaaagtcaatgcaccaaagggcagctaggggtttccatacagacaccatgggtccaagccctcatgaaagggtgaggacctggagtttgtcggggatttgggttcttgtacacagatacaacacggccgc

SEQ ID NO: 6428 - DNA, 453 bp, Homo sapiens
gatccgccaggcaaaactgaaatgacattttaacactaccacctataaaataaaagcaggaaggtaaatctgactgaaatcaaatctagtaattattttaaaggtaatattccaaagccaaaacaaaactgtggggaatgggagaggtctttgtttctttctgatagatgatttaaaatgatctgctattagggacacttcatcccttagatgacctatgggggtcccctgcgttactaacaaacagcagcaagcgatcagtatctaactccgtgtcactctctgagagcactgtggcatcaagaaaggtgtcccaggagacctggcctaggcgccctctctgtcgccaagttaattgcatggccttgggcaagtcactccaccccgaaagcctcagtgtgtccatctgcagaatggggctgccacctcctctcacctgatgttatggagatg

SEQ ID NO: 6429 - DNA, 1460 bp, Homo sapiens
aggcttggcacaagtagaaccgaacaccccaaggcctacctgcacgtgcagtgtgactgcaccgacagcttcaacgtggtgtccacacgcggcagcctgcgtacccaggatagcgtgccacccctgcacaggcaggtcctggtgatcttgtcccagctagagggcaacgccggcttctctatcacccaccgcctggcacatcgcaaggcagcccaggccttcctcagtgactggacagcctccaaggggacccacagccccccgctcacgccagaggtcgccggtctgcatgggccccgaccgctgtgaccaccatgcctggggcaggggctgtgcacagacggaccccccacccccacacgcactttatgagggagaccccggacagaggacgcttgagccagaatctcaggaccccgcccagggagctgccagcccagggctcagcttcccatgggccccccgcccccctccttcccctccctgaaccccacagtccgcctggccaggcctcctggccgccacgcagaatacctcgaaccaggcgggctgtgaaccagccccgctcacctgccagccccaacacccgacgggggccgaggccaggctgcccctccctgtgggctcagggtctcctgcgggctaggcagccaggagctctgtccgcaaaaccaaatctgggtgtcagaggccaagaccctggggtgggatcagggaccacccctcacggggcataaggtcagttttcccccagagcccgggtccctgtcccccacagggcaggcggggtccctggagccctggtgtggagcggcgagtcccggggcggtgcctgtctcagaagaaggggcccttggccagccccccagcgacactatgcaaatcctggagtgcccgccaggatcgaagccatgactgggtgcaggcgggcgccaggcccgctgtgggtgggcaccagttctcagcaccgctcactgctgccgggcacactgggaccagcaggctcctcagccaaccctgtccctcggcccggccctgccagagagggaccccagcacatcgtgggcacgggcagggctcagccgctcccacctccccacagaagcccaggagtgtgtggacgtctgagcccagctttctgcgtgccctcctggcccctcactcccggcagcgggccggcctcgcccccactccccctcctaccccggcaggggcttccggggccttttcacctggagaaacattcccactcccctttggcctccctgtactctgagctgtgaatatttttaaccctgtaaatacggccagctcttgtgacacagagactattttatcaattgtcagtcccgttcctttaccataggattctccacagtggcttccgactcaggctccaatggaccaaataaaagcgttttgttttgtaaaaaaaaaaaaaaaaaaaaaaaattctgcgg

SEQ ID NO: 6430 - DNA, 425 bp, Homo sapiens
ggcacgaggttctttctgctcaagcaaaatatacagaggaacagatcaagatatggttttcagcccaacgtttaaaacatggtgttagttggactcccgaggaagtagaggaggcaagaaggaaacaattcaatggaacagtgcatactgtacctcagaccataactgttattcctacacacatttccacagggagtaatggtttaccatctattttacagacatgccaaatagttggtcagcctggtctggtccttactcaagtggctggaacaaacaccttgccagttacagcacctatagccttgacagtggcaggcgttccaagtcaaaataatatacagaaaagtcaggtacctgctgctcagcctactgcagaaacaaagccagcaacagcagcagttccaacttctcaaagtgtcaaa

SEQ ID NO: 6431 - DNA, 407 bp, Homo sapiens
ggaggaactgaggagactaaagcagactaaagatccatttgaaccacagcgacgtctccccgcgaagaaaagtcgacaacaacttcagcgagaaaaagcccttgtagagcaaagccaaaaacttgggcttcaagatggatcaacctcattacttccagagcagctgctttcagcaccaaaacagagagttaacgttcaaaaaccacctttttcttcccctactcttccgagtcatttcactctcacctcccccgttggtgatggacaaccacagggcattgaaagtcagccaaaggaactgggacttgagaattcccatgatggtcacaacaatgttgagattctacctccaaagccagattgcaaattggagaaaaagaaagtggaattgcaagaaaaatctcgtg

SEQ ID NO: 6432 - DNA, 785 bp, Homo sapiens
ctggttcaaaagcagctaaaccaaaagaagcctccagacagccctgagatcacctaaaaagctgctaccaagacagccacgaagatcctaccaaaatgaagcgcttcctcttcctcctactcaccatcagcctcctggttatggtacagatacaaactggactctcaggacaaaacgacaccagccaaaccagcagcccctctagcatccagcagcatgagcggaggcattttccttttcttcgtggccaatgccataatccacctcttctgcttcagttgaggtgacacgtctcagccttagccctgtgccccctgaaacagctgccaccatcactcgcaagagaatcccctccatctttgggaggggttgatgccaggtgggggttcaggtttcctgttgggtcctgatagaatcagggcaggagaggaagaagaagagggaagaggaggaacccaggcttggggaggggtggcagggcttcacaagcctggggaaggtgaactagggagcagttggggccaccatggcccagagtctatgcctcctcttccttcctgtgttcagagtgtgtgtgggaaccacaagggccttctcagtgttcatagggaagcccggttcacccatgggtgggccgcaatttgggtgccacagtgagcccctagagaccagctctcccagcttccaggacagggactaggggaggcaagagaggctcttccttaaattgtgcacccaaggtgcctcagctgccttactctagactggccccgttaactcccctt

SEQ ID NO: 6433 - DNA, 864 bp, Homo sapiens
ttacaagtctatgtttatgcataacattagacataacattagacataaactgtttttaccattttatttttgtttacatatttgtttaaaatcagtgaatttctttgccaggttcagataactgaagggcctttataagtagtttatattgttcagacccaaggtatgctgaaaacatagtctggagcaaaataggaaataacatctttctaaagacaggcttagaagttctaatccagtaacttaagatgttccctttgtgtggtaacagagctgattgatacctggctgctagaccaccatttacaggtatagccaagaaaacagggtatagaccaccaataacaagaccagtcagtccactccgtgttatggtacaggtttcacaatccaaatcacctgtattcaaaggaaaacttacaaaacatctgtaagttaagtctgttgtaagaaaaggtatccctgccattggtaagccagcagctatgcgagcctttgtcacattcaagatgcgtcgaaaaagactgtttgctatgaggccacaaagagcagcatttaatccaacataaaccgatccattttcaagtagattcctttctgcttctggaagctggttaatttttctggatatatcaacaattgttatgttttccttattattggatttatgattttccattttgagccttatgctctcctcccagtttgtcctgagagtccagtttgtatctgtaccataaccaggaggctgatggtgagtaggaggaagaggaagcgcttcattttggtaggatcttcgtggctgtcttggtagcagctttttaggtgatctcagggctgtctggaggcttcttgtggtttagc

SEQ ID NO: 6434 - DNA, 98 bp, Homo sapiens
  misc_feature (1)...(98): n = a,t,c or g
gctactagaaataacatgctggtgaggctgcagagagaaaggaatgtttatacactgttaatgggagtgnaattagtcaaccattgnggtagacagtg

SEQ ID NO: 6435 - DNA, 1435 bp, Homo sapiens
cgaatctccttccgtcggtccgctcagaatcagctgtcctctcagactgtgtgggtggtttccccggccgcagctccgtacgggcttggattgctgggcctcggtgcaccccagcctcccccactcgggttctgagcttgagctggcggctctttaactctgcttcactgttgctcttggcaacatccacttccgggagcgagtgccgtttcccccgctcaccgcgggctagggagcgtgggattccggactgtgagcggctgttagtgcgtcgcagctgctggcgatccggcgaccctcggccggcaggacccgcgggccacgcagccggggccttctcaacgcctcagtacctcggcgggaccgccatggttctgctgcacgtgaagcggggcgacgagagccagttcctgctgcaggcgcctgggagtaccgagctggaggagctcacggtgcaggtggcccgggtctataatgggcggctcaaggtgcagcgcctctgctcagaaatggaagaattaagccgaacatggcatatttctccctcctaatatgcaaggactgaccgatgatcagattgaagaattgaaattgaaggatgaatggggtgaaaaatgcgtacccagcggaggtgcagtgtttaaaaaggatgatattggacgaaggaatgggcaagctccaaatgagaagatgaagcaagtgttaaagaagactatagaagaagccaaagcaataatatctaagaaacaagtggaagccggtgtctgtgttaccatggagatggtgaaagatgccttggaccagcttcgaggcgcggtgatgattgtttaccccatggggttgccaccgtatgatcccatccgcatggagtttgaaaataaggaagacttgtcgggaacacaggcagggctcaacgtcattaaagaggcagaggcgcagctgtggtgggcagccaaggagctgagaagaacgaagaagctttcagactacgtggggaagaatgaaaaaaccaaaattatcgccaagattcagcaaaggggacagggagctccagcccgagagcctattattagcagtgaggagcagaagcagctgatgctgtactatcacagaagacaagaggagctcaagagattggaagaaaatgatgatgatgcctatttaaactcaccatgggcggataacactgctttgaaaagacattttcatggagtgaaagacataaagtggagaccaagatgaagttcaccagctgatgacacttccaaagagattagctcacctttctcctaggcaattataatttaaaaaaaaaaaaaaggccacttactgccctctgtaaaagatgttaacatttctagttttcttttagtgtgaatttttaaaatagcagttattcaaggttttagaacttaataaatacctagtcagaaga

SEQ ID NO: 6436 - DNA, 970 bp, Homo sapiens
actgcacagccagtcgtgcagctccttggtgagatgcaggaccaccaggagcacccaggcttgggcagcaactgctgtgtgccatgcttttgctgggcttggctgccgagaagaaggagataaacaccaccatcatcaaagagctgctcaagaaatttttaaaaacgaaacaaagttatggggttaatctcctacacaattcatttacttcatttgaatgttagagctactcatgattatttgtgtttctaatttatagtttaagtttatttgtaaaaagttaaaagagagtgggtctctgtggctctcactgatgttcactctggcatccttcagcatttttcttttttcatttcataattgtaggtcattagcatgcatatcgagtttgcccttacgtggtgggagttcaaacacacaaagacccactctttgcacaaaactgttctcgctggtttggaataggctcccgtgcttttttaatgttattgcagcatggatgtccattacagaattcagataaaatttgctaatgttctgctgttatgtttgatcgaatcctaatcacagtgagctcttcattagctcaatatgtggtttgccctcttgaaacagcctttccttcctttttctgtgtattggggatgggagtaataacattttggggaggtttttaaatctcccagaagaggaaagtggcctgctttggcaggtgtgtgcaggatagaatatgtttcatttgttccggtgccaagaatgagcgctgtactacggtagttcccttaggatttgtatgtgctctaggctcatgaagatactgcctcatgagctgtggcagttgtactcttttttgatgacctgaaaagggattatttctgaggaatgaaaggctcccatcatgactgtggatgtggaaaaccttttctagctgagagcatttatatctacaatacattttaaagtcagaaaa

SEQ ID NO: 6437 - DNA, 515 bp, Homo sapiens
  misc_feature (1)...(515): n = a,t,c or g
aaagatcagtgacatcacagacaacaccaatttcaacgggatgagctaggaaaggcttacagcttctcggagacacagcttcttcagttcctccagcctctgacgcagggtttcctccagagcttcctgcctggacttcaaggcagccagcatgtccttcttggccgactgcgagctatctgattcctgagaacctgtcgataaacagtggggttacttggccagctgacaggggacacacatctggaccactaatgaatttaactggagcccatgctgcggagatgggatttaccccaggaatcaagggagtgtgaaataaaacaggtgctcagcactctaactgtgagaagcacattccagcactgcatggaatttatagccagtcacaagaaatggcaggaagatggaccctcctgaaaaagaagtttatctttctcaattatcttaagaaatgtcacatacctttttaaattttactagcaaattctaatagactttacctcntgccgaat

SEQ ID NO: 6438 - DNA, 523 bp, Homo sapiens
ttctaatttttctacaatgaacatgtattgttttattgcctttaataataaacattttttaaaaaacaagttcttaaaataaataaataaataaataaattctaatgagaaaaaaagagggacctccatttccatgatcctcctccacccaacatcccaccatctccaccgtctccaccctatccccactcccgggggtcttacatttcagcaatagcgatcgctctggtgaggggctggttttcaacaaggtacctggcttggtgctggaagggtctgagagctggcagtttatgcctgtaaggaattgttgagaaatgagcgcccggagcttatgcaagcagacaaataagacgtgctaaaaataccacacaactggagattcgcataatctcgcccaagagctcatttaatcctcacagcagcccaggagaggcgactgcattatggtctccactttacagatgcagaaacagaggcatggaaaagggaggagccgtgtctaagatggcagggttcagca

SEQ ID NO: 6439 - DNA, 359 bp, Homo sapiens
cttttcttagactctgtcacctgcttaaaatccttgctaggatttaatctacttcatattcaaaccttggcttgcttatatagctctttgttttgcccaccatttctagttgcctttttattttgtttactattcctccttgattatgttgtaaaatgctattagcagtgctgtttatttcgtacgattcggctttttccccactgaagacctttctcttggaaggcctctgcccttctgcaatctgggcaagtatctgctctttgatttaaggttgcatatacagctgtacctggaccttctcctcactgggctcttggggttggagcccgtgtcttaaaacccatatcttcctttca

SEQ ID NO: 6440 - DNA, 465 bp, Homo sapiens
tcttccatcccatcttccacttccagcttcccctgttgtacacattggcccagttcagcagtctgccttggtatccccaggccagcagattgtctctccatcacaccagcaatattcatccctgcagtcctctccaatcccaattgcaagtcctccacagatgtcgacatctcctccagctcagattccaccactgcccttgcagtctatgcagtctttacaagtgcagcctgaaattctgtcccagggccaggttttggtgcagaatgctttggtgtcagaagaggaacttccagctgcagaagctttggtccagttgccatttcagactcttcctcctccacagactgttgcggtaaacctacaagtgcaaccaccagcacctgttgatccaccagtgggaatgcatttgaaccagtgtcatctgcacaaagttttttctcttaagtttatttaagaaaggga

SEQ ID NO: 6441 - DNA, 644 bp, Homo sapiens
tttttttttttgccgataccacggatacctttattgctccctggcattcacatcctaagcccatgctcccaccgtcccatccgctacttcccgaaaactcaatctcccaacattccacgcgggataagaactacaactcccagaaagctttgcgctcaggcgggctcctgtccgtagaagcccgtgacatttcaaggttcgcgcgctcgtttggtattggttctcaaggagacgtggccacgggaggcccatggcgataattggctggcagctcctgctgctcaagatcccagaggaggcggcggagcctacggagtttcacggtgcaaggcatcgtccgtcactggaccagtgagggcgcaggcgcgagctccccagggggaggatgaggggcgggtgcgaggagaagctttcgaagatgtcccctgtgtccacagcctcccgctctgcagggggagggtcccacgcggctggcggcccgcggccagggcccagctgatagtggctgagcagatggtgcagctgggcgggggtcaaggtggggtggtcggttcttaggctgctccatgaagccttgagcagggaagtgcggggcacacagagcaggttcacagccatggagagtttccggaagaactcagtgc

SEQ ID NO: 6442 - DNA, 308 bp, Homo sapiens
aagcttggcacgagggaacaatgtccccccagttactgggctgtgtcccccaattacagggcaatgtcccctcatagtgtctcccagttatacagtattgtccccccattataaggtagtatccccagttactagatagtgtcccccagtaacaggataatgtcccccaattgcagggcaatgtcccccattatagtgtccccaagttataagctggagtcccccagtaacaggataataggatagtgttccccagtacagggcagtggtccccagttactcactagtggtcccctagtaacagggga

SEQ ID NO: 6443 - DNA, 192 bp, Homo sapiens
tttgtttgttttttcactttagcagtacattctggaaatctttctatgtctgtatttttcatcacatggacatagcataatttaactagtacacgattgatttctcaatattactttaagagtgacttaatggagtcaatgctaacttcattcatgattatgcaatatattatggaccttataattctaatc

SEQ ID NO: 6444 - DNA, 591 bp, Homo sapiens
agttgtttgggttgagttcaggagaagcatggccaggtcgagtccgtacctgcgccaacttcagggacctctgctcccacccagggatctggtggaggaggacgacgactacctaaacgacgacgtggaggaggatgaagagtccgtgttcatcgacgccgaggagctctgcagtgggggcgtaaaggctggcagcctccccgggtgcctccgcgtttctatttgtgatgaaaacacacaaagaagacatgtaaagtgtttggacgttttccgataacaaggtgcttggtggagagtgaaggtacaagtaaagccttgtggtgggatcaaggagctatcaatatcaagttcaaggatttccgtcttactttttgcagtctgatatgtcaccaccaaatcaaaaacatatctgtgctctctttcttaaagagtgtgaggtctccagtgatgatgttaataaatttttaacatgggtaaaggaggtatcaaactacaaaaacctaaactttgaaaatcttagggaaacactaagaactttccacaaggaaactggaaggaaagatcaaaagcagcctacacagaatggtcagg

SEQ ID NO: 6445 - DNA, 195 bp, Homo sapiens
gtgaacccttcttggtcaacttttaagtttgtgttataatagcatattttgaggaaacccccattcctcatattttgtgaaaaaaaaacaaaacattgccatatgatgggggataaaatctaacccaccaattagtgtggtagaagaagctaagaaagcaaataattaaatatccagatgatgaacacgctattt

SEQ ID NO: 6446 - DNA, 606 bp, Homo sapiens
ttaggtgctcgccgaaagcactgaggaatctttaccacaaccctgtgtccaccacaagccctatcaccatcacccatctgggtgcttctttttctcaacagggtctgtaactgtaaaaaaggaaagtgggtggagaggtttttttttcccccttttttcttgttttctaacctcccagcttattcctggagagttaaaacacagttactagcactaaaaacattaaaagtgctgcgcgctggcctcaatgactggtacattggagaagctgtgcagcagcatccttttctgtggtgggcagggcaggagatgaaccataggagccaaaagtcagacaaacagaagaaggcacaccaagcctgaaccctccggacaacagcagagttaccagctgagggatgtccctggaggtttctgacccatgagaggccccctcaccctccttcaccctcctcctaccaccaagctctccggcagtcatggacttattcctccccgtttttactggacaccatgtttcaggccaatctggtcacctgtagtctggtggcatctctacccctactggtccagtaggtgggatgtggcttgggatggacagttcag

SEQ ID NO: 6447 - DNA, 339 bp, Homo sapiens
ccatgcctggctaaattatagttttccattgaaacataaaatttctctctgtagtaaccatcatttttgatcataatcaaagtaagactattattgttttaaaaataagtctagttttgttagattttgcttgattatttacataagtgcagcaagaacaggagatgaccacataggtgctttcaagtttctttgctggaagttttcatacagaatctcagatttgacttttaaaggccttattcaggctaaaacccaagccaagcacatactatccaaatttcaggccgcagtccttatgggctttgtgtggaattcctctcttcttgaggcccccca

SEQ ID NO: 6448 - DNA, 506 bp, Homo sapiens
cagaaatacagctttatgcagagacaggaagcagttagtggtagggctttattttgggaggattagagtggtagggggtggggcatggggagaaattgctttctgcagtgtcagatgaatgagttataggaaatgatagctcagccagcagcttggtgcttgctagtgagtcagcagtgattccatcctcagccccagtgctgggatcacagctgagagacactcttcctggtgagggctcctccccgccctgctgtctgggacatggatgttctgcttacctgatgtgaaccattcagttacctgtcatggaggagaaagagacacagaacgatctttttgttttaatgcagatgtttctacacttctttgggattaattggtatttctaattatttttcctgatatccagcagaaagattcggtgattttctatctagaggatgatatttggggactgggtgtcaaagcaggatctagttcttaaagcaacattttataccttt

SEQ ID NO: 6449 - DNA, 122 bp, Homo sapiens
  misc_feature (1)...(122): n = a,t,c or g
aaatttaagtactgtatatagaaagataccactatgatacataatgttntcttgtaagttccttgaaggtaggactttctttgtatttgnaaaccattatattcccaagaggcctttaatat

SEQ ID NO: 6450 - DNA, 396 bp, Homo sapiens
gaataaatccaaattgtgaatgcttaaaatatactttacagaatattaaaatttaaaagcatcacaggaaaaatattaatactgttttcagaatttcagtatgtgaataatatttacattacagtttcatatgaaccttttacttctctatttagtatgccttcatgtcactgcagaggtatgaaaaggagagctctcctagttgtgaaaaaagaaacatgttttattgggagctaagtggaaggttgaacatgtgggaatatctgggcatgcactgaagacaccttttgcatctcccccatccacataggcaaagtgaatgtggtttgtgtccatttatgcaggatactctggaaaaccaaactgaaggcaaggtttaacatacctttttttaaa

SEQ ID NO: 6451 - DNA, 848 bp, Homo sapiens
tttttttttttttttaatagagaagaaaaataaaccgtttttatatacactatttgtatgttaattataaaccgtggcagtaaaagctttccgaacattggcaagaaaagctgaaaaattgttggtcttccttacattctcttgaaattctgctaggccctcaagatgaggggcactatctgacacttcatagtcccttgcttcattgagatgtaaggaaaacataaatgggctctcaggattcttagggtcaatattagtgaaaataaactgcaatttctcaccataaatttttcgaatttctagtccaagtcgatctttatacaagtctgcagatttctgcagccttttcaacctctctgcattcgctttattagcagtagaaatagtttccttcttcctagaatattcttccttaagatcctggatatttgcagtcagtacttccaattcctgctttttgccttttacttcagcaatcaattttaacaagttatcctttttttcttgaatgagcttattttgcctgctgatctgattttgatattccagaaacatctcaaccattcgttcttcttcctttaatttcacagacagcttttctgcaaatgctttgatggaatccttgtaggtatctcttagtcccgccatctgacaggaggtgtccgtacttttgaatttattccaaaattcatttatgcttttatcgaaaagtgccagttcgtcctctaccattatgtaggacaatcgttcgcaggcaggcctgagtcccgccgccttccccacaccagatccgcgcccactctagccaacagccggactctaggctcagctcccgcagccccgcc

SEQ ID NO: 6452 - DNA, 478 bp, Homo sapiens
tcctctttgatgcgaatacacacaaagtgaagaagtttgttctacacaccaattaccctgggcattataatttcaacatttatcatcgctgtgagttcaagatcccactagccataaagaaagaaaacgcagatggtcagacagaaacatgcacgacctacagcaagtgggacaacatccaggagctcctgggccaccctgtggagaagcctgttgtcctgcacaggtcttcctccccaaacaacaccaacccatttggttccacattctgctttggtcttcagcgaatgatctttgaggtcatgcagaacaaccacattgcctcggtgaccctgtatggcccccccaggcctggtagccacctgagaacagcggaactcccctagggacaccaccacccatgcccctctgtcccgtggaactgtgcatcacatcctgctcagtgggcctctgtaccaccctgtgggttttcttggac

SEQ ID NO: 6453 - DNA, 173 bp, Homo sapiens
  misc_feature (1)...(173): n = a,t,c or g
tttttttttttttttttataaaggaaaaaagtttaattgactctcagttcagcatagctnnnnnnnnnnnnnnnnnnnnnnnnnnnnnnnnnnnnnnnnncaaacatgtccttcctcatgtggcaacaggaggcagaagaatgagtgcccagtgaaggggaaagacccttata

SEQ ID NO: 6454 - DNA, 298 bp, Homo sapiens
tttttttttttctgttttaaagaaggcgaactggggaagaagagagctccctgcttctagtgagcaaaggcagcccctgagcttccacagccctccacatttattgggtaggatgaaagggaggaggaggtaacgactggtcagctgcttaattgatcacaagttcacattattgttaacaggcttcaattatgcctaatcacaagaaacacttgtgcctgggtcgtgactgccttcagcattccttctgggtggcagacgcagtttgtcagtttgccaacatcctgctttcatgaga

SEQ ID NO: 6455 - DNA, 1456 bp, Homo sapiens
gcgaccgcggcatcagccgtgggctctaacgcggggctgggggccggagacagacttcgcccaggtgacgggtagtaggggcggcgcgctgtggcctcgtggggtgtaagacccacttgctgttgcccccggaccttgccgccacaccagccctgtcctggggcggaaccgaaggaaggtcgggccctgctgccccgccccgtccttcctccttcccgggcggtcactgtgcgtggctcacttttagagtttacttcaaccacgtggagcttccatggcggcctctcaggtcctgggggagaagattaacatcctgtcgggagagactgtcaaagctggggacagggacccgctggggaacgactgtcccgagcaagataggctcccccagcgctcctggaggcagaagtgtgcctcctacgtgttggccctgaggcctggagcttcagtgcctcactcacaccggtggccctgggcagtgcccttgcctacagatcccacggtgtcctggatcccaggctcttggtgggttgtgccgtggctgtcctggctgtgcacggggccggtaatttggtcaacacttactatgacttttccaagggcattgaccacaaaaagagtgatgacaggacacttgtggaccgaatcttggagccgcaggatgtcgtccggttcggagtcttcctctacacgttgggctgcgtctgtgccgcttgcctctactacctgtcccctctgaaactggagcacttggctcttatctactttggaggcctgtctggctcctttctctacacaggaggaattggattcaagtacgtggctctgggagacctcatcatcctcatcacttttggcccgctggctgtgatgttcgcctacgccatccaggtggggtccctggccatcttcccactggtctatgccatccccctcgccctcagcaccgaggccattctccattccaacaacaccagggacatggagtccgaccgggaggctggtatcgtcacgctggccatcctcatcggccccacgttctcctacattctctacaacacactgctcttcctgccctacctggtcttcagcatcctggccacacactgcaccatcagcctggcactccccctgcttaccattcccatgggccttctcccttgagagacagtttcgaagccaggccttcaacaaactgccccagaggactgccaagctcaacctcctgctgggacttttctatgtctttggcatcattctggcaccatgcatgcagtctgcccaaaatttaaggggacaagtagctccccccacgacatgtctccctttcttagaatatattaaagtcagagtctctgaggaaggaatgtgatttggcagtcagggtactaagcatgggtgggaactcctgccttataaaaattgtttttgtgttcttaaagataaaaaaaaaaaa

SEQ ID NO: 6456 - DNA, 365 bp, Homo sapiens
gaagaaagcaaatatcaaagttgcttctaaacaccactgattttgctagctctatcacttcatttttttctatcaagtttttaagataaccttgtgtgactcaggccattccttgtttgcacgttcaccatcaatacaagtcagccaagacgagtgtcgctagagcttccagtgtctttcacattctagccctcttcaaccacaaattataaaaacgtggctctgctcaagcacacgttttaaattaaacctttttgttttttacatgaattttttaggtctttttttcaggttattattttctgagacagtccaataaaatttattttaaaatgtatttgtggtaatttgatggacagcctcaa

SEQ ID NO: 6457 - DNA, 329 bp, Homo sapiens
  misc_feature (1)...(329): n = a,t,c or g
gcagggcgcacggggaggcccgaggagcgggcccccgagtccaagtccggcagtggcagtgagtctgagccctccagccgagggggcagccttnggcggggtggggaagcaagtgggactagcgatgggggccctcctccatccagaggctcaactgggggtgcccctaatctccgagcccacccagggctccatccctatggaccgccccctggcatggccctcccctacaacctgcatgatggtggtcatgatgcccccacctccacctncagttccctccagcagtgcagcctccgggggcccctccagtcagagacctgggctct

SEQ ID NO: 6458 - DNA, 1730 bp, Homo sapiens
  misc_feature (1)...(1730): n = a,t,c or g
gctagtacaatgacatttttgttagaaaaaaatatatggagagagattagtgtgtacataaacgaaagaaagatgttaacaatagttatccaaggtttttatttttctatatttaccaagtttgctagctcctctgggccattgcctaggcagaggcacatggctgggccccctggctgggcctgtacccctcatgggggtctgcttagggccttagcacttgggtgtggctccgatcctggcccactgactgtcctcttggcccgtttccttacacatcccaccagatccccaggctgaggaggtgggtcagtggcccacccgctgttctcaccccacagctctgtcctgtccccgtatgagaggcagcttaacctggatgccagcgtgcagcacttggaggatggagatggcaagagaaagaggagcagctccagccctcggtccattaataagaaggccaaggccctggacaactccctgcaacccaagagtctngcagcctccagcccacctccctgcagccagcccagccaatgcccagaggagaaaccccagggagtcaagccccatgaagggtccagggggcccctttcagcttctggggtccctgggccccagccctggcccggccagggagggggtggggtgcagctgggagagtggcagagccgagaacggagtcacgggagccggtaagcggcgctggaacttcgagcagatctccttccccaacatggcttcagacagccgccacacccttctgcgcgccccagccccagagctgctcccggccaacgtggctgggcgggagacagacgctgagtcctggtgccagaagctgaaccagcgcaaggagaagctctccaggcgggaacgggagcaccacgcggaggccgcgcagttccaggaagatgtcaacgccgatcccgaggtgcagcgctgctccagctggcgggagtacaaggagctgctgcagcgcggcaggtgcaaaagagccagcgccgggcccctcacctgtggggcagcccgtcaccccgctgctgagtcctggccaggccagctccccagccgtggtccttcagcatatctctgtgctgcagacaacacaccttcctgatggaggtgtccggctgttggagaagtctgggggcttggaaatcatctttgatgtttaccagggccgacgctgtggccacattccgaaagaataaccctggcaaaccctatgcccggatgtgcattagtggatttgatgagcctgtcccagacctctgcagcctcaagcggttgtcttaccagagtggggatgtcccctctgatctttgccctggtggatcatggtgacatctccttctacagcttcagggacttcacgttgccccaggatgtggggcactgacctcacagctctgcagaggatggagcttgcctccgggggaccggggantgtctgttctcagggaccatctcggctgcctccctgtacccagactctaacctgtagccttcagaggcccagtctgggccttggcccctgggtgtctgatactcacagagtgaaactgtgaccctctcccttccctgctgccttgcagtgacccctctggaactcaggactcgattttaaggacccaggaggtggggcagaagagaggactgtgtgcctttaacgagagggtgcctgcttcgtgctataaagccaaagccattaaaaatagatttctttt

SEQ ID NO: 6459 - DNA, 341 bp, Homo sapiens
  misc_feature (1)...(341): n = a,t,c or g
tgtgcaagaacagctgaactctgacctcctgaatggccgactcttgccttgctcctcagggaccccagacacgatcgtaggaaccaggagattttatggaaagaagctgatattatttggagaatgaaaaaagaaagatgcacctagacaaaggcacatcaaggccactgtgcagaagaacaagcatgctctagaaagtgtatgtgctgctgttggaaacacctctaagaaatacccgtagaaacccaatgttgcagaatntcccaagaattgccacccgtcttgtgcaagaaaaaagtatacacacatcagtgcacaggtgtctgaatgtctgtgtaaca

SEQ ID NO: 6460 - DNA, 456 bp, Homo sapiens
cccgttcaccagcttgggttcagatgaagctcccccgacagccactactcctgtgctgttgcaggctattgtaacgggggttccacgtcatccaggccacaggccaagccttggatgcacctgctctttgcccagctgcccagggcagagctctgccagatcacagtgccttaagacaggatgataacacccctcagtgttttccttagagtgctccatgcaccacagccatttttcaaagcatcccccaggccagggttaaggcagaacaggttttccagtcatagcctcccacttagctgagtaacatttcttgagtgatcttgtaaatgaatagtttgaaagaaaaacaggcaactaaggcagtgcggtcacattgtttgagaatacagatgcaaaattacttgtgaatttacttgctcatttttccaaaggatgtaatctgtacacttagaa

SEQ ID NO: 6461 - DNA, 52 bp, Homo sapiens
  misc_feature (1)...(52): n = a,t,c or g
tatcttttctgaaactctttatcatcttcatggncatggtacctcccttctt

SEQ ID NO: 6462 - DNA, 759 bp, Homo sapiens
  misc_feature (1)...(759): n = a,t,c or g
ctttcagtaagtctccttaactggcttccctttccctttttgagggtgtgaagaggacctgattcctggggcaggctcaggcagttttgctgatagaggagtagacaagcaaatgtgtggtaccactggcccctgcaggttctagttgtcttttagttttactggggccttcatacctcagggtctggtggcttctcttctctacccttttcttaagagtcactggtgtcataaagccccagaggatcaactctgtatatcagcctcatgagaactgaccttctcctgacctcattaatgctcttatttaaaagttctctaattaagctttgtattttgatataattagagactcacctgcctgtgtcttaaaaataactctcccagctactatctcacatgatctgtgggcccatcttgtgaagcctagtattaaaaaatatttttgtttttcagtggcgtgcattttaattctcaggccatagctcctaccattgaacagattgaccagtcttttggcgcaacccatcctggaggtaagccaagtccatctgattcctctggtcatcagtggcagttcatagcaataaacctgcccggtagtgccatcccaccccacttcctggagtcaggctcccataggattgtggggttggtacttgggtgtgaaggaaacatcctcccccttggtttcaacctagtaggccagtttagaaacaagccacagggaangtgttgcagtcattactccctgccagg

SEQ ID NO: 6463 - DNA, 486 bp, Homo sapiens
ggaggccaacacacgtcaccgcgtccgcctggggcaggtcggggaagggacgcgaggcggcgctgtcaccgcattctgagggccgcagccctgccgccctgctggtcttgtatcatttcagtcaacgtcgctccagtctttgatggggccacactcgggatgtaaatttaggatcctcactgaaggggcgggaccctgagaggctttctcctggccccttagttgtgagttttcctgcaggcggaggagccagtttccgtcagaaccgcccagaggcaggcgctgcattcctggggtggcggacgagctggaagcgttttcggatcctggaatccgtgggcggcccgtgggaggggctgaggcgcatttccctactcacccggatccgaatccaccgcggtgctgtttcaagcgagtcagattccacatcgcgctccaccccggactcggaattcctgccccacaggtctgcattttcacagcggc

SEQ ID NO: 6464 - DNA, 668 bp, Homo sapiens
gaccacggctagataggccgccggccagatgtggcgggggagagccggggctttgctccgggtgtgggggttttggccgacaggggttcccagaaggagaccgctaagctgcgatgctgcgtcgcaggcgggaagcaattatccccgctgttggaactgcggcggcccatggggccccgggcgggaggacaggttcttctgcccacagtgccgagcgctgcaggcacctgaccccactcgagactacttcagccttatggactgcaaccgttccttcagagttgatacagcgaagctccagcacaggtaccagcaactgcagcgtcttgtccacccagatttcttcagccagaggtctcagactgaaaaggacttctcagagaagcattcgaccctggtgaatgatgcctataagaccctcctggcccccctgagcagaggactgtaccttgtaagctaaagctccatggaatagagattcctgaaaggacagattatgaaatggacaggcaattcctcatagaaataatggaaatcaatgaaaaactcgcagaagctgaaagtgaagctgccatgaaagagattgaatccattgtcaaagctaaacagaaagaatttactgacaatgtgagcagtgcttttgaacaagatgactttgaagaagccaa

SEQ ID NO: 6465 - DNA, 496 bp, Homo sapiens
tccggaaagtgctgagaggaaatgtatctatactactgcgttctgtcctctgtatgacctttgtgtgatgacgtgcaaaatagatggtagagattgggataacaaatgatttgtggaacatcgtggtgataattttactgtcttaaaggtagaatccatgaacttggccttgccactatataggcttttgaattttgacaagccttggggggatgaaacctagaataagttatttatggcgttacgctttaatagggttgacacttaaaaccttgttttcataaatgctaccttttggttatgttgatctgatgaacagatactggctgtcattgaaagaaagttaaccgaatgttcagatacttattgggctcctggaacatggctgctctgtagcttcatgaatattcataatattcataaatatttgtgaataaatatttttagtatttccaatttataagctctttgaaaggagggaatttttttttttttt

SEQ ID NO: 6466 - DNA, 848 bp, Homo sapiens
tcctgagttcagagaaacatgcaaagtgactaacaaaatagctacttacctttgcagttttacagaccctgggagctgctttgggagtgagaaaggcaaccctccaatgtgtttcaactttaaaatgttgaattcttttcagacatggtatctcatttattctccttttctagcgtttgttgaatttcaggcagaatgtcttacagaatgtcctagaaccagattatcatttaatctgaaacagctgaggaagggacagagaaggtacaaggggcaaggcagcacaaaacagatcaggagaatgaagagggagtcgaaccaagacttggagttaagaggattttcatcttttgcatccaacaggcagaatatgatctgtgtccaaaagtgaacttgagtcaggaatgaatcaatttcagcataaacaagcacaaaaatttagtctgctggctgactggaagcaaaaaagtcaagatggaatatgatgaattccaacacaatggggcaccaaggcctttaggcctctctttttattttgctttggttttgtttgtttttctttagagacatgctctttctcatgggacttgaagtggactcatctttgtgcagtgctggttttgccatactcatttcaagtattatagacatatgtaatggtgaaaatatatgaactgtggcctttttcattcttgttacttgtgatgcaattaagtgaagataagaaaaaaaaaaaaaagcagagatttaccatgtatcagtgcctggctttttgttataaagctttgtttgtctagtgctcttttgctataaaatagactgtagtacaccctagtaggaaaaaaaaa

SEQ ID NO: 6467 - DNA, 446 bp, Homo sapiens
  misc_feature (1)...(446): n = a,t,c or g
ctgtagaattcctgttttgtgttaatgttttttactatgtcttattgtgttgtgtgcaatgcattgtactggggggatgcacttgagtgccatttctgatactgtcattgtatgattgctgatgctcgtttatgttgttctttggaagctatagtgagcctgatgttttcacattttaaaaaatgcttcctgagacttctttaagctcctctaacttcttcagtgcatttgggatcaaacttagctcttagatcagcaaacctgacttgcttctacttttgcaatttttcaggccttaccatatttcttatctctgtcttcccacctgataggaaaatcttgcagatttggaacagtggtttctggcctgctgctgcagcaaattccctatgtttatttaagaagtcgggcctatgcttttaacctacnaatgatgagtaatttac

SEQ ID NO: 6468 - DNA, 354 bp, Homo sapiens
gactccagccagtacccaggccaggccaacaggacggcgcctggccgccatgctcatggtcacctccctggacacagaggtgctgaccatcaagaacgtgagtgttataacctgtggaggcgggggtggcttctgtggtgagcatccactcaggcctggctgggctggccccactccacatccagctcgtggacgcccatgaggccccgcccacactgattgaggagcggagagacttctgcatcaaggtctcaccttctgaagacacgcctgtcaccctcagcgccgacctggccaacttctcggaaaaaccaatcctctaactgctactgcctcctatctttgggcaacaag

SEQ ID NO: 6469 - DNA, 84 bp, Homo sapiens
agtctcagtgtctttactacaggtaaaagggtgtaaggagattttatgagaactgaatgaaccctgaaggtcactagtcaaatt

SEQ ID NO: 6470 - DNA, 2278 bp, Homo sapiens
  misc_feature (1)...(2278): n = a,t,c or g
ccctaggacacctttctaaaaagactccctgtggtgttcagaatcactcctacagtcaggttctccacaatggatctcagtgctgcaagtcaccgcatacctctaagtgatggaaacagcattcccatcatcggacttggtacctactcagaacctaaatcgacccctaagggagcctgtgcaacatcggtgaaggttgctattgacacagggtaccgacatattgatggggcctacatctaccaaaatgaacacgaagttggggaggccatcagggagaagatagcagaaggaaaggtgcggagggaagatatcttctactgtggaaagctatgggctacaaatcatgtcccagagatggtccgcccaaccctggagaggacactcagggtcctccagctagattatgtggatctttacatcattgaagtacccatggcctttaagccaggagatgaaatataccctagagatgagaatggcaaatggttatatcacaagtcaaatctgtgtgccacttgggaggcgatggaagcttgcaaagacgctggcttggtgaaatccctgggagtgtccaattttaaccgcaggcagctggagctcatcctgaacaagccaggactcaaacacaagccagtcagcaaccaggttgagtgccatccgtatttcacccagccaaaactcttgaaattttgccaacaacatgacattgtcattactgcatatagccctttggggaccagtaggaatccaatctgggtgaatgtttcttctccacctttgttaaaggatgcacttctaaactcattggggaaaaggtacaataagacagcagctcaaattgttttgcgtttcaacatccagcgaggggtggttgtcattcctaaaagctttaatcttgaaaggatcaaagaaaattttcagatctttgacttttctctcactgaagaagaaatgaaggacattgaagccttgaataaaaatgtccgctttgtagaattgctcatgtggcgcgatcatcctgaatacccatttcatgatgaatactgactgccgggagttcctgaacagatttttcactcccatgagtgccaagacggtgcaatgggtagtcccctagatgtgaaaatgaagagagagggttttaccatcctgagaagaaataatgatggaaacatgtttaatgtttgtgcagtgtaaatgactttgactcagtcacattgaagtaaaaatattaaaatctgttgaaataactcttaggaaattatcaactaattttttcagatcagtatcttctagattccagacagaaaaaaattacacttcagaaaagacatcaaaggcaacatatgacaacaagtaatttatgaatctgggtagtagcgttggtaatctgagttctttaagggttcacaggacaacgaagtgcatgtggcagtgtgctggcagtggccttgaggctttggaccattggttacaaaacagacacagccaagataagatccacacacacattattaacaaggaagtgatttgctgcaccttgagttgagaggactacatgtagaaaagtcttaaaatagagctaaacaccacagtggtcaacaaagccatcataatgttggtgtttgtttccctccaatgtatgtatgtttagtttttatccaacctgaggaatgaaaacttaactggatctctcttgcatccttaaagggcctgagtctcaacatggctgctgatccatacttacacatcttactgtcaatcttgcctacattgattatagaaccactattacgtgaaaaggcttgaaacaaccaacatatacaaataaaaccctgccttgtaaaatagtaaaagagaagccatatattggcttttcttcttaacttgggagatatattgaaacaaggtgctttataagattattgtacttaagactttaatagtgttacttggatagcttatatgaattttgagaattttaatatgaatttttgagaaaagcaagttcaaaagaactctggtaattttcctgtatgtacaatttaaagagtgaataagattattagaattcagcaatagagatatatctattttcaattcaactacagaaatatattttattnnnnnnnnnnnnnnnnnnnnnnnnnnnnnnnnnnnnnnnnnnnnnnnnnnnnnnnnnnnnnnnnnnnnnnnnnnnnnnnnnnnnnnnnnnnnnnnnnnnnnnnnnnnnnnnnnnnnnnnnnnnnnnnnnnnnnnnnnnnnncggtgcggg

SEQ ID NO: 6471 - DNA, 259 bp, Homo sapiens
gccaaatgcagaagaaatgtggaaaactttttggaagcgtgccgaaaattaggagtaccagaggaaaagctatgtctcccccaccacatccttgaagaaaaaggcctggtcaaagtgggcattaccattcaagcattactagacatcaccgtaacgaaggctctgttcacatgaaactaccccttctccattgggggctcagactctgctctcatccaggatcctgaactctgctccaggcacctgttcaaccctctct

SEQ ID NO: 6472 - DNA, 2813 bp, Homo sapiens
ctcgtgccgaattcggcacgagaccgcgtgttcgcgcctggtagagatttctcgaagacaccagtgggcccgtgtggaaccaaacctgcgcgcgtggccgggccgtgggacaacgaggccgcggagacgaaggcgcaatggcgaggaagttatctgtaatcttgatcctgacctttgccctctctgtcacaaatccccttcatgaactaaaagcagctgctttcccccagaccactgagaaaattagtccgaattgggaatctggcattaatgttgacttggcaatttccacacggcaatatcatctacaacagcttttctaccgctatggagaaaataattctttgtcagttgaagggttcagaaaattacttcaaaatataggcatagataagattaaaagaatccatatacaccatgaccacgaccatcactcagaccacgagcatcactcagaccatgagcgtcactcagaccatgagcatcactcagaccacgagcatcactctgaccataatcatgctgcttctggtaaaaataagcgaaaagctctttgcccagaccatgactcagatagttcaggtaaagatcctagaaacagccaggggaaaggagctcaccgaccagaacatgccagtggtagaaggaatgtcaaggacagtgttagtgctagtgaagtgacctcaactgtgtacaacactgtctctgaaggaactcactttctagagacaatagagactccaagacctggaaaactcttccccaaagatgtaagcagctccactccacccagtgtcacatcaaagagccgggtgagccggctggctggtaggaaaacaaatgaatctgtgagtgagccccgaaaaggctttatgtattccagaaacacaaatgaaaatcctcaggagtgtttcaatgcatcaaagctactgacatctcatgggcatgggcatccaggttccgctgaatgcaacagagttcaactatctctgtccagccatcatcaaccaaattgatgctagatcttgtctgattcatacaagtgaaaagaaggctgaaatccctccaaagacctattcattacaaatagcctggggttgggtggtttttatagccatttccatcatcagtttcctgtctctgctgggggttatcttagtgcctctcatgaatcgggtgtttttcaaatttctcctgagtttccttgtggcactggccgttgggactttgagtggtgatgcttttttacaccttcttccacattctcaatgcaagtcaccaccataggtcaatagccatggaagaaccagcaatggaaatgaaaagaggaccacttttcagtcatctgtcttctcaaaacatagaagaaagtgcctattttgattccacgtggaagggtctaacagctctaggaggcctgtatttcatgtttcttgttgaacatgtcctcacattgatcaaacaatttaaagataagaagaaaaagaatcagaagaaacctgaaaatgatgatgatgtggagattaagaagcagttgtccaagtatgaatctcaactttcaacaaatgaggagaaagtagatacagatgatcgaactgaaggctatttacgagcagactcacaagagccctcccactttgattctcagcagcctgcagtcttggaagaagaagaggtcatgatagctcatgctcatccacaggaagtctacaatgaatatgtacccagagggtgcaagaataaatgccattcacatttccacgatacactcggccagtcagacgatctcattcaccaccatcatgactaccatcatattctccatcatcaccaccaccaaaaccaccatcctcacagtcacagccagcgctactctcgggaggagctgaaagatgccggcgtcgccactttggcctggatggtgataatgggtgatggcctgcacaatttcagcgatggcctagcaattggtgctgcttttactgaaggcttatcaagtggtttaagtacttctgttgctgtgttctgtcatgagttgcctcatgaattaggtgactttgctgttctactaaaggctggcatgaccgttaagcaggctgtcctttataatgcattgtcagccatgctggcgtatcttggaatggcaacaggaattttcattggtcattatgctgaaaatgtttctatgtggatatttgcacttactgctggcttattcatgtatgttgctctggttgatatggtacctgaaatgctgcacaatgatgctagtgaccatgggatgtagccgctgggggtatttctttttacagaatgctgggatgcttttggggttttgggaattatgttacttatttccatatttgaacataaaatcgtgtttcgtataaatttctagttaaggtttaaatgctagagtagcttaaaaagttgtcatagtttcagtaggtcatagggagatgagtttgtatgctgtactatgcagcgtttaaagttagtgggttttgtgatttttgtattgaatattgctgtctgttacaaagtcagttaaaggtacgttttaatatttaagttattctatcttggagataaaatctgtatgtgcaattcaccggtattaccagtttattatgtaaacaagagatttggcatgacatgttctgtatgtttcagggaaaaatggccttaatgctttttcaagaactaacacagttatttctatactggattttaggccctgaggaactgctggtgtttaggaataggaatgtgcagaaggccaaaataccaggagagctatactgatttaagcc

SEQ ID NO: 6473 - DNA, 136 bp, Homo sapiens
caacactaagcatcttttaaaattgtcttaaattttttattatggacattttcaaacatatattaaagtagagaataataaatggcatgaatccagtttcagcaattgtcaacatgtgagtaatcttgttttggcc

SEQ ID NO: 6474 - DNA, 417 bp, Homo sapiens
tcctaaacaaatttagttcgcttttttgtattttgccggaatactgacatctgattctgcactctgattttggggatatcctgttttaaaaaccagtaggactgactgtgttggccctgcatgaatctctttaaccacctatggagcaaacaaaacattttgaaaatggaaaatatatcacattcgcaacaagcacatttgaatatgttttttattatagacccatatgattgaatgcagtagccactgcctgcacgtggctagctagcacttgaagtgtgacaatttgggattgaaagatgctggaaatgtgaaatacacaccaagttccaaagatttcatatattgattacatgttgaaataacagtgttttcagttatattgagttaaaatattaaaatattgtaagatttgaa

SEQ ID NO: 6475 - DNA, 632 bp, Homo sapiens
gtgactgagagcaacaagtttgacctggtgagcttcatccccttgttgcgagagaggatttactccaacaaccagtatgcccggcagttcatcatctcctggttcctggttctggagtcggtgccagacattaacctgctggattacctgccggagatcctgggatggactcttccagatcctggggtgacaatgggcaaagagattcgcaaaatgtgtgaggttgttcttggagaattcttaaaagaaattaagaagaacccctccagtgtgaagtttgcttgagatggccaacatcctggtgatccactgccagacaacagatgacctcatccagctgacagccatgtgctggatgcgggagttcatccagctggcgggccgcgtcatgctgccttactcctccgggatcctgactgctgtcttgccctgcttggcctacgatgaccgcaagaaaagcatcaaagaagtggccaacgtgtgcaaccagagcctgatgaagctggtcacccccgaggacgacgagctggatgagctgagacctgggcagaggcaggcagagcccacccctgacgatgccctgccaaagcaggagggcacagccagtggaggtccagatggtcctgtgactc

SEQ ID NO: 6476 - DNA, 392 bp, Homo sapiens
tcctttcctcctccggagattcagagaatctctgaagcttaatggtttgaggtaattaatacatctgatatgatcaggtgatcagcctgtaacagtagtgtgtagtcactgcacacactgcagttatagaaaaaacatgttctgtttaatccacctgtcaagatgaatagcacaaatcaaggaagtaatgtggaatatagttttatagtgctttcttgttgttgtgttggagatccaacttagtgggagaatggtggaaaaataagaatcggtcaacagtttcttcaagttcactctggtgtacttgaaagcagtggaaatctgtggccaatattgaaatataccatcgaataaaaattttctgttctcctttccagactgccatcaagaag

SEQ ID NO: 6477 - DNA, 540 bp, Homo sapiens
ttatacacttaaaattaacaaacaaaaaaacaggtgctgggctgtatttggcccacggaccatagtttgctgatctctggtctaaacagagccctttgtatgtgccttttgcggaagtagactgtatttcttcaattttccatatactgcaaatggcaaggtgccctgttcaataaggaaacaaaggcacaccctgccactatacaccttttccatccatcttgttcctttacactgccaagacactccactccacctgactgccccatccccacccactttctccttatttctagagtacaggacataaacatctttgaatctgtaaataatgtgaataattttcctcaaaaatcaagctttcatgtttgaagaagagtttattgtgacttcaaacataagctgtaactggtaataagcgaagcagctatggaattatacaaggcaatccaatcaaacaacatggagcacactgaagcgcaaacatcaaattttacctttttcctcctaaaaactttattccctaattacatccattac

SEQ ID NO: 6478 - DNA, 451 bp, Homo sapiens
ctaccagcaccttaatctcccacatccaagttaaaattcatccaacactcaatctcccagctatcctgactgctcctatacaggtatctctcccactatatatatatcaagtgctattagtggctattatttgttgggttacacaaagccagaaatcatctacatctactctcttttcttctggttttgaatagcaaaatgcaacagggagatgttctcagatagagggagaacaacaaaaagaagggtccatgctgaacaaacttgtttgctttgaaatcggaagttctagaggaggtattctgacagtggccaggaaaacctcctgcccgcagaattttgtctaatccaccccagacagagttatccaacagcctggtatggtgcagaccaggggctctcgaaaggtgggctccaggcagcagcaccagtagcacctgggaaattgttg

SEQ ID NO: 6479 - DNA, 275 bp, Homo sapiens
ccatgggggaacccaccttctaccaaggaaggaccattgatgacaacagcaatggaccttatgggaaattgcaaaactcagcaccacgaaaacaaagaggacagagaaaagaacgatctcctcagcagaatataggtatcttgtgtaagtgtaagcacccagacagcttcagatgatcaagctggtaaactgtgggatgaactcagtctggttgggcttccagatgccattgatatccaagccttatttgattctacaggcacttgttgggctca

SEQ ID NO: 6480 - DNA, 338 bp, Homo sapiens
ggcagagcctgtggatcacaagggtggcacaggggagccaaagggactcgggggtaagagaaagggaccaagtgcccggagtaccacgatggcagtgcaggaaaggaggcgggcaggaaggcggatgcaggctgcacccagagaaacagctacagctgcacgcagcagctccgcaagccgtgtttttgtgagctaaacaaagaaatattaaaaggaacaatggaagcaggaattggaaataaagaatgctgttttcaaaacaggcaggatgtgggatcgcatcccaattccaccatcgagagctcctagggcagaaacctctctgggctgggcttgtc

SEQ ID NO: 6481 - DNA, 197 bp, Homo sapiens
tcatgcccatctactttttaaaaactcagtgtatgattttaatatatcttatctgtatgctgctaaagtactaactggtctataagaattaagaatagccaatgatcaactgcaaaaagagtaacaaaacctatccatgcttttactttattccattctttgtttttttctttttctccctatttaaatgtactgag

SEQ ID NO: 6482 - DNA, 569 bp, Homo sapiens
tgaaggactttttactacattaaatttttcttaagcccccaatatataaaagagatgaatatgaagctgctctgggggcgaacttgcagaggctttgctgttcagctcctttaacctttctgctccctggaacatatggagcatgtgctctgaaccccggaatcccgagaacagtttgaaacatgacctcgttgacacagaaggtttccctctctaggagtctaagagtctacaattggaattccaaagccaagcaggcatactcagtgggtccaatacaccaatggtgaaggagggacatttattcaaatctacaaagggacagagcacgagagagaaaagaagtgatttgcaagaaatgagctgattactttacctcacattcaggcatgcctataaaatgacagccttggtaggcagcaaccgcttgtgttaacgcagacggggtctgccagacctgccacacacagagacaaaggagagtttcagtcatgacacacactgtcctcctggcctatgtgcaggcgaccacagaccaccactgcttgtacacttggtgaccaaaacaa

SEQ ID NO: 6483 - DNA, 356 bp, Homo sapiens
accctttgcatttctaggataaatcccacttggtcatggtatataatctttttaatatgctgttggatttgttgtgctgggattttgttgataatttttgcatctatattcataaggaatattggtacgtaatgtttccttgtgatgtcttcatctggttttggtatcagagtaatgctggctccgtagaattagttagaagatattcccccttctactttttagaagagcttgagaaggattgttgttgactcttctttatgtttgttggaattgtctagtgaaaccgtctggtcctgggaattctctttttgggggaagtttttgattactggtctaatttcctcactctttat

SEQ ID NO: 6484 - DNA, 449 bp, Homo sapiens
tctgacagcactattcaagaagcatcaccaaactttgagaaagcttatactttacctgtgttaccatcagaaaaggactttaatggaagtgatgcctctacccagctaaatacacattatgcatttagcaaactaacttacaagtcttccagtggccatgaagttgagaatagcacaactgatactcaggtcatgtcacatgaaaccgcaaacaaactggagagtttggttttaactcatttgagtaggtgtgattctgatttatgtgaaatgaatgcagggatgccaaaaggaaacctaaatgaacaagatccaaaacattgtcctgaaagtgaaaagtgtttgctttccatagaagatgaggaatctcaacaaagcattttatcaagtctggaaaaccattcacagcagtcaactcaaccagaaatgcataaatatggtcagttagt

SEQ ID NO: 6485 - DNA, 2423 bp, Homo sapiens
agatgtaccgggagaagatccggcagctggggagtgcggccctggctaggcatggcactgatctttggatagacaacatgagtagtgccgttcctaatcactccccagagaagaaggactctgatttcttcacagaacacactcaaccccctgcctgggatgcgccagccactgagccttcagggacccagcagccagccccgtctacagagagcagtggcctggcacagccggagcatggccccaacacagacctgcttggcacctcacccaaagcctcactggaactgaaaagctccatcattggcaagaagaagccagcagcagctaagaaagggctgggtgccaagaaatgcctaggggcccagaaggtgagcagccagagcttcagtgagattgagcggcaggctcaggtggcagagaagctccgtgagcagcaggcagccgatgccaagaagcaggcggaggagtccatggtcgcctccatgcgtctggcctaccaggagctccagattgatcgtaagaaagaggaaaagaagctacagaatctggaagggaagaagcgagagcaggcagaaaggttgggcatgggcttggtatcccgaagctctgtctcccactccgtgctgtctgagatgcaggtgattgagcaggaaaccccagtgagtgcaaaatcctctcgctcgcagctggacttgtttgacgatgttggtactttcgcctctggacccccaaagtacaaggacaatcccttttccttaggggaaagctttggctcccgctgggatacagatgctgcctggggtatggacagggtagaggagaaggagccagaagtgaccatctcaagcatccggcctatttcagaaagagccacaaaccggagggaagtggagaaccggagctcaggcctcgagtctagtgaggcgcgtcagaaattcgcaggagccaaagccatctcatctgacatgttctttgggcgggaggtggatgcggagtatgaggccaggtctcggctgcagcagctctcaggcagcagtgccatcagctcttcagacctctttggggacatggatggagctcacggagcaggaagtgtatctctggggaacgtgctgcctacagcggacattgcccagtttaagcagggtgtcaagtctgtggctgggaaaatggctgtgctggccaatggtgtgatgaattccttgcaggatcgctacggttcctactgatccgagctctgtgactcaggcttacgatggtgacggcaacaagaactccacagttcccaggctggggatgctttgccttgtggaagctggggaggatttgttacttcgtatgtgtggtgtgtgtgtggggtggcctttgaggcgctcactcctgtgaggggaatggtcagtaccagcccttgtcctctgcctgtggactgagccctttattccctctcacaccaccctccgtgtgttaggactcttgtccttctgtcctgcccccacagctgctgctcacttatcctgccatactgggaaagggggttcccccacgatgggcttattctggggtccagactttccccaggtagggaaagcggaaggtagaaggcttttttttgctgggctctagggttcttctagttcgaggccttgggtccccatcctctggaaccagggggaggcctggaaggagttcactgtagacccgtcccatggggaaagaggctgcggacttgctgctgctgctgctgccagtggcctcttctgggtgccaggagaggggaaggacctttgtctgggcgttaccaagggctggaaactttacctggtacctaaaggtttcatttgggatcagaccggagacccttgggttctcccgtctcaccacccctttctacagtaagcacttggaagattgtttcagggtgtctcagggtccctctgtaccatctgctgtggaatgcaggaccctctgtgacattctttatcccttcttccccgggttggtggccatggagggtcttgtctgctgtgattcgactctggatgctgtgagcttgatgctggccagggaagcagaggatgtgagaggcagaggcaggctcctggggctgagctccttcctctgcatcattctgggcttggcctggacagcacccgccagtgagagctgtgggcctcaccctctggcagctgagccaagcactgtcattcttggtgccatcttcccttgccgcaccggcagtctcagcccagcccccacctttgggttgtaggttgggctcccaagcaacacagaccactcttccccttgcccctcccccagagggacttgactttctttctggactgtttgtattgaaacaaagtggtgtcaaaataaagcccctgcagggcctgggctccctgttggtctgagtgaaaaaa

SEQ ID NO: 6486 - DNA, 270 bp, Homo sapiens
ttttcctgtgttcctggatacccagatgtgaagatgggtttaactgtatggcagggcatttgtgtttcctccttggccttggtgtctccccctgtaaaatcggggtaatttgtgaattaagggcaagtagggagatgtattactctaattagaccacaggcaagatagaagattataatggacttgaagaattgtgggaagaaaccccaaagggggttttgatctggaaagatggaagaatgttcgaaaacatgataggagacaaaagac

SEQ ID NO: 6487 - DNA, 100 bp, Homo sapiens
cccctcaaaaaaccatgttggggagggctgatcagattaggggagggaaggtctttgttgcagggaaaaaaaggcagtttttaaggcctcactggttttc

SEQ ID NO: 6488 - DNA, 543 bp, Homo sapiens
taaatgagcatagaggacagtgattcaacagcaggaagctgctaccacctctaggataggagagaccaagggagcaggtgggagtccaggagctggggccacctgcaaaagctagaaccacagaatagtcactgccactgccgctcgtgccagaggaggtagggagagaaaaaacctgacttctctgccctcttctcacctccagtctcccaccagagcctcccactgaccaaatctaactggaaaccaacaggcatgggagctgagaaatgtaatttaccggagtagctcctgtgagacagagtagggagaggaagagtgaagaatggatctgagagcaaataagcagatgaggagcacgaatcctcccaccagcattgtattcctggtacaacagaggctctccaagatcgtgcatcatcttgtaaccaaagaagatctacccacaagttcagaacagtttagcatagagtcaagtattaggaggccttgcttctttacctctatggttttcacgtcattgtatcgcctccctttgggttc

SEQ ID NO: 6489 - DNA, 307 bp, Homo sapiens
  misc_feature (1)...(307): n = a,t,c or g
tgcctccaaataaaaataattaaaaaaaatcaaatatataaaatacctaatgaatgtgcaatgcaggatgacttcaggcagactccaattctactagggaaacttgtgggagcttaaggtagtagttatttcatttgtctctcttttaatatcttccaacacagtttagaaatcaaaagatgaggagcaatattaaatttggtattcaaaattaaggtttacattaatgctatcaaatgacttttattaatttaatacttatatgcttggnttttcatagatcaacttccctcttattattttaaaa

SEQ ID NO: 6490 - DNA, 333 bp, Homo sapiens
agagacaccgcctgtttcagtcccaaagagctggccagaacggtggggcgtgtgtggggaaaatggtgtgatgctgggctggcttgggaccctgtgaggggagggaacggaagcaaaagcttgatgttcttggctccacttgggaaactgaaaccagccttctctgtggtttactggcccagaactgaagtatctccattcccactcaaggattgcaagggtgggccagggggtgcagctcagctgtgtccaagaataggctctcaggagaacgggctgggctctctcagccgaggctgggttcagaacttcaggaaatctaagtccttggac

SEQ ID NO: 6491 - DNA, 497 bp, Homo sapiens
cctgggccagcagctgcaggcagcgagtggtgcgggcccgctgcatctcctcactgtcacgcagggtcttctccagcccctgaaggccttgggtcagggccccatacagctcctgccggccctgctccatgccccacttgtgctcctccttctctccatggcggcctgtggggcctcagcacctcttcaagctgctgaatcttgatttcgtgcaagcagctctccttctccaacatggtcactgagtggttcaggaactcgaaagccttggtctgggcctgtaactggctcttgagtgactcaagttcacatcgcaggagcttctgggagtcgggaatcatcacaatggtcttggctttgactttggaagagctggtctccaagggcttcacataccacctgttcatgctctcccatcagggaccacgaagccagtcctcagctgtgacgctgaagtttgatcccgcggggacaccatcgtattaaaacgctcagag

SEQ ID NO: 6492 - DNA, 588 bp, Homo sapiens
ggtgcgcggggctgtcgtgttccagtccctgtgttccccgtcgctggagtgcagcttaagtgcgaatcatttcttggaaagtttagagataattttgtcaactacccacaatatgtatgtgtggactagattactttcttatttcaggatctaaaggcaaaatggaaaaacgtcacattttgtggttattaccagggactgaagtgagttgcccggtggcccctggtggctttagctcccctggtcacctgaagggctgcagtgacccctcctggccagcagaggtattggcccagccaggctgggggaggctgaaactgcttcccttctctgcagccacaaagggctggattccttgggcgccaggaggggaggatttttcttttccctccgatagccctactgggcgctaagattgttgtgaatcattaccctcagaatttggactttctagatgcttcttaacccatgatttaggtgagtaaacttggaaaaatgtttttgcaaaacttgatgatcaagctgaacgtagaacgatattcctaatgggtgtgtttgccttttttcccccttttgagacagggtctc

SEQ ID NO: 6493 - DNA, 321 bp, Homo sapiens
ggagagcgagatgaatgtggcaattgctcattttattttgcatatattaaattgagtaggttcagctctaacataccttaagaaaaatgcatatcggtggcacttgtatgtatttcaaaatgcctttcctatgattgtcatgtcctcctttaaggcttttccctcaaatttattacaaatttagtatttttagtacttgatgactctaattacatgaatgcacctggaatgacatttgtaacagaagacagtctgacttgctttcagtattcacaagttctttccagtttccaagtcttttcctagcagtaatttagggga

SEQ ID NO: 6494 - DNA, 857 bp, Homo sapiens
ttttttttttttttccatctcattattttaatcattttgtcaaaaaatctgaacatgtgtacataaatacttgatttgttaaaagaatgtgtagcatagaaatccctgagacacattcaaaaatgacttgacatcttgacatgtattcaatgcaagtattcaccaaactaaataccaaggacttggctcctttccctgatatttgaggcatataaagctttaaaaatatatataatatactatatatataatttacatctttaaagttagattatattttctttctctgattcctggttttctgccagtttactgctcctgccatattgtcagttccagactgtaaaggaaagcccacattggaaaagccagaataagcactttccaaccttagggtgcccagttagtagaatgaatagcacgtggaactaggaggtccccaacagatgattttgtctaacccactcattttgcagttcaggtgacagaggctcaaagaggttgtgatttgcagaagcatggctggttctgccactgctattgtaatgttatgcaagtccttcagtgggcctggaccttggctccttcctcggtaaaatggactgatggtaatcacagcgaatattttccaggtgcttcctacatgcccaggcactatcctgagtacttcaagtgtctaatctatcctctcaacacctccataaattatatatgcaaagcgtaaaatatttactccctggaaaaacgtttgccaatccctggtttagatccttgaaaatttagaacatcttataattatatagcactttacaatatacaaagcaccttggcatacatcatcacatttaatctttgtt

SEQ ID NO: 6495 - DNA, 300 bp, Homo sapiens
  misc_feature (1)...(300): n = a,t,c or g
ctcagttggagcaaccgggagaaggcaaagcaggcattcaaggaactgctgagggacaaggctgtcccctcctcctcctccgtctgtttcctttcacctctgcgccaggtcggtcctccctgccaaccttccccagctccaatatgtagcagtctctntggatggcggagagtgaaggagacggagaaacgcgccccatcccttccgccggctcctttcccccccgaccctattcaggttttaagtcaaaaatntcgatatgtcattatgcactttacagatgaggggaggggccgcagt

SEQ ID NO: 6496 - DNA, 308 bp, Homo sapiens
  misc_feature (1)...(308): n = a,t,c or g
agtaccataaatatgttgtttttctttccaagagtgagccagccaaactaataacgcttagctaagaaacatcctaaggctagctcagagattattttggatactattgaaatttgggcattaaagttataactgtgggtctccaaagtatattaatgaagaagactcagaaccattctcttaaagtgagccagttattgtcagccttttgcttttgggttgcagttcttataacttagagttacactttttttttgttagaagatacttttcctncagataaatagantaataatgttttataatta

SEQ ID NO: 6497 - DNA, 418 bp, Homo sapiens
  misc_feature (1)...(418): n = a,t,c or g
gttgggaattcaaacctaggcagaggttggggtcttataccctgccccaccctgcctcctcctatgtagtggctctatttgctcaagtggtggcttgatctgacccatcttttctgtggaaggatctagaccagtctctagggagataactttacccattttgctacaacatcccaagagattaaaatcttacatgaacccacaggagactggcgtttctcttaagtgtgttcttcagagtgctagccctgtaaaatttttctcaaaaagagagttctgttgtagaatgagttgggaaacactgcatgctctaatctaatacctcccacccacttttgaagagatactttgttgatgacatattaatagctccagaagtctttcaagaaaggacctgaacccnaatttggganatgct

SEQ ID NO: 6498 - DNA, 421 bp, Homo sapiens
ggcacgaggaaaaggaggctcagcaccaaatcctgaataacttcagctttaatccaaactaggacatttatgtcaggaaataatatacagtctttaactagtaggatataatgtaatttgttttgttacatttattatttcctcataagattataatcttggtgacacactattttaataatcactttttatcctcagtggaatgccaagcccaataggtagttgcttaataagttgtctgttgaatagattaatgaatgaagaagaaagtttggaaactattgctgttacacttggctgtgcttcagtagacatcctaacatatgttggatggcaagcaatctccacatacatatataggctgaaaaatagaattaaacagagttatcctgaaattttattttttccctaaattggagga

SEQ ID NO: 6499 - DNA, 725 bp, Homo sapiens
ctgccaagacatcagtgaaaagtctgtatgaagtggatccaaattattagcctgcctaccactccttgtgcgtctcatcaattgaacccatccctagaccaagggccctttaggtgaagaaccagcccagaagggaaagagaaaagagtagaaccaatggacctccagatgggagcggcggtcagtgagtagtttagagccaggtacatgttagcaccctggatacgtgcacatgccctgatctttggcttcccatctgtgaacttcaacacccacgtggctttttcttatatcctttaaatacatatctgacttagtatcacctcataaaagataaagaatcatagtgaagcagaaacaagccacagaccagtggtacactcaaactggaaatcctctttttcccaccctctccctcaagaaaacatccctgccgacttgagcagtatgatggccaatagcgaagcagagtggcccccagggatcccactctgtccctcgcacacgcgcacacacgaagagcaaatgaagcggatccaaggagtgatgacaagcgctgcacaggaatgtttgccaaaactcttctgggggatccgagtgctctaccaaggacatgagtatgccctgaatttctgcagctaaggccatatagtctggtgaccaagcatttggttcctagcttcagtctttggttcaaatccctgcttggcaacttactaccacac

SEQ ID NO: 6500 - DNA, 376 bp, Homo sapiens
gccacccacgcccctccctctccttgaaagaccttcggttccaaccccaccatcagcagggctctgctcagttcctccttatgtgtatcaccacagggctgctggctcgtgtcacgttcaccaccagaccccacatcaggagtcccgccaggggtgtggggaggcagcgctgcctggttggccgtggagccgtatggaacatggtgcctcacaggcagtctgcttggcgtcctggatcctggctgtatcccgctggaaaggatgtgtgtgggtctaagatatgtatataatagaaacatttattcagaagctttagtcaagacttcatttttaagttcagagtaataaactcatagtctaaatttaaaaaaaaaaa

SEQ ID NO: 6501 - DNA, 425 bp, Homo sapiens
  misc_feature (1)...(425): n = a,t,c or g
tcagctgtaccacctggaaccattcctccagcctttcccccacctactgctaatataatgccttcgtcgtctcatctctttggctcaatgccatggggaccatcggtgccagttcctgggaagcccttccatcatactttatattctgggaccatgcccatggctgggggaataccagggggtgtgcacaatcagtttatacctctgcaggttactaaaaaaagggttgcaaacaaaaagaactttgagaataaggaagcccagagttctcaagccactccagttcagactagccagccagattcttccaacattgtcaaagtaagtccacgggagagctcatcagcttctttgaagtcctctccgatttgctcaacctgcatcttctttttcaagttggaactngcctttnagggccatagtat

SEQ ID NO: 6502 - DNA, 472 bp, Homo sapiens
  misc_feature (1)...(472): n = a,t,c or g
aagagagctagcaccatgagcttcaataccctggacaggctcttcctgggtatcaaggccccacactctgggcaggcacccaattccccagctcatcttccacctctcgccctggctcccagcacccctctccccaggaccctctaaggagacatcttccctgtcaggcccctccactgtctcccagttttgtggcttctcaccctttcgtgtctcagcctctggatacctccctacccacgcccacccgcccccgcaccccggcatcacggcagtctgtgcactgggaaccatgacgccacatgcgttctctctgctcaacaggagcgacaggagccccagggagggcagggctgccctggtcccttaccactaactccccagaacctccacggaggctcccgancagggcggccttagcattctncacagaggagcgccagcccgcttgaatttaccctanttaatcaaa

SEQ ID NO: 6503 - DNA, 405 bp, Homo sapiens
  misc_feature (1)...(405): n = a,t,c or g
tccacttaggatgtagaatactgcaagaaaatgtcccttccgtcctaacaatgtgaaaaagcaggtacaaaatcataacttttcttgagcccatcagaaagccaaggccacaaggcaaccaaataaaggagagatagtgttaggggagctgagttcatagaaatgaataggagtgagaggaaatagaaggagagatagtgacccatcaactgttttcaactttgggcaaagatgtgggctgtcttacaagtggggtaaggaaaaagacattaaaaatgtttaacaatttgttaaagtccacatgtgggcctagcatatcagtttagaatagctgaataggatctagacccgaaaatgcgtgcaangcaacctttttgacaggcctccctgggggtcatgggaaaa

SEQ ID NO: 6504 - DNA, 436 bp, Homo sapiens
ggcacgagaaaaagtatggttttcatttcatgaatggcgagtctgaagttcagagaggcttaccacatgtctaagaccacataccttccatcagttcttctatgctcccttttcacattctcagatctctgaaatcaggatgctttttacaattggcagtgtcttacaatcaagtggaagtatttttctgtttttagtggtatataaaataatgtatcttatattagcttagattcaatgaaatatgggtagtcagtattgaagtcaaaattgaaacatatttcaaaagtctgtacatcttcgcttttcaaggagtttattatctagttggagaaaaaaatacgtaggaaaactcccacaaatctttctcaaatacagagtagggttttcatggaacactggagtgggaggccctcactaaagctggcaggggtgg

SEQ ID NO: 6505 - DNA, 362 bp, Homo sapiens
ttccaaagacttctggtactctgtggtcaacggggtcatctttaactgcttggccgtgcttgccctgtcatcccacctgagaaccatgctcaccgaccctgaaaaatccagtgactgccgaccatctgcctgcacagtgaaaactgggctggacccaacccttgtgggcatttgtggtgagggaaccgagtctgtgcaaagcctcctgcttggggcagtacccaaaggaaacgctacgaaagaatacatggagagcttgcagctgaagcccggggaagtcatctacaagtgccccaagtgctgctgtattaaaccacggccgctcacagcttcagatatggtaacacctacgtgccgaatct

SEQ ID NO: 6506 - DNA, 116 bp, Homo sapiens
cttattaacagctccatcttctccattgtaatatttccttaaaaagaaaatttgcagacatggtctgaatgatttagagtgatgtgtaacagtttggacaggctggttgcacccct

SEQ ID NO: 6507 - DNA, 562 bp, Homo sapiens
caatcccgctgaagaattggaacatagttatattggctggaggtttggacattcctagagcaatacatatgcctttcaactcttgaaagacctcactaccgcctccttcttgagctttttttggaggagcattcacacagagcattctggcagcttctagttctgagatgaggtatgtgagcaagaggaggcagttcttctgaatgagaaggcgcttggtcacatccccagatgtcagtgaaagatacgggcagttcatctcccctagtagcccactcacctcaagctggaattcttcagcttcactcggactgttagttgcttgcacgttttcctctagtttacagagcactcttaattcagacaccagccaagcacagagtttggtaaactcgggggaactggctccagcagagactgcctgagagagcgctccatcttccaacaatgggcccttgtaacctagatcttccaacgactccaagatgtcagtctccatgaggtcacactccatgctactgtggtattcaaatttccgagtcgtcaggctcccctcttcgcc

SEQ ID NO: 6508 - DNA, 665 bp, Homo sapiens
tttttttccccagggaggaacctggttttaatgggccctgtgctcagggaggccttcagtcagcagggtcgcctcagcagcatttgggagcctgccctgcagctccctgcctccaccctgcacgctgtgcccacacccccccacaacacgtaggtgaaagcacaggcaccatgcggaggccccgagcaccccttagtggggcggggtggggggaggaagtcagtccataatgttgtagttacggatcttggggggcccctggcagcctttagcttttgcaggatgagaccgggaggctcctgtggtcttggcctttgcctgggctgctgtcttcatccctggggtggcaatgcctgcctgcatcttgacgggcctcctgtcggctgctggaggagctgggagctctggagttgagtcaccctgggaggtgacaccagaagggctggatcccaggtctagcaacctccacgtgtcctggagggtccactggcaaaggaggaggagctgtgggattggcgaccatgctcctcagggtgcttgggagcctggggtggctttggggacctgtcttctttctgccgaggtgatttacaggtcaccgtgtggatgctgtgttgtgtcttcgggcttgcagggtgttaagtccgctgcccacctgtgctgag

SEQ ID NO: 6509 - DNA, 614 bp, Homo sapiens
cagaaattagaacacagaaggccttaatgtgtagaactgccctgaagccagtgggaagctactgttgggttttaagcaggaggcatggactgaccaggtttgcatgtgagaattgattctagaagctgggtggagacggaggttgatgctgagacctgaggctggagaccactcccccgttccatccacttctcagcctccgttttctctgtggaaaagtccagatcccgacttatactgtctctgtcttacggattagtgtgagagtcaaatgagatcattattgccaataggctctgtcaatacatagaatttagttgaccattttcattgtcttcacttgtgggttaaataaacactaaaataaaaacatcagggagcctggctgagcagggaataacctcttggaggaaggaaaacattcccctttatatgtcagcaactttgaccctagagggaatcagaacccatgcctttagggggtgttcctgcagacacagagctgttctccccctgggaacctcaccactgctcaaaatgtaatgcaaacatgaactgacttagttatctcaatgttcaaacttgaaaaaaaataaacattatgttccaaaaaa

SEQ ID NO: 6510 - DNA, 1103 bp, Homo sapiens
acctgccacctccagccctgatccattctcacctagcggctacaggaagctgtgtctgttcgatttggtgggaggagatgtgcagggagctgtatcttgtcctccgcttgtgaaaaactcaaggatgtggagaagagtagaccgtggaaccctgctcttctgcagccaagctgaggggcaggatgcgtgtgggacagtggtagagaagcaggggatagactcataggctgcaacaaaggtgactctgtccctggacactgcctccgtactttctccttgcttcactggccacagcatctccctccagccctcgctatgtgcctctgccatcttcacccatcatggagcagaggtgaggagaggcagcctgggaatatggagaccagtgaaggaccaggcctggagagcacagggtcctacctgggcatccagcagaggagcccctaaaggccaggagcaccccaagaggagggagggcagccagcctccattgacggcgagcctccagccctctcctactttgatcaccatttctctccaggctttctgcctccgagatgtggcaccatagtgcggtgccctgtggcttcaccgccctacttccacctccgcccagcctgtaatgtttatataagcagcctcaaggaccaagaaccatctgcgaaaggacacacacaggaaattcataaaagaaatctgaatggataaaaccatgaaaaaaagtatgcttcattagtaattaaagaaaggcaaatagagctggaagcatttttcccttagcaaaccataacagaaaaaaataagacccaatattggcaaagagactactgaaaaaacattcccatacattgcgtgtgggagtatacatcggtgcaggcttcctggatgacagttgggtgatatgtgtcatgtggcctaaaagcctccatgtcatttgacctacgaattctatctttgggaatttatcctaagaaaatacttaaggatttagttagtgataagatgttcatcccagcattgcaatggagaaaaatgggaagcaatggtttggttgggaatttattccttttctgctgtaacgaaagtttgcaataggggattgc

SEQ ID NO: 6511 - DNA, 734 bp, Homo sapiens
gctcagagcctttgccaggcctggagaactgcataggtgcaggactgccagtagttcttcctgctctttgatcattgaaatgttttcttttgtgaagtaatgatggtagaagatgatagggtttctgtttgtttctaattctagtctttacttggcattaagaaattgttagctgctagggttgattttgaaattgtgaagttggagagtccctcctggagctgtgggttggatggctgcagctctgtgactcagctgtgctgggtgcctccctttggggctcagttacctccttttaaggtgtccctagggtgagagagatgatcacgatagtcccttccacctgggcggcccaggctttcctcgcccatttagtgcctttcatgtagaatttccacctgttgtctgctgtgctgccactgcttgtcctcgctccctgccacacagagctgtgttctctgcctgccactcacgcctacttctctgatcagggtttgtggaacctccagcgtggtcaccattctggtacctgtggtaacacgctcagccttggtgtggcacattctaggtctaccgtttgtattcaccagcctgtgagcttgtgtacatgggacatgtatcttcgttttgggggctttctccttccacttgatgcccatcccttgagcgtttactacttgtggagcgcttggctttcaggccgtagagagctttccaatcagtggtgtccaggt

SEQ ID NO: 6512 - DNA, 445 bp, Homo sapiens
  misc_feature (1)...(445): n = a,t,c or g
tgcatttatttttcacaaactcattctcatttcctagaatgatacctcaggtataaatacctaaaaaggtgtgttctttattctctctcacatacaaaagaagtgcaaaataaccccagtattaaagatgctactatggttacatgttatggattaaactgtattcccctaaaattcatatactgaagccctaatctcatgtgatagtacttggagatggaggcctctgggaggtaatcaaggttggatgagatcataagggaggggccctgggtccagttggactgggtgttcttatacaagagggagagacacagaggcacctgctcttccctctccctctggctcctcctacatttcccctcctatggggctgagggaaagggctgtgtgagggcacagcagggaaaggcagtctgcagggccgggggtagggcttncacca

SEQ ID NO: 6513 - DNA, 735 bp, Homo sapiens
tcggcacagggtggttattttttccccaagacaacagcactagtaatcccacttaataagagcttatttaattggatgtcagcctcttaactgctaagcactttgtgggtctcagcgtttttcataaaagaacttttgtatttaatacaaagtttgctttgagacttttcagcatatgatcttttttccataaacttgtacagtgcaaaagacattttgaataccatgatcgatgatgtcccatgcttcgaggaaaaccaaacactttccgcctctcttgcaaaatccattcctcatgctgaccctcctcacgatgggctgtgtcagcccagccccttcccttctccaggcccagagaactctttccacaaacaagatgagagccactcgggaaaagagccatagtcaactgggagggcctacatctggatggcggtggaaaaacttgagggtttggggttcaaagtcagcccatcccacctggcaaaatcctcctggaaggaggaccttcaagagcgcatcacctgaatgtcgtgaagaagtatctctgaatgtatccaggagaggaactgcataaccaaaggggtgaccagccctcagatgtgcttattggattccagtacaaacgccaccaaagccagcccactgctctcctacaaggaaggaaagatcttgcacgttgttaaaacatgggggcagcctttgggaacatggtgtttttttggagtttccttt

SEQ ID NO: 6514 - DNA, 436 bp, Homo sapiens
  misc_feature (1)...(436): n = a,t,c or g
ttggaacttcttggtattgcagaatatactcttttgaaactgacacactgtactaagtttttagactcctagaccaaaannnnnnnnnnnnnnnnnnnnnnnnnnnnnnnnnnnnnnnnnnnnnnnnnnnnnnnnnnnnnnnnnnnnnnnnnnnnnnnnnnnnnnnnnnnnnnnnnnnnnnnnnnnnnnnnnnnnnnnnnnnnnnnnnnnnnnnnnnnnnnnnnnnnnnnnnnnnnnnnnnnnnnnnnnnnnnnnnnnnnnnnnnnnnnnnttttaaatgattcaaggtttttcaccttagtgtaatcttgcaatcccgtggtcatgctgctgatgtcttcagtttgtgtggacccagtaaggctcaaggaaagtgcctatggcaatttgacatccgtgggacttaattacacattactaantttgtaataagcct

SEQ ID NO: 6515 - DNA, 757 bp, Homo sapiens
  misc_feature (1)...(757): n = a,t,c or g
gatctgaccgctgtttaagctttctttgaactcctttttttaaaacagcctccataatcaatggtgtacgatctactctcgtggtaaaacttactcagtgaagagtgtgttttattttctgaggagctgaactgttccaacctgagtattctgaataaggacagtggtcgagcatgagtgatgccatctggggcttaggaaataagtggggcctaaaatctgattgtttttcatacattgttcaggatattgacggcaaataggcaatttattttgttaaaaaatggttgggtatccgggaacttggccaacagctgtgtgtggcttgaagggagatgaagtggtgaaggcctggtttccaccgaagctctcacagcccagcctttcactgtgtggccgggggaagggtgctccgggtgagggacgggaatggtgggactggggatgccacgggacaaggctgctggccctggaaggtagtcacgtggagaaccgcaggagatgagattggaaagtagtaataagccatgtngataagaacagaggagcgggttttaagggggacgtcctgaaatgctgctcatgtcgtttcagttccatagaccacaggaaatgcaggtgagacggcagcccggngggaaggaaggaaganggtngtggtgagccangtgagtttcgagccgcccagggcaccntgctgtgcgatactcangcatcgggtgcttctgccaaacccttcagcagctggtttggggca

SEQ ID NO: 6516 - DNA, 983 bp, Homo sapiens
ccgcctagacgctggcactatggtcatggcggaggggacggcagtgctgaggcggaacaggccgggcaccaaggcgcaggatttctataattggcctgatgaatcctttgatgaaatggacagtacactagctgttcaacagtatattcaacagaacataagagcagattgctccaatattgacaaaattcttgaaccacctggaaggccaagatgaaggtgtgtggaagtatgaacatttaagggcagttctgccttgagctaaatggacttgctgtcaaacttcagagtgaatgccatccagatacttgcactcaaatgacagcaactgaacaatggatttttctttgtgcagctcataaaactccaaaagagtgtcctgctatagactatactagacacacacttgatggtgctgcatgtcttctgaatagcaataaatattttcccagcagggttagcataaaggaatcatctgtagcgaaactaggatcagtatgccgtaggatttacagaatattttcacatgcttattttcatcatcggcagatatttgatgaatatgaaaatgaaacatttttgtgtcatcggtttactaagtttgtgatgaaatacaatttgatgtccaaggataacctgattgtaccaattttagaagaggaagtacagaattcagtttctggggaaagtgaagcatgaagggaatcataggaaaaatgtactgatcatataattaacattatgtactgtatatatcattttagacacatcaatcatgtatccatattatagcttctttgtttagtataggtttttgtatgctgggtttgccttttaaaatgggaaatactttttaagttattcataagctgtatattcaccagtgtggcactcatggtttttaaataagattagtattatctgtttataatgcctgttaataaaagaatttacagtttggtaaaaaaaaaaaaaaaaaaaaa

SEQ ID NO: 6517 - DNA, 775 bp, Homo sapiens
ctatgtcgagggaatgggttccttgcaggttggaggcggggttgcatctggcttggtggtagcatttaatctattgcattggtgtttttcagatgaaagagaaatccatataccattatgtttgaatttcctgatatatacaggatttaaagtgaaaactttattccaagagttaacagagtctctgggaagctttaggacatctgctacgttatttatcaaaatattgggatctctgccttgtgcctacagtgtcgtgggcctgctcgctagcagaagtcagaaaaggcgataggcttggctttaaggatttcgtgcccttgcctgaattcagtacaactccactgcctcacgttagcgggagcgcacctgaagagtacggggggagccctctctcccttaccctctcactctccaccagatgtttactaaacagggcatgttactgaaatcttcctttgcgactttctcggacatatcaactgcctttctcatgaagaattttaatgggttacagtatgaaatcagttaagataaagctgcattgtatataagtgcaatatatttttgaaggtctgtaaatgtgtacatacatgtcttatataaatatataatatataaatatggtgtctgtgtacatatagtgaagatatgcagtaagagctaccttaaagactttccctagacaaaggttaagttattttttgatcgtgtataccaagcagatagaatactgtgcttagtggacccgctaaaaacctttttctctgttttt

SEQ ID NO: 6518 - DNA, 524 bp, Homo sapiens
aatgaactgaccattaacagcgcctctttgataggttaccctgatgctgctaaagtaaagccttaagtgtgtttttgggacaacgtgctgcttattccacctcagccacatatgtgtttgtgtttaggatattgtaaatctttgctaagtagtgttttccttggtgaatgaagtcattgttgtcttcaagtgtaccatctgcctagcaaaaaattgctacaaactttctcttatgcaatagtccttgggtacttctaatatttttaggcaagagacaattttctgtactaggaatcttccactgccaggaaaacacagtgccagtaagggttctaccataccactggaccatctgcttaataggacatgtatttcctttgagtaggacattagcttttgattataaagctcaactagtataaggcaaaaatattaacatctaggaaggcacagttttagccggggtgtttaaaaaattacagttttgtggggacttaaggggtctttttaacctagggtaagtt

SEQ ID NO: 6519 - DNA, 425 bp, Homo sapiens
tccagagaggaccaggctgggaagacactcaggctaagtaagtgcagcttccggccagagcacgtgtccaggctggccaccggcttgagcaagtccctgcagctgacggagctcacgctgacccagtgctgcctgggccagaagcagctggccatcctcctgagcttggtggggcgacccgcagcgctgttcagcctcaggtacctcctcccccgctgcctccgggaggggccatggcatgaatgggagcaggggtgggcactggagtaagaggcccccaggatcatggccccagtcatttcctgtacccacaaccctgccatctggaccctgagcaaaccctgtccatctgtcccagagactccacaaggcacacagagaaactgtccttccccacactggaggcctgtgctttgggatttacg

SEQ ID NO: 6520 - DNA, 705 bp, Homo sapiens
tttttttttttatcttaattgtaaaaggtttatcaagaaaaaagattcaaggagcagcatccaggaggagaccatgacccccccggggcaaggggggcagtggtgacacatgtcagcaccccacagcaagctgctggaccacaccctgacctgggtggggaggaggcagaaacccctcgggattgtaaacataggtcagagacagcacaacctgacggggagcaggggcccacattccagcgaggcaggcagagggcaggtgggcatggaatcccttcgcatggctgggcaaagcaggcccctgtctttttcctcttaggtttcccattgtgcaacaggaaggatcttgggaagacagtgccacagagcccaaggaccctggggatccttgggtttggacctgcttcgagtgtggggagttattgctggtgaaactcaaatatacagtcacttttgagagtcttctccaggaaggtgtcaccagggatctggggcccagggcttatacctcagcaccttgagtccgaggaggggaggatgctgcaatggtcccctgcccgagataagctgagggcccaaaagtggaggggagtcagaggcctacaggagggagatggcctgtagccccctcctgcaggggacagggtgatgtacggacagccagcaacatgggagcaagggagatcccttcctaccacacaggcc

SEQ ID NO: 6521 - DNA, 672 bp, Homo sapiens
tgcctttaaaatcattttataaagaatggcacaagttggggtttatgtttactcagatgaacccgtccccttagaggacacaatcccacccccaacccccccaactccacgactgcccatcattgctgttaatccttcaggggagggttcacagctgtttatgaagccaagagaggttctgggcaagatcacagctggggaaacaggcccaggccctgctccctggtgtcctccatgctggagtcagcggtgcccaactgacggggtgatgtgatcacatctgcttccttctccacaacaagagcagggctggcgggcaggccaggaaagtcctccaggatctgatcttgccttccgactgaccagtgcgagcgacttctgcttctcttgggtcttctagtggtagaagacagctggagctggggtggtatttggatcaccccagacccaagatcagtggactggagcaccatggaaatgtttgggagggtccctcaggattgggactttcccctgaggcctctaggctcctccaagctgtggcctcaaggataagagagattgtgtcaggttcatgtgtctctggaactgcatgattgctgttgagtctgtatgtgtttcacctgtgtatggatatgtgtctctgatcagatttgtgcgtcgtgccgaatt

SEQ ID NO: 6522 - DNA, 1645 bp, Homo sapiens
tttttttttctcattaacaaagcagtcaattccctttatttttaaaattttatgtacacatatgaatgatctgtataatgtacattcaatatagaaagctttatatatttgatagtgtatagaacatttcacaattacactcatcttttacataacatcttgacatccatttttaaatttttttgcacaagctccttttcattcaatttggtaaagccagttatacatactaatgtgtactgtgagctttcagaaggttaatgattgaggatgccagtgaagggtgcagggacaaaacctaatagtcttggatggtggggggaggatgggccacggcagacttgatgcaggagagggaaatattctttcctggggaaaagtgacttagcccaatttttgttgactgtagctcaaccctacagtcatgctagttcaaaaaaaaaattacaaaaactaggaagaaagttttgtctttttgattccacagttttgtaaacagatataaaggaacaaatgtgcttacatacaccaagaaaaaaaaaaattcttgtgtacccacttatgttgatccacagagtgctttcttataatgtgatacaattaggatcactgactttttttcctaaaaatatatttatagaaaaaggaataacactgtcatgaaaccaggagaaaggcagtaagagtttgcttcaacgtatcagctggaggaatgtggacttggcactggcctttcagcgtttattgtctctcgtgaatatttcaagtctgatagccaaggtcgcctgcctcatggtctacaggaggtggcaggttagacatgactgatgtagatgtacctgcggtaaggtagccagcaactccaggtcctgtgaggtatcctgctgtatgtgacctcaagaaatgaacaaatcatgttcctggatctttgaaaggcactcccagactgaagaacggcacaggatttcattcacctgttcctccatactgcaaacttcgagtcattgccttgagagctttaacaatctgagccctagtggctgctgggctgtccaggttttcaaggccaatgccttcgagtaattttaagaggtatggaaccaaatctgctttcagggcttgtgctactaattaactctgctccttctgaaacattcgattaattgcttcacaggctagaccaacagtatctgctcgctttttcattccattcatcagtgggccaatggtctctaaagatgccatggctcgaacacacagctcattttcagacaaggcatggataacccgaatggcactcttaggaatggcattgttcctatgattcattgcctggataactttgggaagatggcccaatggcgggacctgatctgccagctgaggttgtgcgctgaagagacacactgttgccattgtcaaggtttccagagtttctccctgcaggtgtaaaacaaaaataaatcaactataaaatactcatacagtcctaaatatccaaggtaatgtatttggtgttcaaaactagggattcaaaagttctaagtgctgatacttgaaaacagattcactaatcctaagagaacaacgaacttcccattttctttcataaaaggcatgaatctaaaggactttaagaatatgc

SEQ ID NO: 6523 - DNA, 629 bp, Homo sapiens
attgttgaaaatacatttatttggagaagtccaaagccaaggggctcatggggctgtgaggtccttcttgctgcatcgtcctgtggtagaaggtggaggagtcaagagagtgccccagagtgagtgagagcgagaactagaaaaacgggaagagggaaacagaggagagagagagagaggacccatcagtgtcaggagcccactcccaagatagtggcattaataaagatcctgcgtctcactattgttgcattggggatgaagtttccaacaaaggaactttgggggacacatccaaaccataacataggatttaaataattttacagagttcaagagttctgctactgaaccgtttgagatccctgttctgaggtctcatcactttccagtttttagccagggaagagaagtggccagtgggcaggagtctgcagattgggggcctgcacctttttttgaggcaccttttttatgaacagtgtttgttggaacacagccagactcactcattcacctgtagttcgcggctgcttttgtgctagagcagcacagccagagcggcctggtggccacaaagcccgactgtctctgcagcactggttttttatatggggtttctagtggtt

SEQ ID NO: 6524 - DNA, 673 bp, Homo sapiens
  misc_feature (1)...(673): n = a,t,c or g
aggaggtagctctgagggcttcctgtagggcataaatcacactttttatataattgcagttgtctcttaatgaaagaaagtttgcacatatggcacttcactccatttgccttcttttctacaaaagaggtctagctgtaagatgctgttataatttatacttctcttaggaggccaggtttctcccccttgaagaggatattgtggccaggcagtactgcagaagaatataagtagtttctttcttagcatgtgagagtcaaattggtcccaattctccagaatacatctcaggggcgtttctgccttggggggaacgtttcccattgctttggagatcccttcgtggtcaccaaatgttactgggggtccttactcccagagctcccgatagtggcaggctgcttccaagacggtggcaagcctcgtgttctctgacctggggttcttggcctcacggattccaaggaatggaatcttgggccatgcggtgagtgttatagctctattagaagccgtgggtcacggaagagaaccgtgggaacccagtgactagtgttcagctcgattaggacgaacccaggctcttagccttgcaggaacaatgggcaagccttcagtccgattcaggagttggcaaagggcgcnccccggatcaggagcacagcagaca

SEQ ID NO: 6525 - DNA, 580 bp, Homo sapiens
ttttttttatatgaaagaggaaagatttttttaaactacaaaagttacttttaaccataaaaaaaaaacaaaaaaactaaaagtaggttggggattaggttgtatctctttgggcgagctgcaaagtagccaaacctgactaccaaaggtaagaatgtggatacacaaatgtcacctaccccaccctgctttgttgaggtaggggacgaggaggacaaagtggaagtgtggagggaggagggggccaggcaggtgtggaaagccagcaaggttgtctgaaatgtctgttgtcagaacagggcttccccttctctgtcatgaaaacaggatagaaaaagcttgtggccagggagcccggggcctgagtgaggcattgtgtcatctctcgctctgagctcatcctagaggcagacacatacatgctcaaaggaacttctttttcaatggtaattattccagttaaaagaaaaaacaaaggaaaggaaacaaaacattgtctggaaagacacgggatcccagagcctagggtgccctcctagctctgaaggctcgcagaaaacttggctagcttgaaaggagg

SEQ ID NO: 6526 - DNA, 233 bp, Homo sapiens
  misc_feature (1)...(233): n = a,t,c or g
gcatgcaaatttattaacttgcacaggtgtcttacaaaatagaactcaaataaatggccagatgattgatgcttttataccatcttggggttatagaaagaatgggagcttggagcttgccagaacagattatggcaggcagagaagagaaggcctgggttagcaaaggtggtcttgttatattatgtagataagacaggtagcagccctcggagaaaatacgggaaanggct

SEQ ID NO: 6527 - DNA, 870 bp, Homo sapiens
ttttttttttttaagagtttctagagtttttattattcaaaatgagtttcatttcaattcaggtacttgaaagaaggttctagtctgttactttgacacagcacaagatcaatagtttattctgatgaagtattccacccaaatgaaagcataacatgcaagtagtcatttatttcaatcactcctatttgaaggtccttatttttggagaacagtcaggcattttattatccactctttccattccttaaaggcttccttccacgggtttcagtaaattcccattatcctcacgactgtgttctggagttgctccaggtgtgccagaagattcatcatcaatccacctcaccagtgccatctgtcaaagaggcctgtccaaagacaaaattccacaagtctcttgggtaaagatcaatcattgttattcccacaacacagaaggcatcttcaggtttcttctttttcaagaacttcaggatgtcccctgcatgaatttgtaggttttgtgtgttctcattgactctaaaggaacaccttgttgtagaaacaggaactggttctagcagttttactctcaagcgatagaaatatgctttacagtagcccgtgagccatttaatatattcttcactgataattctggtgcttcatagagatcctattctccatatacagctctgatttctccctagagtgaaatgactgactgctaatgctttagagtggtcacacttagagtggtttccatcatgtccaatcaatttcttggggacaatgacacgtttcttccattcacatcgtgttcctatgtagagttttcatccttcctcttgaaaagggtcagatgttccaccacgagaccgcgac

SEQ ID NO: 6528 - DNA, 461 bp, Homo sapiens
tcccactaaagtgccctgcaactaagactttgggtgtgagttgtactactcacagaacccttgatctcagggtaagaagaattctccagaggtcttctggacagttccttgccttcatgccgaaaagagctcattgccccatttcacagatgggtcaagtgaggcccaggaaattagagtgatctgaactcagtcacacacaggtctccacacaaacatgtcaagcttttaagtactgactgagtagaattatttttctattaatagttcatctgggtgacttaagacaaccagagttctctctccaggtcttggctcaccaatctctaagaaaagaaggctgaaatcccatcatttctggtctgaggctgtagaaagagagaaatgcctcagatgtcaataaattattaagttacttaattgattagtaacttcgaacaagatattttgtgtgactaagc

SEQ ID NO: 6529 - DNA, 507 bp, Homo sapiens
  misc_feature (1)...(507): n = a,t,c or g
tcatcctgggcacagaattcaggaaactgctagacagcctggtccgaaagcattgccagctgcccgtttcctcccatggcccagtatgaggccagcaggggacatttgggatgcccaggccgcagaggaagctgggcactgggtgcagaacaagggcaaggacaggctctgagtgtccagtggcagccagaacaggtgacacagagcaggggcttcagccacagagacacactcaggaggccagaagccgacactcaaggtgttcgtggggctggctcctgaagggcctgggagggtccatcagctgcctccagcatccagtggctgctggcatacagcctcatccccacgtcccaacccctctcctgtgtgtctgtgaccctgtgcgctgtctctgtgtgtaccccccacctgctcccccccccttttttttttgagacggggccttgctgtgtncccccaggcgggaatacagtgtccatgatcatagctcaaacaaaaaaaaaa

SEQ ID NO: 6530 - DNA, 622 bp, Homo sapiens
cacaccttcaccatccaggcctatgactgtggcgagggccccgacggggccaacaccaagaagtcccacaaggccactgtgcatgtgcgggtcaacgatgtgaacgagtttgccccagtgtttgtggaacggctgtatcgtgcggctgtgacagaggggaagctgtacgatcgcatcctgcgggtggaagccattgacggtgactgctccccccagtacagccagatctgctactatgagattctcacacccaacacccctttcctcattgacaatgacgggaacattgagaacacagagaagctgcagtacagtggtgagaggctctataaagtttacagtgacagcttatgactgtgggaagaagcgggcagcagatgatgctgaggtggagattcaggtgaagcccacctgtaaacccagctggcaaggctggaacaaaaggatcgaatatgcaccaggtgctgggagcttggctttgttccctggtatccgcctggagacctgtgatgaaccactctggaacattcaggccaccatagagctgcagaccagccatgtggccaagggctgtgaccgtgacaactactcagagcgggcgctgcggaaactctgtggtgct

SEQ ID NO: 6531 - DNA, 435 bp, Homo sapiens
aagagggcttttattattgtactcaagagagttgtttctggagacaaagttgcctgtgctttaataggcagactctggggagaatccaaatcacaggccagaacattttatattaataaattcaatacaaagcagaaagtatagatttgctttcaccattttaaaagtgtttagttttgttaatcacctaaataacataatttgttttgttgcagtaattgcttttattctgaaaatatgtacaaacctatactcacacaaaaacactcaattcataattttcttacacctcaggtttatcttcagagtaatatgtgtatatttaactctatgtaaattaaaactaaaagtctatgtgtttgcaggcagagaccacatgttcaaggaaaactatattacaagtatttataatttttcaggactcagaaatggtat

SEQ ID NO: 6532 - DNA, 1463 bp, Homo sapiens
gatgcacttgagcagggaagaaatccacaaggactcaccagtctcctggtctgcagagaagacagaatcaacatgagcacagcaggaaaagtaatcaaatgcaaagcagctgtgctatgggagttaaagaaacccttttccattgaggaggtggaggttgcacctcctaaggcccatgaagttcgtattaagatggtggctgtaggaatctgtggcacagatgaccacgtggttagtggtaccatggtgaccccacttcctgtgattttaggccatgaggcagccggcatcgtggagagtgttggagaaggggtgactacagtcaaaccaggtgataaagtcatcccactcgctattcctcagtgtggaaaatgcagaatttgtaaaaacccggagagcaactactgcttgaaaaacgatgttaagcaatcctcaggggaccctgtcaggatgggcaccagcaggtttcacctgcagggaggaagcccttccaccatttcctttggcatcagcaccttctcacagtacacagtggtggatgaaaatgcagtagccaaaattgatgcagcctcgcctctagagaaagtctgtctcattggctgtggattttcaactggttatgggtctgcagtcaatgttgccaaggtcaccccaggctctacctgtgctgtgtttggcctgggaggggtcggcctatctgctattatgggctgtaaagcagctggggcagccagaatcattgcggtggacatcaacaaggacaaatttgcaaaggccaaagagttgggggccactgaatgcatcaaccctcaagactacaagaaacccatccaggaggtgctaaaggaaatgactgatggaggtgtggatttttcatttgaagtcatcggtcggcttgacaccatgatggcttccctgttatgttgtcatgaggcatgtggcacaagtgtcatcgtaggggtacctcctgattcccaaaacctctcaatgaaccctatgctgctactgactggacgtacctggaagggagctattcttggtggctttaaaagtaaagaatgtgtcccaaaacttgtggctgattttatggctaagaagttttcattggatgcattaataacccatgttttaccttttgaaaaaataaatgaaggatttgacctgcttcactctgggaaaagtatccgtaccattctgatgttttgagacaatacagatgttttcccttgtggcagtcttcagcctcctctaccctacatgatctggagcaacagctgggaaatatcattaattctgctcatcacagattttatcaataaattacatttgggggctttccaaagaaatggaaattgatgtaaaattatttttcaagcaaatgtttaaaatccaaatgagaactaaataaagtgttgaacatcagctggggaattgaagccaataaaccttccttcttaaccatt

SEQ ID NO: 6533 - DNA, 651 bp, Homo sapiens
  misc_feature (1)...(651): n = a,t,c or g
cgtcgactttttttttttaaacatataagaaagcctttaattttgtcaccataaacattatactctgattgctcacttacagtataaaatattcaccccgctaaataaataagacgacattattgcaaacggcacttaaaccccccctgagagataagacctcccttagctcaggcagggggtgctcctgagtttctgtgtgagattccccaagcacagatatactctgggggctgagatggacaaaggcttgggaaaccgcactttgtgcttctggtcctgcagtagctccaaacagggttgtggagctggtggggaaagttgggggtaggggaaagttgggggtaggggaaattttgggcagtgccttcatcagcccagtcctagagagagtagaggggagtggaagtggggggaaccaggctgggccaagagaagaggggtggttagggaagccgttgagacctgaagccccaccctctaccttccttcaacaccctaaccttgggtaacagcatttggaattatcatttgggatgagtagaatttccctcgtgccnnnnnnnnnnnnnnnnnnnnnnnnnnnnnnnnnnnnnnnnnnnnnnnnnnnnnnnnnnnnnnnnnngggtntccaangaagggnnttccaaa

SEQ ID NO: 6534 - DNA, 356 bp, Homo sapiens
gagcaagcgagccctggggggcaaagagacgggagagtgggtgtatgcgcgggtgaagtgagaggtaacggggcctccgggcggagaggcctcagtggctcttgtcaccccttctcgcggctgaacctttggagccatggtgaattcgggcctctccgaagccgccgccgccgccaccgccactactgcctttaccgtctcctaagagtgaggagcgcggacgaggtaagcgaggaggcggcggctggatcggtggagacagcagccaccatgtcggatacgcggcggcaagttgaaggtctataccctgaacgaagaccggcaatgggacgaccgaggcaccgggcacgtcttcc

SEQ ID NO: 6535 - DNA, 177 bp, Homo sapiens
gaatgcctggagcatcctggcactctatactctactgagtgcctctcttcagcccctcaccctgcttccacacacacacacacaaaagcaaaggcactgaccagcttggctgcagggcaagctgccttgcagctggatttgcgacttttttttgtcttaaaatttttactggatcag

SEQ ID NO: 6536 - DNA, 428 bp, Homo sapiens
gttttttttctctgcttgataaaatggggctcattcctaaagccagcttgctgagacactaatttcagaagctcacttgtcacttgtttaacctctgagaatactcaggaacacatggttcccagcagcttgggctgggtctttatggaagtgaaatgcacatagatgaacacacgcactcacgtgcgcacacacaccacacacacacacagacacgcagtcacacacttccatctgtaaatatatttctccccaaagaaatggctcatctttcctgaggacattcctaatagactgataagccttctaaaaaaggcttttggtgcaagggctggcctggggatttgggtctgggagctcatggaactgaaaatgtctcacctgtactgaaagagggggttgggttggggacattcaggaccagctgt

SEQ ID NO: 6537 - DNA, 300 bp, Homo sapiens
aagaaagcaaggacagtgggggtgcagctgtggctgagcaggtgcttagcatcatggagatcattctagatgagtccaatgctgagcccctgagtgaggacaagggcaacctcctcctgacaggtgacaaggatcaactggtgatgctcttggaccagatcaacagcacctttgttcgctccaaccccagtgtgctccagggcctgcttcgcatcatcccgtacctttcctttggagaggtggagaaaatgcagatcttggtggagcgattcaaaccatactgcaactttgataaatatg

SEQ ID NO: 6538 - DNA, 1818 bp, Homo sapiens
  misc_feature (1)...(1818): n = a,t,c or g
tttttttttttttaaaaaacaagctttaatccatttcataaaaattgttcttgcaattgaacacagccaggcccacatgcccagcaggttgcaggagacagtttcacattttccaggctcaggacagggcagtctcctccacatgccacaggtgtctgagtgacagtgtagacgcctgatgggcaggaggtaggcacagatgatctgaaggggtcatctatttaaaagtctgcaactccagttcaacggacaccttaaacactgtcaggcacgtaccccaagagaaaattaagcccagagaagaaaacctcaggcttgagagccctgtacccctcctcaaccgctgccacctgggaccagggccagcctgaggcaatgggggcacctgaatttgccccaaagggctccctcattcaaatcacagatataggcacagctttaggattcagcagggcagggagggaggaagcaggcgtgagctgggccacagctttgaatgacctaccagcccctggcgtcaccaagaactggtgtttaatgaggggaatgaccaccgccacacagaactacctagccaagcccctccccagcagctgcctccctccctggatgaggggagttgtgccgggagtcccagaaaggaggcatcgatgccccagcccaaacatgatgtcgactgcagggacccacaggacacatgtccctttttcaaaaaatactaaggcaaaatgataggaaactaacagacgtggcccctcagagtgatgaaacccacgtgtctgcgggccagctcgagccacagtcgcgccaacaagcgcatgaaacagttaaatgcacactcccaacagcggggcccccgggctgctcggagctggctccagctgctgtcactgtccactgagaaaggccaagtgccctttggtgcatctgttggcgtagtgtcctttctcgccacacttgtaacaggtgacctgctccagtggccggggtccccggttgcccgcgctgctgttttgactctgcatgaccccgatgacctgcggggttctctgctgattgggagaagagttctgactcgttaactggatcaaggaggacgacctttgtaatggcggattgttactttgctttgctggaggctgtgtctgctgcggcagtgggggctgctcggtggttcccatgggcagttcaaatcgagggtgcatgaatttacacgagggcccctccgggcagaatcccacgaggtaattcacacagatgactctccgtgtgtgccggtgcctgcagaggggaccgtgcttgcagaagccacggtcataccaaggacagtccttgatcttggactcggggtcgatgtgcaaggaagggacattccttgttgctgcactccccgaaacttggaagtagaagtagcactcggggcattcttggtcatgtcattactcaatgcaaggaactcacaacttggtcccctttttctttgcataggccaacgcaagcccagtgtttgcacacaaactgtcttcttcaccactgatgtggcgaaacgggacacatgccccctttttccgcaggcagctttcaaaaagaattcacagacagcagcgcccgactttgtccatgccggggaacgggcaggcgtgcgcccccagctgctgctccaccgcgatctcaaagtnaaacttgatgtgcncccacgcnnnngttttcntnccngnatggngncgncnncgcaccacnggccccggctccccctcggtctcntgcagccttctcgcntttaccccgnngcnccccgccgcacacactcctccttcg

SEQ ID NO: 6539 - DNA, 476 bp, Homo sapiens
cacagggaggtgatgagggcggacatcccagcctcctttctgttcttagtgagaaactgttcagtcttccgccatcggttgtggggttttcatagatatcctgtattaggttagggaagttccctctattcctaatttactgagtgatgttttttaaacaaatcaggaaccgacgttggatttttcaaatgctttttctgtactgttaaaagaaaaaccttagacaaattaaatttaacagagtttaattaagcaaagaaccactcgctaatggggcagcccccaaaccaaaataggttcagagaggctctggtgctgccgtgtggctgaagattggtggacagaaaagggaaaggaggcacagaaaacggaagcaaagcacagaaaccgccagaggggctgcagctccatgcttgccttatctgaacacggttggaatggccggcacccttgatgagcggaaacctgggtgttgc

SEQ ID NO: 6540 - DNA, 368 bp, Homo sapiens
  misc_feature (1)...(368): n = a,t,c or g
tgccacttgccttgtaaggttattgtaaaattaaacagcaagtgtacaagcagtcagcacagccctagtacataggtgttgcacaaatgctatcattcaatagaataatttgtaaataccttgcgcctccttcaaagttagttctcacacaagcatctcatttttaaagtgtttacatagtatatattgtaagaatgtattgtgatttatgaaacatagcctttttaaattttgtttctttctgtcatttaaaaataaaagcaacaaataacaggatagcttcctactatgtatcaccatatttccctcccaaaggactgtactaatntgctgttctgtcagtttagactttatcacttaaatatttg

SEQ ID NO: 6541 - DNA, 360 bp, Homo sapiens
ggccccgggattcctaaatccccatcctggtcacctagcctacccctcagaaagggttccacctttttgaaccctcagtctccttgaaatttaaaattgggacttgacagtctctgtaatgttgcaaaatctgatttaattctaaatttctgtgtttatatgtttctaaaaatgaatgggttctgttttttcttttgtttggcctgtatttatattactgcaaagagaagagtttgatttagactgtttagaagcaacctctttttttccccacagtgtttttttatgttgtccagaaaagcagccacacaagttttgacttaaatatataggttttattaaaacaaaagctgttaaaac

SEQ ID NO: 6542 - DNA, 2111 bp, Homo sapiens
gcgcggaagtggcggcggcgcgcctggcctggcctggctgaggggaggcggcgggcgggcgcgatggcggaggccgggccacaggcgccgccgcccccgggcactccaagccggcacgaaaagagcctgggactgctcaccaccaagttcgtgtcccttctgcaggaggccaaggacggcgtgcttgacctcaagctggcagctgacaccctagctgtacgccagaagcggcggatttacgacattaccaatgttttggaaggtatcgggctaatcgagaaaaagtccaagaacagcatccagtggaagggtgtggggcctggctgcaatacccgggagattgctgacaaactgattgagctcaaggcagagatcgaggagctgcagcagcgggagcaagaactagaccagcacaaggtgtgggtgcagcagagcatccggaacgtcacagaggacgtgcagaacagctgtttggcctacgtcactcatgaggacatctgcagatgctttgctggagataccctcttggccatccgggccccatcaggcaccagcctggaggtgcccatcccagagggtctcaatgggcagaagaagtaccagattcacctgaagagtgtgagtggtcccattgaggttctgctggtgaacaaggaggcatggagctcaccccctgtggctgtgcctgtgccaccacctgaagatttgctccagagcccatctgctgtttctacacctccacctctgcccaagcctgccctagcccagtcccaggaagcctcacgtccaaatagtcctcagctcactcccactgctgtccctggcagtgcagaagtccagggaatggctggcccagcagctgagatcacagtgagtggcggccctgggactgatagcaaggacagtggtgagctcagttcactcccactgggcccaacaacactggacacccggccactgcagtcttctgccctgctggacagcagcagcagcagcagcagcagcagcagcagcagcagcaggcagcagcaacagtaacagcagcagttcgtccggacccaacccttctacctcctttgagcccatcaaggcagaccccacaggtgttttggaactccccaaagagctgtcagaaatctttgatcccacacgagagtgcatgagctcggagctgctggaggagttgatgtcctcagaagtgtttgcccctctgcttcgtctttctccacccccgggagaccacgattatatctacaacctggacgagagtgaaggtgtctgtgacctctttgatgtgcctgttctcaacctctgactgacagggacatgccctgtgtggctggggacccagactgtctgacctgggggttgcctggggaccttttcccacccgacccctacagagcttgagagccacagacgcctggcttctccggcctcccctggaccgcacagttctgggccacagctcccgctcctgtgctggcacttctgtgctcgcagagcaggggaacaggactcagcccccatcaccgtggagccaaagtgtttgcttctccctttctgcggccttcgccagcccaggctcggctgccacccagtggcacagaaccgaggagctgccattaccccccatagggggcagtgtcttgttcctgccagcctcagtgtcttgcttctgccagctccttcccctaggagggaagggtggggtggaactgggcacatgccagcaccacttctagcttccttcgctatcccccaccccctgaccctccagctcctcctggccctctcacgtgcccacttctgctgggcctttagccctagaacctgcaggtggtgggggcggctaccaagaaggaacagaggtctctggggaggagtctgggtggtccagccctgatgattggccccacctcctgctgccccataaccctctcttcatttcggctttttcatttaccctcatttagagccatttgcagagatttagaaagatttacagtaacgaatggattcctatataaagattatttttatactttttgcagcaaaaggaaattgtaatatttgtacagtgttcaagtgaataaaaaccatgcctaagg

SEQ ID NO: 6543 - DNA, 793 bp, Homo sapiens
aacatccttagagggatgaaatctcagcatatgttgcaggacaccaaaaggaagaaaacaatcaagcaaataaaataaacagtcaaacaaaccaggagtttaaaacaacaaccccaacaacagaagccttggcaaagaggaataagtgatcagcaagtgaacacactctatgtcaactctccttttatccagctgagatttatggtaacttatttaattaatggtcctgtctgatgcatccttgatggcaagcttcaaatctgatttggtatcaccgaggaaaccttgcccccatcactcagcattgcacttagatacagaatgagttagataaacttggcttggtctagagacccatgtcatcttaacctaaagggaaatcttattgcgttatcataaaattgatgatatcttagggtcagaattgcccttttttttttattttgaatgggaagttctcactaaaacaatcctgagatttcttaatttcatggttctttaaatattataaacacagagtcaacatagaattaaattgtatttgttaaaatacacacattggaggacaagagcagatgactacttttcgaagtaatgctgctccttcctaaaagtctgttttcaatcctggtaatattaggggcactgcggcacctaagaagccttaaatgagagctaatccaatctagagagcgatggtgtcagcatttcggtctgcatatctgtgtgtccgtatctgcgtttgtgtgcgtgtacgtgtgcccctgtgtgtgggcccagttttcaggcatgt

SEQ ID NO: 6544 - DNA, 753 bp, Homo sapiens
ctgggtggactctcagcagaagcggtatgttccagtaaaaggagaccatgtgattggcatagtgacagctaaatctggagatatattcaaagttgatgttggagggagtgagccagcttctttgtcttacttgtcatttgaaggtgcaactaaaagaaacagaccaaatgtgcaggttggagatctcatctatggccagtttgtggttgctaataaagacatggaaccagagatggtctgtattgacagctgtggacgagccaatggaatgggtgtcattggacaggatggtctgctttttaaagtgactctgggcttaattagaaagctattagctccagattgtgaaatcatacaggaagtgggaaaactctatccactggagatagtatttggaatgaatggaagaatatgggttaaggcaaaaaccatccagcagactttaattttggcaaacattttagaagcttgtgaacacatgacgtcagatcaaagaaaacagatcttctccagattggcagaaagttgatataggtggacttttttacaggtcagttgaggcaaaaaactatgggttttttcaggtgaacctcccccatttaaatactcagaagataaggtgtgaatgtatgtattattagagtccgaaagtatttttataagttactggttttcacccacgcttttgtgggagagaaaatcattgcaaaatcattttttttgttcggtacaataaagtttactaaaaaacag

SEQ ID NO: 6545 - DNA, 208 bp, Homo sapiens
tagaaatcaaatgtcattagtgaatgcattacaaaaacataactaatttgataaaatatagtcagctctactttatcaaattagttatgtttctagaaatcaaatgtcattagagaatgcattacaaaaacagtagcctaagtaggacaaaaagagtttcagactatattttttgtccttaaaatgacctgtcttaaaaaagtcgacg

SEQ ID NO: 6546 - DNA, 943 bp, Homo sapiens
ttttttttttttttttttgggtttgagagtttaatctgtgctctggcgcccacagtgctgcagcccctcatgggccagagacaggatgcacggggactcccagcccctacccggcaagagaggcatcactgaggctgcatctgccatgcgctcctggtgtgactgcaccctgtcaggccagacccggcttgagccaacttagccaagccagcgtcagtgtcaccagcctcatgggtggagccaccctcatgctgctctgcagaccctctgaacccgatatcccaggcctggggaggtgctgaaggctcaggacgcctcttattgctctgaagtctttgtgaccaagtggagtgctgtgactgtggggccaagagagaagctgccaggtacagggaaaggcgctggtagggagccagccagaaaggtgcagcatcccgggatggccctgctgagtctgctgtcaggcctgtgaaaggtcagcagagccaaggagcaggcaggagaggctggagccccgccccaaaaccttggcgagctggtggccctgccaagtcctgctggccactgaagagggaatccagggcaaggccaggtgacctccctgggccaccagtctctaacccctaccccagcctagggaaggggaggacaggaagagactggatgctttgtaaaggacttcctgttcttggggacataactctcgtcccctcccagagccctggatgactgacaggcattccttggccaacacatgcttgacgcgcgctgctggctgcagggcacctggatgacaggcattccttggccaacacatgcttcagccgcgctgccggctgcagggcacagaggctccttcagtggaattttgcctacgacacagagcacagctattaatacacttaaaattcaaatccattgcctgacacagttgttcaaagtt

SEQ ID NO: 6547 - DNA, 889 bp, Homo sapiens
gaatttcagtcaacagcagcctgtgaagaacactacatggcttccatacgtaggtctgtttccccatcactttcagtttgcactagtcctttaccttcagtcttggacatcctacctccaactgatctttattttgagcagcacagtccaattctttaactaaaggtgaagggatcgctgcactgacgttcttcccctttgagaaaagaatcgtaattttaagagtctgaaggagtttagtggtcacctagtctctcctcccttgatacctctactgatactttctactcaagcattggggaaggcttttttagaagaatcttatcttcaaaaattctaccttttttaatgtgtgtatttgtggccctcagaagttcctaaattctatacaaagaacacaaaagtttctggagggtggaaccgggcatactgaagttcaagccaatgtaatttgcttttgggagtgcagagacctactgcaggtggcagatgtcccactgtccacacaccgtgcttagctacactactattcttcacagcttctaggaattacatttttttttggtagtttatgggcagtggtgcctaaatatagttgtacctccaaaggtttcagaacaggaactgggaatcctgagaatcttgtgaaaatatcctcttatgcctcatcacaaatacaccaaatcatctctagtgataggaccctggaaatctgtactttcttaaaaggttcttcaggtaaggtttgctgaggtttattacaaatgtacccttgatttgatgctaatgctgtatttagggctgaaggaagcacacactaaatatctgagtgcttttcagattccatctatgctgaaaaagaatctaggagaataaacacatttcaata

SEQ ID NO: 6548 - DNA, 274 bp, Homo sapiens
  misc_feature (1)...(274): n = a,t,c or g
gtattgatttgtgtggatcaggttaaatgtgactaatgcttttctttctttgagaggtatccttacaattccatgatgttcttagagatctggccactggtcaaacagtacctttctgaagtactgaccttctgagttgtcctttctttcttgagccaacattttgtacttcaggattcttttttctcttgggggggcctacccttcaacccaaggtaaaatactgtggattagggagggaggagagagtnggagcccgggggaccagtgactt

SEQ ID NO: 6549 - DNA, 2040 bp, Homo sapiens
gtgtttttttcattagtagctgtttattgatcaatggtttgatataaagttatttcagatcttcagacttttgcccagatggaatcacaagcattacaaagtttttttcttaaaaataaaaaaaggataggggcaagttgggaggggaccaacctagcagtagtggcatttgagaataaattaacaaaaaaatttagtattaccatttattgatgacaaacacttaagttttacttacattccatggggagaaaaattccagcgtaaacaatgaatggaagcagtacttaactcgcagggctaccaggctttccatacggaccacacgcagagcctcagtgcacacacttctgtgtacagtaacacaacatcaaaagcaacacagctgtatacagaaacgtaggtcattcttttcagccctaatggagatgtaattaacagtatcgagcactctggaaaatcactctgcaggtttatatggactacatggagatcatatcctgtagtgtagtgaaagctaagtcctcaagagccatatgtatagatacacaatgttttttaataatctttaaaacagagatcaaagttcatttaagtcctgtttgcattaacaaaaataaaaatgaaataaaaatggaaccaaatgatcatctaaagtttaaaattcctaaattgtccaatttatacaactgtgggagacttattcaaggtttttgaaagtccaggactgtttcagctgaaccagagggcacacaatttgcatcactgaaactgtcctgggttagtcaatgaaataaaaatgtctaaccacatacacatggatatgatctttgtcggttagattattgataaagtcagtctcagacaagtttccaaactgtgctatttaactagatacaattgagaaattctcaaatgaaaattttatatagtgtcatatcaatcaaaagaaaataatgaaactaagaatacagatcactgttggaagagaaagcagtggtgatggtgtgggtactgcaggaggtggtggggccgtggcacactagaaaagttgggtcacgctgagtaggaagcatttgattttctctggtgcttttagctctggggccggtcaaaggcctctctctggcatggctgtccagggtttgtcccaatgtgtctgagtgagccagcttgagaaggggtcgtgccgtttcttctttcacacaggggaaaaaaaagaccaaacacggaggtgcccagggtgtggatctgctggtgtcccgggagaaccagctggcttgggcagcccttcttccccacaggcagctgctattgcggtagggaccgccaggtcaccgagtggccatcacaacaaaccccagcacagtccagcccggccacagccgcctccttgtgtttctgttgtcttccctgctgctgcccacatcctttacccaccgtgtctctcggcccactggaggtatcagaaattccaaattttcaaagcagtttcagtattttcagtatatatgttgggattttataatggttcatggccagaaaaggttcagcacctcccacacacagacattggtccgtttcctgttcttggcatctctgtactttgttggtccaactcagacagcaactttaagatgttcagcgcagccatatcatggcaggactccacatccttgccgataccatggctgatcagaggtggctgagaggagcaattgataagagatacaaattcgttcttgttgtttttggggaagtctttgtattcaacctggaatccctggactctggaaagatagtccagttgctcagagggtctcgtgagaggtccatggggtacgtggcctgaagagatgttattctttaaaatggtctcggctgtgggcgagggtgcccccatacaacaactctcgggctatcatggcagttaccgtggccttggcaggattcggagctgccctggtaaaatctttggtgtgatgtccttgactaactcctacagcctgggcgacctcgggcaccatgggaagaattcca

SEQ ID NO: 6550 - DNA, 585 bp, Homo sapiens
  misc_feature (1)...(585): n = a,t,c or g
cagaaaattttattagtgaattttagaacgtttaaatgcttaagaaaaattggattttctaaatttgttttcaatgcgtgaattgaatgaagtgaaaattaaacaaaatacatatagttttgagtattctatgtccaaaagtccctctgacaattaaacaatcagtttacaaattcacacttcagaagagaaagtccataattactgaatcctaataacccttattagaatccaaaggaataagtgattttaaaagcacatagaaagacaaagcttgaggttatctattctgaccaaaaacagtacataatttccttggttttaaagacaagtgaatcacaacttagtaggaatcacatttccatattaaccagctgggtagatgagacatgatgtttgattgagactaccacatagtctctcctcttccnnnnnnnnnnnnnnnnnnnnnnnnnnnnnnnnnnnnnnnnnnnnnnnnnnnnnnnnnnnnnnnnnnnnnnnnnnnnnnnnnnnnnnnnnnnnnnnnnnnnnnnnnnnnnnnnnnnnnnnnnnnnnnnnnnnnnnnnnnnnnngaagcggcacgag

SEQ ID NO: 6551 - DNA, 206 bp, Homo sapiens
tggccttcagtggagattttctttgaggcacagtgtcatgcagtggttaggggtggtgcgcaaagtaatacaccttgcaagttaggcccaggtcccccacttcctcagagagggaggagggataatcttgagacacatggtctttctgagtccatctcctctcaggcagaatggacctcccaggaaaactctcctcataggaggta

SEQ ID NO: 6552 - DNA, 550 bp, Homo sapiens
  misc_feature (1)...(550): n = a,t,c or g
cccgtccgcagtgtggaagggacccgggcaagttgccgtgttggggttttaagctaaggtgttattacaaaggattcagaagttaagaattttaaagttttactttttatgtagcctaagtntgtttataaaggctacagtgatgtacaataatgtcccttcatattcagtcaccactcagagcaacttccagtcccgcaagtgcccaatataggtgtaccaattttccttttatattgcatttttactgtaccttttctatgcttcactatgtttagaaacacaaatacttaccattggtgttaatcactctcatagtattcagtatatagtattctcttataggtaacatggccatacaagtttgtaggcctagggagcaacaggccataccatataggcgttggggtattagggggctataccacctanggtccggggnaagtaaccccttaatgatgtttgtagcaacaatggccatcacctaacaggggcatgtctcagaatgcatcccatcattaagcaatgcatgactgtaactggaagctcc

SEQ ID NO: 6553 - DNA, 537 bp, Homo sapiens
  misc_feature (1)...(537): n = a,t,c or g
aggacagcagcagactgctgtgaagctgatctgggactgaggaggaggtcagactagagataaagattcagacctattggcaatcccaacaagtaaaagctggcagagaggaaggaacagcagcaaatgcagcagcagtggtaaacaagctaggagggaaaaaaggagggcccaggtcacagaagcccagagagggcagaggttcaatgggagactggtcaaatgttgtggagaagttggaaacctcgggtatggaaggaggctattgcatttgacaataattccgaccttttctaaagcggttttggtacagctgccttatgagagtgggtatattgtgcagtactaattagcatctccatccttagatgtcaaataactacattgggaagtaggatttcagaacattaattattttatttaaaagcttattaaggggggtttcaagtctatttaggtttagttcattggcaaatattaaaggcattattttaaaaggtattgncaactaatttacccctgttaattttncaaatc

SEQ ID NO: 6554 - DNA, 422 bp, Homo sapiens
  misc_feature (1)...(422): n = a,t,c or g
attttgtcctgtcttgtggatgttccatggcggacagacaggctgaacaaacaaagggtgtgcaaagaagcccagagcaggagagaaggctccccagcctggctcttggtcagcacaagtcacaggctggctctgcctctcttggctgcactgtcctgaagcaggaaatatgannnnnnnnnnnnnnnnnnnnnnnnnnnnagttggagctatgataacattatctgcaaggccaggcaggggccccaaagaaatgggatccaagagcagggacgagaaaagcaagttcttagtctccccctggaattctttnnnnnnnnnnnnnnnnnnnnnnnnnnnnnnnnnnnnnnnnnnnnnnnnnnnnnnnnnnnnnnnnnnnnnnnnnnnnnnnnnnnnnnncccatctatgcaggatggcaaag

SEQ ID NO: 6555 - DNA, 1152 bp, Homo sapiens
  misc_feature (1)...(1152): n = a,t,c or g
ccctcaaattctgagtcacactttatgttacgttaatatgtcctgggctctaccctgctctggttttatatttctggtgctatattctgggtcttgcccctcatcctgtgcttatcaagttgtctaggcctcaccagtgtccctactgtaggaaatgtggtcctcttaacagctctgctctgtttcagtaactctctgtcctggtatggtggggaatcctacatccagagcatggagccaggggctaagtgctttgcagtccgctctctgggctgggtagaggtacctgaagaggacctggcaccggggaagagcagtattgcagtcaataactgtatccagcagttggcccagacccgcagccggagccagcctccagatggtgcctggggtgagggccagaacatgctgatgatcctgaagaaggatgccatgagcctaggtgaatcccctggaccacagtctgatccactgccagcctctgggtgcacatccgagtgtgggccgtggggagctccaagggccgggacttcgcttttgtggcaagtgacaaagatagctgtatgctcaagtgccatgtgtttcgctgtgatgtccctgccaaggccattgccaggtgccctacatgggctttgtgcccagatcttgtcagagcgagtagaggtcagtggtgatgcctcttgctgctccccagaccccatctctcctgaagacctgccacggcaagtgaagctgctggatgcggtaagccaagctgctcagaagtacgaggcactgtatatggggacactgccagtcaccaaggccatgggcatggatgtgctgaacgaggccattggtaccctcaccgccaggggggaccggaatgcctgggtccccaccatgctcagtgtgtctgactctctcatgactgcacatcccattcaggcagaggccagtacagaggaggagccattgtggcagtgccctgtgcgccttgtgacatttattggtgttggccgcgacccacacacctttggcctcatcgctgacctgggccgtcagagcttccagtgcgcagccttctggtgccagcccatgcagggggactctctgaagctgtgcaggctgcctgtatggttcantaccagaagtgtcttgtggcctctgcag

SEQ ID NO: 6556 - DNA, 455 bp, Homo sapiens
  misc_feature (1)...(455): n = a,t,c or g
caccttcaaggcctgcacgctgctgctgctggtgctgttcctctacgacatcttcttcgtgttcatcacgcccttcctgaccaagagtgggagcagcatcatggtggaggtggccactgggccctcgggactcagccacccgtgagaagctgcccatggtcctgaaggtgcccaggctgaactcctcacctctggccctgtgtgaccggcccttctccctcctgggtttcggagacattttggtgccagggctgctggtggcctactgccacaggtttgacatccaggtacagtcctccagggtatacttcgtggcctgcaccatcgcctatggcgttgggcctccttgtgacattcgtggcactggccctgatgcagcgtggccagcccgcttcttcctcttacctgggtgccctgcangcttggtgaacgaagctgcgttgttgggcttcttg

SEQ ID NO: 6557 - DNA, 2058 bp, Homo sapiens
  misc_feature (1)...(2058): n = a,t,c or g
cgttacctactctgtacatgtatctgtcatttagctgtttctcaagatgatgttcagcagttggctgcttagaaatctttttcaagccagtttctaaagacatttgtttaatgttctaccatagaataatgcacaccattgtcaaagatttgattattgtgttttatagtaagtccatttgacatttatttccctttcagtttattttccttccttattttgttatacatacccttccctttctcccctgcctttcggtacattcattcctcttcctctaccctccagcacatctacttactggtgctgtgctgagtgtcagaagataaaacaggtgtattattgtataatgaattttgtatacatgtttatgaaatggtgagatcaactaaaggaggcatgttcataacagtgtttattatcagcagctatgtcccaggaaaaaaaaatgggaggggcaaatggctacagttgtaaatggataacatcatttagaaagccgaatttactgttcatctgagcggttacctggagtattatatctatgcactggtgagcatctcctgattccacttacttttctccctgtgaacagtttaccggtgccatgctgaagagaaagacatctaagtgataacatgaatgaagtcttaaaatttaaagtatttttactgctatataaactaaagactacattgtgcatattttgttaacactgtctcttgttatgataaacactgaaatagcatgttaaacagttgcctatactttaatataatcagttggggaaaactggccttttctcccccactgtatgattgtttcttgaaaggtaaattgctaattttatacagtgtaattctgttcttcacaaaataggtttcattattctatatttaaactgttggtcagaaaatgatctgcaattcaagtaagtctgcattacttttttctttaaaaagtactttaacatgccttatttattatattagcaaatgagctaataacagatgaaattttcattttttgacagatataaccttgcataagtagtatttagggtgattttgatactatctttagagttttgcattggatattaaaaaatatattggcacaatgtattggaagaaaatgagtagtatctggtttaatttttaatatttagggacattttaaaaaatcaatgttttaattagactaaaaattctttatattttttatttactttttaaagaaacatctgtcaaagtaatattgattccaaactgatgtttgtgtgaatttacatgtctattttcatgaactaagaatagagtttctttgagttgaggagaaaaaaatatatatgtgggtccatttattaggttaaagttgacccattcagtgtaaaaataaccatagtgtgtgagctaaagaaaaaaaaaagtaaatttctcctttatattctaagangctttaaaagaacaattcaggggttattgataactgctactctgtcggtcattgtctctatatgcagtaaaattttatggtccctttataggaatataaaaggaattccaaaacagtttttccaaaagatttttttccttggacataaaaaattttgatgctattctatttttgtttttattacagcttaactgtatgctgttaaactctaggatgtatctgaatctttccttttttcccccctcctccaaatatataaatctgtgctctcacatgtaatgtatttaatttttggaaaatttaatgctatatagtaaatcaagtgtgtgatttaaagtaatcagatcactttgattcttttaagttttcagaatttcttttttccacaggtaattttggagaaaataattaccaattaactgataataagcacgctgtcctctgctgtaaaaagtctgaatagatactgtgtatgtttttatgtccatgaacttgagctactcgtgtgcaattatgtgtatgggaatggagtagtgttcatgatttgtatctacatcatcatatggatgtatatttattaataaagtcattactttaaaacca

SEQ ID NO: 6558 - DNA, 259 bp, Homo sapiens
caggacactatagaaagaagcagctcaaagcaattggctgacactcaattcccccttctttcagaaggaaagaaggaagaagcaaacccccccctaccaaagatgacactcaacaccgagcaggaagcaaagacccctctgcaccggcgagccagcaccccactgcccctgtccccacggggccgccagcctggccgcctgagcacagtgccttccactcaatcccagcatccccggctgggccaatcagcctccctca

SEQ ID NO: 6559 - DNA, 906 bp, Homo sapiens
  misc_feature (1)...(906): n = a,t,c or g
tttttttctgtgcaaactacttttatttataaggaaagtttctctattttgtttataaacattaaaccagtgctgtgtgaaggcacttaattggggagaggtggggcagggatcctggtagagaccaatgtttcccacccagaccccaagactgctgggagagatggtgtcagcagtgactcccaggaatatccagtggtgtggtggcccatcccaggcccggctggcgaggcnggctggcttgctggggcgatgtgatgatggtggtaggcatgggaggcactttggacgggatctgatttggcaaaaggaagtggtttccctgtccccagtgatttccagcccttcccagacctcccaaggctaaggcagattactaaatttaaggctggggccctccttcttcccctggacttccaggagaacagagaaccggtggcaaggaccaccaccagcagggtgaggggtgcagataaaggcagcaaaaaaacagagggagaggtctggagggaaggcaggaatgcttgtttctgtcagcctcagaaacctccttctatcctgctagactttactcctttgaggcttcaccctggggaacagcccgaagtagttccgcggcacgtagccctcctggccgtgcagcgcggcccaccaccagtcggtctcctccggcccgtccctccgcagcacggtgaccgactcgccctcgcggaaggacagctcgtccccgaactcggcgctgtagtcccagagagcgtacactgccccgctgttcatcagccccatactctgctcgacgtctgccaggtaggtggcgcctcgtgccnnnnnnnnnnnnnnnnnnnnnnnnnnnnnnnnnnnnnnnnnnnnnnnnnnnnnnnnnngtcanagggttcaannnnncac

SEQ ID NO: 6560 - DNA, 1519 bp, Homo sapiens
agccttatcaaccagcccagccgtatcccttcggaacaggggggtcagcaatgtatcgacctcagcagcctgttgctcctcctacttcaaacgcttaccctaacaccccttacatatcttctgcttcttcctatactggacgagcgctgcactaacgcaggatccggctgccgaagtcctcgccagcacagcaccaggcctcttcacctacctccagccctgctacttctttccctcctcccccttcctctggagcatccttccagcatggcggaccaggagctccaccatcatcttcagcttatgcactgcctcctggaacaacaggtacactgcctgctgccagtgagctgcctgcgtcccaaagaacagaaaaccagtctatccaagaccaggcacctatgttggaaggtcctcagaatggttggaatgaccctccagctttgaacagagtacccaaaaagaagaagatgcctgaaaacttcatgcctcctgttcccatcacatcaccaatcatgaacccgttgggtgacccccagtcacaaatgctgcagcaacagccttcagctccagtaccactgtcaagccagtcttcattcccacagccacatcttccaggtggccagcccttccatggcgtacagcaacctcttggtcaaacaggcatgccaccatctttttcaaagcccaatattgaaggtgccccaggggctcctattggaaataccttccagcatgtgcagtctttgccaacaaaaaaaattaccaagaaacctattccagatgagcacctcattctaaagaccacatttgaggatcttattcagcgctgcctttcttcagcaacagaccctcaaaccaagaggaagctagatgatgccagcaaaccgtttggagtttctgtatgataaacttagggaacagacactttcaccaacaatcaccagtggtttacacaacattgcaaggagcattgaaactcgaaactactcagaaggattgaccatgcatacccacatagttagcaccagcaacttcagtgagacctctgctttcatgccagttctcaaagttgttctcacccaggccaataagctgggtgtctaaaaggacagcttctcttccactcaatattgccatttttccaaagaaacatgttaaaaaaaaaaattataagacatggactagtcctcattagcatgtttgcatagcaaccagtcaagagcatttacactatttctgctgatatactcaccttagaactgctcagaaccctggtgctttatttttgttttaatcttttgttgccagtgatgattttcctattctgcaaatagtgtatttcctggattacacatagtatggtttcctgaagtattctgataaatgtgttttttaaaacctcaatacactttttagaaaaggagcatctggttatgcataaagcagagctaaaactaaatttctttcatgtcctccctacttcctcagtgtcaatcagattaaagtgtgtaatcct

SEQ ID NO: 6561 - DNA, 1417 bp, Homo sapiens
ttttttttgtgtttccagaagagaaatttaatctaatttacatacttctaggtacatcgataaccaaaatgtggccactgaaaaaagttaaaaggtcaatcagctcctggcttctagctggcccaggattgcaaaaaaaaaagatccacgttccttattctctacacaaaacgcgtttttaaaaaagtgaaaggtctagggagctatacatagaaagcaacagtgaaaagggagagggagcaggagtaggggaggagagtcccaccccccaaccccaccctccaggggccccagagcacctgaggctactttggggggccttgacatggcaggaggcagctgtcagctctgagctcttcccagctgggaaggcccctctcggggcgagccaacaaggatttccgtggcattgtgggctcagtggggggctcccaggccccagcaggccccacagagggagcgtggcttcccctgagcaagcaccgtggcatgatgtggtcgttcaacccaggaactgggggtccggggcaggtcccgggtctcacgaggtgcgtgttgtgtgtgttcgcatgtacatgtgtgtgagaggatattcatgggggagagagggaaccagaacaggggtctttggggtctttgcaaatggccacggatggcagacatcgccctgcctggctgctagacgggggagtgctgtcctcccctgtgaccagaccggctgccatcagagacctggctgctgcccctgctggaccaggtgggcatgggctgaaggaagacaccctgtggccccagagtcctcgggctgggggaagggcagctagctggctcccggcgccctggctgtagtgtgcccggcccccaaggggcgccggtttgaggttttggcttgctcctttggaaacggaaagaaagaggaagagggacgaggacacagaggaggaagaagaggagacagaggtggcacgagaggggatctggaatgcttttgtgttagggagcctctgccgccgctgtctgtgcctgcggggcctgggactcctcaggtggggggtccgctttggagaagttcatctccaggatgtgccgctgtaagtgccgcacccactcttcctggatggagagggggccctggaattccacctcacagaacctgcatttgagggtgtagatgttgcccacgaacttgacaagtgatgtctgggggggccggggcaccagggaggggactggccggactcggggtgggggttgccgcacctcctccagcttctgctgtaggtcattggtgtcctcgcctcctcgggctgcgaaggcatctggaggacgggcttgtcggcgttcaaatttgttgatgttctgctgctggtgctcctcagccttcacggtgcctggcgggctggctgccaaaggccgc

SEQ ID NO: 6562 - DNA, 803 bp, Homo sapiens
ggcagagataggtgggacatcctgggtctctgagcccacctgttacccaacctgccccagtctcccaaaaagacttctgttaggctaactccttactttccagtggcccagagatagatctgagagttggaagtagcaacagcctgaggaacgcgtatcagtgctgggaaatgttttgtcatcattggggaaaattttgttaatactatggctcttatgcttcccactcttcccttcctccatcattagcattttggtcatagcttaatctccctgagtccttaaccttgaaattcatgctcattagaatagagacagagactagagggattttgtcccatatttggttcagttactccttgacttgcatttcccccaaatagtacaactttgtaattaatttctctcccaggacaccaaaacctagcagtagaaatgtgtgtgttctcttggctgttagatctcgggcaagtggcagtggatctctctgtcttcagccttttctaacttggcttaactgtcccctcctgaaggagcttctagctcaagaaggaggaacttgaaagaacagacacagcttcgccgtgggtggtcgacacctacatgtttgtatctgcacatgttcagtgtgttacttctagatgcttctttattgccttcctatttggacctgtatctgctgataaaactgcagatacacccacaagaagaaaacagagtgaatgcattgtgagaaataactgcatgtctgttttagaatgactttttatttcaaaattaaatttaggataccaaaagaagga

SEQ ID NO: 6563 - DNA, 494 bp, Homo sapiens
taggcctgtgctcctgggctacgagtttcacaagtgcttctcagtctttccccctccttaggtggaacagaatatctaggatgggctggagttgggtactccccttcttccacatggaagactagagggggctagagttgagtatttcccttaccaaagtcagttaagttctgacaatatagtttctcctgagggcaggccttgctgaaaagaacagaatgcttttgtgtgtttcaaatggctacttttttcctccctctgtcagaatcagggcaagatttttcttcgacatccatcgtgaggacccagtcaagctcctggaagtaaaactaacaaaagtgtggagagcccccgacttctcatgactgggtactcctgcagtttttaactctcagacttctctgtagtgagcctccagcagtatgttaattacagtttaggttttcttaccccagtatcggttcctgcagaggtcactgctcatagggtcttac

SEQ ID NO: 6564 - DNA, 729 bp, Homo sapiens
  misc_feature (1)...(729): n = a,t,c or g
caacggcgtccctttgttccctgatcttcaaatcacctgctccatttctcaccaggtggaggccaaaaaggatgagagttggcagggcacagtgacagacacacgcatgtcggatgagattgtgcacaacctggatggctgtgaaatttctctggtgggggatgacctggatcccgagcgggaaagcctgctcctggacacaacctctctgcagcagcgggggctggagctcaccaacacatctgcctacctcactattgctggggtggagagcatcactgtgtatgaagagatcctgaggcaggctcgttatcggctgcgacacggagctgccctctacaccaggaagttccggctttcctgctcggaaatgaatggccgttactccagcaatgaattcatcgtggaggtcaatgtcctgcacagcatgaaccgggttgcccaccccagccacgtgctcagctcccagcagttcctgcaccgtggtcaccagcccccgcctgagatggctggacacagctgagccagctcccacagaaactccatgatacccagcgccgcaaccctcatcattgtggtgtgcgtgggcttcctggtgctcatggtcgtcctgggcctggtgcgcatccattccctttcaaccgccgcgtctcaggggccggcgggcttccagggggtcttncagttgacccnaaaggtanccagaccttttnttgggatgaattcagg

SEQ ID NO: 6565 - DNA, 622 bp, Homo sapiens
ccccctgttccaggaagctcatcctcacctgtgtaggcccctgtagtgacccacgcgtccagcagacgcccacccaccgctagccgttgttcctgtgcaaagtagtgtgctatgcacccacccaggtggccgcctctgggcccaaggcacatgctgtgagcttcctgtgagcccaggctctgctcactgctgtcccgcgtcatgagcaccacctctgctttccctgtgtagatctaggccagtggctgcttgttcttgtggagctgtgtgtgttcttctctgagcagctcctccccggaggacccccagcacagtcccagggagatgacaggaaggaagcaccaggggcaagggcggacgttcaccctgtgaaccacgatggtgaccgtgactgtgggaggaagaactggacccaggacagagcggggctgccctgcctgaaggtcccgaggagctttgtgctttggtgtttccacccctgttgttactcatgactcagtttccttgaccctggtagggtgttccctgctgtgttttccagtgtcctgtgactgtcctgtgcgggccatagggcagggccctgtcccagcagatgggcttgggagggggctccctaaagcca

SEQ ID NO: 6566 - DNA, 351 bp, Homo sapiens
  misc_feature (1)...(351): n = a,t,c or g
ttaagtgctgagtatacagattcattcaaccctctaaccagtccttgtagtactgattcatctgtggtcaaaatctggggtactggtgggttttgtttccaaagggttatgactttgagtgactaaaaaaagatagtttatccttgatgtagggaccatctttgatttctcattacttccccttttgacccctccaaagcacttagcaaatgtcagctaatgaataaatgataaaaaaatggttggccaaaaagacagcatcagaagggaatttttacctaggtgcagtgcttaggcncctatcaggggatttattaaacatatatggggaggggatggacatttctgcca

SEQ ID NO: 6567 - DNA, 349 bp, Homo sapiens
catgcctcaccatcttttaattttttctacatttgaaaattttcttaataaaaaattgggaagaaaggggctttttaaaaagtcattacatgactcgtattgccagcaacatagtgaacttgatattctggagctattagatattcttgctagcatttcgtcgtaccactggtttgcaaatagagaaacctctaagactcttcttactcatttccttgaccaaaataaaactatgaatggaaaatggagtgatgagcagtaagcacactggaaaagtgggatgatcttgaagcaaattgctgataatcacttctgggattcagactgagacttgagcaagcttcaaggt

SEQ ID NO: 6568 - DNA, 351 bp, Homo sapiens
gagagctagcaccatgaataccctgtccagcctcttcctccctccccataacccccagtgcaaggctgtgtgttccaagaaagcactcagtgacttgttgaaggaatgaaaacaccttggtacaaccattaagtttggagatgagccttttcatcaaccaaagatacgaaaaatactccagtagctcatttgtgaaagcaccctgaaggtaaaagtgaataactgcttcattttgggaagcctcataaaatctctttcacaaagaccaaatgaaaagtaccaatccctcaattagaagatattcaggagtctactccagggcttgtgaattaaacgcataaattgtgtttg

SEQ ID NO: 6569 - DNA, 350 bp, Homo sapiens
cgaaaatttactctttcaataagaacctgacaaatacataatttagaattaaatgatacaatatttgtgtctctttcagccgccatcccattctcccttattagtatgaaaatgttagaggtgcttaaaccaacaaaaaagctgccttaaattaatctcctgagaatactttccttctatttccctaactaggaatttgtatcgcctttaagcagaaatcatctccctcctaaggccctgctcaggctgtaactcttgagtgacagtggtcaagttacatgctgacctgggaatctaaatctgcatcttgttccagaggacctagtgcagcaaagcattatactttactg

SEQ ID NO: 6570 - DNA, 104 bp, Homo sapiens
gcctcaaaaaataataaataatagcacataacaattaaccaccttttgaattgctctaattttatttttgagggtagttaacaaatatttagctttcatttggg

SEQ ID NO: 6571 - DNA, 792 bp, Homo sapiens
tttgcagcagggaaatacatgactatgttattggtgaaggtgtcacaacacgcatggtgggggagttgagaagggtcacagaagaaattaggaatttccacatccttgaagcaggtaatttgcaaggcaatcaaattgtgcagctgggagtctaaaagactgagaaaaaaaaaagacaacaaaactagaaaggcacagaaacacgggttcatgatggtgaatgatatagcgggtgacagatggctacaaaccagtcataggccatcacactcaggagcatgtctctcttccatgcctccaaaaatggcaaagagagacatctgagtcaggcagcctgcataggagatgactctgctgtgagactggatgtccacaatcatcttggggaccgtggtggaggtgaaaccgatgtcaggcaaggacaggttggagaggaagaagtacatgggggtgtggaggtgggagtcagggctgatggccaggatgatgagcaggttccccagcaccgtgaccaggcacatggacaggaacagcccagcaaggactggctgcagttctggatcccctgagacttctaggaggaggaatatagagacatctgttagattctgtgggtctgcataatttggacacctttgcctagaaacgagggttgaaaaatgggaaacaagtaaaccaacacctggcattgtgtctgcattttgaatagaagcaattcacaagtaatgttttcagatttcagagcaatccacactcagcaatattttgcagttctgacagactcaattgtct

SEQ ID NO: 6572 - DNA, 504 bp, Homo sapiens
tttttttgagacaaattaagagtcctttatttaagccggctgccgaagagatggctaacgctcaaaattctctcggccccgaggaagggcgttgattaacttttatatcttggtttaggaaggggagggggacttaaatgtaataattctacagaagtaaaaacatgcaagaatcaaaagaatcaaaatggttacagagtgataaacaacttaaaagacaaatggttacaagaagagcaacagtaccaggtgcaagattctaaatctttcattataattagatatagggtgctacgccagacacgaactcaaggctttatgttgttatctctttgagaaaaatcctgggaacttcatatattgttggtgttcgtaccttatcagttaattgggctactttgaaatgctgaggatctgtttacccaggccaactccttacgaaagggggttgggtgaggagcccttagtgtcttgtaaattaaggggtcaattggggtttgtacg

SEQ ID NO: 6573 - DNA, 200 bp, Homo sapiens
ggcaatagaccaagaccctgtctcaaaaaaataaaaaataacttatctgtacatgaatgttaatagtagctttattggtaatagccagaaactggaaacaaatcaggtgttttcaacagtgaatggttaaacaagctgtggtagatacccatggaatactactgagcaatagaaaaggaaccaactattggtacatgttg

SEQ ID NO: 6574 - DNA, 103 bp, Homo sapiens
cgtcagcatgctggtgcatttatttcgggtcgggattcggggtggcccattcccaggcaggctgctaccgcccctccgcttccagacattctcagctgtcagg

SEQ ID NO: 6575 - DNA, 492 bp, Homo sapiens
cacagcttgcccatcggggacatacaaacctgaaggctcaccaggaggaatcagcagttgcattccatgtcctgatgaaaatcacacctctccacctggaagcacatcccctgaagactgtgtctgcagagagggatacagggcatctggccagacctgtgaacttgtccactgccctgccctgaagcctcccgaaaatggttactttatccaaaacacttgcaacaaccacttcaatgcagcctgtggggtccgatgtcaccctggatttgatcttgtgggaagcagcatcatcttatgtctacccaatggtttgtggtccggttcagagagctactgcagagtaagaacatgtcctcatctccgccagccgaaacatgggccacatcagctgttctacaaggggaaatgttatataaggacaacatgtttggttgcctgtgatgaagggtacagattaggaagggcagtggataaggttaatttgttcaa

SEQ ID NO: 6576 - DNA, 239 bp, Homo sapiens
ggaacttgccctcatctcatgactacctctgccccagtcacagttgcttttctcttttcccaaacatcaaaacccttcctgtctcaggttattgtccctgctcttacactatgtacctaaatgatgacagcactgtccctttctcctccttcaggtctaggctcagagatgtctcccatgccctcccacccccatctgaagattcctctggcctgtcagtctctcacgttactcaggaa

SEQ ID NO: 6577 - DNA, 1357 bp, Homo sapiens
  misc_feature (1)...(1357): n = a,t,c or g
gaactagtagttnnccaaaaanntttttttaccaaagaataaatgtactgtattaacatgaagactaatgacaaatgcactgcagtagtaagcacgtcatagatgcatagaatattctctatatagtctgaatatggatataaaataagttatactcattttgttttccatcacagtaggagcatagcatacaaagtgattggttcagtggccatgaagcaagccaggggagagaccacagaagagaatgtagggcattgagtacagtggggatttgccaaggacactgcagagtccctggggaccctctggggaacaaggccccaaacctctcaagttagccttctgagaatagtatgaggtcccacttgacaagagacagtggctgcatctgagctgggatgattcaggcaactggggtggggaggcagagcaggggacagggcacgaacagcatccagcaggctagcccactctcctgctggtgctgttggatgtctatgatgctgggaatatggggcgcagaagccagaaggcacggtttgcttctgtgacgtgacagatggccagactgatggcccaccaaatgctggccggccctcctcccttgccagcctgtcctgggaggctgcagggggcctgcatactttgcttgttctccatagtttgtcattgggtatcaatgctgggatcctgcatacatcatagcacagacaagtgtgtgagggtctgaggccctggctttgaatcctctctccatcacgtgacttctgtgagtttcagaaggtcgcctaaacccttctgaggctactcagcctcctcaactgcaaaatgggaaggctaatgcatacttccctggggcatcagtgagggccacatagnataatgtatataaagtgcctaacacagntcctggtacgcaggaggggctggtaaatgtgagtcaagtatgacatctaaacatcataggccaggtggaaagacatctaacaaaatctatgaactaaaaccaccttgactggttttcaatagactacaggacaatttcctcactcttatcaatttttttctcttctctctcccgctctgggattctttaaaatgaaatactggcagagttcaaagcaaggtttgccgaagaagacagaggcttagattaggaaagaacagagctccctgggccaatgtctctagaagacgcttcctttctcacctctcctccctgcagctgcccgcctgccctcagatctcctagctcttgaatggatttcttattaggaagccaaagcagataggggaagcaccagaaaaagaagtgcaattgtgctcactcaaatgcaaaagttcttttcccatt

SEQ ID NO: 6578 - DNA, 1844 bp, Homo sapiens
tcttcggtggcgatccggtcctagaaagggcggtgggctccacctcggcctagaaggcagacgggaccgtaggaagccgtcgcgggaagctcagccgaattggagttggagcccccggattgcgctgaccctgagctctcagactccccagtacaatgactcaagcagaaattaagctctgttctttgttgctgcaagagcattttggagagattgtagaaaaaattggagtccatctgataagaaccggcagccagccactaagagtaattgcccatgacacaggaacatcactggatcaggtgaagaaagccctgtgtgtcctcgtccaacataacctggtgagttatcaagtgcacaaacgtggtgtggtggagtatgaagcccagtgcagccgggtattgcgaatcgttagatatccccggtacatctatactaccaaaactctgtacagtgacactggagagctgattgttgaggagcttctgttgaacggcaaactgacaatgtgcactgttgtgaagaaagtggcagaccggctcacagagaccatggaggatggcaagaccatggactatgctgaagtatcaaacacatttgtgcgactggcagacacacactttgtacaacgctgcccttcggtacctaccactgagaattcagaccctgggccaccaccacctgcccccacacttgtcattaatgaaaaggacatgtacctggttcctaaactcagcttgatagggaaaggtaaaaggaggagatcatctgatgaagatgctgctggggagcccaaggcaagagaccaaaatatactacagataacaaggagcccattccagatgatgggatttattggcaggcccaaccttgacagattccaccaacacttccgtgaccaagccattgtgagcgcagttgctaacaggatggaccagacaagcagcgagattgtgcgaaccatgctccgaatgagtgagattaccacttcctctagtgctccctttcacccagccattgtctttccaatgagatctttcagatcccttacctgttggctataacatctctaagcaagttcttgatcagtatctcactctgctggcagatgatccactagagtttgttggaaagtctggcgacagtggtggaggaatgtatgtcatcaacctccataagggcattagcatccctaggccacagccactctggagtccgtcgtacaggagagatttgggtctcgctgtgctagaatattccgtctagttttgcagaagaaacacatagagcagaagcaagtggaagactttgcaatgattcctgcaaaggaggcaaaggatatgctatataagatgctctcagaaaatttcatgtcactccaggaaattcccaaaacaccagaccatgccccatccaggaccttctatttatatactgtgaacatcctgtcagctgcccgaatgttgttgcacaggtgctacaagagcatagccaacttgatagaaaggaggcaatttgaaaccaaagagaataagcgtctactagaaaaatctcagagggtagaagccatcattgcatctatgcaggctactggtgcagaggaagcacagttacaagaaatagaggagatgatcacagctcctgaacgtcagcagctagagaccctgaaacgtaatgtcaacaagttggatgccagtgagatccaggtggacgaaaccatcttcctgctggagtcttacattgagtgcaccatgaagagacagtgatccagaagaagcatcttcctcagaagatctggggggatggaaagcaaaataaaggaggtgcctggatgcattaaaaaa

SEQ ID NO: 6579 - DNA, 228 bp, Homo sapiens
gacaaggcaggaagagaaaggtaagtgctataaaaggactcattgttaatttctagaaattggactgagatctgaaagcataagccttaacattttttagataaacggtccctgaaaagaataaaaagtatcagtacttccgttaactagctttagtattgggtcatttgtagtttacattctcctttaagttttaagaccttcagtagttaacaaagcagacagaga

SEQ ID NO: 6580 - DNA, 545 bp, Homo sapiens
gactctctcagtgaggatttatggctgagagctcttgacctgcaacagtgcggcctcaccaatgaaggagcaaaggctttgctagaggcccttgaaaccaatacaactctggtcgttctggatataagaaaaaatccactcattgatcattctatgatgaaagcagttatcaaaaaagtcctccagaatggaaggagtgccaaatcagagtaccagtggataacttctccatcagtgaaggaaccatccaaaactgctaaacagaaaaggagaactataattctaggaagtggtcacaaaggaaaagctactattagaattggattggctacaaagaaacctgtaagtagtggcagaaaacactcccttggtaaagattattatgcgcccgcacctcttccacctggtgtgtctggtttcttgccgtggcgttactgcagaacgtgcaaaaagacacaggggtttcccattaatcaaaacacgtgatatatgtaatcagttgcagcaaccaggttttcctgtgactgtgacagtagagagccttc

SEQ ID NO: 6581 - DNA, 430 bp, Homo sapiens
  misc_feature (1)...(430): n = a,t,c or g
tcttctgaatgtttggatagccaatggctttgcagcccagcctggccactacatgaggccgatgactttaacaaacttatttcaggccagtgtaaatgcagtgttcaaaaatcccacctaagaaggatgggaacacggaggtttgtgtaggtaacatgcaggtgtgtgcacatgtacccaagaatgcacacacacatacatggacacaactgcaattgatacaaaaggctgaactgtgctgattcttacaggtacttggttctggcccagtctggaaaaaaagaaaagatccttagtctaaacatggcatacaaaatagaattcccaccatgctttgatgttatctatttatgattttcaatgttttcaatgttttgtggcttaaaaattacaaggattattatcaataatccttgtacctaatgncctt

SEQ ID NO: 6582 - DNA, 818 bp, Homo sapiens
  misc_feature (1)...(818): n = a,t,c or g
gaagcagttaggaatcaggacgctgtgttggttagagctgcttctccagcagggtactcctgtcagtgcacgtactgcttcacatgcctgcttttgctgcaatgtatttctttaaagtagttcttcaaaactggtattacttggaaaccaactagcaccatgtttttgttgcactcatcttttaggataaagagcaagtaaactactaaagggatttctttagaaatcagtttcctgggggataactatgggtctgataggactcagtccatttcttatactgtctacagtattgtacaaagagaggctgaagttctcaggttatgtctctgagggcaagtgaaattaaagaaaggttgcattattttccaaattcctatacttaggaaaaagtttttcaggaacaaatcttgaaatagaaagggtttttggtaaacctgataaatcctacaagaatgaattccctagtaacaggattatattttacagcttttatctccctcagtacttcgtactatgaatttacctgctttccatttatcaggcaaattaaatttcctagaaaaacttcattcatcaagctttcttgttaatgtagacttaatttttaaaaatattttgcaataattcatcctatattgggttcatttcactgactatagcatctcataatggatggatagtatgaataagtacttaatgtacatgcttgcattttcaatttttttaactcttctcgtgccnnnnnnnnnnnnnnnnnnnnnnnnnnnnnnnnnnnnnnnnnnnnnnnnnnnnnnnnnngtcataggnntntcaaa

SEQ ID NO: 6583 - DNA, 404 bp, Homo sapiens
gggaatgaagagacaagagctctctttatgccacgtgaggatacagcaaggccccaatctgcaagccaggaagagtcgtcacgagaaccagaccatgtaggaactctgatcgtggacatttcaacctccagaactgtgatccaaaatgcatatgtatctttggaagaaactctgaagtaaaggccggaatattctttgtttaaaacattaaaaacaaaacagaccaaagcatcaagcaagaagtttcctggcaataaactaagcacagcattattttttaaggaacacaaattaagtgttcaacctgtggcaaatttgtactttctccctgaattatgttgttatcaaagaaaaaaattgggaagcatggcaaaatatcatcaaaactgaaactagaattaaac

SEQ ID NO: 6584 - DNA, 221 bp, Homo sapiens
gcagactagaatgtttcggattacaaaagaaaccggttctcttcacatccttatccttgtgatgcagcattccgcttgcaattggaagccgtttaatatcagagagaaaccatatttatgaaagtaaagaggctgctcagatgactgcaaaccagccttccttactggttttatcactggtaatgttataaagacagttgtccagtttcatgaatcttgta

SEQ ID NO: 6585 - DNA, 1185 bp, Homo sapiens
  misc_feature (1)...(1185): n = a,t,c or g
cctgtatataagtggttggtggattttaacacaccagttattcctcctgtgaatgcctcatagatgttggaaactgaggctgatgggggaacaactttagctacggaaggagggtattggttctcacatttgacccacactcctcctgcccggggttgttcctctctgcctcccttccctacactgctgctgtcctctttttgacatttctatttatttatttttctgccctctcagatcagcaggagagcacctaggtctcagccagctctctatggcaggcctctgcagcagcacttgtgaagtgctagtgattcacttccttctctattgctcacccttctctttcttggcaggcagtccagggagtggaggagggtggagtatagcagggaaagccagggnactgcctcacattttcactggaagcactgctccctcttattggcaggccaagttttttagtctgagccatcagactagattttgccgttcacttgcagtgatctccctcagcagccctcttgcccttccatccaatctggcccctgtgtggaaatcccaaaaacagcagttaaatttgtgcatgtgggaaagttaacttaccaaattctttttctgccctttggcaaattaaaggatgtaactgggaatatccttacaaggcacaaacatgctaggatggctaggaaagttctggcttattctgttaggatgcttgtctgctcagcacacacagaaaacctttggagtttacaggactaaacctcttgctaaagccaacgggagttttatgattgcttatgtaatccaaacactactctttaaaaatatagcagttgattttatattaatattgattttgtgtttagctgcctcctgctgtgagattgtgagtggcctgccaggaggaattggtcttaggggagtagcccctatcacgtctctgggtgagtagccctagcacagcagtcagcatggaatggattcttattggaactatccatgaagcgtttataaagatgcacaaatgctaggacattcagcaaatctcctaattggtgtattgcctcgtgccgaattcttggcctcgagggccaaannnnnnnnnnnnnnnnnnnnnnnnnnnnnnnnnnnnnnnnnnnggntntccanatnnnnnnnnnnnnnnnnaagggnnttcca

SEQ ID NO: 6586 - DNA, 412 bp, Homo sapiens
cagaagtgcaataaacagcctccagttttcttcttcaaaaggagaaaacaacttacggccaaggaaaaaaggaatgtctttaaaatcagatgctgtgctgtcaaaatcaaaacgaagaaaaaaacctgatagggtttttgaaaatcaagaggtccaagctattggtggcaaagatgtttctctgtttctcttcagagctttggggaaaattctatattgtaaaagagcatctttaacagaattagactcacctcggttgccctctcatttatcagaatatgaacgggatacattacttgttgaacctgaggaggtagtagaaatgtcacacatgcctggagacttatttaatttatatcttcaccaaaactacatagatttcttcatggaaattgatgatattgtgagagcc

SEQ ID NO: 6587 - DNA, 440 bp, Homo sapiens
atttgtaattttattaaatgagtggaaagaaaattacttcctaataatactgatatatgaggatttcccatattcttgacctgctgttaggcttttaataggcatctcatttaatcgcactacatcgagggtctgggcccagcacctcctatctccaagtctgacatcccttcttggacactactgttcctgtatatcttttgttatgtgcattcattaccttttgtaacatatgtgcactttgcttgctccgaagtctatggtatgcacatgtacctcacctacttcccttcactgtgatggctgatgatttttcccccagcttccgtggctatgtcacatgtccaagttcattcctcgtaggtgctggaggtaagtgatcaaaaaggcacaaaactaagagtccctgtgattgactgtgacccagcagaaagagtgcc

SEQ ID NO: 6588 - DNA, 292 bp, Homo sapiens
agtaggagttactgattacatgcaatcaatatttggtgtaaaatgaatatgagtagtgagtataacttccccaattaataagtcaaaatctaaatgcagctatttttctacttaactatgaagcccatggtcaggtatctcaggtgtttttcaagcagcagcaaagtttcaggcaatcagaatataagaaattagaaccaagataaatcagacagaatctgtgggcaagtatagtcattaaatatgaagacaaatggtcttaaccatcaagtagcacctggaaggatttacc

SEQ ID NO: 6589 - DNA, 80 bp, Homo sapiens
aaaggaattaatggctctgttgacttggtctttgggaaatttgcatatacacttctggtagatgtctcttcccctccctg

SEQ ID NO: 6590 - DNA, 310 bp, Homo sapiens
tggagacagcatctcgctctgtcacccaaactggagtgcttggggccatcaatgctcactcagcctcggcctcccgggctcaagccatcctacactagaaaggtctgagtcattacagagtggccaccagtgtcatctgaggcacgggtaggtggctcattcagggccacaccagcggctcctttttagtacatgtgaagagtgtaaagcaaaggagaataaggtgtgtaaaaggttgtgccaatggtgactgtcagccacacttcctgccctcttgcttgtcctttcaagtacagagctgtggctcacc

SEQ ID NO: 6591 - DNA, 311 bp, Homo sapiens
actatcataatttacttgtggcttaaattgttccagctttagccattgggctccttttgagattggctcctgtatccttttgatatatcccaccttttcttctgattttttactttgtctttcttgtcttcagactcagcccatttcttcagggaacccctggttccttttggaggaatggtatttgggaaacccaagatctggatgttacatgtgcacattactattgtattgttgcttctaggctctcactggacagagctaagaaaaatatgtgtacatactaacccatgagaatagacatactcatg

SEQ ID NO: 6592 - DNA, 1013 bp, Homo sapiens
  misc_feature (1)...(1013): n = a,t,c or g
ggagagtgtcatggaggcctacgagcaggtccaaaagggacccctgaagctgaaaggcgtcgcagagctgggagtgaccaagcggaagaagaaaaagaaggacaaagacaaagcgaaactcctggaagcaatgggaacgagcaaaaagaacgaggaggagaagcggcgcggcctggacaagcggaccccggcccaggcggccttcgagaaaatgcaggagaagcggcaaatggaaaggatcctaaagaaggcatccaaaacccacaagcagagagtggaggacttcaacagacacctggacacactcacggagcattacgacattcccaaagtcagctggacgaagtagccgcctgcccccagtatggagcagcatcgagggttcgcaaaaggccacactggggttgtgtgtgtttcctttggtatattctggaaacatggctacacacacccttgcatcttctgctacagactgcttttcgaagctgtgtaccctcattctggaacttgattaaagtaagatcgtccttgtactcagtttaggcttcttggcaacatacagaagatacacccttttcgtttggatggaaagtttctaagtttatccagaggtaaagcccattgtgtgtctgtgtcatgtaaaaatgttttcacccgagttgcatgtaacgctctgaggccagccagctgtcttctcctgggatgagacagactccagagggtaaggagctagcgccatggtggccctgcagtatgcagagccccgcagggaccccagcgtgggcgcccttccaagcttcctctagctttggggcctatgctgtcccctgcagggccctaggggaagccacttgcaactatgcggcccttcagacttcctcctcagccacctggccactgaggacagcatagcctgggtaacgggaacagccacctaaggcaagaatggaacggacacaccttgctcctttctgaanccgttttcccaaaaccccctttcaagtggcttctaa

SEQ ID NO: 6593 - DNA, 134 bp, Homo sapiens
caccatctttaaagtgcttagggaaggagagctttggtgaaagctgggaatcaagaattctacatccggcagaaatatcccacaggaatgaatgccacatgaagattattttagattttaaaagtgagaaagga

SEQ ID NO: 6594 - DNA, 429 bp, Homo sapiens
tgatgtcccttgggctgggcagtacatcaccagtaatccctgcatacgcttcgtctccattgataataagaagcgcaatatagagtcatcagaaattgggccttccctcgtgattcacaccactgtcccatttggagttacatacttggaacacagcattgaggatgtgcaagagttagtcttccagcagctggaaaacattttgccgggtttgcctcagccaattgctaccaaatgccaaaaatggagacattcacaggttacaaatgctgctgccaactgtcctggccaaatgactctgcatcacaaacctttccttgcatgtggaggggatggatttactcagtccaactttgatggctgcatcacttctgccctatgtgttctggaagctttaaagaattatatttagtgcctatatccttaaaa

SEQ ID NO: 6595 - DNA, 132 bp, Homo sapiens
ttagaacagccaaggaattaggaaatcgtgttgaacagattgcccagaaaattggcaggacttaaagatggagtcaaggaaaaatgtcatccagaaactaaatcaacgcaaggaacatagggaagctgatag

SEQ ID NO: 6596 - DNA, 229 bp, Homo sapiens
taagatctgatctctgccctcaagtgagtgcacgtgcagtaaagctgtcatcgtgccatgacagatgtctgcaaggactttacagtggggtccaaaggatgccaccatcagctccacctggggctcaacaaagcctgaaagaagaaagggatgatgcttccagcagaaacctggaggcctgcagctctgccagcccagcacaggcaagcgaggccatttgtccagcagg

SEQ ID NO: 6597 - DNA, 370 bp, Homo sapiens
gtaatttgtaaaatattttacctttttttccccctgccctctccagaaatgttacagaaaaagattgagtacatttctgccatgatgcagagaaagaaactggtccattattactcattgtgtaacaccataagaaggttcaaaggagctcataccttctgtatgttgatgccaggaactgtgtataatgaactggccttctatagttaggattggtacataccgctcattcagcaaatgagtattacagtgatattcaacatgtgtccattgactacagcatcagaagcactaagtgctattaaaatgcagattctaggcctcatcctactcctgctggaatccagggtatctcaggaggggattcatg

SEQ ID NO: 6598 - DNA, 5750 bp, Homo sapiens
ctcccgcttctcctcctcctcctccacagttgcctgccctgggcgggggcgagcgcgtccggtttgctggaagcgttcggaaatggcaacttgcgcggtggaggtgttcgggctcctggaggacgaggaaaattcacgaattgtgagagtaagagttatagccggaataggccttgccaagaaggatatattgggagctagtgatccttacgtgagagtgacgttatatgacccaatgaatggagttcttacaagtgtgcaaacaaaaaccattaaaaagagtttgaatccaaagtggaatgaagaaatattattcagagttcatcctcagcagcaccggcttctttttgaagtgtttgacgaaaaccgattgacaagagatgatttcctaggtcaagtggatgttccactttatccattaccgacagaaaatccaagattggagagaccatatacatttaaggattttgttcttcatccaagaagtcacaaatcaagagttaaaggttatctgagactaaaaatgacttatttacctaaaaccagtggctcagaagatgataatgcagaacaggctgaggaattagagcctggctgggttgttttggaccaaccagatgctgcttgccatttgcagcaacaacaagaaccttctcctctacctccagggtgggaagagaggcaggatatccttggaaggacctattatgtaaaccatgaatctagaagaacacagtggaaaagaccaacccctcaggacaacctaacagatgctgagaatggcaacattcaactgcaagcacaacgtgcatttaccaccaggcggcagatatccgaggaaacagaaagtgttgacaaccaagagtcttccgagaactgggaaattataagagaagatgaagccaccatgtatagcagccaggccttcccatcacctccaccgtcaagtaacttggatgttccaactcatcttgcagaagaattgaatgccagactcaccatttttggaaattcagccgtgagccagccagcatcgagctcaaatcattccagcagaagaggcagcttacaagcctatacttttgaggaacaacctacacttcctgtgcttttgcctacttcatctggattaccaccaggttgggaagaaaaacaagatgaaagaggaagatcatattatgtagatcacaattccagaacgactacttggacaaagcccactgtacaggccacagtggagaccagtcagctgacctcaagccagagttctgcaggccctcaatcacaagcctccaccagtgattcaggccagcaggtgacccagccatctgaaattgagcaaggattccttcctaaaggctgggaagtccggcatgcaccaaatgggaggcctttctttattgaccacaacactaaaaccaccacctgggaagatccaagattgaaaattccagcccatctgagaggaaagacatcacttgatacttccaatgatctagggcctttacctccaggatgggaagagagaactcacacagatggaagaatcttctacataaatcacaatataaaaagaacacaatgggaagatcctcggttggagaatgtagcaataactggaccagcagtgccctactccagggattacaaaagaaagtatgagttcttccgaagaaagttgaagaagcagaatgacattccaaacaaatttgaaatgaaacttcgccgagcaactgttcttgaagactcttaccggagaattatgggtgtcaagagagcagacttcctgaaggctcgactgtggattgagtttgatggtgaaaagggattggattatggaggagttgccagagaatggttcttcctgatctcaaaggaaatgtttaacccttattatgggttgtttgaatattctgctacggacaattataccctacagataaatccaaactctggattgtgtaacgaagatcacctctcttacttcaagtttattggtcgggtagctggaatggcagtttatcatggcaaactgttggatggttttttcatccgcccattttacaagatgatgcttcacaaaccaataacccttcatgatatggaatctgtggatagtgaatattacaattccctaagatggattcttgaaaatgacccaacagaattggacctcaggtttatcatagatgaagaactttttggacagacacatcaacatgagctgaaaaatggtggatcagaaatagttgtcaccaataagaacaaaaaggaatatatttatcttgtaatacaatggcgatttgtaaaccgaatccagaagcaaatggctgcttttaaagagggattctttgaactaataccacaggatctcatcaaaatttttgatgaaaatgaactagagcttcttatgtgtggactgggagatgttgatgtgaatgactggagggaacatacaaagtataaaaatggctacagtgcaaatcatcaggttatacagtggttttggaaggctgttttaatgatggattcagaaaaaagaataagattacttcagtttgtcactggcacatctcgggtgcctatgaatggatttgctgaactatacggttcaaatggaccacagtcatttacagttgaacagtggggtacgcctgaaaagctgccaagagctcatacctgttttaatcgcctggacttgccaccttatgaatcatttgaagaattatgggataaacttcagatggcaattgaaaacacccagggctttgatggagttgattagattacaaataacaatctgtagtgtttttactgccatagttttataaccaaaatcttgacttaaaattttccggggaactactaaaatgtggccactgagtcttcccagatcttgaagaaaatcatataaaaagcatttgaagaaatagtacgacaacttatttttaatcacttttaaataatgtgttgcatttacacagttgtttcatgctgtctttagagttaggtgcctgcctaaagccaggcaccaccacacctggctttagagttcacacaataggatataagtcctgtatgacttaaatagtgaattttatccttaacatttacctcttgtatagtatctgccaggcagttttttcttaaactactgagatgataactgtgaaatatttgtgatacgtgtcatgtgtgaaaagtttgatgcattttgagatggaaaactgaaatttggaaaaagaaatactttactattgagtaaactacaatatatttagtgctactcgcagctatttattattttgtagacctgccttatgcaccttactgcctagatttttgggaaaaaactttggaaagtgtgttacctatatttctagccaactaactcacagaaaaactgtttacttcttcactttcgaagtatttggcttttgttaatatgcagttttactaaacagatggttcataagacatgtgaagcaaattcatatttgcaatgggtaaaaagtattaaagcctttctcttgcctgcatatcctattgaccattggtatagtcatcactttttcatattttagtgtagttagaagaattccttcttcaaacattaaagatccacaaagcagtatttctaaatatgccttgaagaactaaatgaagtgtatagcacttgcctttactagatattctttacacttgtacaattatgtagtaaatgtatgtttacagggtttatcatgtttacagattaagctaatttctgtagtcgcatttttatatttttagtatcactctagtaaaaaaaccaaataatttgtttaaaataaccaaagagttgttataatgcataatttgtattaaatttattactatttcttatgccttttaaaatactgtttactatgaagacaatgtttttaattacaaatccagaattctgtaggcaaaatgctacagttcatatcttcctttaaccaaactgaagtacataaagaccatgtacatgtattcatcaaacgtttattgaatgctgcgtgcctagcgctgtgctatgctctggggtaagagttgtcagcttcagagaagctgagtcctgatcctcaaggaacttgcaaatgtgtctatgaatttgtaaaacaatcaaaagtaggcgtaagcagaataaggcaaaagggaaagtgttctaggttccagcacacctgcaaagataaagtgtgccaagactgtatttatatttcatacttatattgtttcatccttatattggaatgattatatagaaaatgctcttaaaaagattaaacctatttctcagtatggtatcttggtgatttaggaataattgtaaatatatgttacgaatcttcttaaatatatatatatacacaccctgtgagaactgtaaaaagtacctctggttcttggtttaagtttgttggggtataacatgatgagtactcattagcacctgatagaaatctgaaatgtgacagtagcaaaaccactttctactttccaaacaccacagcatcagcatggtttaggggaagcaattcacagattaatgtaccctgcgttttgtcttcaccattgtcaaccagcagtcaaggatgagcaccaggtatagtcctggtttgatatctcaccagccatgtgaactgaagcagcttacttaacctctctggattcatatttcttcatctgtcaaatgagagtaatcatgcccaccctcattgtcatggcagattgtcagaagttccagacagatgagaaagcaaaaagtactttgtaaagtgttatacaatcagaaggtgctttgtgctgaccgtcaggattgtgtcaagtcaggtgtgcaaattgaccacactcccaaagaatcatttaaaagtaaagtgacttctaagagacaaggaagtaggaacatttctgatattaaatatataaataatatggatacacatgtgtatatctgtatatggatcttaccatcataattcattttcttcatatcagcaaagtaatagtaatgtgggccaatgcattttggaaatgtcctcattatgtagaatggaatgtgaaaattatttttgttaaaacaggattttgccacaattatttaaatattatgtttgtgaactatctaagcatgagaaaatacaaagctttctttgtatctggctgatactcatttggatgattctgtgactcatagaacatgatgttaaatgagaccagactcaactgccaccagtccccagctgcagaccttcatccccttcatctcccactaggggctcgtggtctggaagaaacatgtatcaagcaacacagccccttatcccagatagaaaagtgtctcaaatgcattctactgcgggacagtcagtaggatcattttcataaagcaaggacatcatatgtttctagaaattacaagcatataactttagcctacaatctcttattaaaaatttttaacaaaattgtattacaaatgcatttcatcagaactcaaatttaaatggtgtttgttttgggtttttatttataatgctgaagttattccatataagtatcaagttaaacacaattcattttgattataaactatttgactttttaaaatcttctgacacagtaaatatatatatcaagattgatgtatcaaaatttattgcacactttaaagtgtaaaatcattttttaaaatcttgaatccacaaataaagttctattctgatttt

SEQ ID NO: 6599 - DNA, 509 bp, Homo sapiens
catgggcaatttaaaaaaatagctttattgaggtatactttgacatgccataaaattcacccattgtatgtgtacaattcaattacttcatttatacaactgttcaattatcaccatattccagcttaatggtcaatatttgctttgtcatttgatcttttctctatggtaagcaaaaatctattatttgaaaggttccttcactgaaagctgggtggagttgaactctaaaattacctacaaaattactttctatctagtcatctatgtctaattcttcaatttgacacatgcatgttactagcacaagctgcattttaaaggcagcaggaaggtcttttactatcattagaagttaactttaaggattgagcaggcacgatacagcatagattgtttcgtgtgctatatagtaaggtcaatattcttgctccttctacaaataaaaaaaggttccacagaataacaagtacaggtggagttcccaacggaaatgcaggtactgaata

SEQ ID NO: 6600 - DNA, 459 bp, Homo sapiens
gaatatgtgtactaaaacactataatttttctgagtctggttctccattcaaatgttttaatacttttgtgattttatgatttgtaattgtcgactctcacctcccaattcaacatgatcctaaaatgtacaaaataatctgaatgattgagtttcaaaaagttttagaaaacttgatcttgtaacttttattccaaagctttgttgagggggagaagtacaggcttctgcctttaagggtactgcttcacttttggggcaaaaaagcaagggttatcaaagggagacttgacatgaatggcatgcagaggagggggtgagccagtggagagtctcaatgactagctttagtgctatatctaccagagtggtagaactgatcgtcgcgagcagaactagatgataaggtgaccagagtcatgagatactctcaaagtgaaaataaaattcatcaagggc

SEQ ID NO: 6601 - DNA, 49 bp, Homo sapiens
caaaaatgtaaagatatcttctgtttgttgatgctgcagaaatgcacaa

SEQ ID NO: 6602 - DNA, 334 bp, Homo sapiens
tgactactgttaaaaaacaatacaaaacaatacactggaggtgttttcagtgagttttccccttccttttttttcaccttaagtgtcataattctattttgagtatgtttttacttttgccatttctgtaaagagtgcttacctttttgtgaacctgggagatttgtgtaaactctgatcttgataccggtgattgatgacagaggattgtatataatcataggaggatcaggatcttaacctaggccttgtcccaacccacagcccgcggctgccatgtgggctcagggacaactttgaatgtggggcctaacattaaatttcataaactttc

SEQ ID NO: 6603 - DNA, 431 bp, Homo sapiens
cttttgagggacttcatttctttgggttattcatgttttcttggacattttaataaaccgtaagattatcttaattttaattccttagttaatattattgagtgtagactgcatgctgaaagtggtcatacattcttttaatttccatgtatatatttttaatactcagcgaaaccttttgagatagatgatatccttattttatgaatgaggaaacggagacttacagaaattaatttgccccaatcaaacaattggcagacccaagaattaaaatgcatatcttctgatgtcatgtcaagaactattactaataaattcattactgtgatctcactgttgtgatgtatgcctttcccccaaggttttggggtattttgatgtatgcctgttttgatgtatgcctttcccctaaggtttgggcacattca

SEQ ID NO: 6604 - DNA, 500 bp, Homo sapiens
tctgtgatgtaaaaaccctcctgacatcgttgtccagcctggacacattaggctctatgtcgtagaaaaagagaatttgcctgtgtttccagtttgggtagtggtgggcatagttactgctgtggtcctaggtctcactctgctcatcagcatgattctggctgtcctctatagaaggaaaaactctaaacgggattacactggctgcagtacatcagagagtttgtcaccagttaagcaggctcctcggaagtccccctccgacactgagggtcttgtaaagagtctgccttctggatctcaccagggcccagtcatatatgcacagttagaccactccggcggacatcacagtgacaagattaacaagtcagagtctgtggtgtatgcggatatccgaaagaattaagagaatacctagaacatatcctcagcaagaaacaaaaccaaactggactctcgtgcagaaaatgtagcccattaccacatgtagccttgga

SEQ ID NO: 6605 - DNA, 358 bp, Homo sapiens
  misc_feature (1)...(358): n = a,t,c or g
aagcagttttaggaggttccagcctgcagcataggtacgacctcagaggatggctttgcacttggcatagtttcatggaaaggagtacgttgtagtttatgcagtatctgactgcaaatcatattcaggaaagaagtgcagaatttcttccccaagcccagagaagagcagccctgagcccctgtattctgctggccagacacacatggcacagacacagctgaccataacccaggaatccagagctcggtttctcatttctgagatcaggatgcttgtatagtggcctgtgaggtnacagatttggcagggcccaaggccccaggttttcatttttcatgagaaaagctttccaagt

SEQ ID NO: 6606 - DNA, 895 bp, Homo sapiens
ttcggacgaggcgctgcggctggccggtgagcgcggcatggggcgagtgcagctcttcgagatcagcctgagccacggccgcgtcgtctacagccccggggagccgttgctgggaccgtgcgcgtgcgttgggggcaccgctgccgttccgagccatccgggtgacctgcataggttcctgcggggtctccaacaaggctaatgacacagcgtgggtagtggaggagggttacttcaacagttccctgtcgctggcagacaaggggagcctgcccgctggagagcacagcttccccttccagttcctgcttcctgccactgcacccacgtcctttgagggtcctttcgggaagatcgtgcaccaggtgagggccgccatccacacgccacggttttccaaggatcacaagtgcagcctcgtgttctatatcttgagccccttgaacctgaacagcatcccagacattgagcaacccaacgtggcctctgccaccaagaagttctcctacaagctggtgaagacgggcagcgtggtcctcacagccagcactgatctccgcggctatgtggtggggcaggcactgcagctgcatgccgacgttgagaaccagtcaggcaaggacaccagccctgtggtggccagtctgctgcagaaagtgtcctataaggccaagcgctggatccacgacgtacggaccattgcggaggtggagggtgcgggcgtcaaggcctggcggcgggcgcagtggcacgagcagatcctggtgcctgccttgccccagtcggccctgcgcggctgcagcctcatccacatcgactactacttacaggtctctctgaaggcgccggaagctactgtgaccctcccggtcttcattggcaatattgctgtgaa

SEQ ID NO: 6607 - DNA, 1024 bp, Homo sapiens
tttttttttttttggaaactgcgcatggcacaaccaacagcgctcccgcccctttttatttgaattcggagaaccagaggcgcctgcagattctggaggggtctcgcctgcccatcgctggcagcccgagatcctggggaggggatgccatactgctagagatgagggaagagagccccaagcaggaaaacattgatttgctgtacactcaaagggcatctcatgccttcagtccaccgcctcctcgggccacagcccgtgccctcgcgccggctcagactagctctggccctgctgctgtcgctgcaggttgtcgtcttcttccttggtggtcctcgggcaggggcggctcctccagccctgcagaggatgtctggagctcccgggtggacccggcgaggcggaagaccacggggatctgggccagggttgggttggtctcctgcaggccctggatccacttagccatcgtcgcctggtcatgagcacccgccatgcacatggcgaagacagggccttcctccacttcattgatgtcaaactcgtagttgtcccaagccactcctcacatactccaggtccagctgccatcgggtagtagaggttcccactcctccggcgttctcttccacttcccttcttcttccgggggcagcaagtcagctctgaggatgtggtaatacacacacttgttgcggagccacagggagaaggggccctcaacaaagacaggccgggctggattgtggcgggccagggcggcctgctgatcgggactctggattcctacgatgtggggctgggggggatctgctgcacctgttgagtctttgggcaaaggaacctggtagatggtgaccctggcactaaggtcaggctccatgtgccgcaggccaaacatggccagctccacagggtcctggggcaggtcccggggcactgggaaggggttgacgttcatgaatcgagggaaccacagcttcaggcgcaccaacttgagcatggggtagcttttgcgtccaaa

SEQ ID NO: 6608 - DNA, 527 bp, Homo sapiens
  misc_feature (1)...(527): n = a,t,c or g
agtcgtccgagacgccgcgcggtgatgctcctgaaaacgtctgcccggcgtaggggaacccagcatgattttcaggatcttatattgcactttaaacacacctaaaattgacatggaaagactcttaggaggacaactaggactagaagatttcatatttgcccatgtgaaaggaatcgaaaaagaagtgaatgtgtataaatctgaggattcacttggtctcaccattacagataatggtgttggctatgcttttataaagagaattaaagatggtggtgttattgactcagttaaaacaatctgtgttggggatcatattgaatccataaatggagaaaatattgttgggtggcgtcactatgatgttgcctaagaagttaaaggaattaaaaaagggaggaactcctttactatggaagtttaaatagaaccctaaagaagggccatttggaaattaggagcccganggtccaaaggcctggaaagtccancaggnggaaaaaattgggttgttggaagggcac

SEQ ID NO: 6609 - DNA, 425 bp, Homo sapiens
  misc_feature (1)...(425): n = a,t,c or g
taaatgggttcttgatgtcaacatgaaatttttcacatactgtgcccctacaccaaaatgcttacttattcataggttaccaccagattcacgtcaaatattccaaaattcaggtgttgccaatgtgaagataatgagaggtgggacctttaggaggtgattaggccatgaggggctccttcccggttgaacaggattaggtgccgtttagggctcgacaggacgagtttttcttttttcgttccccctttctaccctgtgaggatgcagcaaaaaagcgcgccagatgtccggcacctagacgatggccttcccagtcaagaagtaagagaaaataaattctcgtgccnnnnnnnnnnnnnnnnnnnnnnnnnnnnnnnnnngagtcgtattaaattngnaatncaatcatagangnnttcaaa

SEQ ID NO: 6610 - DNA, 382 bp, Homo sapiens
aatgtgcagcgcctgtacgcggcctccgacatgctacagctggaatatgtgcgggaagcctgtgcctccttcttagcccgacgtcttgacctgaccaactgcaccgccatcctcaagtttgcagacgccttcgaccatcacaagcttcgatctcaggcccagtcctacatagctcacaacttcaagcagctcagccgaatgggttcaattcgggaggagactctagcagatctaaccctggcccagctgctggctgtcctacgcctggatagtctggacatagagagtgagcggactgtatgccatgtagctgtgcagtggctggaggctgctgccaaagagcggggtcccagtgctgcagaagtcttcaagtgcgtgcgct

SEQ ID NO: 6611 - DNA, 454 bp, Homo sapiens
agttcacaaaagaggaaatgcaggcgggtaaacaccaagaatatgaacagaagctacttcaagaattatataaattaaatcccaattttcttcagctatctacgggttcagttgataaaaataagaacaaagtgacaccactgcagagccccattgacaaaccttcagattctctcagtatagggaacggtgataattcccagcagatatctaacagtgatacgccttcaccaccacctggtttgtcaaaatccaatccagtcatccccatcagttcatccaatcacagtgcacggtcccccttttgaagggggcagtaacagagtcacagtcgttattctcagacaattttcgccagcccaaccctattcccaagtgggcttcctcctttccccagctccccacagacatccagtgactggcctacagcaccagaaccacagagcctcttcac

SEQ ID NO: 6612 - DNA, 318 bp, Homo sapiens
aatacagcgtggttctaattttctttcacacaatcccagacaaccccaaataactttataaataccttatgaaaaaaagcaatttaaaaacctatcaaatctatttaaaatatataaatgcagacctctcaaatttccttcaatcaggccagaaattatcacaaaaattataatcacagttacaaacagaatgagtggaatgtttgtaagtttaggacaaccaaaaaagccccatgtaactttttaaaaatataatcattcactcaaatatactgttaaataggaatggcagtaacacaggagccaaataaaccgcca

SEQ ID NO: 6613 - DNA, 328 bp, Homo sapiens
gagagagagaactagtctcgagttttttagtcactgaaccctttcttgaaacccttaacatatagcaagaacataaaccaaaaaagcaaagttgctgtgcttgaaggtctcggattggggggctgaacctgcctggccctactgctaaagcgcttggctcaaagaaataagagcacagtttggaacacctgcaatacagaatacaaaatatgcttcagacaaatctcttactcctaataaatttattatcttcctagagaacaggtggattgcagcacatcaatggaggtgctaaattggtccagtcaagaaactcagaagtgcaatt

SEQ ID NO: 6614 - DNA, 194 bp, Homo sapiens
actatttaaaatattaaaaccattcttagctcacaggccatacaaaaacaggtggcatgtagatttgctgaccctagggcaagactacgtcatgaaaaaacggtacacaaaattacatatggtgcttgttttgtggtattggaattgttggggtttttttctctattctctgagttaggattaggatttgtatt

SEQ ID NO: 6615 - DNA, 1166 bp, Homo sapiens
gtcaggttctgtgtatgtctccgcgtcttccgcggagcgggtgtgcagggcctgcagcattgaactagatgtcgtccccgcaggccccagaagatgggcagggctgtggcgaccgcggcgcttccccctggggacctccgtagcgtcttggtcacgaccgtgctcaacctcgagccgctggacgaggatctcttcagaggaaggcattactgggtaccggccaagaggctgtttggtggtcagatcgtgggccaggccctgggtggctgcagccaagtctgtgagtgaagacgtccacgttgcactccctgcactgctactttgttcgggcaggggacccgaagctgccagtactgtaccaagtggagcggacacgaacagggtcgagcttctcggtgcgctctgtgaaggcccgtgcaacatgggaagcccatcttcatctgccaggcctccttccagcaggcccagcccagccccatgcagcaccagttctccatgcccactgttgccaccaccagaagagctgcttgactgtgagaccctcattgaccagtatttaagggaccctaacctccaaaagaggtacccattggcgctcaaccgaattgctgctcaggaggtccccattgagatcaagccagtaaacccatcccccctgagccagctgcagagaatgggagcccaaacagatgttctgggtgcgagcccggggctatattggcgagggcgacatgaagatggcattggctggcgtgggccgcctatatctccgactatgccttcttgggcactgcactgctgcctcaccagtggcagcacaaggtgcacttcatggtctcactggaccattccatgtggttccacgcccccttccgagctgaccactggatgctctatgaatgcgagagcccctgggccggtggctctcgggggctggtccatgggcggctgtggcgtcaggatggagtcctagctgtgacctgtgcccaggagggcgtgatccgagtgaagccccaggtctcagagagcaagctgtagccagaggtacccagttcgcctggggcttcaagaacctcccatctatccccattcctgagacaggagttacagtcccttttggccctcacatccaataaagagactgataccactggaaaaaaaaaaaa

SEQ ID NO: 6616 - DNA, 401 bp, Homo sapiens
  misc_feature (1)...(401): n = a,t,c or g
caccatgcccattatgaatttaggatattcacaggtcatgaagaatatgcatttgaacaattccagtgaaaattttacaagctgacaatacagaaaaatatgccatgtttccccactccattttttttctttattggtgaactataaatatgtgggaatgctatggtataagatgaagagaattcagatataaaaatgaaaacttcttgatagcctttcatgccttataacccttggggttgtggggtggccgggcgatgacgggcagagagataatttaaatacaaaattaggatctagaacttaggcaagaatttattggctggagatataacttagagtaatcactggttataagcaaaattcctgggaagtagccaaaccatgttggggngaaagtt

SEQ ID NO: 6617 - DNA, 793 bp, Homo sapiens
tttttgtggtttgggattttcttttttttttatatcatgaaaaaagatttagagaattacaagagtttaggttaataggaaacacaaatggaggtggaaatttaaaaacaaaggaatggaactcaactctccacagattgaacccacacaggtgtcactgtttactgaattagcaccacttttgtgcagtgaagacacccgtggctgagatttcttaaatctcactttttccatgcttttcttctgacaaactgaccacggagggagagctctcctcccccctccctatcccagactgctgctgctttcctgcaattctggtggtctttttgttgcctcatctgattgagactttggggaaacaacacagcagcaaaccaggacatatattccctctaaaaacagcttgaaaattacaacacaaagatctcaataattatgagatgcagtgattttttcttttttttctcttcccccggccgcgcttggaggtatctctaggttagactcctctggggctggaatgacgtgaagggtaaggtcgccccagcttggcccagggcagtcgggggcaggacagctgggagagccggtccgaccccagcccagcctgctgggtcagcattcatcagagaggtcgtcgctgcccgggagtccgcggcttcgagctccacgctggacagaaacctcctcagcgtcttgcggcagttgtaatccagggtggtggtgtagacggccttggggtacttggggtacacgatggtggtactgaggaagcgggtgggggaagaga

SEQ ID NO: 6618 - DNA, 1300 bp, Homo sapiens
tgaggaaggacaaatgacttgtgaaccatgcccaagaacagggaaagtcttgggccctgaagaccccagaagcttggaatatgtctgaatgtggaggtctgtgtcaacctggtgaatattctgcagatggctttgcaccttgccagctctgtgccctgggcacgttccagcctgaagctggtcgaacttcctgcttcccctgtggaggaggccttgcaccaaacatcagggagctacttcctttcaggactgtgaaaccagagttcaatgttcacctggacatttctacaacaccaccactcaccgatgtattcgttgcccagtgggaacataccagcctgaatttggaaaaaataattgtgtttcttgcccaggaaatactacgactgactttgatggctccacaaacataacccagtgtaaaaacagaagatgtggaggggagctgggagatttcactgggtacattgaatccccaaactacccaggcaattacccagccaacaccgagtgtacgtggaccatcaacccaccccccaagcgccgcatcctgatcgtggtccctgagatcttcctgcccatagaggacgactgtggggactatctggtgatgcggaaaacctcttcatccaattctgtgacaacatatgaaacctgccagacctacgaacgccccattcgcctttcacctccaggtcaaagaagctgtggattcagttcaagtccaatgaagggaacagcgctagagggttccaggtcccatacgtgacatatgatgaggactaccaggaactcattgaagacatagttcgagatggcaggctctatgcatctgagaaccatcaggaaatacttaaggataagaaacttatcaaggctctgtttgatgtcctggcccatccccagaactatttcaagtacacagcccaggagtcccgagagatgtttccaagatcgttcatccgattgctacgttccaaagtgtccaggtttttgagaccttacaaatgactcagcccacgtgccactcaatacaaatgttctgctatagggttggtgggacagagctgtcttccttctgcatgtcagcacagtcgggtattgctgcctcccgtatcagtgactcattagagttcaatttttatagataatacagatattttggtaaattgaacttggtttttctttcccagcatcgtggatgtagactgagaatggctttgagtggcatcagcttctcactgctggtgggcggatgtcttggatagatcaagggctgggctgagctgggactttggtc

SEQ ID NO: 6619 - DNA, 409 bp, Homo sapiens
  misc_feature (1)...(409): n = a,t,c or g
gagattgtagtaggagagtatcatgggatactctctttaatatttacacagaattatgaagggatacacaagaaggtgaattccccttttaagaaatataactgttaataaaaggaaagcaattttccattttgcacaaatttaggacagaaatattcaaagagggtagtgactacagtttcttcacacttagatgagagaataaacaaatacacaacagtagtgatggtaattatcagaggaagaattattaccatatatatacttcattaaaatggatatatcttttctcatatagagaaataaaaacttgattgtgaagataaatggggctcagcagttgctaaggaaaatgactgggtaccttcnggcccctttggaggagcctgcagaggaaattggctttagc

SEQ ID NO: 6620 - DNA, 443 bp, Homo sapiens
ttgtttttttttttttttttgaatgtaacaagcatttattaaaaactgtgctgcacaaaacatgttagaaactagccaggtgctaggagtctaatcaaggcaggggcagggtaaaaacatgggaatattacatggacaagcttgtctagcatggcagtctataacccttgagggtttacataaaataaaggaacatttttgtggctcaggctccccagagttctctttatgtttgggcagagactgccccatcccttagtgatcccaccttagagccaggttttcaaagtcatttctcccagtatatctgtctctgtatgcaagtttcctctggttgccttgagcaaaaacaatcatccaactcaaatttgctagccctatgctgggccagcccacgttcccgtaggacatctgtaggctaagtaagccccggtgatctgtgt

SEQ ID NO: 6621 - DNA, 463 bp, Homo sapiens
  misc_feature (1)...(463): n = a,t,c or g
agaaaaatacccttgggttgatcatattcaggttaaaggttgctgtatccaataaagttaaaaaaggatgttaaaatattttggctaaattgttttttatacctcaattttttcaactataaaataaatccaggtgttttccaaacaccacagaggtattatcaganaannnggggggacaggttccgccacaccccccaaccacagtatgagtttagtgtatcctttccactttccttaatgctcatgcacatggactcatgcattttaatttgtagaagacagagtcatactctacacaatactccacatatagtgttcacataacccatcaaggcatgctccaggccaacacacccgagtctgaatttcatcctnttccaacagccacacatggggaagcatctnccattcatttcgaccagatnctttactgatggggtttcaaggtttttcccagttt

SEQ ID NO: 6622 - DNA, 534 bp, Homo sapiens
aattaaaaaccttgaatattaggctgaggattttctcttgaaagagacaaagagacatggtcaagtcactgggaatttcatgacttaggaggattctctcagaagactttctaagaataacttcaataatctccaataatctgcaacctacttttctttcattgaaacaaacaaagttagctatggaattaatatttggaaaatgaagaaagtttaaaggaaataaacatttcccataatcttaccatccactgaaaaccatggttaacttgacatgggagtgggcttgggttggaaaaaaatagggagagagttttatctctggaaagcattgctggcttccctttccacactttacagcatgtattagcttagtgacactgtagggagaaggcacaagccatgtaaagaggacttaatttgtcaagatttactgactagctaggggctaaaaagagatgagtggggtggaagcaatggtttccacaacacccccaagataaggggtatcacttgtgcaaatttagcaccagg

SEQ ID NO: 6623 - DNA, 533 bp, Homo sapiens
ctcgtgcgcggaagttttgctgctagtcgcggacgcaatggcttcaaggttacttcgcggagctggaacgctggcccgcgcagggccctgaggggctcgcggccccagtggcgcggcccgcgatgcgctccatggcatctggaggtggtgttcccactgatgaagagcaggcgactgggttggagagggagatcatgctggctgcaaagaagggactggacccatacaatgtacttggccccaaagggagcttcaggcaccagggaagaccctaatttagtcccctccatctccaacaagagaatagtaggctgcatctgtgaagaggacaataccagcgtcgtctggttttggctgcacaaaggcgaggcccagcgatgcccccgctgtggagcccattacaaagtggtgccccagcagctggcacactgagcacctgcactaaattactcaaaatgtgctgtaaagtttcttctttccagtaaagactagccattgcattggctccttctcccataaaaaaaaaaaaaaaa

SEQ ID NO: 6624 - DNA, 378 bp, Homo sapiens
  misc_feature (1)...(378): n = a,t,c or g
ggcacgagctggaaggacaaggggaaacagtgttctggggtgaaaatggagaacgaagtcctccggggcagtttttggtgttcctcttttactgtttaggcctggtcagctctggtcccaaacttggacatcccagctcaaccaaacctcaccctgacactacctgcctgggtcctctccttacagtgcagttcagtcactgtgccattgatcaggtcagcccttggggtcttaccactccccggtgtggctactaaggtactgacttcctttagactattttttaaacaatgcacccctaattacacttgagatattttaggaatcttggtagnatttgaggcacccttacaatataggctcccagcngggcctgcc

SEQ ID NO: 6625 - DNA, 802 bp, Homo sapiens
ctgccctattcatggaccacagcgggatgctggtgatgcttccttttgacctgcggatcccttttgcaagatatgtggcaagaaataatatattgattttaaaacgatactgcatagaacgtgtgttcaggccgcgcaagttagatcgatttcatcccaaagaacttctggagtgtgcatttgatattgtcacttctaccaccaacagctttctgcccactgctgaaattatctacactatctatgaaatcatccaagagtttccagcacttcaggaaagaaattacagtatttatttgaaccataccatgttattgaaagcaatactcttacactgtgggatcccagaagataaactcagtcaagtctacattattctgtatgatgctgtgacagagaagctgacgaggagagaagtggaagctaaattttgtaatctgtctttgtcttctaatagtctgtgtcgactctacaagtttattgaacagaagggagatttgcaagatcttatgccaacaataaattcattaataaaacagaaaacaggtattgcacagttggtgaagtatggcttaaaagacctagaggaggttgttggactgttgaagaaactcggcatcaagttacaggtcttgatcaatttgggcttggtttacaaggtgcagcagcacaatggaatcatcttccagtttgtggctttcatcaaacgaaggcaaagggctgtacctgaaatcctcgcagctggaggcagatatgacctgctgattccccagtttagagggccacaagctctggggccagt

SEQ ID NO: 6626 - DNA, 771 bp, Homo sapiens
ttttactcagtgttttcaaataggagtaaaggcccttgcaatttttaattaacaagcaaggcccaagggaacacatgtcctcaaaagtttttctgatccctcgccttgcacacctggcatgcatcaggcacatctgtcctacagctggcagagacagatgcctcggttctttgtcattcagattgcatttgacctcttctcatctatttatttctttatacatccagacttcatcacatgaagcctatttggggttaagtttgtaagtgtttaattgtgcaaattgccaccctgtgtacctcctccatgtctgtctgcgtgttttccaccaaagaatgcaaagcagacttccaggtgtttaaattctgttcactcaacaatgccagatgaatggaagagggaacacactgagatgacttagactctggtccaccaaccagacccttgggaaaggaatactaaaatcattacaaggtatggattttaaatggatgaaacttcaaattatcttatttggatagaagtctatattctagcctcatttgcatgaagtcagatagccagaagaaattccattgctggttttcacgaaattcacttgtcttttgctaataaacacatggccctttcccagattattctctagccaagccccacctttgttacgttgaaatccctcatttattttcttctcaaaatgcccattatccaaatgcagaacctctgcatctccaagccagtctcgtgccgaattcttggcctcgagggcca

SEQ ID NO: 6627 - DNA, 1074 bp, Homo sapiens
  misc_feature (1)...(1074): n = a,t,c or g
cacggcagccactgcttggggtagcgggagggcagactctgggcgccactcccgggccggtcatgaacgggccggcggacggcgaagtggactacaaaaaaaaataccggaatctgaagcggaantcaagttcctcatctacgagcacgagtgcttccaggaggagctgaggaaagcgcaaaggaaattactgaaggtgtcccgggacaagagtttcctcctagaccgacttctgcagtacgagaacgtggatgaagactcttcggactcagatgccactgcatcattcagataacagcgagacggaggggacacccaagttgtctgacacaccggcccctaagagggaagagaagccctccgctggggggcgccccctctccctccagcctctccctgcctccttcaacagggtttccccttcaggcctccggggtcccctccccatacctgagctcgatggcggtgggaccccccgactgccctgtgggagggccgctgaccttccctgggccggggttctggggctggggtcgggacaaccctgacccccctcccaccccctaagatgcccccccccacgatcctgagcacggtccctcggcagatgttcagcgatgcaggtagcggggacgatgccttggatggagacgatgacctggtgatcgacatcccggagtgaccgtgacatcacgccatgcccaccacggccccgcccggcgccctccccgtgccagcacacacgagtccagcttcctcggaggtgtttattgatgcccagctgccatgctccggccactgacacaaccagaaaaggcgtaaacatgcacgggtgtcccccaggagggtggcaggggccctgccttcaaaccccggccccctccaggggacagttatttaaacgagtggccgggagcatctgccacctgctggggaggcagagaccctgcaatggccacctctttaaaagggcagctgtacagggctaggttttttcaatgaagtttctgtattaaaggagtggctctgggtttgttttttgtcctttttttttgagacattctcctcctctga

SEQ ID NO: 6628 - DNA, 648 bp, Homo sapiens
gattttggacatattgaaacctatcacaggctgtaggttatggacctctgtgccatgagaaaattgatacattaaactaagaactttgtttttaacttaccaatcactactcagcacatcttatataagctgataatttgtgatggaaaaggtctgtagcatgtgatataaggtgaccttatgaatgcctctcttgctggtacattaagttgttttaatatatcatttggaggggactgaaatgttaggctcattacaagcttgatacagaaatatttctgaaggatttctaatcagaattgtaaaacaatgtgctatcatgaaatcgcagtcttcacctcatggttcatggaacatttggttagtcccataaaatcctatgcaaaacaaagtagttcaagaatttttaggtgggtagtcacatttataaggtattcctcttactctttgggctttttcagtctgatttatttaaattttcatttagttgttttacttttggactaaggtgcaatacagtaggaaggataacttcgttacatttatgttgtagggaaaactaaggtgctgtctcctcccccttcccttccccacaaaatctgtattccccctattgctgaaatgtaacagacactacaaattttgtat

SEQ ID NO: 6629 - DNA, 417 bp, Homo sapiens
gcttactctccttctccaggtcacccatcggttcattcaaccagctcttctctgggttggatccccatgctctggccgggcgcattatcactgagagcctcaacaccagccatgtcactactccatccagaagggagctgcgtttctgggacttggcaccgacagtgtccgagtggtcaaggctgatgagagagggaaaatggtccccgaggatctggagaggcagattggtatggccgaggctgaggtgctgtgccgttcctggtcagtgccacctctggcaccactgtgctaggggcctttgaccccctggaggcaattgctgatgtgtgccagcgtcatgggctatggctgcatgtggatgctgcctggggtgggagcgtcctgctgtcacagacacacaggcatctcctggat

SEQ ID NO: 6630 - DNA, 499 bp, Homo sapiens
cagagctttaaaatagtgatttgtaagactttgttacaatggtacttaaaaaattgctttgtataatttacacactgtaaaattcacccattgtacatgtacaattaattgtttttagtaaacttaagagttgtgcagtccaattttagaacatgtccatcagcccccaaaatttactcctgctgctctgcggttaatttgctcctgcctccagccccacgcagccacactgatctgctttctgtacagatttaccctttctaggaaatttcacagaggtaggaatcatgcagttagtcttttatatctgggcatctttcacttaggcatgtttttgagggttcatccatgttgcagcttatacctgcgtgtagttcctttagttgctgacttagtgttcactgtttgggatataccacattttgtttattccattcaccagttggataggacattgggctgggcctacaattaggtttttttaaatgcggattaatat

SEQ ID NO: 6631 - DNA, 751 bp, Homo sapiens
ttttttttgagaggcagctgggagagcagctttattatcatggctggggatagaacgggttcctctccctgggggctggggtcttccactggttaccacccgcagcggtcctggaggcaccacgcatctcagtgctggcttagctgcggggcagggccttggagaaggcgaactgtccagggaagtagaagctgtgggggtcctcaccagcccgctgcaccctgaggcactgggtctcctggtgctcctcagcctcccgcagaacttgggtctctatggggcagtggaccaaccggcccagaactttgtcctcagagcccagtttgatgcaggccaggcatttccgtttcctcccattgggcctgactttgcactcgggtttcttccagtccctcttccggcagcttgtctgctgcagcttaaattccagcctcacaaatattccagctgggaagggctgcggacagacaggcaggcagaggatggccggtagccagctgagggtgcagagcaagccctggtgtgatccgcacctccctcacgcagtcacattccagcaggctggacagtggccttttctccaaagggctgggctcagagcccaagcacttctgtccccggcgtgggaatgcgctggtctcctggggtaggaccctcccggctcctgcccaggccatgctactcacgtgtccacggcgctctccacactggtctcctggaagtcccactgcacgggcgggtgcttgtgaaa

SEQ ID NO: 6632 - DNA, 127 bp, Homo sapiens
gcaaaagcgactcatgtgaaacagacaaaaatacctgtttgcatgtataagttttgtaaaatctttgtagggagagaaaggggaaatacacactagactaggccacggcataatgtacctcccatgt

SEQ ID NO: 6633 - DNA, 2150 bp, Homo sapiens
cttctcgccgctcctcgcagggcttgcactactgggagtcgggccggtcccagcgcgggcgctgcacaacgtcacggccgagctctttggggccgaggcctggggcacccttgcggctttcggggacctcaactccgacaagcagacggatctcttcgtgctgcgggaaagaaatgacttaatcgtctttttggcagaccagaatgcaccctattttaaacccaaagtaaaggtatctttcaagaatcacagtgcattgataacaagtgtagtccctggggattatgatggagattctcaaatggatgtccttctgacatatcttcccaaaaattatgccaagagtgaattaggagctgttatcttctggggacaaaatcaaacattagatcctaacaatatgaccatactcaataggacttttcaagatgagccactaattatggatttcaatggtgatctaattcctgatatttttggtatcacaaatgaatccaaccagccacagatactattaggagggaatttatcatggcatccagcattgaccactacaagtaaaatgcgaattccacattctcatgcatttattgatctgactgaagattttacagcagatttattcctgacgacattgaatgccaccactagtaccttccagtttgaaatatgggaaaatttggatggaaacttctctgtcagtactatattggaaaaacctcaaaatatgatggtggttggacagtcagcatttgcagactttgatggagatggacacatggatcatttactgccagggctgtgaagataaaaattgccaaaagagtaccatctacttagtgagatctgggatgaagcagtgggttccagtcctacaagatttcagcaataagggcacactctggggctttgtgccatttgtggatgaacagcaaccaactgaaataccaattccaattacccttcatattggagactacaatatggatggctatccagacgctctggtcatactaaagaacacatctggaagcaaccagcaggcctttttactggagaacgtcccttgtaataatgcaagctgtgaagaggcgcgtcgaatgtttaaagtctactgggagctgacagacctaaatcaaattaaggatgccatggttgccaccttctttgacatttacgaagatggaatcttggacattgtagtgctaagtaaaggatatacaaagaatgattttgccattcatacactaaaaaataactttgaagcagatgcttattttgttaaagttattgttcttagtggtctgtgttctaatgactgtcctcgtaagataacaccctttggagtgaatcaacctggaccttatatcatgtatacaactgtagatgcaaatgggtatctgaaaaatggatcagctggccaactcagccaatccgcacatttagctctccaactaccatacaacgtgcttggtttaggtcggagcgcaaattttcttgaccatctctacgttggtattccccgtccatctggagaaaaatctatacgaaaacaagagtggactgcaatcattccaaattcccagctaattgtcattccataccctcacaatgtccctcgaagttggagtgccaaactgtatcttacaccaagtaatattgttctgcttactgctatagctctcatcggtgtctgtgttttcatcttggcaataattggcattttacattggcaggaaaagaaagcagatgatagagaaaaacgacaagaagcccaccggtttcattttgatgctatgtgacttgcctttaatattacataatggaatggctgttcacttgattagttgaaacacaaattctggcttgaaaaaataggggagattaaatattatttataaatgatgtatcccatggtaattattggaaagtattcaaataaatatggtttgaatatgtcacaaggtctttttttttaaagcactttgtatataaaaatttgggttctctattctgtagtgctgtacatttttgttcctttgtggaatgtgttgcatgtactccagtgtttgtgtatttataatcttatttgcatcatgatgatggaaaaagttgtgtaaataaaaataattaaatgagcaggaaaaaaa

SEQ ID NO: 6634 - DNA, 332 bp, Homo sapiens
tgtaaatgctttgccccagcaccattgcttccattgtgaggcgtccagacgagcatggcacccatccccttcttgtccagccacccctgcagctctgtttggaacacctcctccttttccatgctgtgtcggctctgcttgtctcctcttgctctttttattgtggcactgtttagtagtcatcttttgttcttttgaggggcatttattgagcaactggcttgtgcagagcatagggagggagatgtaccaaaaggagacggacacgcacctgggagtcctggttcaaatctgtgagctcctccctgtgaggggtgccccgttaaccttga

SEQ ID NO: 6635 - DNA, 705 bp, Homo sapiens
ttggagacaatgacaacggcagccgccattttattgccaatcagccatgagccccgccttccatacacaatgacatttcatccccacaatcgattaacacaaccatgatagccatgaactcccaactcctccagctgctagtgctcaacgggagagtcccctccaggtctgtctcattgcagagcccatattctttctgcctggccagcagttactctcctcaatgagcaggcactggtgcagtcttgggtgggcaccagtcacccctatggaaatccttgatggatgttacaggacaggattggatgtgaggggtcttggaaatggggctcaagaatcttcatcatgaggcgtttctgcgcctactgacctgagatacagagaggaagttccatggacaccaacacccagttccaaggaggcacacattaaccttcccatgatgtggatgtgtgggaacacatgggcttttaatcacacgccatgcaatccacagaagagctgacccagcctgggggcatacacgcactcatgtgtactcaacgttcacatgcactcacaccctggctcggctctggggacgctgaggccgctgtgagaagaaggacggctctggctccgtcagatgaggctggcaatgctggatgtggtctcgtgacgccggccagcagacaactgtcctgagatgctgaagatgctgccatg

SEQ ID NO: 6636 - DNA, 883 bp, Homo sapiens
aaaatcagaagacacccattctgcaagcatggatcctgttcctatcccagcgtatcctaagcatggcagactcgggatcctcccaattctctggcatctattgaaagtgtctccaaaccttcactgagtgagtccacagactcagtgtcattgatggcaccattgacatggtagccattcataccacctttctctgaggaaggcgcagactgttcctcttgaatggaaactgatttactggaatctgggatgccgttacttggttctgcggcaggtttcggtttgtttttcttctttttgttctttttcttgcctgttactgtccattctttgagtacttcactggcactaccttccatgaatgcttgtactgttttgtccacacagttatcaaagtgctgcaaaaccaggataatttcattgttgctcttattaggaactattgcacgtaccgcatttatcttctctttcatgttctcaaaagctcctccctgggccagtacggtattggactgcaaatcaaaaatgaatcctgatgaatccttctggttctgtttcctggacattgtcgtttcttcgatctcaaaaaatatacaagaaaagtatccttttgccttgtctgggttttgagtgtaggtatctctgatttaaaagtgggcaacggaagtgtgcagttggaagcaaaaaatacgaaatcctgctgttcgaaattctgctcactagctgttaatctcctttccttttcttgtatcaacttcttgtcaggaagtatcattgcagacattcatgtctccttttccagggagattctaacggcttatcaacatctgaagatactggaacttgatatcctcttaaggaaaatttgcctccaaattttaag

SEQ ID NO: 6637 - DNA, 998 bp, Homo sapiens
ttggtagttctttccaaaactttatttagagaaactaaaatctcgtaattttcatattatacaaaatattattttgagccattaacaaaagggaatataaaaaccatagtttgtaggccatacaaaaataggcagcaggccagatttggcccatgggtggtagtttgctgacccctgctctagattaacaaatttacgggctttggaagctttgtggggcaaggaggcttgatatacaggttggtggtgcagaacaaagaggaaatttctaagtataatagaaaaaagatgtaatgctgtccttcatgtatcaacgctggattcaactatgtgcaaaacattttatcatatgtcgctggaatcaaagatgcagaagtcacagtctctggtctcgaggagcatatacttctccatggtagcttagaaatggaaagtcttccttcaaagtacaatacatccttctcagactttgacaatgcacccgtgcgtgctcatctgtgaggcaggtagtttctttggcaactacagctgaggcccaaacatgcattattatcttgaccacctgtgcttcttcccctccccagtaatcataccagtttttctcctggtctccaaattattctgttttgcattatcattttggggataatacttgggatgatatactaaaagtcaactggtcacatctttttaaaaattaccattttaattagtcttcagagataccctctctctcttaataggtaacatgcttgtgacgcctgtgtttttttgtttcaatccaggcagaaacttctccctaggaggcaggataaacggatctatctcaaggcaacaaagacacatcacaaaaacatttttttcagagcaaatgttaaatacttgatccaacagaacacaaataaagataaaatgtaatgctctattatatacttcagttggttataaagattgcggatttgaaaaaaatcagcagaaatccactatgtcaatgtcaa

SEQ ID NO: 6638 - DNA, 542 bp, Homo sapiens
aaagcactgtactaggagctgagaacacgatgatgagcacaacacagttcttccctttggaaacatagataagtggagggaatgtcatcaaaaatgtaaaacttcactatgagatgagttccgtgataggattttcttagggaaacctgagaaagagttgagactaaaggtatgtgtcatatttttcacaaggcaaaactgggggaatgagatatacagaggcttgggctagaaaaaagataccgttagtccacttacttttgagacagttttggctgctttccctcttcagtgccctgttttagaactgagtccttactgaggcttgtaagatggctattatgggaggtgagagtgttacaaaatgaggctgaagaggtaggtaaagaagccagaccacttcaggctccctctggctttattaaagcaagataaatccatggtggaaaatcagatttgcaagaaaaggtagttgaactaggttgcttattgttgtctagacaagagaccagcttggactagtaaaattagtgaaataagat

SEQ ID NO: 6639 - DNA, 294 bp, Homo sapiens
ggcccagacgtttcgggggcgtagacgctgaggggtggccgggtgggtctgcggctctgaggcctggctttcattctccatcagtccctgtacgagcggttaagtcagaggatgctggacatctcgggggaccggggcgtgctgaaggacgtcatccgagaaggagctggagacctagtggcgcctgatgcttcggtgctaggtacgccctggggcggtttgtccgcaggatccatgtcatcgcactctcagtccccaaggcctcagtgtgagtaagtttatcagatgcattca

SEQ ID NO: 6640 - DNA, 1034 bp, Homo sapiens
agcactctgtcttgcgaccactcacaactcttctcccctccctgtttctccctgtccatctgtccccacatccaccaagcagggtttccaggcctgaggtgcccgccctggccccaggagaatgaaccagccgcagaggatggcgcctgtgggacagacaaggagctcagtgacctcctggacttcagcatgatgttcccgctgcctgtcaccaacgggaagggccggcccgcctccctggccggggcgcagttcggaggttcaggtcttgaggaccggcccagctcaggctcctggggcagcggcgaccagagcagctcctcctttgaccccagccggaccttcagcgagggcacccacttcactgagtcggaatagcagcctctcttcatccacattcctgggaccgggactcggaggcaagagcggtgaggtgcgcgcctatgcctccttcgggagagacgcaggcgtgggcggcctgactcaggctggcttcctgtcaggcgagctggccctcaacagccccggggcccctgtccccttcgggcatgaaggggacctcccagtactacccctcctactccggcagctcccggcggagagcggcagacggcagcctagacacgcagcccaagaaggtccggaaggtcccgccgggtcttccatcctcggtgtacccacccagctcaggtgaggactacggcagggatgccaccgcctacccgtccgccaagacccccagcagcacctatcccgcccccttctacgtggcagatggcagcctgcacccctcagccgagctctggagtcccccgggccaggcgggctttcgggcccatgctgggtgggggctcatccccgctgcccctcccgcccggtagcggcccggtgggcagcagtggaagcagcagcacgtttggtggcctgcaccagcacgagcgtatgggctaccagctgcatggagcagaggtgaacggtgggctcccatctgcatcctccttctcctcagcccccggagccacgtacggcggcgt

SEQ ID NO: 6641 - DNA, 649 bp, Homo sapiens
gttaccaagctgaggtgggaggattgcttgagccatatgctctaatatattttaaaatacatattttaaatatattttgagtggtaaaatgtagcagataatgttacataaaagaagccatggtaatgacatgacattactggttttgagttgtttgtgtagtagttagctattaatactcaggtataatgatttgctatttaaactacacaaatgctcaaagtccagcgataccctgcacccaaattcagtggctagattaccttcttaggaaagcacaacacttcaatggagtgacactggcatgagtccactagagggtgtgtatacatggcctgagttcaaattgttcctgctgtgagtactgcttttcagcttcaagttattcttatcggccacagtactgtttattccacttagtaacagttctgtttacagagcactttaacataaattctgatttttaacatgaaagctgtctgatgttggtatttttattttaatctttagagatcaagaaatttttttagtgacagaatagggactttattgatccttaaatccgcccctcaccacaataaaggaaaaaagcaaaaacatccttgactcatgtattgaagggtcttttttgaggaagggtcagtttttg

SEQ ID NO: 6642 - DNA, 453 bp, Homo sapiens
  misc_feature (1)...(453): n = a,t,c or g
aaaattttctttttaattctcagcaagtcaatgtacttctacagaagggtgcgcccttacagatggagcaatggttgagtgnacacctggacaagggagggnaagggttcttatccctgatgcacatggcccctgctgctgtgtcattccctattggctagggttagaccacacaggccaaactaactccaactggctaatttaaagagagtgacagggtgagtggtttggcgggaaaaatggttatggcagagcatggaaatcagaatgagtcaggatggagcaggtaatcgaaaaaggttgctttacgaggaagttaagtttaacagtagaaggcaaagaactgaacatactgacatattgattctttgaagagaaatttagaactcatacttaacagtacttggagagtgtgcatgagccattccctccgcctgaattgctctgcatagc

SEQ ID NO: 6643 - DNA, 385 bp, Homo sapiens
acatgggttatggccacatgttcctctcatctctgttcactaccaggttaaatctttctgttcattgcctcttgctgagagtgtatctcagcctaactaatgtctacattaatatttaccaaagaactgaattgtctagttgtttatattctcatgaaaataagatgaggtttgtgggttagcctagcagtgaatggaaatttattaggcttaaaagccagggaaagaatagagacaaattgtaacctccagtctctccctcaggtttccacaataggacatcagtaattaataatggccacttcaggaatccttctttggacacagtgggtcttgggccaacaattgttgaatgatcagagagggcaggccagttagaacctat

SEQ ID NO: 6644 - DNA, 1426 bp, Homo sapiens
tttttttggctctgtatttgcattttatttttgtgttcttgtcagtttgggaatgattaatattaaacatttatttgagaaacaacagcctgtaaataatttaaacacacactatattgcagccaggcaaagagacctttaaaagtgaatattcgtgattctaaaagtgtttttctcccacacgttcacttactcattttcccagcaatgtggtctgttcctttaggcaaacaaagtctagccaggtcaaatgtgtgggtgggtaatatgtggaaaatttgtttttaagtggttggggaggggacttcccccacccagtgggcaggggcttgtggttgcttacagactcagggagggtaacccaaatccctcacagataggtgcactaatctacaaacagcagaaggccaacaagagtaacaattttgtggttgttcatttgccatttattgttctgcaaagacacctcatgagcaccaggtggcgatgtcctttcacggagcaacaccaaagacttcaaaaacattccagttacaaacagaacaattcacttaggacattcacctgcctctcccagaacccccaatctaatgccggggaccacagagaaggaaaggggtcaggggtcctttcttgtaccagtgagccttcccccagttttctcatgcacacaacagtgcaataccaagacgagtacttttgaccaagtataaaaccacagagaagaccaaaatgtacaaaaatgggaagagaatgaaaacacaaaggcacacgcagccacaaatacacaattaaccttttaggggatgagcatctgacgaggtttgtctccaatccaatttgtcatccctggagactctggaagggagaaactaggctgctggtgctaagaccatgaaagggaaggcatggaatcccctacttgggccaggagagcagagcagagcttctagtgggaaaacactctgtgtcaaggtagtagatgcacagggctcagctggcagggttctcactgaaatctagactgcacctttccaggttggcacaagacaaagggcagaggaatgctccccgccttgccgggccacagtgttagaaaggaaattcaagatccctactgcccagaaagccacacaagaacagcacgaggatgaggtagcccctactgggcatctgcagagaggacaagaaagggggcacagacacaatcaaaagcccaggggaaaaggcttgaaggtatgaagtcgacctctccaagtggtattgccacaggcacagcggctccctttccatcttgagtcttcttccttctgctcctggccacccccttccccacctataccttcttctccctgatgtggggaaactgatctctccccagtgcctaattccattttgaaagtctgtcttcttttcttccccacct

SEQ ID NO: 6645 - DNA, 95 bp, Homo sapiens
agccctcctctgaattttacaaaatgaggaagaagtgattgcaaagtgtggttaagtgactataccgaggacacagacctactttatgacagagg

SEQ ID NO: 6646 - DNA, 811 bp, Homo sapiens
aatgagagctaagctacgggtcagcccactgaggctggcagagatcaagctacctgcccaggtccacactacaggtggactgagactcacacctcaagtgccctggagtttccataaatctcattaaggatgctggctcatctgctttggggtgattcaggctttgagggtcatagcaagcaacaaacccaggccaggctagatcagcacagaacaagattatagagtccttcccagaattgtggggcctgagactgctgtggcactttctcttaagcctctgcaggggaacccttctctggccccagccctctcttcctcagaattctttagttggggggtcctggcctttcagatcccatttctccggatggaggattaaaaatacctatgtcatcaaatacaagacatctttgggagtgagatgcgctatcattttgtgaattaccatggaattcattcatttgatgacactctggatttaaacagtcagggtgacctccaggttgataaactgtgaaaaatggtaatactatagtaatcagacccagtgctatttattacaattaaaacgaaaaaaagacaacgctgggaaatctctgcactacccttccttacgtgcaatgacgggggcaatcttaatcagttcaatcaatgcaagtggaaataactgaagaatgagtggttgaatacttagatttcattttgcttcaaaccgatcatctttacaagtgtttcttaattcaaggctaaaagctggggatatgggacttctgtatgaaaaacagtctttagcatcagagcacctcta

SEQ ID NO: 6647 - DNA, 2321 bp, Homo sapiens
  misc_feature (1)...(2321): n = a,t,c or g
cagcacaagattcagaaggcctgcccagcgggccctccggaggccctgcctgccacccctgccaccacagcgttgctgggccaggaggtggtgccggcagcaccaggcccagaggagcccatcactgtggcccacatcgtggtggaggcggcctctctggcagcagacatcagccacgcatctgaccttgttggtggtgggcacatcaaagaggtcatcgtggctgctgaggcggacgtgggagacggtgagatggccgaggccccgggcagcccccaccagcaggggctggggctcgcaggggagggtgagcaggcccaggtgaagctactggtgaacaaggatggccgctatgtgtgtgcgctgtgccacaagaccttcaagacgggcagcatcctcaaggcccacatggtcactcacagcagccgcaaggaccacgagtgcaagctctgtggggcctccttccgcaccaagggctcactcatccggcaccaccggcggcacacggatgagcgcccctacaagtgctccaagtgtggaaagagcttccgggagtcgggtgcactgacccggcacctcaagtctctcaccccctgcacagagaaaatccgcttcagtgtgagcaaggacgtggttgtcagcaaagaggacgcacgtgcaggttctggagctggagctgccggcttggggacagccacatcatcggtgacaggcgagcctatagagacttcacccgtgattcacctggtgacagatgccaagggcaccgtcatccacgaagtccacgtccagatgcaggagctgtccctgggcatgaaagccctggccccagagccccccgtctcccaggagctcccctgctccaggaagggcagccgtgagaacctgctgcaccaggccatgcagaactccggcatcgtccttgagcgcgctgctggggaggagggtgccctggagccagctcctgctgccgggtccagtccccagcccctggcagtggcagccccgcagctgccggtactggaagtgcagccgctggagacacaggtggccagcgaggcctcagcggtgcccaggacccacccatgtcctcagtgcagtgagaccttcccgacagcagccaccctggaggcccacaagaggggccacaccgggccgaggccgttcgcctgcgcgcagtgtggcaaggccttccccaaggcctacctgctcaagacagaccaggaggtgcacgtgcgtgagcgccgtttccgctgtggcgactgcgggaagctctacaagaccattgcccatgtgcgtggccaccggcgcgtccactcagacgagcggccctacccttgtcccaagtgtggcaagcgctacaagactaagaacgcacagcaggtgcacttcaggacacacctggaggagaagccgcacgtgtgccagttctgcagccgtggcttccgagagaagggctcactggtgcggcacgtgcgacaccacacaggcgagaagccgttcaagtgctacaagtgcggccgtggcttcgccgagcacggcacgctgaaccggcacctgcgcaccaaagggggctgcctgctggaggtggaggagttgctggtgtctgaggacagccccgcggcagccaccaccgtcctcacggaagacccgcacacagtgttggtggagttctcgtccgtggtagctgacacccaggagtatatcatcgaggccactgcggacgatgcggagaccagtgaggccacggagatcatcgagggcacccagacagaggtggacagccacatcatgaaggtggtgcagcagatcgtgcacccacgtagcgccggccaccagatcatcgtgcagaacgtcaccatggacgaggagacggcgctgggccccagaggggctgccgccgacaccatcaccatcgccacccccgagagcctgacagagcaggtggccatgacgcctgncctcggcccatcagcgagggcactgtgcttgccgcccgggccanggacaagtggcactgaacaggccactgtgaccatggtgtcatcagaggacatcgagatcctggagcatgcaggcgagctggtcatcgcctcgccggagggccagctggaggtgcagacggtcatcgtctagcatgaggtctgcggggtcctggccgggcagggacagggcagaggactctgaagcgccccacccatgcctgcctggcctggtagagaagatggcacaggatggaggcgccccaagacggacagtgtacataagagtttcttgttgctttacaataaaacatgagaacctgccaaaaaaaaaaaaaa

SEQ ID NO: 6648 - DNA, 753 bp, Homo sapiens
gtattagcaatatctggccagatttagaaccagtcatggaaacttgtgctcaaactaaaagtaggtcatcacttcccagaaacagaataccttgtgcttcctgaaacagcatatatcactgtgaaactaaagaatattctacagacacccctgtagaaagaaacaaagaacaggatagtttagaaagctttctgttagctgtattcagcaaatttcatactagttgctcaggactgctagttggtatgcttttgtaaaacgagattgaaatttaataaaagatgcaactaaaatctttcctgcatgaagctaaaagcactcaagttgagagaggggcaagggaatctccccaggatgactgaagatgacttctttttacagcaagtactgttagcctttctgcaccccttagcttggcccctgctccaacttctgggtcagcagcaaggtgaactcaacagaagttgctcttgactgtttgaaggtagaagcagcctaccttttctctttgctaaaagaaggtcaaaggcttcgcaaccaggatgcaaggtctgcggtccagaagcttgcggtgagtgtgtgccactgatggagctccaagcccacccaccagccactcctgatggggttgctcacactgcagctgccctatcaccaccctgcacgttccttggaagatttaaatgtttggttgcaaatgaatgttttaaaaatgtatttaatgcaatttttcctgctctcaacatgaccacc

SEQ ID NO: 6649 - DNA, 469 bp, Homo sapiens
cctcgaggccaagaattcggcacgagccagagtgaaccaactgttatctgtaattcaacagataattaactgaaactcagtgctcaaattgctactgggagtttctgcagccaaggtcattctcatggtgctgcttgattttgtttctgtgtctcttatatcgttttaggcagggaggaacttggattgtccttcagtaaaattccactttgatgcgcaaagcgaacttgaatttctgcttggcctaccacaggcctgcaacatgcactttctcctcgaggtgagaaggtctttttctctccactctgaaacaccgctgcctgcaccttttgctgagtttagagtagcatcatactttctgccaccgaatgccacaaatactgccttttcaacttgggttttgtaaaatgtaatggtactaaatccgccaaagggataaagcacccttactttggatttgccagtccca

SEQ ID NO: 6650 - DNA, 415 bp, Homo sapiens
ctttttggtatataaactcatttggcctgtttgatgagcccattttacatctctggttgttgagataccaatttctcagtagttattcatgaagcaccaacgtcttggttattttcacgagacccatttgtgcctgtatagaaattatctgaatcttgctaatacggacatatctttggcttgataagtggtggagctgttttcttttccattctacaatgttgttagtcttttaatacaaaaagaccataaagaggaatcttaagaaatgcccccaaagtagggatttgttttctggaccacacattttctggatggacggctggcaataggaaactaaaaagtttaattttccaaaaggtttaaacaggaaaactttcacttcttggggtgggtttaaaggtttaaacactta

SEQ ID NO: 6651 - DNA, 514 bp, Homo sapiens
  misc_feature (1)...(514): n = a,t,c or g
aaaatcttactgcctttttttttctaatcatgtgtcaaagtgtgggaagaacttttatttatgttttaataaattgtcagtataaccatttttacttgaaaatattataatttttcaagtaaacaaattgtttctctaagttgaaaattttatgatggaataaaagtatttttcctcaaaacacatagaaattttacaacaatattttagagttaactaaatgtttctttagtagtttagtcacttaaaaagtgatatgattatgaaaatacttaaactttgtcttttaactatttctaataatgctattgggtataatttcatatttttatactgatcttttctccaaactttagggtaaaaccataccttcctggtaaccccctgccccaccaaacctggaggtcccccatttaccttctggaatggctggtagggnttggtaaagggttggcntgggatttccggttattaaattnaaggtttttaattatattttanggcccctgggggg

SEQ ID NO: 6652 - DNA, 444 bp, Homo sapiens
tttttttttttccagatgtaactcttgtcttttattccagcatctcccagagctccaatatgtacagactttatttatacacatataatatacaccatatatacttatttatagatattcacacaccagcccacacactcgcacacactcacacgcacacacccttccaggaggggcgtgtggctgccttggagtcccgctagggcccaaacaagtgatactgggcttgccagggcagttgtgaggttttgtgttttttgcttttaaaaagaaggccatttcctccagatgtgtcctccctctccccaagccctaaaactcctccccaaaacactctgaaaaaaatttttttaaaacaagaggttttcctttgctctggcccaagtagtttctggagagtccaggcccatccacaagtcccgtgcaggtcctagagcacggagg

SEQ ID NO: 6653 - DNA, 384 bp, Homo sapiens
aagctacagacagaaataagttcctgaaaatttagaaggtatctatggtaggctgctaattatcttaattcattcttccacagtaatcgaggtttagttagtcacactgacacccagctacagagtatatttcctggcttccccactgtagctaggtatggcccatgcaattcgttttcttcaatgaaatgtgagcaaaagcgatgtacgtatcttcctcatcacttgcttggcctcattcttcctccctttttcccatcccttcctcgggctaagactcagtcatgactaagtggtttctctgctttgacaaaacctaaggagaaagaggaacaacaaattgaaaggaatcttgatctctgaattatcatgaggtgtgagaga

SEQ ID NO: 6654 - DNA, 603 bp, Homo sapiens
gaaatgtttagctgactcattgcaggaagttacactgtaaaaaagtgaatcaaggcagggaagacagatttaagtaccatgcagctcaaaatgacaattacattgtcattttcattgtgaatacttttaggttctatattggctgtgatctttgtactaactggtatcatggagaatgtgttggcatcacagaaaaggaggctaagaaaatggatgtgtacatctgtaatgattgtaaacgggcacaagagggcagcagtgaggaattgtactgtatctgcagaacaccttatgatgagtcacagtgagttctgataagagcatcatatttaataatttaggaagccaaattgctctgactggttacttatttattttaaaataaaaagcagatttttttctacatttattatacacttacattacaaattccttttcatttttctctttttccctttttacctacccttcaaaatttatcttgcttcatagtgaatgtttgagacacattggggaaaatgtggtttaatggtagatttgattcttcaatatgtaacatagaaattaatgagattaaaatagcctgacttgtttggactttaa

SEQ ID NO: 6655 - DNA, 1534 bp, Homo sapiens
aagccctgaagggtcaaaagaaatacaaaagcaaaggctattttctttttttttttctttctttcattcattccttcctctgtttctttctttcttcctttcatttttttttcttttttaagagcgagcggctctgcggtggcggtttggggtgggcgccgccgaggtgaggtcgtctcgcctcccgcgcgccggtagattggttgtttcattatggatggaggggatgatggtaaccttattatcaaaaagaggtttgtgtctgaggcagaactagatgaacggcgcaaaaggaggcaagaagaatgggagaaagttcgaaaacctgaagatccagaagaatgtccagaggaggtttatgaccctcgatctctatatgaaaggctacaggaacagaaggacaggaagcagcaggagtacgaggaacagttcaaattcaaaaacatggtaagaggcttagatgaagatgagaccaacttccttgatgaggtttctcgacagcaggaactaatagaaaagcaacgaagagaagaagaactgaaagaactgaaggaatacagaaataacctcaagaaggttggaatttctcaagagaacaagaaggaagtggaaaagaaactgactgtgaagcctatagaaaccaagaacaagttctcccaggcgactgttggcaggagctgtgaagcataagagctcagagagtggcaacagtgtgaaaagactgaaaccggaccctgagccagatgacaagaatcaagagccctcatcctgcaagtctctcggaaacacctccctgagtggcccctccatccactgcccctctgctgcagtatgtatcggcatcctcccaggcctgggtgcctactctgggagcagcgactccgagtccagctcagacagcgaaggcaccatcaatgccaccggaaagattgtctcctccatcttccgaaccaacaccttcctcgaggccccctagtttctccgtccctacacagggagctcctccccaagggtagatcggaccgttcatgctgcctataggcattatgtccctcaaaaaaaaactcctttgcctgcatcctgtgtacaacatgacatttttaaccaatccaatctaaaaatgtgccagaatccacctgtggcccgaatcgtgtttggttcctctttctactccactgcagatgaccaaacctgtcccgctgccactttcctcactgatattgggagcgagggcaaggcccagccgatagttccactaaaaatgccccaggagaataggcaccggctggcttgccaaagggtttgggttttattgctttctgttttttcttttcccgacagcacaaagaagtaagggcagttattggacacggtgttatttaaacattctattgtaaatgaatgtgttgtttggttctactgcattgtggagcatgcgggggaagagaactgacccaggtaatgaaatgggagcccttccctggaactaaccagtccttgatgttgtgtgactaagtaaagatgataaacccca

SEQ ID NO: 6656 - DNA, 323 bp, Homo sapiens
  misc_feature (1)...(323): n = a,t,c or g
tatatgtgaaccctggcactatttttccagcttttagaaggagtcctcattttccagaactgtgagcaggaaagacagtctcctggattcactttttcctaataaaactgatgtgtttttttttcttagtgaaaagtcacataagatggatatatgctatgcaaaaaataacaatcatatagactgacagagtaattgatgccttatgccagtagangaacaatacctgggaggtcctgaaaggtgaagataacagaatcacggggatggtttcccccacactgtccttgtggtagtgaagaagtctcatgaggagctgatgg

SEQ ID NO: 6657 - DNA, 92 bp, Homo sapiens
tttttttaaaaatgagaaaacagattttagagaggtaaagtaatatattttaaagtccagcttggaagtgaccgggttaggatttaaatcca

SEQ ID NO: 6658 - DNA, 517 bp, Homo sapiens
acaaccaaagctcattgacagctactgtgtgtccttggagttagaactcaaggatggaatgggggagggggatggctgcaaaatggtgtaaaaagaattcaagactggcaggtatcatgctggacccctgttgacttcattcaataggaatggcatcgtgtttgagaggctaaagacctggcaccagtgaacaagacatagggtttattgagggaacttacatacagggcagtcccgtccagtggtggtggactagacaggagaactgtaacaacttgtataaagcatgcagtttatatagtgttttcacttaacaccctcctcctaggaacctctacccattaaccttcacttaacccaaaacaaagagccttgatcctctgtacagcctgtgctccacaggatgggccaagggataaggaatgaatctccatgttggctacttctggattccttagcttacagctacaaacacacattcttcttagaccatagggtcattctcagagtgtggcta

SEQ ID NO: 6659 - DNA, 510 bp, Homo sapiens
  misc_feature (1)...(510): n = a,t,c or g
cctcgaggccaagaattcggcacgagaatactcacttccaaaatcctctttaccaaactcctataacactacaaggtcagtagcctctttgtatgttcactgaccttgtagttgtatgaaaagttattataggcaacagcgttaccagatattttgccactataaaacatgatcctccatctttccagcctccggtatctgtttcctctcagcccttaatctgaccactaaggcagtatcactaaggcaggactgcataggtttttattgtagcagcacctcacttccaggtaccagttttctgtattaggataatgaaacactgaatatacagatggacaatggccagatcatatataaaactagaactctgacccatgacctatgtagcaataggcccagtcaggacttggcagtaattaccagcttcctaatttttgngccttctttcaattcgggacgactcanagaaagccaaatatgctttccaatcaccncntaggaaccccg

SEQ ID NO: 6660 - DNA, 1574 bp, Homo sapiens
caactgttatcctaatctagaaaatgaggactggcccctgggcaaaagtgacatgaggaatttactctggaagaggaaaatctgggtggctttccaaggctaagataggtttgtatttcaccctgtggccaagctacagaacttctgagattgtggaagaatttttgcaaccagcagggaaagaggcctcttactgcctaaacacaaagttacactgagcttttctactgtcctttgcctattgctccctctatcatgtaaagatctgggaaggatgagaggcagggcctgcttgtcatgagctgcactcttttctttttaactaatcattgacaattggaagaaaattgacgttaaagaagtttctccattgtcttactaacaaaaccttttgggtttcattaattgtccttgaaattgagttcctttggcatttttccttgcagtcatcagttaagcatgttgcatcctgaattcacagaagtttagctttgcaggtttgaatctctgtaatttaactcccgtggacttggtcgagttttcagcaggttgggagccacctctcttcatttcagcagtgagtcatcccttgacttttcaaatgacagaattttttccaattgtaaaattagcactgtaaaacaaagaaccaaagtggcatcctaagagttgttaaacctgaagtctagtttatgaggaattgtccaagttggagtttaaatagtatctgcttttgtctcaaagcatctaagttattctgacagaaaatggtaagtcagctttgcaggcagatgcgcctctgggcctcctaccttgctccacagctttctggccatcttgtctcccagggccatgccactgctctgccacatgtcagcaaatttctttccaccagtcttatagcatcttacatgatcaaatcatcacagaataaccccgtgatagattattgatagcaatagagaggggcggctttgtcactgatttttctctcagattccttttccatctctcatccataaaggaaggactgaaatccaaaggcattctccttttgtacctacagtatccagaacccacgtggggcagccttctgcttatgacaataattggcccattgcatgcagagagaatgtcttcatagagagaatgtcattaaatacttgaatctgcatgacagtttgacttgaatgcaacagcaggaaaattttgcaagttacataattgtatatacagtaggttttcttaagtctcttcggttcatcctttgtaatttgtgtgtgtatctgtagtattgccaggcttttggagactattcttacaggcagtatgtcagtcatcaaagaaaatgctgtcacctgccattgttgtatttgtgggtatttatagttgtatgtatgtaaatgcatcagtgtgtagattgcatatcagtgtatggtacatgtacatcaaaattatttttgtccttaatcagtgtgatatgaaaagcaagtacaacctcataggactgattatataatgaagttgttgagagtatatatagtggtattgtttattaaacttaaactccaata

SEQ ID NO: 6661 - DNA, 479 bp, Homo sapiens
  misc_feature (1)...(479): n = a,t,c or g
cagctgagtggtaacacagtcaaccagattgcctctggaaacaaagagttcttggttatgatggactgaaactggaagagacctcgctgctgggtgagactagccagggagcttaggggtaaggagggcaccccctgtccaacagggagattcttaggtcagggagcacctggctggcttcctcactcaccgccgaagtgggcattggatttgacctattacgaacctggagcaggaccagggatgccctggttgctctgcagaatgtggctcagaggtangtgtgatctgctcgggatacccantcactgtgctcagagccatgcntccccgggcagccggagacattggatgtgctctggaatgtctttaacaccctttttttgttagttccagaccccctgagccacagaaagctccttccagaccttatcaggataccagaggaagttatggcagtgatgccgaaggaggaggag

SEQ ID NO: 6662 - DNA, 382 bp, Homo sapiens
cctgctcagtctgtatcaggcccgggatgaaatcgtcacttagacgctcaggggtcctcccacccatctggccaacacaaacctgccagcatagcactgagtggaaggttccagtgcacccacaggcctggctgttaaaatgtccggcctctccagaggacaggttaagttcacactgagaaagcctgggttctctccagctagcctgaattaaagtgagaaggatgaggcacagcacctgtgggaaatggcgctggaaagcaagtgtacctaggaactgcctctgggccaccgaacgtgcgccggcccaagtgttctcacgacaacccaggaggagtcctccatctgggccacttcccacccgttaggccccgaggggaca

SEQ ID NO: 6663 - DNA, 363 bp, Homo sapiens
ttaaaaattttttttttttaatccttttaaaaaattctttgagcttttattattagttccactttacagctgagaaaactaatgtttaaggacattaagaaacttccctctggaagagttagaggtgagattcttagccacttcaaccttgtgcctcttataaacatgcatgaataaacttgagtggaaagaaacttcctggcatgcaagactattggttagaattgagatgtttctcctcagaaatgatcagagtctagacattgaagtcaagtttgctaaaaagcaaggttatagatagaaaagaaaatgaaggccaaatggcggtggcttcatgcctgttaatcccaacaatttggggag

SEQ ID NO: 6664 - DNA, 672 bp, Homo sapiens
  misc_feature (1)...(672): n = a,t,c or g
tttttttttttttaacaggtgggaacaagttttcttagaaactgttatgaaggaggagccctccacccccacccccacatcttttactatctgacatgttatcagatcagaggccttcagcctcagcaacatctggggattagagggaccccacacagctggggcctcagaccaagctgatccatgcctgtggggtggaggggaaatcctcctgggaaaaatatgtgcaaggccctacaggcccaggaaaggctgaccaaggcaaggtgagtcatggtgttctaagctgaatcttttgcccatctcacagaagcaggcaggaagcaccaccattgatcagctttatatggcacccactgtatacaacagacagacaaagacagacagacagaggcacacaccacttctaagctcaacactgctcaccaactagaagcacctcggttaagcacatgtgagacactcttgcataggaaagatgtagtttttaaaggaatgaagaagtattttggcaaaacatctacttccctcctaggtctggggtaaagagggacctctaattctgaagcttctacatattgaaaaatttccccttctcaatggcagtatatacagtagcaaaccttccaagtctgttgtcacagccctntacagatatcctgaatctacttt

SEQ ID NO: 6665 - DNA, 693 bp, Homo sapiens
tttttttttttttttcttctgaacgtgtgtcaccatttattgtagtttgcgttaggaattgaacagaggacattgtctgtggagggaaaaaaggaaaagaaaaaagaaagtatgctttttatagacttaatttcttcagaacactttatggtttcaaatcctttttttttttttaccccaaaggaaatttgagaattcaagtatgttaagtagggagcagtaatacaaaaagtcttatacttgtgtgcgcgtgtggctgtgtttgtctgtgtgtgttgaaaccggcagacatactcccacattcttgcaccctcttttgctttggtaaggccaaacacatcacacaaatgaccctgcctcaaactcacacacccaagggttgaagaattgatttacccccagaggataactgtgaaggtttcaaactgtcacgtagcattaaaaaaaaaacccaaccctcatctccccaaaatataagtcacataagtcctgatacacttacacccctagattttgctgcagctgctcctcagatgccgaagagaggcttatcacaaggaccagagcagcaggattttctttattttgtttagaataaaaaaatcttaaagggacatttcaaaagaaaaaaaaaactgaaattcaaattctgaaaatatcttgccttttttattaatcatgtcatctaacacc

SEQ ID NO: 6666 - DNA, 1038 bp, Homo sapiens
  misc_feature (1)...(1038): n = a,t,c or g
gctgcggcccgctgcttctgcttgcctcgttggccttggctgtgtctagcagagggtgggcggcggaaacggtttaagtgaatcgctgttctgtttctctctcatccacgcctgaatctgctctttcagttctggcactggttccagcatgctctctgtcagcgtctgccggttgaaggggtccgtgggggagttgagcaggtgccgcaggatgatggagcggtccatgatggtgccagagggcagccgcacggggtctgtcatgagggtgtccatcagagggtctctgaactcatcaggagcgtcgctgtagtcgatttctgcgcgtgcgttcttggccactatctcctccactttctcgggcgagcagcttaaatttttctattgctattgtggatttgatccctgccttccgcatctttgaaataacttcttcaaacaattccttactgtaggatctctggtcgtcagcaatggctttcgcgaaccgagcacagtccagctgtaagtaaatatccgtcagttggtccaacagcttctttggttcaaagccgtatttctcagggttttcaactttcaggtcacggcacttggggccacaaagttgctgaagattaaagttcagcattgcagccaatcggggtccaagctccggtctgaggaagggcttctggacctgcttcgtgaggatgtggaacatgtccacgggtttcgggtggccagggcgaggtaagagcgggacacacgctcatcctgagcaagctgagactgacgagcctgctgctgatcccggggcaactggtcccactgttctttgttcttcatctcttcctgcacttcatggattcgcttcagagactccagactttcatcgagcaaaaacgtcgtgtcgtttatcaacatgtttatatagcgaacaaactgcttcccggagttgaactcctccataaaggtgccatggtgagctatgttttncaaaggcttttaaaaatggtgctaatatgatagcgaattgtgaacttgtcataaaactcactg

SEQ ID NO: 6667 - DNA, 698 bp, Homo sapiens
ccgcattattcctttttctcccccatgttgaaaaaaataaatgtcctgagatgcaagatcagggacactggagcactgacatttagttcagtgcaggaactgaaggcagatgtaattcttaagaagcgtacctgttattatgaaccatcctcaacaaattgtagtggatcttgttttctcatagatacagcagttaaattttttaataaaagtaactaagagttatttggatgtattttagcatgcactgagcggaaagtacgacatttcttcattgggtaagtcctgattctttatgatcctcacttggttccagggccccatgcatctaagggtgtctcagagcatcctgcagtgctccagcatgatcgcagggaaaagctataggaggaaaagagtcaataaagtttagtttctcaacctcccacctccaccccataataatgacagctggttaatcatgagacacgtgcacaccccacacgccctgtacatgtttactcattgggatagcatgtcaggccagaaggctccatggtcatttctatgaaggtactttagcaggtcttcaagaaggcaagtggcctgggtccctgcctccccaaattgcaagctccctgctttatgtaggagacctatgtgtatattacagttctgtgtaagattattttgttattcttacccccacacccaccccc

SEQ ID NO: 6668 - DNA, 530 bp, Homo sapiens
aaaaggtcctcacaggtgtctccatacttcgccaaggttgtagcatgggcagtttcagtttcagcctaagagactggtgacatccacaaatgcagttttagaagcagaaaaggtcttggtgcctctgcagtacttgatgtattggggtcaaatctctacaaatttttctgtggtgatagcaaaatcaagagatggcttacaaaaagaaatattgaatttttatttttgaagtttttgttttttaaaaggttgggggtgttcagccactgagggacaaaacttagcatctaatttcaattatagtgtcatgcagagtatttctaaagtaattggttatcatgggaaagtattctcttttcaagaagttctttgattctgtaataactagaacaaataaagtagtaaaagaagaaatagttctgtgactaggaaaaaattgcttttgagagaacatagatcaattatactacttctaaggtagctgcagataagtggccttgacacattacaagcctggaaaaaaacatcag

SEQ ID NO: 6669 - DNA, 404 bp, Homo sapiens
gcagaaaagccttattttgtggagtacctagttcccttttgggtttgtctcttgactgctacgggcattgccccagggaaccatgacagtgaagatgactggccaagcttgtggactggccagcaagcttgggctgcctgagacgctttgaaatggctgccttctgagttggtcttgagggtgaagactgaccacccttctcacctgcacagtcacagtccctctcctgctgggcctgactgcagctgtcctcccagctgggccacctgaccagagaccaggagagaggccacagcctccagaccctccagagtcccacggagcggaggaagaaggcttaccagagagaccctctgatgcatgagccaggccccagcccttctccctgcatccaggtgtgtttc

SEQ ID NO: 6670 - DNA, 391 bp, Homo sapiens
ggcacgaggggctcggcgtgagccaccgcactgggccagagagaacttttttagtaaacatctattggggcactgagttagtcataaatgtgggagacacaggtgtgaagtcacattgataaaatattagtgatatgataaagggacaacattaggggaacggactctttctgggacaggaggcaaggaagaagtgtgagatgtagggagacttggtagttgcaagcacaggaactggtatgaaaatacgtgcgccagagagagttaagtatgcttggtgtgtagagtatgaggtttagagatgatactgatgtaggaaaggggtccagtcatataaaagtctgtgctccatgctgattttcttcaaagaaatgttgaaaggctttaaaat

SEQ ID NO: 6671 - DNA, 641 bp, Homo sapiens
ttgcaaatcttgtttgaattagtaatgtaaatttaatatttttatttaattcatgctgtaccatatccagtgatctctgctaatgatttttttttttctaattctaatgacctgggtaatggatgtatctttggactttaggatgcagctgccctgatgactcccaggagcagcagtagattgggaaagcagaatgaaatcttaagaaaactaagatgacaaaaaaatttatgtctagagttggaagaagtaggcaagatctattcaagatactaacaggtgattttataaagtgaaatctgaagttatgggactatctcaatctatactttacacaggcaagtgacagtgagcctgccctcatgtgtaaatttaagattgggttgcgttctgtaatggctgcagcctcaaagcctttgcacacagactaaaacactagttgaaatattgcataataataggcattggctctgaggtagaaataaagaatgtcatagagatgtatttttgtgtggtaagtatgtgataagatttttttccctaaaggtcagtttctcaatccgaatggtccaggcaggatgaaacagaaaagaacctatcaacctctacaataatattaaaaatctattctgactcccagt

SEQ ID NO: 6672 - DNA, 590 bp, Homo sapiens
  misc_feature (1)...(590): n = a,t,c or g
cttggagccagctccccaggaggccttttccagggacaaggcaaaagttgaaattctccatgggtagctagaaagccaatacatctagccctgctaagtcagaaaaagattatgaaaaatgttgaaatttacattcaaagcctcatttgcttatcttgctggagccaacccagtctaatagcaaaatagctgtcattgatacagaaacatcctcatttttaaatgtctgctttaccctgttactgagtttgagatgacttaaatcactgtgttggaccctcttctggaaccaaatctttagcattgatgaaaatagttattttattctttacatccttcaccccacactatggtcagggcatgaaacaccctgttgatcccttcccagggctcggcactgtctgctcactggagccggactcccaggttgtaattctaatgttgcctcatgaggaacagaatggcagaaagtttagtcctgacagattcccccataggggagttaatgagggacaggcatggaaacttgggntagggttttttaccctttaggtccctattagggtgggatttttacttaagggtttttt

SEQ ID NO: 6673 - DNA, 949 bp, Homo sapiens
ttttttttttttttttttatgagtaaagttaaactttactttacagtaaattttttttctatatacaaagaattacagtacatgtttatggggactcctaacacagggctcccctctttttcactaggagtttcacttacagctgacaatctatgggggcggggggcgggggggcgcggcaaaaaagcaatgatggaccttggctgatccccccgacccctttcttaacaatataggtagatgtctatcgtcagcttgcctctttgccaagacctaggaggcggctctgccatgagctgctgtgtgctgccctccccaccttcagcacactcatctacacacacacaggtagcacccacctcgatgaggaccgccttgctctggcctgccccaaccctggaagttgaaaacatagaaccatttatttctgcttctactctctgtgcccatgtcttgtccacgaaactttgctgaacttccaggaccttacacctgaagccccacaataacctgatgttttgaaagccatgggaaagcagctctagagaaggaaccacataagcagaaacagcgcatgttaaactcgaaacacttcttccgaggttgtggatttctagtttaattctttccacttccttagaaaatactacccttaatcttcataagcagtagaggggcttccatgagtggaagaggtagagaggggcagaagggagctgaggaagacccaacaaccagagctctctaacaacctgctccaggcagcgtggacggaggctatggacaaggtggccccagccctgagaaactcaatggccaccttcacctggatataggatctcttccacctctggattgcactgggccactccagggttgggtgcaggcttcactgaggatcttccttctccccacttttaacaaagcctcaaacttttctacataaaat

SEQ ID NO: 6674 - DNA, 285 bp, Homo sapiens
cctaaaggcagttgccaatctgtacaagttgggctttggttttggtggaccattggggtgaagaggacagaaatcaagtcctagagttcatctaaagtgacagtcaaaaagaataacctcagttttagatgggaccccagtgactctatcgttaggttaagggtgaaacaactgaactgtctacacactcccatatccatgtgattgcagggaaggttgaatggagcaggaggaggaaaaggaaattaagaaaaataaacctttcaagttgtgaccacagtttta

SEQ ID NO: 6675 - DNA, 520 bp, Homo sapiens
cttgggtgaccaatctagtgctgccagtggagtattgaagtcccctactactattgtgttgctgtcaatctgatttcttaggtatagtagtaattgttttataaatttggaacctcccagtgttaggtgcatgtatatttaggattgtaatattttcctgttggacaagaggttttatcattacataatgtccctctttgtctttttaactgttgttgctttaaagtctttttgtctgatataagaatagctactcctgctcgcttttgatgtgtccatttgcatggaatatctattcccacccctttaccttaagtttatgtgagtccttatgtgttaggtgagtctcctgaagacagcagatacttggttggtgaatttttattcattctgctattctgtatcttttaagtggagcatttaggccatttacgttcaacattagcattgagatgtgaggtactatgctattcctaacgctatttgttgcctgagtacctgaaaacctggaagcgttccc

SEQ ID NO: 6676 - DNA, 516 bp, Homo sapiens
ccctcgaggccaagaattcggcacgagagtacaaacacaccattgatgtttataagaataattattttctcccctgaatgttaactagccacaaaagctggtgtacacatgtgatagtgtttttcacggagtttaaagaatgttggtctttgatgttctgcccttgaatggaaatgagtctgtattacaaaatcactagtgaggaaaatggggaacttctagacaagcacctgagaagcattattagaattcctgagcattaaaatccaacagatgcatttttcatgacgttaaaaaaaactccactttctggtagtagcccatgtcttatgctacgaaaatgaatgagattaagtagaatatgttaaaatcatattaagtagaaatgtcttagtcaaaacgtgactgaaaggaaaagacactaatacaaggtagcggtagcaaaaaaaaattaataaatagaaaaaattttaaataagctgtaaggaaaaaggggtgtctcatgggaaaagggcc

SEQ ID NO: 6677 - DNA, 203 bp, Homo sapiens
  misc_feature (1)...(203): n = a,t,c or g
tacacacatacattttgtttatcatacatcttccctagtactatgtaatcagcataaaaagagaggtaatagctgtcttgctttgtctggactcacgggatctaaaagccagcacaaagaatagttggcaaaaatgatacgttaatgaacacattagtggntggataaatggataatttgatgnggnaaccngtgaaaccaaa

SEQ ID NO: 6678 - DNA, 698 bp, Homo sapiens
  misc_feature (1)...(698): n = a,t,c or g
gtgctgcggcggcggcttgctcgagtcctccccgacgcgtcctctaggccagcgagccccgcgctctccggtgacggaccatgtcggcggcgggacgggcgcgagcgtagaggcgggcttctccagcgaggagctgctctcgctccgtttcccgctgcaccgcgcctgcccgacnggggacctggccacgctctgctcgctgctgcagcagacaccccacgcccacctggcctctgaggactccttctatggctggacgcccgtgcactgggccgcgcatttcggcaagttggagtgcttagtgcagttggtgagagcgggagccacactcaacgtctccaccacacggtacgcgcagacgccagcccacattgcagcctttgggggacatcctcagtgcctggtctggctgattcaagcaggagccaacattaacaaaccggattgtgagggtgaaactcccattcacaaggcagctcgctctgggagcctagaatgcatcagtgcccttgtggcgaatggggctcacgtcgattcacagcactaacaaaatggatgcggttttcacccttaaatgttgagtgtaagctatagagctataataaccaaaataaccaatatcagctttttttttttaccttgttatgaataattcatgaaaattaattataaaccacattattctaatcagaaatgtc

SEQ ID NO: 6679 - DNA, 1872 bp, Homo sapiens
atgggaattcaaggcctggccaaactaattgctgatgtggcccccagtgccatccgggagaatgacatcaagagctactttggccgtaaggtggccattgatgcctctatgagcatttatcagttcctgattgctgttcgccagggtggggatgtgctgcagaatgaggagggtgagaccaccagccacctgatgggcatgttctaccgcaccattcgcatgatggagaacggcatcaagcccgtgtatgtctttgatggcaagccggccacagctcaagtcaggcgagctggccaaacgcagtgagcggcgggctgaggcagagaagcagctgcagcaggctcaggctgctggggccgagcaggaggtggaaaaattcactaagcggctggtgaaggtcactaagcagcacaatgatgagtgcaaacatctgctgagcctcatgggcatcccttatcttgatgcacccagtgaggcagaggccagctgtgctgccctggtgaaggctggcaaagtctatgctgcggctaccgaggacatggactgcctcaccttcggcagccctgtgctaatgcgacacctgactgccagtgaagccaaaaagctgccaatccaggaattccacctgagccggattctgcaggagctgggcctgaaccaggaacagtttgtggatctgtgcatcctgctaggcagtgactactgtgagagtatccggggtattgggcccaagcggcgtgtggacctcatccagaagcacaagagcatcgaggagatcgtgcggcgacttgaccccaacaagtaccctgtgccagaaaattggctccacaaggaggctcaccagctcttcttggaacctgaggtgctggacccagagtctgtggagctgaagtggagcgagccaaatgaagaagagctgatcaagttcatgtgtggtgaaaagcagttctctgaggagcgaatccgcagtggggtcaagaggctgagtaagagccgccaaggcagcacccagggccgcctggatgatttcttcaaggtgaccggctcactctcttcagctaagcgcaaggagccagaacccaagggatccactaagaagaaggcaaagactggggcagcagggaagtttaaaaggggaaaataaatgtgtttccccattatacctccttcaccccagaatatttgccgtcttgtacccttaagagctacagctagagaaaccttcacggggtggagagaggattctaaggcttttctagcgtgacccttttcagtagtgctagtcccttttttacttgatcttaatggcaagaaggccacagaggtacttttccttttttagctcaggaaaatatgtcaggctcaaaccacttctcaggcagtttaatggacactaagtccattgttacatgaaagtgatagatagcaacaagttttggagaagagagagggagataaaagggggagacaaaagatgtacagaaatgatttcctggctggccaactggtggccagtgggaagttgatggtggacctagactgtgcttttctgtcttgttcagccttgacccaccttgagagagagccaccaggaaggcgcatcttagcagatgggaggaactgctgagagaagatgggcagaaagctggagccccctggagttggctgtgtctgtgtttgtgactgattactggctgtgtcttgggtgggcagaaactcgaacttgctatgtaatttgtgtctagttattcagaggagtaagatggtgatgttcacctggcaatcagctgagttgagactttggaataagacactggttttcatgcgctgtttttgttttaaagttatgaagaaaaaagtcaataaaattct

SEQ ID NO: 6680 - DNA, 377 bp, Homo sapiens
agagatcatctagagaaacctcccaaaaataaggcataccatccctctgatggttgaaacacacttagttctgggcagaataaatgaaaacaaattcatacctcgatatattgcagtgaattttctgaacttcaaaaacaatgagaaaatcttaaaagtcactgagataaatgacagattgaggaaaggaagcaggcgggcagctggtggtcttccaagcactatagctgatcagcaaccagagattccagagaaacatggaatgataccttaaagtgctgaggctaactaactgctgagcacaaaggatattttttcaggcacacacagggattctgaaagtgtaaagacgagtcccaggccctcatttgaatatt

SEQ ID NO: 6681 - DNA, 341 bp, Homo sapiens
tttccgattccaagacctgtttggtgtgaaagtgcagctaagttactgttaatcaagatcagaataaaagaatctaccaagaaaaattaacaaaatcccccttttaatgtataatcttccatctgtcaggctgtaagttaaataacacaaaacaaagctgtatgttttatggatatgtacatatataattgcagggaacatgatttggaaggatatacacttacattgctaagaatagtcacccctaaggagaagactggggtcataagtgggaagtcaagggagtcttcagctttctttttgtatttaaattttgatagaaatacatacatatgtgttat

SEQ ID NO: 6682 - DNA, 556 bp, Homo sapiens
  misc_feature (1)...(556): n = a,t,c or g
gtttttttccccctatattcagagctccttgagaagtgataaacacctccagctttctaacatcctccccacaccatctcaccatatccatctcccagcatccatctgcattcagctaagggcgggaaactgacctagtgcctgtgttgcagaccatttctgaggtctccaccatccaaggaggcacagcgttcattactgtcctccatgccttcagcagcccccctcacagctaaggtacataccaccccttctgccgcgcctccacccctggcaccaaggtcttctgctgcttatgtctaaagggatcacctatatttaactgcctcagtgacctaacctctttcttctcatgtgccagatgttaagatgaaggaggaatacaacacatactcaagcctcagcctgtttagttgttttcactgggggctcgcttttctgggacggtatttattatcagactggcaagcctaactccatagggttttacaggaagtagggatattttnataaaacaattgtgtcctccccacattttgctatgttaatatttgct

SEQ ID NO: 6683 - DNA, 54 bp, Homo sapiens
taaggccagcatggtggcacacacctgtagtcccagttgaagtgagataatcat

SEQ ID NO: 6684 - DNA, 109 bp, Homo sapiens
gctaaggactccaaataattctctccctcgtcagtatttctactctccactgaaccattctcaaaagcatacaaatgtgttattatttttccctaatgcccgaaaactg

SEQ ID NO: 6685 - DNA, 283 bp, Homo sapiens
ttggaaatacagtgaagtctggcacaatacaaaaacgtacacctgtatttaattttacactgatctttttaaagcatagggtttaaggtacagatttctctgcaaacacagtttagctgcatttcacacattttgatatgctgaatttgccacatagtttataatttttctaatttctcacaaatttcaaaaagtgttttgatcaaaggttgaaatcccagagggtttaggataaatttttaaaaaatacttgacattgaggattcccttgaaggtaaattga

SEQ ID NO: 6686 - DNA, 115 bp, Homo sapiens
tccgatgtgcaagaaatttcttacattctcatggattttgagatgtagtgcttattagtcaaataatatctggaagttttcttcaacaaaataactctcgcagcacgttgagagg

SEQ ID NO: 6687 - DNA, 677 bp, Homo sapiens
gaggtgcggagggttggcagttgacttttgctgatggagcctctctgaagggcaaattcaaagtacagctgggtgctgcagcactgcgagtcgagacttgtggctgtggttatgaaggagcctcgtcagctatgcctttagcccctggtgaagcagtgccagtcacactttgccagtcaaacggagaggcagcagtagtaagaccagaccaaatcaaaccaaaccaagcaaaccacggggaatggagacacagagtttcattctgttcacccaggctgggagtgcagatgcagtggcatgatgatagtgcactacaacttggaactccgtgggctcaagccatcttccctccactgcctccaagtagctggggactacaggtcatgtgagcacacagcataaaggcagctgcccacaagccaggaagagaagcatcatcagaaaccgaccatactggcttcctgatctcagactttcagcctccaggaatgattattgcctgctcctccaagcccttcactgtagaatggaagcctgtgattttcctggcatcatgcatgactgagaaggtcagtgtggctaattctgagcttcaacatcaggaaacccgtagttcttcacactgagccgcctcctgcagcacagtcatccttggtaataaagctgatattttaatc

SEQ ID NO: 6688 - DNA, 771 bp, Homo sapiens
cgacgatactatggcttctttgtaaaggtatataaagtgtttttcaaagcggaaagatactgttaaattcagctgctaatcatagtgtatttgtttggaatgacatgttgagcaggtagtacctttacggctgttgctttttgcagcattatgtggaagtgcctaagtctatttagcctcacagatgactttagaatcttgtattttctacatcagagttcatagcggggatggtgctacatatatctatgcaactgaaaaagaaaacatttcaaacctaaagtacgcaacaagatattatttatatgaaatccatagctcagttatgctatgttcatgaatagagaagttttaagttggaagggaccatggatgacccaaagcagatacatatggtcattcatatacctaaaatacctacaaagacaagttgttccctggtttaaaaggcagtctgttctattgatggactgctttagtccctgaacattttctttggttaaaccaaaaacacataaacctaacttggtcttgggcttgatctactggggtaaataataactcttaaatatatatacagttgacccttggacaacacaggagttaagagcgctgaacatttgctcagtggagaatctgcatataacctgactcctcaaaaacttaattagtagttagtttacaattgactgggaagccttattggataacataaagcagttggattaacatattttttgggttggatggtattatattccgtattcctac

SEQ ID NO: 6689 - DNA, 62 bp, Homo sapiens
ctcatgcctgcacccctgctgctcttcctgttccttgtcagtgtcagccgttgttttgaaag

SEQ ID NO: 6690 - DNA, 1199 bp, Homo sapiens
tttttttttttttatttttaaagtaacatttaatgaatacacatttataaaagccatcatcccttaacatggggaaagtgtacaaaaataatgtgaaagtgtaaaaatttttctagaatacaggaaacatatcagcagtaaagaagtttagtttaacttttttttaaatgtaaaatagtttggatctgttaaaaggaatacagttcgcccaaagcacttattttcatctgttgtaaactcattctttctaccttaagtaaactggaggagtcagctgtgttaatatggtcatattaatttcatagttttgggagcaggaaggttgtggggaaagggaacaagaagggagaaactggggcctttcctttgggtccaagctgggtgggggcttggagcacttgtggttggggcccaaaaggtcaggtctggaaatgcagctattatgccaaaaccatcagagtgctctttagcttcaggcttcatgaattgcttttaactactcaggtagagcatttttactaggctataaaagtagagttcatttttttctataggtcagcattttacctatggatggcattttcctattttcggtgacggactatgagcccaggataaacacattactctcttctttaacaaaaagagcatggttaactcccaaagacttctctagaccagcctggatggtacctaaactttaatcaaccaatgctcaagtaaaagagcagtatcccagcccccagcacaccctaactgttttgccataacataggtgagtagtgacattttccttatcttttcccactgatactgtagggtcagcaccgtataccatgactctactcaatgtcgtccaactttttgtatccttgcttgggtttatcaaagataagttgaaggagcgtgtgttctgtgtacctttgcaaccagttataaataaacgcaaattgaaataaaaaagacaatctacaatggtgcgatgaaagcaacaccctcatccaatggtaattaaattgataaggtcactttagaaatggcttggcaacattatcagtgcaaagatattatctgaaatgttatttattttagtaaaaaatggatatagtctacatgtttaataaggaaagaggtttgaaaaatgcctatttgatgtgatattatgcagccattaagaaaatatattacgtaaggccaga

SEQ ID NO: 6691 - DNA, 467 bp, Homo sapiens
cgaatgtgtttttgactgttaactgggttcgctttccagatctgtctttcccaaatgaaaggttagtcccatagaccactggctattcagggaaattactctctacctccccatgacatggatgataagtgttgagggatgaacactctggaaactcttagcatggattttgaattccagatttctttataggagatgtataaaaaggagtttatagcatacaaaaattatactgctcttcccagtaagggactaaaaggacatttgaaatctttacattttagatgtttttgtgaattataaatatctcctttttcctcgcttcatgctaacttgtctctagataaaatcttatttcttcatacattggaccacaaggcataaagaaggtagctcagcgccactgagattgtgttctgcataatatttggaaggcttccatttccattgaaaacaaatccatgagt

SEQ ID NO: 6692 - DNA, 621 bp, Homo sapiens
gggcagatggtaggaaatggagacggagaaatggcactaatggcccagccacctgagatgggatacctgggagggacatcttttcaagtagaggctgtgttggggcatggtgagagagggtcttagcaggtaaccttcctttcctctccagactgaggaatcagagttctgattgtggagtgcctctctctaggacggggctgcagcataggagtctcagctgcttacatccaggtccaggattatgtctgctaacagacgctggtgggtaccacctgacgatgaagactgtgtgtctgagaagctcctgaggaagactcgggaatctccactggtgcctataggcttaggaggctgcttggtggtagcagcatacaggatttaccggctgaggtctcgtggttccaccaagatgtccatacacctgattcacacccgagtggcagcgcaggcctgtgcagtgggtgcaatcatgctaggtgctgtgtacacaatgtacagcgattacgtcaagaggatggcacaggatgctggagagaagtaggactcctataggagccggggctgtccaactcccctaactcaatccctggtacattcctaataaagctttttttgagg

SEQ ID NO: 6693 - DNA, 345 bp, Homo sapiens
agtcctggcattttgtagaaggatggccaacgcagcctgttgacccttcctggccatcacatgaaaatcagcgactcttccttcttacaaaactcggagcttctcaggataacttggtgaaacgtcccccgctgtgaaacctcagtgaggcccacctgtaatatacaggtgagggagaagaccagaaaagctcagtcagagtgacactgacccctgaaatgatgggcacaatggagtgtgtggcttttcctgtaggacagggaggtgcttagctgtaatttgaactttaaaggattccagtcctccgaaaaacaggattagactcaaatcaccttgaaccttatt

SEQ ID NO: 6694 - DNA, 1342 bp, Homo sapiens
tgacttcttattgaatattttactgtgttaacgctcattatttatacagacattaggtttacagaatattctgttttacatcaccaaaattcacagtccgagaataacaacataaccaggtcccaattcctccatgcaccccacaagcttctgtccaccctattttctggacagaaattagcacaacccacaggtttttcctgggccaagtcttcctttgctgccactgtcttggcttctaatcaagctctgacaggccaacattgtgaagtcctcaccctttcccattcacttctggtctcctagtctagctaatccccctcccccagaaggttaaggcagttggttcacaaccaagttgtttggtgaccttgggtggagctccagacaggcactgggggtgaggagatgtctgtgcaaaattacttgtagaatgatcttgggatgctggattttaatttttgaagccagaaagttagggggggacatatttcctgtcctgggaaaaatggagaccaagtgatattaagaaagtagtttggaattcaaatttataaatcacttgctctgtgggtagctatcaggaactagatcattttcccacctctgcttattgtacttcttaattttaggttttatacctgggaaagctgtgactctattagagctttgaatcttttcctatccttttatctttactcctacagggaatggcctcagctcccttctcttttagaattaaacaagtaaaaactaagagttaactttttaaaaaaactgactccagggaaaggacattattatattaccaatagctgatttttttttccattctgggacctaaaatgcttacaggtactagcagtacatgtcggatagcaaagacttttcctttcagacccaactaaatgatctcctttctgcctttgatactcttttccttctttgtctttcatccttgcctgtcacctcacagatggattcttcctcatttctcttgcctcacttgcccaggtttattgactagcgtcagtttaaggagctggacttcctgggacctccttggcatcttgtagggtgattggagtggcctgagtactcagctcttcagaggtcaggtgacccactttctttggttaatgaaatgttactgtctccaggttagtagctgtcatgaacaggaaaggtggcaaaatggaagaccagttctattgttctttttgtttaggggattcgttttttatcttgtaatcttaagatttcctctcccctcaactttacagcagccttaggccacctgccgtatttttcagtatcccctgcaaatttagaaattgaaaat

SEQ ID NO: 6695 - DNA, 377 bp, Homo sapiens
gggctcggcgtggccaccctaatttcagctaaatctgagggtggggagattgccaactcaaaaagctctctgagcctaatcaaggttcttaaaggactcagtcactaggcagagaccataccaatttcattcactgctggggccccatgccccagcactagcactgcctgatacacagccagcacttaacatatgaatgagtctgtcaggaaaggaataaaccagatgggtaggatggactgcagcagtgagctactactgacttaactagtcagtacagttaagctttactatttcattcacccagtctggctaactgctctccctttttagtaactgttcctcaatacacacatgactcctcctttggttctctg

SEQ ID NO: 6696 - DNA, 1137 bp, Homo sapiens
cggaagatggcgtaccagagcttgcggctggagtacctgcagatcccaccggtcagccgcgcctacaccactgcctgcgtcctcaccaccgccgccgtgcagttggaattgatcacaccttttcagttgtacttcaatcctgaattaatctttaaacactttcaaatatggagattaatcaccaacttcttattttttgggccagttggattcaattttttatttaacatgatttttctatatcgttactgtcgaatgctagaagaaggctctttccgaggtcggacagcagactttgtatttatgttcctttttggtggattcttaatgaccctttttggtctgtttgtgagcttagttttcttggggccagggctttacaataatggctcgtctatgtgtgggagccgaaggaacccctatgtccgcatgaacttcttcggccttctcaacttccagggccccctttctgccctgggtgctcatgggattttccttgttgttggggaactcaatcattgtggaccttttgggtattgcagttggacacatatattttttcttggaagatgtatttcccaatcaacctggtggaataagaattctgaaaacaccatctattttgaaagctatttttgatacaccagatgaggatccaaattacaatccactacctgaggaacggccaggaggcttcgcctggggtgagggccagcggcttggaggttaaagcagcagtgccaataatgagacccagctgggaaggactcggtgatacccactgggatcttttatcctttgttgcaaaagtgtggacacttttgacagcttggcagattttaactccagaagcactttatgaaatggtacactgactaatccagaagacatttccaacagtttgccagtggttcctcactacactggtactgaaagtgtaatttcttagagccaaaaaactggagaaacaaatatcctgccacctctaacaagtacatgagtacttgatttttatggtataaggcagagccttttcttcctcttcttgatagatgaggccatggtgtaaatggaagtttcagagaggacaaaataaaacggaattccatttttctctcactgtaaaaaaaaaaaaaa

SEQ ID NO: 6697 - DNA, 378 bp, Homo sapiens
aataccctaaaaaacatctctgaaacctgattctgtggctgattcaaaagtaagagcccggctggatgactctcactgcagaaggaatatctgactatgcctcaaataccttttgctttgctaaaagctttgttaactgaaatagttataagaattcccaaataattaacctgctcaaggatttaagattctgtttaagatgacatatacctcagtgcttctggaaactcttcctaaaacaagcattttcccatcttcatgaggagcacagagtaaggacaatccaattcttttcaactgagaccctatctacacgtcaggctcataacacaccatacaattctgcaggtagagcccacatgaaggataagaagatgg

SEQ ID NO: 6698 - DNA, 370 bp, Homo sapiens
  misc_feature (1)...(370): n = a,t,c or g
ttgacccactggagagtgagaaatttaacccaaacaagttgacgtacattcttgccgtccactccactgctctgggaaattctcccctggcccttccattaaagccacgtgataacccatgagatgttaccatgactgtggggcccgcattggtcaaaatggaggacataatcaatctggtgtaagcgacctaaaattgccttgtccctcttgcatctggcccttgcttacagaagggctgggtatgagtagggtatcattggtaaacaggtgaaaatagctcccgaaataggaaacatacaattttgtcctggtggaaggagagcaacaatgctagtaccctagggnagtggggagtgcattacacctt

SEQ ID NO: 6699 - DNA, 707 bp, Homo sapiens
accgtgttggtctgtactgattcaatttgatgtggtgaaaagcaggttgataaatcattttatgtcaagggcagctttgctcatatttcccatgatttcatgtactgcattatttgagaagctgctcaacttgcaaaatcagttttcctctcaataaaattatagctctaatgtttgcatataagggaagtagttatcatgttagtaatacctctaatagtataaaccccaccccaaaattagccagtaatcctgtaggaaggtactgtatgatcaaatgtttaatcatataaatagaatgtaaatgtctcactgagcactgttttctagtgtatcaaaatgctcttatttcatcattcacttcactgtgctgttgttatgatgtgcttaacagggaacgtgattagtgaaaggaagataaacgtggatgttactccaaaacttcgtttaatgaatgcttaaagaattcaaattttatctgcctctcttgtaatttggatctcttcttaatgtacatagtgctaacatgaagacctttttctgcactatatgcaaacagggtaactaactaaaacaaagccactttcaatcttcaatccttgaaggtatatctaggtttatgacagtaattgtgtttacattttatggtgcctagtattgacaaaatgttatttccctacattaaacatgactccatagaaaaaaaa

SEQ ID NO: 6700 - DNA, 794 bp, Homo sapiens
caaagtgatcatttgaaaaagagatatccacatcttcaagcccatataaaggatagaagctgcacagggcagctttacttactccagcaccttcctctcccaggcaaaatgaaaatacttgtggcatttctggtggtgctgaccatctttgggatacaatctcatggatacgaggtttttaacatcatcagcccaagcaacaatggtgggcaatgttcaggagacagtgacaattgataatggaaaaaaataccgccattcgtttaacatccatggcagggttcatgctcttctaccacaatttttgactataaacatggctacattgcatccagggtgctctcccgaagagcctgctttatcctgaagatggaccatcagaacatccctcctctgaacaatctcccaatggtacatcctatgagaaacaggctctggacaacatgttctcccaacaaatacaccctgggtcaagtacaacccctctggagtctctgatcaaagacgtggattggttccctgcttgggtcacccattgagaaactctgcaaacatatccctttgtataagggggaagtggttgaaaacacacataatgtcggtgctggaggctgtgcaaaggctgggctcctgggcatcttgggaatttcaatctgtgcagacattcatgtttaggatgattagccctcttgttttatcttttcaaagaaatacatccttggtttacactcaaaagtcaaattaaattctttcccaatgccccaactaattttgagattcagtcagaaaatata

SEQ ID NO: 6701 - DNA, 1120 bp, Homo sapiens
  misc_feature (1)...(1120): n = a,t,c or g
gtggagcaggaggttttattgtaaagaggccgattgtacagagcaaagattgttctgacacggggggctgggtggtgggacccagaggccagagctgggtgaaggatgaggggtggcatcgcccatccaggcagtgggcagggcagggaggactaaacggctgcctcccagttcccttccctgcccctcattactgggtaagagggagccaggctatttccacggatccaggagaatatagcagggagaccctcaccaccccacaccattgccccaaggatacgggaggtgccccagtctgggcttttgcagtcggccagctcccagcctcctcgaggagcagcctgggccacacctttttcccctgggagcctggaacagctggctttgggttaggagctggaagcacccccttaccctgtccagggcacctcaagggacagcccgtggttccctggtcaaaccccttagggcacagtgacccattggttctcctctgggctgggtagcacaggagtgggtgggcactgaggggcccagcactgagccaggtcttaaagagggagtccgagtgttgggggcagtggtctctcggtgggcatagccccagagatggggctcctgtgagtccagcctaggggttgagggggatctgagccagttcacattgtcctggccacaggggtctctagggcatgacactcagggccactcctnctgttccaggccctgatcgtggtaatttaaagctcagaatggtggatgggggaagcctcagggaccaaggccctgccttcccctagactgagcccctcgtcggcttcatcctcacacccgctgtatctcaaacagcttcacgtcggtgtcgtaccagacaggggggtccacattcctcagatagatgacgccccacatgtaggtgcggaaccacatggcagtgcccgagttggcctggtacttgcggatgaggatggggtggggcacgggcagcagccccaccagggtgccatgctgcaggaaccgcaggatctcagactcatccgtcaggcccttgtcgatgcagatcttctccacctgcggaaccagcacctgcagcagcctcatgatggtctgcagcggc

SEQ ID NO: 6702 - DNA, 959 bp, Homo sapiens
ctggtccttcaacagggcagtattgggggacatttattccttcctggccaataagctcctgtggcctgggacactgggtggggacaggtggtgggggtggggcagggcagaggcctatcctcctataaagacacagttgtagcactttgctaaaaccttttctggcaaacttacttggagacaacagggaggggacagctgatgtaggcatttggctagtcccctagaacagggaactctggctttccctcttggcttttttctcctcttaaagatcctccctctgtgggtgagatgaacccagatccccaccaaacagtagcttgggacaggatgcctcactgatccttatttaagaatcgactccttcccgtctcctccagatctgcagatctccagatcagtgccagcaaaatctgcaaaagtagtgacctaaccagggtaaggaatgagctgcaaatctgttgtaaaaactggatgtgctaggagtttcaattctttggataatcaacatgtttaaaacactggagaaaagaaagacctaaagtcgtttcaaagtgtctgttcatacctgagaccatgcctatctgcagctaacacattctgcagcattgattctggaatagaggcgaggcaatggagggttagggagacaggcggaatgtggcaggctttcacctctgttcccaccggggttcaccagcctgtgatcccccagccccggagccaccagccccccactgcagagctttcctgatgcctcccctctgtggcccaggaagagcctgtctggccctggaactctgatttgggctgttctggtgtcagcaggggtgcgaacttcttaaagagcatctcctgatcagcccttctcatgttacctgcagggaacgaggacagggaacgaggacagaggggtcgtctgggctcttggctgggctgacaagaggcagagtcat

SEQ ID NO: 6703 - DNA, 461 bp, Homo sapiens
aaagccaagaagaaactctcaaatgagccaaaaaggaaaaaaaaaattctctgaaaagaattttagggggaaaagttgtgctattttaaaaagctttgagggctgtaaagtgccacgtttttcacaccttctccatacttttttttcagatttttttagtatgtttaacatttgtgagatgacatcctttttgtatctcaaactggatgcttcaggatttgtaggggaggggttggtggtattcacgttctcttgtgagagaaagtttgtgcctaaaggcctccttcctggggaactgtttaaaccctcgcaggcagacctgtcaggttttactgtgttatttgccaccatttttcaacatgcaaaagtaacatgcagttaatggtattggaatgagaccacagcaagagcagaaacctctcgtgacaacttttcagcgacattatcttgctcctagactg

SEQ ID NO: 6704 - DNA, 333 bp, Homo sapiens
aacaaacggatcttgtgcgcttgcgaatggttagaatgtccaatgtgccagacacgctctacatggtcaataatgccgtgccacagtgttgtcacatgatcagccaccagcagatcagcagcaaccagtcaagccctccttcagttgtagccaacgaaattccagttcctcgtctcctcattatgaaagacatggtcagacgactgcaggaactgcggcacacggagcaggtgcagagggcctatgccctgaactgcggggaaggcgccactgtcagctatgaaattcagattcgagtgctaagagagtttggtcttgcagatgctgctgcaa

SEQ ID NO: 6705 - DNA, 3467 bp, Homo sapiens
atggcggagcgtggcggggacgggggcgagagtgaacgattcaacccgggggagctcaggatggcccaacagcaggccttgaggttccgaggtccggctcccccaccaaatgcagtgatgcgaggcccaccacctctgatgcgacctcctccaccttttggtatgatgcgaggccctcctccaccaccacggccgccctttggacgtcctccttttgatcctaatatgccgccaatgcctcctccaggagggatacctccacctatgggccctccacacctccagagaccacctttcatgcctcctcccatgagttccatgcctcctcctccgggtatgatgtttccaccaggaatgcctcctgtgactgctcctggtactccagcactacctcctacggaggagatatgggttgaaaataaaactccagatgggaaggtttattattataatgctcggacacgtgaatctgcatggaccaagccagatggagttaaggttattcagcaatcagaactgacacctatgcttgcagcccaggcacaggttcaggctcaggcccaggcgcaggctcaggcccaggcgcaggctcaggcccaggcacaagctcaggcccaggctcaggctcaggcccaggcccaggcccaggcccaggcccaggcccaagcccaagcccaggcccaggctcaggctcaggcacaagctcaggcccaggcccaggctcaggtccaggcccaggtccaggcacaagtgcaagcacaagcagttggagcttccacccctacgaccagtagcccagcacctgcagtatccacttcaacatcatcatccaccccttcctctaccacttctaccacaacaactgctacttcagttgcgcagacagtatcaacacccacaacacaagatcagaccccaagttctgctgtttcagttgccacgcctacagttagtgtttcaactcctgctcgtacagccacacctgtgcaaaccgttccccagccgcaccctcagacgttacctcctgctgttcctcattcagtacctcagccaacaacagcaatacctgcttttccaccagtaatggtacctccgtttcgtgttccccttcctggcatgccaattccacttccaggtgtagcaatgatgcaaatagtcagctgcccgtatgtaaagacagtcgctaccaccaagaccggtgtattgccaggaatggcccctcctatcgtacccatgatacatccccaggttgctattgcagcttcacctgctaccttagctggagcaacagcagtttctgaatggactgaatataaaacagcagatgggaagacatattattataataatagaacattagaatcaacctgggaaaaaccccaagaactaaaggaaaaagaaaagttagaagagaagattaaagagccaattaaagaaccctctgaagagcctctgccaatggagacggaggaggaggatcctaaagaagagcctataaaggagataaaggaggagcccaaagaagaggagatgactgaagaagaaaaggctgcccagaaggcaaagccagttgctactgctcctattcctggtactccatggtgtgtcgtttggactggtgatgagcgggtcttcttttataatcccaccactcgtctttctatgtgggaccgacctgatgatctgattggcagggcagatgttgacaaaattattcaggagccccctcataaaaaaggaatggaggaattgaagaaactaaggcacccaactccgacaatgctgtcgatccaaaagtggcaattctctatgagtgcaattaaagaggaacaagaattaatggaagaaattaatgaagatgagcctgttaaagcaaaaaaacggaagagagacgataataaagacattgactcagagaaagaagctgccatggaagctgaaattaaagctgcccgagaaagggccattgtccctctggaggctcgaatgaagcagttcaaggacatgctgctagagagaggggtgtctgctttttcaacgtgggagaaggagttgcacaagatagtttttgatccccggtacttacttctcaatcctaaagagagaaaacaggtgtttgatcagtatgtaaagaccagggcagaggaagaacgcagggaaaagaaaaataaaataatgcaagccaaggaagatttcaaaaaaatgatggaagaagcaaaatttaatccaagagcaacttttagtgaatttgcagccaagcatgctaaagattcaagattcaaagcaattgaaaagatgaaagaccgagaagccttgtttaatgagtttgtggccgctgctaggaagaaagagaaagaagattcgaagaccagaggtgagaagattaaatcggatttctttgaactattatctaatcatcacttggacagtcagtctcgatggagcaaagtaaaagacaaagtagaaagtgatccacgttacaaagcagtagatagttcatcaatgagagaagaccttttcaaacagtacattgaaaaaatagccaagaatttagactcagaaaaagaaaaggagcttgaaaggcaagcccgcattgaggcaagccttcgagaacgagaaagggaggttcaaaaggcccgttcagaacaaacaaaagaaatagatcgagagagagagcagcacaaacgagaagaagctatccagaatttcaaagctcttctgtctgacatggtacgttcttcagatgtgtcatggtctgatactcgtaggaccctccgaaaagatcaccgctgggaatctggatccttattggaaagagaggagaaagagaagctttttaatgaacacattgaagcacttaccaaaaaaaagagagagcactttaggcaacttctggatgaaacttctgcaattaccttaacatccacgtggaaagaagtaaaaaaaatcattaaggaagatcctcgatgtattaagttctcctccagtgacaggaaaaaacaaagagaatttgaagaatatatcagagacaaatatatcacagccaaagctgacttcaggacgcttttgaaagagaccaaatttataacatatagttaatttagtgaaagatgtgaaagtgaaagcttgtggaagatgctgggattggcagccccgcagactgaagtcttctgtttatcaacagaacagctaagaagctaatctaagaatgaccagcacctgaaagatgtagacaacattttgcagaatgataaatggtatccagtactggactgtgtctgagaggcatcaactgaatgtggatgttaatgacctggactgtcagggtccacctctacctcccagagcctcagagcccacaagacaaaataattctgaatactgttccatgggggtaatctactaattcaaaatgacctgcctgtgcccaattttcaggtttttatgtagataagtattagttaacc

SEQ ID NO: 6706 - DNA, 567 bp, Homo sapiens
  misc_feature (1)...(567): n = a,t,c or g
ttttttttttttccctgtgcacttcaaagctcatgttttttttaatgttttatttttattttttacagagatgagttctcactgtgttgcctaggttggccnnnnnnnnnnnnnnnnnnnnnnnnnnnnnnnnnnnnnnnnnnnnnnnnnnnnnnnnnnnnnnnnnnnnnnnnnnnnnnntgatggaggctgagactttttggaatccctccctctctccatgtcctgccaagaacagaagtaaagttttccatcttaaaacatgtgtgtgagtcaatagacctgtgttatcttttcactcaaagctcaaccagtgaacagactgagtcagcttccaggaaacatccacggctgtaagagggggtgtcggctgctctccatagccaagtggctgcaaaaatcatcatactgacaaaaaaaaaaatcgacgcattttgcctggcttgcaacgtcttcctttgctgggggacgtcagggttctcgcacgttgtcgaggaaggatattgtctcggcttcctctgactcaagctctcatttttgtttacaaggcagtttagggatcgtccg

SEQ ID NO: 6707 - DNA, 415 bp, Homo sapiens
ccccttatttctttttcatgaaacaatctgagtctaaaggatccagggcggacatggtgccatcacagtactgaggacctaggtgctttttatcttgctactctgtcatcctcagcatgcagctttaatctcaggatctgaaatggcaggtccagcccataccattgtatttattttccagccagaagaaagaagagaagaaaagaaggaaggcatgctcttttccttttaaagtcatggcccaaaacatcacataaagttctgctcccatcccagtagacagaacctagtcatatgactatcccttaaatgtatagtctttacttctgttatagaaatttctattactatgaaaaaggatggatattgaggagacaattagccatctctgtcacagtaactaaacgtattgtag

SEQ ID NO: 6708 - DNA, 168 bp, Homo sapiens
ctttggtaaggaacagagaggcatcagactaagccagcaccatcctagcctggcccatccacccacttgtgctggctggtctcattcatgatttcattccatgccctcgcaatccttcaggataacggtcactatcacccttttatttttattatttttttttttttt

SEQ ID NO: 6709 - DNA, 433 bp, Homo sapiens
  misc_feature (1)...(433): n = a,t,c or g
cattcagaatgttgacaaaatatctgggtatcatggaacagccaagctgacacataaaactaataatcacgagcaggtattgttatccttatttataaagatgtggaaaccgtgaatcttcaaggtcaagatgactcttccaaggttacacagttattaagagctgctttcagtgtactttctgccacatacagctgtctcgtaaaatctatgatttctagtattacaatgtttaatttttttaaattgatctatactagagaaacttctccatgggataaccaagacatgttgggaattcctcatggattttctttttgtcttctggacacttattctctgaggtgtcgtacaatttcaattcaattctggacactaccccngaattaggtggaaggnccccacaaatggaggggctttggntcccntaagg

SEQ ID NO: 6710 - DNA, 304 bp, Homo sapiens
acccagccactggactgtgccttttgattggaacatctctgtcagccccagggtctgcatcacacatggtctgcatctgtgcacatggctactgtctctttttagcagtgatatcaccctgcctcatactgttgtttatgaggccatctccccacctggctgggggccactgctttggccattcagagtggaattcctctgtcttccagcccgtagcacaggcctggggccagcattgctgcttcaggaaatgcctgtgggattcaaagtgaggactgttcccagggtgttgaggattaattgt

SEQ ID NO: 6711 - DNA, 175 bp, Homo sapiens
actttcacttaaatgttgtgattcaacataacattgccatagctattattaacactttacatagaaattgaaagtccagagaatttaggtaacttgggtaggtcactctccaagtaggcagcactccaaatccacactccttttaataaaaataggtaataggcagggtgtggtg

SEQ ID NO: 6712 - DNA, 477 bp, Homo sapiens
ttgttttgtgtttctaaagtaccaaatgcctgggcactactttagagattctggtgtgcagctagcgtcatctttttctcaaaacatcacgtgattctatagtgcagacagggtttagaatctagtttaacttaaatataggtaaaaatatttttacgttaaaatgagtgtattataaagaaaatgtaataaacagtcaaggaagaaaacctcacctagctttctgcaggaactttgaggctgaacagtagaatttgaatacgatcttgtcgatatagtttgaacccttgctggtttcaattaaactgaatcaggttaaaaaagttctcataggccattcttaacaggccaattttttttttgtttttgcacaatattccattatataactcttctcttcagatttagttaacatagcctctctgaggactaagaataaactctgagattatgctctggtttgaggagagaaatggt

SEQ ID NO: 6713 - DNA, 703 bp, Homo sapiens
gctttaggagcttgagccatttcctgactgcactggcctggcagtctggctgctgcacaagagtttttaaagaggggtccgagcccgcccgtaagagcgggtcttctcaccatgtggggctgtactacgtggtggtcttggtttctcttcacagaaatgctctctcaccaacttgccccactgtcccaactcctctcctcttagagaaaaaactgtgattacctcaacttgaatatgaaactgtgattgaaaaaagtcaaaacgtgaagaagcatcaaagccaaaaaggcaaaactggctgaggcctctgttgatgctcctcagcctactcgggaacgtgaaggggcagctggcgaaagggcattcctggggccacttgctctgccccactgataaggcacacccgcggtgcactgtgagctctttgaggactgaggccaggggatgcctcctggaacctgccaggcctctctgttctgtgaaggtcagtatccacttgattcctccaggcggcgctccaggtgggaggagcagggtcttctgctgtttccaaaggaatggccatgacactgcttttgaccttagaagtggatccagggacccagcaaagagcgggggtgggttcccagggacaggcagtcctcccggggcttacatgctttttgctaactttcctattagcagcttcagtttatatcaccca

SEQ ID NO: 6714 - DNA, 1173 bp, Homo sapiens
tttttttttttttccaccagaggcttttatttcagccactcaggaccctggctttctgctccaaggcactgaacacagtcaggctcttctaaacactggcagggacctcccccacagccgcccccacagggttctctgtttcccaagtcctgatggattcaggcaagaccttcacacattcacccactacctgctggacaggagggtcatgaggcagcctgtggtgcccagctcagtgtgacacactgccaatgtgccgcctcccccagcctctgatggggccgggccttgaccacgtgacaggctcaagctgccgtgcacatcccccaggaaaggggaagagctgctaaggtgtagcagtgaccaaacaaataagaaatgctactgtggaggttacacagatgcttatttggtttttaaacaaatccaacacaaaagaaagaaagagggaacagggtgcttgaaggtgggggaggagagggaatctcatctgtaaagtgcttttccagacaccggaacctcctagtctagcctggcacacccatgtcactcagaaaggtcaggctcagggtggagatggcatgcaattcccaacacacttggtattcagagtggacagagctacacagcagccttccctttgtcggggtccatgcaatctacacatggtcgcaaggtctctgcagccacagtctgcacacgtgggcacagacggcactggtgcatgcctgtcgggctggggccacactggggaagggcctcatggcaacatgcactggaagctcctcgtggcggaccatcctcaggccgccgacaggaatgggaagaaaaagaagtcgaaggcgaacttcacggcgccatgcacggtgctgcgccagtcgtgctcgatcttcacgtgccgcctggtgggtgagagctgggccatgcagttgaggcagctgatggccttgagctcgaagacaggccacttgctgcccaggcggccctccaggatggtgctgaactcgatgaggctgccctggcgcaggctgagcagcacgctcttgaactcgctgctggcccgcagcacgatgtccttggtgacgtcgtcctcctcgcggctgcgcgagccgtcagcgccgctgctgaatggcatgcccatggtaatctcaaacttgtagcggtcctcgtgcc

SEQ ID NO: 6715 - DNA, 340 bp, Homo sapiens
tagaagttatgcaaacctatgcaaaccccatacaaatgagctggccaggccagtagtctagttgggcaaaaatatcggaaatattgtgcacaccagcctgtcattgctgtcacagaaggagagcaacaaggagaagggttatctctggtgcatttctggattaaatcataactttagaatacttttctcttttacaaagtctgactgtctctctaagtaagacatcttggataaatgtccctttccctctccgtgtttccgcattgcatgttaattttcaggtggcagttttatctcattagtcattgtcacttccacggatcacccctttgaagctaca

SEQ ID NO: 6716 - DNA, 394 bp, Homo sapiens
gtggttgctgatgggggtggaaagttgaactccatgtctgaggacaagaggtcccgggggtggtgggaggtggcgccggggtcccttggactggcctccttgttcatgaccaagaccaaacctgggccctggatggccttggcctgttcccgaggagaaatgagaaaatcccagatctctgagcgccccccaactccattcccctgtgttcttctgtcttctgtagtatttattttattagtatttaatttgtattgtttcattggtttctgataagtctgtatcactgtgacgatttgagacaacttgttgtattgagggactttctgtacctccttttctttttctttgttgatgagctctgacaaagctattccctggtgtttttttcccc

SEQ ID NO: 6717 - DNA, 268 bp, Homo sapiens
  misc_feature (1)...(268): n = a,t,c or g
acattctctggtggcaactatagcagtaagagtcacaggatgaacagtcaggtggaggatgaccacattgagttgcctagctgaaacatgtgctccgtctatgtctgcaaagtgaaagaaagctacactatctcttcaacatagatcagtgggggaaattttatacttgggatgatttatatgaatgcatctcatcaaagttcacaacacatttttttttcagttttttattttcagtttttagagtcanggccaggggcctggtctg

SEQ ID NO: 6718 - DNA, 861 bp, Homo sapiens
gacactttgagttacttataatagtgtatactataagatataaagcagtcataattacctaagcttcaaaaatcttttgtttccatgtccagagacaagtacagtacagtattcttatttgtttgctccccctttttaaaatatttaatagcttatgttcacttctcatagctcctttctttatgaaaaataacatgaaaatagaaaagttgttctaagtatactttttgtatatattctagacttatcagatgtagacttcctagatgattcttcaacggagagtttgcttctgagtggggatgaatacaatcaggactttgattcaaccaattttgaggaatctcaggatgaggatgatgctcttaatgaaattgtgcgatgtatttgtgagatggatgaggagaatggcttcatgatccagtgtgaagagtgcttgtgttggcaacacagcgtgtgcatggggctgctggaggagagcattccagagcagtacatctgctatatctgccgggacccaccaggtcagaggtggagtgcaaaatatcgttatgataaggagtggttgaataatgggagaatgtgcgggttatcatttttcaaagaaaattattctcatctcaatgccaaaaagatagtttctacacatcacctgcttgctgatgtctatggtgttacagaagtgctacacgggctacagctgaagattggaatactaaagaataaacatcatcctgaccttcatctctgggcttgttccgggaagcgaaaagaccaagatcaaataatagctggggtggagaaaaaaatagctcaagacacagttaatcgagaagaaaagaaatatgtacagaaccatag

SEQ ID NO: 6719 - DNA, 779 bp, Homo sapiens
ctctcccggtcccccaggccccactgccgctgtcccctgggctgaggctgtgagcatcgtccttcctcaatacttgcaccagcccccacccaccagcttcactccttcacatacagtgcggaccaacattggatatgaaaatagattgttgtcactacaattttaggggccgcaaaaatccctaaggtctggaaatccctccttgggttggcactgaggaaggagacacagacaggtgcagagggtcttaggtgctggggacacacaagtgaacaaaacaggcaaaaaccagtggccccgtgggagcttacgtttcatacacagattcaattaaggtgaaggagggaagggccatcccataattacaataattaggcctccccgccacgctgattcaggtgtgttaccgggtgcagtttattaacattaggtgctattaacacacctttctaataagtaagatgatgcgattaccaccattttcaaatgaaggaccgagacctagaaaggttaggtcactcacccaaggtcacacacagccggtgaaatccagaggcaggatttgaacctaggcaggctaactcttcaccactacgtcagactgcctccagaagtccttcttagcttccctgcaaacagggctgagagccggtgggttgggcagatcctgtgccttcaccaggaaagtgtttctcctggcccacctgcccctgaggttggggagaaatagactggttttataaaatcacctggttctgcctggggatattttaaatgtg

SEQ ID NO: 6720 - DNA, 94 bp, Homo sapiens
ttattatggagttaagaacataaataatgtcaacatcatccttgggagtaattagtaggatgacatctgcatcccactgcccacatgcttacct

SEQ ID NO: 6721 - DNA, 276 bp, Homo sapiens
agagctagcaccatgagcttcaataccctgcaattgctgtcgagaaacttccccctcctaaccattgccgccaccacctaatatactagtctccctgttagtaaccggctccttgaggactgtattgttaacatctgcctccctaaagtttgacataggaagtacataagttatattacttaaattgttgaatccttatcacctcctaatggttttcttcctcacatctgagtttttacaaccggtctcttgaccatatcctatgataaaatgcca

SEQ ID NO: 6722 - DNA, 375 bp, Homo sapiens
  misc_feature (1)...(375): n = a,t,c or g
ggttccttgctgtggttttttgccttattggttatgttccatcagttattctgttcacttatattgcttctttcacctttaagaaaattttaaataccaaagaattttggtcatttatctattctgtggcagcgttggcttgtattgcaatcactgaaataactttctttatgggatacacaattgcaactattcttcattatgccttttgtatcatcattccaatctatccacttctaggttgcctgatttctttcataaagatttcttgggaggaatgtacggaaaaaatgtggacacctataatccatggggatagggctttcagtaggctgttattatcgccttacccgccgtgttgtaccgtgggntttt

SEQ ID NO: 6723 - DNA, 1361 bp, Homo sapiens
tttttttttcacttaattatacatacgttttatttaaagaaaagcaaaacacacaaccacagcatttcaattaaggagcttagaaaaatttcaagtgcgttcttggttctccagttaccattccaataaaaaactttttaaaccaaagttaaaattaagtgaaaaagaaagaagtcccagtaagcagaccgaacaatacaaattcaaaatactactctatcttcttgtgttcgttcccaccaaagtgtgctgtttaaagttccacaactattatcttcctcctcttgttctttagtgagttctacaaaaacctgttccaatgttgcttgaggaaaaggctatattcttcaatggcaaaagccatgtttagcttcttccagcttaaaaaaagattgtgaaagggactgaacatcttccttaggaattttataagcccaaaatagaagaaaaactttctgacggcttgcatttgggaaaatatactgaatttctctttgaaggcggtctacttctaggttttctatccagtccgttcaatttaatttccaaaaagtagccttttccaaatttactctttagatgttgtactgttccgatacatcttaactgcccagacaccatgatagctactcgatcacagacagcctctgcctcctccatatagtgagtggtcagaatagcagcccgctttctgtttttaaatgcagttcgaattgctcgccacatgtgctgtttggctttgggatccatacctgtagatggttcatctagcaaagtaatctgaggattccctagcatacttagagcaaaacacaactttcgtttgattcctgcaggtagtttctttacagtcttctgaagatgttcttttaaatcaagtgcatgtgttattcgacttatgacttctttcatgtcacttgcactcattcctttgacagctccataaatttcaaaatgttcctgcaatgtagtatctggccacaaagggtttatctgaggacagtaacccatacacttcagtgaatcatcatcttcacttgtctctgaagaataatctcctaaaaatacctggcctgaagctggttcaatatcactaaccagaatattaataattgtgcttttgccagcaccatttggacccaatagtcctaagatctctccttttttcacacagaaagagatgtatttagttgccactctctttacttttcttgaaagaagaaaatctttcttgtcatcatattctttatgcaaattgctgaccataatggatggtttctcctcacaacactggcaacccatcagctctttgacctttagtctttcagctttgacatcttcatcttcatcctcattgtctg

SEQ ID NO: 6724 - DNA, 2437 bp, Homo sapiens
  misc_feature (1)...(2437): n = a,t,c or g
agaagagcgatgggagggggtgacgtggcagtgacaggcgcataaactgaaatgaatggcggaaacagcagccaatcggcgatcagattggccgggcattccgcattctcccgtcctccctgagcgctggaaacttcaggaaagcaccaatgagcttccccaaaagtctgattggcctttatctgaaccaatcaaaggtgggtctggcggacgcgtcccaccccaggctctcactgggcgctgtagaatgacaggcccgagagaaatgccaatatccgcggggtcttcctcaagtgacactcagcggcaccaatcgacgtccttcttcccggcggccgagccctcctccccgcggctggccgggcggggcggggacgctgcgcggcggtggctgatgcggtagccgtgtggggcgctccgggcggcgacggcggctctcgtaggcggttccggtcttgtatctccaggcggcggcggctcatggcggcgacggagctgagaggagtggtggggccaggcccggcagccattgcagcacttggcggcggcggcgccggtcccccagtggtgggaggaggcggcggccgcggagatgcggggccaggctccggggccgcgtcagggacggtggtcgcggcggcggcgggaggcccgggcccgggggccgggggagtggcggcggctggcccggcccctgcgccgccgactgggggctcgggcggctcgggcgctgggggttcgggctcggctcgagagggctggctcttcaaatggaccaattatatcaaaggctaccagcggcgatggttcgtgctgagcaacgggctcctgagctactacagatcaaaggcagaaatgagacatacctgccgtggtaccatcaacctcgccacagcccaacatcaccgtggaggactcctgcaacttcatcatttccaatgggggtgctcagacctaccatctgaaagctagttcagaagttgagcggcagcgctgggtgacggccctggaactggccaaggccaaagctgtgaagatgctggcagagtcagatgaatcaggagatgaagagtctgtctcacaaactgacaagactgagctgcagaatacccttcggaccctctctagcaaagtagaggacttgagcacgtgcaatgacttgatagctaagcatggcacagctctgcagcgttctctcagtgagctggagtccctgaagttgcctgctgagagcaatgaaaagatcaaacaggtcaacgaacgagccacactctttaggataacatccaatgccatgatcaacgcctgcagagatttcctcatgttagcccagacccatagtaaaaaatggcaaaagtcactacagtatgaaagagaccagcgtatccgactggaagaaaccctcgagcagctggcgaagcagcataatcacctggagagggccttccgaggagccacggtgctgccggcaaacactcctggcaatgtgggttctggtaaagatcagtgctgctctggcaaaggggacatgagcgatgaagatgatgagaatgaattttttgatgcacctgagatcatcaccatgcctgaaaatttgggccacaaacgtactggcagcaatatcagtggagccagcagtgacatcagccttgatgaacagtacaagcatcagctggaggagaccaaaaaggaaaagagaaccagaataccatacaagccaaactatagcctcaatttatggagcatcatgaagaactgcattggaaaagaactctctaagatccccatgccggtaaactttaatgagcccttgtccatgcttcagcgccttactgaagatctggaataccatgagctgttagaccgagctgcaaaatgtgagaattctctagaacagctctgttatgttgcagctttcaccgtgtcctcctactccactactgtcttccgcaccagtaagccattcaacccactgcttggggagacctttgagctggaccgattagaggagaatgggtaccgatccctctgtgaacaggtgagtcatcatccccctgctgctgcgcaccatgctgagtccaaaaatggctggacattgcgtcaggaaatcaaaatcaccagcaagtttcgaggcaaatacctctccattatgcccctcggtaaggttaccatctttgtcagaattaatgctcctggaatgaaaggttttctggcacgatggaggaggtcactggctaaagagtcaggagacaggaggtctgattcgagcactgaccctcactaactggctttgggcaggtatttaacttttcagctatcaaatgagtgtggaggctagaaactctttaaggacccatctagtcctaaattctttatcctcttagctatatttaacgcatctctaagcactatttagaacacaaggttcttntatgca

SEQ ID NO: 6725 - DNA, 200 bp, Homo sapiens
tggaattagatactttaaaaattattgaaatgaaagtcagtaattcaaacaagtgagtcattgaaggatattttgttgtatataaggaatcaaaatggtaaataattgaaggatatttttattgtatttaaggcaacaaaatttgagataattttcttcaaaattaaaataacttaaaaatagagtaagtattagttaaa

SEQ ID NO: 6726 - DNA, 1752 bp, Homo sapiens
  misc_feature (1)...(1752): n = a,t,c or g
gagctgaggtgttttcaggcctgagctccctgcaggagctgggacctttcgggcaccaacctggtgcccttgcctgaggcgctgctcctccacctcccggcactgcagagcgtcagngnggccaggatgtgcggtgccggcgcctggtgcgggagggcactacccccggagcctggctccagccccaaggtggccctgcactgcgtagacacccgggaatctgctgccaggggccccaccatcttgtgacaaatggtgtggcccagggcaattagacagactgctgtcctgggctgcctcaggtcccgagtaacttatgttcaatgtgccaacaccagtggggagcccgcagccttatgtggcagcgtcaccacaggagttgtgggcctaggagaggctttggacctgggagccacacctaggagcaaagtctcacccctttgtctacgttgcttccccaaaccatgagcagagggacttcgatgccaaaccagactcgggtcccctcctgcttcccttccccacttatcccccaagtgccttccctcatgcctgggccggcctgacccgcaatgggcagagggtgggtgggaccccctgctgcagggcagagttcaggtccactgggctgagtgtccccttgggcccatggcccagtcactcaggggcgagtttcttttctaacatagccctttctttgccatgaggccatgaggcccgcttcatccttttctatttccctagaaccttaatggtagaaggaattgcaaagaatcaagtccacccttctcatgtgacagatggggaaactgaggccttgagaaggaaaaaggctaatctaagttcctgcgggcagtggcatgactggagcacagcctcctgcctcccagcccggacccaatgcactttcttgtctcctctaataagccccaccctccccgcctgggctccccttgctgcccttgcctgttccccattagcacaggagtagcagcagcaggacaggcaagagcctcacaagtgggactctgggcctctgaccagctgtgcggcatgggctaagtcactctgcccttcggagcctctggaagcttagggcacattggttccagcctaggccagtttctcaccctgggttggggtcccccagcatccagactggaaacctacccattttcccctgagcatcctctagatgctgccccaaggagttgctgcagttctggagcctcatctggctgggatctccaaggggcctcctggattcagtccccactggccctgagcacgacagcccttcttaccctcccaggaatgccgtgaaaggagacaaggtctgcccgacccatgtctatgctctacccccagggtagcatctcagcttccgaaccctgggctgtttccttagtcttcattttataaaagttgttgcctttttaacggagtgttcactttcaaccggcctcccctaacccctgctgggccggggatggagacatgtcattttgtaaaagcagaaaaaggttgcatttgttcacttttgtaatattgtcctggggcctgtgttggggtgttgggggaagctggggcatcagtgggccacatggggcattcaggggctgggccccacagaggaccccacaggggcagttgagctctgtttttccccccacctggcctaggcccattcatctattttaaaccggttcnttgatttaattaaaacattataaaaaagtttttttngtttta

SEQ ID NO: 6727 - DNA, 331 bp, Homo sapiens
aaggactactccaaacagtgtgcttcgacagttcagcagcaggaggatcgaaccaatgagctgttgaaggcagccacaaacaaggacattgccgatgatgaggttgccacatggattcaagattgcaacgtatgttcaggagctaccttgttttccccacatgcccttcttagactgcccaagtttagcttttggtctgtgtaagctttggtatgtctttctatgtgagacagttacccaaaaataactgtcttaggatcaaagagcctgcctgattttcagaacacaggtgcacatgcatcagactaagaggtctccttccattggttta

SEQ ID NO: 6728 - DNA, 354 bp, Homo sapiens
gtgaaatgcaagaggcagtttaagatagctcttccacacagagttggaacattttcaacccagagtgtgacttccccgcagccctggcccaggccctctcacaaggaggaggccaggagcacgtgcaactgaacaagctgtgaagccagccgggcacagaacccccggggtggaaggctcccctgtgaaaatgcaagaggaaaggcgcaaagggaatcttcccaacctctctacctggaagcatcctcatctgtgacatgaagcaaagaacagtgccttcccgtgcaggctctttttgggattacaccagaacataggcatgctcaattaaatgggcagctatttgcaaaaaaa

SEQ ID NO: 6729 - DNA, 531 bp, Homo sapiens
ctggaaggggacagccacagccctgtttgttgaccagagtcttgagcattaaccattgtggcttaagagaatgaaaatgtacaaggggtatgatgggatctatcctcttcctctctccatgctcctgactcaagaaaaggaaaagacttgcatctctcaaaaatgtttggaagaaagttctacccatcttctcttacactcattcaatcttatgcttgggaggaggaataacttgatgagattgagaaaatggttataatggataggcagcttaggccactcttggatcttgagttcgttccacacagcaagatgtgggaaagactgcagtccttcactacatggctgggtaaacatctgctttctagacccaactatctctccttggggtgggggaatcccaaagtcgttagacttatgatagaagttcatttcagcctcaggtccaagccatgttctccaatccagctctatcagctataaagctggtatctattttgattcttttttacagttttaatatataaattg

SEQ ID NO: 6730 - DNA, 368 bp, Homo sapiens
ctcttctcgaatcttttccacagcccaaaatggccgcagaggtgtattttggcgatctagagctcttcgagccgttcgaccacccagaggagtcgattccgaagcccgttcacactcgcttcaaggacgacgacggcgacgaggaggacgaaaatggggtcggcgacgcggacgtacgggagcggcttcggcagtgcgaggagaccatcgagcagctccgcgccgagaatcaagaacttaaacgaaaattgaacattctgactcgaccgagtggaatattggtgaacgatactaagttagatggacctatattacagattctattcatgaacaatgctatttcaaagcaatatcatcaagaaatagag

SEQ ID NO: 6731 - DNA, 686 bp, Homo sapiens
tcacagcctgacagtactgaaatatacttgggtgagtcccacacagcttgcctcagtcccaggtaactgctggtaagaaagtcagtccagttgcttttctctactcctggggtctacgaactttcaccaacatcactatcagacacagagggacatcaggtggggaggagggtgaaggcagaaggtctttggtgggtcagaacttcaaaaaggcattgagaatctgtccacagttctgcccctcccagccagaaggaggtggccttcaacgcggtcatcttttagctgccagaactttgttaaccacctgggaccgtggacatcttctctcgtgtcttgagccctcatccccacccctccaagccctcatgcccaccacaccgtgtcccacattccccatcctcccctgtctgctccccatctcaagtccaattccaaggccagagccctggcagcttttctgggagacagcatgaaaaggaggggagtggagatggcagagatggggtggagccagtgcgctgtggtcctgttggcgtggtgatgtggggccaatcctgaggccagaggttcatcaccgtgatctggaagcccacggggccccctggtagaaacttgggaagaacaaagggggaaaagaaaccagaacaggaagaagacgagtaagcatccgagtttcacgagat

SEQ ID NO: 6732 - DNA, 121 bp, Homo sapiens
aacttcctaaagatcacaatttcctatcccttcaatctgcgatccctcttcttcctttcttactagattatggtgtagtttgtactagactgactcattaagaccttgtacgcttcctgag

SEQ ID NO: 6733 - DNA, 601 bp, Homo sapiens
acgggcatgatgctgccgagggacttggggagcacagtctggctggatgagacagggtcgtgcccagatgatggagaaatcgacccagaagcctgaggaggtgtcctgggtttggctggctggctcctgctccagcggcccggcttcaggtgtccgggggcgtggctgcctggagcaggtgtgctgaataccctggatgggaactgagcgaacccgggcctccgctcagagagacgtggcaggaccagcgaggaatccagcctgtccacttccagaacagtgtttcccaggccccgctgagtggaccggacctctgacacctccaggttcttgctgactccggcctggtgaaagggagcgccatggtcctggctgttggggtcccagggagaggctctcttctggacaaacacaccctcccagcccccagggctgtgcaaacacatgcccctgccataagcaccaacaagaacttcttgcaggtggagtggctgttttttataagttgttttacagatacggaaacagtccaaaatgggatttataatttcttttttgcattataaataaagatcctctgtaacaaaaaaaaaaaaaaaaa

SEQ ID NO: 6734 - DNA, 62 bp, Homo sapiens
tcacagcagctgggcctacagacaggaaatgacctgacctcaaaccagatgtggaggtgcac

SEQ ID NO: 6735 - DNA, 742 bp, Homo sapiens
cttggtgtgtttgacagactttcaggcccatgcgcgagagcagctgtctaagtcaactcgggattttattgaaggtggagcagatgacagcatcacgcgggatgacaacattgcagcatttaaaagaattcgcctccgtccgcggtacctgagagatgtgtctgaggtggacaccagaaccacaatccaaggggaggagatcagtgcccctatttgtatcgcacccacagggttccactgccttgtctggcctgatggggaaatgagcacagcaagagctgcccaagcggcttggtatctgctacatcaccagcacatttgccagctgtagccttgaagacattgtcattgcagctcccgaaggcctccgatggttccaactctatgtgcatccagacctgcagctgaacaaacagttgatccagagggtagaatccctaggtttcaaagctttggtaataactttggatacacctgtatgtggcaacaggcgacatgacattccgaaaccagttgaggaggaacttaacactaacagatcttcaatcacctaaaaagggaaatgcaataccttatttccagatgactcctatcagcacttctctctgctggaatgatctctcctggtttcagagcataactcgattgcccatcatcctgaaagggattttgacaaaagaggattgcagagttagctgtgaagcacaatgtccagggtatcattgtttccaaccatggtggg

SEQ ID NO: 6736 - DNA, 523 bp, Homo sapiens
tttttttacaatctagccttgacctggccttcagacttggtttctagctcatcctccccaaaactgcatgttttatcccagtggttcttaattctcaacatccatagtcctgcgcagaatcttaaagtttggttaagtgaaacagattttagaatttagtgtatatctcaaaggtcagaattaagaaattgccatgtttcttcaggtggtttatgaaataccagcatgtagacccagaagaagctgtaaggattcacactgatgtccaaacaaagaaatctatggcaattcactggggaacttttgccttagcaaatgagcattacttagagcctccagtgaagctgaatgaagctctagagagatacggacttaacgctgaagatttttttgtcttgaagcatggagaatcaagatacctaaataataatgatgaaaacttttaataaatgtgagcacaggcacttttaatgaaaaaggcatcatctaagtttaaaaacaaatgaaaagacttaaaaaaaaa

SEQ ID NO: 6737 - DNA, 334 bp, Homo sapiens
cgtggtgtatgttgtgctgtttcatgaacacagattgcttctacaactaaaaattagaaacaaattatataacataatctggacataagaacaaagtataacaaaggaacagcccactaaacatgcttctctgcaagaacccacagagtgaaatcaaagagtcagagcccaacttccaaagtaggaaaaaaaaaagtcctcttacatggtcctgggatatttacatactctattcaaatgtaggagggctatatttataggaactgtccccaatattcaggtttctatggattcaggttcttctagcacatgaatgaagacctcactgccagca

SEQ ID NO: 6738 - DNA, 283 bp, Homo sapiens
caagcaggcccccctcctctctccaccccactccatgcccagcccctgggatacaccaacctaattggtgtctatggatttatttgttctgactatttcctctaaatggaagcataccgtttgaccttttgcatttggattctttcacttggcatattgttttgaagtttatccatgttgtagcttgcataagtacttccttccttttgagaccaagtaatattccatatggatacactgcattttatttatccattcatctatttgtagatatttgggttgt

SEQ ID NO: 6739 - DNA, 372 bp, Homo sapiens
accccaccaggtgccaggtgacctgccaccccagaatccccaatcatttcttgatttggaagcagatatgaggaagaagcataaagattgggggacagggggattctggcatatgggccttaggataaaaaaaatagttttctttgatattgatcattggcttgaatatgctttgcaattaagatttatagtgaatgtaagcaaaaccagcacctagaaatctaaatgtaccaaaaggaatattaggggataagttgacattttatgagtctatacttctgaattctctaaaacagcttttaaaataagctattctaattgggatgcatttgcaagcatgaaacctacgtgcacttattttccaggattcct

SEQ ID NO: 6740 - DNA, 1070 bp, Homo sapiens
ctgactcctccgtgagacagatcggggaccttagcactttaatccctcccttctgagcgctcggtgtgcacttttagactatagctgtttcattgacgtgtcactctccatccagtgtccttgatgtggcttttagagacttagcagaaaattcgacacaagcaggaacttgatttttttaagaaaaaatattaccatttttgagggacatttttggacaagtagggggaagagagggcttctgttgttttgttttgttttgttaactaaacctgaagtattaattccacaaagacactgtccctcaggaccactcaggtacagctctgccagggacagagtcctgctagtgggaggtctcaggtggggctgtgtgttctgtgccatgaggcaggcgacaggtccagatggatgtcgtcaccaccttcctcagctctcatcacctggtcgtacgccaggcccacctcttcccagcaagggacgccaaagaactgcagtttttattctgagtcttaatttaacttttcatcatcttttcctattttgaagaattttttgtaattaaaagcaattattttaaaatgtgcaagccagtatctcacaaggcatggatttctgtggaatttatttttattcaaataaccatatttatctccaggctgtggaatcgccactttctttgtgaagacagtgtctctccttgtaatctcacacaggtacactgaggaggggacggctccgtcttcacattgtgcacagatctgaggatgggattagcgaagctgtggagactgcacatccggacctgcccatgtctcaaaacaaacacatgtacagtggctctttttccttctcaaacactttaccccagaagcaggtggtctgccccaggcataaagaaggaaaattggccatctttcccacctctaaattctgtaaaattatagacttgctcaaaagattcctttttatcatccccacgctgtgtaagtggaaagggcattgtgttccgtgttgtgttccagttttaacaggcgttctcttgccccctaggcgttgtttttgtggac

SEQ ID NO: 6741 - DNA, 697 bp, Homo sapiens
  misc_feature (1)...(697): n = a,t,c or g
ttaagaggcagatcttgctcttccgtggcagtccagcacctgctgcctcgccctactgcggcccactttggcncgngncttttacccgctcctttccgtgcatcatactttgttttctgttgaatactttcctcttagatcaccaccctgagatggtagaaaacataaaaatccctgtgtacacgtggagggagaccctctgggcctgtggagcccaaatatgaatctaaggcaatgggtggattctggattaactgcgtttcacgctgggaagtgactgcggggagtttgggtcctgtgtggtggtgaccgacgattctgtcctagatcccagtggagaacaccaaagcgagcgaggaggaaggaggacccgaccttctgtgaggtgtgcggcaggagcgaccgtgaggacaggcttttgctctgcgacggctggcgatgcggggtaagggacggttgggactggcacacgtgccctggctgcgtgcaaggcgggccaggcgcaggagggatgcagagccctcttcgctctgtgaagtctgagtcccagcacctggagctgtgctcaccaccctcagcagcgcggttcagtcctgcgggccttcctgttacactcatttacacttcagtctttccccaaaaaacattctgaggctgcccacagaagtgcaggtaatacatcaagacaaaaaagaaa

SEQ ID NO: 6742 - DNA, 70 bp, Homo sapiens
cgtggcagtataactgagaatgtaaattagtggctgaaagtgtaacttagcagtcaagatttcaggccat

SEQ ID NO: 6743 - DNA, 726 bp, Homo sapiens
  misc_feature (1)...(726): n = a,t,c or g
ggcacgagctcctaacaccatggattcaaagtgctcagggaatttgcctctccttgccccattcctggccagtttcacaatctagctcgacagcagtagaggcccctgcctctttctgtcattgttcaaaggtgggaagagagcctggaaaagaaccaggcctggaaaagaaccagaaggaggctgggcagaaccagaacaacctgcacttctgccaaggccagggccagcaggacggcaggacttctagggaggggtgtggcctgcagcttcattcccagccagggcaactgcctgacgtttgcacgatttcagcttcattcctctgatagaacaaagcgaaatgcaggttccaccagggagggagacacacaagccttttctgcaggcaggagtttcagaccctatcctgagaatggggtttgaaaggaaggtgagggctgtggccccctggacgggtacaataacacactgtactgatgtcacaactttgcaagctctgccttgggttccacccntctgggctcaaattccagcctcaccactcacaagctgtgtgacttcaaacaaatgaaatcagtgcccagaacctcggtttcctcatctgtaatgtggggatcataacacctacctcatggagttgtggtgaagatgaaatgaagtcatgtctttaaagtgcttaatagtgcctggtaacattgcagtgcccaataaacggtagctatt

SEQ ID NO: 6744 - DNA, 339 bp, Homo sapiens
tttcaataaatgaatataataacacctaccatcatttaattgtaaaccttccacagctctgcattaaacagaggcttctcctacaggctaaagattgtgctggtcccaggaaaaagatgtcctttttgcatactgggcccaaagagtattttaataatcattagtaatcaccatgtgggggtgtgtctggtgatgggtacaagaattgaaatttgaatccaaatttgggggttttgtattttttgtaagctctagctagactgaatggcaacaacaaactgaggctaaattcagtgtcgtggcttgagggggaagaaggagctgactaccatcataaac

SEQ ID NO: 6745 - DNA, 183 bp, Homo sapiens
tggccataaattgtatttgatttttacagctacctgtatttagccatgtgaaagtgattttccacttatgtcagagatacaaagtttcgtttagggataaattgtaaaaaagaatataggcctgggtggtgggctcatgcttttaattcccatactcagcttgagttaccgggaaccaagact

SEQ ID NO: 6746 - DNA, 348 bp, Homo sapiens
cttcatccataaagtgcattgtcttaaaatcaaggcattatcttatggtaaccacacacacagtaccattattaaacctaagagaactaatatcatctaatatcagctctatttcagtttttcaagctgtccccaaaatggctgttacagctttgtttttcaaacgaggatctaatcaagtttactcattgcattttgttctctccctttcatctcttttaaggtggaccagttcccgtggtttgttttgtttgtttagactttttagagtctaagccagttgtcctgaagaggatgcaattgttctatcaattttggggtgtcagacttcagtttctccagaactgt

SEQ ID NO: 6747 - DNA, 1698 bp, Homo sapiens
  misc_feature (1)...(1698): n = a,t,c or g
cagaccacgacagggaaccagcaggtgttggtgcggaaactggacctgtctgatactaagtctattcgagcttttgctaagggcttcttagctgaggaaaagcacctccacnttttgatcaacaatgcaggagtgatgatgtgtccgtactcgaagacagcagatggctttgagatgcacataggagtcaaccacttgggtcacttcctcctaacccatctgctgctagagaaactaaaggaatcagccccatcaaggatagtaaatgtgtcttccctcgcacatcacctgggaaggatccacttccataacctgcagggcgagaaattctacaatgcaggcctggcctactgtcacagcaagctagccaacatcctcttcacccaggaactggcccggagactaaaaggctctggcgttacgacgtattctgtacaccctggcacaggtccaatctgaactggttcggcactcatctttcatgagatggatgtggtggcttttctcctttttcatcaagactccctcagcagggagcccagaccagcctgcactgtgccttaacagaaggtcttgagattctaagtgggaatcatttcagtgactgtcatgtggcatgggtctctgcccaagctcgtaatgagactatagcaaggcggctgtgggacgtcagttgtgacctgctgggcctcccaatagactaacaggccagtgccagttggacccaagagaagactgcagcagactacacagtacttcttgtcaaaatgattctccttcaaggttttcaaaacctttagcacaaagagagcaaaaccttccagccttgcctgcttggtgtccagttaaaactcagtgtactgccagattcgtctaaatgtctgtcatgtccagatttactttgcttctgttactgccagagttactagagatatcataataggataagaagaccctcatatgacctgcacagctcattttccttctgaaagaaactactacctaggagaatctaagctatagcagggatgatttatgcaaatttgaactagcttctttgttcacaattcagttcctcccaaccaaccagtcttcacttcaagagggccacactgcaacctcagcttaacatgaataacaaagactggctcaggagcagggcttgcccaggcatgggtggatcaccgaggtcagtagtcaagaccagcctggcccaccatgtgaaaccccacctctactaaaaattgtgtatatctttgtgtgtcttcctgtttatgtgtgccaagggagtattttcacaaagttcaaaacagccacaataatcagagatggagcaaaccagtgccatccagtctttatgcaaatgaaatgctgcaaagggaagcagattctgtatatgttggtaactacccaccaagagcacatgggtagcagggaagaagtaaaaaaagagaaggagaatactggaagataatgcacaaaatgaagggactagttaaggattaactagccctttaaggattaactagttaaggattaatagcaaaagatattaaatatgctaacatagctatggaggaattgagggcaagcacccaggactgatgaggtcttaacaaaaaccagtgtggcaaaaaaaaaaaaaaaagtcgaccggccgcgaatttagtagtagtagtagtagtagtaggcgtcggc

SEQ ID NO: 6748 - DNA, 147 bp, Homo sapiens
tctacaaaaaaattaaaaaatttggcctggtgtggtgctcatgcctgtgatcctagcactttgggagttaaaatacaacacttcccagctgcccttatagttaaggtctggccagtgaaatgtatgtggaaatgttacatgacactt

SEQ ID NO: 6749 - DNA, 399 bp, Homo sapiens
gagagcctccaacaaggtaattttaaaatagaggctgtcatttccttccagtgtgggttgatcttagatatatacttataacgaatcggcaaagtgacactgtgatttctgagttagaaaaaggtaatattccttcagcctagggttctgtctttctctcctgggacatgtgtctttgacaccctgagccaccatgtaagaagtccagctaccatgaagccgtcatgcagaagagaccatgtagagacatcacacagagatagagggagggcacccagggagccccagcttgttttcaggactccaggatattttgggatccatcctggcgacggggttacccaggacatgttggaattgaaggaaggctcgtggagatggacttgccagttttccagc

SEQ ID NO: 6750 - DNA, 323 bp, Homo sapiens
agtttttggctcgggcggctgagaagaccgcgcggggctggagacaggtagcagtacgggggcggggcttcatgccggatgtgatagtctgcagtcgtttcggttggcagcctggcgggtgggagatgcggcggccacctgctgcaaagaaccgaagggaaggttagaagtacgaaggcagtttggagctggggctaagcagctgtcgcacggtcagatcatgggctccaccaagcactggggcgaatggctcctgaacttgaaggtggctccagccggcgtctttggtgtggcctttctagccagagtcgccctggttttct

SEQ ID NO: 6751 - DNA, 579 bp, Homo sapiens
  misc_feature (1)...(579): n = a,t,c or g
ttgtccaccccaattattcagtgacagggctccagttgcttaagccatagagaaggcccctttgcagtgggagtcactgaagacagaaagggaagcccaggatgaacccagtcctaagggctgctgggggccaccaaataagactgttttagccctggacacagagggagacacagtcatcccagatccttacaaagaatacattgccaaggaccccgaagaaatctgcttgtcttaagagacggaagacccacgaccagctctctgggactacctgtcaactcagcaggtgcagccagggagcagccatgcttcttctgccctcccagtaggctgggctatcagttcctgggaggggtcctgtccccatgtaaggggatatgtacattgctgagtacgctgatatctttttcatgggtatgattttttaacaagaaagctaaatggttctcgtgtaacataactgatatagtttggctgtgtnnnnnnnnnnnnnnnnnnnnnnnnnnnnnnnnnnnnnnnnnnnnnnnnnnnnnnnnnnnnnagtggaggtattgaatcatggggtggttaccgcca

SEQ ID NO: 6752 - DNA, 496 bp, Homo sapiens
tcttgttccagcgttgcgtaatcatccagaaagatgacaatggatttgggctgacggtcagtggagacaatcccagtcttcgtacagtctgtcaaagaagatggagcagccatgcgggctggagtccagacaggtgatcgaatcatcaaggtgaatggaactctggtgactcattcaaatcatctggaggtggtgaagctaatcaaatctggttcctatgtagctctcactgttcagggacgcccacctgggtcgccccagattccacttgccgactctgaagtagagccgtcagtcattggacatatgtctcccatcatgacatctcctcattcacctggagcatctgggaatatggagagaatcactagtcctgtgctcatgggggaggaaaacaatgtggttcataaccagaaagtagaaattctgagaaaaatgttacagaaagaacaggaacggctacagttattgcaggaagattacaaccgaacacctg

SEQ ID NO: 6753 - DNA, 290 bp, Homo sapiens
tgctaagacccaattccattccctgtgtctcctctttcctaatcctaaaatgcagggtgcatttgcacaagttacatttggggtcccttcatgttcccaagtcttttgaagcataagactacttttggggtacactgcgtattgttctgggccattgcctccccccgtttttcctgccactgtgtgctgggtgagtacatacactatacaccccataccaacccacacatgtccccctgttaagcttgatttgcgtacttggcaatttaatacttcctgcctttcaaccc

SEQ ID NO: 6754 - DNA, 415 bp, Homo sapiens
gctgagtcttgtttcagtgaagtcacaggatgtgccttatttaagttccatctggtacttatgacaacacatgctatatgtccactgggaagcttattagagactcagtgccagggtttttattgggcatgttttctagcacatcccacaattctggacttccagaaggttagcaggggttcagcttttcagctgaaaacgttatccccctttcagctggggggaaaaaaaggcaccgaaaaacagggcactgagctactcctgttttgggtgggtggagcagtagtaagcctcccaaaatctaaggtcccacactccagcaagggtgaaccttgcaaactcaaaaggatagcagtctccaacctgctgttttatacagtgacttaagtggtactaaaatgctatataagtcaaa

SEQ ID NO: 6755 - DNA, 912 bp, Homo sapiens
  misc_feature (1)...(912): n = a,t,c or g
tgatgcataatcaaagataattatagcaagttgcatcttcaaggagaatgccaacatcaatctcattgaacctctttgaattagtttactatcctataactaaaagaagagatttatagtttactgaagtcaaaaagtgggcttgaattaaggctgcttatattgtataagtgaaatgccagagtattttacttttatgtttctgtggcccaagggaattaaaatagatattatgccctgaatcccagtgtcactgtgactgcctgtgaaccatgtcagaaccaatatcaacaaaggcctcttcagctaagacttcccagtgttagaaagacaagaacagtaggatctctaaagcccttatcataatatgcctacacaatcaatatcactgccacaaaatcatgcagccaggtcactaaggcatctgcagtcatcactaacactgatctccacctggagaaggctgtatggagactacaccactgcacccacctagtnccagaacaactgcactctgcccaaccgatgccctccagcctgtcgtcaggtgaaagtttttccctatgaaagtcattctctgaagtttggaagaggagactgtaccnagaagatgcgcaagcattaatgtgggaataccagaaacatgaaaatgcaagggaacatgatgccaccaagggaacatgagaatttcccagtatctgacccccaaatttacagaaatttatgaagttattgaaaaggaatttaaattaatgatcttaagaaaaccaagagagacaaaatagtatacaaatagaaaattcaatgaaatcagcaaagtaattcatgatctcaatgacaaattcaacaaagaaatatatatcataaaaaagaatcagaaatcttgaagccaaagatttcaatcaattaagc

SEQ ID NO: 6756 - DNA, 488 bp, Homo sapiens
tatatccttgcagacaggatggaagatttgacaaaccggaggatatccaaacaaacatcaaatgtgaccggcaggtgtcactttatggttatttaagaggagcacacttcaaagataaaagccaaattcacatgccaggacaaggtggggctcacccatgagctggtccagagtctcatctccacctactccaccattgatgccaagatggcttcaagtcgagtgatgctgctttccaattccaaaccacttgggtcagaggctatagataatcaaggagatggctttggattccctgttctgtgtgctcctgtctggctcctgaacccagctggagaggtgtgtcaatcccaactggtgaagtactgagaggaagctacacaaaaggcagcaaggtgttaataagtgtacctctgacattttaaccacctctgacttttccatggaatggacaagtagtagtctctgtcagagcaatgttttaaagg

SEQ ID NO: 6757 - DNA, 372 bp, Homo sapiens
ggtcgacgagaaacacttatttttatggagggctggaggaccccaaggtcaaacagtgaatgggactgaacaaaaggtaaggatgtgactcacccattcagtaaaacttgttgatgccacagtgaaatttcccgcctagtgcactagctagaaatgcaaaaggcactcaccgtggagtgtaataagtgggggttaaacacatgctatggaggagaacagaaggggagcccacactggtgacaccaggcatggcttcctgaagaaagtggcctctaagctgatacttgtaggatgtggaggagctagccaggagagtgggcaatggagttgaaagaaacttcttgtcagaggggaaaagcatgtgcaaaggtc

SEQ ID NO: 6758 - DNA, 369 bp, Homo sapiens
ctaaagtatggagaggattctccggtggagcattaaagggaatagtgtctgatgctcttttttttgcagactttatcttttcatttatcatctatttcatagttctaatgcaaagcactgtattgcccccttctaccctctgccctatcttcctactcggcctccctgcttcacagttccttaactgtcctgtacttatttcccaccgccccctagtgctgtgatgcagaaggtatcttatgaggccttttttggctctaccctctctggggaggaaagagttattctcataaatttgtgttatgttttctgggctttcgtgtttcttcatgaactgccaagcagtccaattttatgagaaaattagag

SEQ ID NO: 6759 - DNA, 1412 bp, Homo sapiens
gagatgttggatattttggtgaaacacttaacaaatgtttcaaatcactccaagcagaacctgatgactgtggcaaacttaggagtggtgtttggaccaactctgatgaggccacaggaagaaactgtcgctgccctcatggacttgaagtttcagaatattgttgtggaaatcttaattgaaaaccatgaaaagatttttcggacgccgcccgatactacattccctgagcccacctgcctgtcagcatcacccccaaatgcgccaccaaggcagtcgaagagacaaggccagagaaccaagaggcccgtggccgtctacaatctttgtctggagctggaagatggtgacaatccttacccttccaagggaggacacccctaccagcagtctgggactcactttcctccccggtctcccgtgactacagctgtccctgggcctcctgggaccagacaaaaaccaccttctggcagatggagggagctttggagactgggcatccactatcccaggccagacccgatcgtctatggtccagtggcttaacccacagtctccaaccacaacaagctccaactcagctgtgacacctctttcacccgggtcgtcccctttccccttttctcctcctgctactgtagcggacaagccacctgaaagcatccgcagtcggaaggctcgagccgtcgtatccgtgtgaagcagaacacagctcggaattatcttttgaaataggagcaatttttgaggatgtacaaacctccagggaacctggctggctagaagggactctgaacggcaagagggggctgattccacagaactacgtcaagctgctgtagctcctggcctcagagcccctgctgaccctggcacccagggacctgcctgggggcagagagctgtcttcctcctccgaggctctgggctgcacccacaggtacctccacacttgggagttaccatcatcacagtcagccctgggggtggggggtggtgggcagggatgggacgcaccacacagaactgtgattgtggatcaggaggggaatgtcaggattcgcaaaatggacttttcatttgtcaagtattgggacttgtgatttttaattatccagcatatagaatgagagggagggcagccttctgcccacctgtgtcgccctcccactggcaagtcacgccaccagagccaccctggctccctctcctccctgagcacctgctgctgcgattttaaagggaactgtactactcgcagtgataggtttgcagagtgtgtgcttggctgtggcagcctagcttggagaagctgctgttggtgcaagggagatggtctcaagtcagagggaagcagagacgcgcgtctcaagcctgcccttcctagacggccacctgcaggaccccac

SEQ ID NO: 6760 - DNA, 1424 bp, Homo sapiens
tgcaaaacaatcagaaaacatttattatactgaaatgtgtacatcctactattaaaaaaacaaagtaacaaatttgctggtgccaaaatttatttagcctgtttcactgggacaaactcacgttcaatgccactcagtataatttcaagtctgataagcatctaagtatttttaccccgcttctaaaacctgatgaggaattcaaaataagcacacagcattaaatgacatttattgttccataaatcttgagacccaaaaaggaatgctaaatagacaagcaaaacttttaaaacaaacgagataaactcacttctttccccagtgactgggtacagaaaacatgtggtcacacgaaagcaaagggaaaaagtcagaaaggaaaactctctgcctataggatctataggagttacagatattttcaaatcgatgatgaaaatagatcgtgcttctttgtagcaaataattaaccccctttatgaataaaacataaaatgtcaaagcttttactcactgaagtagtttgtcttctgggagagatttcaaactcaaaattactcatttcctattttttgcctgaacacaatgaggatcaaatagtacattcaaatcaggacacctgggtatatggacaaagatatcctacaattaaaatggaatagaagttaaaaaaaaaattcagtcccctacaccacaggcctcaaacatgcttgctgatggattctgggaaggttttggatgaaggacggagatatgggaggaaagtgagaaaacagtggattccctttgaaaagtatgctagcagacaagcatttggttttatgaaagaggcactcttatagagaaagaagctagtatgtggtgtataaaaagcccctaaatcatcaccagaatgtctatccatgattgtactaaagctcaatatttgagaggcttaagggatttgtatggtacattttagtgtttgattgataacatctagtgtttccagaaaaaaattcatcttgttcataatgaagatcccttaacacctagtcagaagctatcaacaataatactttctccccctacttgggtcacctatttccaatgtctggggtagggctttaaaaatgtttaataggatggtgggggtggggggttagggtgggggtggtcagagatggagggagagagggaagaaaatgagagaaaaaccacgagtttaaaaggcaaggaatctccaaaaatgaaaaccagaaactaaaatgctaaaaatggaagcagaagcaaaaaagtttttcaataaatctgtgacaaagccaaaacacaaaagtctttgtacctattaggatttacactgatcctctcaccaaggtactcctgataatgcagtttgcttcaagcccatcttccctggcttggatccctcgttccgaatt

SEQ ID NO: 6761 - DNA, 356 bp, Homo sapiens
aactctgatcattttgggcttcaaatctctctctgtgactggtgattttgtgggttgaaacttctggcaaaagggggcagcccttgggagctgggggccaggggattgacttggttccctgacaagggtaccaggtccaccccttctgaaaagcagctgttagtttactcttgggctcttttacacattggatatctcttccctgggtagagggtcctgacctaaaattccactttaggagtttgtcgtcttggactcaacaactaacaaaatgaaaaggacccagcaagcctcacttgtggaatgaaaatggggcattcaggaaagcacctgtcctggccccacagtatgtcagc

SEQ ID NO: 6762 - DNA, 384 bp, Homo sapiens
gacaacaccaagtaagacaggagctgaggacatctcccatgctctgggccatcctatcggccatccgaattttccagcactgtgtgaaagcctttgcctagaatgtactagtgtttctagtttccgatgagctgctgtggaggtaactgtctctgtgccctctactgtcagatctgctcaactgtgtagctgtcagtatttctccgttttcctggagcagagggtctgtgaagcatgcttccctgatacaccaggaccatccaacccatggaagcttgttgagacctacagcgccttggctgctgggccaccttttcctcccaaacctgcccccagagcattttacattctagaaacaaaacaaaaccaaacacaaaaaaaaaa

SEQ ID NO: 6763 - DNA, 615 bp, Homo sapiens
tgtccccacctgctcggcaagaactgcagtccgcccgatagcggctgcgctgcgcagcctagaggcccaagccgcgcccagcaagcaggagtcgcgagactgggattggctctctgaacagacgtcattccaaacaagacggctccgcccttctcaagatggcgctgcactcaatgcggaaagcgcgtgagcgctggagcttcatccgggcacttcataagggatccgcagctgctcccgctctccagaaagacagcaagaagcgagtattttccggcattcaacctacaggaatcctccacctgggcaattacctgggagccattgagagctgggtgaggttacaggatgaatatgactctgtattatacagcattgttgacctccactccattactgtcccccaagacccagctgtccttcggcagagcatcctggacatgactgctgttcttcttgcctgtggcataaacccggaaaaaagcatccttttccaacaatctcaggtgtctgaacacacacaattaagttggatcctttcctgcatggtcagactacctcgattacaacatttacatcagtgggaaggcaaagactaccaagcagaagcacgat

SEQ ID NO: 6764 - DNA, 573 bp, Homo sapiens
gatgacctgccttcttcatgactcaacccatgatttcaaaatgaaattggggaaatagtaggttaatgctttatcaaagaaaaatcaatttggtctgataggggactcaacggattagagatcacagactgaggttctagtcccagctttaccacaagcagccttgacctcgccctcaacctgggtcccagtgcctcaatgaccctaggcttccatccctgatataggctttcagaagtcagtggaaagattattcatagtgcctaagaaatgcctgtttccaatatttgaccttgtggatctcaggctttggagagcctaataccaacacaccagcctgcagattttgtctttcccaaactgtgttccaggaatgggctcaaaacttcagggctgacgctgtcctcaccccagactattagagtcctgtgtgctcacagagaacatgaagaaggagcaatgtgtagaagacttaactttctcataactgcagcagggactgaaaattgacctccatccaaatgaaaaataatgttgaggatgattctaaagctaaaccctaggcttggtggg

SEQ ID NO: 6765 - DNA, 229 bp, Homo sapiens
  misc_feature (1)...(229): n = a,t,c or g
accccccaaaatggcagtgtcttaatcacctaaaccttaacatgtgactatattaccttcnnnnnnnnnnnnnnnnnnnnnnnnnnnnnnnnnngatcttgagatggaaggagtatcctggatttttcaggtaaactgagtataatcacaagggcctctgtaaaggaggcaggagtgtcagagtgacggaagaaaatgtatgtaacaatggaagcagaggtcagagtga

SEQ ID NO: 6766 - DNA, 211 bp, Homo sapiens
ctatatgtccttaaaagacaaacctgtggaaagcaataattatttccttgtattcttggatttataacataaggaagtgaaaatggagctacagcggggcaaagttgccctattttaccagaactgagtcagtactaacctgaagaagactgatgcatacaatccctacagcaaccaattacaatttttttaatagcaaaaaattaacagg

SEQ ID NO: 6767 - DNA, 114 bp, Homo sapiens
cgtaagttcatgtcttccttggtcccacagcagccttgaggtttgaaggtggaccgcttcctttaagtcttctcttgaccagctgagctaccaggactctatctgagcccttct

SEQ ID NO: 6768 - DNA, 327 bp, Homo sapiens
atggtgccgttgaacatcttcttccgggcctcctccacctcttctggggaccagctgatgccatgctttaagcgctgggtggcaaaccagattctgatgtgctcctctgggtgtttggaggcagctgtcagccaggacaactcagcctgggtcgggtaaggaaacttgttgaaagagttgatcatcgtggcatttgtatccagggcagagttgtatttggtagtatttagtgggacagggaccttgggcacaaggttgatatttggtggcagctgtacagaaggcatgacgtgtcctaatgtgtcttggaggagctccaccccgccg

SEQ ID NO: 6769 - DNA, 250 bp, Homo sapiens
gaagctgaggactccagcgagtttgcgagtttctttccagactttatttggactgttcgggattttgccctggagctaaagttagatggaaaccccatcacagaagatgagtacctggagaatgccttgaagctgattgcaggcaagaatcccaaaattcaaaattcaaacatgcctagagagtgtatcaggcatttcttccgaaaacggaagtgctttgtctttgaccggcctacaaatgacaagcaat

SEQ ID NO: 6770 - DNA, 157 bp, Homo sapiens
ggcacgaggctcccggcatcctgggtagggcggccaagggattgcttgctctatatcctgcaagtgcccaggacgggccccacccacagacgggggattcaggccccaaaacgttccatgggtaccaaaagcttaagaaaacccagaggctaaagaa

SEQ ID NO: 6771 - DNA, 395 bp, Homo sapiens
caaacgtggagagtgttgttagctcggatttattcattctcgaacaaatatctattaaacatcccccaagctgaggaaactgagattcaaggagttgggagacctcacccacagtcacgtggatcctaactggctgagatgagttttgggctcctgctgggctgttgggacccagaggtcgggcgacaaggtcacccagggtctcaggtcggtccctgtacctttatctcatccccctcctctgcattcctggaaacccttcccagggacagctcccctggcccaccccgcccttggaccttcaccttttccatggagggactccacaggcatgggcgggtcacccaggcagcgggcccccggacaccttttccctcctgggatgatgttcccct

SEQ ID NO: 6772 - DNA, 255 bp, Homo sapiens
ccagagttaaatatgcccaggctgaaagaaggtgtataatgtatggtcgttcttataccaaatgatttctttggaatttaaacaaatatgtttagtattttattcctaatttaggaagaaaaagcaactaaagttgttctgacattgtacacagatgagtagcacgtaactgttatttagtaagccccatagatagtaaggaataaaagttgttagtgagcaaaacaggagtatcctgccatttgctttaattct

SEQ ID NO: 6773 - DNA, 189 bp, Homo sapiens
ccataagcccccacagcaccttttccctttctctgcttggcttcaattgggttaatgataccttgtgcattcttcccgaggccccgtccagggacgtagcccatcttctgaagaagcttctgtccaattccttttgtgtgtctttcccagctgccgaagtccatgaaagatttggttcctcctgcaaaa

SEQ ID NO: 6774 - DNA, 428 bp, Homo sapiens
  misc_feature (1)...(428): n = a,t,c or g
tgttgctaccttgtgctgagacttgtgctagatagtgaggataccaagaaaaataagcacagggattttgtgttgttcatctttatctcctcagcatctaagataatacccaatgcatagtgggctctcagtagtgtttggtgaactaataagcgaaagatataatcgccactgtcaaagcactcactcactatgtggtgggggccaacagacaggtacagatgtgttcctggtgtggagaaagtgccaaggtggctcagcgaagaaaaaagaattcttgtggtgctatcaagcaaggcttcatttggagggaaaagtaggatttctgtaggtggaaaaagagaagacattgatttgaaactccctggttgtttttataaacttcatatttagcctatgtccaccagagcctcccaaaagggntataa

SEQ ID NO: 6775 - DNA, 452 bp, Homo sapiens
cctgaattacaagggtcttgtcagagctgcgactgtaagagaacaattgaaaaagcttcttgtcaagtttcaagtgcccaggaagtctagtgaaggtgacccggatctggttctgaggtgcattgtctccggcttcttcgccaatgcagcgaggtttcattctactggagcttataggaccatccgtgatgaccatgagctgcacatacaccctgcgtcagtcctctatgcagagaagccgcctcgctgggtcatctataacgaagttatacagacctccaagtactacatgagagatgtgactgccattgaatcggcctgggctgttgggagctggctccacacttttatcaacaaggaacgcacctgtcttttgaaagccaaaaggggccaaggtccagggacccgtgaggagggagcccacagttacagttgcagggattctgggcttc

SEQ ID NO: 6776 - DNA, 168 bp, Homo sapiens
  misc_feature (1)...(168): n = a,t,c or g
gggacaaggggggctctctnatactgagaacagctgaagcccgaggcacagcgcaggagggtccccagtggtggagagctccctcctccaaagaccacagctaagggttaagctgctgtcaagaccagttatgggaacagagaatcacattcctctgcaagaaaggac

SEQ ID NO: 6777 - DNA, 1165 bp, Homo sapiens
  misc_feature (1)...(1165): n = a,t,c or g
gctggtcggaccaggtctcttcccatcactattgaaatgctaaaagttccagacgatgaagaagaagaggagcaaacctgtccatccacattcagtgaagaaatgacacctacctcagtcattcctaaattaccacagtgtctacgggaggaagaagagaaggagagcgactctgattcagaaggtcccattcagtaccgagatgaagaagatgaagatgaaagctatcagagtgcactcgccaacaaagtgaagaggaaagacacactggcaatgaagttgaaccacagacccagtgaaccagagttgaacctgaattcttggccttgtaaaagcaaggaggagtggaatgaaatacggcaccagattggaaacacactgatccggcgactgagtcaaagaccaacaccagaagaactagaacaacgcaatatattgcaacctaaaaatgaagctgatcgtcaggcagaaaaacgagaaattaaacgtcggctcactagaaagctcagtcaaaggccaactgtcgctgaactccttgccaggaagattctgaggtttaatgaatatgtagaggtaacagatgctcaagattatgaccggcgagccgacaaaccttggaccaaactgacccctgctgacaaggctgccataagaaaagaattaaatgaatttaaaagctccgagatggaggttcatgaagagagcaaacattttacaccgctaccatcgtccatgatgccaaaggttgagagaggaatcaacatggctgctttgctgcttccttctccaaagtgacatatggagggaactttagcacttcccagcacagccagaattgcatcctctgggatcttctgaggtggacagcactttgaatgtagcatttcactggaacagagtcttatgtgctgcaccgggggcaaaacaacactttgtcagtgcttttgaacctttcaatattgtagcatgcttgaggagtttttcccttactgggccaccaaagttctgaaccacttgcaggttccaggttttactgggctggcaccacaccccttcccctagatgactgcctgtgcagagacacagttttgcaccattaggcctttanctggccctggccctggattgtggaggacccaaatgtgttagggggtncttaaatttc

SEQ ID NO: 6778 - DNA, 591 bp, Homo sapiens
agttttggtaccttgcagtttagtctcttcatttatgtcctcctgaaatcttcaggaattgcactattttgtcaatacttctggggtcgtacttagggggacttaaaggagatgtgatgtggcagcctttgacttaagggagtatcatactagctcaaagagatctgggtacatgccagttgaaccaactcttctgaggatgtgatagatcctgggaggccactctgatcctgccaatgttgaggccagatgagtctttgaaaaacatggtttggcttaacaccagcacttactctaacacccaccatgaatcttgctgaactgaagctatacaaataccttttcaacagattttttttcattccagatccttcttagaaattcctaaggctcaatgttgtgtggaagattctgagaaagaaaatagtttccgatctttgggattcccctgagatggtccaatctgcaaaaagttcattgccatttccatcaaggacactgagaacaagagtcttatccgcattgaatcctgggaattgagaagcttcagcagggcttcgctggaactaggatgaggatgtggacaccccc

SEQ ID NO: 6779 - DNA, 361 bp, Homo sapiens
ttacttcagacatgggacggtctctgtagttacagtggggcattaagtaagggtgtgtgtgttgctggggatctgagaagtcgatctttgagctgagcgctggtgaaggagaaacaagccatggaaggaaaggtgccaagtggtcaggcgagactctcagggcaaaggccttgggcaggtgggaatcctgatttgttcctgaaaggtagtttggctgaatcattcctgagaaggctggagaggccagcaggaaacaaaacccagcaaggccttttgtcgtgagggcattagggagctggagggattttgagcagcagagggacataggttgtgttagtgtttgagcaccagccctctggtc

SEQ ID NO: 6780 - DNA, 329 bp, Homo sapiens
gaaaaaagataaggtcattgagataggaagacagaggaaaagcctcttgctgttgtttcttcccaagaaaggagaagccctgccagggagaagtcagtagtattgctgactcactgtatcactgagtgtagggtgtggtagcaaggaggaggcaggggattcacgctgacaggtggctctggcctggctcttggggggccttctgaagaccagtctgcagtttgaggaagggccccaacaattcatttggagagcttggccaaatactttctcattaaatcagcacctaaacttgatgaacttaaagtttgtttattagagttgaaaac

SEQ ID NO: 6781 - DNA, 552 bp, Homo sapiens
  misc_feature (1)...(552): n = a,t,c or g
aagaagcctgtgtggtctgggccagtctctgccatgtcctgagtctgcttcagtctggagctgtttgtggggcgagtgccatgtggacagtggtggatgatgtgtgtgcttcaggctgctccctgacccctctgacctttccacgagtgtcacatgggaatgtgtggggcgcaggggcgggtgcggagagagcacctttttgcttttcgagctcttgaccacctccaatgtgtaggtccctccaggctggggcttgggactgcttatgatttggggatcaagcctccatgtctattcttgttgcctgtccagatgccaaaactctgtgttgctgcagggtttgaacttttggaaaccaattaaaatgtgcctttggtgggcggggtcaagagcccctggatgttcgacctcttcccgctgtgtgggcgttccccctcccacctgtttgaatacatagggatggctctctcagggccctgggaatgggaatggacagcgctgctgtgggctgtcccctccctaaagttaatctcttggctggcaagntgctgc

SEQ ID NO: 6782 - DNA, 921 bp, Homo sapiens
ttttttttgcagtacatgaatgttttattcttcataaagtgcttaaaacatgaagaacaagctctttataaagagccttaactaggaagacaaacagcaaagcagaaccatgcctgctccctgcccaacccacctgcaactttcctccaagtgtggctaggagaagaaacatcaacaaggaccctgggcttcgattcaaaaactcctctgaagccatccatgccctgggcattagggaggcccacaaaggtcagggccagggctgggagtgaataaagcccagaggaatccccagtagggggggtgactccccctctctcagaaaagatacttacttctctaatacccaatgacccccaaaagcatgactgaaaccctggggaccagtggatacttttctcagatttgatgagtggagtttaaggtaggtaacgttacaggggctttcctccatgtgtggcgctcctctgctccatcctggcagcagacagacatcacccagagggcacgtgtctgcctgaggccttccaaaagcaagcccacaggccctctcctgaagaagtggtggtcccagaggagctcttgcctcctcactaagctgttaagtatccttcttcagcacctcatcaccccccatttttgctaattcagggtgccccaagctgccaaagttccctgcagatgcccttggggaagcctaccatgttttctacaagcaaaccaggggctgggcccaaaggacagatacttcatttcaaagtgcactgcagccaagcccagccaaaccctggggcagaagggacaggctgagatagcagcttaatggatggatgggaggacaacaaaggctttttcctaagtataggtgtctcccaaaggcatagtgggacctccctcttccaggcaagctgactggtctag

SEQ ID NO: 6783 - DNA, 364 bp, Homo sapiens
tttttttttttttttttccagtgaggaagctctttatccctgggaacccttcccacaatcaggggtctccagtccgatggcccattggtcataagctttgccttggggaaacagagccaccctcctctgcccccacttctggctgcctcactcccctgctcaaagcttgattttgaattctgtgggctgcgtggtcacagaggcccctgaggacttgaagagtgccttcaggatggtgtcagggtccacttcggcaggggggttggaggaggaggcagagttcaccctgcgaggcagctcgctctcctttttcattgatgggctgtcactcagccgcagcaggatgggctggtctgaggtgata

SEQ ID NO: 6784 - DNA, 438 bp, Homo sapiens
  misc_feature (1)...(438): n = a,t,c or g
agatctctgaaggcctgagggtaatgggcacaaaagagcatccgcttcaagtctgtgggagaagcagtcagatcctcccccaccagccctcctccacctcagccaccttcccagaaactgacagctatgccccccaacccctaaaccccaagcaggagactgggaaactcctctctagggagacttacagccccaaaataaagaattctattcacttaacttctgggcagtggcccttcaaattgggcagggtccatggttctattttcctcatgggtgaggattcaacattttaaagttcgggccctatggcattacaggggagtttttccaatcgttcccntttcattaaccatggggaaaggacaggccagttatttcaccagggtttttnggggngaggaggcntttttaacaaagggggttngacccagtttg

SEQ ID NO: 6785 - DNA, 125 bp, Homo sapiens
ccttgctgggcttaggaaggcccccttgcccccaaccccaaggtagtgagcaaacccctgcccaaaccagggcctaattgaggctcttgaggggggagggttgtatgaccaccatggactgggtt

SEQ ID NO: 6786 - DNA, 357 bp, Homo sapiens
tttataagcagattgatcagaactggtatgaaggagaacaccacggccgggtgggaatcttcccacgcacctacatcgagcttcttcctcctgctgagaaggcacagcccaaaaagttgacaccagtgcaggttttggaatatggagaagctattgctaagtttaactttaatggtgatacacaagtagaaatgtccttcagaaagggtgagaggatcacactgctccggcaggtagatgagaactggtacgaagggaggatcccggggacatcccgacaaggcatcttccccatcacctacgtggatgtgatcaagcgaccactggtgaaaaaccctgtggattacatggacctgc

SEQ ID NO: 6787 - DNA, 1117 bp, Homo sapiens
gcttctcttcagactgaagcagcaattctgccactaccagcagcaaccaggacgtctgttctttgtgggggccagatcagaagagagaggcccctgtgaccgcccgggctgcttggtcacaactctgtccaattcaaggatgtttatcggcctctcttagatcctgagtgagacaaatacagaaatgacccattccctgcccaccagaaactcagaggtgattggggagactgacacaggaaaatgaacttaatcaagagagactgtgatatgtgctaagaagggtgtgagggagggagagatgaattttccctggagggatcctagaaagcattgtcatattgccatctccattagctcacttttaaacaactagggtgctggaagaacctttgtctgagggtagttcatagctggaaatacttggaatattttccagagtctctaaactctcatcttcccccacagatacacatccaagctcacaaataggagtagcaattctaggtggtagggttgtgtacggaacccctggctgtctgcatatatctcagaattaccccaggaccattgtcccaaagtctagagtctttacaggtaggcaaaatttgttttcaatgcctgtgcctcagctgctgtcacaaatacccatcttaggatcccatcagcttcccatcccccaccagacagccacagtaccctcactttctccctattgttctttcaaatcctgttctcaggaaagaaactgccactaattcattcacactaaggtgtaaatgattgataataggaatgagttacctcttcccacagacatttgtttttaagtatgacagagcagggccttaatcccaagggaaaaggttatggaactggagggggtgagctttctgggtagaaggagacttcctgaatttccttaaaacccagtaagagtaagacctgttgttttggaaggtctgctccaccatctaagagcactgtttttttttgttgttgttgttgttgttttacggtctctgagggaatatagtaaaaatgcatatgcacgtgcaatttgcacggcagcatttcaccgattgtggactgtattggctaatgtgtttcctggtct

SEQ ID NO: 6788 - DNA, 570 bp, Homo sapiens
  misc_feature (1)...(570): n = a,t,c or g
caggctggactcggcccgagcagtgtggagcgaatacagccccgctttctctcactgcggtccacacgcgcagccctgcagggaatggagggaggtcactgagcaagtcctttgctctgtgtaaaaatgacgtgaaaggctgatcctgaaagtcattaggtgtcctttccatgaagttgtgccttcctcagaggcaagggggtggagagaaaaaggagcactttcaggcagaagccaagcagaacctgccacagctctgtcgtctggactcgccagggcccagggcacggcccttccgggagcacagccgttccctccccgaacacagccgtccctccccacctgccccgccccgccccacccagagctgctgtcctcctctctctgccncgctcagctgttgctcgctcattccttaggtctcgggtgcactctctgccccctggtatgggaagaacttggcctcttttatccaccgcttcatctctgctggccagaacgggctggcatctcatagagcctctgtagaagcctccatgcaggggatgagtgatactcaataaaaattaa

SEQ ID NO: 6789 - DNA, 692 bp, Homo sapiens
tttttttttcctgtgactttaagtgtaatgacagcattaaaaataaattatgctgtcaatatacaaaaaatatcttttcattataagcatatataaagccttctgcaactattacatatcactttatcgaatccaaacttttttgcttgttcccttttgtggtccctagtttttcacatcctcatagaggacaaaagcctttagagatccatcaattcaaccctttcatttcacagataaaggagggtaaatagtttgcccacagttacattcatcctcagtggcagaaattggactagaaccaagtctcatgatcccgaagagggcttttctcattacatgacatgacccattctccaccccatccctgatctcaagtggacgatgctccctcaatctcagatgggcagaagggctgtggaggaaagaaacaatcctgtttggggcctctctggcttgttaggagcatggggctctagaataggaggtaataaaatacatctccttctatccaaagtctttataaataacctatcacacacacacatgcacacagtcaggctactttgaagacctaaatgagaaatacttcctgagaagagaattgtgtgtgacggaaacttttaaagcttccataagagaggtttttgatttaaaaagtgaatatctggccactcacacagttatacgcc

SEQ ID NO: 6790 - DNA, 178 bp, Homo sapiens
tacaaatttagttaagtagagtataaataatctaaaatatggctccttttagaccttctttgtgaatattgaaccacatgtacctaagacggtttgctgtgtaggctaataaacttgataatataacaacttttatcatttataaaatattttcacataaatgatcttatttatttaa

SEQ ID NO: 6791 - DNA, 534 bp, Homo sapiens
gctggcgttattcttttgatagttctctggagtttaaagaagtttagatagtttgctggagatgtttttgtaagtgacgtatagcttatgtctctaatccatgccctgcttacctagattattaaatgtggagcaagatgaccagacaggattaaattttattgaattacagttacaagtggaaaaaatgactgacttactgcatggagaagtattatgtcaacctgttaaaagctatggaaattaaaatgttcatgtatatacaaaatataaatgacatgtaaggtaaaattacagtgatcaatttacaacaaagaaattaacagtagttttccagcttgtttgattaatcaagcaggtttactcttgaatccatagcatttctacaatttaatttggacaaagttctattccagatcagccagggttttaaaactggaaatgtgttaagggtgggattgttaggcttccccaggattgggtgtgggatggataaatactttttttaaaaattaattattattgtttataaga

SEQ ID NO: 6792 - DNA, 284 bp, Homo sapiens
cctccccagtcttcagagtgatttaatgtgctcaggtatttgaaatccttaatgaattacctgacaacttgtttggtttgaatgactggcataaccaaatgaatcagtcattgagcctgctatagatctggcgtattaaagaacaacaattgattgggtaatcatccataattaaatgctcttaatgttccaggaataaataatttctgcttttaaactttgttgcagtcttctctctcagatctttcagggtgatgaggatgaggcagccttaggacactggg

SEQ ID NO: 6793 - DNA, 2742 bp, Homo sapiens
  misc_feature (1)...(2742): n = a,t,c or g
gcctgagtgagtctctggcgtcccaaattgcctgtttttctcgcaggctctattccgttcgctggttcgccacctcaggggaacgatggccatggagtccacagccactgccgccgtcgccgcggacgtggtttctgccgacaaaattgaagatgtccctgctccttctacatctgcagataaagtggagagtctggatgtggatagtgaagctaagaaactattgggtttaggacagaaacatctggtgatgggggatattccagcagctgtcaatgcattccaggaagcagctagtcttttaggtaagaagtatggagagacagctaatgagtgtggagaagccttctttttctatgggaaatcacttctggagttggcaagaatggagaatggtgtgttgggaaacgccttggaaggtgtgcatgtggaagaggaagaaggagaaaaaacagaagatgaatctctggtagaaaataatgataacatagatgaggaagcaagggaagagttgagagaacaggtttatgacgccatgggagaaaaagaagaagccaaaaaaacagaagacaagtctttggcaaagcctgaaactgataaagaacaggacagtgaaatggagaagggtggaagagaagatatggatataagtaaatctgcagaggagccacaggaaaaagttgacttgactctagattggttaactgaaacctctgaagaggcaaaaggaggagcagcaccagaaggaccgaatgaagctgaggtcacttctgggaagccagaacaggaagtaccagatgctgaggaagaaaaatcagtttctggaactgatgtccaagaagagtgcagagaaaaaggaggtcaggagaagcagggagaggtaattgtgagcatagaggagaagccaaaagaagtttcagaagagcagcctgtggtgactctagaaaagcagggcactgcagtggaggtagaagcagagtctttagacccgacagtcaagccagtggatgtgggtggggacgagccagaggagaaggtagttacctctgaaaacgaggcaggaaaggcggttcttgaacaactggtaggtcaagaagtaccacctgctgaagagtcaccagaggtgcaaacagaggctgcagaggcctcagctgtagaggctggatcagaagtctctgaaaagcctgggcaggaggctccagttctccctaaggatggtgcagtcaatggaccgtcagttgtaggagatcagactcctattgaaccacagacttctatagaaagactgacagaaacaaaagatggctcaggactagaggagaaggtcagggcaaagctggttcctagtcaggaggagactaagctgtctgtagaagagtctgaggcagctggagatggggttgataccaaggtagcccagggagctactgagaaatcacctgaagacaaagttcagatagctgctaatgaagagacacaagagagagaagaacagatgaaagagggtgaagaaactgaaggctcggaagaggatgataaagaaaatgataagactgaagaaatgccaaatgattcagtccttgaaaacaagtctcttcaagaaaatgaggaggaggagattgggaacctagagcttgcctgggatatgctggatttagcaaagatcatttttaaaaggcaagaaacaaaagaagcacagctttatgctgcccaggcacatcttaaactcggagaagttagtgttgaatctgaaaactatgtgcaagctgtggaggagttccagtcctgccttaacctgcaggaacagtacctggaagcccacgaccgtctgcttgcagagacccactaccagctgggcttggcttatgggtacaactctcagtatgatgaggcagtggcacagttcagcaaatctattgaagtcattgagaacagaatggctgtactaaacgagcaggtgaaggaggctgaaggatcgtctgaatacaagaaagaaattgaggaactaaaggaactgctaccccgaaattagagagaagattggaagatgcaaaggagtctcagcgtagtgggaatgtagctgaactggctctgaaagctactctggtggagagttctacttcaggtttcactcctggtggaggaggctcttcagtctccatgattgccagtagaaagccaacagacggtgcttcctcatcaaattgtgtgactgatatttcccaccttgtcagaaagaagaggaaaccagaggaagagagtccccggaaagatgatgcaaagaaagccaaacaagagccggaggtgaacggaggcagtggggatgctgtccccagtggaaatgaagtttcggaaaacatggaggaggaggctgagaatcaggctgaaagccgggcagcagtggaggggacagtggaggctggagctacagttgaaagcactgcatgttaagagggggcacagccctcctcccaagggaaagtgtttttgtatataatgtattttttcacttttggaggattctttttgtataacttcaataaagattgtaagcaaaggttgaggctttgatggtttttttcttaattattggctgaatctgccttggagcactgctggttttatatattagccaaaggttttgttctggccttctgtactgatctgtgttcctgatcctaattcctatctgtctaacgtggaggtgatcaagngtggctgtaggcctttgttttccaatgg

SEQ ID NO: 6794 - DNA, 314 bp, Homo sapiens
agcagcatcagcattgtcctggagtttcctggaaaatgcagactcttaggtcccatcccaaactactaaatcagatctgtgttaacagtactcccaggtgattcacatgtacattaatgtttgagaagcactgtcctaaaaaattagatcagagagacaatgaaatatataaccaatgacttagtaataaaatagaggcaaggctatataaactgcagtatttctatacgatggaatttatgtagtgactttaaagactatggtccaggtgtggtgactcgtctctaatcccagcaatttggaaggctgaagcg

SEQ ID NO: 6795 - DNA, 441 bp, Homo sapiens
gggaaatccccctgttgtcttcagggggccccctaccttgctgggtcaggaaaggggaggtcaggcccaacatcctagatcctgacagaatcttcctgcatgacggggaatttcaacatcctattcaacaacacaaaagtcaagtgcccactgtgaacatccagactgaagtctgagatccttccccggagcccagctggcccaaaagatgtcattgatgccctagctctgggcaggcagaagagacccggagcctgttacaaacgccttctccttcttcttggagttggttctggctttcataattcacagtggatccagagttgcagagataattcttagtcttgggccattctggatatatcattcttcatcatagaccattctggatacgtctttgtggccaaaaaagagttaaatagctgcaaggttgttgatttc

SEQ ID NO: 6796 - DNA, 539 bp, Homo sapiens
gtctccaccaccgctgctgcaacccctgctgctgctgctgcctctgctgaaagtggagcctgcaggggccacactgatccggatccctcttcgtcaagtccaccctggacgcaggaccctgaacctactgaggggatggggaaaaccagcagagctccccaagttgggggccccatcccctggggacaagcctgcctcggtacctctctccaaattcctggatgcccagtatttaggggaaatagggctgggaacgcctccacaaaacttcactgttgcctttgacactggctcctccaatctctgggtcccgtccaggagatgccacttcttcagtgtgccctgctggttccaccaccgcttcaatcccaatgcctccagctccttcaagcccagtgggaccaagtttgccattcagtatggaactgggcgggtagatggaatcctgagtgaggacaagctgactattggtggaatcaagggtgcatccgtgattttcggggaagctctgtggggaatccagcctgggtcttcactgt

SEQ ID NO: 6797 - DNA, 644 bp, Homo sapiens
gagagcggggagttgtgtccaccttgccgacgtcgctagccgtggggctgtcctgggaaggcggacggcgagcgcccggtgtccgcactcggccgcctgccgtgcccgtctgcgcccgtgtcatcctcactcgggacgcagggaccgtttttaaatcacaggggcgtgtgtcagcctgccctaggacttcatgtctatatatttccccattcactgccccgactatctgagatcggccaagatgactgaggtgatgatgaacacccagcccatggaggagatcggcctcagcccccgcaaggatggcctttcctaccagatcttcccagacccgtcagattttgaccgctgctgcaaactgaaggaccgtctgccctccatagtggtggaaccccacagaaggggaggtggagagcggggagctccggtggccccctgaggagttccctggtccaggaggatgagcaggataactgcgaagagacagcgaaagaaaataaagagcagtagagtccctgtggactcccatgggtcataccagccagcatctgttcctgaactgtgtttttcccatcatgacggaagaagagagtgagccgcaattgttctgaaaatgtcaaacgaggcttctgttttgcacctgc

SEQ ID NO: 6798 - DNA, 151 bp, Homo sapiens
atgatgctgtctagctctccccaccccataaatcatctgtttagcataagagacagtaaattccagggtttttaggtttctgtaccagtaactaggggtaaagatcaaatatttattactacaccacagcatctactatatattataggga

SEQ ID NO: 6799 - DNA, 282 bp, Homo sapiens
cacctcaaacatttatctttcctttatggcggaacattccaattctcttctagccattttgaactgtgtaatacgttattgttaactatagcctactgtactatcgaacactagattttatttcttctgtctagctgtatttatgtaccattaaccaacctcttttcacatcccattcctctctacacttcccagcctctagtaagcaccaatcaactttctatttccatgaggatccacttttttaggctcctacatatggaagcagaacatgcagtcttt

SEQ ID NO: 6800 - DNA, 396 bp, Homo sapiens
aagcatgcctagtaaggactccatcatcaagtgtatccatgggtacatgggatttggctcacgtagaccctaatgatgtaagttgattgcatgagaagtttgctttcaatcaagttgcatgttttctgattaaacccaatgacccacttgcaaatctattgcttcctatcctatgactctgagctctgctggacttaagagattttggtacccaagggaagaatacttctttggtactcagggaagaataccctggaatcggagactgagcctgtcacctgggactttcggagctttttcttttccctatgtgtgtataaagggagttacagtcttgattagggtaatcaaccaccctgtcaaggggaaatatggttactgctcacaaagtaggca

SEQ ID NO: 6801 - DNA, 667 bp, Homo sapiens
aaatcaatcattccctccagttatgtccctgacccacaggcttcatttgtgcaagtactggggctgtgctgtcagtaatgtgtgccgcttctgggaaggacgtccattgcccttgatgattgtggtaccatacacactgcctgtttccttgcctgttggttcgtgcgtgataatcacagggacaccgatcctcacttttgtcaaggacccacagctggaggtgaatttctacactgacatggatgaggattcagatattgccttccgtttccgagtgcactttggcaatcatgtggtcatgaacaggcgtgagtttgggatatggatgttggaggagacaacagactacgtgccctttgaggatggcaaacaatttgagctgtgcatctacgtacattacaatgagtatgagataaaggtcaatgggcatacgcatttacggctttgtccatcgaatcccgccatcatttgtgaagatggtgcaagtgtcgaggagatatctccctgacctcagtgtgtgtctgcaattgagggagatgatcacactcctcattgttgaggaatccctctttctacctgaccatgggattcccagaacctgctaacagaataatccctgctcacattttcccctacactttgtcattaaaacagcaaaataaactca

SEQ ID NO: 6802 - DNA, 257 bp, Homo sapiens
gtgttgtttgctaggaccctagaaaaaaacttcctcagttgtaggaattttgtctctttttaatgaatgtgtcccacagcagcctgttttaaaatgtaattgacagtggtttctcccttgtagcagttgttgattggggggttggaggatccttgacatttaattttggatatactctcccatgatagaatgagcttgaagtggagagtggaggagccctacaatttttttttggtttattcagtaattgaaaaatg

SEQ ID NO: 6803 - DNA, 778 bp, Homo sapiens
attttgatgcaaaaatattgcatctaccagcattttcagttccaattgctaatccagcatttgtggatagctgcaaactgtgatattgctgatgagcgctttgacgccacattccacactaacgtgttggtgaattcttctgggcattgcacgtacctgcctccaggcatattcaagagttcctgctacatcgatgtacgctggtttccctttgatgtgcagcactgcaaactgaagtttgggtcctggtcttacggaggctggtccttggatctgcagatgcaggacggcagatatcaagtggctatatccccaatggagaatgggacctagtgggaatccccggcaagaggagtgaaaggttctatgagtgctgcaaagagccctaccctgatgtcaccttcacagtgaccatgcgccgcaggacactctactaatgggcctcaacctgctgatcccctgtgtgctcatctccgccctcggcctggctggtgttcctgcttcctgcagattcccggggagaagatttccctggggataacagtcttactctctcttaccgtcttcatgctgctcgtggctgagatcatgcccgcaacatccgattcggtaccattgatagcccagtacttcgccagcaccaatgaatcatcgtgggcctctcggtggtggtgacggtgatcgtgcttgcagtaccaccaccacgaccccgacgggggcaaagatgccaaagttggaccagagtcatccttctgaactgggtgcgcgtggttcctgt

SEQ ID NO: 6804 - DNA, 794 bp, Homo sapiens
attcggcaggagggtctaaagcaagctacaaaatgtgattatttatgtcacgatatgacccagccataaatgtacttcaggtaagaaggacactgacatgatatcttactgatcaaatgcagtcagtaggtatatatgaacttttttctctgtgaagaaaagctattaataagtttgacttaataggcctatagtatgcacatactggccaagattctaaatggattattcagcggttctgtttttgtggaggtgcttattctcatttctccaaagccttaagattcctgggaatagaggaaatgttggctgccaccagctttgctggtgagatttcaaagagaataggtgtttgctgtttgatttctagtgaccttttggcgagctctgatttataggtaggaacatttgtgtttcttttcattttgaggccaggtggtagagtggaaagactggggagctgtccagggaaacccaaggcttggatctccactctgttatgtaccagctggggcaaatcagggcccattcccaactcctttaaaatgaaaggactagacttggtctttaagctcccttccgattctaacatttggtggtagcaggattgtgcacaaagctcctaatttagagaaagatctgggttttagtcttttctcctctatcgccgccttaccggttgtacaacattggaccagccattctccccaaggactcggcattttcattgttaaatgggaacactcctaattcacactgttgctgtgaggattacatttggtaatgaatgatag

SEQ ID NO: 6805 - DNA, 339 bp, Homo sapiens
aaacaaaagaaaaagttgatgtagtatataccttcaactgtgttttgagttgactttttttttttctttaagctttgggtaaaaatgtatgaggagggagagggcccaatataaatatttacatcttcttacctttttggaaatggaagaagataaatcttgagtttttctgcctatattaatcaggaattgccctttgaaaaaagtgctaaataaatattttgattttttttttcaagggaagttaggtgaaaagaaggaaaaacatcacaggaaaagacctgttaaacattcctgtttgttgtctgagaggtgaggaaccaaagggaggcactaaag

SEQ ID NO: 6806 - DNA, 812 bp, Homo sapiens
attcggcacaggtgatgcagtggtttgctcaggaagggggttttaacatagaaatgaccttttgtgttactgccgtgttttggtccaacaataaaactgaatagcctaaatcagaagtcctgactagtgtggaacctgaaagatggtggcaccctcattagacagacaagtaataagaattggatactcacaggatgttggaggaacagcacacctttgggaagcatttttgagctgaagcagaaggaagaaaatatatatatttgtgcttctcagagttgtatgttttctacactgctggtgtggcaatagatttttaaatgttacttttaaaaagaaaaatggagatttgggagcagtaatggaggatcctcagcaccactggaaaataggctgggttaggggggtgctgaaagttccagcctccaaagcaaacttatagtatggctgtgtgttgcgtggggtgctggtggccagctttgtcagacacagatcatgggtccttgcctcccagaatcccattgggctgcccaagtgactctttgaagatctgtctgtaatgtgtgagtcttgtccatctgctcttgactctgagctggctaggtgactgttggttattccctgggacaggtgctgggtaggcccaggtttcagcatcgcagacaagaagcgcaggacaggctgcattggggccaaacacagaatcagcaaagaggaggccatgcgctggttccagcagaagtatgatgggatcatccttcctggcaaataaattcccgtttctatccaaaagagcaataaaaagttttcag

SEQ ID NO: 6807 - DNA, 361 bp, Homo sapiens
aagatgtagctgggactggatttgggtcattgagagcaccatttgtatctcaaataagggagcaataacccatggtggcagccgaaggtacatacagaagccacagtaggagttacagagaaaaccattgccactagaggttttgttactgttattattgttgcctgggatcccttcaagactcctaggtcctctgagaagctgtggagggaagaggccagatctcttaggtttcagcaggctctagactcttgtaccctccctcaatccacattatggtggagtaattacaacctggaaatgtgggtggaaattaagctgtagctcatcttgattttttcatagactcagtgccagaaga

SEQ ID NO: 6808 - DNA, 364 bp, Homo sapiens
ggcacgaggagggttcctgccctagtgaaggttacaacttaggaggacataggtaattacaatatagtgcataaagtggtaatgtgacaattgaaactagattaatgtttcatttggattttcttacatagatttgtacatgtaagtttcttcaccatatatttattgtatgatgtaaagcaaattgaagtattgaacagcaggtctgaaataacacaaaagagctcatttacctgatcttttgtattgagtaatgagctatcacaatggcatgctgaaatgatgtgtctgtctttatgtgtagtgagccccatgttttggtagatggttttcaaagctgtccaccgtcagggcttctcatccc

SEQ ID NO: 6809 - DNA, 577 bp, Homo sapiens
taggatctctcaagaaaatccatcctctgaattggggttttgtctacattcaggaggtcaggaagaactccactagccatcataagttgtcctctttaccactccgagggaactatgctagctgtcttattcctctccaaataagaaagtctgattgctatctgaggaagaagcccccatcaaatacagtttctcaaatataaattctattttagtggggcaaaggctgcttatttgagcaatcacggattaaaagcaacagcatttcctgggaaataaaagtgcatgcagaggtgtttggggagccccaaagcattattgacaccagccggaaattaatctctagaggaagctcttcttcaagtgtctcctgttacagggctaaacacaccctaaatgtaacttcagcatagccatgctaactgttcctcacactccctgagctaccagcctgagacaggcatcagcccagcagagcttggcattataggacatccatggagcagggcctgactctattaggtcatctgcccaacttctccagactctgcatatttaaaacacacaaatttccttt

SEQ ID NO: 6810 - DNA, 205 bp, Homo sapiens
tattttcaagccatcactcaaaccccagtgctaggcatgtccagagcgaaacctgttaccttgtcggcatgctcaccaaagtgcactgccaggggtgtgcactttacactcatagcacagatcacagtttgtgtctcacagtgaaaaagactgttcatatctttgggccacaccctgaaacacaaactgaatgatcccaccctca

SEQ ID NO: 6811 - DNA, 555 bp, Homo sapiens
tgaaagctattttatggaagaatttaaactaaagatctccaaatattattcataattacatacccatgttggtatctatgtttacttatctaccatttttataggatttacaatatgacaatataaaataatcgtctgtatcccaaaaatagagcataagaaaaagactaaaatttgttttatttatggtacaaaagtttgttctcacaaatattttaaataaaatattgaatatgcttcattatttctgaagatcttaacaccgtgtgatacagagattcaaagatctagttctaacatcagtttgaatatttgatttttaatggctatcaaagcagaaagggatgccttacaaaaaaatgagaattttttaaaaagtttcacttaaaacctcaaaatcagcgtaatttttcttaattcatgagaacagatttgattttgtatatcttaccagctgaacaacaatgtgatcttatttgcagttaaacacttgattttctccacaaattccctaatcccagacttacatattttgtaatagttaaactagataac

SEQ ID NO: 6812 - DNA, 895 bp, Homo sapiens
gcctcaaattatcaatagaatttaagagaaaaatcaaagttacacatccctctccacatcagtttcttggaatctgctactcatgactgcccctcctctccccacgcgcccctaccaaagtcacaggagtcatcctcaaatgtcagggtactggggtgaatgtactccacgcctctctgagtttgtctctgctcactcttcatcttcccactggtttcttttctgcactagagatgatccctgccctcagctcccttcatggaggcagttcagatacttggccctacctgtgatgagcacacacacagaattctcaactgacagtggcatcctcagaagagtcggtgcccactattttgttttattttgctgaaagaagttgccctcactacacatcataaacccatagatgtaaatactttccctctcaacatacaaattttacctttctctttcccctcccacaggggtgactgtggtggggaaggaaagagagggcttagacttcaggtcaaatgttacattttcttagggaacaatttttataattcattatgtattttaataggggcaataaatctgctttggggttgcaggatcactcagtgttctgttggaaagcattgaccaatgatttgtttttaatacaaatgctgtgcgatgagttatagaaacctaggacaatggttgagggagtcgactcctacatcagcagtgaaaggctgagcggcgttgtattcacaaagtcacatcttctgtttctgtgttagtctcgatttgttgtggtacgttctgcatttattacataatcattgtgggctcattttagatttgccatctgaaccaagtgacaagtatttttcaatacaataaagttgaaaaccttgtcttccaa

SEQ ID NO: 6813 - DNA, 911 bp, Homo sapiens
attttttttttttttaaggatttactaatatttattaagtgccaccaacatttcaacgggccacaggcagggctgggagttgggggagaaggagtggctcccctcccgacaacaggtgaccctcacccccggctcagggccccgaggggggtcctggaaacactcacgctcaaggagcggaggtgaatggcttcctgttctcacctccgggtccaggcactgggggtgaggaagtggctgggaggccaggaagctggaggaggggaggtgctggggcccagggctgtgcgggaggggatgggatcctgtgggtaccttggcccgtgtgccagggtcgggggaacgtgacactaggtgagaattgggtagaaagtgtgtgtgaaagggcatgcgtgcatgtgatgttggtgccatatctataggtgtcgttgtcatggtgtgtgttgtcactgtgtctgtgtgtgacatcatcaccgtctgtgtgatgccatcgccgcgtctgtgtgacattaatatgtgtgacgtcgacatggcccgtgacgtcgttgctgcatctcggtgtgacgtcatgccaagttccccatgtctgtgtgcgaacgtgctgcatctgcacgacgccatcgctatatctcttcgtgacgtctacatggccacgtgacgccatcaccacggtgatatgtgacgtcagcgccgttgcttgcgtgacgtcatctccgcggccgtgtgctctgggtgagggatcgtgaggcgcgggtgcgggtgtgagagggtactaggggtttgcatgcagggagttgtctgatggtggccctgggtggttgggggcggcgggagggggttgtgtcgggcgctgtgagcatatccctgcatcctccgcaaaccgccgagtcgggccatcccttggtcctcag

SEQ ID NO: 6814 - DNA, 861 bp, Homo sapiens
tctgaaataacctttttctccccagttaatttctacaagcctttcctaactcaacacatactacagtgcacttttcattcgacctagcagtatttattggggacctgctatgtgtcaggcactgttctgggggttgagattaagagaacaagatcgatcaagtccttctctccgggacgtttgattttagttgaggagagacaagataataagcaaagaagaaaaatatcaaatagtgagacgtgctatataaaaaggttaaaataggggtaatatagggagtgaccttggatacctttagatagagtgatccaggggaaatatcctgataacaatccaaaatcctgaatgacaaaaacagcctgccatttcctgcgtgatgattgtatgttaggtattgtttgaagtgctttacatgtgttagctcacttgatcctcagaacagccttttgcagttgttaccattatcctcatttgacaaagaagaaaactggggcactagagcccatgttctgaaccacatgctaaactgcctgccttatgaaaagacagtgaaaatgagaaaagagaattcagagtagagagaacaaccactgcaagtcccctaaggctggttggagcttggcgtgttaaaaaaaaagaatgccagtttggctgcaccctggagggcaaaggagagcatgggaagggaggtgacagagggaggcaggttccagatcacacaggacttgagtgagcagggaaattagtttagattttattctaagtgctatagtaaaccagttttggggttactgttctgtgacatggtttaggggctgccatgtttggtctccatcatactgttgcaattagatggca

SEQ ID NO: 6815 - DNA, 453 bp, Homo sapiens
tttttttttaaaggggtctccaaatctactcccttaactcctaggtgcatcactgtcaccaggggtgggagaatctaacagcttaactggcagctctgaaaccagatgagggccagtgatttcagtacgctctgatgcagtcccacacgggcaaggcccgcaaggctggaaggaaagagaagcaaggtttctcagctccaagaacagagtccccatgccctcagagccctagcagagagacatgtgcaccccaaatcctagctgccggctttgactgcaaggctcacccagcaaaggccagtccagagggtaagggacacgggaaggatctgcaagttaatcatcaacaaacttgctcacttgtcctcaacccctctttgagtttgatcttatttcattttcacatttggagctgtagactccactcctcacctgccaggtaccagcctaccc

SEQ ID NO: 6816 - DNA, 425 bp, Homo sapiens
cttttttttttggttccttttaccttgttttatatataaccttttaataagctttgaattagacaaaacttgttcaccatttttttaaaaaaaggacacacttttttttaagcaacaatgttttcctacaagatatatttattggaaaatacccaaataataaattatctattatttaatttaatatgactttatattctaaattatgtccagttggtctataagtatttatcccattacatttacctagttattttattaattgtttacctagattatttataaaaactttgatagtcatgatttaaagttatgaaacttccattgcaaaattacaactgagacagtgaaaaacgatttgacctaactgactccaccttgctcttaacttccaagctgtccttgttcattcctgggcataggcg

SEQ ID NO: 6817 - DNA, 387 bp, Homo sapiens
cccatttttcctaatttggagtcactgaaaactaagctgtgctttcttaaaaccctgcaaactgaagccagacaacttgaacttcagaagaaaataacagcaacctatttacgtacataagccactttcatacctgcctactaatgtatggacttcagagtaatgtggcttatatcgatttttctaggattgttcttttgtttgttgttgttttttctcccttcctccttgctattttctcttcacagaatgtgagacttcacaacctactaaaaatgagcttttgggacttacccatctaggaataaaccatcatagctatgagaaatcagatgaagcctgagaccagagactcatttttttgcaaaatgctttctccgacagatt

SEQ ID NO: 6818 - DNA, 1426 bp, Homo sapiens
gactataccactcccataccctataactttgtttgttctatttcacacatataattttccgagacaagatgttctcatttaagcaacaagaagattcgtctctcgctattactgtaactgctgtttatatcgtcatgtcccggaaaggtccctgtcttccctgaatggtctctaccaacttcacctccggttctaggtgtcatggctgccccaagagtctagagacgacaacttctccgcttcctcggcgatggcggcgtccgggagcggtatgtcccagaaaacctgggaactggccaacaacatgcaggaagctcagagtatcgatgaaatctacaaatacgacaagaaacagcagcaagaaatcctggcggcgacgctggactaaggatcaccattactttaagtactgcaaaatctcagcattggctctgctgaagatggtgatgcatgccagatcgggaggcaacttggaagtgatgggtctgatgctaggaaaggtggatggtgaaaccatgatcattatggacagttttgctttgcctgtggagggcactgaaacccgagtaaatgctcaggctgctgcatatgaatacatggctgcatacatagaaaatgcaaaacaggttggccgccttgaaaatgcaatcgggtggtatcatagccaccctggctatggctgctggctttctgggattgatgttagtactcagatgctcaatcagcagttccaggaaccatttgtagcagtggtgattgatccaacaagaacaatatccgcagggaaagtgaatcttggcgcctttaggacatacccaaagggctacaaacctcctgatgaaggaccttctgagtaccagactattccacttaataaaatagaagattttggtgtacactgcaaacaatattatgccttagaagtctcatatttcaaatcctctttggatcgcaaattgcttgagctgttgtggaataaatactgggtgaatacgttgagttcttctagcttgcttactaatgcagactataccactggtcaggtctttgatttgtctgaaaagttagagcagtcagaagcccagctgggacgagggagtttcatgttgggtttagaaacgcatgaccgaaaatcagaagacaaacttgccaaagctacaagagacagctgtaaaactaccatagaagctatccatggattgatgtctcaggttattaaggataaactgtttaatcaaattaacatctcttaaacagtctctgagaagtactttacctgaaagacagtatgagaaaaatattcaagtaacactttaaaaccagttacccaaaatctgattagaagtataaggtgctctgaagtgtcctaaatattaatatcctgtaataaagctctttaaaatgaaaaaaaaaaaaaaaaaaagat

SEQ ID NO: 6819 - DNA, 353 bp, Homo sapiens
ttgctctgtgaactgtcttcttctccctaagaagccaaaacactgcccataacctccagacaccagggagggtccagggagtactgctgagagcctcaagggagccaatgcagaaacagcagaagtcccttcaataaataggagctcaaggatacactgaagagcatggctggatcctggaaaaggccttgctccgaccgggaagatgtgagactggcccaataggagcaacaaagggcactgcagtgctttccaccacctgattaccagccagatctaaccctaggaagacagaggtccagtccatcccccaaccagccaccttacacaacctatgtctcactccttcccac

SEQ ID NO: 6820 - DNA, 1714 bp, Homo sapiens
ttttttcaccttttatcacaaagtttttattgaacaaaaataatatgacagtaaaaatgatacataaagtgaagatttgcagtcatagaaaagatgtgtacaaagagaccaacattcaggttatatagttctataaaacttttcccatagcagtttaacactgattaagcagacataaaagggaaaagaaagtcattaatgttctttgaaacctattttctgagtaaaatacctctgctaacacacacatgcacacacacacagaatgaggcagagctatatgagtgagttattcttcagttcctccagttctctggtttgtgttacaggagtattttcatccatcaaaaaattgtagtatttttgcatttctaataaatggatctagagcatacattaatcccagtttccaaaggaaaagaaagaatcagatctatagtcatttaaatatttccaatcagcatttacgtaaacaagtatactaaaaatagtagttttggttgagatttttgcacattaacttcctttagtttgtaagaatcatgcattttggatgtgttctcttatctgacaacacaagttttaaatgctgtctttatctgttttgtttgttttactaataacacgtagttttgaaccagtaattacttaacagctaggcatgggggagacagaattggactgagcaccaatcattgttctaccttcagtgagctgtgcagccataggcaactcccagcttctgctgtgcacctgtcttgagctggaaacaggtggcgggaagcattctcaaaggccccttctagcactaactttgtatgttcagtaaatatcagttccctggaccagctccttttattctggtacagaattattcttagcctatggggtgggggtggggggacagtagtgtctattatttgtgaattttggaaccagtgtcattactttacagtcaaggaggcatgttagagtgtttgggatttttatcccttgataagggcccacatccccacatacagagatgctcaattccaattgaaaaacctcagaatttcctaagtgtcaaagcaatagtctagatttttttctgaaaattcaagaaatgtgttttctcaaatctctttttttatcctttctcataatcctgccacttaatgcccagtttggatcagttatttagtcacatttcaagttagtttttatcatcacttatagttaaggattgtaattaatcttgaatttaaagcttggtgcttttcagttttcttgtattagaactttccttcttcatgtacaggtgtggtacctttggactggtgcctgctgattttctgatggaacagaaaatatgtctgtattatcactgctccaaattacattacacaacagaatttactggagtgttccaagttatcatcagttcagttccacgatgatgaggttcctgtagaatttttcatctgtcagatttccttcattctcccctaactttagtaatacataaagcagtgtatcctctctcagtttccacaagcaaggcctttagtacctccactctctatttgtattacagcaagtttttgatccatcaaaaattgtgaacacctacctatactgatgaagatacctagtgttaaaaatggtttctttgttgtttgggttcatcactctgtgagcttcttctaaagcattagattttttaaatgttaat

SEQ ID NO: 6821 - DNA, 906 bp, Homo sapiens
  misc_feature (1)...(906): n = a,t,c or g
ggatgacttatgtgcattggcatttaaagttctccatgacaagcagcgaggaccactggtttttatgcgcatttactcaggcactataaaaccccagttggccattcataatattaatggaaactgcacggagagaataagtcgtctgcttttgccgtttgctgaccaacatgtagaaatcccttcattgactgctggtaacattgctttgactgttgggcttaaacatactgccactggagacaccattgtctcatccaagtccagtgcattagctgcagctcgtagagccgaacgggagggagaaaagaagcacagacaaaacaatgaagcagagagacttttattggctggagtggagattccagaacctgttttcttctgtaccatagaacccccatcactgtctaagcagccagatttggaacatgcgttgaaatgtcttcagcgtgaagatcccagtttgaaagtgaggctagatcctgactctggacaaactgttctgtgtggtatgggggagttacatatagagattattcatgatcgaatcaagagggaatatggactggagacctatctcgggcctctccaggtggcatatcgagagaccatcctaaactcagttcgtgccacagataccttagatagaactttaggagacaaaaggcatcttgtgactgtagaagtggaagcaaggccaattgaaacatcatctgttatgcctgtgattgagtttgagtatgctgaaagtatcaatgaaggccttttgaaggtctcccaagaggccattgaaaatggaattcacagcgcatgtctccaaggaccattgcttggatccccaattcaggatgtaggcaattacctttacattccctgacaattcatcctggnacctncacaactatg

SEQ ID NO: 6822 - DNA, 2362 bp, Homo sapiens
gtcccgaggctccggctcggcagaccgggcggaaagcagccgagcggccatggagctgtgcgggctggggctgccccggccgcccatgctgctggcgctgctgttggcgacatgctggcggcgatgttggcgctgctgactcaggtggcgctggtggtgcaggtggcggaggcggctcgggccccgagcgtctcggccaagccggggccggcgctgtggcccctgccgctctcggtgaagatgaccccgaacctgctgcatctcgccccggagaacttctacatcagccacagccccaattccacggcgggcccctcctgcaccctgctggaggaagcgtttcgacgatatcatggctatatttttggtttctacaagtggcatcatgaacctgctgaattccaggctaaaacccaggttcagcaacttcttgtctcaatcacccttcagtcagagtgtgatgctttccccaacatatcttcagatgagtcttatactttacttgtgaaagaaccagtggctgtccttaaggccaacagagtttggggagcattacgaggtttagagacctttagccagttagtttatcaagattcttatggaactttcaccatcaatgaatccaccattattgattctccaaggttttctcacagaggaattttgattgatacatccagacattatctgccagttaagattattcttaaaactctggatggccatggcttttaataagtttaatgttcttcactggcacatagttgatgaccagtctttcccatatcagagcatcacttttcctgagttaagcaataaaggaagctattctttgtctcatgtttatacaccaaatgatgtccgtatggtgattgaatatgccagattacgaggaattcgagtcctgccagaatttgatacccctgggcatacactatcttggggaaaaggtcagaaagacctcctgactccatgttacagtagacaaaacaagttggactcttttggacctataaaccctactctgaatacaacatacagcttccttactacatttttcaaagaaattagtgaggtgtttccagatcaattcattcatttgggaggagatgaagtggaatttaaatgttgggaatcaaatccaaaaattcaagatttcatgaggcaaaaaggctttggcacagattttaagaaactagaatctttctacattcaaaaggttttggatattattgcaaccataaacaagggatccattgtctggcaggaggtttttgatgataaagcaaagcttgcgccgggcacaatagttgaagtatggaaagacagcgcatatcctgaggaactcagtagagtcacagcatctggcttccctgtaatcctttctgctccttggtacttagatttgattagctatggacaagattggaggaaatactataaagtggaaccctcttgattttggcggtactcagaaacagaaacaacttttcattggtggagaagcttgtctatggggagaatatgtggatgcaactaacctcactccaagattatggcctcgggcaagtgctgttggtgagagactctggagttccaaagatgtcagagatatggatgacgcctatgacagactgacaaggcaccgctgcaggatggtcgaacgtggaatagctgcacaacctctttatgctggatattgtaaccatgagaacatgtaaaaaatggaggggaaaaaggccacagcaatctgtactacaatcaactttattttgaaatcatgtaaaataagatattagacttttttgaataaaatatttttattgattgaacctttgaccctctatcttattacatttagaggcctggcatctttcttgtgagacaagcttaaggacacaaaagaaacacaactttgtgataccactcttctgaaggctacttatagtaataacttcatagatgaacagcatgattcaggtacagtggctttaaacatcaaagcacatttctcattatataaattaaaacgggtggctccagtgccactatcaaagcttaagttatatcttttatctagttctctgaatgtactgaaacagtactttattcgtccaataaataaagcaataaaaattgttcttactgaaaatgaagtagctaggtgctcctgaatttctctccaaaaactaaaacatttaggtcaaaccacttctccggttgagcagtgtattttgatcttgaggattcatggcttgataagtagatagttctaaggcaaaagtagctgagcctgatgttagcgttcgaagcacagttgaataaccctaatcaaaataatttaagtcatttatattatcac

SEQ ID NO: 6823 - DNA, 385 bp, Homo sapiens
gagaccgagacggcgccgctgaccctagagtcgctgcccaccgatcccctgctcctcatcttatcctttttggactatcgggatctaatcaactgttgttatgtcagtcgaagacttagccagctatcaagtcatgatccgctgtggagaagacattgcaaaaaatactggctgatatctgaggaagagaaaacacagaagaatcagtgttggaaatctctcttcatagatacttactctgatgtaggaagatacattgaccattatgctgctattaaaaaggcctgggatgatctcaagaaatatttggagcccaggtgtcctcggatgggttttatctctgaaagaggggtgctcgagaggaagacctcgatgctgtggaagc

SEQ ID NO: 6824 - DNA, 356 bp, Homo sapiens
atttaatacgtttcacatcctagaaagattatgtcagtggtgtgtagggtggattggagatggagaaagcagaattcctttcaataacttcattatactgaacacatttattgagagtgatcatatttacagattcatggaatcagacaactggcggggctgcgatgctttcttagttttcctcattcattttcaaatagaatacctgaggtttactcaggatcacagaagtggttctgtgatagcttagtctagaattcagtcttcagcatgtactaggtgattaataaaggtgaattcacctctctcttctctcccaagtcccatttcagtgtttgtgtcattctgccacattg

SEQ ID NO: 6825 - DNA, 688 bp, Homo sapiens
  misc_feature (1)...(688): n = a,t,c or g
aatggcgatcggttttgggctcagaaaatggagtgaccagtctgactgtggaacttatgggcacagaatcaaaagtttctgtgggaattttaaatataaaacttgaaatgtatccaccactcaatcaaacgttatctcaagaagtagtgaacacacagcttgctttggaacgtcagaaaactgcagagaaagagcgattatttcttgtatatgctaagcagtggtggagagaatatttgcaaattcgaccctcacacaactcacgactggttaagatttttgcacaggatgaaaatgggataaatagaccagtctgttcctatgttaaaccacttcgagctggacggcttcttgatactccaaggcaagcagcaagatttgttaatgtccttggttatgaacgagcccctgttattggaggaggaggtaaacaggagcagtggtgcactctgctggcctttctctgtagaaacaagggtgactgtgaagatcacgctaaccttctgtgcagccttcttcttggatatggattagaagcctttgtttgtgttgggaccaaggcaaaaggagtacctcatgcatgggttatgacttgtggaactgatgggggcatcacttttgggagagtttanaggacccagtacctccctaaacctacnaatcccgatgaacctccantgctgaacag

SEQ ID NO: 6826 - DNA, 751 bp, Homo sapiens
taactgtaaacaaagtagcatttattaaaatagaatatacacttaatttatactaaattccagggagatttatacaagtttttcagccttaatttttaaaggaatgcatgattttttttaaacattaccagtcaagtatatacaaaattgaagtatgccattcaagccagattgtgattttaaaataacaaacctctaaatagctaagtaatgtacaatgtgtaaaattccaattaaacacaggtataaatcttatataaatattggccctataataccgagcgatatttacaagcaaacatgatccaaacaggcacatgcagattcagggtaagtaaatactcggacacgaactgccagtcgcacttggtctccacggcaacagattatttcttcacagaaaggagatcgaagacatgtggcaaatgcacgtcttgcatttctatacacaaaatgtattgggaaccctttaaatgtgtgaccatcaggtacagcccttcttatggcatcttgaaattcttcattgcccggctgatatacttgttgtacgctcaaattcataagaagccaaagctggtgataaaaggtaggagagctggtcttcccaaacagtagtgaggccaagatccttcctgtgttctgacaccaggagcctcagctgcatttcaatttcattacttgttactgacgcgtcaattgtggatgcacacagaggtggaaagggaggaagggatgttgtagctccaggagc

SEQ ID NO: 6827 - DNA, 636 bp, Homo sapiens
gtgtttggccctcttcgagtgagtgagagacagcatctcaaagacaaattttggaattttattttctacaagttcattttcatctttggtgtgctgaatgtccagacagtggaagaggtggtcatgtggtgcctctggtttgccggacttgtctttctgcacctgatggttcagctctgcaaggatcgatttgaatatctttccttctcgcccaccacgccgatgagcagccacggtcgagtcctgtccctgttggttgccatgctgctttcctgctgtggactggcggccgtctgctccatcaccggctacacccacggaatgcacaccttggctttcatggctgcagagtctcttcttgtgacagtgaggactgctcatgtgattttacgatacgtaattcacctctgggacctcaaccacgaagggacgtgggaaggaaaggggacgtatgtctattacacagactttgtcatggagctcactctcctggtccctggacctcatgcaccatattcacatgttgttatttggcaacatctggttatccatggccagcctggtcatctttatgcagctgcgttacctgtttcatgaggtgcaacgtcgaattcgtcggcacaagaactatctacg

SEQ ID NO: 6828 - DNA, 473 bp, Homo sapiens
gctttattgtgatatttgctttattgccgtggtctgaaaccaaacccacaatatctctaaggtatgtccgtataagttcctaagcatagtatgggggcatatctaatgtgtaccattttaagtagtggctattcttgaatttacactttcacatgaattttagaatcagtttgactagctctaagtcctattgagagttttaaaacaggattcaaatgaattctttacaatataaccttcccattcatggccatgatattctgctccattattgaagttttcttatctatctttcaaaaaagaacataagactctagcatatttcttgttaggctttccctaggtgatttttaattgctattataaataaatatccatttttcccataaaatattgctatatgttagtgtattaatcttgtactgttacctttttcaactctattggttctgatagcttgtcagttgtctacc

SEQ ID NO: 6829 - DNA, 1012 bp, Homo sapiens
ggcagggaggtgcaaagccagcccaacccagccctccactctggtacccagaggaaggcgcaggccgctggttccacagcccatcacctggaggtgatggaggccaaccccagccctgcctggaggccctggtgagcttgcccagcactgctccaacccctccctgaaccacaggcagagccaggggtggtccaatggcctgagacgaggggacagggctggcctattaagaggatgccaccagagaaggcacaccagacacagactcctgtcagctcaggcgtcctggcctaaggaggcagggcccccaaaagagccaggtcctggcaccatctccgagctcccagcaggcctgctgcaggtcagaagggccacatcccatcttgggtccctgacctcattgggcctcacctgaaaacaggcacccaggcagtggccatgaacagccaggccacaagcctcgacaggggtgggccccaggtcacagggagggcggtctttatttctggaagggccccggagcaggaggctgcctctcgtccacccgtccttctatcctcacgacaggtgctatggggccgcagcagcatcaacagcctctctcagctgctgcagcacgtctttgggctgtggtgagaacgcgctggtgtccactctctggaagtcggggtgcgcaaccaaggaggccagcacctctgtgatgcgcccaacatcaaaggctgcctgttcgaaacccaacccagcaccgtcctcagcggctgcctccctcaggaccaggagcctcttctcagcgatgaccttgaggaagtggtaaaactcttcaaagttgatgcctgagcaggacctcatgatgacctggcagtggtggtgccagtcgggcatggagtccctccactcgctgacctcctcctgcacggcgcatagctcctgctgcaagaagcgccacatgttggccaggttgaagccattgacccagttgtggttgatggagatggtgtcatccaggttgtgc

SEQ ID NO: 6830 - DNA, 354 bp, Homo sapiens
tccccacgtggtggctttctcacgctagccctctttggtcctccttgacgtcccgggcctgtgggcccgctttctgccgagatgccgaaggtcaagtcgggggccatcggccgccgccgcgggcggcaggagcagcgccgggagctgaagagcgctggaggactcatgttcaacacggggattgggcagcacattttgaaaaatcctctcattattaacagcattatcgataaggctgccttaagaccaactgatgtagtgctggaagttggacctggaactggcaacatgactgtaaagttgttagaaaaggcaaaaaaggttgttgcttgtgaacttgacccaaggctagta

SEQ ID NO: 6831 - DNA, 384 bp, Homo sapiens
tattttaggtgctagagatgacactgcagagtagagaacaaaggaatcttagtaattgttcaatccaatctccacactttaaagatgaagaaactggtattgagaaaaatacacagcttatccaaggttgcactgctggttggtagctgagatgaatttagaacccacatctgatgactacaccatattgctcccagttttcctgtctgttccacatgtaaaagtctgactcttcacttctcctttgagtatatagacttttaacatttttgtatgtcaagatggacttttcctcatacccagcccctgccttttctcctcccttcataccttgcaggatctttaacagaatttaaaaggagttttttgttttgttttgatgta

SEQ ID NO: 6832 - DNA, 360 bp, Homo sapiens
ctctttggcctgtcaaggagatggtagggataattccaattatgtgaatggttggaccacgtgtccaggggtcttatcaaactctaagattctggaatggtattaagtgccacaatgttgctgggaagaggaagtcaaggcagagattcaaagttaaatttttaaggccactggcttagcactggcttggttttagagttaaggcgacaagaccttagctgcagaattttctccattccaatctaaggagtagccatcaattccttacttctggagattgccttatcctttgcagaacacaagtgctaggaaaggaaaaagtgtgggagagtggcacacaagaagtccagagtccagtcc

SEQ ID NO: 6833 - DNA, 649 bp, Homo sapiens
ggtttgaaataatctttattttgtaaacatctgtgtttaaaatagatgaaccctgctcacaattcatatatggacccgagacacagtacacgaagttcacccgtcacagggagatagtggaggctcaggagcaggtggcgtgcctggggctggatggagtctcaagacagcaggtgcagaggtggtgacgagtaaacaggccagcagagcctgcttaacagtctgggcctcaagacataccccaggccaccaaaagtttagggtgagcgtagctgcaccctaaaatcccaattctccttctgctcccataccttttcccagtcatggcccttgtggatagggcctatcagtctatagaatcctgattccatgttttcccttccagaacccctagggtacagtacaaatatagtccttctttcctgagggggctaggagagaaagacaatgaatggcaccctgcctgatcttcagggaaagctgaaatactggtccacagattggagccactgcccaatataacttctcaagtccctggctgaagacagacttgagggctggcatcacctacttccctagccccagtgtgatgtggcataggtcttgatacccaaggagtcccatcttcaaggaagcaactccagcctag

SEQ ID NO: 6834 - DNA, 550 bp, Homo sapiens
  misc_feature (1)...(550): n = a,t,c or g
ctaaatctgaattatgttgaacagaagaaaagagaagacagggttaagaactactctaccggatgattagtggtaactgttaaataatataagaaaatgagaagagtatactcaaggggatagaagagtttatgtacgtaagggagatgtccttaaagactgacaggaaagaaatcacccagggaagagggccannnnnnnnnnnnnnnnnnnnnnnnnnnnnnnnnnnnnnngaggtgcttttacttttatcaaaagtaaaaaaaaagtagctaatttaatgaataattgatcttttcccaactaaaatgaaatattatccattacaatttactgatgttttgttatgttttggggaatatctctggactctcttctgtcctactttttgtctatgtaactatatgaaactactctaaatcttcgaactttgtaatatattttaatatttattgtggatagtctctcgtgccnnnnnnnnnnnnnnnnnnnnnnnnnnnnnnnnnnnnnnnnnnnnnnnnnnnnnnnnnngtcataacggtnttcaaat

SEQ ID NO: 6835 - DNA, 394 bp, Homo sapiens
ccccagttcctaggagtgggggaataaggaatgactgcccaagggttacagggtttcctttaggggatggatgaaatgttcctggaattacgtagtgaggttggttgtacaaccttgtgaatatattaaacatattaaaaaccactgaattggtatgtcaattatatcccaattaaaaagaaaaccaggcattgagccagatttggcctgcaggctgtagtttgccaacctctcacctagacattgagtttcattatgtaataatgcatttacttgtgtcaaaattagaaagatctcaaacattatacagggaaaagcctctcctaattcttttctctaggcaaagacaaagcagtctttgacagtacatttcactgaaaattaacagagccca

SEQ ID NO: 6836 - DNA, 499 bp, Homo sapiens
ggacagccaaccagacaccatctccattgcttctaggacctctcagaacacagtggacagtgacaagctctctggtggatgtgagctgacagtggtcctccaggacttcagtgcgggccacagcagtgagctgaccatccaggtggggcagacggtagagctgctggagcggcccagcgagcggcctggttggtgtctggtccgtaccaccgaacggagcccgcccttggagggtctggtccccagcagcgccctgtgcatctcacactcccgaagcagcgtggagatggactgcttcttccccttggtgaaagatgcatactctcattcctcaagcgagaatggaggcaagtccgagtccgtagccaacctgcaggcccagccctccctgaactccatccacagttccccgggtcccaagcgctccaccaacactcttaagaagtggctgacgagtcctgtgcgtcggctcaacagcgggaaggcagatggaaacatc

SEQ ID NO: 6837 - DNA, 702 bp, Homo sapiens
tcatgtgtacttctggaagctttcgaaagaatctttgtccctcatgacagcattttatcatgaaagcagcttctcctttctgggctgggcttgttcaagttcggtgtgggcttccactaaggcacttgtcctggagacgttggctttcccagctgcatctgccccaaaaggttgtaggcacagctgtcgtagcgttgccataaagagtttgccaaatctctgatcctccctttccattgcttctcctagtgatgcacgaagattaggtgcatttattttgtaaacagattggagaatctagcaataagattcaaagctaatctggagcataaaggcacagttcagagacagaataacagggatcacaagcatgaattaaaaggaatttatttgcttcaagttcctagatacaaccttcccatgctgcacttctccactgtcggagcacgttccgaaaaacagaatgccttgatccctggtgggtgcgaaggcagttgttagggatggcaggcattggtgggctccaaaagatgaaggccccacacacaggtgtgctgcatttgggatctgtgtgggtgtttcttggaccctttcttctgggagtagggtacacactaacgtttaatccgctgtctgggtgcatgtccacagtacggtggctaaactcgaacatcactgcaaataggacgctgagcaggtccg

SEQ ID NO: 6838 - DNA, 976 bp, Homo sapiens
  misc_feature (1)...(976): n = a,t,c or g
actgcttcaaagccatcctaggccgcagttggacaagcttgctttatacctcatagttagagaaggtaatatttagcaagcagagttgttaaagaggaaggccttggctactcaggttatatgacagataggattcatttaggtcaatgcaaggatccaggggagagaacctctgtttacttcatttgtctccccatctcaaaaggactaatatccttgtaaataggagtgtgcagagctgtttgagaacactgctcgtcacttccaaaccccacaggctgaatgatgattgccctcctgatctctaagaaatggagtatgttagggcttaggcctggggccctttatcttctctgtcttcatctcttcttaggtgatctcacccagtaccatgctgtcaataagctgatgactcccaaatctatatatccagccctggttcctctctgggctccactcaacatctcctccccaaccttcctcctctcaatgaaaagcactcaaatgcccagttgctaagncaaaaaaatggaatgtctcactttccctcacctcccacatctaatccatcagcagttcctgtcagttttacatctaaaatactgtgtacctgaatttgaccactcctcatcattcccactcctaccaccatatatttcaggtcatcttccccttcctggactgttgcaatggtctcttccccccgtctctgcttccattcccatcccccaacaatatattctgcacagaactgtgagagatgatcatacgaaataatataaggtttgagatgtacttcaaaagaatttgagaaatagggggctagatgggtatagagatgaaaagattatccatacaatgataattattgaagctgactgaaaagggtacatggggttcatgatactattttctctactgtgtttgtttgaaattttccataataaaaaaagttgaaggaaaaaaaaaaaaaaaa

SEQ ID NO: 6839 - DNA, 208 bp, Homo sapiens
  misc_feature (1)...(208): n = a,t,c or g
taggatctgtcgtttaaactgtaaaccgcttgctcttacaggcttgccactctgctgttcttaagtcttcctacttcaggggtcttcaacccacaggccacagactggtactactccatgacctgttagaaaccaggccgcatgagcagtgaggaagcctcatctgtatttacagccactccccattgctcacattgctgnctgggct

SEQ ID NO: 6840 - DNA, 44 bp, Homo sapiens
tattccttatgaattatgtagttatttctattatgaaaacttta

SEQ ID NO: 6841 - DNA, 817 bp, Homo sapiens
  misc_feature (1)...(817): n = a,t,c or g
gtggcatcagacgaccaggctctggacgatgaccggctccggaagtactacctagggaagtaccttcaggaggtgctgaaanatacctgattgataaagtcagaatcaaaggctattatgcattcaaactggctgaagagaaatctaaacccagatttggattcttcacatctgattttaaagctaaatcctcaatacaattttacaacaaagtgatcagcagcaggggcttcccttttgagaacagtagttctagatgcagtcagacccaagaaaatacagagtgcactgtctgcttattccttgtgcagaagaaaccactgatattcctgggttgttgcttcttctccaccctggttctactcttatcaattgccatttttcaaaggcagaagagaagaaagttttggaaagcaaaaaacttacaacacataccattaaagaaaggcaagagagttgttagctaaactgatctgtctgcatgatagacagtttaaaaattcatcccagttccatatgctggtaacttacaggagatatacctgtattatagaaagacaatctgagatacagctgtaaccaaggtgatgacaattgtctctgctgtgtggttcaaagaacattcccttaggtgttgacatcagtgaactcagttcttgggatgtaaacataaaggcttcatcctgacagtaagctatgaggattacatgctacattggcttcttgaaagtttcattcaactgtattccatcattctgctttagctttcatctctaccaatagctacttgtggtacaataaattatttttaagaagt

SEQ ID NO: 6842 - DNA, 171 bp, Homo sapiens
tgtgtccagttttcagaatttgggaataaagctgctacaaatgttcacatacagtttttcatgtcaacataggtattcatttcatttggataaatgcctaggagtcaaagagtctctctgaaagtattctggtttgggtggctggctggctgatttcaaaaaaaaaaaaaa

SEQ ID NO: 6843 - DNA, 574 bp, Homo sapiens
  misc_feature (1)...(574): n = a,t,c or g
tcccatgacctgcttgtgaacctggcccgggacctgcagtgccccaagaagctgcccagaaccccatgctgacagcacctgcagatgtcctgccatgagcatcgacacagccccaggatgtgtggctgtgaccagccaccggacccagactcctagtcacagtgagtccccaaccaaaaccagggtatccgctctgggccctgccagctctgaatgcccaggttctctgcacagtcggcccctagggactctgcggcctagcccacggccatcacaggaacagccaggggcttggcagctgctgtgtgtgctgcctgctcctggggctgctcacagagggactggataaaggatgcagtggagcatgctcagtgccagctttgtgggccgcgcacctcggattccaccctgagctgggcctntgccggagcccagttaggactgagagagagccaggtggtggtgctgtaaaacattacatcccccagccctgtcagcccagacccagaccccgcaggcgcagtctcgcttggagagtgagaggaagangaacacgctgacctggcttgttcct

SEQ ID NO: 6844 - DNA, 543 bp, Homo sapiens
gcacgagcgtagagtgcagagccaagcagagcatcagcttcttcttgcaattgtccatgtgtttctccaatgtcaactgctgcctggatgttttctgctactactttgtcatcaaagaattccgcatgaacatcagggcccaccggccttccagggtccagctggtcctgcaggacaccacgatctcccggggctaacggaaggacatcctgttcaggggaagaaagccctggccctgaattctggtaacggatatcgcgttccagggttttgatgtggtgggatgatccgcaccatcttcactgatgtgcttccctttgatgcccattgagtgccagctttgctcattataccccaaagaccttttttccactgcccagacagcttataccacccagtgttcagggatctctgaagaacccacagaccaggtgaattactgatttctaagtccaaaaactatagagcagaagaattgagaaagagaatgagaccatgtcaacaaggctgtttccaactctagcccattttcctgttctactg

SEQ ID NO: 6845 - DNA, 275 bp, Homo sapiens
acactgtcctcaccatcaagtaacgccccagacccatgtgcaaaggagacagtactgagtgccctcaaagagaaggagaagaaaaggacagtggaggaagaagaccaaatattccttgatggccaggaaaataaaagaaggcgccatgatagcagtggcagtggacattcagcatttgagcccctggtggccaatggagtccccgcttcttttgtgcctaagcctgggtctctgaagagaggcctcaattctcagagctcagatgacccttgaag

SEQ ID NO: 6846 - DNA, 494 bp, Homo sapiens
ataatttaaacattttattttaactgaaagtttataaatgtacatttgttttcccatcttctgacaaaggccaaggctttctctttaaacagaggattcactgaatggaattctgtattagctctcttgtacaaaccacacccataacacatcatcaaggatttttagttttgatttctttaaataaatctagaaattaaaaacactttcaaagcaatctaataccacatcttggatttttataacttttctaacttacacaattacttgtccatccctaattagacagcaatgtcttaaagtttttgtaaagcactgtatctacgcttaaactaagtaattataataataaaaagcataaaaattgaaaacttacaaataacctcctgttcagcatactcttcaactggtgggataaatacatagtcttactagaaagtgacagcctactagctacaagcattcagcttgccatgttatcaagccagtttttc

SEQ ID NO: 6847 - DNA, 459 bp, Homo sapiens
ttccactcagaggaagcccctaaaagagctgcttctctggttcccaaagccaagattatcaccattctcattgacccttcagaccgagcatactcctggtaccagcatcagcgatcacatgaagaccctgcagctctgaagtttagcttctacgaagtgatctcagcagggccccgtgcaccctcggagctcagagccttgcagaagagatgtttggtcccggggtggtatgccagccacatcgagagatggcttgtttatttccccccatttcagttgctaattattgatgggcaacaactaagaactgatccctgctacaagtgatggatgaagtacagaagttttctaggaagtcttgccctcattataattactccagaagctttaacggtttgatttctcataaaggtttctgggttgtcagttaactggaagaaagggtaaaacaaaatttgg

SEQ ID NO: 6848 - DNA, 396 bp, Homo sapiens
tcgaccaaagctgaacatgactcagaactttcgttcacagcaggcacggtcttcgataatgttcacccatctcaggagcctggctggttggaggggactctgaacggaaagactggcctcatccctgagaattacgtggagttcctctaaccgtgggccccagcagaactgctgagctttacatggtatccatgacaactgctgattccagtgtcgaggccatttctctttgccactgagaaatgcagcgtgactgactctgttgctacctgtcaacatgaatgtttctgtgagctctggtgtcactcatctccatgatcatctcagccaacatgcatcagtactgcaagaaaagaagtcaatcagcagaggagagcatttgataactaagaagaa

SEQ ID NO: 6849 - DNA, 424 bp, Homo sapiens
aagaagggataggaaaagactcccgtattttttctcaccttcaggcctttgcacaaaagctgttcctctgcctggagcactgttttcatttgatgtatacaatcaggtgtttacgtacgggagcctttctctgtctccaccgcgcacagcgttaaccctgtctctttatgaaacgaatgctcattattgttcaggggttggcttacctgctgctcccatccagaaagccatctctccatccgacctttaagggttaaacacccatcctcagcgctcctgggagcccgcaatagcaggcatcacaccatgttatacttgtcaactctgtcacctggccaccccttcgaaacttgggagctccctaggagcagaaagaacgtgtcttgttcacctttgtatggcaattgggtggtttcagttgagg

SEQ ID NO: 6850 - DNA, 439 bp, Homo sapiens
  misc_feature (1)...(439): n = a,t,c or g
aaaaagttgaatggatttagtcccataaaaacatcaacatttgtgatactgaaaaagtactataaataaaagtaaaaccaaatgaaaactgaaattaaaaataaagagctagggctagactnnnnnnnnnnnnnnnnnnnnnnnnnnnnnnnnnnnnnnnnnnnnnnnnnnnnnnnnnnnnnnnnnnnnnnnnnnnnnnnnnnnnnnnnnnnnnnnnnnnnnnnnnnnnnnnnnnnnnnnnnnnnnnnnnttgttgtagactagtaagaaaaagaaacacatcaatagaaatataggcaaaggacatgagaaggcattctggccaggcgccannnnnnnnnnnnnnnnnnnnnnnnnnnnnnnnnnnnnnnnnnnnnnnnnnnnnnnnnnnnnnnnnnnnnnnnnnnnnnnnnnnnnnnnnnngtgaaactaaaagtac

SEQ ID NO: 6851 - DNA, 491 bp, Homo sapiens
cctgcttagaatatgccttttgctagcctgctgtgatgcctggaatttcatccttcacccattgctgggcccacccacatagtttaaagccaagatcaggacagagatggagggagctgtcccctggccaccctgatacctgctgttggaaatcaacaaacaaacacaaacccactttgcgttctgtgagtgtgcatgtatgttggtccctaggtgctgcaggacaagaggagggccagaaagctctgcccatgcctggggagcatgctggatctcccttccagctacagaagaggtctatggtttcttagacacgcgtggattctcacagccaccaccacagacagtacaagcaacagttccaatactccagagaacgccctcatctctcctcaccccgtgccttctggcaagcaatgagctgttctctgttcctgtatttttgccttttctagaatgccatataaatggaattatatagaatgtgaaaa

SEQ ID NO: 6852 - DNA, 1009 bp, Homo sapiens
  misc_feature (1)...(1009): n = a,t,c or g
ctgctgtccctgcctattccccttcatgctggctctagaaagatgcaatctttttcccaggccccagcctctctggcctccctgccatccagcttctagcctcccttctctggaatctatggaagaatcatcaagcagcttctggaaatccaggagtctgtccttggtcatggtcatcttcaacctgtctgtgttcttgagaacgttcatgtgctcccagaaacattctttttgtctgcctttcctggtctggccacatttgactgtgtcacttctctcttttctcactcttctctgccctccacagacctccgtgctgccaggacttcctaacggaagggcttggctggctccccgaagccatccagaactggacccgagggacccagctcaacttgaatgtccttttatctgcccaggagatgggaagatgctgagaccatgcttcagtgctgtcccacatctgtctttctgagtttagacttggtttttccattatattccattcaactgatttttccatgatattccacaatgtcttacctaactctagctttctatactcaacagcaatgcctcctgagagcctcctgggtgtcaagtactctgttgtgtgcttttgaggactagggtgttagccaaggccacagtctctgacctttgccagggcctcacagattcatggggaaaattgatgttccagttacagtgaggcaaggcaatctggcagtaactccatagagaggaatgacaggctgggccctagggaatgggaggggtagcgggtaatagaggatcctaaaggaaacttgaggagaagagggggctgggagttgcggctggtcttgcgctcctgtgccnttgccttggctaacattttacttgtccttctgaatcaccctggcattgtcaacaaagaataatgtatgatccttcttggagtaaaaagccttcagcagtgcttcacaaaaaattctattgtatattttgtgtcctacctcaaattaat

SEQ ID NO: 6853 - DNA, 442 bp, Homo sapiens
atcttgagaaaatgttacaaaattagcatctgggatgcctagacaagacttgatgcctgacttgctgacccctgggccagaatcactgcgcctactatacgcaaaagggcccctggcaatgcaaatgtcctaactgctctggtgagagagaacaataacaacaaaaagcttccatcaatactagagctaaccttctcctactagccccagtgagctgcttagctcaagtaagtttactgtcccagaggacagctttccacagtggcagataagcagccgcctgaacatttttctttggtatttccaccactgagtgtggctctccagtggcgtggggactccagaatctccttttgagcaatgcagtttgcttcctcccctttttagttgatgctatgggattccctgtcttgccttttcctgttttccatacctatcgggg

SEQ ID NO: 6854 - DNA, 462 bp, Homo sapiens
aattcggcacgagcggcacgagctgctttttactaaccacagagttgaatagccatagaaactctacagccatttatggaaagtttgctgacccctgatctgaataatactaatcttggttccggctttgttgtacgtattctgttctgttgaatatcttattgccctcatgatcattttcagttaagaaggactcgctacaacaggcatggaaacaaactcttatgggaccactaaccctgtctgccgtccaggcaacccttgctctctgctttctttagcgtgccatatccccttcccttcttttctctcgagcttctattccctcactactattgtaaatctctagagagcataaaaggggaaatttaattttcttttatcttttcctcctcctggaaaagtagaaaacagtcaataaacttatataaaatatttaagggtggagttttaatattattg

SEQ ID NO: 6855 - DNA, 516 bp, Homo sapiens
tagaattgtgttaatcctccataattatgagatggagcttgcttttatgtaaaacttcttggagtcagccagcctcaggaggatggtacacataagtgatgacggggtgggaccagccacaaaaagatcccaaatggtgcctggctgagccaatccctgttccaactggccccttctctccactgtcccttatgtggtgctgtgtaaggaagcatggccagtctcaggactttcagagtgctttggttagcagtgaggtctgactcccactgcttcaaggaggtgtcgtaagctgtagggctgttgctctttacttttccctgtcagtacccacgaggaggtgtgtttgggctggaggcctgggctcacatggtgggtgcacaaccaagaccatcatcattggtctgatgatgaatttttagcaactctgaacctaacctgtgctctgtaacagtttctgaaatgaggtgtacagagatgggaagaatcttttggaaaacagagacagacatagta

SEQ ID NO: 6856 - DNA, 468 bp, Homo sapiens
ctggtgcagaggatattgatttatatacattaaatctctaatgaattcctgaaaagcgccaggctgcctgagagtggtggggcctgctgggtgtgtacattcatgaaagtgctttttaatccttaagggccttgtggtgtgagttctggcctctaggctgactttgcctcgaggctaataaacatggaagaatgatgatcttcgaataattttataatccactgtgtgggactgttgaaacgactgcaaggcgatttagatgtaaataaacgtgatgtttgcagaaatctataaataagaagcactggcaatttaaaccgtgttgtgcattttgccaaaaaacacgagtgagtcctggaaaccacagtgaggtgctgccgaaagtagagattctattttaaaaggtgcagccaccgttacagcacaaccctccgtgctcaggcctggcagcttatcatcatcactgga

SEQ ID NO: 6857 - DNA, 392 bp, Homo sapiens
  misc_feature (1)...(392): n = a,t,c or g
gggagaaattatttcaaccaaaagtatttcagtaagccatgtatcccacattatgcaagaattgggagagaaatggaaaagtacagcttacagtctgtgttcttaatcagttgtcagaatgagtgccatagatagtatatgttgaagcaattgaaagaaaagaaaatatctgtgggcttgtgggagcttcatgaaaaagatagaaattgagcaagacatagaagtagaaattaagcaaggtactacttggatttagttgatgtacaagagaggaaaggtttctgtttacacttcatctttgactggtcatgtagtttaaagcttccatgagttaatataagtatcagattagggaagtggcccaatttcctgtgtggaaatatgnaaattct

SEQ ID NO: 6858 - DNA, 382 bp, Homo sapiens
aaaaaagattagatctttacttttggctggtgctgctgagtatgataacttctttcaacatttgcgtcttttggatggggcctttaaactctctgctaaggacctgcggtctcaggtagtgcgggaggcttggtatcacgttggggcatctgtcatcagttctggggaataagtttgaccatggagctgaagccattatgccaactatctttaatttaattccaaacagtggccaaaattatggccacatctggtgttgtagctgttaggttaattattcggcacacacacatccctaggttgatacctgtcataacaagcaactgtacctctaaggctgtcgcagttagaaggcgctgttttgaattttagatttgctttt

SEQ ID NO: 6859 - DNA, 1819 bp, Homo sapiens
  misc_feature (1)...(1819): n = a,t,c or g
tcggggggcatcggtcaagctgctgaaccccctgctcaccgccagcagcaggtgcaacctgggagtgcgtgaatgcgtccacccacaggaggagcgctcctcatgctctgacagttctgcgacaagcaccagtttcaaatcaaacctagtataacaagtactccataaaacgtgtgctaaggcaaagaaataagcacatttggataatacaaatatcccagaaacaatggaaaagaaaggcttctattagagaacagaaggcttagcatatatgagtgcgcaatgatcctgatagctacggatactgtttttatttacagtggcaaaaactttattactacagaaggtcactgacagacaatctactggctggttaattgtttcaaatttgattctttatcaagcaaaaatatcacacaacctgatcaacacacacacaaacgcttcagaaatcacttaactatcaagatggagcagactatgagagctatttataaaacacgaatatttgcatggaactgcttaatatcagaaaattccaagaactgtcaaaggcagcatttgaaaatagttctgacaccttaagatggaattaccatccagaaagccactactttgaaaggaaatctgagctatgaggatggtcatcatggatgaaaaggtcgattttcctaatcattatcaggacgcatttacaaaaagctgtaaaacttcaaaggagaaaagtattttccttaaaaaaccataaaaaaccaaaaacaaaaaaaggaaaaaaaaataaattagtttgttgcaagttatataaagacaacaggttactgtaaccctcattttcttctatntgttttttctgatctgcaggggtgtgaatttcatctatcattccaagtttaagaaggaatcagggacttctctaaaaagcaccagagagtgagctgatttatcaagtaaacaatcacactcacttcttaaaagacacaactacaaacgccatagaaagcggtgactgatggagcctgcaggaccctgtgggcgaggacaactgggctcgcctggacgttttctcttttgcagtccccacaacactgccctgttcaagggcaaacaaaaggcagtgccagtcagacctgtggtagggctggagcgacctcttttgtataaattgattggaaagaaagagttaactgttttggtaagaatgaaaatttaaacacagaagtatgtaagaatgatactagcttttacattacttgtaaaacattttacaatcattattttaaaaacaaaaatactcaaaagggcaacagcactgggtaagaagctctttcattttaatattacacatgcaaatgctaactgaaacttacaagaataggcccatggtaagcggatcgatttttaagataagactttcagaatttcactggaaggtgggaaatcaataggaaagggatctacaaggatgaaggccaaaactcaacccccaaaacctggttatcccagatatgctaatggacagtatgtgctaatgtgttgtgagaaaaccggaatgtttcatcttaattatggaggggaacgccaggttgaatgaagcctgtatgaacgtactacattcatggaaaccattatgaaaagtacacaacctgtaggtggcatttcttcaagcactctaaggggaaaatgacttatgtaacagaacaaaataaatgagggctaaggtttggggctcattcctagctatactttcaatttataatttacctcgggggaactccggaattaggggtatcactgctttctttgtgtctgctctattttt

SEQ ID NO: 6860 - DNA, 1239 bp, Homo sapiens
ggacagaatcagattctttttctttcaaggacgcattttatacaattttcaacatttatactttcaaacaaaatgagcaaaaaatacactgagtgctaaaaaaatcaaaacagaagtaatacaattttaatttcaatattttaaaatacagaaattggaaagaatactaaatacaactttaaacaagtcacttgtcctcccctataataatcaatgtaagctacttaaagacttacaaatttaaagtaaaacagaaacaaaataaatactgttacactttccctgcctgcaggcaaaagatgggaaatactgttatgaatcagcaaagaaatgctcttcaagcttcagcaccccacctcccagccacaccccacgccattgtcacacagtgggcttccggactgaaaggacacacatgtcacacacattgactgcctatacaaacaagacgagacgctattccgcagacaccccaaacaagaagaacagtcccctcggaccgtgggcataaaaaccagtaagaaaagtcagtcaggctagcaaaacgttactacaaaacttagtaaattaccaggagcccaacaactgtcccctctcccaaagttccacagatttggaaaccctcctaaaacccaatactacccctcccccatcacccccccaaaaaaacttgctgaagcactggcaaagttagacatttcacagtaaatgtgaaagttcatattatataatctcttaaaatgaaccttttcaccctctttcccacagcatgaaactgttatggcttaatttatattaaaagtagaaaagtcttttctgaaggaaataccatctgcgaagatgcatttcctgatcagtgctatttcatacctaacaactgtatgacttgcttttgcagtcagaagctgtttttggaaaaattgaggttatagcttttgattcagtctaaccataaactgtaaggcccttagtttggtttaggtttcttttgcaagataaaataaccttggggttcacttagtaagttacacctcaggtccctgactgtaatgtggaagttatacgtagctctgtaaaaataaaaggttacttatgaatcttaaaaggaagaaatagttctaggtaaggaattaactcctcattatattttacatttaatgctggtaagttttaccaaccaaaatacaccaaagaaatatgagagtatgtctgggttattttatgcctgcaaagtattat

SEQ ID NO: 6861 - DNA, 588 bp, Homo sapiens
  misc_feature (1)...(588): n = a,t,c or g
tttttcccattggtccctgtcatctttgatctactctatatggggacagatgacctctgaagggtaattcatattggggtctctgggaaaggcaaagagcagacaggcactccgagacaggcctgttaagccctctttagggttcattgaatgtgaccagacgaataaggagggttctctgagttaggcctgctggacttccatcagcaacccctctgagatcccttccacatatgcaaacacacacaaagatgagacagacagaagggcttccaaatcagatccctaaccaagaactccaagagtatcccttccaaactatcctcctgttctctgtctgagaaatctccccaaaatcttcctgattgagaagtctcccaaaccaagactcttcctactaattagagagagccaaccgagaatctcaaatgaaccaaactgagaaagatgcccctcagtgggcttacagaccgacaccccaccatggggcaacagaaaaaccaagaccccctccccaaaggaattcaaaaccaatcgggaaaaggaaggaggcgttggccgtgcctaggatattcaccaatncagaca

SEQ ID NO: 6862 - DNA, 152 bp, Homo sapiens
tttcccagcaccttcatgccacttcacagtcaatacctaccccaccccccatggggtaagcactattcccaacttcctatcagcattcattagatttgctgtaatttggtcatttaacaatttgtcacattttccgtattacattattactc

SEQ ID NO: 6863 - DNA, 824 bp, Homo sapiens
ttcattagtactttttgatgtcaatttattatttatccctttgccagtattcaaacagacaggcagtcataaaacattaaaaaagatcctttaaaacggtcaggcatctgttttacctcagttcctttttagaaacctggaaatcaggagccccggcttttatgctatagcaagtttgacacttgctgtatcaaaaatattgcttgaggatcactacgtagaaagagttttgtttaaattttatgaaaggctggttaggcaggcagacaatggtttctaaggcaagatccagtgtaaatcagcaatgtgctgtttccaactgtttgactcctcagttcatattctgaaaccagggcgttgacaaaacccactgttcagtaattagcatcctgtcaaatctttccaatcaagactagcatgctgcacctggtcctagttaaaaaacacattgtgggcaattctgatctgaccctcaggggccgctggccatgctcagaactgcattcagcgtgcatgccataattaccatccacacaaaataagtagacctccttgtccagcagctctgagagattctgcctaatcctaatgacctgccacaccattttaacttctttgataaatgtctatccttgtgatttagacctttcctctcctgtaaagaaggtatctcttcctgggacagaagactcctcagaagtagaatcactgtagaaataaagcaaatgaaaaaatgggagaagcaaaaaccagagtaaaacagaaaccttaacagccctctccccagcaggagcttgttggaggaggtgtgggtgctgagtccc

SEQ ID NO: 6864 - DNA, 453 bp, Homo sapiens
aggggatggtgccttaaaattcactagactcccaggtagttgaacttcgtgaagaaagtggtaacctgagatgaggattgatgcctcctttactgggatgtacttctgagagccagacttaccttcgcacagccatagctccccaagaatagcattccctctcccaccaaaaaaacatccggatctcaattttcataccaggatgcttactgcagactgtaatcagtttcctggttgcaagatttctctctgctcgttggcaagtcagcctctcagaagatatgataactacatctgtagatgatttgtacaatgttgggggtgggcagtggaccccagtggtttatgctcatgcttgccatttctgtccctgaagaccagttccttgagtccagaagatttttgttttttgtgacattccttttaaaaatggctgtattcctgggagggggt

SEQ ID NO: 6865 - DNA, 317 bp, Homo sapiens
gcctttttgctttattaaatgagtagttaattcctgaaataccgctcctttcacaagacaatgaagtctagtgagatgtccttgtacttaaggactatcttagggaacaattacttaattacaacacataacactctttcccaaaacctgaaagaagtcaccttttaaaaacagactactttgaagtattctgtctccccaagacaggaaagtgaagaatggaaggaggacttaaaatatatattttttgagaaagcttttgatgtgactttcccagtattaaacaatacctcttagcaatgattgcatcttttggg

SEQ ID NO: 6866 - DNA, 452 bp, Homo sapiens
gaaatttcaattactcaaatcagaaaattattaagttcacctttagcaatatataatatagatctttttccccactctgtttttcgaagagctgtactaccattttgtttcatcaagttctgcctccagtgatacttgacccccatttaaaacattcgagtttatttaacagcttattgagcccttggacatatcatagaaactactttgtttatccatctgtttcattgatcagagagaacagggtcagttttttctgccatcagaaaaatcttttattagttgttggttctgtgacccttctttctgggacagcgtggggttctctcttgccaaaaacatataggccactattgggttttcctgttcactacacggggtacttttttacccagtggacctctattatccttcagtcttgaagatccctagtcattctccttctctcccct

SEQ ID NO: 6867 - DNA, 453 bp, Homo sapiens
aactgggttctaaccaaaacaacaacaacactcgctgacttcaaaggtctgttgactcgaggagataaatctcccagtcctagttggttcttttcagagaggtgcagaaaagaccccctagaatggagctgttgagccaatcacctttccacagcaagacataaagcggagcatctggggagagaaataaagcttacaaacaaaactcggggaaaggagaaagagaaaggtcattcgtccttttcaaagatgcttacttacactgttgattttattatattcaaaactacccaaatatcagacatccagtctgactgctcttttcttttaatcacttgggagctgcatttctgaaaataggcactctggtcctcagtgagccagattttggcaaactgccatacattccgttatcacattttacccagtctgcagcatattcataatatgtta

SEQ ID NO: 6868 - DNA, 779 bp, Homo sapiens
ccccatgggatgacccagactggcaaccatttcaaatccccagtctatttcattgaaatttccttggttaagtttaattttctctgggggcatgatctcacaaagaatactcaagtctttttcttcttatggaatcatcgaaactgctatttatcataatcaccacttatgagcctgggtttgggattttgtgcatgtagttcagtctactgttggtagcatgacagaaagtggggaaaatgccgcagtttgttgccttgaaacctaagagcaatccttggttttgttgctacattatttttccagaccaacacatctaccaagtaaattttattcactttaatttcataataaagttagtagagtcactcaacttacaactttatttatgtgggcttgggcaaaaatcactataaggcagctctaaatttgccttgataagctaaataaattacttttataacttactaaagcagaacaaacagtgaaactttctaaaatattctatctggaatagggacaggggatcttttatttataatctcatcagatgagtgagttgttcacagatattttatgtttttttaattttctccaagaatatttatagaattccaaagaatcagaatagtttcaaaataattttcagtgataaaagagtgttgtaattaatcatattacactaaaattgggatacatctaaggaactttatcttactatcagtaggttttgcattgatatttctttttaaataaactactagttctttatattttga

SEQ ID NO: 6869 - DNA, 4236 bp, Homo sapiens
  misc_feature (1)...(4236): n = a,t,c or g
ttttttttttttttgagagaaaaaagaaatttttttatttagctaaattaaaatggctgtgttacttatttgaaatatgcaaagctcaaatcaagtcatggaaaccctgaattctccctaaacagaaccaaaattgcttatacattaccaaaatagcttcactaaaacaaagtagatttaaatttcttaatatgagaaaacaacaaggtaggttaggttcgtataacaaacaatacacgctctataaagtctcaggaatacccaaatgtgttctggtttggatatgaaagagggaccacttctagctggtgttggtaagcaagccaatgaggtgtgcagcaaacaaaacctgtcactaaaaacaactcaacaggccattatgagtatgagcccatcacagccaaaatcctcaactgtgaccggcaggaccagcaagggggggtgttgaaggggttatgaacagcaaccataaagaaaggaatctccaacagaagggacaatggccagcagtaggtgaagggaacccattcttcagctctgttgcatcatacacattcctgagggtcaggcacctctgccttttagatgacaccacagtcatctagaagtcaggttttctcttcttttggttcttctttttatatgctacctttttgcctctctgatttatggggaggctcttttagtaaacattatacaagatagtacaaggcaaaagaaaacaaggaccaagaagccngtgcctttgagtaacttaggaaagcagcagtaggagctgccagactgaaaaggtaaaagggtttaaaacccaaaaccaaaaccaaactcactatccagtcttcctctcagagatgagatatggctggtgaggcttgactacagctaaatacaagtcacaggctcagtaagttaagacaacatacaaataaaagtcccaaattcacactaaataataggcttatgggatgcttaagcccagtgagtctgctcaactcagaagaaaggagttcaagataccttacttttgcctggaagatgtactttctcaggcaggatgacaaaaatattcatagatctgagaatgcagtataaacacctctgccaaacttggtagggggagaggatggtactgtatactggctcaggggtgatactagtcagacaagcacaaggtaggaagaacagaagataaaccaaaaaacaaaatggatttctccatgtatagttatctgatgcaagggaaaatacacacaacaaagagttaaggtgtcttcaaagtatctgcctatgaataagaatttgaaactaaaaaggacaagctacattaccctcaagtatatttcatataaatcagttctcaaaaaaataccttccaggtacagacatactatttatggtacagtatatacaaatatagcagtataattcaatttattgctagaattttatttggttgttagaaaatctgtaagggtgtatatatattaaaaaaaggtgtggggtgagagtggatggaaggcagtcagaagggtgagagttattttcaagttacctaaagtgccaggctaatttgttttaacctttccaagaaagtgaaactgagcataagctataatgagataaggggacacattcatgggaaaagacttcatcttgctttaactaaattttaatacttctggaaaaaaaatttaagtttggttaataccaagctgaacatcatgtaaagaaaaaaaaaaacagcccttaaatgtttaagggtaccggactgtatccatggtgaagggcaacctgaacaaagttaaaaaggaaatgatctccactaaagaagtctgtggcatgacagctttctctactttctccctgacttggcctataccaaagttaagtttttgtagtttttttttcccctttcaagttgttgcccaaagactgcttctaagaacaacacagcaattctagactcaacatacaggagacatggaggtattattcctttcaatctagggatctttcatgccaggtccacagaagcatttaaaggaagtattgtacttgattgtattagatttgaaaaacttgctaccaccatgtgaaggccctagctccaggcctgccctgctatactttggcatcctttgggtagaaagcctctagctacttctgagctggtaatggtaaggaaactgaatattatttcacatgtttcatctcacagcctttttggctttagtcatcccccagagaaacatattaggctcttggttagcctctaggtaaaatctcaaggggtatggttttctgggtcaaaattagaagcacagctctcttctaaagctctgggtggtcagtgtgagataatggctgggggaatttagccctgccattcaaatggagatggtactggtggtgggagccagctacggctttaagacagacttaagtgggtgggtggggaaggcaatctagctcactcagcagggaaaatggagctccccaatggataactttttatgctcataaaccctgaaatagtactaaaaatgagaaaaatccccaagacttctctgattcccaggttgggattagctgagggaataggaacaaagaaccagaatcctacttccatgagccatgcctggagtcagtattgtctccagtgtctattccctgaaatcggttcctccagctaccaggacaaaccccctggcagcgcctgggcctttgagggatgccttatggagacatggatgtagtttcagctgccacctacaccagatcagcaatttttaataagtcatttgttcatatcctgttcaaaaccattcttcctactttccacacaatatgcacaatgctttctttcatttaaatatttacaaacagaaaaggcctatcttttaaagaaaagacattttctgagtctctataaagtgcagctaatttaaggcaaatttaagtgaaatataaaagtggcttattctctctctatatacatttcccagctttaaaagataaggtctcctccccctcaaaaaaaggaaagagaaaaaaagagggctttaattttttttctggcaattttaaaatgtaagatcttactggttgtaggaaatcatagatttctgaacatcataagtaaaatggtcttcttctttaaaaaaataacttttatatagcttcttcaaacaagttaaaaggtggcaaagtatctgctacagtagtttggaggactagaggactgatgggtaagtaagggttgttttgttgttaggtaaatagatattaggcagtccatttctaaaatatgcctgatgaagctagatacctaaagctacccttagctccaggaatgagtatcttccatctccatcggaatcaaatgctctcaagctctctggttctggcatagcagaacctagggaggtccagatttcctggtaggtcagcttcccatccacgtcctggccagtcttgcggaataaatcctgaagatcttcagtgctagaaactcctggtagggagataggtcttagttgggcagctttctcaactgggtctccaagaaactgtgaaaattttggcaatgctgatggctttgatgtgaaactctctacttgctcttcatcggcggtctctggaggcctgttgctctcaggtttgtttgtaagagcactgatcagctggagtttctctcttagcttggatacctgagaatttgaactatcttctttctttatgctttggatttttactgtatctgttctgttggtgacttgatccaaagactgtcttttcagagtggcagatctatcacccatcatgctgaaggacaggtttgctttcttttctaccttgctcatagcaaccacatcgctttctatcaggttgactctctgggtaagattactgactgtctcgttcattccctcgagtttaagatcattctgtctctggtaccccactagggcactgtttacctcctctaaagagttgtgaaggtacaggatatcctgtttcaaattctcactgtgggttttattgtcaagttctgatgtggctgaaggtgacggaatgatctggttgcttccaggagtctccttcaagaagtgctgattcatatcactctgcagtaattccatcgtttctcgtgccnnnnnnnnnnnnnnnnnnnnnnnnnnnnnnnnnnnnnnnnnnnnnnnnnnnnnnnnnnnnnnnnnnagggtnntccaaagc

SEQ ID NO: 6870 - DNA, 499 bp, Homo sapiens
ctctgcggattggggctccagcctgactgacccgacagtgcgggtggcctagggggaggcgctcagagtaggaacccgggggtgcagacgggatctgccggatccccaggctcgtatttttatccaaaagaaggacctggaggaggatgagagcgttactgctgcacacctaaagtcaagggggagaagcccgaggaagattgaccagttttgtaattctagcaacatggtccatggatcagtgacattcagggatgtggccattgacttctctcaggaggagtgggagtgcctgcagcctgatcagaggaccttgtacagggatgtgatgttggagaactacagccacctgatctcactgggaagttccatttctaaaccagatgtaattacgttactagagcaagaagaaagagccctggatggttgtaaggaaagaaacaagcagacggtatccagatttggagttaaaatatggacctgagaaagtatctccaga

SEQ ID NO: 6871 - DNA, 1711 bp, Homo sapiens
ctggttgtctaacttgggaatctactcattggctagaacatattaagcttattcttgcaggggctcttaggattgctgacaaggtagagtcagggaagacgtctgtggtagtgcattgcagtgatggttgggatcgcacagctcagctcacttcccttgccatgctcatgttggatggatactatcgaaccatccgaggatttgaagtccttgtggagaaagaatggctaagttttggacatcgatttcaactaagagttggccatggagataagaaccatgcagatgcagacagatcgcctgtttttcttcaatttattgactgtgtctggcagatgacaagacagtttcctaccgcatttgaattcaatgagtattttctcattaccattttggaccacctatacagctgcttattcggaacattcctctgtaatagtgaacaacagagaggaaaagagaatcttcctaaaaggactgtgtcactgtggtcttacataaacagccagctggaagacttcactaatcctctctatgggagctattccaatcatgtcctttatccagtagccagcatgcgccacctagagctctgggtgggatattacataaggtggaatccacggatgaaaccacaggaacctattcacaacagatacaaagaacttctttgctaaacgaggcagagctttcaggaaaaaagtagaggaactacagagagagatttctaaccgatcaacctcatcctcagagagagccagctctcctgcacagtgtgtcactcctgtccaaactgttgtataaaggactgtaagattcaggggcatcattgctatacactcttgattacactggcagctctatgagtagaaagtcttcggaatttagaacccatctatgagagcaagttcagtcactttatttattttaaatctctctaggatgagtttagaactgtagcagtgcaggtggcttaagtgaagtaactccatatgtaattacatgattatgatactaatcttttaagtatccaaagaatattaaaatacttcaatcctggattcacagtgggaacaagtttctattaaaaggcaaatgctgttacaaatttttggcatctggtaatattaaaaccattttagaaatacactctgtgctcactgtgcagaggaacatcagttttcaaaccaacactgaaattctgtggcatcacatatattgggccttgatgtcatgacagatcaaaatcatttgatatccctttctccattctaggtttttctttttttcagtaactgatttaccttgatcacttttcaacttccatattcttcatatagtaaaaggcaaagtgttgaagatactacggtgtggtagtagttgaaaattattgccgtcattatttacatacttaagacatattagcaagttgatccaaaatgggaggccttatagatgtgcttgggggaaaatgaaggggagaaagtagccatacaggagttcaaagaattccatgcccttcagattagcccaattaccagaaacatcatgaaagatattttaaaaactaattatttactacagtgtatttcacttgtcttgtgtgtctgaacacacagaagctaattagcaagtttttaagaagtatttaaaaatcttactaggattgacattttttctgaattctgtataaatagcttatagtgagaag

SEQ ID NO: 6872 - DNA, 234 bp, Homo sapiens
ttcaaggccagttaagacaaaatgctatgactttgaaattcacagaaagaaataacagtttagattaggtcttcaggtattcaggatagagataatctcctgaaaaacctgaatttcagagattcttagactggcctgccaaagggatgaagctaggtgaaggggggaaaaagcttaaattccatcttgagctcttggattgggataataccatggattcattaacttttcatt

SEQ ID NO: 6873 - DNA, 429 bp, Homo sapiens
ttcatgtcttcttactcagttgtcaatttctcagtaaccttatatgaccaccttatttaaaattatattgtccttgccctagcatttcctatgtttcttccttgtcttttctccatggcacttataaatcatttgatatactaagtatatatatgttttattttttattttattgtctgttttccttacttagaataaggttcacggtaggagggatttttgtctattttgttcattgctatattcttaccccctagatgagtatctggcaggtaataagtgttcaaccaatactgctgaatgaataaatattttttgctttagtttcttataaggctaaaaattcacaaagcatatatcaatgaatcaggaggatctagatccggatagtactacagatgtgggagatgttacaaatactgaagaaga

SEQ ID NO: 6874 - DNA, 1036 bp, Homo sapiens
  misc_feature (1)...(1036): n = a,t,c or g
aagacaagaacatagatgcttttatcaaaagcataagaacaatgtattggctggatggtggtcattctggaggaagcaatacttgggttacttatccagaagtcttgaaagaatttgcacaaacaggaattatcgttcacactcatgtaacaccttaccaagtacgtgatccaatgagatcttggattggaaaggagcacaagaaatttgttcagatacttggggatcttggtatgcaggtgactagccaaattcattttacaaaggaagctccttccatagagaatcacttcagggttcatgaagtattttgagattacaggtatattaatgaacttgttcagtgggaaggaacataaggcacttttgagtgttattaaattcagataatggggatgtaattcatagctggcattgtcagttttgggggtatgggggggaagcacacattcctaaaatgtgagtgtaatgtgcaatagtattttttgcttgtgaatgtgagcagttattaatttggattgagttagaattagttaatttgaaatctaacaaggtggtttgtaataatgctgaggagatataagacccttaaaatgaaagttacaacattgttcttataaaaggtaactaaaattgttactgttggaaataactgattttctgagtaatgttttaaactaatttggtgacattttaacagtaattagctattttgagtggaaatattttcatttctcttcaaacaaaagcaaaggtacgatgctgttttctatcattttgggaataactgcaccctgccttttgtgtttttgtaaactccttgactcattctttcatgtgtcaccaagtacttttctcatgagagtcaacatatatttgtttccaaatgtccacaagtgtacaatagtgtaaaggtggtttnnnnnnnnnnnnnnnnnnnnnnnnnnnnnnnnnnnnnnnnnnnnnnnnnnnnnnnnnnnnnnnnnnnnnnnnnnnnnnnnnnnnnnnnnnnnnnncaccataattgtgtttgtga

SEQ ID NO: 6875 - DNA, 431 bp, Homo sapiens
tgaaggttacagatgcgccaaataaatcagagataagcaaacacattgaagtacaggtagcccaggaaactagaaatgtatctactggctctgctgaaaatgaagaaaagtcagaagttcaagcaatcatcgaatctactcctgagctggatatggacaaagatctcagtggatataaaggttcaagcactcccaccaaaggcatagagaacaaagcttttgatcgcaatacagaatctctctttgaagaactgtcttcagctggctcaggcctaataggagatgtggatgaaggagcagatttactaggaatgggtcgggaagttgagaatcttatattagaaaatacacaactgttggaaaccaaaaatgctttgaacatagtgaagaatgatttgatagcaaaagtggatgaactgacctgtgagaaa

SEQ ID NO: 6876 - DNA, 444 bp, Homo sapiens
aatatgaccatgtaaatcacaaaactgtcagtgtgggtcagagtcttcgaatttgctatcctgaagatgcttcagtacatcctgaagatttgcttcctgaaaatgaatgctctaggaccctgaaggttgtgactgtgcacctgccaactcaagctgaaggctgaagaggaaagctctgcagccccttcctcaagctggaggcagagtgacgtctgctggggatgcaggctgtgcgccccacaggactccagagtggcactaagcatgttgagttcactcctgcccatggtctagcttctgctttgcaggctcaggcatcttatcttgccagggcctcaaagctggtgggacagaatagcatctttgctcactaagctctgacccaccggcctccttgcagctctatagtccaagcgaactccttccaacatcaggcttctttta

SEQ ID NO: 6877 - DNA, 433 bp, Homo sapiens
tccagccaataataacttataaaacatgaaacgatttagtgagaaaagtggccggttttttggggggaattactttctgtcataaagaagatagatgggttctcatgtcttctacattcagtctgttgtgcagtcacatatcatgtagactctggaaaacacctctgtatactggtgaaagaatgaaaagaagcaaataatgccttagtatgattatgaaaaacgttttgacttcacagtgccctgaatgggtcttgggaatctccagggatccctcaggcacactttgagaaccaatctatataaagtgatggttcacaatgattctgaagccttagtttcagaatcatttggggcagcttttcaaaaatgccattcctgccacctaaccacaaagattctggattcactgtatctgtgatgggtctcagat

SEQ ID NO: 6878 - DNA, 529 bp, Homo sapiens
  misc_feature (1)...(529): n = a,t,c or g
tgagtatgaattctggtgtcagcattcactaagcatatgaccttggacaagtgatttaagtttcttttaaacagagaatagtaatacctacctcatattattattgtcagtgtatcatcttacaatcacagtctttctcttagggctgggctcagtgggtggattgacactgcagaaatggccagatctaaaggatcaacatttacgtagctgggaaatgtagctgggacttcagtttcactgcccctggtgatttttcctaccactaagcagctcagtccatacccctacgagacccacaagcttatgagatactgttcttccaggaaagcagtggggccagggccaccttttaatttgtgttttcttgggcctgggtcccatctttctcacaatacatagcaacagttatttacttgctgattttctaatgcacatcacacatagtcatattaaacacacacacacanacccacacacacccccacccctcaagaaacattttctgaggcgtgatttcctgatttca

SEQ ID NO: 6879 - DNA, 428 bp, Homo sapiens
catattgtaaatacaacggtgttctaaaatttagaataaatgaaaaatgaataaaatgttgctttaggggatataatccttcagaaaaattctttgatagtatctgattatttcacagttagttttgggaataatattacagatacagtcatttttgcaaaagtatttgagcacttcatcagttttctctgtcttttgacatgcagatctttcttttctgaagtgcctcgtatcatcatccttgtcaattttctttcttcagttgtcttctggtcctgctctctcagatcctcatttaacagcggctttgctgtaattttagcatctccctaatatcacttccactgacttcatgaaatctacatgttttgccagttttgcaattttgctaggctcttaatttttttttaacgtgtgatatcttttca

SEQ ID NO: 6880 - DNA, 524 bp, Homo sapiens
gcagagtttctgagcaaatctgtgctggtgagtcgcgaaacagcagccctggctctcttggtggtccggtgtgtggtggggtcagtaattcacactccgcatggtggccacggtggtcaaggggcgacggggcaggcctttgctgacctgtctatagtcctcaggcctggtcttcagtagcgtcacgatgtgctggagggtgcgggacggctgcaggcccagggcatccatcacgttgatcagatagtcgatgtcagtggccagctgcttggcagagtgtgggctcagctcagggatctgtaggatcgcatcacagtaggtctgcattgtggctctggcgatcgagcccagccagttgtcagccatgttgtccagctcgggcaattcatccccctgctcaggaggaaatggcagctttccagcgtgcaatgccaactctaaggcagagtcctcctgagtcacaaatggctcaagattcagggggagggacatgatgtactgcccgatctgaaacaaaagaaaga

SEQ ID NO: 6881 - DNA, 723 bp, Homo sapiens
aagcttggcacgagggcggatcccagcggcggtcgtgtagctgagcaggcctggggcttggttctatgtccctgtggctatgtttccagtgtcctctgggtgtttccaagagcaacaagaaacgaataaatctctgacccttctcaggtgcagccagagagacactagcccactgatggacggacagacgtgggcagggtccgtgtcactaaaccacccaccactgccacagctgcctacaacagacacatcagatgacactccgggcaaataaatgattttcactgaggacttactggttttaataataggtcctggtgtagagaagtccctcaacctattgtgcaatgagttttgagaagcgggtaagctgtatgttttgtggttttgtttcataaattcatctacaggaagaccaatattgactgaatgaagctttcatttaaagagctaaaatatgctttgtgtttttatatgtggatactactttaaacctaacgactattcattgtatcatagcttgtgatgtattctgctcatggcttttaaggtaaattgtgccatgatccactgccattctaattgctttaacaagtcattaccacactactgttacatcttaattatgcatacagacaggtagacttgttttacatatgtgaactaactagttgtcaaagcaaatgcagattgtattctgcaagtaaagtctttttctctctg

SEQ ID NO: 6882 - DNA, 206 bp, Homo sapiens
tgggatctctagcctcctaagttaatttagcctcccaaatgccagacaaagaatctaacataaaatttaccttgaataagatatatgatattgattctgagctgctttgtattttttctgactttggcatctgtatcttggtgctttctgttagactggtagagtttaagaacctaaggagtatgcattgtacttcagtgctaact

SEQ ID NO: 6883 - DNA, 304 bp, Homo sapiens
ggagccggggcagggcacgatggcggactgggctcgggctcagagcggcgctgtggaagagattctagaccgggagaacaagcgaatggctgacagcctggcctccaaagtcaccaggctcaaatcgctcgccctggacatcgatagggatgcagaggatcagaaccggtacctggatggcatggactcggatttcacaagcatgaccagcctgcttacagggagcgtgaagcgcttttccacaatggcaaggtccggacaagacaaccggaagcttctatgtggcatggccgtgggtctaatt

SEQ ID NO: 6884 - DNA, 616 bp, Homo sapiens
acggcctttattttaaaatttggcataggagtcaaaagctgcccaaggagggcagctacctatggggtgtgcatacattcatgaccaatatttaagtccaatatagctttgataattgttctataaaatgtttacacctcactgaagaatctgtcgttttaaaagaaaatctttacatttattgtatccaattaactttgttagtaatctgccaagtaaaacaagtattcatagtaattagtgactctattgcattagaactgtaacttagtgccatttttgaagactgttttcccaacaaggaggcattatcatttatccaattactttattctccttgaatagcaagcatgatgtaggcctcagctcacaatttacttacctgattagcttccatttctctttaaggatattgactatgtgacacttctaagaaggctgactagtacgtaagattatgtaaaaatcctaccagagtatgtactaaaataaagttaacatgtctattttctagttgcttgtgatttatcttaattttcttcctatgtcactaagatatgggtaaagagccctaaactccgaaacatttttacatgttaatataaatttaatggtg

SEQ ID NO: 6885 - DNA, 548 bp, Homo sapiens
  misc_feature (1)...(548): n = a,t,c or g
tataaatctgggaggaatgcggtcagtgtttcatgccaaccaaaaaagactgcaaacgtttttccatccttctgccttgaatacctttctacttagatgactattttgtaagacgtgagtgcaaatgttatatacaataccaactccatactagatgtttaattaattctagggattcagtaataaggaatgactcgaacagatttctgcctacagacagctaatgcttcttgtatttttgcattacctgaaatgaaagtagcaatgttagattttacagtagtggggaggttgtaaacaatagtatggtaaaccatttttgatcattttataattaaattgttcagcactaaaccattatggtcctgatacctcctggggcctttaattggcttaattaagctttttttttttttcccttttncggagaaggggaagtccgtngctcctggtcancccagggcctgggaagtggtagttggccgcgatctcctngctcctgctncattggcaaaccttctggcctnccctngggttcaaggcaaatt

SEQ ID NO: 6886 - DNA, 109 bp, Homo sapiens
ggagattggattgcttgcagattgaaattgaaatctatggcaaaagcaaagccaaagtacgtttgtccgtgctagaaaggttaaaggatcaagcagatggaaaatacgt

SEQ ID NO: 6887 - DNA, 187 bp, Homo sapiens
atcctttctgcacctaagcctgcctgctgtaggcaggacagcgcgaggcacaggggacatcagagtggagaggtccccactctcatggcactgactcctgcaccacgggccttcccaagccactgaaaagtgaggacagcagtcctttctctgctcagctccctgcctcaaccctcccctgccagcc

SEQ ID NO: 6888 - DNA, 562 bp, Homo sapiens
tttttttttaacattaataattttctctgtgctaagactcttcgccaatatttctgaatgacgagtgctgcattaactctttttctcaatctttgttttgctagaaaattgattacagccaattgaataattcttgcagctttctctctctccttctaaagtataattcacactatagtagtttcatattctaggagtacctgatggcgtttgagatctgtttttagtttatattttctccatgttgtttgtatgagtcgagcagctcttatttctttacgaagatccaaaagccttgcacaaagaaatgacaaataggtaataaccaccttttcatctggaattgtatttgacatatctgaatgattaatcatagcaggtattccaccaaggtctctaactgcagacctaaccaagtgaaaatttttcttttcattttctaggagctctttgtatagctctgaagtattttcatgatcaaatgctttaagtgacatatccagagaactgtcatcagattcagatgatgaatttaataccactgaaccagtttgcgtacatt

SEQ ID NO: 6889 - DNA, 450 bp, Homo sapiens
  misc_feature (1)...(450): n = a,t,c or g
gtccaactgtttttcaccttttctaatgaaagtattctccaaagaacaaattggaatgcttccaattatagttgttcccccttatcctagggggacacattgcaagactccccaatgaatccctgaaactgaagtctgtatacactgccgaagcctaagtataccatgttttttagatctaataaccaagatgggctgannnnnnnnnnnnnnnnnnnnnnnnnnnnnnnnnnnnnnnnnnccgtcctaggcaggagggggcaaactttcattttgctactcagaacatgctcttgccccatttaaaacttagggaattggccaaagtgctggggattacagggcgtgacacgcggcacccggccatgttttttgatattctggaataaaaagggtattggcagttggggatagggttggggttcttgttcctttatgttcttgttcctt

SEQ ID NO: 6890 - DNA, 497 bp, Homo sapiens
tggtatcctgaacttttgctgcagggacaggcaaggaggcactgacggtctccaccaagcttaagtgccctgcaactctctccctcacagcttggagtcagactaagagactaagatcccaattcctactgctcccttggctctgaggagcactctgacaccccccattgtcactggccttctaggaggtcactgggtgaccccttactccccaggagtcaagggtagagagatggtacgtaggcatctacgttttgttcttatttttgagacatggagtctcacttggttgcccaggctggagtttctctcttagcttggatacctgagaatttgaactatcttctttctgcacaaaacaaagattatagaaggtttaaggtggtagtaagacttcatctaagtgtccactgtattcccagagcctgtttagcatgtagtgtttgaccctcagtagtttccctataaagacaataaaagaatgaatcaacatatac

SEQ ID NO: 6891 - DNA, 543 bp, Homo sapiens
gcagggtagtgggagacgaaggcagaagcaagagtcaaactcagaatgactgagttgaattcactgtctagtcagcaatgcctgcttctgagtttggcccagagagaaggtattgagtaagattttaataactgtaaaaagtaagctggataagtaaaatcatgatggatccaaagcacagtttcttcatctcctgataaagaaagtcaaatgcttgataaattcagagtcacagatgtgagcatagctatattcttttaaacgagaggtagagtgacctagcactaagcaaatgagctgaaatgtcggaaacagagtccatcagcttatttggccacacgatcccaaactagttttatcttgggaaatggccctgtcctcagcattcccttcttgtgctggtggggccagtgaagtcttgatcttatcaggaaaaaggccacaccaagtgcgagttttcccagggttgactttccaggcccttatcaaatgaaacaacagaagctcttcacagttctgtgccccatggccactccacagaca

SEQ ID NO: 6892 - DNA, 153 bp, Homo sapiens
cctgctcagaaaaaccagtggagccctttgagtcaaaaatgtttggagagagacatcttaaagagggaagctgtatttttccagaggaactgagtcctatacgcatggatacagaaatggaggacttagaagaggaccttattgttctaccag

SEQ ID NO: 6893 - DNA, 449 bp, Homo sapiens
  misc_feature (1)...(449): n = a,t,c or g
aaacnnnnnnnnnnnnnnnnnnnnnnnnnnnnnnnnnnnnnnnnnnnnnnnnnnnnnnnnnnnnnnnnnnnggcacgagggaagatgcgagagcagatccagcgggagcaacagcagcaacagccacatggtgttgacgggaaactgtcctccataaataatatggggctgaacagctgcaggaatgaaaaggaaagaacgcgctttgagaatttggggccccagttaacgggaaagtcaaatgaagatggaaaactgggcccaggtgtcatcgaccttactcggccagaagatgcagagggaagtaaagcaatgaatggctctgcagctaaactacagcagtattattgttggccaacaggaggtgccactgtggctgaagcacgagtctacagggacgcccgcggccgtgccagcagcgagccacacattaagcgaccaatgaatgc

SEQ ID NO: 6894 - DNA, 429 bp, Homo sapiens
atggcaactaccacaccttcgcctcagatgacatctgactgctctagaacctcggccagcccggagcccagactcccggtcatccagagcacttatggtatgaagacagatggcggaagcctagctggaaatgaaatgatcaatggagaggatgaaatggaaatgtatgatgactatgaagatgaccccaaatcagactatagcagtgaaaatgaagccccggaggctgtcagtgccaactgaggagtttttgtttgctgaattaaagtactctgacatttcacacccctacccaacaaagagttattaaagagcccgcatgcatttgtggctccacaattacatcagcagaatggtcttaattgtttcgtaaagtgtgagacagattaagttttccctgatttttcatgaaaaaaaaaaaaaaaaaaa

SEQ ID NO: 6895 - DNA, 143 bp, Homo sapiens
cccagcacctgagggaacagcctaagagaagaaaacaatctttgcccagggattgtgaacccacccaaaccccatggacccttactgatgaaagcatctgaagtctttaaaagcagttaaagaaaaggagtattccctggcat

SEQ ID NO: 6896 - DNA, 654 bp, Homo sapiens
gatactcacccttctccatcacattcctccacagtaaaggacagtctcatcgaactcaaggaatcttcagcaaagctctacattaatcatactcctccaccactgtccaagagtaaggagagagaaatggacaagaaagatttggacaagtcaagggaaagatccagagaaagagagaaaaaagatgaaaaggacaggaaagagcggaaaagggatcactcaaacaacgaccgtgaagtgccaccggacttaaccaagagacgtaaagaggagaatggaacaatgggggtttcaaaacataaaagtgaaagtccttgtgaatctccttatccaaatgagaaagacaaggaaaaaaataagtcaaaatcttcaggcaaagaaaaaggcagtgattcatttaaatctgagaagatggataaaatctcctccggtggcaaaaaggagtccaggcatgataaagaaaagatagaaaagaaagagaaacgggacagttcaggaggaaaggaagagaagaaacagtcctcggacaagcacagataatgaagactttccatcaaggtaatgcacttaatgctttatgtgagatttaaaaagtattttacccatcttaaataaattgtgtttccatcatagtggatacagtgttcagaccct

SEQ ID NO: 6897 - DNA, 469 bp, Homo sapiens
  misc_feature (1)...(469): n = a,t,c or g
aatctgtatacagttttagctccatttgatattagtcccctttaagtaagtttaaagtgattatgattaggaaatctatgaggctttaaaaaatttttcnnnnnnnnnnnnnnnnnnnnnnnnnnnnnnnnnnnnnnnnnnnnnnnnnnnnnnntagtatacagttcagcaatgctatgtacagtcacattattgtgcaaccggtttccagagctctcagcttacatgactgaaactctgtatgtattaaacatctccccagcacccctttttctagcctctggcagttcattattctggctttccatatctataaatttgactactctacatacctcaaataagtggggaggcatacagtatttgtnccttttgtggactgggctcgtttcacccggcgtatgggtnttcaagggtttcntcccttttgttgggctggtattcacaattttcttttncctttttaggg

SEQ ID NO: 6898 - DNA, 666 bp, Homo sapiens
atacgcgcacacacacacacaaacgcactcagatttcccggaccctggttttcctcctgtgaccctttcggggccgggctctcaccctaaagaagcagccccgccctggggtggccccaccctctcttgggacctgtcataagtcggaccccgggcgcccggctgcgcagtcccagccgccttccccaggcagtggaaccttcgggctcctgagcttcaggatggttcgtactaagacatggaccctgaagaagcactttgttggctatcctactaatagtgactttgagttgaagacatctgagctcccacccttaaaaaatggagaggtcctgcttgaagctttgttcctcaccgtggatccctacatgagagtggcagccaaaagattgaaggaaggtgatacaatgatggggcagcaagtggccaagtaattatttccatttgtcccagtgcttggaaaatatgtctcctctttacctcctgctgggtcctgtctctgtccattgctcctacaatttcttcagcctatgttgttgactcactgtgtgatcttggaatcaacttgggaaattctgtctccttcctaactagctggaaaggagggaaggatgtgaaattgtcattttttcagcttcactttgccatccttacttttaattacta

SEQ ID NO: 6899 - DNA, 181 bp, Homo sapiens
tgtctgacaggtttagtccagacacaattttccccctcaatattttcaacctgtagttggttgagtccatagatgtggaacccacatatacagacagccaaccgcatgtctaaacaagtttcacttgtttttgaacttctggagtatcataatgtacatgtcttctgacaccagctttttt

SEQ ID NO: 6900 - DNA, 394 bp, Homo sapiens
tttaagaattaaaaattttatttaaacaataagaaaacaaactgaaagtattacagtgctccaacatgaaaaaataacatattcatggtataaattacattctcttctttgaagatcttaaatttcacaatgacaaccccacctataggaaagaaaacatattaagtatcaagtaatttaagaacaaatgccaaaattacaaacacttttttgtattacatgctaagaacttactaactgttcgttagcccagttaaatatcatcaggactctcaaaaaaaaaaaaaaatctagtactggatcagaaaaatacagaaacctcatttcctaagcaaaatgaaagtcaactaacaatacattgagaatactacttacctccaccaatgctgtgaac

SEQ ID NO: 6901 - DNA, 395 bp, Homo sapiens
ctctctctctccctctatctctctctcctccctcccataggaatgtcagctctatgagcgcgggattcctgcctgtgtgttcagtgtcggatcctaaacaaggcctgacccctccacaggcacacacataatttttaaatgactgaataaatctaaaaatcatcactttattttcctttttgtataaaatctttgtgagggatggaaactccctccaacctcacaacgggagacatttaatgctgtaaaggctatacgatcgttagcaacgaatcattcctttacataacattcacacagcttcctacaataggtgtatttatgttgttgtctaacatacatgttttaatttttcaggcgtttgggttctgggatccacacgttcttttccgggg

SEQ ID NO: 6902 - DNA, 372 bp, Homo sapiens
tcatttcccacttaaggcatgtggtgaggaaataggagaaagaggatgtccctttggctgtgctaatttggccttatctagactgccaccctgggccagtgcaggctactctagacactactgactcatattttcctcctcttttgtaccctcttctttctttctctaactattccttttactagttatgaaggcttatcttttccttaaattatctttactaaaaagtccaaaatgttgcactgatggagagattttatcaaggttaggttacagttggagtttgtgcctggaagagttagaaacaatttctaatatacagtaatacaacatcaaaccctatgccacattctcttactattaattctggct

SEQ ID NO: 6903 - DNA, 155 bp, Homo sapiens
gcgtcgacgctcagtgagttacacaatcctagttatactcaaaattaagtcatggctgtgctccccagtggcacagctctgaaaacaaattgggagcctggtagattagacctgcagtgcaatggatcatccctcttactttctggtgcaccaca

SEQ ID NO: 6904 - DNA, 480 bp, Homo sapiens
cagcaaataaagcaatcgaattacaactacaagtgaaacaaaatgcagaagaattacaagactttatgcgggatttagaaaactgggaaaaagacattaaacaaaaggatatggaactaagaagacagaatggtgttcctgaagagaatttacctcctattcgaaatgggaattttaggaaaaagaagaaaggcaaagctaaagagtcttccaaaaaaaccagagaggaaaacacaaaaaacaggataaaatcttatgattatgaggcatgggcaaaacttgatgtggaccgtatccttgatgagcttgacaaagacgatagtacccatgagtctctgtctcaagaatcagagtcggaagaagatgggattcatgtagattcacaaaaggctcttgttttaaaagaaaagggcaataaatacttcaaacaaggaaaatatgatgaagcaattgactgctacacaaaaggcatggatgccg

SEQ ID NO: 6905 - DNA, 159 bp, Homo sapiens
tcagcttataataagtgccataaagaaaataaaactgggagacatgaaagagactgactagggtggtagtctaacagatggggcagtcaggaagtctttcctgaggaggtgacatctgagctgagatctgaatgaaggataggatccagccacagattg

SEQ ID NO: 6906 - DNA, 597 bp, Homo sapiens
gatgagagtacatacctcctgggatggtcgtgggattaaagaagataccatattgtattgattctaagatgcatcctccaaaacacacatactcttgagcatttgtgaatcaggatcttacaatcgatgctgtgtcagaggttaactcgcagctttttctttcttggtggtacattcaataatggtgcatcttaaaatcgatggcatcttaggttagataatatactgtaaaaagtaggtagcacttaacacagtgcctggcaggaaataaatgttcaggagggttagttgttactgctttatcaatgtggttatcatcatcaaggaaggagattagctaacattcatttggtgttttctgtgtttcagtatctaattcttagaacccacaagacaaagatttttatccccattttacaaatgagaaaactgaggttcaggaagttcaggcaattcccctccacccatagagctggtaaggggcaggcctgagggtccatccaggagtctaagcccccgcctactgccaaagccagctgcctgttttcatagccgcctgcaagctatgaatggtttttacatttttaaacagttgag

SEQ ID NO: 6907 - DNA, 648 bp, Homo sapiens
  misc_feature (1)...(648): n = a,t,c or g
ctgggataagggggaagaggaagattatatcttgtgttttgggcatgtcacactagaaatagttcctttaaggtgatgatttttccctccaacagattaatgctgaactgttgtttcggccaactgctctttcaactccaagcttttcttctcctaaggaaagtgttccaagaagacatctttcagaaggaacaaattcttatgcgacaagacttctaaataatcatcaagttccacctcagtctggaacctgagagcaacaggtcagtggctaagattggttttccatttggggaatattaaacagagcttttacttgacacttctgtgacagtgatgcaattcgggatcattgtaggttccattgtgaattgtaggttccatgaatgtgaaaatcttcaggacaaattgtcttgcttttattgtctaaacttaggctaaaccctacttctgccacctgttaaattcgttaaaaagtattaattgaccnnnnnnnnnnnnnnnnnnnnnnnnnnnnnnnnnnnnnnnnnnnnnnnnnnnnnnnnnnnnnnnnnnnnnnnnnnnnnnnnnnnnnnnnnnnnnnnnnnnnnnntgaggctgaggctgagctgcaccccgagcctgggcaacaagagcaaantccgtctc

SEQ ID NO: 6908 - DNA, 691 bp, Homo sapiens
ggtcgaccattagtcatccagacaaccaatctttcagctagactagaaacagatgtagaatgcctgaaactaaacctataagagaataaaacataaagttattaagcagaacagtaaataatattgttttaagtgtttgacataaaagcacagtctaaataaaagtcacctgttttcctcttgttctacttgcaacttctggggggctaaaaggcaacaaaatgaaacttaattttgatagtcatcctggtaaagaaaacatgtaacatgtagaaaacatttggaaattaagaatccattaagcaaaccacatcctaaaaaaaattagataaggcattactggtggcaagcttgaaaggtacaggtcaaaggccctcaggattcctccgggggaatgtggttagggacaccccatggcggtaccaaaattcgcgtgcatgcttcaaggtcctggacactctggccctggcaggaacctggcatattgggttttcaacatcggggattactggcaatttctcatctggcatttggctggaaagaatttcattggaaggtggacccaaaatttcaaaccccaggtggttcaagggtcaatgggtaataatatctcttcaggccaaaatagtccttttacccgccctgaaatccaggagtattaggtttaagaatcctgacccggaaattagtg

SEQ ID NO: 6909 - DNA, 430 bp, Homo sapiens
ttctctcaccttgccctgacagttttcatttgctgtttagaagaaacacaaattctcccttaggaatcaggtaagtatatgaaagagatgaaggaactggttgagctcacagattctttatcttttctatttttttctcttttctgtttctgttttctataagccagggtttttcttccccctgaactcttcctttctcttcccttctttggggaataacttcaggtactctgtaagcacctcctttctttttactgttttcctgacgtatattttcttgacgacgtgagactggatttctgcacgaattttccttgagatgctcctagccccaatgtcctaaagatcggttgatttttcttggggttaaaacaccaattaagggtaccaaaaactcagggcagtggggcaggggggagaaatttttttc

SEQ ID NO: 6910 - DNA, 425 bp, Homo sapiens
  misc_feature (1)...(425): n = a,t,c or g
ggnnacnnnnnnnnnnnnnnnnnnnnnnnnnnnnnnnnnnnnnnnnnnnnnnnnnnnnnnnnnnnnnnnnnnnnnggcacgagctacagggggctggaaacagttcagtctttgattggttgctgagaggcggggctactcgactgctctggaggtagcggccgcggttttacagctctttaaaacactgcacaggaccagacaacaagtttttaaaaatgatgccagagcattagaagcagccagaataaagataaatgaagaattcaaaaataataaaagtgaaacttcttctaagaaaatagaagagctaatgaaaataggttctgatgttgaattattactcagaacatctgttatacaaggtattcacacagaccacaatacactgaaactggtccctaggaaagaccttcttgtagaaa

SEQ ID NO: 6911 - DNA, 2379 bp, Homo sapiens
gaaggcggtgctctgagaagccggactacgcggacgctcttcaaagcggacgcgggagtttttgctacagttttcgccaccatgagtcgcagctataatgatgagctgcagttcttggagaagatcaataaaaactgctggaggatcaagaagggcttcgtgcccaacatgcaggttgaaggtgttttctatgtgaatgatgctctggagaaattgatgtttgaggaattaaggaatgcctgtcgaggtggtggtgttggtggcttcctgccagccatgaaacagattggcaatgtggcagccctgcctgggaattgttcatcgatctattgggcttcctgatgtccattcaggatatgggtttgctattgggaacatggcagcctttgatatgaatgaccctgaagcagtagtatccccaggtggtgtcgggtttgacatcaactgtggtgtccgcttgctaagaaccaatttagatgaaagtgatgtccagcctgtgaaggagcaacttgcccaagctatgtttgaccacattcctgttggggtggggtcaaaaggtgtcatcccaatgaatgccaaagacttggaggaggccttggagatgggggtggactggtccttaagagaagggtatgcctgggctgaagacaaggagcactgcgaggagtacggaaggatgctgcaggctgaccccaataaagtttctgcaagggcgaagaaaagaggccttcctcagttggggaccctgggagcaggcaaccattatgcagaaatccaggttgtggatgagattttcaatgagtatgctgctaaaaaaatgggcatcgaccataagggacaggtgtgtgtgatgatccacagtggaagcagaggcttgggccaccaagtagccacagatgcgctggtagctatggagaaggccatgaagagagacaagattatagtcaatgatcggcagttggcttgtgctcgaatcgcttccccagagggtcaagactatctgaagggaatggcagctgctgggaactatgcctgggtcaaccgctcttccatgaccttcttaacccgtcaggctttcgccaaggtcttcaacacaacccctgatgacttggacctacatgtgatctatgatgtttctcacaacattgccaaagtggagcagcatgtggtggacggaaaggaacggacactgttagtacacaggaagggatccacccgcgctttccctcctcaccatcccctcattgctgttgattaccaactcactggacagccagtgctcattggtggcaccatgggaacctgtagttatgttcttactggcactgaacagggcatgactgagacctttggaacaacctgtcatggagcgggccgtgcattgtcccgagcaaaatctcgacgtaatttagatttccaggatgtcttagacaaattggcagatatgggaattgcgatccgtgttgcctcacccaaactgggttatggaagaggctcctgagtcctataagaatgtgacagatgtggtaaatacctgccatgatgctggaatcagcaagaaagccattaaactgagaccaattgctgtgatcaaaggatagaaccttggacagcagggctgcctgacaccaccaaccctctctgaagtggaagtggactgacatgctcttctgacatcagactcaaggcgggacaagttgcaaagtgtgcagctgtaactgctcacgccaaaatggctgatggggaggctgctgctttcaggggcccgtgcttgtaaaataaccttccaggaagaggcacattgcccacctttggaaagggaggaatatgccttctccttggttgtttccacagagttttaggaaaatctgttagggatgggtagatgtcaaactgccttacgcagtcatactgatctttagccatcagattgatcttcttcacaccaagctctgtttacattccgagaggtgtcatgaagaaagttctgttcaataaggttttggaatgtttcctttcgtctgttgctttgtcagtttgtccattcatccacccatttaggcatcacccctgcactcagcaaaaccctaaatacccctcttacttggagagcacccagggagttgtaatcaggctgttagatgaatggatagtggaacacattgaagagggagtatggggaggtttaaggaatagcggcccaaaagacaaagtcttcatagctttactacctttcttattctaaatacacggcagagtttttgtatccatggggccgggtgaacaaaatggaggtaggtggtggtgctggtgatggagggcacagcagaaccagaggctggcctccctcctacacatgcttgcagggctttttttttt

SEQ ID NO: 6912 - DNA, 426 bp, Homo sapiens
  misc_feature (1)...(426): n = a,t,c or g
gattagtttgcattgtctagaattttatataaatgaaataatatatacttcttttggtctggcttctttcactcagaatagttattctgagatttaacaatcttattgttgcatgtatcaataggccattcctttttattggtgggtagcgttccattgtgtgcacatagcagcttctttacccattcacccttttaatttagccattttagtaggtgagtaatggtatcccactgtagttttaatttgtgtttccctaataaccaatgatagtaagcatcttttncatgcggctatttgccatcagcttatcttctttggtggaaatgtctgttggaaatttttatggagttttttttcatcgaggatgattttnatttttggaagtttgnacaggtactttnatgtanttttagggttaccaag

SEQ ID NO: 6913 - DNA, 349 bp, Homo sapiens
attaacatacacatgtgataacagtgcttcagtggctcattttagacttaaaatctaaactcctgggtggtatttttcaccaattccccaggaagtttttcatcaatggctgaatacttatggtggtttggctgtgccatgctctcctgaacctctgtatcttctcacttcttctgcccatctacctgattaacttttatttatcttttaaatctcacctgtttcctaggggaagccccctggtcttcagctacttaaacttaagttctgttgtgcccttggtcctatggccctgtgctcacgattattgagagtctgtctccacactgtcctggaagctgctgcaaag

SEQ ID NO: 6914 - DNA, 891 bp, Homo sapiens
ttttttttttcttgcataacatgatttatcacataatatatacatttactttgcttgtcacttgaaatgcctaagaaaacacaaaatcaatcttaaactagaaacttctattgaatatgacatgaagagagcacatattccgacaatttcaagttcttttcatagcctctccagtcctaataactcagcgttaacatcttattctgttcagcactatttgataatttctttcatcctcatgggctctagtattgatgtttcatcagtctcaattttataaaaccatcctttactttgtaataaagcaatgctgagagacattttccataatgcagggggaaaaatgtggatcaatcacaaactcaaagaacgttacagttataatgctttcgacatttttttctacttctgtgatgctttttcaagataagcttccccctccccctttttttcccctccacctgtgcactgtcttatcgcgatatactcttgacttctgaaaatcaagttgcaggattggtatgactggaatgcagaggttctcttgaagtagtgtcaccacataactattctctattgataaacttatcgcaaccaagttcttctatcagagggttgataacttcagaggcagtcagagctatcgtaaaggttaaaatatcgaggtccaccctgtgaggatttcgctgatattcggcatcaaacgctgcttcccttgctctgcaggcttccacgaatcgcctgcggcggttcttcaagctcttgtattctgccgggagcaatcgggtaattttccagatagtggcggagaaactgctggtaattgatgcctaaaacgctaagtgggtggcggagacggagatagggcaacgcagccaggcctccgttccc

SEQ ID NO: 6915 - DNA, 852 bp, Homo sapiens
ctgaaccatcacaagtattttgggaccgataacaaaccccttttatgctaatttaattcttgacttgggtaataggtgcacctggataatttataaagctgtccatagatctaagtttagtggtacagatactactgggcaggagaaaaagcacaagttaaaatatttctacagtcagctcttaatattcccacatcttgtttgcaaaattttatggtcacgttctggcttttttacatgaggaaaacaaagttttaacagttttctcttctgtccccttctccagaggaggtgtgaaccagaactgaggaggccagttatattttaggcttttcagtagtacgattttgtcctctcccactgcggaggagggacgaacaggggaagccagtgggagttccacacacgtggtcagtgctgtaagttcccggatatcagtgtctctcacatcaacacagaaatagggcacttctcaacattaattttggaattattcaccatttaaaaattgtcactgctctttttcattactgtagataactgagagttagctgttctaggaaaaggccatgtttcagttagtgctatgacttcttttttcgattaaggttgaagcagtgttctcttagtagcctgaacacttctcaaagcgacttatcactagcggctttaatattgagcttctatatcgttgtgtccacctcactttttaaggctgttcatacctggcaatattcacttactctgctatttttaaaaactattttaaagttttaagcacaatgttgactcttctgtaatttcctaaaattatattgttttcctacagacaaaaaataaatgaagaagtcg

SEQ ID NO: 6916 - DNA, 89 bp, Homo sapiens
gcctcctgagtagttgggattacaggcgtgagcactgcacccagcaaatctgtacttattataaacaataacttcccgtttccttttgt

SEQ ID NO: 6917 - DNA, 352 bp, Homo sapiens
gaaaatccgaaagaaagaatctatgaagaaaaaacaagatgaagaaataaatcaaatagaagaagagagaacgaagcagatttgtaagagctggaaagaagactcggaatggcaggcatctctgcgaaaatccaaagcagctgatgagaagagacgctccttggctaaacaagcacgagaagactacaagaggttatccctcggggcccagaaaggaagaggcggtgagaggctgcaaaaccccttgcgtgttccgcagaaaccagaaagacctccccttccacccaagcctcagttcctaaactcaggggcatatcctcaaaaacctcttagaaatcagggagtggtgagg

SEQ ID NO: 6918 - DNA, 331 bp, Homo sapiens
atttatgaatatttccaacacaaaatatctttcctttctgtactttgacttagataattctctgcttataatactagctggttttggtttctctgtggtgatctatggtgtgactctcatctcctctggagagagctccttatataagctctgtcacctgagggccactgctggcattccagtgagtgagctaagctctagaagccagacaagtagaattatttttcccaccgtagaagatacagtacaagttcatgtatagaagaagtttattattttctcaagttttgacctaagtatgagaatttggaatccaaagtaggctattcag

SEQ ID NO: 6919 - DNA, 621 bp, Homo sapiens
aggaccttgtctgaacataatgatttcaaaatttgagcttaaaaatgacactctgaaatccagtcagtgtgcctcactagacttttcgatttcaagattttctgcagaaaatgttttgaaaactttgaatacttaaaaatggcaggtgtagtattgcactttgctagttgctcagatacccttttttatttgtatagatattctgagttcctttttttttctacatgttgtacgttgtcgaaagctaaaaggaaacttatccttggatcacggaaggcagaggcatttggtgagatggaaacaaggatgtgtaaaaatgagacgaccacctctcggattaaaaaaaaaaagtgccagagttctagggttctaagtgatgtccaggaaggaggaggaataatatttatggagcatatattatggaacacagtgagtatagtacctgcctttaaatgaatactgttggttttttaggacagttgcttttttttcttttttcttcagctgtgtgcagttgattaacttgtacagagcctatcacacaatagatgtttaagaaatattaagtgaatgaatgaggcagcattgctaatttttgtatagtgagacagtatctcacag

SEQ ID NO: 6920 - DNA, 651 bp, Homo sapiens
ggcacgaggtgggatctgtttatttggtagcaacatctgaacatggaagctaaactgacttaaatttcaggaacaaagctggtgttagcctcctatatgttcttgaattctgattaataatttgtatgccaatgcctttgaggaaagagtgctacatctgcagttaactctgaagtctattttttaaaagttggattgatggatggatagaggaatgaaaaaaatatatatgctgtaaagcaagaatagtaaaaatgctgtagaacctagatgatgtgtatatgggtgtttactgtaaaagtctttcaacttttctgtatgtatgaaaattttcattataaaacgtcaagaagaaaaaatgaagactgtgtgagaagagtggcaggatgtgctctggcccatgggaacaaagacattctcttgggtgcacagccctgacaggtgggaggatgacttggcatgagagctgtcgaaaacactataagccatgctcaagaatttttaatgtggaatagagaacttttctgaaaaagcatagttgaaagcaaggacaagcattaataaggcacttctactcttttatttattaccatgttgggaattattttgggaggagtgcttgcttcagaaatgctaaagtaggtaatttgt

SEQ ID NO: 6921 - DNA, 243 bp, Homo sapiens
tagaggccctacgcagtgaacaccaggccgtgctgcaaagcctgtcccagaccattgagtgtctgcagcagggaggccatgaggaagggctggtgcatgagaaggcccggcagcttcgccgttctatggaaaacattgagctcgggctgagtgaggcccaaggtgatgctggctctagccagccaccttgagcacagtggaagtcggagaaacagaagctgcgggctcaggtgcggcggctat

SEQ ID NO: 6922 - DNA, 405 bp, Homo sapiens
tcgatatcttcgtgacattcagatgatttatacttcttagacatttgttatacaattaatttctattcattgaggaaatttagaagatgcaaataattttaaaagggaaaaaaatcacaagatgaaagatttgaaattcctacattgagagtatggaataaaatactatgattactttttccaagaaaaagaggaaagagaagccctaagggagaggtgtatacatggcatagcagtagagaattaagtgagggcttttctgtttcttacttaggggtttatgcatggattggaatcaactttgttttgggaagattcgaccacgaggatggtgagtaatattgtctttttatgacagtttacctaagggctgaagatttaagttataacctatcagtagcatgt

SEQ ID NO: 6923 - DNA, 440 bp, Homo sapiens
cggaggtttagctgaatcctaggatcaggaaagaatctgaagtatccttacattacacacctcttccctagcgtcagtctcccaggccctgccagtattaatacacctgaggaagaaaatagggatgggaaatccagggcccaataggaaagggaaccgaggtctacctaactatcactaaaccctagccagtgattttgaaatgcactttttcaatattctcagatatactgagagaatatgagagatctatttatagactgctgtaaggttgaccttttaaccttttgtgtgttcacactcataaaccagtctataaaatagatcttttatattcaactatgcatttaatctgttctcaggtaataccttaccaaaaatttaaaaaggttttttaaaaaaacacaccaatcgttgtcaataaagtttatgaaaagaaa

SEQ ID NO: 6924 - DNA, 373 bp, Homo sapiens
tcaggcatttgaaagaaagaattcgagatctagtttgtatcagatattataaattagtatggtttagtctttgtcatgaaattctacttaatttttggactataggtttaagaatgtaagcagaagttctgcaccaatcagaataagctacattatgcttgagtgacaactactgtaatgacaaaatatcagtggcttaatacaatggtttttctctcatacttgttcataaagagtcagcaaggaccctgctcattatggtccctcagggacccaggttgttggaagctccaccattttagatagctcccttcaaagtcagccatctttggcagtccatgtcccccaacaggctggcaaaatttgctctgat

SEQ ID NO: 6925 - DNA, 353 bp, Homo sapiens
  misc_feature (1)...(353): n = a,t,c or g
cgttcttttctcgtttcatttctggaaatatttagtaattaaatgtattatatgttaaagtctgttaacttatactgagctatgttaagaaattatttccaatgtgtttgtaccaacaggttggcgatagtattgttcacaaagccagagagaccttggaacgagctattaaactggtgaatgataccaagaaatggggggctagggttgtatatggcgatactgacaggtaatgggtttttggttttgtagttgtcttttgcatctctctagatcttcatttcagtgtttaaaatggcttaaggggaatcttttcctaaaaacagagttctgtctgaggcccnttccaggcc

SEQ ID NO: 6926 - DNA, 741 bp, Homo sapiens
aggaatgtggggtgtgcatgcagatgtctggtactggagtaagctgaaggtatgtgcagtatttaagaaaatgtacattctaattaattcacttataaaaccatttacatattgtgtatatgtttttattttcaaatgataaactctagacatatattttgcaaaatgagcttgggtttaaaaagtgctttgtgccaaaaatatcatacctaatttttatagtgctttactatcagaatttatattgtttattatatcttttaaaagcagtaagcagttttcatctgacagcgtaggataaaagaggagtatagggaatttgaatgctagagcatctcccagggtgagccttattgcagatctttttgatataggtcaccccataagcatgggtgagctcctgctcctccataagggtcagcccaaagcccccttaagaagggtacacagcacatctgcagtccattccaggaggtcctgtgaagtgtggtgatgcatctaacaccttttgctgctcactgagaacccagctttgaacttacaagattacactaaccatttttaaagtgcacaaaaatattattattagtcttaactaaaattacatattttataatgcccctgcaactctaaaccatccttttgggttacacatttttgtatggtattttaagattatcaatcacttcaacatttctataaccttgtttgtatagcactttctcaagagctgtcagtcct

SEQ ID NO: 6927 - DNA, 378 bp, Homo sapiens
attggcccacagacaatcaggatggctgggattacaggcttgagctaccatgcttggccttcaaacactttttctgtttgtgctttcagtaaaattttattaagagtcttccctgtgtttggtgctgaggatacaatgagaaatcagatgatgttcttggccttttgggggatctctgctgtcacacttggctgattttactggaattgtttttgaaattttttttatgcttccttccgtttgtgattagaggatatagaacatgatctcttaataaccaagtaattatgaacaacatttttcttgcacttaggaaccccgaggcaatgagtctgccccctccacccctccacgctgctgtgctattcgcaggtggcc

SEQ ID NO: 6928 - DNA, 291 bp, Homo sapiens
tgacaaattatacttgtacatatttagggggtacaaagtgatgttacgatttatggatacaataaataataaaatcaagttaacataattcatcacttcaaatactttaagttttttgtggtgaaagcatatgaaattaccgtcagcacttttgaaatcgacattattatttactatattcaccgtgctgtacaatatatctcataaaagaaaaccacattcctcctgtctaattgatgttttgtaccctttggtttttcattttctttctggaagttattctcaagtttg

SEQ ID NO: 6929 - DNA, 497 bp, Homo sapiens
aagttacaggtatcagccaccaagcccggcccagtattagctatttttatgatcattcagcacccatcactacactgaccattaattcatggcggccctgattaggcttgtggtcactaggtatttgtcagacaaacactgactattaggatacattactaagcgtcactgcctcagggtcccaagctatttttatgatcattcagcacccatcactacactgaccattaattcatggcggccctgattaggcttgtggtcactaggtatttgtcagacaaacactgactattaggatacattactaagcgtcactgcctcagggtcccaagctgccattagagagaggagaacagaggtgcacgctggagagacatctattatgatttttttcttccccttcgggaaggggtggcgggtggtggcagacagaaggggctggttttaaaacaataaagtcaatttggtacggtctgcttcagtgttttgagatcttt

SEQ ID NO: 6930 - DNA, 674 bp, Homo sapiens
  misc_feature (1)...(674): n = a,t,c or g
atcgaagagagccttagtcttcgaggcttttcccttcctgtgagcccctttgaggccagcacattgatttttttttctttcgcagaacaatttcggacctcctggggtctatgctaggtatgaggtgtatctttgccctccatcaagtagcaaagatggacatgtaaacaaatttcgacactgtgatgactgccacaaaaagcagcattatgaggttgaatgtaaaaggataaccttagcggcggcgggggccggaggatgaaggaaggcttcctgaggtaggcgctggttgaaactgaagttggagagagcaagtggcatttgctgaagtgcatttccggtagaaaactccagtggtccctcacctgactgagtggcgcagtcagagataaatggaacagagtctacaaataaacattttataaagatgatccttcaatacatattctacagcccagttaaaatgtgagaggccatgatctacagacagccatttataaaggtggatcagggccggacacggtggctcannnnnnnnnnnnnnnnnnnnnnnnnnnnnnnnnnnnnnnnnnnnnnnnnnnnnnnnnnnnnnnnnnnnnnnnnnnnnnnnnnnnnnnnnnnnnnnnnnnnnnnnnnnnnnnnnnnntccaggcatagtggtgtgcacctgtggt

SEQ ID NO: 6931 - DNA, 359 bp, Homo sapiens
tgaagttgtagagaaaaatggcctgggtcaatgtaggatctagaaaattaggagtgtacatttgctggcttctttttgagttttgtactgtttattacaggaacatatttgtgtggctaatctctagggtgacagtgagtactaccctgctccttctgcattctagttatccaacacacccagcagattgtgttcagggacagaatgtgtttttagaaatcccttattattgaaatgaataataatatagctataaatatgaatgtctggaggtatccagatgtgccttaacaaatgtaaatggttttcattcagaagtttacatttttattacattataaaatctcatccattgggga

SEQ ID NO: 6932 - DNA, 655 bp, Homo sapiens
cggatgcagaaatagaattatgttagagaaattattaaaagtttaattccagtaggcagttggagaaatctgaaactaatttgaaaaacttttatgctgtagtctcattagaatcattttaaaagcactgttcttgcatttttcctagactacagagagtgttctttgtcattttttttcctattctgttgtgaagtttattgtttcagttatttgagggaaataacctcttaatatgtttattttcctgaactaaagttttcatgtagagaatacaattaaatgttttgtgttatgacccaaactggctggaagtagagttcagagagggagaagggacaagaatcagtgtgggcatcctcaggaaagtggcgcccagtggctgggctccagccttctccactggcatgatgggtcctcagattctcctctggataatgagggtgttgggcactgtgagctctgacttctggggaggataggccatcatggactccatacacaattttgatgggtatcagttctcataaaatacctgctacaatttatttattttgtagttgtttagaaaactgtgagcagttgggcattagtaaattgtagttatatcttaacgatcttgggaatcattgaaatatgagtttttttccctcac

SEQ ID NO: 6933 - DNA, 396 bp, Homo sapiens
gtttcctttattataaaactgtagcactctcagtgagttctgtgagccattctagtgaattactgaacctgagggaggtcatgagatcccccaaatttgtagtcagctaggcagaagtacaggtagcttgggatacctgagattggtggctgatgtcagatgtgaaggcaatttggggactgagcccttcgcatgtggggtctgtgctaactccaggtgtttagtatcagagaggaattgaagtgttgggcacccagttgaagtcatagaatcagtgtcagagcatacacaccattatcacaatccaatatgaggaacctttgtgggagtgatggaaatctgaaatctttcagttctttactttacctgatcttctttggcagcactgggacatgg

SEQ ID NO: 6934 - DNA, 412 bp, Homo sapiens
gggaataagcttgcggcccgcccgtttttttttttttttattactttgttacccttgtccacgtatttgtaagcccatttaaattgactttgataaaagtaacattctttagagaatcttatcttccttttatgatttatggtttatggccttatttttaggcatctcaacttgaatgtgagaccgaagcagttgtcatccttagtaagaaacggtgtccctgaagctcttcgaggagaagtctggcagctgctagcaggctgtcataacaatgaccacctggtagagaaataccgcattcttatcacaaaggagtctccccaggacagtgctatcacccgggatattaaccgaacattcccagcccatgactactttaaggacacaggaggagatggacaagattccttat

SEQ ID NO: 6935 - DNA, 209 bp, Homo sapiens
ttatgttctttctggcttcccaagtcagtaaggtacctcaaaccagggagataaaagtgcctgctttgagcattgctacccaggtgctgaaggtgaacatgggtgggaatctagggattttgggaagcagacaatgggcttttagcttaagcgcattcttcaagcttcagtggacatctaggtctcaggataggactttgaggcccttg

SEQ ID NO: 6936 - DNA, 459 bp, Homo sapiens
cttcccaacctaacgaaaactcacaaggattacttgggaccattcatcctcaaaaaagataggaggcagtggtttgttttagtcttcagatatttttgttttggtcagtccctaatctgtagttttgaaactcgtgccacacttgaaagggaaacatcctactacctttccttcctctccatttcccacaaaccctttccttcatcatcactccctgcattcttacttctcagcatataaatacaagacccttctttctattatttgttgaaagctaggcctgtaaaatagagatggacagaccatgcatgtttccatgaagctatttaatgctgctcccagtcttctgtccataccattccttccctgcccctaggagtggggttgaggtctgtgacatgcagactgtaagcacagtcagaacctctgcagctctcaacccaacagaggagactgtgg

SEQ ID NO: 6937 - DNA, 97 bp, Homo sapiens
gcagggcgcaggttggagtgaatggttatccttgattacccaggtgggccctgtctaatcacaggagtctgagaacgtgacattgagaaccttttag

SEQ ID NO: 6938 - DNA, 362 bp, Homo sapiens
ggcacgagaaatcaaacgcgtcctggcctgtcccgcccctctccccaagcgcgggcccggccagcggaagcccctgcgcccgcgccatgtcaaagaaaaaaggactgagtgcagaagaaaagagaactcgcatgatggaaatattttctgaaacaaaagatgtatttcaattaaaagacttggagaagattgctcccaaagagaaaggcattactgctatgtcagtaaaagaagtccttcaaagcttagttgatgatggtatggttgactgtgagaggatcggaacttctaattattattgggcttttccaagtaaagctcttcatgcaaggaaacataagttggaggttctggaatctcag

SEQ ID NO: 6939 - DNA, 350 bp, Homo sapiens
tggaaattattacaagattgttaactagaatatagacctaatttccaccattttacatgcatttttatgtgtgtgtgtttttctgtgtggtcttatcccatgtatagatttgtttaacaaccaccacagtcatgatataaaactgttcaatagaacctcccttgtgcttccccttcataatcatacccaccctgccccatccttgctccctgggcaatgattaatctgttctgtatctctaaaattttctaatttcgagaatgttacataaatagagtcctatacaatgtagtcttttgggattgacgttcttcaccaaatgtaatccttttggagtcatatctgggttg

SEQ ID NO: 6940 - DNA, 699 bp, Homo sapiens
  misc_feature (1)...(699): n = a,t,c or g
aaatatattgcagcttaagtgatttagccagattctcctccccacatctctccaggacacaattgtggttatcagttaggacactcttcactttgttttgataattctgagtgtgcaaggatgcttagaagacagttcttcctcctcgctccataggcttcccaaggagcacacaccaggacatcaggatgagagtcaagccaggttccctgtgcacacacatacacatgcatacactcatgcacacacacaccaccaccaccaccaatctccagccttggttcatcacccagaatgactggatagagttagatgtagaattagatgtctaggaatttccagggttattctagggcagaggtattcaaactggtggccacctgtgactctgcctgcctacaaatgaaatgtgtttggtcttcagaatgcttctgataaagttcagttaggagcccacatttaaatatggcaaggttttacatagaaacctgaattttcaatttggaaaatctggaagctgcagcaatcctgggccacatttccttatggtganacttggttcagcccttttgaggcaaagcacgtcctctgagttcactgcagccttgcaatcccaaatttatggacagtttcagggcagcagtacttctttcacacacagtgctaatatcaatgttttgaatgttcctattagatccc

SEQ ID NO: 6941 - DNA, 44 bp, Homo sapiens
caggaagtcctgatggtcccagttttctttgatggccacatctg

SEQ ID NO: 6942 - DNA, 293 bp, Homo sapiens
gctttttaaaagttttattggaacatagccatgctcatttgtttacatattatctatggctgctctcacactggaatggcagagttcagaaattgtaatctgtatacctaatgtcatggaccacaaaggctaaaatatttactgactctttacagaaatgatttgccaacctgtctagattttttaaaaatagaaaactgacattaaaaataaaagatgccccaagataattgaaaacatatctacacaaaaatctgtacatcaatgttcatagcagcactaatcacaatagt

SEQ ID NO: 6943 - DNA, 78 bp, Homo sapiens
cctggccgatttttcactaaaagaacataatctctaacaatgtctatttttcaaatatgcttaacatcacagattgtt

SEQ ID NO: 6944 - DNA, 619 bp, Homo sapiens
gctcgactttttttgctagtcagattatttttctaaacctatcttgaaatcatgtcaattttcttttgtctggttcaagacaactaaatcacttgataatggttttgctcaggtcacattgtgacaaggttttagtgtagccctacttcgcagaaggaggcagaaaagacggactgtctagaaccccctttaaaagcatttgtctattcagaaaattttcctgaggtagatctctccaaagtctcttttaattgtgatttcaaggatcacttttgcagggactctgggtctatttgttcaggacatctactgtggcacaattacaaggagactagaactgaggcatctcaaagagcactgtcaaggtgtgtagggagccgggtgggtggagggaggctgggctctgaccctagaaaccatgcttatgaatgctgttaatgtttaaagcaagcctaagggcactgctgaaggacaggggaacaaatagaatggaccaagattgaggtataacaagaactcccaggctatccacctgctcaaggtaaaaagtgtgatattacatagggcaacctctgattttgtgagagttcttcctaaagtcacagtgtatgcctattct

SEQ ID NO: 6945 - DNA, 442 bp, Homo sapiens
aatccagttccagattctagacttgagggttctgggctgttggtctctagaagcgaaggagagaaggactcaaatccaggccaagtgtatggctgtctgaggtattggaacagaaggaggtccattcctgttggtgacaacaccgtggccctgttctgggatgagcaaggtgtaaaggagctgtgaaattagttgtaactgaaaatgtctgacggtctggataatgaagagaaacccccggctcctccactgaggatgaatagtaacaaccgggattcttcagcactcaaccacagctccaaaccacttcccatggcccctgaagagaagaataagaaagccaggcttcgctctatcttcccaggaggaggggataaaaccaataagaagaaggagaaagagcgcccagagatctctcttccttcagactttgagcatacga

SEQ ID NO: 6946 - DNA, 360 bp, Homo sapiens
taaaaacaaaacccgaaaacctactttccaaggatgtaagcaggaatgaagcttgccttttattttttccctagtggattttgtttaaatttgttttgccctaaatcgtcaggcttatgatcacacatcgaagtcttggattaactgcgaaggcctccttctatttgccgcggctttggtggacatataggaataattcttccctggattgcaatacaatgcggaagattttctttctcctcttctaatccaaaagaggggaggggaggaaagaagaggggaatccatccattcccggcgtgttcgcggggggttaatgttgcgtgttcgctgggggttaatgtttgccttatgaccgag

SEQ ID NO: 6947 - DNA, 147 bp, Homo sapiens
gacttcagatttataagcagggcaactggcaacagaatccaaatgaattctaacgttgtcaatcagaaatactttagcttaaaaaaaattaaaacacataaattcagcattttggttcaatctgaaagtctgataatttgaggttac

SEQ ID NO: 6948 - DNA, 176 bp, Homo sapiens
tgccagacccagctggccctcagggaaagcagcaccctggagcccaccccaacagctgctctcattgtctgtggctcaccgtctgtggcttctccgtatttgccacacatatatgactagatgaaaaccttttctgacttaggttgtaacaaatcttttttcatgattgatgagac

SEQ ID NO: 6949 - DNA, 472 bp, Homo sapiens
agacaagccaagaaatatgtttctttattttcattcccatatagcagagatggaaccaggacagtgatgctggaaaagcctgcctcgatcaagtcatcacataagttaatgtcagaaaacctgtatttgaatttgactcctctatccttactctggaaaattggacatcttgacccagtggctgtgagggctaaattagatgatgcagaaagtgcttggcatgcagtagatatgcaaaacaataacttatgacactctccaagcaggggaaaaaagtcttcatgccttctaactaataatacaaacgtatgcagtgtctttccaccctggcttgagtttaacaaatacaaattgaatagaaaaaattagtcaaactccataaacaagtttataacaaatacaaatctaatcgaaaaaactagtcaaactctataaatccaacttgattttaaaattctagtggctacaacac

SEQ ID NO: 6950 - DNA, 351 bp, Homo sapiens
aggtgcctccgtgattcctggcacggagcaagtgctcagtaattgtcagctgtgagtattagtagtagctaatacactactactattcttggctaacaagccagctcaaagctttgatagttttccattacctgatgatggtgatgatggtttccacttcctgaacactcacacccctgggctaggcacttaacccaaatccaaggtcagcgttattgtttgggggtgggggagacacctcctgctctgactcgtgtgtttgggttcccgtattttcaccagagggtgttagtcctgccccagttcagctggtcctcaaagcgtatatagctctttaaccgtcagcaagtg

SEQ ID NO: 6951 - DNA, 420 bp, Homo sapiens
gtatgtattgtatgaatgaggtttggggtttctgctctcctaatgcctttctgtactatatgaacttttcacagtaagcacattttatctttataaatagaaataaaatgcaaataaagggtatatattatctgaatgttttaattttttctatgatatcctagatatttaaatgatttttatgagttggagctacagcatggctctggtgttgtgggttggagcattccagtgactaaaggggttgtgccttctccaagagaatcccacacagctgttatatattgcaaaaaagattctggaagtcctaaaatgtatgtttttggtggaatgtgtggtgctcgcctggatgacctatggcagcttgacttagaaactatgtcatggtcaaaaccagaaactaaagggacagtgccactt

SEQ ID NO: 6952 - DNA, 742 bp, Homo sapiens
aaagggaagtgcttctctttggctttttcttggttacactgcagtttcaggattgggtgagacagagacaaatgaacccccctctaaagtcatttaactaatagccagcacatcccttccccaaactgtcaattgaaatcttaactgaaagttttactgaataataccaagctaattgctgttgggcacacctggatgggctttgcacctggtgttgaacctgctgaagcaggtggatgctcaagattacgtgcaaggaatccctcccatctggtactaaaatttcagtgtgttctgagtgtcttttaaaccaaaatggaaatacagatacagggctgtagtattcagtaatgtgtctgctccttgttgggcagacaccagcggtgtgcagggagagaccaagtaccatctttatctacacttgggctggcttgtgggagaagggctgctttttttcagtcctacattccttcattttttttttcattcttgaattcattgttttgtgggatctaagacccagggggtcatttgagaggtttgacagtatcttttctgaccagttgccacatgacttgcttgaccctgagcctgtggaaatggcatagggaccagtctactaccccactggggcctgggtgtgtagagggggagagggtagcaaggtgcttctgctacggcccatggacttgggagcaggtcttgggcctccttcatggaggagtctagtggccatgttcct

SEQ ID NO: 6953 - DNA, 177 bp, Homo sapiens
ccagttttcagggagatggtggtcatcgtgtctgcagactaggtttgctccctgggtgtggtccaactttctttctgacttgccgtcctctctgggtctccctgcagaccccaggttggcctcctgcctttctgctttctctggccttatctctctctctctctctctctggttcca

SEQ ID NO: 6954 - DNA, 318 bp, Homo sapiens
ccccttaatttgcatgtagttaaaagtgggtataaataggattgcagagctgctgctgagctgctaactctgggcacactgcctatggggtagccctgtccacaagaagcagtgtacctctgctgctgctgtgcaatgctgcttcaatacagtttgctaacaccactggatcgcatcaaggcaaagccaagaaccctctcaggctaagccccaattttggggattgcctgccctgcatcagaggcatcactccagtctctacctccaacttcacatggcatactcccctgtgtcttctgtttccaaatttccctcatc

SEQ ID NO: 6955 - DNA, 302 bp, Homo sapiens
agtgtaatattttttaaaatttaaatatatgattgaagtttaatgtacatggggaaaagtacacaaatcatacatatagagtgagaaatttttatgaagtaaacataatccatgtttacagtatgtatccatgtttatctcctacccagataaagtagtaataccttgctgcctgcatcttggaagacgccctctctcagcgcgtcagaaagtcgcacatagtcaccacccagtagtttctgatacatgccatcataaatcatacatagtttgaaatcatactaattatactcttttggaaa

SEQ ID NO: 6956 - DNA, 164 bp, Homo sapiens
acatgtgtccacaaaatgacaatttgtatgtttataaggaattcagtattctgtatcagttactttttccaaataaatccaaatatttaacatttaaaaaaatgcaatctaaagtataccaaactgtaacttacctagtaaatgagattagaaactaaaaaaaa

SEQ ID NO: 6957 - DNA, 349 bp, Homo sapiens
  misc_feature (1)...(349): n = a,t,c or g
acagtatgaaaataagaaaaaatgtattgcagttttaaaagaaagaagaaaatatgtatgactttagattggagtctcaggaaagttctgaaaagagggtggacaaaaggcttcagtatccttagggcacagtaaatctatttattcctccaccaacttgaagcctaaagccaaaactgtcatgctgtcacatagacaaacttcttcaagacgtaaagctgaacttctcctaccttaaaatgaatgcaaactaccgaggaaataggcaaaataccgaggaattaacaaactggagggtttttttgccttttcagtacctcttaaccacagcgtttttggagctggnttt

SEQ ID NO: 6958 - DNA, 336 bp, Homo sapiens
  misc_feature (1)...(336): n = a,t,c or g
aaatactctccccctattattctcaccctttaagactcaggacagtcattcctccttgtaccacagagcccttcccgtgacccacgagcttgctattgcacccagaccccaaactatcaaaataccccaaccgctgctatcatacccagaaccaaagtacccaagtcacaggacttcaccctgtcaggttaaatgactgccaacttacatagcactcaccaggtgccaggcagttttttaagcacttttcatatatcaactcatttagtcctcataacaacctacaagcagatattattactattttttctttttattanganggacacagaggca

SEQ ID NO: 6959 - DNA, 329 bp, Homo sapiens
acatgtgtacactataaatagaaaccacgagccaggctttttacgacagctcagaatcttgtgacgcagtagtcaggcatcttcacaccgacttgaatattgaagtgcagttgtgtggaacttggatcatcttagttgattttgtttaaattatgattccacatatgacaaaaatccagatccactaattaaaatgagggtttatgtctatgaataatctcctgtgggtttaatctcataacattctagtctaaacagttggcttcacttcatgatgtctgctcaaatcctttttcctttaaaggatgtttatttaataaaaaaaaaag

SEQ ID NO: 6960 - DNA, 172 bp, Homo sapiens
ggcacgaggggtctccttatgttgcctaggctaggaattctttatcttattccaggactttgaggagaggtctgtaaactgaaatttgacagtatttttttagaaagtattttttaaatgtattttcctattaatttgaaaattagaatatttaaaactttttttttttttt

SEQ ID NO: 6961 - DNA, 277 bp, Homo sapiens
  misc_feature (1)...(277): n = a,t,c or g
tgtgggaagtgagaaacacgtttcggagtcgcagggagctctgtctggcatcggtggcacagatggtgaacntgtttcaggaantgtgagcacgggcctggctggcacccggtttacagggaggtgantgaggacgtcgttatgatttgatntgaccntggcacacactgcagagccacagggatgttgctgaatttcaatcaccgatcagcaaggatgaaccttctcaacttcctaggaatgtttagcagcaacctnatatnccaggcaaaactcc

SEQ ID NO: 6962 - DNA, 381 bp, Homo sapiens
cccagccaatttctggagactttaaatggctaggttttttaaagttaacttttactgattacagttgttctgaggagcaggtccatggatctcagactgccattgaagtagacctctcaagtctcagtttacattttcttctttgccttttttttttttcgtttttttcttatttctttctgtgcacaatttgttgaaaaaatcaagtttgccctgtgagttcgtcactgattttgcagattgctttcatggcttttaacatgaccctctgtatattggtagttgtatctagagtagcactatgcaatagaactataatgcaagtcctatgtataactttaaattctctaatagttacaataaaaaagtaaaaaaaaaaaa

SEQ ID NO: 6963 - DNA, 442 bp, Homo sapiens
  misc_feature (1)...(442): n = a,t,c or g
tttganatccgnnnnnnnnnnnnnnnnnnnnnnnnnnnnnnnnnnnnnnnnnnnnnnnnnnnnnnnnnnnnnnnnnnggcacgaggaatgggaacccccacagcacccctgtgagtggtcctccggcctttctgacccagggctggggcagcacctaccaggcgtggcagcagcccacacagcaggtcccaagtcacgccgccagcgctgctcctcaggccagctccccaccggactacacaatggcctgggcagaatattacagacagcaggtcgctttctacggacagacgttagggcaggcgcaggcccacagccaggagcagtaggacagcgtcctcgtggccaactctcccctcaaaatcattgtcaaagaaaacctatttgtaacagaggtttttacatttgcaaaccttttgatgaagaactgttgtttggtctg

SEQ ID NO: 6964 - DNA, 341 bp, Homo sapiens
tcctttcacgttcaaaagcatctgggggctcctgggggttcagcggtgatgatacactatgtttggttttgctccagtccttgtgtgtgtctgtggccacagactggagcacagtgtgcttgctacttgacttgacttttgaggctctatagaggagaataatcgtgccttatggaaaggctaaggtcttttcctaggtcccctcccccagggacatcatcacaggtcaaacactgtttctggggaagggccagtgccccttgaagggtgctccctgctttcgggaagtgcctaaacacagggaaacatggccctcaggacatgggggggctggcactttt

SEQ ID NO: 6965 - DNA, 480 bp, Homo sapiens
ccccagacaggaactttgatagagccttttcttacatatgccgtgatggcaccactcgtcgctggatctgtcactgcttcatggctgtcaaggacacaggtgaaaggttgagccatgcagtaggctgtgcttttgcagcctgtttagagcgcaagcagaaagcgggagaaggaatgtggagtgactgctacttttgatgctagtcggaccacttttacaagagaaggatcattccgtgtcacaacagccactgaacaagcagaaagagaggagatcatgaaacaaatgcaagatgccaagaaagtgccagaagtagaaggggaggcagagagcatcagctccctgtgctcacagatcaccaatgccttcagcacacctgaggaccccttctcatctgctccgatgaccaaaccagtgacagtggtggcaccacaatctcctaccttccaagctaatggcacttgactcagccttccatgt

SEQ ID NO: 6966 - DNA, 720 bp, Homo sapiens
  misc_feature (1)...(720): n = a,t,c or g
gcacgagtgaaaacagctattctctagatgacctggaaataggcccaggtcagttgtcatcttctacatttgactcggagaaaaatgagagtagacgaaatctggaacttccacgcctctcagaaacctctataaaggatcgaatggccaagtaccaggcagctgtgtccaaacaaagcagctcaaccaactatacaaatgagctgaaagccagtggtggcgaaatcaaaattcataaaatggagcaaaaggagaatgtgcccccaggtcctgaggtctgcatcacccatcatgaaggggaaaagatttctgcaaatgagaatagcctggcagtccgttccacccctgccgaagatgactcccgtgactcccaggttaagagtgaggttcaacagcctgtccatcccaagccactaagtccagattccagagcctccagtctttctgaaagttctcctcccaaagcaatgaaaaagtttcaggcacctgcaagagagacctgcgtggaatgtcagaggacagtctatccaatggngcgtctcttggccaaccagcaggtgtttcacatcagctgcttccgttgctcctattgcaacaacaaactcagtctaggaacatatgcatctttacatggaagantctattgtaagcctcacttcaatcaactctttaaatctaagggcaactatgatgaaggctttgggcacagaccacacaagg

SEQ ID NO: 6967 - DNA, 210 bp, Homo sapiens
  misc_feature (1)...(210): n = a,t,c or g
atttacagttctnacaccttctcaggtgatgctgattcagagatcacactttgagaaccgctgctccagaagaattacctacaagaaactggggagtggaggctctggcaagaggagtcaatgtggttacaactctccagtgcttggcctcagtggattctctttggagaagaaaaagaaaggagccagttttcttttttccacccaaga

SEQ ID NO: 6968 - DNA, 372 bp, Homo sapiens
tagctcttgtgtagcctaacatttccgcctgaatgtttgccattttgttctattctgtaacattgtttttgacctctaatttcattttgcaatgatctcagcactgggtttatctttacaaatgaaatggtgagaaacgctttgcgtgaatcttcacaactggttcaatcacatgggacagtggaatcagagacatgaggttgcgggaaccattatggggttagaatggataagggaaagagaaagggaaaatagcagaagccatgacgttgctccttggtaggtttgctttgtatgacactctttttcttctgtcactgcatcagacagatatgtttagatacaccatgtattaataaatggtttcctcgg

SEQ ID NO: 6969 - DNA, 444 bp, Homo sapiens
taaaacaatccatattatttatttaatcctaagtatttttaaacactgctatcatgctacttcacctaattctggctgctgttcatttggggaatgctatattggactattcttgaaacaatatatataaaatcaagcaaggcacgtgacagtcaggctttaggttggagccaggcctgggaaaatgtttttcaaacaattttgtgtctatcctttcatcctgagctggaactattgagaatgtgatagaaaaatgcatcgagtggcttgttgggtcttgtaagggtcctacgactctcatactctgtaaatggaatgtgtggagagggttaggagagccttcaggtagtactagagatgctggagcctctgaggacctctgcactgagattcctaatgttaatctggcctctgccatcactgagggtacccggggcttggctt

SEQ ID NO: 6970 - DNA, 345 bp, Homo sapiens
gtggaggatcaagatttcccttatggatgtgtgatagttgagttgtctattagtcttccaattggtgataattggtagataattagatatgagtctaaattttagaggagaggtaggagctggaaatatgtgttcatggaccatgcacatatacatagaatttaatgccattgggcttcatgagatcacagaagcatgagtgcacctagacaaacggttgagaactgagacctgggatactcccttgttaaaaggtaaatgttccttctacattttgaatttatagaaataatgacacagtagccagttgctgaaacactacccagttcagagtaacaaaattcc

SEQ ID NO: 6971 - DNA, 535 bp, Homo sapiens
  misc_feature (1)...(535): n = a,t,c or g
acaacaatgtacatagtgtagaaacactaacagctgggagaggggagccagctgtccagccagcatgttcctgttgtacagcccggtctccctgcgcgctctgctccttcccatgtgcagacagatcagggaggaacctccaatgggtgggggacagtgagcttcggcctggccgaggtgggtgggtgggctctcagattcagctctgtgtaaagattctctagcgggctgcgctcccaagttcccctgctctgtgaaagtgaagaattagtacagctgtgttttttaaagccacctctctgtctccaccccatgggcccacacccaggtgggggaggaggaagccactgcatctgttggctcagggccccagcctgtgcaagcagggcgcctgggctgttgtgtctcctgtctgtgccgatctctattaaaggactccctcttggtgggcctggccgagtccctcctttgtgctcccagggactattttntcctcgtaagccaagcgacctgcctaaagcttggggctgtgcct

SEQ ID NO: 6972 - DNA, 490 bp, Homo sapiens
ggaaacatggcggccgcgacgttgacttcgaaattgtactccctgctgttccgcaggacctccaccttcgccctcaccatcatcgtgggcgtcatgttcttcgagcgcgccttcgatcaaggcgcggacgctatctacgaccacatcaacgagggggtgagggcctgtgccatccctgaccttggacccgcctgaggggtgacagtggagtagagaagctgtggaaacacatcaagcacaagtatgagaacaagtagttccttggaggcccccatccaggccagaaggaccaggtccacccagcagctgtttgcccagagctggagcctcagcttgaagatgatgctcaaggtactcttcatggaccaccattcgctgttggcaagaaacggctttacttacaaaacagactctttaccttctgctgtgtttgaagtatgtttagtcagcatgctcaggaaataaatgtgaattgcccttgaaaaaaaaa

SEQ ID NO: 6973 - DNA, 355 bp, Homo sapiens
attcggcacagcacagtgatagaggaaaaaatgataaagacaaccacataggtcaagaaagggctgtttgaggaagtgatagtgtttaaactgggattagaagaataagcgctcacaagaaaagtgggttgaagagtattctaggcaaagtgaatggctgtacaatatttttttctgtaaaggaccagatagtcagtatttttgtttttctgagccatacattctcaggcacagctcctcagagtctgtttttgtagcacaaaagcagcaacagaccaaatgtaaatgaatgaacatggcagtattccagtaaaactttactttaaaaaggcagcaggctgagtgcagtggctca

SEQ ID NO: 6974 - DNA, 509 bp, Homo sapiens
ggcagctcggactggtcatacggccttgagaagggtagtctcgggatgccgtccgaagtcggcgacagcggccggggcgcaggcgcccgtgcggaatggcagatatttagcttcctgtggtatactgatgagcagaactcttccactacatacctcaattttgcctaaggagatatgtgcacgaactttcttcaaaatcactgcaccattaataaacaaaaggaaagaatattcagagagaagaattttaggatattcaatgcaggaaatgtatgatgtagtatcgggagtggaggattacaagcattttgttccttggtgcaaaaaatcagatgttatatcaaagagatctggatattgtaaaacaagattagaaattggatttccacctgtgttggagcgatatacatcagtagtaaccttggtgaacctcatttagtaaaggcatcttgtactgatgggagacttttcaatcatttggagactatttggcgttttagccaggtctt

SEQ ID NO: 6975 - DNA, 529 bp, Homo sapiens
  misc_feature (1)...(529): n = a,t,c or g
atacgcattcccccattccctctcaggcataaggaaactattttacataaatagcaatttagtttcattgctgttctctagcttatcttttatttttactgaatcagtagtataggtgtctcttttcatgtttaataaaaatatatcaactcataatttttaatagttatacattatgatatgttccacagtccacatgaccaaatccctactggtagatattttacttatttctttttttaaaatactataataaaaaagtgctgtgctaaccttatctacttgtgtcatttttcttcttagctttaattcctagatgtgagtttgctagatcaagggcatgcttattctttgcttattcttctcccgtctcctcccgtttttctccttcctgcctgcctgcctgcctgcctttctttttcttttccccttctccttccctttttcctttctccttttaccactctggagtgcggtngcatgatcacagctcactgtaggccttgatcttctggggctcaaggtnatc

SEQ ID NO: 6976 - DNA, 495 bp, Homo sapiens
tagttattactacattatgttactatgtattaggctgtctaggtgaggctgagaaacacttgatgacagtatttggtatcctccagaatatactgggaatacggttccaataacacataggatggttcctcggccactctgagccatcgtcaatgaatccctgtgaacactcctctagcttagttatgctgttcttttaagtttgtctttgagttgggaaagtagacctatttggcttggcttaagggctaaatgtctcctcttcacttggtcttctaatcctcagtccttcctggctatgtggcatcatgtctttaaagcagggagagtaaagtatcaatattttaagaaggaacattcttcccacttacgttttctattcttctttcttttgagcctttcctagaaagagtaatgctccagccttcaaccagaaatgaaaagtccatcttccaatggtttaaacttttccatatatgccctcatatatgtgtc

SEQ ID NO: 6977 - DNA, 588 bp, Homo sapiens
acccaaccgcggcgaccggacgtgcactcctccagtagcggctgcacgtcgtgcaatggcccgctatgaggaggtgagcgtgtccggcttcgaggagttccaccgggccgtggaacagcacaatggcaagaccattttcgcctactttacgggttctaaggacgccggggggaaaagctggtgccccgactgcgtgcaggctgaaccagtcgtacgagaggggctgaagcacattagtgaaggatgtgtgttcatctactgccaagtaggagaaaagccttattggaaagatccaaataatgacttcagaaaaaacttgaaagtaacagcagtgcctacactacttaagtatggaacacctcaaaaactggtagaatctgagtgtcttcaggccaacctggtggaaatgttgttctctgaagattaagattttaggatggcaatcatgtcttgatgtcctgatttgttctagtatcaataaactgtatacttgctttgaattcatgttagcaataaatgatgttaaaaaaactggcatgtgtctaaacaatagagtgctattaaaatgcccatgaacctttaaaaaaa

SEQ ID NO: 6978 - DNA, 382 bp, Homo sapiens
  misc_feature (1)...(382): n = a,t,c or g
gcccaaaagtatggagatcctcacctgcaagtcttggggagagggtgaaatggctgaaatctggggaagaacccctggagctttctagtctctagtgcccagggatagtgacctcagcctcaaaatgagcaacttgagaaaggggcgcattgtgtagacgtggaccgtgggtttgcgctggtccactcataccagtatattttaccttatactaaaagcctctctgtgggctgccatacatagagttcatgtagtggcctggcctgtataactgttgatagtatgatgtgggtaatggttcagtagnaantctctgagaaaatggggaaagggatcagctttaggtttcttacttgcaatttaatttgacctaaaaatacaa

SEQ ID NO: 6979 - DNA, 373 bp, Homo sapiens
accctgttttctactgatatatgtatgtgtatggctacctgaatccaggtttcttctaggaatatacagaaagtaattgatttctctgtggatctctaacagtgacaagaattttcacctatgcctgtgagaataccttcaaaagtattgggtgctcatcataaacacacatcagtttaacaaactcttatggatgcattgactttcccagttagttgctagatgacttcggatgatttgcataatgggtctcagtttccatatctgttaaatggcaataatcagaggaattttaaaaaatttaaggacacctggaaagcttgaaagatccctaggaaagcatgtgtttattccacatagtgggaactatgct

SEQ ID NO: 6980 - DNA, 1048 bp, Homo sapiens
ggggaaagaatccggccctcgaggccaagaattcggcacgagggcgacttggcctttggcgacatcttcctccacctgctcacgggcaaccttgcgctgctggccgacgaatttgcccttgaggacttctgcagcagcctcttcgatggcttcttcctcaccgcctctccaaggaaggagaacgtgcaccggcacgcgctgcggctcctcattcacctgcaccccagggtggccccgtctaagctggaggcgttgcagaaggccctggagcctacaggccagagcggagaggcagtgaaggagctttactcccagctcggcgagaagctggaacacgtggatcaccggaagcccagcccggcacaggctgcggagacgccggccctggagctgcccctccccagcgtgcccgcccctgccccgctctgagggccctccagacctgctcgggtgctggggccatgccgagtcgcggccctgctcagccggaagaggctcccggacctggatgtacagggcagtctctcttcccggggctatggctgggcctgtcctgccgtcatggccccctgcttcctgctccttggagctggctcccggaccttgcccaccatccatgcagtggctcccagggcagagcctctccttgtactttggcagccatagaaagcgtgctcattttctgttttcctgtgttaggaaaaaaccacctgttttccaaggggagagggcggggcctgagggtgggggcggggcctcttcattggcccagcttggcgaaagcgaggcacactgcttactgccttggggttgtggagatggacccgtgacctcgtggaggccgtgtgggggcagcagcctggcctgtgccatggtgggtgtcctggggcctgtgcggagggagccacctcaccctgcagcccaggttgcaggtgtggccttgtttctccttgcccagcagtgctgccttcagcggccgtgacggggccagctggacacacggtgagattttctcgtatgtaaataaaaggcaatttggtaaacgtgg

SEQ ID NO: 6981 - DNA, 395 bp, Homo sapiens
acaggatctccctttgttgcccaggctaggaaaatactgcttttggtttttagttgatctctttgttaatttttcagcttctcagcccccacctctttaactaaatatcttaattttaccgtgttgggagtcaatgaagtataataaaagttctgggctttaaaaccagatgagcccaagttcaaacctgagttctgttgctgactatagctatgtgattttagacatcattcacacactctgagccaaggagttttcttcagaaaaatggatatagtaatacctaccttacatagaacaggtgaattcttgttctagttacattagggatatgtagcttaagtgaattgggaagtaattttgacatttgggaattttggcttcattaggttttt

SEQ ID NO: 6982 - DNA, 613 bp, Homo sapiens
caaggaattagtggtagctggataatggagtcgtgaagtgctggagggattccgtgtagaacttggggatacagatgggtacggttgccactggctacaaatctaacaccaggtgttcctggcctagccccctctgcccatgatggcacatacttaaagacagcaaagatggtgcgtacctaaagacaggaaagatgcaaggactgttttgacacagacatgggttcaagaaatacttccctttcttctttgctgtactttaagataaacaccaaaaacactaaaagcaagccatgatgaatggctactcatgcttggtcaggagctgatgggatgagtggccggaccacagtaagttgggagttctggctccggcccaactcccaacaactgcgactttctgagagcctaggtgaacttgcgaaatctttggatttttcaagagatgccagaaacctggattttggtgcaaaatatccctttagatcttcatcactaattcttatcacttaaaaacactgcctgggcccaaatcaatacagcaactgcaggcgagatccaatacagggtcactggttttttaggttgtgcagcaaaaagacaatgaaggcca

SEQ ID NO: 6983 - DNA, 595 bp, Homo sapiens
tttttttaaaataaaaccaacttttacttctctcttgccaccctttctctccaactccagaaaacctgagtgctacagaccactgtttgcaaactcaaatgaccataggaactcagcaagtcatataaatgagcgggaaatgccagatggaaaggcctatttggacagagacatgggtctaagaaatacttccctttcttcttcgctgtactttaagataaacaccaaaaacactaaaagcaagccatgatgaatggcacgtggtgcttggtcaggagcccacgggagtggtggggatggggtggccgggccacggtgaattgtgagttctggctccggctcagctcccaacaactgtggttttgtcggagcctaggtcgagttgccaaatctttggatttttcaaaagacaccagaaaacctgtatttggttgtaaaatatccttttcaattttcactactaactcatatcacttaaaaacactgcctggactcagatcaataaatatgacaaccgcaggccagatccagtacacagtcacaggattttaacttgggcagtaaaaagacaatggaggtggtgggtgcctgtagt

SEQ ID NO: 6984 - DNA, 200 bp, Homo sapiens
ttcttttactctcaattccttctattaatataccaccttccatcccaccaatcccctcaaaattatacagtgatatccaaatgcctaatggttcaaggagaggagagaaacaacaaaatactctcgttgttgttcttggatccaaatcattatcttgctgcattttccctatcatagcacactcccaatttctttcatga

SEQ ID NO: 6985 - DNA, 687 bp, Homo sapiens
  misc_feature (1)...(687): n = a,t,c or g
tgaaaactgagtgtggcttttcttgttgaactgatcattcctgctcttcctgcaaataagtcctgcatacggaccctggaactaaaaatggaaaatcagagcatgccccctcccaattttgtatagctttagtgggctctaaagttgcccgtttttagtgtgaaggaaaaaacgttgatttgcagatatcgtgagaatgaaacctcaacaaagatgtttggttcagtgcttcaaagttgggggacactttttccatgttgaacaaatgccaacttctccggttgcttacagcaaatccttctggaacaatcggggctgaaattgagttgcctttgttaggcgattggggccccattcattcttactcgtgcatcaggtcctggtctgtgtcaggcccaggggacacaggtggtcccagctcagaggcccagtgtccactgcagcccctcccacagcctgcccacccctactgcagggaaaaatgcccaggggagnagatggtccaactcctgatcagttttgtgtccgatggagcaggccttgctgagtgtaagacactggaactagctgggtcngggggtgaattggagggtttgggcctaaaagggcagctngaacntgggatttttattttnccccaggagccgaaagcatttttntttgattttncccccaggaaattaaagc

SEQ ID NO: 6986 - DNA, 362 bp, Homo sapiens
gtcttggaattttacagatattgcctgtgttcaagggctgtgctgtactaagcagtggctgctggcacagggaaaggtgtaattctctcctgggttgtaggagttgcagctcatgcagagagtcctctgtgatggaggccagtcagcttttatggacttcagtgctatttgctccagtaccctttgaaatgcagggtcagctcactgagctacatcgtgcaataataacacatttttataggagtagcttgtcagagcagcaacaacatgcaatacataaaaccaataaacacaccatgttacagagtctatcctagtaaacaggataaagcaataaaattgacagcagccatcaacaagct

SEQ ID NO: 6987 - DNA, 349 bp, Homo sapiens
ctttttttaacttgggaaaatacgttctaagcatactttttggagtaaaacctgttcgaaagttggagactgcctgtacccaggttgatagtcaattgtttttaatgctagtaaatcttaacactaatacaagtaaaaatatttgtgtggaaaactaatcctttctttattcgggcatttttaactttataggtattaaaactttctttgtatgatcataattttttgatctttttgttttgcaagaaagtgaatggtagcctttcatttgtatgtttgattttcttaaaaatttcatatttattatgttattttacaaatgaaaaattatttgtgagaaaaaaaaaaa

SEQ ID NO: 6988 - DNA, 443 bp, Homo sapiens
ggcgctgcatttattgaagagcggctgcagccctgcagttcagattaaaatccgagaattgtatagacgccgatatccacgaactcttgaaggactttctgatttatccacaatcaaatcatcggttttcagtttggatggtggctcatcacctgtagaacctgacttggccgtggctggaatccactcgttgccttccacttcagttacacctcactcaccatcctctcctgttggttctgtgctgcttcaagatactaagcccacatttgagatgcagcagccatctcccccaattcctcctgtccatcctgatgtgcagttaaaaaatctgcccttttatgatgtccttgatgttctcatcaagcccacgagtttagttcaaagcagtattcagcgatttcaagagaagttttttatttttgctttgacacctcaacaag

SEQ ID NO: 6989 - DNA, 996 bp, Homo sapiens
aatttagcatgggacatagtcagtgtttgaagtgccaacttcatcaagtaatgcatgctttattataaataaaattctagctttgaaaggcgttatgtgttgaacagtatgcttcaggggtaaatttaaaatagtctcttgaagccctagtcatggaagtaacttttattttaattgacattctcttattaaatgccctatccatcattaaaaggattattatcagtgggcaaaacatgaaataatatgatcgaatggcaatcttgctagttgcgctacctaacagtaccatcttggatccttcaaaaccaaagacttgccccagcactgctgtggaaccacctggcttatgacccctatggatgatctttaggaaaagcagccctttacttttaatacaggctttaatgaactatacctgttaagttccaaaggtcaaaatggaggcatttgctgtctaatattcaaacatagaaagggagctgcttttaaagaattccctgcaaatactgaaagcagtcatgcaatggagggtgctcttgtgtagctggtcagggacttttttttcttttctcctgaactacatgattctaattggaatgttcatttgcctctttttactcttttaaatgcttgtaggtggcttggggtgtgctatcgtgctgttcctactcagtaaacaggtgtgatgagttaacaagaaataacactgtttgagaactagctttgaataataatttttccctttgtacatgacctgctgaatttcggtacagtgtttttgtagctaacttattttgtcatgcacataatgtatatttgttatgcactacttttgtatatcttgtttttccaacagttaacatttttagggcacacttttcactgacgggatatctctttatgcaatacctcaatttttcatattgcaaagagtagctttttgtacttttattactgagagatcttcatatacttcattttgtaatataaata

SEQ ID NO: 6990 - DNA, 361 bp, Homo sapiens
tgtccctgggctgccgtgtgtcccacaggccacaggttggaaggttgcaggttggacgagcttgataaatatatagttagaaaataccaaaggcatagtttctttagaaatcacatgtctcaaagtaaattatcttttcttggctttttacatttaaaaaatttcatgtattccctattttctataaactacaaaaaataaaaataaaaacaataataaaatttgagagttgaaagagttgggaagggtcgagtctcactccttcttttcaaagttgaggagatggaagcccagggatattaacatcaagaccattcaacttagtggtggcagagccaggattgaaacttacattctttaa

SEQ ID NO: 6991 - DNA, 222 bp, Homo sapiens
aaatggctcatagaaagcgagacccatataatttgaggtaaagatctgtagtactgtatgaaaagaggtgccttgggaacacagaggagtaacaacagctagagagttgaagaggttcccagaggaagtgatatctaagctgcaatgttttataaacggtgtcttataatacgctttttactaacctgaaatgatgaatgtaatcatttcaaactagtactc

SEQ ID NO: 6992 - DNA, 174 bp, Homo sapiens
ggagttttaaaataaacttatttggaaacaatttcaagcttacaagaagttgtaaatataaaaatagtccgaggccccatcccatatatggatttgtctggatgttaacattttaccccatttggtttgtcatttgatctgtgtctgtttttatttatttttaaaatttgttca

SEQ ID NO: 6993 - DNA, 299 bp, Homo sapiens
agcagtcttattctgttttccattcatatttgctattccatcactgggtattcctccctactcttttcatgtttcatttattttgatcaatgatgtgcatttccaattctgtaaaagtttaattcagttgtatgtgtggtaaaatgtaacatcaaatctttgcaagatgaaattaccttgcacagcatattgaacattgtattattgaaaatctagagagacgccagtgagccaaggatcgaatgacctatatgtagccaaggccgttttcatggcatcctggcctctctgcacatggg

SEQ ID NO: 6994 - DNA, 736 bp, Homo sapiens
atccatcattaagggttaagttaaaatagcttataatagtcataggatttagatttgctatttgcaagtaaatctaaaaaatgatgtatcaaatgttacaaatattcaaaagataaaaactaagaaaacagtttatataaactaataattacatacagggcatttcagctctttctgattactcttacctctgaagattttctccccaataacaaatatgtagctgtgatttcatcgtatttcatcttactaagagattcttgaatttcttcttgtgaatatcccattcccaccataatatctattcttttttggtctgagatgtctagctctggttcaacaaatggtttgagttcatcttcttcatgccctgcattgatccacctgtccttcatgatttgctctagagtgccgcgtttaattggatttagcaccaggaaacgtttgagaaggttttcacagtctgtagacatgtagaagggaattctgtatttccctcttaatactctctctctcagttcctttaggttttgcccatcaaagggaagtgagccactgactagtgtgtataaaatgacccccagactccacacatccacttctggcccgtcatatttcttgccctggaagagctcaggtgctgcgtatggaggactgccacaaaacgtgtcgagtttaccgccaacagtaaattcattgctaaaaccgaaatctgctattttaatgcctcgtgccg

SEQ ID NO: 6995 - DNA, 388 bp, Homo sapiens
aataccctggatgaaatacacaggaatacctgcaaggtccaatgtttccatggacatttatttaggagaagtcattaagaatgtattttttccctagtccgttgtgacagtatttggttcctcaggtgcatgagttttagcaggaggattgcattattcaccttctgagccttgacagaaactgcttattttccgtaatgtggtcaatacatgtgtagtttctgaactgtaaaatccacagagaattaatactttgcagttattgctagatgggataagcaagcctattatgtcagcaaaattgatgattccttaatatgggctaaagtctccacctacttaattttctctaaaaccaagacattagtggtttgctttaaagattcaa

SEQ ID NO: 6996 - DNA, 260 bp, Homo sapiens
ttgccgctgtgcaaccctccaagtgtgaagtggcaaccttgtgtgtgatttttctgccctacccaggtttgcatctttgacattaaagtttacttttaaatttaaattaaattaaaagttttaaattggagaaaaaaaaagacagtggggagccatggaaggttcttgagcaggggctgagggggtatactcacctccattgtgattaatactgttagactcaacaagagctatggtgatgggccggcgcagtgggtcgt

SEQ ID NO: 6997 - DNA, 1598 bp, Homo sapiens
  misc_feature (1)...(1598): n = a,t,c or g
cgggggagtcggaggaggtggcggcgctggagctcctcccggggaccagcgacccggggagcgaggcacgtcgctccgcaccggctcttcctccagccgctgagccgtcccttctcgccatgtcccagagcaggcaccgcgccgaggccccgccgctggagcgcgaggacagtgggaccttcagtttggggaagatgataacagctaagccagggaaaacaccgattcaggtattacacgaatacggcatgaagaccaagaacatcccagtttatgaatgtgaaagatctgatgtgcaaatacacgtgcccactttcaccttcagagtaaccgttggtgacataacctgcacaggtgaaggtacaagtaagaagctggcgaaacatagagctgcagaggctgccataaacattttgaaagccaatgcaagtatttgctttgcagttcctgaccccttaatgcctgacccttccaagcaaccaaagaaccagcttaatcctattggttcattacaggaattggctattcatcatggctggagacttcctgaatataccctttcccaggagggaggacctgctcataagagagaatatactacaatttgcaggctagagtcatttatggaaactggaaagggggcatcaaaaaagcaagccaaaaggaatgctgctgagaaatttcttgccaaatttagtaatatttctccagagaaccacatttctttaacaaatgtagtaggacattctttaggatgtacttggcattccttgaggaattctcctggtgaaaagatcaacttactgaaaagaagcctccttagtattccaaatacagattacatccagctgcttagtgaaattgccaaggaacaaggttttaatataacatatttggatatagatgaactgagcgccaatggacaatatcaatgtcttgctgaactgtccaccagccccatcacagtctgtcatggctccggtatctcctgtggcaatgcacaaagtgatgcagctcacaatgctttgcagtatttaaagataatagcagaaagaaagtaaatctggagcaacttaaaaaatctttcagtagcacataaaaagttcccctctggccccttcccaagtaaaacttttaccgtagtgtttatgtcttgtttctaaatctcttcatagattccatcaacactccagatttaattatctcctcatagttgttattaagctctttttaatggcttcaactttgtatcagtatactgtatttataaactttgtaccacaagagagagtgtagcacccattttacagtggccatgccatcagagaaagaaactgcatgtttgttgttgatgatgaaataaaaatgcctagcgacagtctttcttactgggtgcttaagcctcttctttgcacaaaactttataaagggaattcaaaggaagccctttagaattagagtcttgagggacagcactaacaggcctttattaagtatgattgattgttaaatttcagggaacatgattgggtcngctgtgtaattgaattcatgtaacaagaactgttacgatgggaatctgctcatttattaaaaag

SEQ ID NO: 6998 - DNA, 143 bp, Homo sapiens
ttctcaggttgattttttctacaactgaaattggaaatccccaagtcaaaaattttgtggaaaaatacacctttttatcctatatttctatatacatatactgcattaggccattactgcattgctataaagaaatacctgag

SEQ ID NO: 6999 - DNA, 141 bp, Homo sapiens
taaacgtatttttgaaatcactcattaccatcaaaaaaaaaaaaaatcttgcttatgcaaggacaattactgctcagattggtctgttagtatgcttcattgaccagcaatgacacacactaagaaactgaaggggcaatc

SEQ ID NO: 7000 - DNA, 369 bp, Homo sapiens
ataccaggaagagtaaaggggttgcacttatttttggataaagcatctgcacaacagtgtaccaggcacgaagcaacagatgtggcggagtgatgcgagtgatcattgatactgaagacgggagaacagatgagtcattgctaatagaatctcaagagaaataacaagcaacatggaattcagtatttgaatgagattttcttagaaaaagaaacaagtctatgaaacgaggcactgttcctgcccttgctgccctgagcctgtgggcctcattggtgacatccttggagtgcactctaagctggccttgcagctttagaaacgcaggcccctgcaggtgagcggcttgtcccgcttcgggctgggttc

SEQ ID NO: 7001 - DNA, 698 bp, Homo sapiens
gagaatatatctcaagacatttttgtagatcaaattggcaaatccatgttatgtgtttagcatagtgcctgtcatctagcatacagaataatatatagtaataatataattatagtgatataattattatattagtgattataattattataactaataatatagcacagtaataatatatgaatataatatataatattgctaatattgtaatttttggtgaaatttattatagtaccacccaaagttagggactgtcatgaggaataaatgatgtgtgcatatacttttgtgtaaatacctatcacagtgattggaacatagcagggctaaatcgaatagttgttgaataagctaatgtattggggaagctacaaagggtagattgttatacaaatgcttgtacttcttatttttaacaaaaatagattgagcaatcagaatctctctatgagcaaacaaaggaggtcaaaagatgctcaaaaatgtccctattgatcaagtatgttattagaatatttagcaatcaatagggcatggatgctgcccgactggaataaatgctggcagtagctcctgatgagggtcctaagggccccaactctgccatgcattatccctttagttagaaattgtggaaaggtcttggaggggtcctaagagtgtaccagagaagaggaagtggtagtatggggtga

SEQ ID NO: 7002 - DNA, 177 bp, Homo sapiens
acaatatccctgtaaggtaggtatattacctgcagtttccagatcaagaaactgaagtgcacagaagtttgaagtaacttactcaaaccacttcactaataaccagggtaggcaggactcaaatacagacagtttgcctccaaaatacatggtcctaatcacctccctatgttgggg

SEQ ID NO: 7003 - DNA, 1721 bp, Homo sapiens
gtttcactgctctatttatatataatgtctgaattaattctgtgcaggaaaggccaggaaattgcatgtgaagttcggtgcagtcaccacctctgtgtgacctgcagctgcagtctcttcgctgagatgcaggttttaaatgagacttggggggctgagggcaggcctcaggcctcccgagcgccccaacccctccttggtctaatgaaatgcagttcttagtgcagagatgttttaaggtgcaatatatctcttcctttcccgtggttttagagccaagctcaaggtagtaggacgtagggtcttattttgttttcaaacccccatcctcagagcgcagatacatgcagaggcttctgccaggataccacggggccttagtgggaacaggtggagaccagcacttccctttcctgctgctgaggtagggattggggggtcagaacccactcacttttgcctgttaaagttgccctcctgacgctggcagctctgccttggtcactggggatgcggctcgttgctcagccaccagtgggccttgcggtattgtccaccatccactagagtgggatgaagtccagagtgtgggtatacatctcagatgcccatctacccactggggacttcaatgccagctgcatttggtttggttttcttaactgttggcttctccccacagcgttttttgtttttttttaaacattcatattgttttcaaacttggaattcatagacactctggctctaggttccttaagggggaaaacaaaagatgactttatttcacattcaagaaaatcagttcagttccaaagctgtggtccttccagccacttctagggacactggggaaccttgttaaacgttgacatcagtgctctccagccgtgctgtcaccctcctatcttctggatctgccttcgggatggtcagtgacagcttctggaagctgagcacacacaggtgcacagccatgctgtggtctggcctgctacggcagcatggcagctctggtggagccttctcccttgccatttggttcccctgtgccaagtagctgcaggctgcccctcaaatcttcatttgtcccttttcacttcctgcagaacaagcctgggttagagggtctgctggaaatggcctttgaagaccaaggataccaggatgtgtgcactctgtcgtgttctgtgatgaatgggaaacgtaggcttccagaaagccagctctcttctgaaatgtgacggacctaagcaggaagtcatccaggacaggagtggctcagtgttggggatggacgctgtcgcccagccatgctccaccagggccaccaatgtgtagttggctggtggtcttcgggcatgtgagacctgctcttcactgtttccaccccacttggtggcctccaggatggtagtggcaccctcagagccccatcttcagcatgttctgaagcctcagagtggaaattcctgctaaggctctgtgtggacgcctttctcccgtgatctaaaggggacactgtactcaagcttttgacctcatgccttgtgtagtaaaaaaggatttgggggttttgtttggttcctgagagggttgtgttttgtttttgtttccttttgtttatgttttggcctttcctctttgtctttccatgtagaccagatatttgaaagggcagacgatggctagaggtgtaatgtgcagcttgtttatacggt

SEQ ID NO: 7004 - DNA, 326 bp, Homo sapiens
gggggtggtatttgtgacaaaggctgtttattagaaatcaatagttttattggtaaaattcatcatacttttccattaaaatcagatataggatataggtacttatacacattatttttgaaggttctagtttgctaacacaaaaagatgatagttgggttgaaccttattcaggttggacacctctaatttgagtatctgaaatgctctaaaatctaactttttgaggcaccgactcaacacttcaaagggaaatgtttattttaaggcattttgggatttcaggattttgggggattaggaggatgcccaaattgggtaaggta

SEQ ID NO: 7005 - DNA, 163 bp, Homo sapiens
cacctgcggctccgactggatcccggcgggcagctccgggagcaagttcctggccctgctggtgaatctggcgtgcgtggaagtgcggctggcactggaggagacgggcacggaggtgaaagaggatgtggtgaccgcctgctatgccctcatggagttgggg

SEQ ID NO: 7006 - DNA, 392 bp, Homo sapiens
caatcgctctttttgtttatttgtttgtttgctttcattaaccaaactcaggggaatgtcatgatgtcaccaaggccaatgggtagagaaataaaaaccagccatccataattgaatctgtaaagtcagtgaacttagccttttcaggttcaaaattacacaaacacaaggattttcttatctttcacctttcaaaggttttctttttattttgccacctgttttccaaataagaagtgggaagcctcttagataaattgtgataaaaatgtctctttgtttggcgtgacgtatcaaattagctttgtgtgtccactgagccatcaaattaggctttggctgctggaggcctaggttctagctttggtcacctatcagaatcttactgttac

SEQ ID NO: 7007 - DNA, 481 bp, Homo sapiens
gcagacattcaaaaggagaatttgataagcagaattaaatgtctgttattcataaatgttagaaattggtttaaaaataataacatgcaactgggtgggcacagctttggatttctcatccacgtctgttcccttctttaaatatgattagaattttcgtaagccaaaactaaaggtcttcaaacatatcttgcaatacatagctttgcatcttccacacaacttccacgtcttcttttattctgtattttacaaaaaactcatataatggttttttcttttgaatgtatcagaatatgtatgaaatttgtcatatcagaatctataaattggcactgtgtctgggattctgtttgtggtttgcattttgaagttcaatgtatcatttgacacacatgcacacaaagtgaactattcaccaaaatcatgccaacagaaataccaacaaaaaacttgtgaacttgtaaggaggttatttgct

SEQ ID NO: 7008 - DNA, 916 bp, Homo sapiens
  misc_feature (1)...(916): n = a,t,c or g
ttttttaaagacaggttctcactctgttgtcctggctgcacgcgcaccggctattcataggcaagatcccattactgatcagcctgggagttttggcctgctccatttccaacctgggctgggttcacccgtcctgatgcaagtttgtggtttcctgcttcagggacatcaccatattgatgccaaacttacacccaactggcatagtgtaccnnnnnnnnnnnnnnnnnnnnnnnnnnnnnnnnnnnnnnnnnnnnnnnnnngtaagctggggctgtacgcatgtgccaccaaacctagcaattattatttttaatcttagaaaataaattgtgtatagaaaggaatagttagcacatttatgtctaaagaggaataaaaaaggacaactgggtttacacaaaatgcattgaagtgactgatttgaagcagcctatcaagtacattcaaaccaaatggcacaggagattgtcatctcagtaactcaacccattacagacatcatttacccatgtctaatctgctataaaacctcagttgaagacttcaactgttctagctatgaaagcaaaaatatctctcaaagcttctctttttaaggggaaaaaaacattaattggaagcaactttctgagcattaagaaagtattttcttagaggcaaagaaaaaatactatgattaaaaataatgtgttctaataaagcatagtgcccacacgcaaaggaaaaaaaaacataatcacaatctttaaggcttccttgaatgctaactgctatcttggctgtagtttttcacaccgtttggaagacaagtgtttgatagatgatttcatgtgacttaggaatcttccaaaacatgaagtcaggcaatttcggacatctctggctcttcacactgcctcttagaaaacttttt

SEQ ID NO: 7009 - DNA, 154 bp, Homo sapiens
atagtgctgttaactaaactatcaaatttatttgaattttaccagttgcctctaatattctttttgttttcttccaggatgccacattacagtttgttgttatgcccccttagtctcatataatctgtcctagtctttcatggttttgtcagaa

SEQ ID NO: 7010 - DNA, 586 bp, Homo sapiens
taaaattaagaggcctgagttttaggctgtcttagtggtgggacctcagacccatagtttgcgtgttttctggatatgttctctcatagataaaatgagaggcttggagtagatgggcctgagcctaggggtttgtccaggtgtaacatcttattatagtattgccaggactcttagaatcatggagggtgaggagagagaacatttgcagttgagaattacaggggaatttctttttctctttttctacacttttctccactagcatcttgtttgtgactagaattaaatggggggacatgggaggtttgttctctgcctccttgagtagggatgacagaggtgctttcttcgaaagtgctgtgtgttcaaagttttattttcagcactagcctcttgtgaattggccagttcacctgtctgtttcccggtaggtaggggcagtctggattccaagggcaactccagagggaggaagattgtgtatcaatggtacttcctgctcagttgccacagaaatttccttgccccattggtttcttttatgggcctagagtaggcccaatataaaagtttgtccttcaga

SEQ ID NO: 7011 - DNA, 973 bp, Homo sapiens
aatgagttgtgaatggcagggatcattctgggtaaaaaaaacctagaatcatttctgatgtgcaacattgtcaagtgaagaagctaacagttcaactaccgagattatttgataacctgggttttctcattcatccatcaagcaccatcaaccagtcagccattattatttatatatgtattaccaaaagcagtctatctgcctgtgacctccaatgtacactgccaaacacaagagtaggacacatctgttctgggttcttgacctatctgtctccaattcatctccccttttcagccatttcaacaaactactctttggagctctgagatgacatcttgttgttttatatagatgtatcttttaaaaatagttcacgtttggagaattcttttgtactcatttgctttttgtctgagaaccatgtctatttttataactggagtgtgagttctgtatcttctcacattctgtatactgtatccattttctagagaacccagtagcttttatacagtctcttcttaccaccccttgtggtttcagaacaagctttattttattacgagtatattaatgacaactaattcctgttccaattctacctgttttagttgtgaaggtagttttgtgtaatccagttgattgctcctcgggcagagagaaggagctcaaaagatacttggatgtctttcatgtaagtttacctggtcttttcctattgaagaatttttcatcagaaacgactgggaaagtttgggaaagtcagcaaaagaaagaatgcatttcgaaagcaaacagaagaaaaaagtatattctcacagtttttccccaggaagtctggagaaaaagtcctcatgtcaccaatttctctgttgcatgaattttagtgttttgctataagacagcatgagggctatcaggccaaaattcattattgtatttccaatacagtttgtcttgaatgtctgtc

SEQ ID NO: 7012 - DNA, 890 bp, Homo sapiens
  misc_feature (1)...(890): n = a,t,c or g
attcggcacagcccggactgagagaggagccgggctggaaaagcagcggatggcagagtgtggcaagcctaggtccagggcgcggagagatgtggggataaagtgagactccggccagtgtgccagctggatgcatagaagtcccttggacgatttcgtcttaaacggacgttattgcgcccccactatgagatgggagtatttagaggagcaggacccagtcctgcctgcgaggggcttaaggtggggtgcgtagaagcactgacagttatccagagctagggactgaatcggatccctcacgcagctctcatttactgctagatctttcaaagaatgctttatctcaatctagatctttcgaaaaatgctttatctcaatcttattgaaagggaaaccgccgtcgaagaagctgaataaattaacaggcaccatccccgcaaaaagggagacgtgataagaatggacaccagatctctttgaccccggagcttgagagtaattaagctcacagctttggggtagattctctgttcaattaccttctatgtgaccttgagcaagttatttactctttcttgcctcagttctatcctgtataaaaataaggattataattgtacatagtgcacatagtgtggtctctatattattaccagacacatagtgtggtgtctatatatgttgttattaccagacactataatatagggttaagaaaaggnnnnnnnnnnnnnnnnnnnnnnnnnnnnnnnnncttcagagagagccaaaatgtggaaagacttgggtttcaaaggatttcaataaagtaggtttggcggcagagatttaggaagagtccaacttaagagataatgggctcttaaaacatgtgcaaaagtttagt

SEQ ID NO: 7013 - DNA, 448 bp, Homo sapiens
tggcagaattacgggcagaagccgctgtgcccggctgagattttacattttttttaaagggctggaaacataattcaaaacaataatatttcacgacacatgaccatcacatgaaattcaaatttcagtgtccataataaagttgtattgaagcacagtgacactcctttgtttacatactagctacagacactttcatactcacagcaaagcttactagttttaagagaccatatgtcccacaaagcatttacaaaatctgtcctttacaaaatgtttgccgacctctgctctctttccccatccagtgaaaacctatatgaatatagtatgtgaagagttaaatgggaaaaattaaagtgtgtgtctgttttatcctttcaactcacagcaaataaggcaagtttgtcagagcaccacggagaagagttaagtagtcagatttcac

SEQ ID NO: 7014 - DNA, 2177 bp, Homo sapiens
  misc_feature (1)...(2177): n = a,t,c or g
gcagatgaaccaaaaactccagtaacatgttttcagtactaaaccgttaagttactcatgaattaatttctcattgataaggaatgtggatgtttggtttctccaaagttcccaccataaaagatccaaagcatgagaggaacttctagtcagatgaccttgcagaaccaccgcattccaccctgccctttggggtagcctactcagcattctacctggggaaatggaaaacagaggccaccacccatgaaggcataacacccatcacattgtctgagaataggattaatgagcaaaagttatgataatagagttatatgatggtttaatggtttctagatttttcttggaaagatataatttgagcagtggctttatgcagactccaagaacaaaaccaccaggtatttttttttaagtaaaaatttactaaggcctttagcataatactgtaaatgtcttttggtcaagagaactaacaaatataaaggaacttgaaatgtggggagtgataatagtccagtgattaaactacagtccagtgattaccaccaactttctgactaagctaaaaatgaatgaaaatggtggctaaagaaaatagggactctgaagatgtcgaaatctttattcctggttaggaaggtgggccgctacccttctttccctttagaaaactgtgattaattaaataaaaagtcttactactataacaactctaaacctggtttaaatgaaacatctaattttgctgtaaggcttaatgctcttcttttgtttagccaagaaaacattcttagttggaaacaggtggtaaagtagtttggcctgttcacaacttatcaggaccaatatctagtgtgggactcagtgttctctaggtttgtgagcagttgtgggtaagagaatgggaagggcaacactggaatagggagtttaaggggaatgggcacgatcacagtgagagagctgcactcacctgcagacccagtcagatggcttgtcagtatctgctctgaggaaccaggtcccacctccccacaaggcaaatctagacccattaaattattacagtgggcttttttgttttaaaagtggttggggatccacaggaacgacattcatacagggacatttgtgaaagcaaagcaagaatgaatgctttcccgatctcagactggctggattcagatcagtgtgttggctggttctcattttaaggggtaagcagtttgctattctgtgactttagtagatctcttttgtgtgcacatatacaatgtgcattatacatatatattaaatatatccacaaagcagatggggcaaaaagattttcatgctaatcttcaaaggttcatgctcaatattgtgaaaagcttttaaaagttgttttgaaaagacaatcattttttgtttttgttttaactttcttgtggcaagctataccggaaaagcggcatgtcaaaaatactttaggttctacatagatctctttctctcttttgttttgtttgttngtttgttaaagttcattatttattttaccttttactgacaatgtgaaactcgaagaaaatgttctctttttaaatatacagtcataaactgttcaaggtaaccataacaaactaggtgttatttattaacgtattataaaataatgtttgatccagtatgtgcttgtcttatttaaaattggaatgtgagacatgttgctgtgacctgtttttctttctcattcacatttgtagatattgtgtgaactacagtatataatgataacaattaaaaggatattctgtggatgtcacgtattttgaaatgatagaactacattagctttgtatcatgtttggataattcatcaatgttcacagtttaaaacatcattaaacattatgtaattacaatgagaaagaatcttacttaaatttggagattttcccccacatctcttttccggatacattataattctggacccctatttatctcaaaactcttaatatatgcagaccaacaggtctttgcattccttttaaataactggttgtgacaaagcttgttgttgatcagattcactgtttcatcatatttattgtaatatattttttgttttgtaaatatgttacaacaaaatgtgattggtctaaaatatttgtaatgtatattaa

SEQ ID NO: 7015 - DNA, 443 bp, Homo sapiens
aacataaaatctcaccagcagccatattgtctgggggtgatagcaatttagtcccactccctcctgcaacttaaatcataatgtagccagtcccgggtaagtggaacacttcctgtaaagcacaactgctagtgcccccttctgtggctggtcatgaggcccagagtggtaactgcagtcttgttctcccaccacccattccatagcccctctactttctggcagtcccttagctgttggagaattttatctggtggaatgacccaaatcttcatccacagaggattcaaattcttagtgcccgtgtcttcaatgagttgccacagtatccacagattcctaaagaacatgaagaggccttgaagatctcacctggaaagctctgtaaaattatcagaaagaatagcaggtgctctaggggaacactactcaaactatggtcc

SEQ ID NO: 7016 - DNA, 289 bp, Homo sapiens
acaatcctgccccaacccctcctctatggaaaggacaatgcaccggacaaaaggccattttgtccaggaaaaaggaggaatgttacatccaaaacatactttctgaattcctactatgtgcctgactcaggcctaggagctgggaatacaaagatgcagtctttgcccttgaggatggcaatacaacgggagacagagacaagcaacaaacaatacactgcgatgagctacaacatgaaggtctgtgatacccttcaaatctgttacccagtcagccacatggaattac

SEQ ID NO: 7017 - DNA, 1294 bp, Homo sapiens
gcggccgctcgcccctcggggaatatggcgccctcggggctgaaggcggtggtgggggaaaaaattctgagcggagttattcggagtgtcaagaaggatggggagtggaaggtgcttatcatggatcacccaagcatgcgcatcttgtcttcctgctgcaaaatgtcagatatcctggctgagggcatcaccattgttgaagacatcaacaaacggcgggaacccattcccagtctggaggccatttatttgctgagccccacggagaagtcggttcaggccctgatcaaagacttccaggggaccccgactttcacctacaaagcggcccatatcttcttcaccgacacctgccccgagcccctgttcagtgagctaggccgctctcgtctggcaaaggtggtgaagacgttgaaggagattcaccttgccttcctcccctacgaggcccaggtgttctccctcgatgctccccacagcacctacaacctctactgccccttccgggcagaggagcgcacgcggcagctcgaggtgctggcccagcagattgccacgctgtgcgccaccctgcaggagtacccggccatccgctaccgcaagggcccagaggacacagcccagttggcccacgccgtcctggccaagctgaacgccttcaaggcagacactcccagtctgggcgagggcccagagaaaacccgctcccagctgctgataatggaccgggcagctgaccccgtgtccccactactgcatgagctcacgttccaggccatggcgtatgatctgctggacatagagcaggacacatacaggtatgagaccaccgggctgagcgaggcgcgggagaaggccgtcttgctggacgaggacgatgacttgtgggtggagcttcgccacatgcatatcgcagatgtgtccaagaaggtcacggagctcctgaggaccttctgtgagagcaagaggctgaccacggacaaggcgaacatcaaagacctatcccagatcctgaaaaagatgccgcagtaccagaaggagctgaataagtattctacggcacctgcatctagcagatgattgtatgaagcacttcaagggctcggtggagaagctgtgtagtgtggagcaggacctggccatgggctccgacgcagagggggagaagatcaaggactccatgaagctgatcgttccggtgctgctggacgcggcggtgcccgcctacgacaagatccgggtcctgctgctctacatcctccttcggaatggtgtgagtgaggagaacctggcc

SEQ ID NO: 7018 - DNA, 255 bp, Homo sapiens
ggcttcatttcacaaaaacagtacccttttgcaaagggaggaagtgactttctcatgacccgaaccagaaaataggcagccacgggactctatgcactgattccaccttggggagcaggcagaacatgtcccctttgtgaccacgttcactggcatctttctggatccagatagagtgcaaaacttagaaacagctgagtggtactgcagagggggtacaggtacagatcataccgtgcaggcaggtatgaccct

SEQ ID NO: 7019 - DNA, 436 bp, Homo sapiens
tgcatggctacttgcattaatgaccacagcggtcatctctacctgcgaccatggtatagtagccaagatcaagagagtgatcatggagagagacacttaccctcggaagtggggtttaggtccaaaggcaagtcagaagaagctgatgatcaagcagggccttctggacaagcatgggaagcccacagacagcacacctgccacctggaagcaggagtatgttgactacagtgagtctgccaaaaaagaggtggttgctgaagtggtaaaagccccgcaggtagttgccgaagcagcaaaaactgcgaagcggaagcgagagagtgagagtgaaagtgacgagactcctccagcagctcctcagttgatcaagaaggaaaagaagaagagtaagaaggacaagaaggccaaagctggtctggagagcggggccgag

SEQ ID NO: 7020 - DNA, 706 bp, Homo sapiens
  misc_feature (1)...(706): n = a,t,c or g
ttgcaaatccatatgaaggaagcagtttccttaccaaaacagaaggcaacttaccacagagagggatatcacagtagtcaaaaagttttcttggattcactctgtagcaccagggaccattgatgtcaccatcagggttacggcagtactgaaaacaagcaggcatgtaagctccagctcacgtggggcaagagagggagaaggtgttccaaggcacacatgtttcacatctattcttagagacataaaggagtgtttcttcttcctttctttctattattattattattattttggcaaagttattttttgaatgctctaaagccgtccttcctgtgcccctgttcaaaaggagctatgaggccacacccctggacagggaagtggtgaccctcgggggtttttggagaatgggtctcccttcaggagcctgacccagtggaggccttagagccccagcaccaaaggacagtgggacatcattgatgtgcattgtccctggagggctcagcgctctcctacccgatgaagcctgtttgctgttgattcagaaacatttatttccatgcattgtgcgccctctatggggcaagacacagaaaggcagtgttgtcctccccctcgtgccnnnnnnnnnnnnnnnnnnnnnnnnnnnnnnnnnnnnnnnnnnnnnnnnnnnnnnnnnngtcaaacggtnttcaaaggg

SEQ ID NO: 7021 - DNA, 1968 bp, Homo sapiens
  misc_feature (1)...(1968): n = a,t,c or g
attttattctgagggtgatttgtgatcaagtttaatcacaaatctcttaatatttataaactacctgatgccaggagcttagggctttgcattgtgtctaatacattgatcccagtgttacgggattctcttgattcctggcaccaaaatcagattgttttcacagttatgattcccagtgggagaaaaatgcctcaatatatttgtaaccttaagaagagtatttttttgttaatactaagatgttcaaacttagacatgattaggtcatacattctcaggggttcaaatttccttctaccattcaaatgttttatcaacagcaaacttcagccgtttcactttttgttggagaaaaatagtagattttaatttgactcacagtttgaagcattctgtgatcccctggttactgagttaaaaaataaaaaagtacgagttagacatatgaaatggttatgaacgcttttgtgctgctgatttttaatgctgtaaagttttcctgtgtttagcttgttgaaatgttttgcatctgtcaattaaggaaaaaaaaaatcactctatgttgccccactttagagccctgtgtgccaccctgtgttcctgtgattgcaatgtgagaccgaatgtaatatggaaaacctaccagtggggtgtggttgtgccctgagcacgtgtgtaaaggactggggaggcgtgtcttgaaaaagcaactgcagaaattccttatgatgattgtgtgcaagttagttaacatgaaccttcatttgtaaattttttaaaatttcttttataatatgctttccgcagtcctaactatgctgcgttttataatagctttttcccttctgttctgttcatgtagcacaggataaggcattgcacttggtacccaggcttttacctcatttcaagaaaatatgcttaacagagaggaaaaaaatgtggtttgggccttgctgctgttttgatttatgggaatttgaaaaaggataattataatgcctgcaatgtgtcatatactcgcacaacttaaatagggtcatttttgtctgtggcatttttactgtttgtgatagtatgaaacagatttgttaactgaactcttaattatgtttttaaaatgtttgttatatttcttttcttttttcttttatattacgtgaagtgatgaaatttagaatgacctctaacactcctgtaattgtcttttaaaatactgatatttttatttgttaataatactttgccctcagaaagattctgataccctgccttgacaacatgaaacttgaggctgctttggttcatgaatccaggtgttcccccgggcagtcggcttcttcagtcgctccctggaggcaggtgggcactgcagaggatcactggaatccagatcgagcgcagttcatgcacaaggccccgttgatttaaaatattggatcttgctctgttagggtgtctaatccctttacacaagattgaagccaccaaactgagaccttgatacctttttttaactgcatctgaaattatgttaagagtctttaacccatttgcattatctgcagaagagaaactcatgtcatgtttattacctatatggttgttttaattacatttgaataattatatttttccaaccactgattacttttcaggaatttaattatttccagataaatttctttattttatattgtacatgaaaagttttaaagatatgtttaagaccaagactattaaaatgatttttaaagttgttggagacgccaatagcaatatctaggaaatttgcattgagaccattgtattttccactagcagtggaaaatgatttttcacaactaacttgtaaatatattttaatcattacttctttttttctagtccatttttattttggacatcaaccacagacaatttaaattttatangatgcactaagaattcactgcangcagcagg

SEQ ID NO: 7022 - DNA, 734 bp, Homo sapiens
  misc_feature (1)...(734): n = a,t,c or g
ggaaaagaaggaatgctgatgatgatgtcaccctcacctagtgagtcttgctgtcctggcactgctctaagggctttatacttatttgctcacttagtcctcacagtatccctctgaacagagtttattgttttcactttgctgataaggaaacagaggcaccgacaggttgagtatcttgcccaaattcaggtggcctgtaagaggcagagtcaggatttgaaccctgagccctccctgtactgcttggctgtgaccgccatgaccacagtgtgttctgctgggcttaactggcatccagggcacttggcttccagcacagcactctttcccttcctccttctcatatactctctccttttccccttcctttttgtccccttttcctcttccttttagttcttctctttaaatgccttctcactctgcacggggtctagacttgacttctcctttggctcacttctttgccttttgtttcagggagtgttacaccttgaaacaatggaggaagcagtggataaattaaggctgttgggagataaaacttcctggaatgttgaagcagttttgtggggaagccccaaggattccggccaaacccagttgccagcggatcctggggtggacacntgggattgccaaagcaggctttttccctgggccagggcttaagttggttttccccaccttatttttaaccacaggttcccacgttgattcattggaacatt

SEQ ID NO: 7023 - DNA, 786 bp, Homo sapiens
ctttggagctccccagagcatgtttgactgatacaaggactaaaaaagaaaaagaaataagtgaaaccagtgaatcgctgaaaaccaaaatgtctgaacttcgcctctactgtgacctcttaatgcagcaagttcatacaatacaggaatttgttcaccatgatgagaatcattcatctcctagtgcagagaacatgaatgaagcctcttctctgcttagtgccacgtgtaacacattcatcacaacgcttgaggaatgtgtgaagatagccaatgccaagtttaaacctgagatgtttcaactgcaccatccggatcccttagtttctcctgtgtcaccttctcctgttcaaatgatgaagcgttctgtcagccaccctggttcttgcagttcagagaggagtagccactctataaaagaaccagtatctacacttcaccgactctcccagcgacgccgaagaacctactcagatacagattcttgtagtgatattcctcttgaagacccagatagacctgttcactgttcaaaaaatacacttaatggagatttggcatcagcaaccattcctgaagaaagcagacttatggccaaaaaacaatctgaatcagaagatactcttccatccttctcttcctgaagaaactgaagtgtccaacttcctctaagtattgctatgcaaaagctgctgtaattaaactattgttatagggagtagttttttcccttaggactctgcactttatagaatgttgtaaaacagacaaacaagaaaacaaaaa

SEQ ID NO: 7024 - DNA, 354 bp, Homo sapiens
aatgaactagaagtttgacgactgtcatccctggcccacctgggcagagcacaaggggccgagtttgaacgtcatcagcaggttcagacatcagcgctgctcatgtctttagagactgtttggaggtggttccagctcactgttcacatgcagagacacaggcccggagaaggaggactcgccaaggccacgtgtcgagctgggactgagccctgcccctttaggtagctgcgtggacttcagcggtttgtgcaaagccctgcccttggtgacccgcctttagtgaccagtctgcctcttgggtcttcctcccaggccttgtctggcacgtccacgtggcccagccctcataga

SEQ ID NO: 7025 - DNA, 200 bp, Homo sapiens
ttaaagtgtgagttgcttgatttctttctgctatgcttcagctcagttttagcagtatgtataacatcttttaatgtgatgtaagtatgtaggtataaagttcctggatatatcagttattaacccacaattataactaagcgtgagttatggcagagacaacttgaaacactgctagtgattctaaaaatttcctaatt

SEQ ID NO: 7026 - DNA, 797 bp, Homo sapiens
  misc_feature (1)...(797): n = a,t,c or g
ttttttttttttttttttagctatatataaggagatattttaatcaagagcacaaacaagaatatacaaaatgagaactgaaacagaatcttggatagcatccagggcttcatgctgattccatgacatggcagagtattattgtggtgatccttaatttaaaggggcaactgctgtccctaaagtgacactttgataaggaaatagtaacaagtctatccatatacatgattaaagatttctatcatttacatttcatagctgtgagctgaccattttcatgaaaatattatgtaaattatgatcataacaagtgtacccagaatcagaactgctaattaattcccctttcctgtggatgcagctgatgtattgtcacatcttaccactaattttcagaaaattatactagcaatataaggaaatgcctttatgataaactatcaacagctttcttatattaacatgaatcagaaatctccaactgaaggctgagatgggaagatcacttgaggctagnnnnnnnnnnnnnnnnnnnnnnnnnnnnnnnnnnnnnnnnnnnnnnnnnnnnnnnnnnnnnnnnnnnnnnnnnnnnnnnnnnnnnnnnnnnnnnnnnnnnnncagannnnnnnnnnnnnnnnnnnnnnnnnnnnnnnnnnnnnnnnnnnnnnnnnnnnnnnnnnnnnnnnnnnnnnnnnnnnnnnnnnnncgtgccnnnnnnnnnnnnnnnnnnnnnnnnnnnnnnnnnnnnnnnnnnnnnnnnnnnnnnnnnngtcatnacggtnttcnatttcaaa

SEQ ID NO: 7027 - DNA, 436 bp, Homo sapiens
gaacagtgagagattttatcatgttactcagaatggtgtacaatttaaaacttcaaagtgtttatttctgttattttcatttaatgttttcaaaccacagttgatcaagagtaactgaaacaaggaaagcaaaaccacaggtaggggggtttctgtactgttcccattttgccctaagtcttgaaatcccccacaagaaaagttttttttgtaaagtagttgaaagaaagaattgttgactaaaatgatattaaatcccctcaaatgaactgaaggcctacacatgaaaaatgttataaaacttaaatcagtggagacgcaatcatcccatgctggaagaaatgtcaaaataccaatgggtaattatctttttcctgatttttaaaaatatacataatttttaacccagaaattgtaatgctaagagtttcttaga

SEQ ID NO: 7028 - DNA, 801 bp, Homo sapiens
gaacagacagtagtagatgtcactgagcagttaggcgattgcaaattagatagtcaggagaaagatgctacatgtgaacttcctttacagaaagtaaatactcagagttcttcaaatagcactttgcctggaagattaaaagcgtcagaaaattctgaaagtgaatacagtaggtcagaaataactctagtaggcataagtaagaaaagtgcagagcattttaagagaaaatttgccaaatcaaaccaagtgtctaggtcagtgtctagttcagtgcaggtgtgtcctgaagttgggaaagagaaacttacttaaagttttgaaggagactttgattgagtgggaagacaggaggaaacctttgaggttttttgtatgggccagaattatgcttctgtgtgtctgaaacccgaagcctctctggttaaagaagaacttgatgaagatgacataatctcagatccagatagtcatttccctgcctggagggaatctcagaacagcttggatgagtctttaccttttaggggctcaggtacagccattaaaccactgccaagttacgagaatttgaaaaaagaaactgaaaagttaaatctgaggatcagggagttttacagaggacggtatgttttgggtgaagaaaccaccaaatcacaagactcagaagagcatgattccacctttccactgatagactcaagttcccagaaccagattagaaaacgcatcgtacttgaaaagttgagtaaagtgttgcctgggcttctggttcctcttcagattacattgggagatatt

SEQ ID NO: 7029 - DNA, 457 bp, Homo sapiens
cgcgtggctggcacaggggagggtggcctggaggagatggtggaggagctcaacagcgggaaggtgatgtacgccttctgcagagtgaaggaccccaactctggactgcccaaatttgtcctcatcaactggacaggcgagggcgtgaacgatgtgcggaagggagcctgtgccagccacgtcagcaccatggccagcttcctgaagggggcccatgtgaccatcaacgcaagggccgaggaggatgtggagcctgagtgcatcatggagaaggtggccaaggcttcaggtgccaactacagctttcacaaggagagtggccgcttccaggacgtgggaccccagtgtgtgcctcaactgattctgacttcaggaaaagtaacacagagtggccttggcatgttgtcttcccctattttctgtcccagctcatccgtgtctctgaagaacaaatatg

SEQ ID NO: 7030 - DNA, 1626 bp, Homo sapiens
  misc_feature (1)...(1626): n = a,t,c or g
atgtcttaatatcttagaattttcctttactccaaaaaaccccatatatacatgtttctcctttataagcttagagattgctttggtggtcaagtgcagggcggctgggggaggtaagaccttcaggaaggccatatcccggacaagacccagaagggaagcccccagagccaagggtaggagggccccacccgggtctcagccactcacttctccagggcggatccgagacactcacaggcctcagggaggggccaggtgctgctcctggtcattgcttcccccacaaggtttgcatgaggagcagagacagtccagtctcctggaacacccacagggcacagagcccagtgcagggggcagacaccaccgcagctcctgggaccaagagggaagctcccagagggggngcccaggaacgctggggtgggtggacagggctgggtaggggttccttctgggccaaacccccagagcagcagagcaccccagtccaaggaagctcttctcagggaccctaggctccagagccaggaaaaagggaggggcggggcgggagcctgcatccccagtgcccatcagctctgggggaaacctccgtctcccgtccctatggtgaccacagcagcagagggggatcctccagtccccaggcaggctggcatcagggccacacaggggccaggagcaggggtctcggagtccacagctcccggcccccagtggtgggctcagggctcctgggcgccatgggtctcaccacagcctcgcccagggaacaggaccatagggagtccttctccccatctctagccacccacaggcccagcagagcacacagccccaccctcgcacaggcacctgtggtctccaagtaaccaaggcaccagccccaggggccactgcagacagcagctgggatctgcagagggatctcagcagcgagcaggcagctggcgaggagaggtgcgtgtgagggaggggtggccctctcctcagtaggaggaagtaagagggtatctaggccaatttattcagctggaaatcaatctgtccagggctggaccaggcgcctccccctcgatacagctcctggctgaagaggtcatcagagcagcagctgtccccaggccagtgtcacgtcactgcgtacagttcctcccgatcgttcttgcagatctgatagtggcaggggaatttctgcgagcaggcccagggctcggcgggctggtcaggtggcggcacagccaaggctggcttcccggccagcaggatgtgccagatgctgtgggtgtagtagtagttgtcgctagtcatcatggaggtgtagatggcgatgcccacagaggccatagagacgccgggcaggaggtagaaggcccagcgctgccacgaggtggggtagcactggcgccggtgcccgcagcggtaagcccacatggaggccatgatcacgaaggcaaagaggcagggccccagcatgttccacatgcccctgcggtccagctgcaaggacatggcgatgaccagtgtacccagaagaaacagcacgtatttcaggactgtcttgagccgtgccatgcacaggatggtgacccagatggccgccccggagcccaagaagtc

SEQ ID NO: 7031 - DNA, 320 bp, Homo sapiens
  misc_feature (1)...(320): n = a,t,c or g
aaccatttcaagcttatagaaaagctacacaaacagcacagaaaggtcctgctggcctttacctgagatgcccgtctgcctttaactggttgtctcagtgttgtttactacagaaggtccaatctaggagcaaatgctgtacccgggcattatgtctctctggtctctgcaatctgggaacattctttcctcctttccttggttttcatggaccttggacattttgggaaggatttacaggggcagtcatttttgtaggaatgttttatgatatngggggnttgttncagtgctttccccgggggtccaggaccnggggg

SEQ ID NO: 7032 - DNA, 430 bp, Homo sapiens
tttttttttgttaatttaatcttttattatttcttaacagtcacaatggaataaatgtgcctactttaagacatctatctggttttgttggcagatttaaggactaacactagactaaatattacacaaatattctattcaaatgacttaaaagtgctacccttttactaaaaattttatcgtactaaacatctttgaaatgtgtgtcccataggaaatgtgtttttttgataaccgtacttctaaaaaaattcccactttgagcactgtcagaaaacagagcaaatttaaagaaaattttgagaatataaaattacataaacatttcattttacttttcctttatcttaatcatatacctttaaataaaaaagctatgaaagacctaaataaaatttgagaaatcagaatagacaaacatcattaatgc

SEQ ID NO: 7033 - DNA, 1902 bp, Homo sapiens
cccacgcgtccggagggactctgtaacatgtataacattcaggcttatccaacaacagtggtattcaaccagtccaacattcatgagtatgaaggacatcactctgctgaacaaatcttggagttcatagaggatcttatgaatccttcagtggtctcccttacacccaccaccttcaacgaactagttacacaaagaaaacacaacgaagtctggatggttgatttctattctccgtggtgtcatccttgccaagtcttaatgccagaatggaaaagaatggcccggacattaactggactgatcaacgtgggcagtatagattgccaacagtatcattctttttgtgcccaggaaaacgttcaaagataccctgagataagattttttcccccaaaatcaaataaagcttatcattatcacagttacaatggttggaatagggatgcttattccctgagaatctggggtctaggatttttacctcaagtatccacagatctaacacctcagactttcagtgaaaaagttctacaagggaaaaatcattgggtgattgatttctatgctccttggtgtggaccttgccagaattttgctccagaatttgagctcttggctaggatgattaaaggaaaagtgaaagctggaaaagtagactgtcaggcttatgctcagacatgccagaaagctgggatcagggcctatccaactgttaaattttatttctacgaaagagcaaagagaaattttcaagagcagataaataccagagatgcaaaagcaatcgctgccttaataagtgaaaaattggaaactctccgaaatcaaggcaagaggaataaggatgaactttgataatgttgaagatgaagaaaaagtttaaaagaaattctgacagatgacatcagaagacacctatttagaatgttacatttatgatgggaatgaatgaacattatcttagacttgcagttgtactgccagaattatctacagcactggtgtaaaagaagggtctgcaaactttttctgtaaagggccggtttataaatattttagactttgcaggctataatatatggttcacacatgagaacaagaatagagtcatcatgtattctttgttatttgcttttaacaacctttaaaaaatattaaaacgattcttagctcagagccatacaaaagtaggctggattcagtccatggaccatagattgctgtccccctcgacggacttataatgtttcaggtggctggcttgaacatgagtctgctgtgctatctacataaatgtctaagttgtataaagtccactttcccttcacgttttttggctgacctgaaaagaggtaacttagtttttggtcacttgttctcctaaaaatgctatccctaaccatatatttatatttcgttttaaaaacacccatgatgtggcacagtaaacaaaccctgttatgctgtattattatgaggagattcttcattgttttctttccttctcaaaggttgaaaaaatgcttttaatttttcacagccgagaaacagtgcagcagtatatgtgcacacagtaagtacacaaatttgagcaacagtaagtgcacaaattctgtagtttgccgtatcatccaggaaaacctgagggaaaaaaattatagcaattaactgggcattgtagagtatcctaaatatgttatcaagtatttagagttctatattttaaagatatatgtgttcatgtatttcctgaaattgctttcatagaaattttcccactgatagttgatttttgaggcatctaatatttacatatttgccttctgaactttgttttgacctgtatcctttatttacattgggtttttctttcatagttttggtttttcactcctgtcc

SEQ ID NO: 7034 - DNA, 619 bp, Homo sapiens
gctgccgcatcccaggctaagcgccgcgccgaaagccgtgcggagattggaggccgcgcgggtccctggtctgggccatgtctggctgtgatgctcgggagggagactgttgttcccggagatgcggcgcgcaggacaaggagcatccaagatacctgatcccagaactttgcaaacagttttaccatttaggctgggtcactgggactggaggaggaattagcttgaagcatggcgatgaaatctacattgctccttcaggagtgcaaaaggaacgaattcagcctgaagacatgtttgtttgtgatataaatgaaaaggacataagtggaccttcgccatcgaagaagctaaaaaaaagccagtgtactcctcttttcatgaatgcttacacaatgagaggagcaggtgcagtgattcatacccactctaaagctgctgtgatggccacacttctctttccaggacgggagtttaaaattacacatcaagagatgataaaaggaataaagaaatgtacttccggagggtattatagatatgatgatatgttagtggtacccattattgagaatacacctgaggagaaagcctccaagatagaatggctcctgccatg

SEQ ID NO: 7035 - DNA, 1219 bp, Homo sapiens
  misc_feature (1)...(1219): n = a,t,c or g
atgtatataaaagttgcattacacagtacaaaatagatggataatgtttatcctttatttttctatgtagaagtttttgaatttgtgtgtgtgcttgtgccgtgtctacacctagtattacggctgggactctccagctgtttttgttgttgttatgtttttaagagggttgaattcttccatcaggtgaacgaaaaaggcaacaaagtaataaatcagtgaatgtggccggcagctgtgtttagcccctccagatggaagtttcacttgaatgtaaaataataaagtttatattttgaatttntcttttcatgggggaaaaaaggtacgttaaaaaaatcaaaataatgatatgtcacttgcagctacctttttttttcttttaaattcaatcagccaccttcatgtgcctttttcctttgtctttccccaaaattccaggaccagagatctggccctggcctattttctcttgctgtgtacacacacgcacacatgccgactagcgcctccgtgtccacccacatgacagcaggagcgatggccgggatcctggagcactcggtcatgtacccggtggactcggtgaagacacgaatgcagagtttgagtccagatcccaaagcccagtacacaagtatctacggagccctcaagaaaatcatgcggaccgaaggcttctggaggcccttgcgaggcgtcaacgtcatgatcatgggtgcagggccagcccatgccatgtattttgcctgctatgaaaacatgaaaaggactttaaatgacgttttccaccaccaaggaaacagccacctagccaacggtattttgaaagcgtttgtctggagttagaaagttctcttcttcaacacgtccctccccagggtgttcctccctgtgacccagccgcctcgacttcggcccgcttgctcacgaataaagaactcagagttgtgtgtgcaatgcacacccagacacacgcacgcacacacacgcgcgcgcacacacatgcttttttctgttcccctccgctttctgaagcctggggagaaatcagtgacagaggtgttttggttttattgttatgtgggttttcttttgtatttttttttgtttgttttgtttttaaacattcaaaagcaattaatgatcagacataggagaaaccctgaatagaaacaaaacttttgaatgctggattcaaaaaaaaaaaaaagttaaa

SEQ ID NO: 7036 - DNA, 448 bp, Homo sapiens
ctaagtaataaaacacatagcatgattctctctccctctctctctctctctctgcccaccccctgctagtttccaggagaatacttctctaaaattcatttttttctattttggaataaattatctttatacagtaattcaaacactgatttccattaacctttggccctgagttttcttctaacatagaagagttcattttgagaggcactcagttaccattcaatctgtgctgtaagtatggggactttgtacaaatgccctttttgagggccaaaaatttcaatacactttgttctactttgtggaaccgggtctggatctggcacagaggaaagtaatgctgagctgtccaaagagtccgctcaggtctccctcctaaccctcctctgccttcccctagtttgcttatcctcacgtctgacactgaggagtgcatagtcttcaa

SEQ ID NO: 7037 - DNA, 370 bp, Homo sapiens
agagctagcaccatgacttcaataccctgggctgacatttagtcaggaggcaacagttgaaccagttgtttccagctagtatccattttgactcggtctctatattatactacttgttaaatatttttagtatctcccctcagtaaagctgatagactggcagattctaaatacacccacccattcttgtgaacaaatatgaactccagaatttttccaaacgcttcagttatgaaagtgatgttaagaaggattttatgaaaaagcattcagtatcatttgattttaaagtttgtaattggttatgctatacctacttgactacctctaatacctattggctaaggcacagtggcatgtgcctgtagtt

SEQ ID NO: 7038 - DNA, 391 bp, Homo sapiens
  misc_feature (1)...(391): n = a,t,c or g
gtcttgaatgttatttatttgcatatgagtgatatttcagtttgtggctgatacccttttggtattaaatggaagatgacaaatcattcaatattaattttagagggagacatctattgaaacctttgtgcagtcaggtcaagtttctgtgtacaaaaattagcagagaggttgctgctggttgacttcccctaggatggtgtctttctgaacattttgaaatgtagattgaaaaggtggatttgtcaactaattctgaaagtgctggtagttaatttgtggttttcatccgttttaattggtttattttatttttaagatgggagttttcgctcttgttgcccagggctggaagtgcaagttgttngcgatcttggctcactgcaacccc

SEQ ID NO: 7039 - DNA, 326 bp, Homo sapiens
cgacatttgaattaatctagctattttgaaatgtacaatcaaatattataatagaatgagacctactgttaagatagatcacagggtgaccagagtttataatatctgattgtacatttcaaaatagctagattaattcaaatgttcctagcataaatattaagggaataatattcagtaataaaagctgcacagttcagctgtgaagtagttaaggtgatggctatcccaagtatgctgatttatctttacaaattatattaatgtattaaattatcacatgtaccctgaaactatgtacattacctatcaataaaaaagaaaaa

SEQ ID NO: 7040 - DNA, 1318 bp, Homo sapiens
  misc_feature (1)...(1318): n = a,t,c or g
aaagggggagggcataacaaagaatgacaaaaacaaaaaaactgaacccaaaaggcatggctggggtctgtgtctttgtcagctgcagtttcaaaactaaaagataaatttgatgccaggtaaaggtggcagggctgctatgaccgagtctgagaggctctttttgccctgcttcttgggctctcaatttactctctgcagagagtgggccacaagtactgcgaaattctgaaaaggagcaaaagaaaaaaaggataatgtcaggaacatgaaataagaggtggaaacaccagggatgggcaggggatagtactagaaaacgagccaagccagaactaagaggctatgcaagagaaaagggccaggcagaaaaggtcactggactacaggtaaagcagacaggcttccaacaagtagagctcctgagctcagtgcttcacaagtgttctcctcttaacagacaatgaaaaattttaaacaagccgagatgtttcaacagagcccacgcctcatcatacctctattcctttcaccgagtctcaggttttacctgagaaatgaggaaaagaagcaaagacagcaattgctgaggaagtgaggaaaataatgtttgcacacacattcggagcagaagctgtttgccactcacaggtctgacttctgtctgtttcagatagctatagaataacatctttggactcaacagggcacaggcaagcaagcagaattgaggatgtaaatgtgccaggtagcatttggtgcctcactttanacaccaacacaaacatctcaaatacgcattgtagaattttcctggcactgtgcaaagcatggtcgattgttactccagaattattagaaataggattatatgattattccagaatattttattttcccaaagaaggttaaggatagaattttgtagagtttttgtttttttaatgcatccaacacataggagaattttattttaaagccctttttaaaaatgaaaattctagttggtcatcaattctcttcagagcaaacatcatttattctactctataaaaagaaacctaaacaaattaagatgacaagtaagaaaaacttattctctttatctcctttaaaaccaaaattttagttctgctgggctggttttcttcaaattctcattattttaccaatgaggcactttataatacaaatgcttaaagtgttgagggattctgactcccaaaaacatcatttggatgataacaagatttgtactactgacgttggatatacacaattaaatccttcttctagtgaatgatgaaaataaatgttg

SEQ ID NO: 7041 - DNA, 915 bp, Homo sapiens
aaataagttgtattaagatagtagaaataggctggaattacaggtgtgagcccccacgtccggccttttttgtgtcttctttaagaaattcttctctacctggggtcataaacatatttttctctgttgtcttcacatgtttaaagtaatctttaagccaccagcagtcatgtgttacgaggtagggatccagtttcatggtttttcgtatgtataatcacttgctgcctcacctctcctttctttgctgatctgcatcgtggacagagtctccgtgtctaaacgcacactttgttcttcagaagtggttattctggttcacttaacaattgccatttgaaaagcaattatttttattttattttcatatttttaaattttatttttaatgataggacaccaaatgataaccagaaccccaaaatacataggtgaaaatctgagctaaattaatagaaacacaggcatgacagagaagactttatcacttaactctcttaggccattcattaattacacagtaagtagggggaaaaggtacatatcttaatatcaccaccacgcgtggccgatgtatttttaatggaatgaggtgatgactgatggggtcttggcctggtgcccaggatgaaaggtagcagcagacgagagtcactgaggctggaatcttgggctagatcttccactagcccccgaggtcttggaataggcggaccacaccgataatgaccttttgtttttgaggggcccttgccgactggaaaaggacatgcgaaaaaaaggttttttggcggggtcttgggtttcggcgggtaataggggcaaggcacatgggccccttggtgaaggcgcccctacctgaggcccctcatgcttgcgggtcccggtctcttccatagaggtagagaagggggt

SEQ ID NO: 7042 - DNA, 374 bp, Homo sapiens
aattcgggacgagggaagagcaggcgtgctgaatgagagtggcgtcgcagcgatggccagcgctgaggggtatcaaggtcttattcatgcattctcatgtcttttgactccaagatgccttggaagcattcctttgctcttttcattttcaatttttgaaaaatatacacaacacctgggcaattctgtgttgctcttttgaatctctacatggcctctccatctgcccacttttccaaagggtcatcttgggttttcccctctcctgcagtggactcagtgtcgcctgccaggagaagtgccactgctgctcctctcttctggcccacaattgtccgtgcctgggctatagtgacagccacctgattcatttc

SEQ ID NO: 7043 - DNA, 451 bp, Homo sapiens
  misc_feature (1)...(451): n = a,t,c or g
aggtctctggttctctctcgtgaggaggcttgccctgcccccttgtggtggcctcaggggtgagaaatcaagacccacccagtgcgaggaataacccgagctctcagcaacgcagaaaaaaataaaaaataaaaaactggccagcaacctagcttaaaggatcttcacatactgcagcgatgactctgtgcacagaccaaggaaggagaagccgtgggagccggtaaagtatttccttggtggtcaggaccaaggtaagaaagccgcaagggggaggggggcagtgaactactccttggtcggggtggcttagaggttaaaaagaggcgagccatccccatttcgggggattgaacctcctcgtgccnnnnnnnnnnnnnnnnnnnnnnnnnnnnnnnnnnnnnnnnnnnnnnnnnnnnnnnnnngtcataacggtttcaaagggtttcaa

SEQ ID NO: 7044 - DNA, 850 bp, Homo sapiens
gcttctaaagtgaagattcagttttcacttaaacaaccagcaagtcttgaagtctcttcccaagcaaatgggagcttctttggaccttggagcacacagaggattctactttctttaaaactttgttttcaggcaatttccctgagaaccgtttacttccagaagattggtggagcttgatctgaaggctggccatgaaatctcaaggtcaacattggtattccagttcagataaaaactgtaaagtgagctttcgtgagaagcttctgattattgattcaaacctgggggtccaagatgtggagaacctcaagtttctctgcataggattggtccccaacaagaagctggagaagtccagctcagcctcagatgtttttgaacatctcttggcaggggatctgctgagtgaggaagaccctttcttcctggcagaactcctctatatcatacggcagaagaagctgctgcagcacctcaactgtaccaaagaggaagtggagcgactgctgcccacccgacaaagggtttctctgtttagaaacctgctctacgaactgtcagaaggcattgactcagagaacttaaaggacatgatcttccttctgaaagactcgcttcccaaaactgaaatgacctccctaagtttcctggcatttctagagaaacaaggtaaaatagatgaagataatctgacatgcctggaggacctctgcaaaacagttgtacctaaacttttgagaaacatagagaaatacaaaagagagaaaggtaagtagcttgtgattgctaacttggaccagaccatggaaattcttaaaccaattggccatgcatgatgttttgatta

SEQ ID NO: 7045 - DNA, 3415 bp, Homo sapiens
  misc_feature (1)...(3415): n = a,t,c or g
cccgactaagtgacttaaactcccacctactcctggaataaggagtcaaagcccggataggcgcagtattctaccttgtaaatactgttatttgtatatactgtaaatgatgacatcggtgggcactaaccgagcccggggaaactgggaacaacctcaaaaccaaaaccagacacagcacaagcagcggccacaggccactgcagaacaaattagacttgcacagatgatttcggaccataatgatgctgactttgaggagaaggtgaaacaattgattgatattacaggcaagaaccaggatgaatgtgtgattgctttgcatgactgcaatggagatgtcaacagagctatcaatgttcttctggaaggaaacccagacacgcattcctgggagatggtcgggaagaagaagggagtctcaggccagaaggatggtggccagacggaatccaatgaggaaggcaaagaaaatcgagaccgggacagagactatagtcggcgacgtggtgggccaccaagacgggggagaggtgccagccgtggacgagagtttcgaggtcaggaaaatggattggatggcaccaagagtggagggccttctggaagaggaacagaaagaggcagaaggggccgtggccgaggcagaggtggctctggtaggcgaggaggaaggttttctgctcaaggaatgggaacctttaacccagctgattatgcagagccagccaatactgatgataactatggcaatagcagcggcaatacgtggaacaacactggccactttgaaccagatgatgggacgagtgcatggaggactgcaacagaggagtgggggactgaagattggaatgaagatctttctgagaccaagatcttcactgcctctaatgtgtcttcagtgcctctgcctgcggagaatgtgacaatcactgctggtcagagaattgaccttgctgttctgctggggaagacaccatctacaatggagaatgattcatctaatctggatccgtctcaggctccttctctggcccagcctctgggtgttcagtaattcgaagcagactgccatatcacagcctgcttcagggaacacattttctcatcacagtatggtgagcatgttagggaaaggatttggtgatgtcggtgaagctaaaggcggcagtactacaggctcccagttcttggagcaattcaagactgcccaagccctggctcagttggcagctcagcattctcagtctggaagcaccaccacctcctcttgggacatgggctcgacgacacaatccccatcactggtgcagtatgatttgaagaacccaagtgattcagcagtgcacagcccctttacaaagcgccaggcttttaccccatcttcaaccatgatggaggtgttccttcaggagaagtcacctgcagtggctacctccacagctgcacctccacctccgtcttctcctctgccaagcaaatccacatcggctccacagatgtcgcctggatcttcagacaaccagtcctctagccctcagccggctcagcagaaactgaaacagcagaagaaaaaagcctccttgacttctaagattcctgctctggctgtggagatgcctggctcagcagatatctcagggctaaacctgcagtttggggcattgcagtttgggtcagagcctgtcctttctgattatgagtccacccccaccacgagcgcctcttcaagccaggctccaagtagcctgtataccagcacggccagtgaatcatcctctacaatttcatctaaccagagtcaggagtctggttatcagagcggcccaattcagtcgacaacctatacctcccaaaataatgctcagggccctctttatgaacagagatccacacagactcggcggtaccccagctccatctcttcatcaccccaaaaggacctgactcaggcaaagaatggcttcagttctgtgcaggccacgcagttacagaccacacaatctgttgaaggtgctacaggctctgcagtgaaatctgattcaccttccacttctagcatcccccctctcaatgaaacggtatctgcagcttccttactgacgacaaccaatcagcattcatcctccttgggtggcttgagccacagtgaggagattccaaatactaccaccacacaacacagcagcacgttatctacgcagcagaataccctttcatcatcaacatcttctgggcgcacttcgacatccactcttttgcacacaagtgtggagagtgaggcgaatctccattcttcctccagcactttttccaccacatccagcacagtctctgcacctcccccagtggtcagtgtctcctccagtctcaatagtgggcagtagcctgggcctcagcctaggcagcaactccactgtcacagcctcgactcgaagctcagttgctacgacttcaggaaaagctcctcccaacctccctcctgggggtcccgccgttgttgcctaatccgtatattatggctccagggctgttacatgcctacccgccacaagtatatggttatgatgacttgcagatgcttcagacaagatttccattggattactacagcatcccatttcccacacccactactccgctgactgggagggatggtagcctggccagcaacccttattctggtgacctcacaaagttcggccgtgngggatgcctcctccccagccccggccacaaccttggcccaaccccaacagaaccagacgcagactcaccataccacgcagcagacattcctgaacccggcgctgcctcctggctacagttacaccagcctgccatactatacaggggtcccgggcctccccagcaccttccagtatgggcctgctgtgttccctgtggctcctacctcttccaagcagcatggtgtgaatgtcagtgtgaatgcatcggccacccctttccaacagccgagtggatatgggtctcatggatacaacactggaagaaaatatccacccccttacaagcatttctggacggctgagagctaatttggcccaaggctgggggctgtgttttgtgtgtgtgtataaatttgcactgaagtcttgtttcagaaaccagaccactgaggagagcctgctgagctgaggccatggcctgcgtggcttggggaaatgagttggtggataccttctgggcttttgaacttgcccctcccccatttccctctcccccatgtgtctgaccctgtcttacccatttcaagttcaagcggtgcagcaccttcgaagcatcaatgcacacacctgctgttgcttttgatttctggaaggcatgtagtttcaacttgtaacaaaaatatttgtagtcttcaataaactgtggtatttctttagctaac

SEQ ID NO: 7046 - DNA, 485 bp, Homo sapiens
caatttcctaacatgggcctctgatattagggagattctggagttacatatcttgataatttaggagtaaatctcccttagcaacagttaattatgccttaatttattttgtgttgctaaagagcaaatgatgaacccattgagttgctgttgaagctttgatttgaatttagtaattcctgattgcctgtatcatgggactttctctagtattagacaatcttccagttcctcaaatgaggcatgttctattagggcaggcaactgggtgtgtttgagaccatttgtaagtattttagggtgatagacaataatacacatagtgccaatgataaagtcaatccagtcacaggaccacccagaaaatattgaggactctaaccaaaagggggccaccaaatcccaaaccatccttaccaaaaaatggaagaggggacactgaatttgatgaattaaaaattatgagaagatttttgttgggaata

SEQ ID NO: 7047 - DNA, 343 bp, Homo sapiens
gaaatgagtgacatctacgtcaaagggtaaggttagcatgtgagagactttgccaagctcagggaaacagactctctccttcgtgagttttcattactgaatatgcccaagataggattcttggttttttgaggttattttatctcattaatgtgatctacttaggtagctcctggaaagcaaaggagagagagcaagacctgtacagactttgtttatgaggaaagctatataaggattataagaactgataaatatttctttgtttcctttttgacaaaatggattttcttcagtttcttaagcagatgtattatttctgggacgttttagccatgtagtt

SEQ ID NO: 7048 - DNA, 318 bp, Homo sapiens
ctccttcctggggcagtggagcagccacagccccagttcatctcgcgtttcctggagggccagtcgggtgtgaccatcaagcacgtggcctgtggggacttcttcactgcctgcctgactgacagaggcatcatcatgacattcggcagcggcagcaatgggtgcctaggccatggcagcctcactgacatcagccagcccaccattgtggaggctttgctgggctatgaaatggtgcaggtggcctgtggggcctctcacgtgctggccctgtccactgagccgagaactatttgcctgggccgttggaaaaaagcg

SEQ ID NO: 7049 - DNA, 499 bp, Homo sapiens
  misc_feature (1)...(499): n = a,t,c or g
tttttttttttccttattttttaaaattgtaaattggcaatttataattgtatatacttatggtgtacaaagtgatgttatgctttaacaatatgaagtggattaaatcaagctagttagcatattcatcacctcaaatactcaaaatttttgtggtgagaacacttgaaattaacacttggcaattttgaaatgtacaatgctgttttattaactatattcatcatgctgtgcaagagatctaaaaaagaaaaagccccaaaccatattcctcctgtcttaagattttataccctttgaccaccatctccccattatgccctcacttctgcctctgtaaccacactctgtcgattgttctagattggaattgttctagattccacacnnnnnnnnnnnnnnnnnnnnnnnnnnnnnnnnnnnnnnnnnnnnnnnnnnnnnnnnnnntatccatgttgttgaaaatgacaatttccttctttttaaagactgagtagta

SEQ ID NO: 7050 - DNA, 226 bp, Homo sapiens
ttttttttttttttttttggcaggtaaaatgtagttttattcagcagctatctcatcagcagctctcacactgtccacctttacctaggctgtcttctccagatctgcagctcctctcagcagccagctctgtggctcctgccacccccatgcttgcaggtgcactccctggctacagggtcagcggcttaactctccctctgggcacaagctgagccatgtcctg

SEQ ID NO: 7051 - DNA, 354 bp, Homo sapiens
aaacagtttgtcgttggtcgttatgtcagaagaggagtgtattcctggaagaaggcccacaaaatatacccagagcccaggtgcctttctaagacgaatcaacattcactcacaagttcagctaatatatgacagaaatacaagaatgaacaagactcctgacttaagcttacagctgatgggaaacttggggactggacagagaattaaaatacaacgtggttaggtacaacttacctgcgccagaggagtgacggaaggccttggacggggagtgatgcctggaggatgacagggcgacagaagaatgtgttaaacatatggagtatggaagaagaaggagaggggagatag

SEQ ID NO: 7052 - DNA, 657 bp, Homo sapiens
ttactcctctcctcactagttttgtgacctagggaaattttgcaatctttctgagtttgttttctcatcaggaacaggataatacctaagtaacaggatagttgacagatttaaatatgatcgcatggcggtggacatgagccgtaattagttgttaagaatatattgacactgaactctcctttatccatgttaaaattgtagataaacaacaattgacaaagaatagacaaaatgttctaacataaatattcttcccttgtttctagaaagaagtcacacatacagtaaaaataattagagaggacctagttcatattgaacaatcttccccaaagcctgaaacaggtcttctttctaacaccagaggtatcttgagtgagtccaacccctgcagtcccctctggtctggaatagatggaggaagtttgctccagccttagaacagcatgggctggcaaacgttctcaagagaggtctcgacttcaactctaaaagggcctgaggaatatgtgcaactgggtcgggttaaggccaagcttgaatcacatgaccagggctctcaccagcgccaaagtcagtggaaggatatcagtccccagagcttctgttcacaggccatgggatgctccatgggaggggtggtggagcattatg

SEQ ID NO: 7053 - DNA, 357 bp, Homo sapiens
gctatcatgaatgcaggccaggaggagggaatcgacaattttggaacctatgccatgaatgccttacgcctggagaaagccttcagagcctgggggttagagatgaactgtgatacaaatcctttggaagctggactggaatattttgtgaagttagataagccagcagacttcataggaaagcaagcactgaaacagattaaagccaaggggctgaaacgaagactggtctgcctcaccttggcaacggatgatgttgatccagagggaaatgaaagcatctggtacaatggcaaggtggttggcaacacgacatctggaagctatagctacagcatccagaagagtctggctttc

SEQ ID NO: 7054 - DNA, 195 bp, Homo sapiens
caattattatgatgagaaaagaagctggggcatggcaaacctctgaatgatttatcagaggtgctatcatgccaatcacataagatatggtaataatgcctgttaggactctttcataggatttcttttggtagttgttacataggatttttttgcagttattaaaaataaaaaactacttacatatttgtacat

SEQ ID NO: 7055 - DNA, 765 bp, Homo sapiens
  misc_feature (1)...(765): n = a,t,c or g
agaattttttaatttctagcccctcctccaaaaaaattttaaacacatcacatactctgaaaagtcagatttcaaatgcaagactagactttatatggaacatatatgttgggttttgattttgggtagcaattgacatatatttttctcaaaacaagttgaattttgttaacatatataattctttagtgaatttataaattaggaaccctgagaagaagccctgttgtttttcttaagagtctaaaactgacaatcttttaaaaatcataatacttttctagtaattgcatcagggaattggtgataattgaagaaagatccatttcttaagaataatttgatctaaattattatatggaaataaacatacttgtgttaactaaattgatcataaattcttgttcctgcctcacccctcaccccccagagaatagtgagtgactcgtttagattctctgctttttttcagttatgtacaagacttcagcatacattaatgtctttagtttataaatttgccaatgctttaatttccataatttgaaagttaaaagatgtaactaaaatactagcttttttaattcaatttccttttggtggaagttggtatgattggaaacctttggctttttcctgggttaattcntcccggccaaccccctcttttgagaggaaagggnaatccgtgggaatggagttataaattaatnggccttttttttccnttaanttccttcattcagtgggcaaaaaacattttta

SEQ ID NO: 7056 - DNA, 1915 bp, Homo sapiens
tacatcgactcattctccattttgctttggttttgtcttgacttgacttgactttgggggtaaagtctttcaccagcacacaagagtttgattgtacaaatatatcttctgcattaacatctctgcctgttgcttaagatcagttgcttttatactcagaatggaaatacctgatcttggctagttttgttataagatattgatttcatttagatttccctccacgaggtcagcaaactatcatgttcttatgtaaacttaggccaaggccagagttatcatagtccctaggttgctacggcttatcatgtgcttggtaaaaggtgatcgcaggttctcagacgagtttactttacatgagatggaatcaggcagagaggctgggatgatggagaaagctcgaggtgaagttttaaaaaaaaagttgtggaaaggaaagttccaaagaggtggtttctgaggaagtcagagcgcccagggccagagcagtcagtaatgggtgaatgaggttgtttggaaagtcggtgtgacagacacatggatgccatctacttctaggttgctggtgggtattaaatatgcacaatattccatagctcactgaggattttaaaattataagcataggattttatattttggggtgaaagaattatctggcacattaggtattggagtttaaaaaaaaagccaaatttcacagtcttaataactttttttaaaaaaaactaaaaggcgcttcatgtccagtgtgtggcccttctgaaacttatggtcatctctcccactgaaaccaaggtcttttcaaatgtggctaaatggggatgaggagacacgggtaggactttcttggtgtgtgtgcattctttaaagagccaagttgcttcggggaaacagccagggaaaatggtcaagattatttttaggaggttattttattggggattttaagaactaataacatcttgagttatttttaattcagggggatgtggaaaggtttgcaattgtcaagtgttttgttgtagcttagtatccataagggaaacttagactatagacataactacaaagccagtgcagcttttgttttctgtatgttgttgggggatcaactttcacacatagcaagcacatggcctccctggatgtcaggatgcccttggttaggatctgtatttgcccttaattttgttgaaatcttttttccttcttcctcttgaaaagttccaaaatatagtttattgtatctttcatcactaaaaatttgttcctttttcactatgggcagttcacacaaggcaaaaactattgaacagttggttttaggtgtgttgtataactttgctgtatatcaaactaattttgacaagttttcatcctaagcctcaaatcatgtaattaataatttgcctgtttatttatgacctaattgtgattcttttattaataaaagctaatgggaaaaggatccctgattaagctgatgactagacctacaattaattttcctgcagtatatgaagtattgtaccagagtattaaaagatatgtaatattttattgataaatctatcctttaaaaggaatacgttttaggatgtcatcattttgatgtgaatcatgtaaatgttgataatatgctgtttattatacatttagtgtttcaagagattcacttaattgcctttttgcccacgtatattatgtagtctatttgcaactgttcttaaaaaaatgacattaaaagaatagtttatgtagagaaacattagtggatgttaattgtctccccacctatatttatgggtgttagcgcaactgctttgctagttgcaaagctgtattatcagagtaaaagtgtatttgtaaactgtatgggaactaaaaattaggaataaaaccattttcttat

SEQ ID NO: 7057 - DNA, 370 bp, Homo sapiens
aaacctggttgaagttctcccactttatattgtaaatgattacatagtttattagtaattgtgtcccctgtccacccactggtccatttggatgggaaaattttcaaaataacttcataagaaaatgataagaaaaatgtggtcaccggtatcatgaggaacttccagacagctcagcacagaaaagttggttttaaagtcctcgaaaacgttactggtaatgagcttccactcctttagtcgttgtgcatagatacaccacagagtaaggttataaaaataaaagttgtttcaggaaatttcccattgctttattacatgatcaatgagagtaaagagaaatggaagttgacgggataggaatgaggga

SEQ ID NO: 7058 - DNA, 171 bp, Homo sapiens
gatgccagatgcctttttaggttattgaatgataaagtgcttctatcactctccccacccaaaacctgggtgtgtaaacactggattcagaatttctcacttctctatgttttatgggttgactcatcacttgggtcctctcctacctccaggaaaatggttttactttga

SEQ ID NO: 7059 - DNA, 902 bp, Homo sapiens
actagaaaagagccatattgaaagtgccctgttggagacagggcaaatgccacaaaaatgatgtaaatttacatggaggaaaagtagaatctgcctggtttgtaggcagcagaagacatttttcatcagtgggcaggtgttctttaccttttgtagaaatgggagtcaagtctcaaataggaggctccacaaaatctcatgccaggtctctgataccttattcacagaagttctttgaagtatttattgttattttctttgacttatgggaaaactgggacacaggaagacaggtaaattacccaacctcacacgttaagtcagaactgggagccataattttgtatccctggtataaatagacaatctctcgaagaaatgaagagatgaccatagaaaaacatcgagatatctccagctctaaaatcctttgtttcaatgttgtttggcatatgttatctttggaatttagtgtctgagcctctgtctgttactgtagtatttaaaatgcatgtattataatcatataatcataactgctgttaattcttgattatatacctagggacaatgtgtaatgtaagattactaattggttctgcccaatctcctttcagattttattaggaaaaaaaaataaacctcctgatcggagacaatgtattaatcagaagtgtaaactgccagttctatatagcatgaaatgaaaagacagctaatttggtccaacaaacatgactgggtctagggcacccaggctgattcagctgatttcctaccagcctttgcctcttccttcaatgtggtttccatgggaatttgcttcagaaaagccaagtattgggctgttcagaggtgcacacctgcattttcttagctcttctagaggggctaagagactt

SEQ ID NO: 7060 - DNA, 253 bp, Homo sapiens
  misc_feature (1)...(253): n = a,t,c or g
gtttcttatagattctgagtattagattttgtcaggttcataggttatgaatatttttgccattctgctagctttggggtaagttagtttttatttttctagtttctctaagtgtgatgttaaattgttagtttgagatcattctaacttcttgatgcaggtactcgtgccnnnnnnnnnnnnnnnnnnnnnnnnnnnnnnnnnnnnnnnnnnnnnnnnnnnnnnnnnnnnnnnagcngtnncaannnnctcc

SEQ ID NO: 7061 - DNA, 510 bp, Homo sapiens
cacgttaagtgcttagaacatggcgtgtgacagagtaagttctgtatacctggaaatgttagctgtcctcatcatcatcagacccagggctgagcaggctgactcctcatactcttcattacccagagcatagttccatttcctctcactgtcccacttaggccttcaggatactttgagatccccggagaagctggccagatttcctgcagtggtagggggtgcccaggggagtctgaggctgtgggggaattcttagggtgaaaaggcccagggtctccccctgctaccttcaccctggcagatgatggtgaatgtgccgctcttcgcgggggaacccccaactgcaggcagcagctccgcctgcagctcccagtcttcctgcagcagatgcagaacccagagtcactctccatccttaccaatccccgagccatgcaggcattgctgcagatccaagcagggactacagaccttgcagaccgaggcccctgggctgggtaaccaggt

SEQ ID NO: 7062 - DNA, 153 bp, Homo sapiens
ctctgagaggacatgagagtattttgcaaagtgagggcaaggcccagtgtggagtgatattgttattccaagattccactgcaaaagtggctgctttggatgccagcccaggatgagtagttcctgttctcagggaggtcatccgctgagcat

SEQ ID NO: 7063 - DNA, 751 bp, Homo sapiens
  misc_feature (1)...(751): n = a,t,c or g
tccactaaacttttgtggtattgggggtaagaagatctaatggcttcaagttagcaatggtgtgttaaaatttttttttttaataaaaacaaaataaaagaagatctaatggttgtgaagtctcatcctttggtgaaaggtgctgttgagcctgatacaatatattcaactgccagagcacagacacttctactttgtctagctggagattctttagccaggtactccttgacagtgactgttaggtaagcgacatttgcaaggtttaagtgcctagtgcacagaaatcagaaagcaaggcttgttttaggcaaacgtgccacatatcttgtaaggtaaagagacaaaaatataaccggtgaaacgcactgaaaaaaaatcctggcatagacactccgggtgcctgctccacatacattctccatttttcatcagaattcttgttttgttcaggtgaaaggtagccaggctcttcaaaggaggctggactttttctcagcctctctgaggatgcattcttggtaaagttaatctaatcacgtcaattccactcactttgccaatgattggtttagaaatgggcatgggatacaatctggccaataaggcatggggagaagtttgaggtttctaggaaagttttcttcactctccaaaagtccctttccttcttgtcctcgtgccnnnnnnnnnnnnnnnnnnnnnnnnnnnnnnnnnnnnnnnnnnnnnnnntngtnntcnntnnnnnagg

SEQ ID NO: 7064 - DNA, 414 bp, Homo sapiens
ggaaaggccttcaggcagagggcttccctcatccgccactggaaaattcacactggagaaaggccttaggatgggagataattccgtttccttgttcaacataataactgacatcagagagaagctccaagcatagcctttatgtgtagccgacagccagaagtagaactttatacactcaaacactcaccctggggaggttcttccgagtgccagctatatgggaagccttctggagctatgctgaattttctagactcttgctggaatttcgtcaaggcagttcctgttagaagccatctgtctttgtgctggaagaatcctgccttgtggccaaagtaaccccaatgtgtttcaaaagacagacctctgtactattcccttccctgggagggaatcatcagtagcctgagg

SEQ ID NO: 7065 - DNA, 153 bp, Homo sapiens
aaagatttttcaaaaatgtatgaggtatagaacatccaactttgagagcactttaaaaaaactctaaatattagtctcacctaccttgccatagagccagtcatggtgatttttacatatatattcaaaatctcttaaaagtcagcttaagta

SEQ ID NO: 7066 - DNA, 356 bp, Homo sapiens
ttcattgactatttccctctgttagattttaagctccataaggggagagatctttgtggtcccccattatcctaagcacctaggacagtgtggtagtttcccaacatgctggtaaacaggtgctgctgcagctcatcctacagctatttcactttctgcattgcttttgaaattgaccacgtgctctgaatgtcatgtgcagtcctacaaagcttaatggcccatcttgttttagaaaataacagcttatttgttatccacatccttcatctgaggcatcctgccttggccttaaccattgccgggtatgtctccagaactctttattttcttcccggggcctgggacaggtagtt

SEQ ID NO: 7067 - DNA, 1741 bp, Homo sapiens
cgggagagcggcggggccgagagcgtgactcgcccgctccgcgctgcttcccccgcgccgcctccccgcgccgctcgcgcagccatgtccgaggagaagcccaaggagggtgtgaagacagagaatgaccacatcaacctgaaggtggccgggcaggacggctccgtggtgcagttcaagatcaagaggcacacgccgctgagcaagctgatgaaggcctactgcgagaggcagggcttgtcaatgaggcagatcagattcaggttcgacgggcagccaatcaatgaaactgacactccaggcacagctggagatggaggacgaggacaccatcgacgtgttccagcagcagacgggaggtgtgccggagagcagcctggcagggcacagtttctagagggcccgtccccagcccgggccgtccatcctcgcattgctgttgaatggtgagcacgtgaccatgccgaccacaaaggtgtctgcggaaactcgaggacattcaccacgatgattttcctctctttgatgtacttcaagtgcaactcaaaactatatctgcagggatgaatctgtaacttaaattgggccaatcagaattgttatctttgttcaggtaaaatgagttgcaagatattgtgggtacttttgtgtgctcatttgtgttttccccccctcctacaacatttttttaaccccaaaattatagcctgaatgttcgcttttagtctggccagggatctgactcctgagttggttgcctctcccctgctcactccagtcacatagagaattggtgtttcccgcagtggggatgcagctgttggacaggtattgggggcaaggttggtagggaggacagactgtcacttgctgttacaggcacaggtgattaaaatgctaaatattgcaaatttaagctttgtcagtatatggaaaagttgaagggaaaatactggaatgcttcttcaaaggttaaaaaataaccgagtcttttggtaatttgaccccacgtgctctctggccctcaagcatgtaacctcggggtctgaggcccaggacccacccccctgccacccctcccaccccactccctgctcagtacctggcgttggtacacaggcaaggattggcacaaccaaaattggcctttttctccctcttaatattgaagaaattcccacatttctcatttggtaatggtgttgtggcctcagatttcttctagtatttgcttctgatgaatgattatggtctatacataaaaaagtaagactaagtattgctgaatttgcagttatgttgtcgtgtataagagctacttccaagtgtggttacaaatgaacccatgggaatgatgacttcatgttcttctcgtgggtttgtgccgtgctgctttccaaataggtattgaatttatgcattagtctggtgatttcagttctgtgaaatattttgggatctataccaattaaacattttccatagttctgcctattgtccttccctgaggctccattgctgcttggtggccattctctgcctttttacagtcacctgaacaatgacccatcatctcttgcttgcttgaaatcttgctgaaatgttctcatttcctgtttgctgtatgggctcgggtgggatgtttgttggctctgttgtgtttattcaccaatttgtacattatttgttgtcctttactactgtaaacagtaaatatagtttggtattctgtcaaaaaaaa

SEQ ID NO: 7068 - DNA, 632 bp, Homo sapiens
attttgagcattcctctgatatttgaaaaggaagtacaacaggaaaggaagtctgaggatggaagctaaaattggtatgaatttatattttagagatcaaaatgtaccttatgttgaaacctatgtaagaagtgattatgtagaaagagtgaaagtgatagctcttagtctggaaagcccactggcttgtttgggcatttctcatggcttcccactcaaagtggatccccaaaatcacttgatggatttccttgctgatttctaagtaaactatggtttaagaaagaaatgacagggctcagcactgccctacagtaccaagaatacaaatgtttccatgaagtcttcaaaggcatttgtaaaattcaggctgtaagtgattagttagttcattctgcacttatttattaactgtatattcagttccaggctctaggggtagagattatggataaaggtgaattaggatagatgaagtttttgccctcacagcaaaagctttagccaataattaaagctatcactggaaagtgggtctgtgccaataacctagagaagagcagtgcttttaagagttgagctatattccccaatcagttcttaatggtggttttacccccttccctctacac

SEQ ID NO: 7069 - DNA, 415 bp, Homo sapiens
caacgttattgtgcagaattcattaaacattcacaacagataggtgatagttgggaatggagaccatcaaaggactgttctgatggctacatgtgcaaaatacactttcaaattaagaatgggtctgtgatgtcacatctaggagcatctacccatggacagacatgtcttcccatggaggaggctttcgagctacccttggatgattgtgaagtgattgaaactgcagcagcgtccgaagtgattaaatatgagtatcatgtcttatattcctgtagctaccaagtgcctgtactttactttagggcaagctttttaggtaagaacatgtctgaagctaaaagtaaatttataacatttacatataaagcaaaaagcatatttggaaaattattctccagaggaaaaaaaaaaa

SEQ ID NO: 7070 - DNA, 173 bp, Homo sapiens
gcacgagggcaggtacacaacttaaaatctcacaccccagaagtgtgcatatatgaacagacatgtacaccaactgcacacatgctcacaatcttgtaggccaggggtgggcaaaccatggcccacaggctgagtcctgccctctgtttgattgtataaataaagctttattg

SEQ ID NO: 7071 - DNA, 558 bp, Homo sapiens
ctcggcgtgggtaaagtgagatgaaaatattgaccttatattcctaccttggaggaaccatccttcttccactatataataatcctgcttagttcatgtggtgctgaccctacttctatcctgctctgggcatcagcaggcaatcgaagcgtacaaacaaaatacttcatttcctggccactttgttcatggatgggcagatcgtaactcaggccaatcagagttctccctagacgtgtgctgaagctataggctacgggtacaatgtagaactgggacaattaagagacatcttttcaacttccagaaaatctatcagagaatgaagccagacaaagccaggaccccaacatatgcagcaactatatatggaattggcccacctttgaacatagcccaaaattttccttctgcacttaagctagtgtgacattcttttggttactcacaactgagtttcttgaatcactccaggccaatgtacatttcactcctcactgcatttaatgaaaaactactaatgaagaaagtatgtcatttcccttatgtgtgccggca

SEQ ID NO: 7072 - DNA, 177 bp, Homo sapiens
cgagtagttggagttacctgtgcagcctgcccattcccatgcatgaatgatcttaaatttcctgtagttgtgctggatgagtgtagtcagataactgaaccggcctctctccttcccattgcaagatttgagtgtgaaaagctgattcttgttggggatcccaaacagctaccttct

SEQ ID NO: 7073 - DNA, 352 bp, Homo sapiens
gagaaaaaccttacaaatgtgaagcatcttataaatcctgtgaagcgtctgataaatcctgtagtccaagctcaggcataattcagcataagaaaattcacaccagagccaaatcttacaaatgtagcagttgtgaaagagtcttcagtcgtagtgtccaccttactcaacatcagaaaattcacaaagagatgccctgtaagtgtactgtatgtggcagtgacttctgccatacttcatacctacttgaacatcagagggtccatcatgaagagaaagcctatgagtatgatgaatatgggttggcctatattaaacaacaaggaattcatttcagagaaaagccctatac

SEQ ID NO: 7074 - DNA, 2376 bp, Homo sapiens
  misc_feature (1)...(2376): n = a,t,c or g
gccgccgctgctgctgctgctgtgctcaggcctggccggacagactctcttccagaacccagaagagggctggcagctgtacacctcagcccaggcccctgacgggaaatgcatctgcacggccgtgatcccagcgcagagtacctgctctcgagatggcaggagtcgggagctgcggcaactgatggagaaggtccagaacgtctcccagtccatggaggtccttgagttgcggacgtatcgcgacctccagtatgtacgcggcatggagaccctcatgcggagcctggatgcgcggctccgggcagctgatgggtccctctcggacaagagcttccaaggagctgaaaggacaggatgacggaactgttgcccttgagctcggtcctggagcagtacaaggcagacacgcggaccattgtacgcttgcgggaggaggtgaggaatctctccggcagtctggcggncattcaggaggagatgggtgcctacggntatgaggactgcagcaacgggtgatggccctggaggcccggctccacgcctgcgcccagnaagctgggctgtgggaagctgaccggggtcagtaaccccatcaccgntcgggccatggggtcccgcttcggntcntgggntgactgacacgatggcccccagtgcggatagccgggtctggtacatggatggctattacaaaggccgccgggtcctggagttccgtaccctgggaaacttcatcaaaggccagaactttatccagcacctgctgccccagccgtgggcgggcacgggccacgtggtgtacaacggttctatctacttcaacaagttccagagccacatcatcatccaggtttgacctggaagacagagaccatcctcaagacccgcaggcctgggactatgccggttacaacaacatgttaccactacgcctgggggtggccactcggacatcgacctcatggtggacgagagcgggctgtgggccgtgtacgccaccaaccagaacgctgggcaacatcgtgggtcagtaggctgggaccccgtgtccctggcagaccctgcaggacctgggaacacgagctaccccaaggcggcagcgctggcgagggccttcatcatctgcggcacgctgtacgtcaccaacggctactcagggggtaccaaggtccactatgcataccagaccaatgcctccacctatgaatacatcgacatcccattccagaacaaatactcccacatctccatgctggacttacaaccccaaggaccgggccctgtattgcctgggaacaacggccaccagatccttttacaacgtgaccctcttccacgtcatccgctccgacgagttgtagctccctcctcctggaagccaagggcccacgtcctcaccacaaaggaactcctgtgaaactgctgccaaaaagataccaataacactaacaataccgatcttgaaaaatcatcagcagtgcggattctgacatcgaggggatgggcatttacctccgtgttttctcccttttcgagccggcgggccacagacgttcgggaaggaaactcccgtatttgcagctggaactgcagcccacggcgccccggttttcctccccgccctgtccctctctggtcaaacaacatactaaagaggcgaggcaatgactgttggcccagttctcaccggggaaaaacccactgttaggatggcatgaacatttccttagatcgtggtcagctccgaggaatgtggcgtccaggctctttgagagccatgggctgcacccggccgtaggctagtgtaactcgcatcccattgcagtgccgtttcttgactgtgttgctgtctcttagattaaccgtgctgaggctccacatagctcctggacctgtgtctagtacatactgaagcgatggtcagagtgtgtagagtgaagttgctgtgcccacattgtttgaactcgcgtaccccgtagatacattgtgcaacgttcttctgttattcccttgaggtggtaacttcgtatgttcagtttatgcgatgattgttgtaaatgcaatgccgtagtttggattaataagtggatggtttttgtttcctaaaaagaaaaaaaaaaatcagtgttcacccttatagagacatagtcaagttcatgttgataataatcaaaggaattactctcttcttgttaaattagctaaatcatgtaaccgcagataggaagggctcgcctggggaaactctggtttccgatgggacaggaaagtcatacgggcaacagtatgcggaaagtacgttttttaagtaaaaaacaaaggcaaactttgtactatccagttatctaaggaacaataaaaacattaggagat

SEQ ID NO: 7075 - DNA, 184 bp, Homo sapiens
gaactgatatatttaattagatccttaaagcccataggatttatactggtcatttctgtcaattgtgaatctgctcatacttgttcttcatgaaactatggaataatttttcatgtattttcatgtgtcaatctgaaaagaaacttaggttctccagaacagaggagtttatttgaaaatagca

SEQ ID NO: 7076 - DNA, 486 bp, Homo sapiens
  misc_feature (1)...(486): n = a,t,c or g
gggctaagacttccatcactattctcaagtggtaaaagcatgcaccctgtcttctttccattttcacaggttaagttttcaatatatattatcatttagttaatggttgctaaaaaaattgttgcagcttttccttacaagaataaaggaaggtccactactttctcttcactaatttggaaattgtacagtttctattcctttntttnctnnnnnnnnnnnnnnnnnnnnnnnnnnnnnnnnnnnnnnnnnnnnnnnnnnnnnnnnnnnnnnnnnnnnnnnnnnnnnnnnnnnnnnnnnnnnnnnnnnnnnnnnnnnnnnnnnnnnnnnnnnnnnnnnnnnnnnnnnnnnnnnnnnnnnnnnnnnnnnnnnnnnnnnnnnnnnnnnnnnnnnnnnnnnnnnnnnnnnnnnnnnnnttgcaatctcctgatctcgngatctgcccgccctcggcctcccaaagtgttcgcagtcacaggcaagagc

SEQ ID NO: 7077 - DNA, 792 bp, Homo sapiens
  misc_feature (1)...(792): n = a,t,c or g
cccctcaactcagcccctaaatccaatgtctagaatcaggccctttggacatcctgctgacacttgggccccttaacaccttgggctgctcagaccctccagatgaggtccagcccagatctgagaggaaccctggaaatgtgaagtctctgttggtgtgggagagatagtgagggcctgtcaaagaaggcaggtagcagtcagcatgacagctgcaagaatgacctctgtctgttgaagccttggtatctgagaggtcaggaaggggacctctttgagggtaataacataattggaaccatgccactcttgagccacaatacctgtcaccagcctgttgttttaagagagaaaaaaaatcaaggatatctgattggagcaaaccacttctttagtcatctgtcttacctccctgggacagctgttacctttgcagtgttgccgaatcacagcagttacctttgcaatgttgccgaatcacagcagttctgttggagaaacgcttggtttccggatccagagccacagaaagaaatgtaggtgtgaagtattaggctgctgtcagggagaggatggcagatggaggcatcaagcacaaggaaaatggcacaacctgtgcccctgttatacacacgttcatgtgcacccaagaacctatgactttcttccagttccttcttaccagggtccccattcctgctggccagcttcttcaacataggcagggccntagggaccccaggaggaaggattcccagttgtttgcttcaaagttctnaaccatccttaaag

SEQ ID NO: 7078 - DNA, 294 bp, Homo sapiens
ctgaagcctgaggcagccttggggcagcagtggctcatggtttacattggaaaggtaagggaggtttctggtttcctgttttataaatttatgtttttacttggtattttgacaaacatttgtatttgaagcacactaaacatctagtattgccgttttctacttggctttagcaaacaagcattaagtgaataaactgttccactttcttccttcccaggtttatcatgagtaaccgggtgctttgcttctgtgattcttggccagtgtcggtctgtttcctttgccattgag

SEQ ID NO: 7079 - DNA, 1890 bp, Homo sapiens
gattccgggccgggaaccctctttttcaaacgggacccttctaaccggttggcactgaaatgtaaaacttcacgtgccttcttcagtgaggtgcaaaggcgttttgatgccatgccgtttactttaaggtactaagcaatgatagtacttggaaccagtctgactcacaaaccatacacccgggaacactttttcctctcccttcctgcctagacttgtagcgtgcatgtgctcactccctccctctctctccccatctccttctcattgaaggtaatgtaaaagagcaatcctaagcatgatttctgcctgagggtaggagctattttaaaatatgagcaaaatggtaagacttgatggggagttaaagatacctctgaatatcatcttccctgccagagcatttgaagatgagaagaaggctcggatgggtgtggtggagtgcgccaaacatgaactgctgcaaccatttaatgttctctatgagaaggagggtgagttccaaaaagagcttcactttggattccctgattataagatatccttcctgtaagttcagaagagctaagtatgacaaaggaactttttatcaaaacacatcttcatttttgccataggtgaatttgttgcccagtttaaatttacagttctggctcatgcccaatggccccatgcggataaccagtggtcccttcgagcctgacctctacaagtctgagatggaggtccaggatgcagagctaaaggccctcctccagagttctgcaagtcgaaaaacccagaaaaagaaaaaaaagaaggcctccaagactgcagagaatgccaccagtggggaaacattagaagaaaatgaagctggggactgaggtggggtcccatctccccagcttgctgctcctgcctcatccccttcccaccaaaccccagactctgtgaagtgcagttcttctccacctaggaccgcccagcagagcggggggatctccctgcccccaccccagttccccaacccactcccttccaacaacaaccagctccaactgactctggtcttgggaggtgaggcttcccaaccacggaagactactttaaatgaaaaaaagaaattgaataataaaatcaggagtcaaaattcatcgtcttcaagcccctctttctagccttttctactactctctgcttggtcaaggtttgtgccccactacagaacaggggctaaattagccaccaccactgaaaactcagccgaatttttttataccactctgatgtcagcattttttccatctgtttggggctttttcctcttttttccattctccccaaatattttatctggcttcaaaattaagaggattatttttcagattgtttttattcagtgtggccgattcctcatctgattcaggctgtccagtcaggcccctcccattttaggagctggagccttcatttatgaagagattctcatctatgaaatggatcctcatttgtaaatcttttttcttccattttcacaaagctgtaaagaaataatccatctcaaccttaccctttttctctggagtcagtggggtctttcctcgctccatcttacacagacctgagctggaagcctcaactggttttgttccctgtttgaaatattgtgatctccctcccatgaaagaaaaaccaagaaccagaggcgtagactgactgaagacacaactcctggctttctgaagctatggacttggattggattgctgggggtttgtagagaaaggtgacaaatttcagtacctctggcatgctgtcccaggaaactagggctcccactaacttatgaggtttttaaacacattgaaaatgacatgacattaaaataaatttggatttgctcataaa

SEQ ID NO: 7080 - DNA, 157 bp, Homo sapiens
tgccttttgaatgaatgaatgaacaaaccctcacaacagtactataagaactagatattatttgagtctgtttgtggataaggctcagaaagattaaataattttttccaacttgtagaggtagtgattcagagactcagatcttctgacaccagaa

SEQ ID NO: 7081 - DNA, 268 bp, Homo sapiens
acggctgatgaagatcaaccatgaccttcggcaccgggtcacggtggtggaggcccaggggaaagccctgatcgaacagaaggtggagctggaggcagacctgcagaccaaggagcaggagatgggcagcctgcgagcagagctggggaagttcgagagagctgcagggggacacagcagaatgggaggaggacctgagacggaccggtggagaggtagcatctcgacgcagaaaggtggcatggattcaaggacccaaccgccccgg

SEQ ID NO: 7082 - DNA, 359 bp, Homo sapiens
aactggaggctacatactggatgacggactctggcagctgtcaacttctaattggacaacgcaactactttgtctagcagagcatgcgactcacatcctaatgccctaagcctttgagaacactagcggactgatatggactgccgatagctcagaatgcttcaggcaagacaaactgtcgaccgctgctgaagaccgagccatgaggagtaaagaagtactgatgacagatacctcccacgagtaaggtgactgacccaaggctcatggatgagcagggtcctgctgaggacttctctgagtacaatgggagccactgatagcttttaaggggaatgactggtgcgatttggttaaca

SEQ ID NO: 7083 - DNA, 2987 bp, Homo sapiens
gaacacgtggaggcaaacaggaaggtgaagaagaacttatcctatcaggacggaaggtcctgtgctcgggatcttccagacgtcgcgactctaaattgccccctctgaggtcaaggaacacaagatggttttggaaatgctgaacccgatacattataacatcaccagcatcgtgcctgaagccatgcctgctgccaccatgccagtcctgctcctcactggcctttttctcttggtgtggaattatgagggcacatcctcaataccaggtcctggctactgcatgggaattggacccctcatctcccacggcagattcctgtggatggggatcgggcagtgcctgcaactactacaaccgggtatatggagaattcatgcgagtctggatctctggagaggaaacactcattatcagcaagtcctcaagtatgttccacataatgaagcacaatcattacagctctcgattcggcagcaaacttgggctgcagtgcatcggtatgcatgagaaaggcatcatatttaacaacaatccagagctctggaaaacaactcgacccttctttatgaaagctctgtcaggccccggccttgttcgtatggtcacagtctgtgctgaatccctcaaaacacatctggacaggttggaggaggtgaccaatgaatcgggctatgtggacgtgttgacccttctgcgtcgtgtcatgctggacacctctaacacgctcttcttgaggatccctttggacgaaagtgctatcgtggttaaaatccaaggttattttgatgcatggcaagctctcctcatcaaaccagacatcttctttaagatttcttggctatacaaaaagtatgagaagtctgtcaaggatttgaaagatgccatagaagttctgatagcagaaaaaagacgcaggatttccacagaagagaaactggaagaatgtatggactttgccactgagttgattttagcagagaaacgtggtgacctgacaagagagaatgtgaaccagtgcatattggaaatgctgatcgcagctcctgacaccatgtctgtctctttgttcttcatgctatttctcattgcaaagcaccctaatgttgaagaggcaataataaaggaaatccagactgttattggtgagagagacataaagattgatgatatacaaaaattaaaagtgatggaaaacttcatttatgagagcatgcggtaccagcctgtcgtggacttggtcatgcgcaaagccttagaagatgatgtaatcgatggctacccagtgaaaaaggggacaaacattatcctgaatattggaaggatgcacagactcgagtttttccccaaacccaatgaatttactcttgaaaattttgcaaagaatgttccttataggtactttcagccatttggctttgggccccgtggctgtgcaggaaagtacatcgccatggtgatgatgaaagccatcctcggttacacttctgagacgattccacgtgaagacattgcaaggacagtgtgttgagagcatacagaagatacacgacttgtccttgcacccagatgagactaaaaacatgctggaaatgatctttaccccaagaagctcagacaggtgtctgggaacactagagaaggctgggtcagtacccactctgggagcatttctcatcagtagtttcacatacaaatcaaccaatcattccaatgagtgtcatcctacacatgtaacactcagtggcccatggccatttatgaggcataccgcctatgggttgtcaccaagccaggtgctattggtcatctgctcctgttcacaccagagaaccaggctacaagagaaaaagcagaggcccaagagtttgagggagaaatagtcggtgaagaaaccgtatccataaagacccgattccaccaaatgtgctttgagaaggataggccttcattaacaaaatgtatgtctggttccccagtagagctctactgcctcaacccaaggggatttttatgtctggggcagaaacactcaagttgattagaaagaccaggccaatgtcagggtacctggggccaaacccacctgctagtgtgaattaaagtactttaattttgttttctgtggaggtggaaaagcaacattcatagtctttgggagaaatgcttagaaattcagcatttgacccttgctgtgaattaagcccaattaattcctgtttgtctacatatgatctgtctgtggcaaaagtttaatcagaggaaattctttcccagtctgtcgatttatgcctcagccacttgcctgtgctacaattcattgtgttacctgtagattcaggtaatacaaactatatataatcatcaagtaatacaaactaatttagtaatagcctgggttaagtattattagggccctgtgtctgctgtagaaaaaaaaattcacatgatgcacttcaaattcaaataaaaatccttttggcatgttcccatttttgcttagctcaattagtgtggctaaccaagagataactgtaaatgtgacattgatttgctcttactacagcttcagtgattggggggagggaaaagtccccaaccccaatgggctcaaacttctaaggggtactcctctcatccccttatccttctccctcgacattttctccctctttcttcccatgaccccaaagccaagggcaacagatcagtaaagaacgtggtcagagtagaacccctgaagtattttttaatcctacctcaaaatttaaccagttacctgagagatttaacattatctagttcattgaatcattgtatgtggtcatggataaattgcacaccttggaattcgctttctaaaggaaatcaaatgaatggaggaactttccaaacaccactttacttgtgttatatagccaatataactatctctactgaatgtcattgaaaaactaaaaaattaaacttatttacaaataggtaa

SEQ ID NO: 7084 - DNA, 358 bp, Homo sapiens
ataatcatgtcatgggcagatattatcttgatccccattctaccatcaaataatggagacctggaaagacaaggggacctgcctaaggtcctgctcttcataaatgcacagccaggaaactgaagcctgtgtcttttgggtcctccttcaaggacctctccacaccctaacctaagctaagctgttcctcagtctttcaagcctgaagagaagaatcttatattggttacgattatatttgaatggttcaaacaagatagtgtatttttctctcacttcaaagtctgaaggtttgaagtccaggactagtatcatagttctgccccctgaagtcctcaagaacccgtactcccttctg

SEQ ID NO: 7085 - DNA, 249 bp, Homo sapiens
tctgagctagggtcactaagaattacagcagatgctgttttcttcttccagagaagagaatgcccttctcccctgcccatcacttgaagctgaaacttgaagtatcacttcctactcaataggccaaggccatacacaatgatttagataatggactgaaagactgcctggaatctaaacccagctttgacacatttactagctagctgtgttattttgggcaggttatttattatttattgtatgtcg

SEQ ID NO: 7086 - DNA, 600 bp, Homo sapiens
ttgggatggagactggaagacatcagatttttaagagtggttccggccagtattagatgctcccagggtaaagcgttaagatactgatttacctaataggaactagcttgctctaaaaaaattagtcggggtcttcactcggagtaaaattaagtcttttcaaattataccttggaattcctgatcctactagtctattaactggaaatctgattgagagatatggaaatagtcaactaaatactctgcttggagactaagaggtggtggtggtaacattggaccatctttgacactgttggtttgccagtttccctctgaccttttccagttttgttcatggactatgtcataaaggtttctttcatgagtaaattttgaacccaggttcaaggtgagttcagaatatactcaaattcattcaatcctttttttttttaatgcagggttgtacatattttaataattttcttatgtatctggtatttaatgctgacaggattccagtcaatggagaggtttcattgcaagtagctgcaggtgtgtttcatggtagagataaaagttttcagtgaagcagactttcgttgtaaaaaaaaa

SEQ ID NO: 7087 - DNA, 129 bp, Homo sapiens
gcaactttttttgagctacagtatatttaatggttttaaatatgagtgcagagtaagagggagtccagtccataagatgacccttgcttctaatactagttgcaagtttgggggttcccaagaccactc

SEQ ID NO: 7088 - DNA, 362 bp, Homo sapiens
aattcccaatgatatggctgccttgatatcgctgggggaagtataaatccatgtaatttttttgaaaggcattctggcagtatatcaagagcctaaatatgttcatgtcctttgacccagcaattctgctaataggaatatatcccaaggaaaagtcataaatacagaaaatactttatgcccagaagtgtctgagatattacttatggtagtaaaaaattataattaatatatttgttcaacactaaggaaatgaacaagccaggaatgatatatatctatatagtgaaatatacttagcaattaaaagtgaggtttgtgaattcttcaccctgtaaagtgcttattataatgtaaacttg

SEQ ID NO: 7089 - DNA, 147 bp, Homo sapiens
ggctacctcttcagcaaggcgatgttctccatcctgaacacggggggcttcctgggcacgtttgccgactacatccgcagcgtgtgccgggtcctggggctctgcatgttccttaccggcgtgacttactgccggccgtcagcgcga

SEQ ID NO: 7090 - DNA, 548 bp, Homo sapiens
aagtcaatgtaagtcactttgttttgtttttttttaatctacgccatatgcctcatgaaaccagctgttctagaatcagtcctgagaatatggcttaattccatggaaacataactcctatcttgggacctgacataatatctatctatcctggggaactggtaatatgagacttataggttacagcagaaatgctacatgttgacaaaagccttaatcgttccactgggagaactaattgataattgtgttaagattgaagattaaccctgtgttaatctcacttgagtctatcctgacagtagttcagattctggaaaatgataaactgacctgctagatgtagaattgtttcaaaattagtgttgaaataccttgttcacagatgaatatctggggcaggatctgagggtgtttggaatgacaccccccaatccagttgcatagatgggatgtctttgcaggtttgaggagatcatcgacctgcagagccccctttgacccagtacctcacgttttatttaaaatctaaatctggggccaggcgt

SEQ ID NO: 7091 - DNA, 417 bp, Homo sapiens
  misc_feature (1)...(417): n = a,t,c or g
ctgaagcagagaattgagatgcctcagctatcaagttgttacatatagaagtgttcctgtggttgatgagttactagaattattgacccatttctggacttttcatttaaaaagttgtaagtagggaattttggagatcatgagttatatttattttatccctgtatcttcagcccttattaggcatgggaacctgggcacatagtaattgatatgtattatctattacaggcaacctattaaaagtaaggtatttgtcttgttttatgggatgaggcattctgagacttcagggggttaaatagcttgctaggtagtggtggggncccagggggcttaactcgaggntttgtcttcacnttccatgttnctttcacccccntacacntgtttatttggaantccagggggggtaaa

SEQ ID NO: 7092 - DNA, 525 bp, Homo sapiens
  misc_feature (1)...(525): n = a,t,c or g
cggtgtcctttttccttgtgtcctcacatgcccttctctctcttcacatgcatcccttgtgtcttttcctcctcttaaaaatagacaccagtcataatccattagagccctactttaatggcctcattttaagttaatcacctatttaaggccctatcctccaaataaagtccacnnnnnnnnnnnnnnnnnnnnnnnnnnnnnnnnnagtgttttgagagatgagggaaacaactttgtccatgcctttatatgtggttacattggagtgtgtgtgtgcatgcatgtgtaccaattaatgtagaacatgattaagaactgaaggaacattgaagaatgcctcattccaaactcccattgtagaggtgaagagatgacacccagcagtggtttgggcgaccaagttgggcctgaaaccgatgcacttcccccatgcagctctccattaaggagtaaaggtgagaacataggttcagaacattctgctgaaatgaggangacagggtagatcattaatctccatcc

SEQ ID NO: 7093 - DNA, 403 bp, Homo sapiens
ccatccatgttatggctcaagggctcagacatggtatagggaagatgggagcagggaaagacatgaactgctgtgctgtgtgacaaggccaggggtgtcactgaggatgcaacaggaagcaggcaggcaggtgagagaagctggggaggcgggagatagagagttattctagcacagcagtgaatgaattcagtttgaatgaagcacagaagtaaatgtttggacagcggaaccaggtttcatgatctttgagttgtcctcataacatgttggaactaggtattgaaaagtctgaggtaatctgaagcttagaaaggcacaatctatcaagttaacttaaaggaaaggaaggtgttaacaaaattagaaagtgctgttttagaaacagccctagatattttcc

SEQ ID NO: 7094 - DNA, 694 bp, Homo sapiens
gataggtagtcagattttttattttcaaacgtgccaggtacatttcccacttttgaataacagcaaaaccggaagaggatgctttcacacataataaatgttctccatcctttctgaaatgcaccaaagcaaaaagcctctgaagtcaaaacatgagacataattccttgctcattgcaggagacatgcaggtgccccctcctttacccaataccaagagacagacggccgggcaggtgtaaggcgggtggcgctgcagctgacatggagaagagtctaaatctgaagacacttttccacacttaggacaagttcttcactttcatgctttattgaaagtagaatatgaatcaaagacaggcattggtaagcaggttatgtctctaaaattacttttcgttcagagcagaatgttgtcccatctacttgatacaatcctttatggaccaacgcatctggtatgaaactcgagcaaggaaatataacagaactttattcccctcccacgactataaatctcatatgtaaacatgatttactattactgctactaaacttgttccgtctttacttgccccctcccaccgaccaccccccttaaatataaaattggaaacatttccttcaagtctgatgtccatcagtgcaatctgctttatttgacataagggcatttggggacagtcacgtttga

SEQ ID NO: 7095 - DNA, 508 bp, Homo sapiens
acttcatgtactctggagttcacaggtgttttccttttgcatgttgccttctcctttcctcctatcacaaagaatgcttctattatcactcccagtcacttaaatgccattctgcttctttagcaggaaaaaatacctgaatgaattctcttacagaaagacagtttgactgaatttgctttttacaatcagtgtggaaaatatcatagtcaattgaggcaatcagtagaaatctcactaaaagtttgtaccccctgagtatgggtaacagcttaaacggcaagaatatataaaagtagcaacagtttagtgggagccaaaaagcactaggttaaatatcatactacgtttttaaagacttgataaatgtgtacacttgaacaaccatccagagggatagttacttgagcattacagagtagtggaactcaaaatctaagattcatctgggatacttctaaaagaaatgtagagttttgaatctcactcttaaaaatgtgtattccca

SEQ ID NO: 7096 - DNA, 543 bp, Homo sapiens
aaatatagaatatctccagtatttttactttatatggcagcacgccaatatatgcaagagaacatattgatggggcagggggaaaactgatccgggcaatgacacagtcaggcattacattcggagaccaggtaaacagcaattttaatctgaaaagcagtatgagaagagttcctatgaagctgggatttacatacttcattctccgttcctggtcatttcatccacagcttgactgttgtcaatcatggttccttgcctttggagtggtactataaaggtacagagaatgcccatctcagtaccaaaatttcaccatgaaaaatcataacagaaatgacaaagcttaaagaaaagtacgccggatttcagaagtatttaccataataatttttaagaaagcttaccataaatacttccaaaaacaacaggctttacaaaatattatacaacatcctgtgtacagcagtaagtatctactcaggccatttgtcaagctgtttagtaattagtttctcatgtaccctcttgtctcaagaaggt

SEQ ID NO: 7097 - DNA, 269 bp, Homo sapiens
tgacaatccagtcatttgcctttacatactgtaaagattgtctgcaaaaagaaaacacatgtaatttcttccaggtacatcttttttaagagtgtctcattggtttaccttcacttgtaccacactctacccctaccacctttttaatttccccaaaaggtaatcagaaataccttttgaggaagaattttttgtctgtctgcttgtttactagcactttgccagtctttgtactttttcatattaaatcttaaccacccggtaataga

SEQ ID NO: 7098 - DNA, 1213 bp, Homo sapiens
  misc_feature (1)...(1213): n = a,t,c or g
gctcaattcgaccaatagtgaaaggcaccagggcaaatccatgataagtgaggcccagaccctgcttacaaggaactctgacttgcacagcgccgggaagtgggtcccactgttccctgagtctggctcgccttttcctacacaacaaggaagaagttgattctgaaacccaggttctttacccagctccacccaaaccacatcctggcttctttcccagacaagacaatcatcttttagtcatctgcccaggtgtctgggtgaaccacctcagctctcaggtccttttgccccagcccagcactccagaaaggcaaacagtgctcttgacccactcctttgaagtgggccccttcctgaactggactgctggcctggcttactgtccccctcacttgggacaacagctgccagccaggcttgggggcttcctccaggcccagcttggcaggacatgaatcagagcctaaagtgtcaaaccctgtgcttggtccttgagaacacttcatctgtcaaccacggctgttgtagcaccactgactaaatgctcacatcttcaactgaggccaagaaccttcactgttcagatgaggaaacagaggtgttacacgggtaaactatgattcaaatgcaggctttgtgacttcagggctcacattcttaattggctctccagaatattacctgccgtctgtacaaccttgtggtctacacaatgactacagagctacattggaagatgtcattgcattctgcagaagctgaggttcagaaatcgtccagtgactagctcaagatcagattgctgctaggaaacagagccagggctcatcccatctgacaccaagtccagtgctcctgtaccacatgcaccctcaagtgggcacacaagcaggaaagaacctcacgaggccatttaatctttggctgtttcaaggaaggactggcccctgaactaacacatcagaaacagatcctcaagtggggagcttgaatgctacctggtgttcctatgatccattcctggctctggtttactctcccactgcctgaatggctagtttcacacctcctcccctaactgctggcagagggagggggccttgctttccattttactaaggaaaattttaggcctgggggtgggtgggttcatgcctggtaatnccagnaattttnggaggccnagattgggnaattacttgagctccgg

SEQ ID NO: 7099 - DNA, 487 bp, Homo sapiens
  misc_feature (1)...(487): n = a,t,c or g
tggtccaactaccctcggcgatcccaggcttggcggggcaccgctnagcctctcccgttcctttaggctgccgccgctgcctgccgccatggcagaagttgggcctaaatgagcaccatcaaaatgaagttattaattatatgcgttttgctcgttcaaagagaggcttgagactcaaaactgtagattcctgcttccaagacctcaaggagagcaggctggtggaggacaccttcaccatagatgaagtctctgaagtcctcaatggattacaagctgtggttcatagtgaggtggaatctgagctcatcaacactgcctataccaatgtgttacttctgcgacagctgtttgcacaagctgagaagtggtatcttaagctacagacagaccatctctgaacttgaaaaccgagaattattagaacaagttgcagaatttgaaaaagcagagattacatcttcaaacaaaaagcccatcttagatg

SEQ ID NO: 7100 - DNA, 1157 bp, Homo sapiens
accacgccatctcctgagaatggggtctgggccctgtggctgctgaaagggaatgagtacatggtccttgcctccccatcagtgcctcttctccaactggaaagtcctcgctgcattgggattttcttggactatgaagccggtgaaatttcattctacaatgtcacagatggatcttatatctacacattcaaccaactcttctctggtcttcttcggccttactttttcatctgtgatgcaactcctcttatcttgccacccacgacaatagcagggtcaggaaattgggcatccagggatcatttagatcctgcttctgatgtaagagatgatcatctctaaaattctgttcccaagatgcagtcctagcgtagcgaacgttcctggagtggggtgaaggatatcaatatactaagttttaacagataccccatttaggtcagcacttgattcgttgttgctgtgaaatatgtccatgggacaaaagagggaatatgaaatatttgcatatgggaagattatagagcataataattttgtaaatggagcaatctcaacctctatttctagatcacattttcttgatgtcttccttcaaattaatgaccttggattacataaggatttctatgcattcattataatttgttattcctttcaatatccttgtatttcaaatcttccatataagaattagacatggcaattcttaaattgattcagaatggtctgatactattccagtatcacctccttaattctgtttctcctcgttttcctgattttccttctcattctctccttccccgctctgtctctctctccctgtcactctctctctctcgttccttattttttgtttcttacctcttactgtttaacctgttgcttccttctggattaatacatttagagccattcctttatatggtcacatttcctatgactttactcaattacttttaaaatcctttctattctgagactaatttttaagaattacaaagctcattcttctgaatctaatatcactaactcctagactttttccgttttctttggatacactttaagtaggaatttatcagaattttcattcaactcgttctttaatgcagatatttactagttataagaccttaaggctgggtgca

SEQ ID NO: 7101 - DNA, 730 bp, Homo sapiens
aaaactttttttttttttttttgggatttttcgcctacaatgcccaacttttaaagttagcattttggaggagactaggcgctttggaaatgtcttgttaaagctaaatgtcacttcatccaaaaatgaaaactcgagatgatgccacggatggcatggacacggttatctttggagggaaggtggtggtgggagaggcctgggcaggaggaggcagtttttggaagtcgggcagacaggcggaaattgcatttccttctattcccctgaccagggtggtgaggagcacaggccgccggggcctctgggattgggaagactgggctggggggccgggagtagggctggggcttgttttacgctctgccccccacaccccctcctcttccgtcctgattaagcccaagggttggtggacttaactttcagcccatctctaagggtttcacagactggatctttctaaactttattgggtacctgcttccccttttccctggtagttttcatctacaaaaagtcaaaacctgatcgaaatagaaataagatcatcaaattggaccattctcttagcgttcgagtgtgccggccagactggcattcagtacacgctgagatccaaccacatcacactggcctcaggtcaccaactcgccactcagggcacaaggcctgcccttgtggtcacaaggctttccttaatgtcgtcggtgcccaggtgaaccacaag

SEQ ID NO: 7102 - DNA, 437 bp, Homo sapiens
tttaatgtattaatacatgtatttaaaaatcagacaaaaagaacgtacaaaacttttcccatacatttacttgtgtatagttggtctgtttattaaagcaacaaggcataataaaaacaaaacaagtttggggtcagaaaaaatacagtttataccctggtactgcaacctcctagctgtgcaaacttagacaaatcagactccataaatcttaattttcacctttgtaaaagagaaataacggtacttacttgaaggattgtgaggaccaaatgaaaaactgaatacaaagcaccataacaagcagagtgcattattaggcacaatatacacagtaactatgtactgtaattattttcatttgttttgaaaggatgacgaaatacactttataacaagtgtacttaactttattcctaatccaacaccaagagatg

SEQ ID NO: 7103 - DNA, 414 bp, Homo sapiens
tgccattttgttaatttattttgccttttcctttgactttgccctccagcccttccttcacatacatcaaagaagaaagttttaagagcaagggtatctttaattcaggctgaaatttcctgacactgtgatctcacgtggtgtttattacagagtttgacatacatgggttcatttgccatttatttttccctgtaggagtggatcatgaaggaaataaaaatttctcttttattatgctgagaactttcccaacaatttctgctatgaccaccttccaggagttttctagtcaccagatgccttggtaaagttcaatacgtaatctttggctctgaaagctgttcctggacaaaatctgagctaactcactgaagaatcaacagattgaggcaaccatccggtcagttactt

SEQ ID NO: 7104 - DNA, 333 bp, Homo sapiens
aggtgactagggccttgttccctcactaatatctctgtaaggaacccaaaaaacacctttgtcctctttagccataaatttatattaataatatccaaatccatgttgaaccagtatttttgaagattgaccttcaggataaactaatagcacaatcttcatgccctttcattcataactaactgaaaaggttgacttttgtaccaggaacccaacgaagaaaacttgtatcttgtcagggttggtaacctggctgccattgactgagaccaaaatatcccaacagtttgtcctcagctgctaagctgctgtggttagaatcaaacgtagagt

SEQ ID NO: 7105 - DNA, 358 bp, Homo sapiens
agcttcagtcacgaaagaggctctgagcacgggggggagggaaggccagacctcagggcagagcttcccaacctgcaggccctgtcttaatccccttagacttgggagtggccttctccaatcactccagcctgctgtgatgtgaaaagagctgggaaccattgacttaagggcatgcagaggggagagactggatgaggggaatgacagtcagaggcaggtgttgaggtggatgcaggagtagcaacagcaggtgggtgtaggccctttttgtacccctatgttcccccaccttttcagtgcccattcagcttgctcttagacagcccggacctagatagatgcgaagggtctgcct

SEQ ID NO: 7106 - DNA, 342 bp, Homo sapiens
gtgacttacacatcataaatgactttcaaatgaaatttgaatttcaaaattctgtaaaagtggttgctcaaaagatgtatgatactattttaatcagtttaagagcaaaaatgtctaattgtatttaacaatggtatttgggcagccagaaaatattttaagcgttgctctaaaataatttgaagtagctcatctgttattacatcagatgcttcttgagtgcccaatttatacatggcctgtggtaaataccatgtgagctttgtaggaatacctttaagaatattcctcacctgttcgtaatatggaatgccaatctaaaaactacatgttttgggtggc

SEQ ID NO: 7107 - DNA, 355 bp, Homo sapiens
ggcccgagtggttattaaacatctttttctggtcttcgtagagaggtttgggggtgagtgaaatgcctgtagatgtgagtgttggtctccatgtttatctgccacatttgtagaaaggtgtgtgtgtgtgcgtgtgtatgtgcatgcgtgtgtgtgtgcattcatacatccactcttacctcggcacccagaggatatgcatctactgttagctgtttgggatatttacttttcatctttttcatttagtcatttaagaatacttacaaatagtgcacagacactctctcattagatttaatgagtattgatttatttctctccactgaattagtgctgtaatgaatttttttta

SEQ ID NO: 7108 - DNA, 690 bp, Homo sapiens
  misc_feature (1)...(690): n = a,t,c or g
tttttttttccaaaaaacccgtatgctgtgccgttaacgttcataaaaaagtccttgtcgaacgttttaaacagccaaggtgtttcagctttaataaaagctgaaaatttggcaataccaaacaggtcaccaagccacagtccgcttcttggcctcctctttggtatcagcgttcggctggcggcttcctgtggcctcttaaacaaggacctcattttgggagccattcgagagattttttctcattatctaaagtagcattctcgccttgcacagctgaaagtcatttctcgaaatcggagcgccagaagcgacaggagccactccaggcccgggggaagcgagcaaaggggcagcgggctgcgtttgccaacgtaggcctctcgggtcccgcgccgttctgggccttctccgtgtttccggcgccgccctcggggtcccttacagagggcgggaggcgggtggagagacggggcaggaagcaggcgggatcggcctgggaagaacccgttctgggaccctctagaaatcccagacagccctcccgggctgacagcgcctgccttggagcccgacgcgctcatcgaatttagattgactcctctcgtgccnnnnnnnnnnnnnnnnnnnnnnnnnnnnnnnnnnnnnnnnnnnnnnnttcgtntcggtcntcgattcaaacncttgtag

SEQ ID NO: 7109 - DNA, 509 bp, Homo sapiens
ccagaacgttaacctcaggcctccagctcagccctcagaccagctggtgtggcgggcggcccgaagcagcggggcagctcctacttacttccgacccaatgggcgcttcctggacggtgggctgctggccaacaaccccacgctggatgccatgaccgagatccatgagtacaatcaggacctgatccgcaagggtcaggccaacaaggtgaagaaactctccatcgttgtctccctgggggacagggaggtccccacaagtgcctgtgacctgtgtggatgtcttccgtcccagcaacccctgggagctggccaagactgtttttggggccaaggaactgggcaagatggtggtggactgttgcacggatccagacgggcgggctgtgggaccgggcacgggcctgggtgcgagatggtcggcatccagtaatttcagatttgaacccccagctggggaacggacatcatgctggatgaagcagtgacacagtgctggtcaacgccct

SEQ ID NO: 7110 - DNA, 640 bp, Homo sapiens
tttcatctttatcattattttattttagtaataagaaactggggctcagaaagtttaggtaacacagtaggaaatgatgaaactgaaacaagaaatcatgtctatttgattgcttttttcctgtaaagacagtcattaatgctcttcaccaaatgttttcatttcttctgacacatgccaagatcgcacttccccatccttttgaagttacttgcagccatgataattgccctggcccaatgcaatgtgaacaggtaaaagacatattttacttctgggccaaagcttcaagaaccagtgcatattttgttgtcttctctctctctaatgcagataacagaagtcccatgagcctgggtcccacaaagagacatggagtgtagcatccagcaatgtcgttataaacttgtagtgggaattaacaatacacatttgttgttataaactaagatttggttataaaccactaagcataacctagccactgctgactgattaattcacaaagtggctatatcactttgtgtttttaagtggcaataatttaactcagttctctattagatacctcaattccaaatatttttttttctgagaaatgcatgtaaattttattcagaaatagtaaagttttaaaatg

SEQ ID NO: 7111 - DNA, 392 bp, Homo sapiens
  misc_feature (1)...(392): n = a,t,c or g
ctcctgtacgtccattctgaaagaacactgtgcaaattcagtaccctgcacaccaacacacctacgacacctcccttaaacgtggaaccggaagcctggaattgccctggagggcagcgggagctgttgctgcccccccaccggccttccagagcctccgaagccccctgcatgcatggcgccttggggcctttgcatggctgccccctggagctctgcgcctgcccaaccccttcactttgttaattcctgtcctgacgcggctcagacgtttcatctgggaggatggtttcaggtgcacaccaccccacccagccaatttttcaattttttatagagatggagtctttctgtgctgctcaaattggtcttgggctcctnggtttaggtga

SEQ ID NO: 7112 - DNA, 370 bp, Homo sapiens
ggcacgagctggaagacagagggaaggaaaccatgcagacataaccacatgggggcaggccctaagctgctgggacctccacagtgtatccctttcctccaactgggagacggaagcaccgatggtctttctctacagtgccaggagccaccctgcccccagagatgccctacaatcaatgactaccatctaaatgcttctggatagtttcgttccttgtagatgatattccaaatattataatttgtacttctccacaattacaattccagttttggggtttctttttactcattaaatttgaaaagccaattccagttttaaagcttgacgcttttcttaaaagtttaacttctctttttattcaggg

SEQ ID NO: 7113 - DNA, 349 bp, Homo sapiens
ggcacgagcggcacgagcggcacgagctgatattgacttcttcaggattaagccctccatgacagggatgtattctaaactgtgtggacaggaggaagatgcatttgtttacaatggacagaagtaagaaaagtaagaaatgtcatagaactatgtctgggggtcaggtgacaagcactgtgtcatttctagccctgtgtcccctgcaggtgctttcttctgtggaccctctgctccttctgttgagggagaattttggatgagagctggataatttcccaaaattcgctcaactgtgaagctctggaactcaagttgctgtgctgcaaagctgtctgaggacaggccg

SEQ ID NO: 7114 - DNA, 1055 bp, Homo sapiens
taactcgataaacactcaactcggtcttaattagaatcttaatatagatcctaatgtatttcttaaatgcgttccatgaactcttctcaaacaaccatgtgccaggcattgagtctgacacagggaactcaaagataaataagacagtccttcctctcaagaagtttatgtccagcatggtacgggacacagacaagaaacgagattcagtattgtgactgcaataaacacaaggggccacagaaacacggatgaagggcacctggcctagactggaacaggagggggtgggggtggcaacaggaaactggcatcaaggcaggccgtctgggggatggcatctgatctttaggccctataaactccccattctctccattttgaaaaatgtggttaataaatagcatcgcccaccactggacagtagtgaggggttcatggaaatggttccacattaaggatttcccacggtacctggacagagattgtgttcaaccaggcttaaacttaaaagagaagtctgatcaaacacgaaatctcaacacctgtgcctagcaactcacgtgctttaccactgatcacacaacagacaccagcttcacaatcacacacaatattgttttaaatcaacttttattttttaataatgagacaatgttaagccctactctgcatgttaacagcctaattccttggtcattaaaattttcttctccattaccttaaacatacctttctctgacatttctaatatacagtaatgttcttagtcttttgatacagaaggtgaaaaaaaagaaaaaaacctaacaattactgagtttttaacatggacctgacatttacattgatactgtgttcaatgctcataataaccctacaacctggacacagtcctccccattttaccttcagggaaactgaggttgaaaaggcagtctgtgtaaagtttcataattagcattaaaaagagctggaatttgaacctagacctgattccacctagtcaactgacttgctgcatcagagataagcaagagaaaacaaaaggaacc

SEQ ID NO: 7115 - DNA, 417 bp, Homo sapiens
aaacactcaccgattcaaatgctcagctatcattgttaattatgcaagtaaaatgtttaaccgctgaactcagtcaatggcagaaaaaaacacctgaaacaattcccttgactgaagacgttctcataacattaggaaaagaagagttccaaaagctgagacaagatcttgaaatggtactgtccactaaggagtcaaagaatgaaaagttaaaggaagacttagaaagggaacaacggtggttggatgaacagcaacagataatggaatctcttaatgtactacacagtgaattgaaaaataaggttgaaacattttctgaatcaagaatctttaatgaactgaaaactaaaatgcttaatataaaagaatataaggagaaactcttgagtacattaggcgagtatctagaagacc

SEQ ID NO: 7116 - DNA, 467 bp, Homo sapiens
  misc_feature (1)...(467): n = a,t,c or g
aaaagtgtcaaaatagcactataaagagagctcagaaataaaagaaatgaaggaattcattaggaactcaaggaattaattacacatgccaaatttaaaaccacctctggatatacatcttaggacttttgtgaaatctgcattaatttctactacactaattttgaattcgaaataattcagacatgattgtgttttactttttcaaagcatttgattttttaaaaaatcgtgtgaaatgtaaattggttatttttttgttaaaagtacatgtgtattacaaatatagatattaaaggaaattttaaattgtcaaatgagaaaatttcttattctggtgggagtgtggaaagtcaacacatcttttgtggcataggaggaaacacattcaatttacccgcttttgtgggtgttgcctcctcttgcntttgtattattgtcccttnggcgggtacngtggggattcc

SEQ ID NO: 7117 - DNA, 496 bp, Homo sapiens
cctgggggttgggagtatgggtcctgagatgttggccttgatatggttccaggctgggaaaaagcccttgaaggatgggcaaaagattcattcactgctggatgtggggtaaggggaggctgactatatggatcatttgactgattatgagaaaaattatctataggtcttggtgtcaaagcaggcctttcataagggtcaacagacaatcgccttgatgcctgtgacactgatccataaggatcctgagaggatggaggaggttgcattggagtcttaaaaggtccaggaccactatcaagaggtgcaggtgtcaacaagggtcgtgcatatgagtcaggtatcctttgtctttgaaacacatctgccctaggagatggtttagtaaagtgatcactggttccagctgctatagggccttttgcagtttgttctgaaactacaggagaccgggataggtttaaggatttgggaaattgatctgtcatcacaggcc

SEQ ID NO: 7118 - DNA, 694 bp, Homo sapiens
tggacttattaacacatatgaagtgcttggtattttagagtgcttccacacacacaatcctcattagagatagacaggatggggagaattaataagccattgcccgtgttacagtgaggaagcagaaagatgagaagtttgaactttggtcagcctggctttctcataacccattttgctgactaaattgcgagtatccctcctttggtatatttattggtgagaagtcacagcccttgtcccacaggttttgcagccaatcaggagaaagaaattaggcacctgtaaagtattactgaatcatagatagtttcaccagtggtttgggcagttggcaaattaatttagggacatctgttctgaaacagcattgaaataggactgactgctttgctttctggttgtggcagccagagccaaaggcagatgaatgaggggctatgaggaggctactgtggctggaacagtatgaaagcaacctcagctcccacgcctggctgtaaaggggataataactgggtgctgcttcccagcctctttcatctgagaagttcaaagcacctcacccctattaacaccccacagagtaggtaggaagtaccaatagagcaagccagggaaaactgaggccaggaggcacagcctggggctagctgtgaatcacctgtgggggcctagagcccagggaattctt

SEQ ID NO: 7119 - DNA, 170 bp, Homo sapiens
tctagtagtcctgtgtattagtttcttaggcctgtcataacaaataaccacaaaatatgtgtcttaaaacaacaaatacagttttttttttattcacagttttggaggctagaagtctgagatcaagatgtcatctgggccacactccttttgaaagctgtagggaaaaa

SEQ ID NO: 7120 - DNA, 399 bp, Homo sapiens
  misc_feature (1)...(399): n = a,t,c or g
agcaaagcattgcttataaaaatgaaagattaaaaatgtagatgtctaacactggacccccatttgcaaagaaacaggctgccatagaaacactgtagagctttttagtttgtgcaagatatgaaaatgtgtttttttttttgggtaacctgagaaaattaaaggagaccattttgaattgcagaggtggtatgacttggtgagattggaacagggcttatacttgctttgcctctgacctgggataaattactttgctcagtttaccttatctgtaaaatggaggcattttaatacttgccccccattagatgccttaganatgtgaacaagcattttgaattcttatggaaggaaggcagttgtgggaaatttcaccagtgttgatnaaattaaatt

SEQ ID NO: 7121 - DNA, 452 bp, Homo sapiens
tcactgaaggatcagatcaccagtggaaaatacaacttcattcctgaagtctgggcagaagtctcagagaaagctctggaccttgtcaagaagttgttggtagtggatccaaaggcacgttttacgacagaagaagccttaagacacccgtggcttcaggatgaagacatgaagagaaagtttcaagatcttctgtctgaggaaaatgaatccacagctctaccccaggttctagcccagccttctactagtcgaaagcggccccgtgaaggggaagccgagggtgccgagaccacaaagcgcccagctgtgtgtgctgctgtgttgtgaactccgtggtttgaacacgaaagaaatgtaccttctttcactctgtcatctttcttttctttgagtctgtttttttatagtttgtattttaattatgggaataattgctttttcacagtcac

SEQ ID NO: 7122 - DNA, 342 bp, Homo sapiens
aagaatcagaaggccaagagaaatctggaactagatgtagaagtcgttcatggattcagaagccagactctgttcccttgttgaattgagtgatactcaggatgaaacacaaaagtcagattcggagaatgaaggtacgtagattttcttaaataatgtagacctaatggttataggacacttatctttttcctcagttgataatttaagaaacatccaggaattctcaaagaccagaatttggtacaaatggtttcctagttgatagaacttcttttatgttctctgttttacctcttttactccttaactaaaaaaagattttctatcaattaattatgg

SEQ ID NO: 7123 - DNA, 254 bp, Homo sapiens
atgtgagtgttacactttgatgaactgaatattttattaacttgtttgtttggaattgtgaaatgttgtttattcagtttccctttttagcacctgaaagaaaggcagtttaccatatgtatatctatatataggccttagtattcttaggatctcttttccagtcttcatattgtgcaagctcaagaatgaaatgcagtagttattcccaggttgtgaaaggtgtcttaggtcacttataagtagcagaggtt

SEQ ID NO: 7124 - DNA, 501 bp, Homo sapiens
caagaaaaatatgcttacattttccatctgaattctgatgttacctccttaaagtggtaacatcttatttattcaaaatagttatcacaatatatagttatcttgttaatttacttacatgttttattatcttcctatcccactagaattacttcatgaagacagcaatcttttttattttgctcatccctatatccccattacctagcacaataaccaacacatagtagcccctcaatatagattgagtgggtgaataagtgagttaatttataaaatttttgaaaacttgacatcaaaataaagctgtacttcttactaaagggagttgaccacttaaatatcagtatttcctgtcttcctataaccacaagaagaagtcattatccttttattattattaatgggttatgaatagtatccaaaaacctttaaattagcttactcctttcttttccctttatgcctcctattcttctcaaccgtttttccttaagtcca

SEQ ID NO: 7125 - DNA, 331 bp, Homo sapiens
ttttccaatttgctttggtacttttcttaagtacagagaagcagaaactcccccatcctcttcagccctccatctggctcctgctgttacttgttttcacccgaattttgttcttctgtgattctctgacttgacgagggccactagcatcccccaaacagacaatgcgctgcctctgcgtgctggcaggaggccacctctctttgtgctgactcagcagccaggctcccaggctgtggcacaagtagcattcctgggaaaagcctctccccgttataaacactcatgaaaacaattcctcactgggaagagaactgaaatctgctgctca

SEQ ID NO: 7126 - DNA, 396 bp, Homo sapiens
tttttatatatcataagtatttatttccacagcagaaaattagttgaagacaagaatattcaaaaaataaacatgtttataaaataaagtaaagaatgaaatgttataagggtacaaagtaaatgctgatatattaatagggtggttggatttagcaattttactaagacacagataaatttggaaataacttacagtagaggcattgtttgtcccccctttttgttagttacttagagtttttctttcatatttgggtggggacaagccatctatgatgcatttgaccgcttcctccataaatacgctaactagttggattattatatgtgaccagtgtggccatgatgtttcttacaaaagggagcttcatcctgtgatcatgtgaaggacaag

SEQ ID NO: 7127 - DNA, 208 bp, Homo sapiens
aatatgtaacatttgggtaagttaatagtcaatttataggccacgtaaatgggaaggattatttccttaaatcaagagattagacaatcattgcttgtcatgaatatttaataaaaatttgagaaagctcagtttcttttgggctgcaaacatagatctagggaaataaatactgcttaactattttgttgttgttgttgttgttgtc

SEQ ID NO: 7128 - DNA, 455 bp, Homo sapiens
atacacagtatcgtcgctcatgtgcagttgagtatcctcatcaggcccgacctggcaggggatctgcaggtcctcagttacatgggtctacaaaatctcaaagcggaggcagaccagtctctcgaaccaggcagggaccataaggcaaatgagaagaatctatcaggctgcaggaaacacgagatttcatgaagcagtattcagtcatcaagtgatgcagagcttgtatagaagatcgactagaaatcatcttcatgaagagtgattttggcacaagtgaccgaagaacaaaacaccatagcagccaaaaatgacatgagtgttgtttctatctccagttactgtctctttcagcagaaattaacctatcccattggaaaggcaagtttgtacccaaagatgcaacagtgaataataccccaaatcactgctcatgttatctcttaacaatggat

SEQ ID NO: 7129 - DNA, 5624 bp, Homo sapiens
cggcgcccggccatggcggtctccaggctagatcgcctttttattttactggatactggcactactcctgttacaagaaaagctgctgcacagcaacttggagaagtggtgaagcttcatccccatgaactaaataatctcctgtctaaagtgttgatatatttaaggagtgcaaattgggatacccggattgcagcaggacaagctgttgaagctatagtgaaaaatgtacctgagtggaatccagtgccgagaaccagacaagaacctacttccgaaagttctatggaagattcacctactacagagcgattgaattttgacagatttgatatatgtagattgttacaacatggtgcatcactcctgggatctgctggtgccgaatttgaagtccaagatgaaaaatcaggtgaagtggatcctaaagagaggatagcacgccaacgaaaattattacagaagaaacttggccttaatatgggagaagcaattggaatgagtactgaagaacttttcaatgatgaggatttggattataccccaacttcagcatcctttgttaacaaacaacctactcttcaggcagctgaattgattgactcagagtttcgagcaggaatgagcaatagacaaaagaacaaagctaaaagaatggccaagttatttgcaaaacagagatccagggatgcagtggaaactaatgagaagagcaatgatagcactgatggggagccagaagaaaagagacggaaaatagcaaatgttgttattaatcagtctgcaaatgattccaaagtcttgattgataatattccagacagctcttccttaattgaagagacaaatgaatggcctttggaaagcttttgtgaagaactttgcaatgacctttttaatccctcctgggaggttcgacatggtgcaggcactggacttagggaaattcttaaagctcatgggaaaagtggtggtaaaatgggtgacagcactttagaagagatgattcagcagcatcaagagtggttggaagacttggttattagactcctttgtgtttttgcattagacagatttggagactttgtttctgatgaagttgtggcaccagttcgtgaaacttgtgctcaaacattaggtgtggttttaaaacacatgaacgaaacaggagttcataagactgtggatgtgctgctaaaattacttacacaagaacaatgggaagttagacatggtggtctgctgggaataaaatatgctttggcagtccgtcaggatgtaattaatactttattgcctaaagttttaactagaataattgaaggactccaggatcttgatgatgatgtcagagctgttgctgcagcatcattagtgcctgtagtagaaagccttgtctatcttcagacacaaaaggtgcccttcattataaatacattgtgggatgctcttctggaattagatgatctaacagcttcaacaaatagtattatgactctcctttcatccttgttaacttaccctcaggtccaacaatgcagtattcagcagtcactgacagttttagttccacgtgtctggccttttttgcatcacactatatcatcagttcgaagagcagcattggaaactctgtttacgttattatcaacacaggaccagaactcttcatcttggcttatacctatactgcctgatatgctccgacacatttttcagttctgtgttttggaaagcagccaggaaattctggaccttattcacaaggtttggatggaactgttgagtaaggcttcagttcagtatgtggtagcagctgcttgcccatggatgggtgcttggctttgcttgatgatgcagccttctcatttacctatcgatttaaatatgttgctagaagtaaaagctagagccaaggaaaaaacaggtggtaaggtgcgccaaggccaaagccagaataaagaagtacttcaggagtatattgcaggtgccgacaccatcatggaagacccagccaccagggattttgtagttatgcgggccagaatgatggcagccaagttgttaggagcactttgttgctgtatttgtgatccaggtgtaaatgtggtaactcaagaaattaaaccagctgaatccctgggccagttactactcttccatttgaactccaagtctgctttacagaggattagtgtagctttggtaatctgtgaatgggctgctttacaaaaggagtgtaaagctgttaccttagctgtgcagccgcgtttacttgatatcctttcagaacatttatattatgacgaaattgccgttccattcacacgaatgcagaatgaatgtaaacaacttatatcatcattagctgatgtacatatcgaagttggtaatcgagtaaacaacaatgttttaacaatagatcaagctagtgacttggtcactactgtttttaatgaagccacatcatctttcgatttaaatcctcaagtgttacaacagttagatagtaaacgacagcaggtccaaatgacagttacagagaccaaccaggagtggcaagtgttgcagttgagagtgcatacttttgctgcctgtgcagttgtgagcttgcagcagcttccggagaaattaaatcctatcataaaaccattaatggagacaattaaaaaagaagagaatacactagtgcaaaactatgcagctcagtgcatagctaaactccttcagcagtgcacaacaaggacgccctgtcccaattcaaaaattattaaaaacctctgtagctcactttgtgtggacccatatctaactccttgtgtcacatgtccagtaccaacacaatgtggccaggaaaattctaaaggatccacctcagaaaaagatggaatgcaccatactgtcaccaagcacagaggtataattacactctacaggcaccagaaagctgcctttgctatcacaagtaggcgaggtcctacccccaaagcagtaaaagctcaaatagcagatcttcctgcaggaagtagtggaaatattcttgttgaacttgatgaggcccagaagccttacctggtacaacggagaggagctgaatttgctttgacaactatagtaaagcattttggtggtgaaatggcagtgaagttgccacatctctgggatgctatggttggcccattgaggaatacaatcgacataaataattttgatggaaaatccctcctggataagggagatagccctgctcaagaattggtgaattctctgcaggtttttgaaacagcagcagcttcaatggattctgagcttcatcccttgttggtccagcatttgcccacatctttatatgtgccttcaataccccagtactgcagtgaggcacatggctgctcgttgtgtaggtgtccatgagcaaaatagctaccatggaaacaatgaatatttttttggagaaggttcttccgtggctgggagcaattgatgacagtgtcaaacaagagggtgtaattgaagcacttgcctgtgtaatggaacaactagatgttggtattgttccatatattgtccttttagttgttcctgtattaggaagaatgagtgatcagacagacagtgtgagattcatggccacgcagtgctttgcaacgctaattagactcatgccacttgaggcaggcattccagaccctccaaacatgtcagcagaattaatccaattgaaagccaaggagcgacactttttggagcaattgttagatgggaaaaaattggaaaattataaaattccagtaccaatcaatgctgaactcagaaaatatcagcaggatggtgtgaactggttagcatttcttaataagtataaacttcatggaattctgtgtgatgacatgggtttaggaaaaactttacagtccatctgcattctagcaggagatcattgtcatagggcccaggaatatgcaagatcaaaattagcagaatgtatgccacttccttccttagtggtttgtccgccaacattaacaggccattgggtggatgaagtaggtaaattttgctctagagaatatctcaacccgttgcattacactggacctcccactgaaagaataaggttacagcaccaagtaaaaaggcacaatctaatagtggcttcatatgatgttgtgaggaatgacatagatttctttagaaatattaaatttaactactgcattcttgatgaaggccatgtcatcaaaaatggaaaaacaaagttgtcaaaagcagtaaaacaactgactgctaattataggattattctttctggaacaccaatccagaacaacgttttggagctgtggtcattatttgatttcctcatgccaggatttttgggtactgaacgccagtttgctgctcgatatggtaaacctatattagcaagtagggatgctcgaagctccagtcgagagcaagaagcaggtgttcttgctatggatgcgctgcaccgccaagtactaccgtttcttttgagaagaatgaaagaagatgttttgcaggatcttccacctaaaattattcaagactattattgtactcttagtcctctccaggttcagctctatgaagattttgctaagtctcgtgccaagtgtgatgttgatgaaacagtttcttcagctacactttctgaagaaactgaaaaaccaaagcttaaagctacaggccacgtattccaggcattacagtacttacgtaaactgtgcaaccatccagcattagtcttaacacctcaacatccagaattcaagaccactgccgaaaaactggcagttcagaattcttctctacatgatattcaacatgcccctaagctctcagctttgaaacaattgctgttggactgcggtttgggaaatggcagcacttccgagagtggcacagagtctgttgtggcccagcacaggatactgatattctgtcagctgaaaagcatgcttgatatagtagagcatgatctcctcaaacctcacttgccctctgtcacttatttgagattagatggcagcatacctcctggtcagaggcattccattgtttcccggtttaataatgatccatctatagacgttctgttacttaccactcacgttggtggcctgggacttaatttgacaggcgctgacacagtagtatttgtggagcatgactggaatcctatgcgagatctacaagccatggaccgggcccatcgcattgggcagaaacgtgtggttaacgtataccgattgataaccagaggaacattggaagaaaaaataatggggttgcagaaattcaagatgaacatagcgaatactgttattagccaagagaattctagtttgcagagcatggggactgatcagcttcttgatctgtttactcttgataaggatggcaaagcagaaaaagctgacacctctacttctgggaaagcaagtatgaaatcaattcttgaaaacctgagtgatctttgggatcaagagcagtatgattcagagtacagcctggaaaattttatgcattctctcaagtaactatcaaatattgtaaatgcaattgctgctagttcagttacatttctgctgatattcagc

SEQ ID NO: 7130 - DNA, 2119 bp, Homo sapiens
cgggcgggcccacccttcccgatgcagtccctgatgcaggctcccctcctgatcgccctgggcttgcttctcgcggcccctgcgcaagcccacctgaaaaagccatcccagctcagtagcttttcctgggataactgtgatgaagggaaggaccctgcggtgatcagaagcctgactctggagcctgaccccatcatcgttcctggaaatgtgaccctcagtgtcatgggcagcaccagtgtccccctgagttctcctctgaaggtggatttagttttggagaaggaggtggctggcctctggatcaagatcccatgcacagactacattggcagctgtacctttgaacacttctgtgatgtgcttgacatgttaattcctactggggagccctgcccagagcccctgcgtacctatgggcttccttgccactgtcccttcaaagaaggaacctactcactgcccaagagcgaattcgttgtgcctgacctggagctgcccagttggctcaccaccgggaactaccgcatagagagcgtcctgagcagcagtgggaagcgtctgggctgcatcaagatcgctgcctctctaaagggcatataacatggcatctgccacagcagaatggagcggtgtgaggaaggtcccttttcctctgttttgtgtttgccaaggccaaactcccactctctgcccccctttaatcccctttctacagtgagtccactaccctcactgaaaatcattttgtaccacttacattttaggctggggcaagcagccctgacctaagggagaatgagttggacagttcttgatagcccagggcatctgctgggctgaccacgttactcatccccgttaacattctctctaaagagcctcgttcatttccaaagcagttaaggaatgggaacccagagtgttttaggacctgaagaatctttatgactctctctctttcactctttttttttttttgtcactaagttaaaagcgaagtgagagtattaacgtttttgttctcctccggccccctgttacaatgaaggggcaaaagtatttgctcttagtctattcctcccttaacttctgtgactaatttttatttcctttctagatttgcccaattaatactagggtgcagtgtatcctggagaggtagggtgtgtgggggaggaatcccttgggggagatattaggagtgctctgttgtttacaaactcaggtacccgcagggcctagcaagagacttaaatgactgataagaaccgtgagactctgtctcaaaaaaaaaagtttcaatgtttactcctagagaagccaaaaatcccagatttgtatatgaaatcttaccattttaaaagattggcagctaattatttttttaaaaagctgtgcagtgtgatgtgtcccaaacggactggctcatggggtggccacgtcacaacctctgatctcagaccgtgcatgccttgtcctcttaagacaactcctgtggcaccgtttctccctccacaggggccaaagccatagtgtccggtcccaaggacaaggctcttccagtgctaggagaggtatgagcagcctctcacctgtgagctgtggggatcacaaggctgcctgcctcagtcttggagtcctgttgggtgaatgaggcagatgggaaagagcctcaccagcagctgcttttggagcaggggtccaaggaagagagggtggcctcgacatcaaactgcctggatttttctaccaccctgttacatcataacaacttctgaaacacacaccagccctgagttctgggctcatttgaagcctggaatagcaataaatctttttaacttgcggacagtttccccttgccttggctgcatatttcactgatcacatctcaggatttcaaaagcattttttggggtggggctctttttggttggaagggtttgttggaacggtacaggtgagccgaggtgattccagggacggacccttctgcaggagcttgagcttgcttgttgtctctgcttcatcgccatccagctcccttgtttgctattttgctttccatcacatcatgactgcggagagcaaaaatcacctagtgaccattgaacag

SEQ ID NO: 7131 - DNA, 626 bp, Homo sapiens
catccttgcagcagcagtcatcatagccctcagtaagctatcctttcctcaggtaacagctcaggcaccaggagatgagatctgcactggtgagatcagagcttaaagtccccttgccccataggaaccactgtcttttgtagtactctgtatacctacttctatgatccctgcaaggattaggtagtgggttgaacagtgccccccaaaaaggtatgtctaaatcctaatcccaggtatccatgaatgtgaccttacttgggaaataggatctttgcagatgttaactatggatctcaagatgagatcaccctggatttagactgggctctaaatcctatgattgggtgcccttataagagaaaggagaaggagatttgagacaaagacacacagagaagaagcctatgtgaagacaggcagagattggagtgatgtggccacaagccaaggaaaatggagaattgttggcctccccctagaggcccgaagagggtatggcatggcttcctccctcaggacccatcctgctattataacacccttgatttttaatttctggcctccagaactgagagataataaatatgttgttttaagttactagatttctggtaatttgttat

SEQ ID NO: 7132 - DNA, 296 bp, Homo sapiens
ttgattttatttgaaactgttagcttttgagtaaagatataagtctcccagtgagcctctgccgatactcgtgaaaccacatggcttatgtgctgcagcagctgtagcgccccattcattctgctgttagccatagtagacaatgaaggtgtcaggttatatgctccctataggctgaaaccatgtctcattcacctttattcctcagtgcctcctgagcccagcacatagtaattgcatggtagacaggttgtgtggctcaacacctgtaatcccagtgctgtgggaggattgtt

SEQ ID NO: 7133 - DNA, 414 bp, Homo sapiens
cataaaattatgtcccacagtatatagttttgaaaaaacatatgatatactacatccagtctaacttctgtggaaagtagatcagaaaaaataagatagtcttgagagaattttattatagaagctgtctaatttgacctattttgcttgctcagtgctaaatctattgcttttttttaatctcctggcttgaaattatatttacttcaataggaaaggtaaaaacatcagtttttacttttcaaagttaattttctgaaataattgcattttaatgagcacaaaatgggtcattttatttttattatactcatcttgtttacacctatacataaacagaaaacgttaaagaagagaaaaataaaggagctaagttctgctgttgaagattatttcatccaaggcttggttttg

SEQ ID NO: 7134 - DNA, 597 bp, Homo sapiens
ttttaaattatccaaaatgatttctttattgagattaactacatagatttcacagtactatggaatacttatatttagctaaagtcacaaacacatttcaacattcaaaatgatgagcatcattaccattctaatctacaaagctcatgaataaagaaaaatacaaaaacctcaagttttacaaaaaaaaaaaaacttttaagtctacatacattaacaataaaaccatttcttccagataacaggtaaaagtataaaggcataccactgacttttttttttctagatagccaggaatgaacgaatgtttaatatctacgacgcttattagggccttcaaagttgcccccttgacttcctctaccaaagccaccaggaccaccactcacaggacctacaccactcattggtgcttgaggggtttcagaacctgttctactccccataggtgaaccccatctgagatggtggtcccttgaggaaatctgtcattgtgcaactgctcccattatctggcatcattgggagttcccatatttgcggctccttctggtcccatgggcaggaccaggacccattggtgggccaggtatagtt

SEQ ID NO: 7135 - DNA, 255 bp, Homo sapiens
  misc_feature (1)...(255): n = a,t,c or g
agttgcatactaggtaccaggagatgtgttaatttgctcaagcaatgaagccacatctggtacagcagctgcaattggagtcaccagttggttaagcttatgataatctactgtcattctccaagatccatctgtcttctgcaccagccaaataananagttgaatggagatgtgttctccanccagactgaaaaaagaatgganaatcaccacccctgtgtctttcaagtccttgatgatggcactaatctctg

SEQ ID NO: 7136 - DNA, 531 bp, Homo sapiens
  misc_feature (1)...(531): n = a,t,c or g
gctgggaagcagaccaagaatgcagaacttctcaggatccctgatctctctctctcaggttagtcacaccaccatatatgagcatttccagctgcaggcggccaggctcaaagaagagatgccagaaaactctgacgctgggttgaggttgagagtgcggtaatcggcgtcacggggtgtcctcctggtgtcatgacgatcgtccgctgatttgcatgtacataatgagatatcttggggataagacccaatctaaacacaaaatttgttgatgtttgagatacaccttatacatgtagcctgaaggtaatttcatccaacatgttaaaataattttgtgcatggaacaaagttttcactatgttttgactgcaacccatcacatgaggtcaggtgtggaattttccacacgtggcttcagggcagtgcnnnnnnnnnnnnnnnnnnnnnnnnnnnnnnnnnnnnnnnnnnnnnnnncagggagggccaacctgtgcttaacaaaataaaacaaaatgccaaagtgagaaa

SEQ ID NO: 7137 - DNA, 322 bp, Homo sapiens
cctatcaattgtccctatttcaacacctccttctctgatatttcttatttcttatcatgctttctcctttaatccaccccttaagaacactttggattttctctctccctcattgtcatttccgttggtctccaagtcaccacagaggcgtctctgcatcccagcgcagccggcattcccctctgcttcctaattgacctctgggctgctgagttcccaactgcagttggttctccctacagctgtcaaggttagcttttcaaaaaatcaatgtcatcattccactccacctaaaaatctccaatgggccttgtcacctcca

SEQ ID NO: 7138 - DNA, 410 bp, Homo sapiens
ttgagacgagatcgtgccattgcactccagcccaggcgagcagagcaagactctatatccaaaaacaaaacaaaacaaaacactcatttccaggcaatctggaaggataggaaatgggaagtaaaatccgttaatgagggccaggcctgatttctctcccgtccctgggctttctcctccatgacctgcctgcctcacaagtcccagggtctgttctcagcaggaagaataggggctcctgctctgcctgatgatttgggtttacccctgttcacctttaggccctgggtattgatgtcaccacaggagctgggacagctgggattgacaagttttgtctgggatgctggatgtgttttgtgctgggtgggccaacttcaggaggtccaccctgatggcagacggtaact

SEQ ID NO: 7139 - DNA, 426 bp, Homo sapiens
ggcgtgtggagctagtgctccgcttattcgccactgtcgccaccgctgtcatgaaccgcgagagcttcgcggcgggagagcggctggtgtcgccggcttacgtgcggcagggctgtgaggcccgccgctcgcatgagcacctcatacggctgcttctggagaagggcaagtgtccagagaatggctgggatgaaagtacacttgaactctttttacatgaacttgcaatcatggacagcaacaatttcttaggcaattgtggtgtgggagaaagggaagggagagtggcatccgcactggttgctcgtcgtcattacaggttcattcatggcattggacgatccggtgatatttctgctgtgcaaccaaaagctgcaggctctaagcctttttgaacaaaattaccaattcttttggtcctggaca

SEQ ID NO: 7140 - DNA, 390 bp, Homo sapiens
  misc_feature (1)...(390): n = a,t,c or g
cgtctgcctggtgtgactggctggagaaataagttagggagaatctagatatggttgaattgtcattgctgctcaaaatttgtttctttgtgnnnnnnnnnnnnnnnnnnnnnnnnnnnnnnnnnnnnnnnnnnggtgaaattatcttgaaatacaaaagaacgtctgttggtcctgagagtgaaaaaaggaatccttaacagcttcagcttgcaccaagaggatttttttttatcagcttcccttcataagagaggatggaggattttggaagagacagaacctgggagaaatttcagtgagctgccacttactggtttaacctacttccacagaaggaacctattattgtttatttgggaattcagtaaatgtgggccatgtaaaggg

SEQ ID NO: 7141 - DNA, 572 bp, Homo sapiens
cactagtagattcaggcacagagacaaagaagatcctaatactgccttggaaactcagggcccagaaagatgttgacagtgatagggtcaacaagaacccaggtttgaggaggaagtcattattgggtcctggttctgggcagaaaaagaggccagtttggagggtggagcttcagcaatctgtgaatctgagccaggaactgaggagggggccattggcggatccgcgtactgggctgaggaaaagtccagtttgggggctgtggccagagaagaggccaagccggagtctgaagaagaggccatatttgggtcctggttctgggacagagatgaggcctgctttgacctaaatccctgtcctgtgtacaaggtcagtgataggttcagagatgcagctgaggagcttaatgcatcctccaggccccaaacctgggacgaggtcactgttgaattcaaacctgggtctttttcatggggttgggcttccgatccacaagcccctttggaattcccgaagaggcttctgaaatgcttgaggcaaagccaaggaacctgggaacttagcccag

SEQ ID NO: 7142 - DNA, 555 bp, Homo sapiens
ttttttttttttttccaattttaacatagaactttattgaaaacacagactcaaatagagaaccatatatttaaacaacgaatagcagggtagcttacttaggtgacacagttcattgaaaacttaatactgaaaaataccgcaatctggacagcaagacaaatatcaacaaatgtgttttcagttttgatattcatttggcatccacaaaatgatccagctcaaaacaagagtttgacaaagttaacatcagcattaaaaaatataagttacaacaaaaaaacagactgtgaacaccaaagcactactcagggctctttgggaacataaggctgatcagcggcaggtggttaatcatattaactttgttgtcccacctcaggatcattttggttgtctatttgggcttgtagttgcttagctaactcctcaaattcacgaaatgcagaaataagcggctcaagactgaaatcatcatcaattaaggacatctttccacttttaaaatgttacgatattcggaacattttaattacaattgaatattatctttgt

SEQ ID NO: 7143 - DNA, 594 bp, Homo sapiens
  misc_feature (1)...(594): n = a,t,c or g
tttttttttctttttggaataatctaaagctattatttccaaaactttgttaccattttatagcatgatccacccatcatctgaaaaacaatactttttattctttgaatagcaagaatagtaattttaaaacagtacaaaatgtcttttgacatacactagaaaagtaaaacataacatttttggaaactctcatggctgttagggtaaaaatcatgggtcagggaggagggtggttaagagagttgaactccatgaattaccagtggagttcatggatatttcagacagccttcaaattgtgatggagtgataaacagtatgggactacacagtgatgaaacccggacatgaatccttttgacggttatcttttgacaaaaaacttctcaataagagaccattttccatctgtagaagttataattcctgcccactgcacagaaaatagtaacacacttaatctataaagtgctatatacatggttagatatttggttaaggcggaaattaagccgaaatcaaaatttttgggggttgatttggtttagtatgggggggatggatatgtatccgtacngggaaatanaaatt

SEQ ID NO: 7144 - DNA, 1772 bp, Homo sapiens
gcggccaggttgttcctgcctctccgccacctccaccgcggcttatcccctggctggcggcgttggcggggcgggggacagtagttgtagacgcccgcccctgcctcagagaagataccacattgaatgaacaaagactgaactttgtttacagataccttttataaaagatgtctgtggagtagtgttacagttcaaataacaaaggattttgcattatgagatgagtgagagtggagaattggacaaaaattgatttttgatctctgaattgtggtttttagctcaccagttattgtgtagtctcactatttgaaaattcatgctgaaaaactgagtgaatatgatcagatttctccaccaaattctcagcctgataaggaaaatcccgttttgtcaacctaatgaagcattcaaagaagacatatgactcttttcaagatgaacttgaagattatattaaagtacagaaagccagagcgttagagccaaagacttgtttcagaaagatgaaaggggactatttggaaacctgtgggtacaaaggagaggttaattccagacccacgtatagaatgtttgaccagagactcccatctgaaaccatccagacctacccaagatcatgcaatattccacaaacagtggaaaatcggttgcctcagtggttaccagcccatgacagcagattgagactagactctctgagctactgtcagttcacgagggactgtttctcagaaaaaccagtacccctgaactttaatcaacaagaatatatttgtggctcacatggtgtagaacatagagtttacaagcacttctcctcagataacagtaccagtactcatcaagccagtcacaaacagatacatcagaagaggaaaaggcacccagaggaaggcagagaaaaatcagaggaggagcggtctaagcataagagaaaaaaaagctgcgaggaaattgacttagacaaacacaagagcatccaaagaaagaaaacagaggtggaaatagaaaccgtacatgtcagtacagaaaagcttaagaatcgaaaggagaaaaaaagccgagatgtagtctctaagaaagaggaacgtaagcgtacaaaaaagaaaaaggaacaaggccaagaaaggacagaggaggaaatgctttgggaccagtctattcttggattttgaagctttcaaagttggttctcccaaagttaaattgaaaaaataggtgagagcttggttttatgatatccgtgttcataccacttttcttatgtgaataggttctttaacttctaacaaaggcctagtaaacaaagtgtttagcatgcttgctctccaacacagaaattgcttttcctcattttctaaaagcattattacattttttgaacatatagtgtaatttcctttaatgaaagtgactctgcttttattcatcaaattgctttgatggtggaaatattttctgttgggaggttatttattttaaattggaggattaatgacctttgcacaatctgtttcttgattgggtttgttatagttttgagttgggtattttatgttcattggtttttctctgtgaagcaatttttttctcctttattagatctaacttgcagtgtattttctaggctggaaagtggaaaatgaaatatattatgatcttaggttacataaagtttctaaagtttcaaagagtcttgatacaaaatcagtttatattctgaaaatatttataataaagtattctaatttctaaaaaaaaaa

SEQ ID NO: 7145 - DNA, 398 bp, Homo sapiens
tttttttttttttgagcggttctcacattgtaattctcagaggtgaaaactatacagaaattgctggagcagtttgaatctctagaaaacattcacctccccacccactaccccaacccatgcccttgacctccaagaactgagccgagcctggggcacccgcggcctgtgctgcaagggtcaccttgtgacgagggccgtgcacagcctccgggctgagcagggacaaagactcctgtcccatccatggccccagctccccgtgagcggtaagagggcgcccagcagcgcttcctccatctaggcgggtctcgggggcccacgggaaatgccctccacaggtgtcccctgcacccacagcctcttgtcccctgcaccaccacgagcctgaggtgtga

SEQ ID NO: 7146 - DNA, 501 bp, Homo sapiens
atttcaggtgacagttacagaaaaatccttttattttgttctcaggaaatgcgattcatcaccacacagataggaagccttccctggaaagagaagatagtatttcatgcatcaaaaaaacatgaaatgttgaaagttgggtgatagaaagtcgagtatttgaaaaaactattagtggtaaccgtgttttgtcccttgtaaatcccaacctaccttctgttgaggtccaggtctctcttcactgacactgtatataactcctatatctacgcaacattttgttgctaaagtttgtgtttcaggtcttacataagccacaaaggggagggcatctttatatatctttttgaaatcacaaacatatcgctttttgttcacgtaaatgctgtagcaatacccttggtctgtatgtgaatcatatctcagtaaagcaatattcttaaaagattattggaaagggtcactgaggtctgtctgcccacctcagtccccagggagtta

SEQ ID NO: 7147 - DNA, 512 bp, Homo sapiens
tctaacctagactttgtaacctctttactcccagtctttcccaatcatctatcccttcattacactactgccagagtgatctttctgaaataacaactattgctcctttgttaacataccttcattgactccctctcaccagctgtataaagtccactctcctcacccgcatcccgtttttcacacttgggcacaccctgctccagctctgtgttctagctgggttgccatgcttacagtttaccaaggtgctgtgctttaccagtgcctcagtactgcagtgtcagtgcaggggccattgcgtcttctgggtttctctaacagggacactcttccatctaaagggctttcatagtgtggaaaactccagctcttctttacattcagtttaggcattggatcacttggaaaaccattccacacactttcttgcagttagggacttaccttccctgtttcctgagaagctttgtatacttctgccacagtacttatcacattatactgtagct

SEQ ID NO: 7148 - DNA, 228 bp, Homo sapiens
catattatttgagcacaatttttgatgcagaatcatctctctgttcccctactcgcttgtgagagggaacatttcctccttatgtgtcttagaatatttttacctaacatgcttaaacaaaacaaatttcattcttaacatcaggctctgaaagttccttttagttagcatttgctatattgacagctggtttgacaagtacatattttagcataagaaaaaaacagc

SEQ ID NO: 7149 - DNA, 285 bp, Homo sapiens
agaaaagaactgtaataagcagagatgtcaagcaatggcatcctctgagaagagaaagattgagggtatgaaaaagtactaagtattcagggagtagcaagcagcaaagacttgacggcacatagtgtctatacgtgttagggaaaagtaagagagaaagcaagagaggcagactgagaagaatcatgagctcaggagtcaatggtttataaacagagtagagaactgatcattacaggggacaaaagataaggacatgatgactaaatagaatagctaggtgtg

SEQ ID NO: 7150 - DNA, 412 bp, Homo sapiens
  misc_feature (1)...(412): n = a,t,c or g
taagcttcgtcagagtcaagattctgttttgttccttgccctatctctggtgttgagaactatgccaggcacatagtagatgcgtagtaaatatttgttgaataaataaaaagcagtgcatgcttttaaattatacaagcttggcctcatccctgtgtggaccctgaataagccacttcattgctctgaagctgtaaaatagaaatcgaaatccctgcctcttcagttaaggcttaaggtatcccaaagccaagggtcaggggggagaaggatggaaaagtttaatatttgttaggtgttaccaaatcatacagttcagtcccttggaatacttaggttttaggcctttagggattctggcagttttgtttaccaacntgttgttcttgncaaggggaggaaactttgcagg

SEQ ID NO: 7151 - DNA, 1172 bp, Homo sapiens
ccacatacaaagaggaaagatgaaacttttattgttacatttattgacactggatatttattatctgttatataccaggcaaaatggacacaccatcaggagataagacctgtatcttacgtgtaagatgaaacttatatttattgattgaattattgaatattttttgagtatttgctatataccaggcaaaaggcacagaacaaattatttgttcacagttacttttaactctttcagcaatgcctgagtcctctttatagaaacttcattttgctaagttagcaaccattcatttttttggttactcttcatgtatagttttctcaagtgtctcttcaaatactgcataatggtatagaccatttaatattccaaacataatctgaaagactagaggaatcgccattaatttcatttgtgtttgacaaagcgtcatccaatggattaaaacccttccttttggtggcagtggaacggtatgatacttggttgccaggcgtccatttttagtaaaagccaaagaactgggatagaaaacaccacaaactatgccaatcagtgagcttctgaaaacacagttttccttgcttatattatctgaatacaaagcatcaattacaaaaagcttgtcagtaacaacagtagacaaaaatggaagtgtagccaatgatgcatatgtcttcaaagcatcatgtttaaccttgaagcagcgtctgaacaggaagtttgagaatattccagagaaaccagctgttgttccaaatgtcgccatttgatatatattttgtgtcatttcttttctaagatagtcaaaatttttttctatgatttctatgaccattggtcttctgagttttgcatcttctagagaaggactgggctgaccatgcatagatgctgccatcttgaaaactgatactgttgctgttttcctctctcctcattccgagaaggcagtcaggctctttgtagttgtcctcctagctcttcaggtggggaggtggaaacagtggctgcttattgacatctctatcctcagtttctcatgaaagattaagttcattttggaaatcgtgtttcatttccttgggcgcttcctcagttcccaccggcaccacacctgaatcccttggcttagtcccagcctcatacccgaacaccaccatttt

SEQ ID NO: 7152 - DNA, 472 bp, Homo sapiens
ccagctcttattaccgcattccagagagagtcaacctggatggagtttgtcccctaaataaatgtagcgacaaagaaaagggtgctccaaatcagtttcatcagaatgataaggtacagtactgcagccatgtctgcaatagcacttcaattttacttttttttcccctagcatgtccttaagcattttctccccagcttttcacaatctttcttctaaggctgtaatgtcttacatccttaataggcatgattagatttctcccaaattttccaaattaactttctttcaatgtaaccaaaacaaaaccatggcatacagtaaactaaaagggtagacaggagagaaaggttgctgcaagtacagaaaatttagaaatcagcctttaccagttacatctgagacaaggtaaactttccaacacattggaatcatcagaagggctttaaaaaatacaactgccagccgggca

SEQ ID NO: 7153 - DNA, 447 bp, Homo sapiens
  misc_feature (1)...(447): n = a,t,c or g
gctcgactgctcatgtgactcatggaggtttgggcaaggtagcagttccctgttttcacagtaggtggaagatcctgactgaacccgagggagggtgggccccaccagcacgtgtccctagcaggggtggggcgggcaggaagcgcagagccccagtggggtgcccggcactgctgcagcgggaagcttgggcagccacggcacgtggatgngattgttgtgctgagatttttgtttaaattttcttccttttttttgtttctaaccaaaaatacttttctggttcttcttctaccattcccctgcccctcacctcccctttttgtcttcttctgtctcctcatctttttttctgggctcttttgtttttattttcattttttgttacttttgttttccctcttcactcacggaaaccttttttagaccaccaagtttttatttatg

SEQ ID NO: 7154 - DNA, 334 bp, Homo sapiens
acaacttgtaagtttactagatttattagctctttaaaagtttaggaggtagacggaattttttttttccgctcaacatactgaaagcctttaaattaaacttactctaggtaaattgctttgtaccttttacattgccttgtacatgccttacctttgttgcgtgtttgatttcttttcctgtagtctactgcctttcgctaggcaggtttcctcacagcattatttcttagaattgtgaggagactagtgatactgcttttcatgtatgcctttactaaagcatctaattcatcatatgggcagttaataagtatgaattgatgagatgacc

SEQ ID NO: 7155 - DNA, 428 bp, Homo sapiens
aaaacagtgatgggtcactggtgattattctttgcccagtaacaaaaacctaggagggacagaagctcagagtgatgatttttgctttcttttactctcaatgtagaactgaatgtgtagctgggaagtgagctagtttatttaaaaatcaataaattgtgagctagccaatttgttgtgtttatctgcatgacttacattgcagtgactagattattcactattacttctcaattggaaaggaaaaatactactggtcaaaagggaggaaagtagacatggatggaattggagttgaaaacaggcatttttagccatgtagagttcttatggttctcttcggtagtttttctttagctggtcagtttgtattgtcctcatttagtagacgtagatgcacgaactgattaattcatttgttctagggc

SEQ ID NO: 7156 - DNA, 506 bp, Homo sapiens
tgagtttatgtcggctattctgttttctgacatggatcagacacaaggccatcttggttaagagggcagggcttgggatgagacatcccatcacttatcaagtgtgtgacttcatgtgagttatttctctttggtccttggtttcctcaactatgaaatggagttatgacagtacctacaatcctgtgtgaggactgactgactgactaatactttggaaagtccttagacctgtgtcaggcacacgatttctacaattacaatgtcattgtcagcagcaccctccctggtctagtctggccaccaccaactctaagaagaaggaaggaatggatacaggcaatggagctggggagaagaaatcagacataatgaacagtctgaccccatcatttgagacagacactgaaggaaaaatctaaaggcaagggagtgggggcagttcttaaatgctatttggatggatgttggaattcttttgtttgttgaatgtccctcctcgtgcc

SEQ ID NO: 7157 - DNA, 479 bp, Homo sapiens
acatttactgtactacagggaatctctcatttcaaaatgacctgtgttgcagttattgtttataaaactgttcatttatctgacgtaaggggctaatcaaactgcttaagtacattcctggatgtttggaagatttttaagcgccatagagagggtacttatgctatggaaattgtgtttatatatatatgcataattgccactgaaattctgaacagacccaaaggaagaaaaatactgtgatttaaataaagctaacataattaatttatatctattttatatttgacttagtgggataaattgttttgtggaaaaccatattataaaatagtctaagttttttatagttgaggaagaatttgaggtgaaagatcatggttaattgtaacaattgcccagtactttgtgtttcactatgtgtctggcactgatttatgtttattaatttactacatcctcagaaccattccgtggtt

SEQ ID NO: 7158 - DNA, 433 bp, Homo sapiens
ttttaattttgggtgctaaataaatgttggatcagttatactgaataaattttccatcaacgtgttcttgctgtgggacatccttgacactaatttaagttttccaacaaatgcgactttccaatattttaagcatgacagaattttgctagacagctggctgtctttctcctgttcctctggatgccactcaaatatcttcacacccatctcactcattaacactgcgtgaactgtgagctctccaccccttgtctgtctgtaatctgggttgtgactacttgtttatccagtttatcttctttctcatcatccatcctggtttctgcatactataacaacatcggttgcatactattgacctctaaccctggatcctgttgggatgaaaacattatcccagtcctggttgaaagtagtgcagtggcctttt

SEQ ID NO: 7159 - DNA, 358 bp, Homo sapiens
ggcacgagtgcgagttaagtggaaaggtctgagagagagagaaatgaggggtgggaaagagatcatagcccttgacagctggaaaaggctttgtgcttctctttctctgcccctttcctggggcaagggaggagggcagatggcacaggattgggtagcagtgggggagaatgaatgctggtcacaaggactgtggcccagaaaagaggttcagtggcggccagaggaagctactgtgcctggggacagccctctgagcacctgccatgccggcgggggcagccgtctaatctggggcacttcagctctgtcgggtgtcctcttcgctcacctgacataccttagagttggttcattt

SEQ ID NO: 7160 - DNA, 1756 bp, Homo sapiens
gcaagtgttacctttatttatttcatatatgtatatttccagaaggacaacggttgactggtattaagaccaaaccagtccatcagaatatcatcgaccaaaatgagaatttccctgttgggccattagggttggagtcttattaaccctcccctattcctcgggcccataatgcattatgagatagaggagaagaaaccaggcacagaagactctccctgtcatgctttaaccccataccctgtgctccacttatggaggacgtctccccagttcttgccactcccacaatcagagaaggtgaggttcataattatttcaggcctcatcttccaagggaacctttaactgggcaacagagattggttgggccatcatgagatgctactttctagctctatgaacataaaatcacgtaagaaaaaagcaaacaacacaaatacatgaaagccatttactcctggtgaattcctcagggtcccaggttcaacactttccgtgatgtcagagtactcagtcagggatgatggggacagggtgtcagaacagtcttgatggtcttgccagcaacagctttttcttattttccataatttggtcttagtcgttctccagttgtcttcatgtaaataaagtggcccatggcaatcatgattctgtaattgttatagtgcctttgtaagttgacagtttccaaatccccttactcatacgacccctgtgaaggggggtgtgaaggggttggtgggcttgtgcatatgagggaatgtgaacgatttcattatgaccgaattatgctttactcaataagcactcaaacactaccatctcacttgtagtagaagtgctagggatgcaaccaagagactggttgaataacgggaaggttaaatgcatgagtattttaatagaaaaaaatattaaaaacaaaaccaaaactcgtatggaaagaggcttctgactaggccctcctttctagcagtgtttggcacctgataacaatttgacgctgggggagggagcagcttgacaaggtccacatgaagcagccttgagatttttcgcccacttccatttctcctcagcatcaaaggaaagtgcatggtaagaagtgaatcagacagcgagggatctatgcagttatcctgtgaatgtgtggcaaagccatcaggacgcaaacctcctgtcttgagtccagagctgtgtgctttaagatttgaccccagtaaagacagaatccttcaggctcgtcccttcccaaacctaaggggctgtccttggccactttcaacttgaagctgttgagcagtctttaggatatgtaacagcctattttttggacgatataggaaccacgacctcttaagtctcttagttctcctactttatacccatgatggtagaggcaggtgcactccgagtgaaggagaagcctcaattcaggttgtactttggatgaaacatcccctcaaggcgtagaggaaggctgagaggttctgcccaggctcgtgtttagttgcaggaagaggtaatgtcagatctgagcaggtcagggagactccctcgaaaaggtcttcccaggctgacaagagggcttttcctcttcctcacctcccttaggtgagggctgaaagcagatctcctcacatggggacctcgctaggaggtcttttctgagtgggtcctctgatgcctaattaagtgatatcctctctgaagctttttccacaggtagggcacgtgaatggtttctccc

SEQ ID NO: 7161 - DNA, 416 bp, Homo sapiens
aagaaaccctgaaggtcgggcctcaagtaggtctctttctagatgcagtcgtttttggaggagaagactttcgagccagcataggtgtcaaagacatctctctctctctttttctgtgtgtgtgtgtatatgtgtgtatatattttttctttgcccctcaaggatggacatttacataacaatgtatatttgccaaccatgacaatggtttttcatgacaatggaatggacactacttcctgataatttagggctcctcatagctgccctgcttctagagcactgcattattacttctgttcatttataaaagacacgagcaatagaaagcctgttgcagccccaggcatgctcaggaatatatggcatctcctttgctcctaataaatatattatgtgaacagccaaaaaaaaaa

SEQ ID NO: 7162 - DNA, 458 bp, Homo sapiens
tactgaaaaaatttacatttcattaacattttaaattacaaaggcaggtctacaaataccgatttgtgtgtttgtgtgtgtgtgtgtgctcattgcattttccaagcaaacaagtgaataatgtgctaactgtatcctttgtttttttatttttgatttctctttttattgtaaaacgtaagctgtgatgtgtagtgacattaattttagtaaaacctactttacgttctctatagataatatgcacataaagtctacataatgttttcttatgtaataaatgctttgggataatgaagggtacttcgagcatcattcctcagctgtttagtaaaccagctctacagagacttgcctttctaattctgcagctacatgggtagaaattaatctacttgaaaatgaattagcaatataaaaatgtaatattttatgattaatattaactagaaattaag

SEQ ID NO: 7163 - DNA, 464 bp, Homo sapiens
tgagatctttaatctgccagcagttactacgtcaggctcagttagctctagaggccattcttttgctgatcctgccagtaatcttgggctggtagacattatcaggaaggctctcatgggaagctttgatgacaaagttgaggatcatggagttgtcatgtcccagcctatgggagtagtgcctggtactgccaacacctcagttgtgaccagtggtgagacacgaagagaggaaggggacccatcacctcattcaggaggagtttgcaaaccaaagctgatcagcaagtcaaacagcaggaaatctaagtctcctatacctgggcaaggctacttaggaacggaacggccctcttcagtctcctctgtacattcagaaggggattaccataggcagacgccagggtgggcctgggaagacaggccctcttcaacaggctcaactcagtttccttataaccctc

SEQ ID NO: 7164 - DNA, 778 bp, Homo sapiens
gaaggggatcctggatttaaaagaaccaagggtctgatgaaccgaaatgctacactatctcaggttttacgagaggcgaaggagaaagaagagatacggacctccaatgaggttaccgtggaaacagacaagaaaactcattatgggctactctttgatgaatttcaaggcctttcacatctagaagctctggagatgctttcccaagaaagtgaaataaaggtgaaatctatccttaattctctgagtggagaagaattagagactctaaaaggttgaattagagcaactcaaagaaacattttctctagcagaatttttgtgaagaagaggaagaagagaaaaaaggggatgaagattttaccaaggacataacagagctgttttcccagctgcacgtttcctccaaaccagagaaacttgccagggcaagaaataccgcccacgaatggatcaggaagtctctgaccaagccattagcagagaatgaagaaggagaaaaacagtcggaagcagaaaatactgagcaagtcaacaaaaattcaatagaggatatccatgcgtttgcaatccggagcctggctgaactgactgcctgctcaattgaactattccacaaaacagctgcattggttctgcatggcagggaagcaggaagtgacagccataggaaaggagccaaactctttcccagatgacaattgtgttgtgttaaagagttgtcctctctgtcttaaagggtttcattaccttgccttaacaactgctgggggttcaa

SEQ ID NO: 7165 - DNA, 1488 bp, Homo sapiens
gcggcgccgcaggggattgaggggttgactgagcgttgcgagccttagctttctcccgaacgccagcgctgaggacacgatgtcgcggctctcccgctcactgctttgggccgccacctgcctgggcgtgctctgcgtgctgtccgcggacaagaacacgacccagcacccgaacgtgacgactttagcgcccatctccaacgtaacctcggcgccggtgacgtccctcccgctggtcaccactccggcaccagaaacctgtgaaggtcgaaacagctgcgtttcctgttttaatgttagcgttgttaatactacctgcttttggatagaatgtaaagatgagagctattgttcacataactcaacagttagtgattgtcaagtggggaacacgacagacttctgttccgtttccacggccactccagtgccaacagccaattctacagctaaacccacagttcagccctcccccttctacaacttccaagacagttactacatcaggtacaacaaataacactgtgactccaacctcacaacctgtgcgaaagtctacctttgatgcagccagtttcattggaggaattgtcctggtcttgggtgtgcaggctgtaattttctttctttataaattctgcaaatctaaagaacgaaattaccacactctgtaaacagacccattgaattaataaggactggtgattcatttgtgtaactcactgaagccaaaatactatcttttaagatgtcccacatggaagacgctattccaggatctttaaatttccatggatgcatataggatgtttgggagcataatccgtgaagaaaaaatcaattaaatcattgtgttcaacaggaatatttaaaatattctgcatgaatcctgtggctgtcttattttaaatagctgctgctgtgggattatattttttttccttaacatgccaaatataactttctgaaagtgatggaaaatgttgtcttgtgcagacaacatcatggctcttggcagtttaaatttagtaattttaatttagtgaacagaattgagaagaacgtgccaaatgagaatcaattaggtggatttttggctgtcatttcaaaagtggaataaatttattaatttagtagtactaaatggtatccttagattaaaattttgtgcttgataacagctgttttttctacattagaaataagatgccacacaaggaactacattccagatttaaagaaatgaaaggataccattagtgtgtataacagattattgttcatacttgtaaagcaccttatgtcattgagaatataaagaacagtgccttagaagacagtgaaaggtaagctctagcttaatgtctatgatttgttctttgacattaaggaaggtaaggattggtcagaggatgtaacttgatgtgagcagtagtaaacctgttttagatatcatactgttaatattttattgaaaatttatttcag

SEQ ID NO: 7166 - DNA, 306 bp, Homo sapiens
  misc_feature (1)...(306): n = a,t,c or g
tcatgccattctgtgttcagtgccagtaatgacagctctgcttgttagcatactacttaaatataactagaatgattcaaaacccgggttctgtgatatgaggatatagatagggtttcatcctatttcctggcttataactcccaaaacccttgttttaggcttttttnataatgttgggcacttcgggcctcagaaaacagcaggctgtttctnagatcttctcctgacctcctttcacctgctgctttttctccccaaggcaggccatagaaactaaaagtataatcttcctttgcccgtctt

SEQ ID NO: 7167 - DNA, 1325 bp, Homo sapiens
tttttttttttttaaaatttaataattactctttatttaaaataaataagccctcttacttacagggaaaatatgaaagcaaactctgtcctcctggtctaagacagaaaccacattcagaatatgttcattgaaaaaggaaagatttgttgattatcaaacaaatctaggtacttcaatacacattgtttctttgaaaaataaagactgaaaggaataattcatttcaaaaagtcacaggttaggaaaaccaattttccttctgagggctcattttaggcaaatcctccaagtgttcccaaatcttttaaaaaagctacatcccctgagaaagggccctttccctgtagccctcttgctctgacaccagcagccctgcacccttctgccaagtggctccctgcaggacggtgctgttgccgggcaggaatggccctccatggcaacctccagcaggcaggagctcaccacctgctttctgcaaactcactcacttggctcagctattctgcaatggagaggaagtttccttagcagccaaagtattctaagtatcacattttccagtattttccagatccgtagtgtgctcagaaagccagagctgtatcaccaggcttttagagaagattaacacctgcacatctgagtgacctttaacaggctccgcagcactgaacgcctgcagacactgcttcatgtgccctttaatgctgatcaatttccagattcaacagttacacaaattacattgtcatgaaaaacagaagaaaaagccccaaagtctttttcagacctcccctccttacccaaaatacagacacacaggcaagaactctcataaattcaaattcatcatttgagtaggtcggtaacacaagcatccacttctttactaagcatctggctgcagtaatccctgaatctgcggctgtggatcttagggaaggtggtgtgattgggagcaaggtgggaggcctctgtgtccctctggagctctgtccctggtggctcttcagacttgtcctcaaccgaaggagtggagatcagttcgtccatcccctctggccctgacagctctgcctgctcgggaaactggtcatcaccaccactctctccatcttgtgtgtcatcactggtaaaagctggactcacagcattttcttggagacgctgctttctctcttgccgttctttcaaaataatcttcttcagtgaggttggcttcttggccttggggatctccctctgcttccctttcttcatcagtggggcgctggagtccaagggattgtgcggggtcttcatttgactcatgcggcggc

SEQ ID NO: 7168 - DNA, 492 bp, Homo sapiens
ccttctgtgaaatgtctttatatatggtctagttagtattgctggtataaaagttagtattgctggtataaaagttaacagtgcctgagttgaaacactggccccgtgacttactagatgaatggctttgatcacgtaacttaatccacaggtaagatggggacaataaaagtaccaacttttagggttgttagaagaattttaaaatagttaacatttgtgcagttactagagtagtacatggcaaatagtgttatatgagtaattaaattaatgaatattcataggttaatttcagatcaggaacattgttgtactctaatagtttgtatggttttttaaattggatgatatcatctgtaagctaatagttttatctcttccaattcttaacgtatctttttccaaaaagagaaaaatgttgattagaactttcagtactgtgtcagacagtatcagtctcaagtcaacatgggtatctttagctaattc

SEQ ID NO: 7169 - DNA, 448 bp, Homo sapiens
ttggctagtgatgacatgaacattcctaatgaggagacaatattgaatgcacttcttacttgggtccgtcatgatttggaacagagacggaaagatctaagtaaacttttggcttatattaggctacctcttcttgcaccacagttcctggcagacatggaaaataatgtactttttcgggatgatatagaatgtcagaaactcattatggaagcaatgaagtaccatttattaccagagagacgacccatgttacaaagtcctcggacaaaacctaggaagtcaactgttggtacattatttgcagttgggggaatggattcaacaaaaggagcaacaagcattgaaaagtatgatctccgtacaaatatgtggactccagtagcaaatatgaatgggaggaggctacagttcggtgttgcagtgctagatgacaaactgtatgtgg

SEQ ID NO: 7170 - DNA, 248 bp, Homo sapiens
aaattcctgaggttcgttgtctcatgcccaaggaaatcaaggacgtggacacacaagaagtgagtttaagagcagaggtttaataggcaaaagaaagagaaaagagaatagctctctctcctgcagagagagagaggctcccaagtaggacttccagtccgtggcgaagggcacggggtttatagactggcttcaggaggtggtgtctgatttacgtaggccccaaagattggttggaccaggtgtgc

SEQ ID NO: 7171 - DNA, 447 bp, Homo sapiens
attcatggtttctgcccaaacggagccacgtgaggacgtctttggggatgtgtctccaagaaaagtgtgggctgccttcctcaccctggatgcctgagggctgccttcctcaccctggatgcctgtgggctgccttcctcaccctggatgcctgtgggcagccttcctcaccctggatgcctgtgggagccttcctcaccctggatgcctgtgggagccttcctcaccctggatgcctgtgacttggtttccatgggggcttcctaagctcagggaccccaagcctccatcaaatctaatgacccgccctgtctctgaacacacctgtgttgtccccgagcccctcaccaaccccctctgcaacccggcccacgcatttcccatccctgaagggtccagctcataggccggcccatgtgtttccctttaacccctgctttgtcccta

SEQ ID NO: 7172 - DNA, 580 bp, Homo sapiens
tttttttttttgggtgtggtgatgtatttattcataatatattttcagaacacattaataatggagaataacacttattcatatactgaatataacttttcctggagcactctagagcttgtttggagttggagaatactgccagggcttttcctaatctctttggtctttggaagtgggcagggtttctcaaaccaagtgtcttccatgggccattggcaaaggcttcccttcatcagcttggaggggcagaaagaccatggcttcagcacttccattttggaaagaagtaacaaaaaagtgaattaatgagcaatcggaaagactcaaagcattttgtactccacagttcatttcttcacacaaacgtccattactgcagcgggcatgaaaaccggcagggtgttaggctcatggcctgaagagaagtcacatcaccagccgatgttttcatgcaaaaggcaatcgtgatgattcagaacctggttctgaatttctccaggtgtgctcgtgagctgaaggtcatgcccattctgtgcatcctgtgtctttctactggtaaacttggatgtcattttag

SEQ ID NO: 7173 - DNA, 223 bp, Homo sapiens
agaaggtgcacatgacttggacaaaagactagtacatggcatcccggggacaaaaagcgaagtcaatggaaggattccaggacctgcttaacatgcgtccggaccagtccaatgtgaggcggatgcatacagcagtgaaactcaacgaggttatagttaacaagtcccatgaagcaaagctggcttttattgaatatgccagggccaccccgaaaccctgagg

SEQ ID NO: 7174 - DNA, 461 bp, Homo sapiens
cctcgggcaggaacttcctagagaactacggtgaagctttagctgctgagcagaccataaagcacctaatggaggcagagaaggtaaaaggattctgccagctggtggtggccgccaagctgagagagggcatttcccacctcatccagtcatgtggccttgggggcatgaagcacaacacggtggtgatgggctggcctaatggctggcgtcaaagcgaagatgcccgcgcttgggaagacttttattgggcacagttcgagtgacaactgctgcccatcttgcactgctggtggctaaaaacatctccttctttcccagcaatgtggagcaattttctgagggcaacattgatgtgtggtggattgtgcatgatgggggggatgcttatgctactaccattcctactgaaaacagcacaaggtgtggcgaaagtgcagcatacggttctttcacagtag

SEQ ID NO: 7175 - DNA, 332 bp, Homo sapiens
  misc_feature (1)...(332): n = a,t,c or g
gcaacttactgtgttactacattgcctttttggcattggttgatttataattttggtaaaggatcctaaaaccctgtattctttttctgtgccccataatgaccaaaaaagataaagaaaatgagagtaagatcaaaagatcaaactaaaacataaacagtctccttcctgtctgctttcttacctatctgttcacactttatctctttccctttctctctctctctcacatgcgcgcgcgcgcgcgcgcgcacacacacacacacacacttgccccaacactgagaaataatcttgccagaattctggtttttatagntgttggagccgtt

SEQ ID NO: 7176 - DNA, 1607 bp, Homo sapiens
  misc_feature (1)...(1607): n = a,t,c or g
ttttttttttttaagacttaacattatggcatttattatattgtatagagccatattacacatgcttggtgcttcaaactgagttatcaatgtttttctggatgcaaagccatctgatgctggatggcggatgccttaaatactatatttctgcatctatgacctatgagctaaggaaaaaccaaggacaattccagaaatggcaaagaacacttcagaaaaagatgtacatgagacgaaatgctaagtccttgagccagggccctacagaagttaccagaaagcgaataaaaacagaatttttctcaccacctgttgataatagagcctcacatgtccgggtatggacaatgtagaaaaaagaggttgttccgtttggtactgatgcctttctcccctccgtgatgtgtgcggacattgtgcggcccccagagagagcagcagacagaacagagcacagcaaactgccccctcctcaacacatcccagtgctgtttttttttttacagcatctggttgtctcatgaaaaacggtcaaatttgatcaaacttgccaccttgtggaaaatcaatcagtgtgcttcagatgaatgtgacgccatcacacgcaccctcctctgacatccagaatgctggcgggggacatggggctgggtgcctgctcggccaggacgaagctctccatgtgtcacctcccaccttacgggcacccagtttgtgggaggtttgctttgcctgctgacctgatgctaacgctcagcttaaacgctccattccagattttacaaggggactgggtgataacgtgtcaagtacatgctgcccatacttcccatcaagcctcagtacagtcccagcttaaagatcctctctggcaccacactgatcccttgggcctgggggtggatgccaggaagcctcttggccacaaatctgccctcttgtgggtcagaggccagccctctcttgcctgacgtgacttgtctgaagggcctgcacttaaaccatcttcaggcaaccagggcatctgagcataacctgagcagtaacaacataaatcaagggtcagtaatttggggtggatgagacctagccagccatccagtcagatgctgccgtgcaggtaagcatgattctgaaggcgtggggtaccttttgtcctgtaaagtcagagagaaggctaagaagtgcatggccagaaccccaagaaagtgcagcttggagttttggcttccttccccaccgcttgggttaaaagttcgggtggaatgcacttgccaggacctgctgggcctgaactctgaagtcgtgcgctcacattactgtcagtgtatccaggacaaagggcccggagccagacaggtgccccctacagnccgagggtccaaggcaaccctgtgactcagagctggcttcagcaagccagcagagcagctgggaggaagcctcatggcatggctgtggcatcaagtgggtgtctgtgagcagcttggctctcaccactgttttgacctctggganccttactcttgctgggggtcagatgtcaagaaaatagaaggattattaaagaataattaaataattaaagatcaacaacatgaatt

SEQ ID NO: 7177 - DNA, 327 bp, Homo sapiens
gcagcacctctgtgaattagcataagatagaaagaacagaggtttggagtaagacagaccttatccttgagcaggagaaggacacaaggtctgtgacagaagaggttggccatatagcagggtacttttcctgccaccccatcatgcaccccctcccccattaaacagaacccagcaagcccagctcagagaggggcataaggagccaggcagactttttcactggtagcagaagcttgtcacattctactttaaatgtcatataaccatttttttttcaaatggatatgaaattcctaatttggctttttcctttacacattcctt

SEQ ID NO: 7178 - DNA, 788 bp, Homo sapiens
atggtttccaaaaattcacatagtattacctcacagtaggaaggcttctttcccatttaggctcagagaacacttttacagaaatcaaacctatttacagggtggcaccccttttctgtggcatctgatctgtcatctcccaagctcctgaagttctttatccaggttgtatctttgctgagctgacaacagatttctctatggatcaaatattctaatcaaggaaagatacggtgaaacttcagtcttcttctggagaaatgctgaggcgagattagtgcagctacattctgagttgaaggaaatgcagtgttctgagggcccctttgtgtcctgatggctggaggacgcttcctcctggttagatcctcaagctccttgcctcattgacaaatgtctcctagtcccctttttccctctgactctgaggaactaaatagcttgactatctctaaacagagactggccctgccactgaccctcctgtccctctcatagcataccctgacagatactcaatagaaaacacctgcagaccatgtgcacacttaactttcctgcccaacctgcctccccaacggcccatgctagaatagcttgtgcccagaaaacaaacggtgacacttcatctcttcagcgtcgagaaaatgggcatagaatgtacccatgcaattgaatgtatctcattctccactggcatagtagatataaactattcctttgcctaccttttactgccttatcctggaaatattggggaaaataagccatatcagtgagatttacct

SEQ ID NO: 7179 - DNA, 346 bp, Homo sapiens
aaacattaaaatatcatttaaaaacaaagagggacatttaagcctaaaaattgacctgggtaaagtggtttttagtaacagcaactttttgaggcttagcatgttttaatactaatgggatttttcatctgcttcttggagaaacctttttttaatgctaaggattaagttgaaagtagataagattaatacttagaagttataattagaagttaatgagttattaattagaagttaaactaatcattaaccagtgtttgttcatttcttcttacattgtcctattctcatctctagcactttgtcagcaacccctaagaggttagtaagtcttgaggaaaatgag

SEQ ID NO: 7180 - DNA, 307 bp, Homo sapiens
tcccccacatgttcaggggaatagctcactttcatcaccgtggagcactagagaaaggccattccaggggacttgaacaggagggttctggatttcaggacaccaagcatagctcagattggggatgcagtaataaagatgggattatacagagttcacataaggaagagtaggacctctaacccctttcctccagatagccacaagaatgttggccactaggctcattccctgctcagctaccaccaccatccttcccccaatgccctgacaagaactaaaggattcctctgtgtggaaactgacc

SEQ ID NO: 7181 - DNA, 719 bp, Homo sapiens
tgcttcttaggagatagagttatgtgattacaagataaattcaaaagaagaatccagtagaaacaaaacctgcccattaacttatgggttcagcccaatcctttttaccctccctggccatgtttttactgtggtccttctctggccttgcccttgccctttcccctttctggtcctgccatgtttctggccctgccctgtccatgtcctgggacctgactctggccctgggacctccctgtccctgccctgccataaccctgggcccgtttctttgctttaacactgaccctggccctgccttggccctgtgctaaccctaggccctggccctggccttctgctgaccctgatcctgccatggccctggccctgccatgtccctgccctggccctggttctgccctgcttctggccctggccttggtcctctcatgtccctggctgtgaccctgcccctggtttttctctggccatgaccctgccccagttctgtcctatccctggccctgtctcagttctgtcctagccctggcctttcacagtactttatgcttagtaagggctccatggtgtctgtgagttgaatgttgtgttcatagtatctgccaaaacagaaagaaaaaagtaaaatattttgataaggaagttaaagctttgtatataaatatgccttgaattgtaaagtgcctgttattagttgtattacatatagggtc

SEQ ID NO: 7182 - DNA, 1690 bp, Homo sapiens
gaagaaccacacctcttttggaatatattaaaaatagaaaattagaaaagcagagaattcgagaagagaagcgagaagaacggaggaggagagagttagaaaagaaacgtttgcgggaagaggaaaaaagaagaagaagagaagaagaaagatgcaaaaaaaaagagacagataaacagaagaaaattgcagagaaagaagtaaggattaagcttcttaagaaaccagaaaagggagaggaaccaaccacagagaaaccaaaagaaagaggagaggagattgatactggaggtggcaagcaggaatcctgtgcccccggtgcagtcgtaaaagccaggcccatggaaggctcgctggaggagccccaggagacgtcacacagcggcagtgataaagagccccagggatgtggagagatctcaagaacaagaatctgaagcacaaagataccatgtggatgacggcaggaggcacagagctcaccacgagcctgaatggctttccagaaggagtgaggatgagcagagatgggggaaaggacctggccaagacagagggaagaaggggagccaggacagcggggctccgggggaggccatggagagactgggaagagcgcagaggtgtgacgacagtccagcacccagaaaagagcgactggcaaacaaggaccggccagccttgcagctgtatgatccaggagctcgcttccgagcgcgagagtgtggcggaaacaggaggatctgcaaggcagaaggttcggggactggtcctgagaagagggaagaggcagagtgagtcactgcacgcacctggcctccatggacgagcaagggcatcccagaaacgtgtaaatgaccccgagtgtgactgggaaggagaacttattccttaccaggaaactggaagctaaaaatacagagggtgacgtagaaacacgcagaaaccattctaaagaaagtagtgatcttgtattaaattgagcagaattctcacagattttaccattcctgttataaactagtatttgttgtttagccaaaacagaaaatgatttccactgggacagtagaaaaatatgtgtaaaatagggaagaaagttagtattggatcagtgtgagtcctgaagcactttcagtgctgtgagaacgacatccactttgggtttcattcgtttgtaagcagaggagctgtcagtcactcgtgcttctcggtggcctctgagccatggtgtcgagtgaagagtagttcttgtttgttacaacctttgtgagtcagccatgccccccaaagcgtgctgtgttttagtcctggtaggaatatttatccagagttcacactatataaaacccaacagcttcaactattgccctttcaacagttttgccactgaccggatagaaacggtttcagtctctggatggatgtgtttgtggtttgtaaccattacggtttaaaccatggtttaagaatttgcccaaataacagaaattttgttcgggaagggataaactagatatagcatacagagcctgtttttgagttttagatactttatttgtaaataacttaaaatagctttctgaaaccgtgcattctgtagtttcttcctttcagtgaaattgctaaatgtcaatgtatttttggcactgcgattttaaccatttattaaataaaaattttgttaaag

SEQ ID NO: 7183 - DNA, 4195 bp, Homo sapiens
  misc_feature (1)...(4195): n = a,t,c or g
tacaacggttgccatgatgctcaccaactgccagagtcctagcggaaacggaaacgcgcgaggagcgagatgttctggctcctctaggctagctggttcttcaaagatctcgatggttcctcataaatatgtaaatattgtgggggcgtggcgggactttatgccccgccctcccaccgaggctgcgctggaagacgggcgtccggaactcctgggtccattcccaatgtctcctggctcctcctccttttgctcagccccaccaccgccccgctcaggccgattgcaaaattcttagctgttctttgagtaaccacacgtcctccacgctcctttcctctttatcccaccctcctcctcctccccactttgaggcctccagctccagattgacagagctgaaggccactcgtttccgtaaagcgcagcggcaagctccgccccctggaggtctcacggccgaggcggggccgggacacagcgactccaacccgttccaccaatgaggacacgcggaaatccccgcccccgggcgtgggccaatggcgctggctggggggggcggccaccgcctcctggcggctgcgaggtttcactgcaggggcgccagtgggctcagtgacgctgcggcctccttctgcctaggtcccaacgcttcggggcaggggtgcggtcttgcaataggaagccgagcgtcttgcaagcttcccgtcgggcaccagctactcggccccgcaccctacctggtgcattccctagacacctccggggtccctacctggagatccccggagccccccttcctgcgccagccatgcctttaaaccgcactttgtccatgtcctcactgccaggactggaggactgggaggatgaattcgaccatggagaacgcagtgctcttcgaagtggcctgggaggtggctaacaaggtgggtggcatctacacggtgctgcagacgaaggcgaaggtgacaggggacgaatggggcgacaactacttcctggtggggccgtacacggagcagggcgtgaggacccaggtggaactgctggaggcccccaccccggccctgaagaggacactggattccatgaacagcaagggctgcaaggtgtatttcgggcgctggctgatcgagggaggccctctggtggtgctcctggacgtgggtgcctcagcttgggccctggagcgctggaagggagagctctgggatatctgcaacatcggagtgccgtggtacgaccgcgaggccaacgacgctgtcctctttggctttctgaccacctggttcctgggtgagttcctggcacagagtgaggagaagccacatgtggttgctcacttccatgagtggttggcaggcgttggactctgcctgtgtcgtgcccggcgactgcctgtagcaaccatcttcaccacccatgccacgctgctggggcgctacctgtgtgccggtgccgtggacttctacaacaacctggagaacttcaacgtggacaaggaagcaggggagaggcagatctaccaccgatactgcatggaaagggcggcagcccactgncgctcacgtcttcactactgtgtcccagatcaccgccatcgaggcacagcacttgctcaagaggaaaccagatattgtgacccccaatgggctgaatgtgaagaagttttctgccatgcatgagttccagaacctccatgctcagagcaaggctcgaatccaggagtttgtgcgggggccatttttatgggcatctggacttcaacttggacaagaccttatacttctttatcgccggccgctatgagttctccaacaagggtgctgacgtctttctggaggcattggctcggctcaactatctgctcagagtgaacggcagcgagcagacagtggttgccttcttcatcatgccagcgcggaccaacaatttcaacgtggaaaccctcaaaggccaagctgtgcgcaaacagctttgggacacggccaacacggtgaaggaaaagttcgggaggaagctttatgaatccttactggttgggagccttcccgacatgaacaagatgctggataaggaagacttcactatgatgaagagagccatctttgcaacgcagcggcagtctttcccccctgtgtgcacccacaatatgctggatgactcctcagaccccatcctgaccaccatccgaatcggcctcttcaatagcagtgccgacagggtgaaggtgattttccacccggagttcctctcctccacaagccccctgctccctgtggactatgaggagtttgtccgtggctgtcaccttggagtcttcccctcctactatgagccttggggctacacaccggctgagtgcacggttatgggaatccccagtatctccaccaatctctccggcttcggctgcttcatggaggaacacatcgcagacccctcagcttacggtatctacattcttgaaccggcggttccgcagcctggatgattcctgctcgcagctcacctccttcctctacagtttctgtcagcagagccggcggcagcgtatcatccagcggaaccgcacggagcgcctctccgaccttctggactggaaatacctaggccggtactatatgtctgaccgccacatggcgctgtccaaggcctttccagagcacttcacctacgagcccaacgaggcggatgcggcccaggggtaccgctacccacggccagcctcggtgccaccgtcgccctcgctgtcacgacactccagcccgcaccagagtgaggacgagggaggatccccggaacgggccgctggaggaagacgggcgagcgctacgatgaggacgaggaggccgccaaggaccggcgcaacatccgtgcaccagagtggccgcgccgagcgtcctgcacctcctccaccagcggccgcaagcgcaactctgtggacacggccacctccagctcactcagcaccccgagcgagcccctcagccccaccagctccctgggcgaggagcgtaactaagtccgccccaccacactccccgcctgtcctgcctctctgctccagagagaggatgcagaggggtgctgctcctaaacccccgatccagatctgcatggggtgtggccccgcagtgcccccacccagtccgccaaacactccaccccctccagctccagtttccaagttcctgcactccagaatccacaaagccgtgcctttctctggctccagaatatgcataatcagcgccctggagtcccctgggcctggaccgcttcccagaggccaggaaatctgccattactctgcggtggtgccagaggttttaggaaacctggcatggtgctttcaggtctggggcttttagagccccccgtgtggcttacaaattctacagcatacagagcaggccacgctcaggcccggcatgcgggccaccaagttctggaaaccacgtggtgtccctgcgaatggggcgatcaagtccagagccggggcactttcagagtttgaaggtaactgagagcagatggtcctccatttcaactccagaagtggggctctgggagggatgttctagccctccctggctgtcagagccaggctctgcctggagggatccctccatccggctcctgtcatcccctacactttgggccaagcaagaggtggtagaaccacttggctgctcattccttctggaggacacacagtctcagtccagatgccttcctgtctttctggtcctttctggaccagatcctactcttcctttctaaatctgagatctccctccagggaatccgcctgcagaggacagagctggctgtcttcccccacccctaacctggcttattcccaactgctctgccccactgtgaaacccactaggttctaggtcctggcttctagatctggaaccttaccacgttactgcatactgatccctttcccatgatccagaactgaggtcactgggttctagaaccccccacatttacctcgaggctcttccatccccaaactggtgccctgccttcagctttggtgaaagggagggcccctcatgtgtgctgtgctggtggntgcaccgcttggtttgcagttgagaggggagggcaggaggggtgtgattggagtgtgtccggagatgagatgaaaaaaatacatctatatttaaga

SEQ ID NO: 7184 - DNA, 937 bp, Homo sapiens
aaacagaaggggaggtgcagtttcagaacccagccagcctctctcttgctgcctagcctcctgccggcctcatcttcgcccagccaaccccgcctggagccctatggccaactgcgagttcagcccggtgtccggggacaaaccctgctgccggctctctaggagagcccaactctgtcttggcgtcagtatcctggtcctgatcctcgtcgtggtgctcgcggtggtcgtcccgaggtggcgccagcagtggagcggtccgggcaccaccaagcgctttcccgagaccgtcctggcgcgatgcgtcaagtacactgaaattcatcctgagatgagacatgtagactgccaaagtgtatgggatgctttcaagggtgcatttatttcaaaacatccttgcaacattactgaagaagactatcagccactaatgaagttgggaactcagaccgtaccttgcaacaagattcttctttggagcagaataaaagatctggcccatcagttcacacaggtccagcgggacatgttcaccctggaggacacgctgctaggctaccttgctgatgacctcacatggtgtggtgaattcaacacttccaaaataaactatcaatcttgcccagactggagaaaggactgcagcaacaaccctgtttcagtattctggaaaacggtttcccgcaggtttgcagaagctgcctgtgatgtggtccatgtgatgctcaatggatcccgcagtaaaatctttgacaaaaacagcacttttgggagtgtggaagtccataatttgcaaccagagaaggttcagacactagaggcctgggtgatacatggtggaagagaagattccagagacttatgccaggatcccaccataaaagagctgggaattcgattattaaggcaaaagggaatatttcaattttcctggcaa

SEQ ID NO: 7185 - DNA, 357 bp, Homo sapiens
caatttaagcataaatagtactaagccccaattactaatctgagggcctcctcacaggtccaagggcaatgagcaacctcgagaggcaggtgactgcacaagcagtaagctatggattaaaaattaaaaggatttcacattctttccaaagtgtactgcccggtgtctggcacacgcatgttacaatatgacaatctgctctatttgtgagcacctgagtgtattacaggggattacacatgcatatgatagaatctggctcccggtacagtcaaaggagaacagcatcagccaccaaatgtgctgatcttacactgaaaagggttgactgaaaacatttcaagggtaatgtaaaca

SEQ ID NO: 7186 - DNA, 503 bp, Homo sapiens
aggtctcggcgagggagtcatcaagctttggtgtatgtgttggccggttctgaagtcttgaagaagctctgctgaaggaagaccaaagcagcactcgttgccaattagggaatggaccgtttgggttcctttagcaatgatccctctgataagccaccttgccgaggctgctcctcctacctcatggagccttatatcaagtgtgctgaatgtgggccacctccttttttcctctgcttgcagtgtttcactcgaggctttgagtacaagaaacatcaaagcgatcatacttatgaaataatgacttcagattttcctgtccttgatcccagctggactgctcaagaagaaatggcccttttagaagctgtgatggactgtggctttggaaattggtaagagcttggtgttaagagttgtcctgccctagtggactcagagaagaagctgttgttgaagagtaaaggaaggaacctcaggaagagaaagtatgtgttgctttc

SEQ ID NO: 7187 - DNA, 1129 bp, Homo sapiens
ttttcagcacagaacgcaatcgcctgaaccttgaatcatgaacctcaaagtagcaatatatttatttacaaaatatacagtttcacagaaacagccttcgctttatacacataaactttaaaattacacagaaccatgtaaacgatgtgaagtgtctggcctggccaaagccaatgggagggcctacttttggggtgacatccctccctcccctcacttcattagccaccaaccaggaaccacagatgggtcgtgcctaatttgcatataaagaagctgattgcagctgcccagctcaatctaacacaaaaaccaaggtgtccgacttcttagacaccacccacagggacagatctgctaaaagaacaaaaatgcaatcaaggaaacaaaatggagatgagtatcacatgcattccagaggcatcgaaccttctagcacacgtgacagttgccagggccggcagttccattctaaagtcacatggattcttaaatgcacctttaaaagcttgtggaattttttttttcaaagcagaaaaacactttggagcgctggttattcacgtggtgaagacactggacaggcgttatctcagggtagatctttggcaaattcctctccaatgcgtcctggctgtttgccctcgtcagtttctaaaccagcttactatttttctctaccgaacctcccccttggggatcttcacaataaactggcttcagaaactatttctctctagtttcgtgttaatacaagcaacagaacttttaaaaaaataagacggttggacaagtgtgaaagatactaggacaaaaaaaatgcctctgattagccaaattacggttcaagccccttggtgcttcagtgggagaaggtgggaagagtctgcctggtggcctggcacaaaggtgccacatgaaggggaagcccccagcagtgagaacgcgggcccatcccactgaaaacaaacatgacttgcttgagcattcttccctttccatgccttaaagaaacaatgcttatgaaaacctaccaatcaattagaaaatgttttgagaacaagtacttgaactgctgaagagcagtgttcatttcagagaaagccggagcccctctccctattctttg

SEQ ID NO: 7188 - DNA, 195 bp, Homo sapiens
  misc_feature (1)...(195): n = a,t,c or g
tgcagtagcacttctgtggataaattaatgccagcaaattataccagatggttcattttaatgaaattaaccaagtatctgctacgggttcttcatatttatagggttctctcattctattctcactctccacttggtttaaaacaaaaattgtatggtaggagtctttgttcttcaaagtttgacanaatattg

SEQ ID NO: 7189 - DNA, 449 bp, Homo sapiens
  misc_feature (1)...(449): n = a,t,c or g
tatgaaacactttatttgggtatcactcaattttactgtagcagcctccatcccttcttagttataccaccgttaccaccacttttgtccttgctcctcccttgatgttttgtctttcatgaaacccatctcccaaggtctttctggatgataatggcttaattcactctctttcccagatacatgtttttccttctttatagggaacctaactctgcctgtctaattgggggaattccggggcagggtatttgaaaatgttctggggggggccggggtgcagtgggctcaagcttgtaaaaacccaggcaaggcacattggggaagggcttgagggcggggagaattgtttttgaggcttcaggaagtttgggaggaacnaggccaggacaacataattaaggacntccattccctaacaaaatatttttaaaaatttaggccgaggg

SEQ ID NO: 7190 - DNA, 725 bp, Homo sapiens
ttttttttttgtttagtatttttgagaacccagccacctggccatgctgtaccagccttgtgctgagtgctggggataaaggaacaaataaaacccagtccaggcttctgtgtgcccagccctgtgccgggtcccagtgggtaacagcatgtccaatcccctcagtgtcccactagaggcttcctttggggctgctggggacatcttgtttctagttgagaattcagatttatgtccaaagacaagaactccctgaggggcagattacaacatggactgggccattacaatcaacaaggacacaaagctaacacagccatcgttatacaccagacatgtgctaaggacttgatttccccattgtttaatcatcaccaactccattatcacccccatttcacagatgtggaaactgaggctgagaagagtaagggacttgtccaagggcacagagcaagtcagggctacggtgatgtttcaggcccagacctgtttgcctctggagccccagggtttaacacaccccagtgctgctgtgaaagggctctggacagctcaggctggccggccaatgcggggatagccgaacagaggtatggaacagaaaggggcgttgaggatgttgctgtgtgtgtgcggttgggggagtgacaaggcttcagcaatggtactcattctctccaaccagctcccagtgctgctgtcctctgatccaccctccgcta

SEQ ID NO: 7191 - DNA, 440 bp, Homo sapiens
aatataattacatcatcatctgaagtggtattgtgttagatctcgatgtgaattttgcatccaaaggggaagacaggtggtggtagaatccagcttcctaatacgctttgcaaaggctttgtagtattagtttgtggtttatgaattagagatgctaattttataaaattagcataatgggaaaagaataatagcatgtcagctgttaaactttgaggcaatagtggttgcttgtttgctattcagtgagtgtccttgagtagtttattttatcaatactatacagtattaggaaataactttttccttctagttagtggtatagctagttttttgtctcttaagtaaaattctagaaaagccaattgtatccttaaatgtttttgtattctatttaagaaacagtttctttcttgttgctttcaggacaaaaaaaaaaa

SEQ ID NO: 7192 - DNA, 741 bp, Homo sapiens
  misc_feature (1)...(741): n = a,t,c or g
gcaccatgagcttcaaacctgaccctcacttctcagtggacccgagtttcccttccatgccattattttcagtggggaagttttagaggtgagctgttggccacaatatcaattttaagtgttcatagcagttatgtctcctgcattcttggctcctgggatttaccaccaagagtccccaaaatattaatgctcttccctttttctaccctcaaacttatagttgtatcttattttttaaaatgaattttcatgggccagggcacagtgggctaccgcctggtaatcccaggcactttggggaggnctgagggcagggagaattgcctgaaggcccagaagttgaagcccaacccctgggcaatgtaggtgagaccccccctgcctccaaaaaatataaataaaaataaagggcatgttcctgaaagactgtcaccttggaaagtgacaggccctggcattagcatgttgacacacccttttcttcttactcagcaaaatacttcgttttggtttcttcttgtgttgctattgagaaatttgtctgatcatatccttctgcctttgtcccccaagaaatgccctactttatccttttctttttgtagttgaggagggctagagaatcacaattaaaagtaaggaaatagcagggttttgaggatccttgtcccagccccaaagctgaggaaataagaataaatgcttaatatagccttaattctagagcgcaccaaaaaa

SEQ ID NO: 7193 - DNA, 275 bp, Homo sapiens
  misc_feature (1)...(275): n = a,t,c or g
cccacctcagtatggcaaactggttaatatagttcaagtaagcctggaagattctttgatttcctgtatttattccttgtaatatagataatcatgaacttctgcgtgtatttttaaactaaactcaacagggtgtcattgtttgagtaactagtagaaataccagtctgggacaaaggccacaaactgttcaatatagaaatagtttaatttgttagtatgttgggtgggattacaggcatgagctaccacccccagcctncnnctctgccttt

SEQ ID NO: 7194 - DNA, 444 bp, Homo sapiens
accaaggacccgtgtggaaggaggcggctccccgctgcctgccctgacctacaggctaggtggtggtctccttgttttggtgtcaaggactcagtaaaagcatctatttttttagcacttaagctggcaaggcggtaggggcatgcactgttaggtggtggccacccccagggtcaggggaaaagaatgggtccatagagtgcccttgaagcagagaacagccccgagcagtgtgaggacagaggcatcccagcctcagccggtgggaacggctgccactcccccagagccctgccaccccatgtgtcctaggctggtggccaaggccatgtgtgagggaagaggggtacctctcttccctgctgctggcctggggtatttccaaaacagccttttcgcacacatgcaggttgcaccgagaggtctggagctgtggctgagcca

SEQ ID NO: 7195 - DNA, 195 bp, Homo sapiens
cgtcgacgttgggaagagatcttggattgtttggcagttttctgtgcctgtttgagatttttgatcatgaattttaaatgaaaccagtcacagttgtatgattttctgcagcaagacttagctgctgaagtgcaggcaggggtacgtgatagggtttagttggtgccaggattctgctaggattgtaaaaaaaaa

SEQ ID NO: 7196 - DNA, 733 bp, Homo sapiens
  misc_feature (1)...(733): n = a,t,c or g
ttttttttttttttttaaagcaaagtatccaatttttattgattctataacatatatatgtgcatatattgtagtatctttatcaatcaggatttacttgctgataacagaaaccactgcaacctagtttagacacaatgtgcttttgttagtttctggccatgcacagaagcctcctgcttacaagatgaatggaaaggctgaaggagcagcctttagtctgacttccaggaatgactctcagaacactatcacataactggctgtccagaagagatgctatctctgcttacagcctggaagctggaaagtcatgaagatgctgcccattgctggctccagagccacattattttagccacaatccccaccagcaaaatggatgctcctcgtcctgccacaccacaccctggggtctctgttattgctcttctagaaaaataaaatgctctgtggctgtttgttggcagaaacattacctctatctcatttggccttcccagtttcaagtaggtacatctgcatagaggaagctaagtcacatttggaattcaagctgaaaggggctctgggaaatgtaggcttcagctttttttggatccaccagtgagtcacggcacacctgtgtgcacaaatgggttacaagtgtgctcgtgccnnnnnnnnnnnnnnnnnnnnnnnnnnnnnnnnnnnnnnnnnnnnnnnnnnnnnnnnnnnnnnnagcngtntncaa

SEQ ID NO: 7197 - DNA, 513 bp, Homo sapiens
  misc_feature (1)...(513): n = a,t,c or g
caggaacaagtccaacttttaatggtgcaacagtaactgtctatcaccagccagcacccatcgctcagttgtctccagctgttagccagaagcctcccttccagtcagggatgcattatgttcaagataaattatttgtgggtctagaacatgctgtacccacttttaatgtcaaggagaaggtggaaggtccaggctgctcctatttgcagcacattcagattgaaacaggtgccaaagtcttcctgcggggcaaaggttcaggctgcattgagccagcatctggccgagaagcttttgaacctatgtatatttacatcagtcaccccaaaccagaaggcctggctgctgccaagaagctttgtgagaatcttttgcaaacagtgagttgtatttgtctgatactcattcagaagagcaattgccattttggagtatgtcttanctgtttctttcacctgtttagtttcctagtactgctataacaagttatggcagttgggtggcttaaaa

SEQ ID NO: 7198 - DNA, 574 bp, Homo sapiens
tccaaagaattcggcacgagggaaaaccccccaagtaggtgacagagtattggttgaagctacttataatcctaatatgccttttaaatggaatgcacagagaattcaaacactaccaaatcagaatcagtcgcaaacccagccattactgaagactcctcctgctgtacttcagccaattgcaccacagacaacatttggtgttcagactcagccccagccccagtcactgctgcaggcacagatttcagcagcttctattacaccactattgcagactcaaccacagcccttattacagcagcctcagcaaaaagctggtttattgcagcctcctgttcgtatagtttcacagccacaaccggcacgacgattagatcccccatcccgattttcaggaagaaatgacagaggggatcaagtgcctaacagaaaagatgatccgaagtcgttgagagagaagagagaaagaccgtagatcgagagaaaagattcacctcagaaggaaaccgttccccggggaaaagatctccacgaagagagcgagaaggttcaccttcggagagtttccgac

SEQ ID NO: 7199 - DNA, 744 bp, Homo sapiens
gcccaagtgaaaatcctcctactacattccacagcacttcatggtaattataaccttggctagataatacctgctgtatggtacagaatagtgacattcaattacctcatatataaagagagctccatggagagctggaaagtgcatgccactacaatattaacacatcccatcttccctttctttttgcaaggctgttgaatttcagcccggcatccccacacactaacaccatcaggtcttccacatttgatggttacaccacaggagcccacaccagactgctgcttccctgtgagctcagagtgaaattgttctcaggggtatttgcaagggccttgtcatcagttaaagactagcagctgactcccaggtgattctacccccgctgtcacctctccaaaaggggaaattgaatagtggtattgctcactgtggtgagtgttctttgcaccaccagaagaaactggttaatgaatgtactatttagaagaaaagttttgacatttaaagattactagttgttccctttccccaggaaaagaaggtcaaagtacagtcttccctgttgcagagtttggaataactctgtttgccctgatgctttccagcaggagaactgtattatgtagaggggtccttggccagcatcaaaggaaaaaaattatttttttcctagacctgtatttttcctattacagtcttccatttatttcttcctccagattaaaagtgcctcttcct

SEQ ID NO: 7200 - DNA, 341 bp, Homo sapiens
gaataagcaagaagtctagtggcacgtgtacatgagaggagtccattaactcccacaactgagacctgagagggatgagttggtcccgaaaattcaggcaaagccaggtaggtggcctcggtattgatttaaaaaaaagattggcttacctgctactagtagagttaccctgggctccaatgcagtgatagcagatggggctgaaggccctgggcctcatcaaccatcagcagctaggccaaggagctgtgggagtgcaagcaattcattgtcatttttcttgccgaaggcagggtatcttggggtgccggctttttttctttctgtagggaggacagtca

SEQ ID NO: 7201 - DNA, 1467 bp, Homo sapiens
  misc_feature (1)...(1467): n = a,t,c or g
tctcaaaaaaaaaaaaaaaaaaaaagctgctgaaatcaggcagcgcctttcagattcccggcccaggtgatttcgtaactcctgggcaccctggctactgcccttcctaggccctgccattaccctcttcctccatttagcacttggcccatgtctcttacatctccttacccagtttttacagggccgtgttagagccttcacccatggaacagtacaagacatgatgctactccgagaataccgacagctccagggaacagcagtccctacttacccagccttttccccccaaccattcgcccctattcagcaagaagcagccagagggacaacgggcgcccctcttctattacctatttaaaaggctgggaatgttagggaacaagtttgcaccagaacccctccccaccccaatggcagctgttccctttaccctggantattttggcagctgcatttcctggggacccttattttagggcggttacagcaagggtcaccaggatttggttttacagccctacggaggccatgggggggaggtcacgaggaaacgtgggataaacctaagttacaccctcttgtaaattcctatattgtaacctggtcacgagatgatatgtggtaaggttaaccaacaaacaaccccagggtctctctcccccatataaaaccctcattttgtaagctcagggctgcctcctttgactgtggtgaagcagcctggcaggttagtaaacttactctcctgaccttgggtctctctctcatcctttctcttggctaaccttcattttggtgccaaaacccaggaaggggataggctctggctgggcgtccttagaggattctctctctctctctcctatcatcccttacccagccaacctccccttcccgaacctgctaaagaccctaaggatctcccaaaattctcccattgttgggccacctcatccaccatcaaagcctctgagaggggatgggcagacaagcatgctcctcagagccaccatcccttcaacaagacaaaaagtgaagaatcacttgcactcccatagctccttggcctagccactgaagactgatgaggccagggcccctgggccggcttcccggcccccactgccatcactgcatcggagcccagggtaactctactagtaggcagtttttacagggccgtgttaggagcctttcacccatgggaacagtacaagacatgatgctactccgagaataccgacagctccagggaacagcagtccctactacccagcctctccccccaaccatcgcccctatttcaggcaaggaaggcagccagagggacaacgggcggccctttttctatttacctattttaaaaggctgggattgtttaggggaacaagtttggcaccaggaacccttnccccaccccattggagttgttcctttnaccttgattatttttgaagttga

SEQ ID NO: 7202 - DNA, 132 bp, Homo sapiens
ttcactaaagaagaaattggcaagaggaaacctgtaaaggaaactacaattttatgttgttgatagtgaaatggaatggttctgaagtactgacccgtaagaaatagccctatgcactgattagtaaggagg

SEQ ID NO: 7203 - DNA, 1127 bp, Homo sapiens
taatttgtactgtcactggagtcagccctcatttgccatgttatgattatgttcttcttgtgggacttgtatgtatttattagagaccattgagacgtagcactgggcattacttttgtggcaaaggcaccagggcagtaatcattattaatggatttcattatttgggagagcattttactgactatagagaattcattgcattgatctattgtgccacagttttattataccgggtagtttaaaatgatattctctaaactgttaggctgaaaaattgtccagtgttggcagttatcccatcagtaagacattccttttactaccgaaaatacatagttctgtcgaaagagaccttttgactggtccccagtgccctgactgtgtttaaatccctcactagtgaaataggaggattactactgccatcattgttctaaaacaaacttccttttggaagataacagcagcggtaaatcagatgttgaagaaagtaccagcttaacttcactttgctttaaaagggtttcctctttaattgacaaagtgtcatgtataatagggcatggcaactcacatagtaaacccttgtgtgggggctgcctgctggggttggagttcttaatgaacatacaagtgaatacactgaggcaaaaaaattaaagctctccaactgtgggggtattcattctgttcactgtggccagtgtggtgatcagtactggccacaccagtggccaaagagaactgcattcatcatgtggctgttctatagctgtgagctgtggtgactgttatttttcctagtgatagttttcagtgacagcatagattctggtatcatatccaaggaataaacaaacactgtttttggctttttgttttattgttcctgacataaaaataataagctatttttggcatatgcagacttttcacaaagtgattgttttcttgagctctggactacttggtaacattcataagttccttcactttgtagctccctctttccttccttccactccctgcaaaagagagcagaactgatttttcagaggtgatgtttacaacagttcaacacactcgaatgagcacttagaataatgtcaatagaggaagaaaaa

SEQ ID NO: 7204 - DNA, 411 bp, Homo sapiens
tatccatctagtcaccggtagcaacttctcttagactgcctgatgtattttagttgtgaatcagaattttagagctagaaaagaaaaaatgattatgtagttccatgctcactttttttttgttgtttttgaaacaacagagcgagactccgtctcaaaaaaaagaaaaaaagaaatacatatctaatgttacagattgtggtttattggttaattactatgcatttttttcagtttaaaaaataatcttattttatatacttctctcggtataatttttcatgacatttcagcatgttgataatatgtgtgcatctatttcagtgccttaaagtattttgagagcaatcttttgctgacagttgaagaactgttaatgaaatactgttcattaaaaggatctgtgaaatc

SEQ ID NO: 7205 - DNA, 645 bp, Homo sapiens
tctcggaaatcgctgctgcacgttccctctttgtgcccccctgactggcttgtgggggtctttctctcaccatgcaatggcctgtggctctgtcagcaaacggttttctgcaaaaggccacctagtaagtgttttaggcattgtgtgccattattgtctctgttgtgattaatcacctttgccattgtagcacaaaagcagatgtcaatacattggcaaatggctgtgactatgtttcaataaaactttatttacaaaaataggtgctggctcacgtgctgtagtttgctgaccccttgcatcagtgaagattttttcaatatggaaatttcagaatttccaccaggatctacaaaattcagatccgtcattccaatctttattttatcttgctgattaaatggcactttaaaaaccacatgctaaaaggaaaaaagaagtagcaaacaaacaaacaaaaaaccacatgcaaatcctgttagtgaggtcatttttatatagcccctaagcaatagtcagtgtgtgtgggccttctggtaagtatggaaggtgggagaagtaaattgggagctgcactctgctgttggagaactggaccagtcaaccatgtgtgtgggtggacttcacatgagatgcacttcacat

SEQ ID NO: 7206 - DNA, 201 bp, Homo sapiens
agaaacacaggcaaatcacttactacagggttatttgcttagctgttgtcatcttcatcatactatctatacaacgtaactttttacaagtggaactagaccagtagtcacccattttacaatcagatattaacctccatccatagtagtgaacttggcatgtctttgaaaggtccactgtggtcatccatcctgtgaggg

SEQ ID NO: 7207 - DNA, 192 bp, Homo sapiens
attgttgtttaatttgccgttccctaatgacatatgatgttcaggatctacttatatttatcacctatctgtatatcttgtttggtgaagtgtctgttcagattttttgtccttttcttttttcttctttttttccccctgcccttttgtctccatttttaaaactttggttgttttcttattgttgagttt

SEQ ID NO: 7208 - DNA, 171 bp, Homo sapiens
aacaagaaactgaaagctgtcaacaaaatgtgtttaaaactttgccctgagtgggcatcaaactggctgtttttaagcctgaagtccagccgcattgattaggcacgttggccatcagcatcttccagcagagcagatctgcagagaaaggcaggacccaggttttagtgg

SEQ ID NO: 7209 - DNA, 479 bp, Homo sapiens
  misc_feature (1)...(479): n = a,t,c or g
aacgctgttgtatgctttttctggaatgttctctggccccggctgcttgacctgtgctctgtttgtcttctgcctcaccagctctttgcacccctcttctgcccatcaattaaacatcagtgttcttgggagtcaccctgggtccatccttcctgcctgtgctgggccatctcatccactcccatggcttgaaatacactgatgggctttgctgagcacctccatgccgaaaacccccaaatccgtattccagatcagatactaacagtagttattgcctagagactgtccaaaggactttgcattgattttttcacttaattctcacagcagacccatgaggtgggcccccactttaaaaaatgaggaaactgggccggggcacggtgggcttgtgnctgtnaatcccaggcactttgggagatgggaggcaggaggattaattgagggcacaagtttcagggancagtctgtggttt

SEQ ID NO: 7210 - DNA, 264 bp, Homo sapiens
  misc_feature (1)...(264): n = a,t,c or g
taacttagcccagattgtcaacttatgaatcctactgattaaaaattttttcttgcatttctcatcaggccatcgaacattggttcatgattatttatagcacttaatgacattgaaagggatttatttcaatttattcagtctttattaacactccacagggaacagagtgcagccgccactggccttttctcaggcacagttgagatgctaagaagggaggaacttcaccactaaaggaagaactgaacccggtgganagaa

SEQ ID NO: 7211 - DNA, 94 bp, Homo sapiens
tctggtgcctctctttctctaagtggtttgcttccccaagttccccacctgagtctgggtggctgtggcacatctgtgcattctgtacgcacac

SEQ ID NO: 7212 - DNA, 346 bp, Homo sapiens
ctcgaggccaagaattcggcacgagccatcacgcacgtgtctgactcggacgccgagtccaagagaggacctgaagctggtgccgggggtgagagtaaagaggcttgagacctgggcagctcctgcccctcaaggctggcgtcaccggagcccctgccaggcagcagcgaggatggtgaccgagaaggtggggaccacgtcctggtggctgttggcagcagattcaggtgcctctgccccacgcggtgtcctggagaagcccgtgggatgagaggccctggatggtagatgggccatgctccgccccagaggcagaattcgtcatgggcttttagcttgcttgcta

SEQ ID NO: 7213 - DNA, 484 bp, Homo sapiens
gtctctgtaatttctttaattattcaaacaatagagcacaaagataacagtttcaagtacattgtgatacacgttttgacaggaatagatatgcatttagtcatgagggaggctggcagcaaccaccatgcatacattttgcacaaactcttggctccgtcaaccctgaatgagaagtcggcgcctcgtcctggcggggctgggctgcaccctcttgatgccctgtacctagtgtctctaagcagtggtttcctttccttgcctgtgaaaaagagaattttaaatataaagcagtggacgcatcttaagaagatggaccaggagggctggggacagcacccagcagcacgggacactctgccaccgggcctgtccaggagggagtgccacccaggagtgaggatttcccatccgggtgaagctctgctccaaggtgccccagtcaccagcagagttgcaccatggcctcaggcaccttggggct

SEQ ID NO: 7214 - DNA, 436 bp, Homo sapiens
acaaaagtaccattacctgcatgtagcttcatgttacataactgccattgatttttattttggaataattatagagtcacaggaagttacaaaggtagctgagaaagaacctgtgtactcgtcaccgagttttctccatggttgcattttataaaaccatatagtacaacaaccaagccaggaaacttgtatcgtaggggccaagggcaagcctccctctttgccttctgaaggttcactgaaaatcaactgacaaaaggcagattaataggagaaaaggcatacaaatttattaacacacacagggaagaatcccagagtgattaatccaccacatagtggggtgctgatggttatatacccttcttctcaagggaaagggtgatggggaagtagggatgattttaggagagtagtagatgatttttaggggaat

SEQ ID NO: 7215 - DNA, 6601 bp, Homo sapiens
aggggaggaagtttgctgtcgagcggcctgggttccgtgggcaaggcgtgggtggcagcgttggctcgttcgacgacacactgagggcggcgcgatgggagacgagatggatgccatgattcccgagcgggagatgaaggattttcagtttagagcgctaaagaaggtgagaatctttgactcccctgaggaattgcccaaggaacgctcgagtctgcttgctgtgtccaacaaatatggtctggtcttcgctggtggagccagtggcttgcagatttttcctactaaaaatcttcttattcaaaataaacccggagatgatcccaacaaaatagttgataaagtccaaggcttgctagttcctatgaaattcccaatccatcacctggccttgagctgtgataacctcacactctctgcgtgcatgatgtccagtgaatatggttccattattgctttttttgatgttcgcacattcctcaaatgaggctaaacagcaaaaacgcccatttgcctatgcataagcttttgaaagatgcagcaggcatggtgattgatatgaagtgggaacccccactgtcccctccatggtggcagtttgtctggctgatggtagtattgatgtcctgcaagtcacggaaacagtgaaagtatgtgcaactcttccttccacggtagcagtaacctctgtgtgctggagccccaaaggaaagcagctggcagtgggaaaacagaatggaactgtggtccagtatcttcctactttgcaggaaaaaaaagtcattccttgtcctccgttttatgagtcagatcatcctgtcagagttctggatgtgctgtggattggtacctacgtcttcgccatagtgtatgctgctgcagatgggaccctggaaacgtctccagatgtggtgatggctctactaccgaaaaaagaagaaaagcacccagagatatttgtgaactttatggagccctgttatggcagctgcacggagagacagcatcattactacctcagttacattgaggaatgggatttagtgctggcagcatctgcggcttcaacagaagttagtatccttgctcgacaaagtgatcagattaattgggaatcttggctactggaggattctagtcgagctgaattgcctgtgacagacaagagtgatgactccttgcccatgggagttgtcgtagactatacaaaccaagtggaaatcaccatcagtgatgaaaagactcttcctcctgctccagttctcatgttactttcaacagatggtgtgctttgtccattttatatgattaatcaaaatcctggggttaagtctctcatcaaaacaccagagcgactttcattagaaggagagcgacagcccaagtcaccaggaagtactcccactaccccaacctcctctcaagccccacagaaactggatgcttctgcagctgcagcccctgcctctctgccaccttcatcacctgctgctcccattgccactttttctttgcttcctgctggtggagcccccactgtgttctcctttggttcttcatctttgaagtcatctgctacggtcactggggagcccccttcatattccagtggctccgacagctccaaagcagccccaggccctggcccatcaaccttctcttttgttcccccttctaaagcctccctagcccccacccctgcagcgtctcctgtggctccatcagctgcttcattctcctttggatcatctggttttaagcctaccctggaaagcacaccagtgccaagtgtgtctgctccaaatatagcaatgaagtcctccttcccaccctcaacctctgctgtcaaagtcaaccttagtgaaaagtttactgctgcagctacctctactcctgttagtagctcccagagcgcacccccgatgtcgccattctcttctgcctccaagccagctgcttctggaccactcagccaccccacgcctctctcagcaccacctagttccgtgccattgaagtcctcagtcttgccctcaccatcaggacgatctgctcagggcagttcaagcccagtgccctcaatggtacagaaatcacccaggataacccctccagcggcaaagccaggctctccccaggcaaagtcacttcagcctgctgttgcagaaaagcagggacatcagtggaaagattcagatcctgtaatggctggaattggggaggagattgcacactttcagaaggagttggaagagttaaaagcccgaacttccaaagcctgtttccaagtgggcacttctgaggagatgaagatgctgcgaacagaatcagatgacttgcatacctttcttttggagattaaagagaccacagagtcgcttcatggagatataagtagcctgaaaacaactttacttgagggctttgctggtgttgaggaagccagagaacaaaatgaaagaaatcgtgactctggttatctgcatttgctttataaaagaccactggatcccaagagtgaagctcagcttcaggaaattcggcgccttcatcagtatgtgaaatttgctgtccaagatgtgaatgatgttctagacttggagtgggatcagcatctggaacaaaagaaaaaacaaaggcacctgcttgtgccagagcgagagacactgtttaacaccctagccaacaatcgggaaatcatcaaccaacagaggaagaggctgaatcacctggtggatagtcttcagcagctccgcctttacaaacagacttccctgtggagcctgtcctcggctgttccttcccagagcagcattcacagttttgacagtgacctggaaagcctgtgcaatgctttgttgaaaaccaccatagaatctcacaccaaatccttgcccaaagtaccagccaaactgtcccccatgaaacaggcacaactgagaaacttcttggccaagaggaagaccccaccagtgagatccactgctccagccagcctgtctcgatcagcctttctgtctcagagatattatgaagacttggatgaagtcagctcaacgtcatctgtctcccagtctctggagagtgaagatgcacggacgtcctgtaaagatgacgaggcagtggttcaggcccctcggcacgcccccgtggttcgcactccttccatccagcccagtctcttgccccatgcagcaccttttgctaaatctcacctggttcatggttcttcacctggtgtgatgggaacttcagtggctacatctgctagcaaaattattcctcaaggggccgatagcacaatgcttgccacgaaaaccgtgaaacatggtgcacctagtccttcccaccccatctcagccccgcagcagctggccgcagcagcactcaggcggcagatggccagtcaggcaccagctgtaaacactttgactgaatcaacgttgaagaatgtccctcaagtggtaaatgtgcaggaattgaagaataaccctgcaaccccttctacagccatgggttcttcagtgccctactccacagccaaaacacctcacccagtgttgaccccagtggctgctaaccaagccaagcaggggtctctaataaattcccttaagccatctgggcctacaccagcatccggtcagttatcatctggtgacaaagcttcagggacagccaagatagaaacagctgtgacttcaaccccatctgcttctgggcagttcagcaagcctttctcattttctccatcagggactggctttaattttgggataatcacaccaacaccgtcttctaatttcactgctgcacaaggggcaacaccctccactaaagagtcaagccagccggacgcattctcatctggtgggggaagcaaaccttcttatgaggccattcctgaaagctcacctccctcaggaatcacatccgcatcaaacaccaccccaggagaacctgccgcatctagcagcagacctgtggcaccttctggaactgctctttccaccacctctagtaagctggaaaccccaccgtccaagctgggagagcttctgtttccaagttctttggctggagagactctgggaagtttttcaggactgcgggttggccaagcagatgattctacaaaaccaaccaataaggcttcatccacaagcctaactagtacccagccaaccaagacgtcaggcgtgccctcagggtttaattttactgcccccccggtgttagggaagcacacggagccccctgtgacatcctctgcaaccaccacctcagtagcaccaccagcagccaccagcacttcctcaactgccgtttttggcagtctgccagtcaccagtgcaggatcctctggggtcatcagttttggtgggacatctctaagtgctggcaagactagtttttcatttggaagccaacagaccaatagcacagtgcccccatctgccccaccaccaactacagctgccactccccttccaacatcattccccacattgtcatttggtagcctcctgagttcagcaactaccccctccctgcctatgtccgctggcagaagcacagaagaggccacttcatcagctttgcctgagaagccaggtgacagtgaggtctcagcatcagcagcctcacttctagaggagcaacagtcagcccagcttccccaggctcctccgcaaacttctgactctgttaaaaaagaacctgttcttgcccagcctgcagtcagcaactctggcactgcagcatctagtactagtcttgtagcactttctgcagaggctaccccagccaccacgggggtccctgatgccaggacggaggcagtaccacctgcttcctccttttctgtgcctgggcagactgctgtcacagcagctgctatctcaagtgcaggccctgtggccgtcgaaacatcaagtacccccatagcctccagcaccacgtccattgttgctcccggcccatctgcagaggcagcagcatttggtaccgtcacttctggctcatccgtctttgctcagcctcctgctgccagttctagctcagctttcaaccagctcaccaacaacacagccactgccccctctgccacgcccgtgtttgggcaagtggcagccagcaccgcaccaagtctgtttgggcagcagactggtagcacagccagcacagcagctgccacaccacaggtcagcagctcagggtttagcagcccagcttttggtaccacagccccaggggtctttggacagacaaccttcgggcaggcctcagtctttgggcagtcggcgagcagtgctgcaagtgtcttttccttcagtcagcctgggttcagttccgtgcctgccttcggtcagcctgcttcctccactcccacatccaccagtggaagtgtctttggtgccgcctcaagtaccagtagctccagttccttctcatttggacagtcttctcccaacacaggaggggggctgtttggccaaagcaacgctcctgcttttgggcagagtcctggctttggacagggaggctctgtctttggtggtacctcagctgccaccacaacagcagcaacctctgggttcagcttttgccaagcttcaggttttgggtctagtaatactggttctgtgtttggtcaagcagccagtactggtggaatagtctttggccagcaatcatcctcttccagtggtagcgtgtttgggtctggaaacactggaagagggggaggtttcttcagtggccttggaggaaaacccagtcaggatgcagccaacaaaaacccattcagctcggccagtgggggctttggatccacagctacctcaaatacctctaacctatttggaaacagtggggccaagacatttggtggatttgccagctcgtcgtttggagagcagaaacccactggcactttcagctctggaggaggaagtgtggcatcccaaggctttgggttttcctctccaaacaaaacaggtggcttcggtgctgctccagtgtttggcagccctcctacttttgggggatcccctgggtttggaggggtgccagcattcggttcagccccagcctttacaagccctctgggctcgacgggaggcaaagtgttcggagagggcactgcagctgccagcgcaggaggattcgggtttgggagcagcagcaacaccacatccttcggcacgctcgcgagtcagaatgcccccactttcggatcactgtcccaacagacttctggttttgggacccagagtagcggattctctggttttggatcaggcacaggagggttcagctttgggtcaaataactcgtctgtccagggttttggtggctggcgaagctgagggcgtgtcagcaggcctttcgatccctgggaccaaccgcatcctcagcttcttccccgagaaatgctggagcaggctgttcagaccgacgttgccatcaaaacacatacacccagaaagaaacaacagaaaccaaaactcacaaggcgcatgattacttgttttatatttcatgttgggttttccctcccactattaaacagtctgtttccgtacaaaaaaaaaaaaaa

SEQ ID NO: 7216 - DNA, 778 bp, Homo sapiens
  misc_feature (1)...(778): n = a,t,c or g
gaaggtagaatggtggttgccagagcngaggaagagggggtaggggttaggttttaataaatatcatttcagttttacaagatgaagagnnnnnnnnnnnnnnnnnnnnnnnnnnnnnnnnnnnnnnnnnnnnnnnnnnnnnnnnnnnnnnnnnnnnnnnnnnnnntggttaagatggtaaattttatgtgtgttttaacacaataaaaactgaaaaaaggaatatatgttaccctaaataaaaatttcatatgctgaactcagaacccccagtacctaagaacatgaccttttttgaaaatgggattgttgttannnnnnnnnnnnnnnnnnnnnnnnnnnnnnnnnnnnnnnnnnnncctaatccaatangatttgngtctttataaaaaagggaaatttgtgcacagagataacacaggggatatgccatatgaagatgaaggcagaattcctacaagccccagggatgcccaaagattgccagcaaacccaccagaagctagganagaagtgtggattnnnnnnnnnnnnnnnnnnnnnnnnnnnnnnnnnnnnnnnnnnnnnnnnnnnnnnnnnnnnnnnnnnnnnnnnnnnnnnnnncagtgcattttgttttgtaagtcagccatatggtttgtggcactttgttatggcagccctaggagatgaagacaatatgcaacatggtatgtccattataggacactgtgggccataaatgtgttctttggcctgaagaaataaaacttggtggtccaagttgatgtcttaaaaa

SEQ ID NO: 7217 - DNA, 509 bp, Homo sapiens
ggcagctccaccttcatcagaatggcgtggaaatgctcatggaaaatgaaggaccccagtcaggaaccacacaagcctaagggaaacctgccagggccctgagtgtcctggcctccacacgtttctcttgtggtcccattcaggctttaactgcctgctttgtgcagagatgctgggacggaaagaggacctcctccaccactggaagcaccagcataactgtgaggacccttccaaactgtgggctattttaaatacggtctccaaccagggagtgatcgaactttccagtgaagctgagaaatgagaccccaaggcagcctggggttaaggagagagctctgccgccaccttccttcagagcttcgtgctttatggtggtgcttagtcacaaagatcaaacaacaggattggtgtgagtgaacggaaatgatttttgtacatggttttattttcttaacgaaataaaatataagctctcgaagcatatttttctaaaaaaaaaaaaa

SEQ ID NO: 7218 - DNA, 565 bp, Homo sapiens
  misc_feature (1)...(565): n = a,t,c or g
agcactgaggagacatcaggctcagtggtcttccctggaaagccatgctaggtgtggccataactgacagtgaactatacttgtgttttagcttcttttgggaccagggtcagggacatagaaggatctgaaacaggtctcctaaaatatatcaacagctcgtcaagattctctaaagtcctaagaaaaatctatgattggcaaagaggatttagattgcactaagaaacacaggaaggtccatgtttcattagtatatccaaaatgtcctcaaagtacaccaaatctaccccatgctgcagtctcctgaggagtgctgggtgaatctgctttgaatataacctagggcatttagttaataaagctccatataatcttatgcctgcttgttggattttgttttcttgttttttgtttttaattatctatgagagaaatgaattaacaagaacaacatagcatggagagttagttcatagtttataaaaccacatcccnnnnnnnnnnnnnnnnnnnnnnnnnnnnnnnnnnnnnnnnnnnnnnntatanaggcnacgagcggatc

SEQ ID NO: 7219 - DNA, 188 bp, Homo sapiens
cgccacacccagcagaattttaatttaaaagctcagcttaaacacctcatgatgcttacacatttggtacatttttaacaatcgttgattgttcaactccatccgtctcagagttaaagacacaggataaggaaaacatctccttatccaagtgatttggggtggtattccagctgtctgaggctgta

SEQ ID NO: 7220 - DNA, 720 bp, Homo sapiens
aacttaccgctaaaaattttaaaatgggaaataaatccaaggagtttttagtcatgcattatgattttaatctatgttatgccaagtatagcattccaaaatatacatctagagactaaaagtaaatgctctatagtgaagaagtaataattaaaaaatgctactaatatagaaaatttataatcagaaaaataaatattcagggagctcaccagaagaataaagtgcctctgcccagttattaaaggattactgctggtgaattaaatatggcattccccaagggaaacagagagattcttctggattatgttcaatatttatttcacaggattaactgttttaggaacagatataaagcttcgccacggaagagatggacaaagcacaaagacaacatgataccttaggaagcaacactaccctttcaggcataaaatttggagaaatgcaacattatgcttcatgaataatatgtagaaagaaggtctgatgaaaatgacatccttaatgtaagataactttataagaaatctgggtcaaataaaattctttgaagaaaacatccaaatgtcattgacttatcaaatactatcttggcatataacctatgaaggcaaaactaaacaaacaaacaaaaagctcacaccaaacaaaaccatcaaattataacgtattctataacatacaagactgtaaagatgtgacagtgtacattat

SEQ ID NO: 7221 - DNA, 874 bp, Homo sapiens
cccaggacaacgacctttgcatccccctccgctagcagcgaccacctcctgccagccaccgaggaagctccaaaggtatgtgaagcctgcaaaaataaaaatgatgatgacaacgacattaatggaaacgctttgtaaaaatgattttgcactgaaaataaaagtgaaggagataacctacatcaaccgagataccaaaatcatcctggagaccaagagcaagaccatttacaagctgaacggtgtgtccgaaagggacctgaagaaatcggtgctgtggctcaaagacagcttgcagtgcacctgtgaggagatgaacgacatcaacgcgccctatctggtcatgggacagaaacagggtggggagctggtgatcacctcggtgaagcggtggcagaaggggcagagagagttcaagcgcatctcccgcagcatccgcaagctgcagtgctagtcccggcatcctgatggctccgacaggcctgctccagagcacggctgaccatttctgctccgggatctcagctcccgttccccaagcacactcctagctgctccagtctcagcctgggcagcttccccctgccttttgcacgtttgcatccccagcatttcctgagttataaggccacaggagtggatagctgttttcacctaaaggaaaagcccacccgaatcttgtagaaatattcaaactaataaaatcatgaatatttttatgaagtttaaaaatagctcactttaaagctagttttgaataggtgcaactgtgacttgggtctggttggttgttgtttgttgttttgagtcagctgattttcacttcccactgaggttgtcataacatgcaaattgcttcaatttttctctgtgg

SEQ ID NO: 7222 - DNA, 431 bp, Homo sapiens
tttaaaaaatggaaaagagaaagattattgatgccttgtgaatacaggtgtccccaaaaggcctgagaccaaccttaattatcaagaatatggttgcagtggaaattggtaaacagctgaaattgattcattgattattcaacacttattgagcacatactactattattaatagctgtactgcgagcgctaatacttaaaagaggaagtcaggtgaaggcgcaacagctttatgctctttttcactataatctgtgaaatagtgtatattaaacaataatagtatatggaaaagcacatctacatgtgtcatcagttataatactgtggggctgtttggcagacaatagagtagataaatttattgaacattgggcctttgaaaggtatgtggaaattgtaaataaaaatggattccatgaaaaaaaaaa

SEQ ID NO: 7223 - DNA, 1225 bp, Homo sapiens
gcagctgccacagacacccccttcctgtttgaagactgagataatgtctcccctgtaccaagatgaagcccctaagggaacagaggcttcttcggggacagaagctgccactggccttgaaggggaagaaaaggatggcatctcagacagtgatagcagtactagcagtgaggaagaagagagctgggaacccctccgtggtaagaagcgaagccgtgggcctaagtcagatgatgacgggtttgagatagtgcctattgaggacccagcgaaacatcggatactggaccccgaaggccttgctctaggtgctgttattgcctcttccaaaaaggccaagagagacctcatagataactccttcaaccggtacacatttaatgaggatgagggggagcttccggagtggtttgtgcaagaggaaaagcagcaccggatacgacagttgcctgttggtaagaaggaggtggagcattaccggaaacgctggcgggaaatcaatgcacgtcccatcaagaaggtggctgaggctaaggctagaaagaaaaggaggatgctgaagaggctggagcagaccaggaagaaggcagaagccgtggtgaacacagtggacatctcagaacgagagaaagtggcacagctgcgaagtctctacaagaaggctgggcttggcaaggagaaacgccatgtcacctacgttgtagccaaaaaaggtgtgggccgcaaagtgcgccggccagctggagtcagaggtcatttcaaggtggtggactcaaggatgaagaaggaccaaagagcacagcaacgtaaggaacaaaagaaaaaacacaaacggaagtaagcagagctgccaggctcccaggagagcatggggactaggaggaagggtgtggcatggctcagtctggcccccttgattaccggcctagcccctgctcacatcacagctgtctgaagaacagtgaggtggagtgcctagaactcccgtggtggtcctgagcagagaggaggatgtcctcctgcctgcctgaaggtctcccatgaaaacactgctgaactgtgttgacactcatgaccctttttttaaaccgttaaagggaagttcggtgttggagcgatactcaatgtagtcagtctacacctggacgtgtgggccacttaagccctccccacccccatcctattcctaaataaaaccaggataatggaaaaaaaaaaaaaaaaa

SEQ ID NO: 7224 - DNA, 572 bp, Homo sapiens
accagctccgggaacagggaatgtgggttatgcagtgcttccagctcagtatgttactcagctacagcagtcttcatatgtatcaatagcaagcaactctacctttactggaacatctggtatccagacccaggcacggcttccattcaatggcataatcccatcagagtcggccagtcggccccgaaagccctgtaattgtacaaaatcactgtgtttgaaattgtattgtgattgctttgcaaatggtgaattttgcaacaactgcaattgtactaattgttacaacaatttggaacatgaaaatgaaaggcaaaaagcaataaaggcatgccttgacagaaatccagaagcctttaagcctaagatagggaaaggaaaggagggagaatctgatcgacgtcatagcaaagggtgtaattgcaaacgatcaggatgtcttaaaaactactgtgaatgctatgaggcaaaaataatgtgttcctcaatatgcaaatgtattggctgtaagaattttgaagaaagcccggaaaggaagacattgatgcatttggcagatgcagctgaagtaa

SEQ ID NO: 7225 - DNA, 1379 bp, Homo sapiens
atggctgcagggccaacactgggcagagcctgggaagtccttcggaaggggaccagggcgtctgaagtgctcagtgcccccactactctgaggccgactccagctactctgaggccgactcaatctctcggctggaagcagtgttttcccagagcttggcccttgctgacctcgctcactgggcccatcttcccacactgctcttagaaggacacccctaccggtagcagccccaagctgagggggctccctttttgaccttcactggcccgcccttcactgtctccagcaggagttcctagggcttggcctgccttgctccacagtacggcggaggcagccctgcttgtcacttgagggagccctagacaaaggccaatgggttcatcaatgcccactggctctctgccaaagccaaaaaggtgtcaggcagtctccagcgtgctggccgggtctcggatgccacccctgctcactgagcctgcatgggccttgcccccggaccctgtggtcttctgggattggggtcggcttaccctgtagcacagacagggattcctggctgcctggggagctgtcttaagcaaaatctcttgtcccagaggtgcccatgtgggtccgctgtgtcccctgtcatcatccttgttttttctcattttggccaagggacggctccctgggacaggcagggaacaactgcggagatattagtgattcataggtttgtacagtgttttatactttgcaaagcactttattagctcacacctgtccactcacatgaaactcgtgttaggccctgggaggccgacggtaactctcaccgtgccctcagatgaagcacagagaggttgttacttgcccgggccatccagtgggctggctgggtcttgtgtccccatctgtggacccctctagggtctgagatgagatgagaagtgtctcctgtatccacctcttcctggcctcccttcccccacttcctggtccctgtccactcctcaggttggtgctctcacttcttgaaagctctaggcacccccgcctcccgccaggctccccgttggctcctggcaggccagctgagaatgaacaggagatggaggcaggcagcccaggctgcagaggtgagggatgtggggccaggcccagagggctcagcctagaggcttccaatctcagattctcctgcctgtggtcatctgtttgtccatcaccccaggacagggcagacagaggggcaaagcactgggggccccagagcctagcttcccctcagcctgggggacatcacagcatttcagtgtcagtcacattttaaactgatcagcctttgtataatgttttttaaatcatttctaaataaaacagaaatacag

SEQ ID NO: 7226 - DNA, 689 bp, Homo sapiens
  misc_feature (1)...(689): n = a,t,c or g
aaaaaattctgtggccagcggctcggaggaacctgactctgtatttccccgggagccagtgcctatgggtgttactcaccaaaactcacgataattagatgattccaggtttcctgcgactttgcagaactatcactgagcaacgcaaggtgaaacataagcagggnccactcacgtttgcttttttcacaaggtcanacttttattgatacttaatcagaaaagccgcaactacacaggtttcccaaggtggcaattccccttagcacagcccgttcactcggtggccacagccccgggcattcaggctcagaccactccacaggtgagtcaacactgcaaaccaaagatagtagtaaacttaatacataaatgttacagattatggattaaaatgtccacttacatcaagagaaaaggggggcnnnnnnnnnnnnnnnnnnnnnnnnnnnnnnnnnnnnnnnnnnnnnnnnnnnnnnnnnnnnnnnnnnnnnnnnnnnnnnnnnnnnnnnnnnnnnnnnnnnnnnnnnnnnnnnnnnnnnnnnnnnnnnnnnnnnnnnnnnnnnnnnnnnnnnnnnnncttgggaggctgagactcgtgccnnnnnnnnnnnnnnnnnnnnnnnnnnnnnnnnnnnnnnnnnnnnnnnnnnnnnnnnnnnnnnnagaggtatgcaacaatnancacc

SEQ ID NO: 7227 - DNA, 463 bp, Homo sapiens
ggcagtatattctacaacagtaaagcaaaataagtaaaattatcccaagtaaactaaataagaaggctttccatgaacgggcaactgttggaaccacgctgatgtggggttgctaggtgattccaatatgtgcccagaattagaatactgatccagattttcacattaccatctctcttgtttcttctgagcagcagccagagatcactggttggttcacaggaataagcagggttagtctaaattgcagaaaaaaccctcaagaacaactgatgagaaaaacactcaaaaacacctaataacaagtgtaccatagtttttgaaacataatttttttctctctccagtctcccatttttactaaaggcaaatcatgataagactggatttgcttttttatacttggtctgattatccgtataaagtacagcaagaataattaatttttcacatggggcttttt

SEQ ID NO: 7228 - DNA, 524 bp, Homo sapiens
taagccctgagcctcagatttaggaataatgggggttggggacaggagaaggatgagatagggactagcagctgatgaaaaggaagggtggacatattcatcgtaggggtttcaggaactccattatctcacactcagcccctttgtcatctctgggatcaacacagtgttatcatcgatcagcccccagattcacttcagtgaatctgtaaagaacaagcatgtcctcctcatcccacgaattctgctgcttagaaagccacctgaaagtgatagcccttaaagtcctcagtctgcccctttagagcaccacagaaagatccctgaatggagatcctgacccttaagtatggaactgctgggaagagctatttggagattatcattacatggagggttagtaacatcactttctcttccctttatcctcatttttttcccttaaaaaaaaacacacacacccacacaaccatttctttgctatttgctgttggtatccagtatgccattgctttcttaattaa

SEQ ID NO: 7229 - DNA, 804 bp, Homo sapiens
taattttttaaatggagtcggggtcccgcttgtgttgcccaggctcggtctgcacctcctgggctaaagtgatcctcctgccttggctgattttgttaatttttaaatatcttcattttgatctatcattaatggagaaatattccgtctaccatgtatataaggactttcagcagatgaaatgcttaaatagtttaagggtggaaatgaatacagcaattagaaataaggggttgataaaatatgcatttagttttgctgttacagttaaagaagcattttttaagaaagactttctcatttatctactttgtgcaataaaacttaatttttgttgttgtgatttatcttacaaaggatactgtatactgttctctttcccaaactaaagtctaaatttgcactaaaaaaaaaatcatgcatgatgaaaagaccagcctacttaaatgtgcttggagtcctttcatgttggcatggatcaaagcctgagtatcccttcaaacattttccagtttgccagatccagataaacagacttgtaaatatactttggtaaaaatatgaagtgatgaattacttaactgctgaatgataaacagatggcatggtgtgctgagaaataacggattatgtgctactagagggcaggaactttcttttggacccttcagaatgcctggtgtagaactatacattaataaatgtttattagatgaaagaacacatgaatatgtcattaattagctttccagtttcaaaattagtgtcaatagcatggacgtaagattattgcaaactgagaaa

SEQ ID NO: 7230 - DNA, 362 bp, Homo sapiens
cggggagtctacattgcttataggagaaagtccagacgtgcaatatcttctataacctccacccttctcactcgctgtgccccttcttccccacctcagccatcctaaacagctggcagttctctgaacatatcacacttcactcacaatgtggcttcttcctgataggctcctcccttctgggggttatgttcgaaatatctgataacctgtgtgacatgagcataccaattagaacagacactgccctgcttgcagggctttctttggctaggtcctggaatgctcctgatctgcaagacattaaccctttagatttcggactgtgagggtgtctgggacaaagaaggggaagcaaaggt

SEQ ID NO: 7231 - DNA, 337 bp, Homo sapiens
cgacttgaggaagcccagtacatttcaagttggtcgcggcttgggctccgctttggggaggggcagcaggtttattcactggatctctgaatacccaggccccctccaccatggccagccggggtgggggccggggtcgtggccggggccagttgaccttcaacgtggaggccgtgggcattgggaaaggggatgctttgcccccacccaccctgcagccttctccactcttccctcccttggagttccgcccagtacctttgccctcaggcgagggaaggggaatatgtcctgggcattgaagcaagagttacggagggagccattgagggagctt

SEQ ID NO: 7232 - DNA, 448 bp, Homo sapiens
tttttttttttttgacagataaaaacactttatttaaaagtataaaaccaggcttactccttcaaactgctcccacccctaattatctccacaaagagctatataaattgggcaggggtatgtgtacagtcatctcagctctaacaaccccagttcttctttcaattctcctttctcccttcatacaattgagatgtttgtcctttgcactttccccaagatagcaaaggtgatacaaatgtggaaggaggggaagtgtagaaaataaactgtcatcatcctctattcccatctccagggaacagacagattatatgaactctgaccaaatgatttgcttgtctgaagaaacaaataataggtacagttactctctgtatcctaaagaaagacacgagggtccagagtccttcttcagtatatagcctcgtccatattgtcatcactg

SEQ ID NO: 7233 - DNA, 384 bp, Homo sapiens
  misc_feature (1)...(384): n = a,t,c or g
tagttatgagagcagtaagcataaggaatttaatcctaatttcatttctgcatttatttaagcaacattaaaatagaaagtgattaaattagtttttaaaaattctgttatgatagaaccagaatttgcaagcttgagccagcttacttaatattattgctggaaacctagcatttggcattaggtgactggaactgggactgcagttttgtatttactaggttatttctctatttatgaaatgggaaatatatttctaactaaaagggtcgttcatttgttcattctttcactcaacagataattagttgtgtagcaccacataattttatctcattactagtttaattttccctactggcaaattttcttcanagccagcac

SEQ ID NO: 7234 - DNA, 164 bp, Homo sapiens
caggccctgaggctgaggcaggagaatcctgctagtctgaattacaataaggaaattaaatgaaggatttatctttaatagagccaggcattgctatcaacgataacatgtttggttttcccctttaaatagaaaacaccaagcagggccttttcagacaatgt

SEQ ID NO: 7235 - DNA, 550 bp, Homo sapiens
  misc_feature (1)...(550): n = a,t,c or g
aaagaatacatcttaggacttaagaaatagaatatcataggccagttacattgtaactgtagaactgccagcagccttaccaagaaaatgcattgacaataggagagcataaggttacccctggagagaagcagatatgacaggaagattaatggtacacaagcccagttagtacctgttaggaccagttagtccctgagaatcaaaacatcactgtttactctgtttttgtaatacttcctaatataaagcaagtctgtctttaaactttttttactcaagacactttctgaaagaaaatatttagaatcatctctcttcctgccccttttaaataggatatttgaggattatgactgggtttggtattaaggatcaggaaccctgtagggtgggaacttgattcaccgaggtgggcctgagttcattggggaggccagggttgccaaagcccccatggactgggggacttcaggctttcacctgctgttcccttaggcagagggcggcccacagggtacctttcctacattacttcaccactngagac

SEQ ID NO: 7236 - DNA, 86 bp, Homo sapiens
attccatttcgacgagcatgttattgggaagtattctgaagaggcaatagcagtaataacaacagacttaagtgctacgccccttt

SEQ ID NO: 7237 - DNA, 936 bp, Homo sapiens
  misc_feature (1)...(936): n = a,t,c or g
tttttttttttttttttttgagtctcagattgaaatttaataagcatttgaagtgaagcagatagctctggtgataacgctttataggtttgcaacaaagcaaaacaaaacgaggcttagtgatgtgtcttggcactatttagataaagtccaggatgcaaacctgtggactggctgtcctgccatcctcaccaaaacccccaaccaggtaaagctgatcattccaaaggcaggtgcgatggcccatgcgtttcatcccacgatctgcacaggggaagtggaaccacaaaggaggagatgtgcgagtatcatagatgtagagatcattgcagatggtgtctctagctctggtcagagtttctccaccaaacagcacagcaaagggcccgaccacagaacatgagtgatgccgtagtccatggggccccttctgggacccctgcccactgctcacaagccttgcaagctgttccatcaaatgaggagcaacaggtggttcctccaataggtgcgggcgctggggtccagccttaatgtgtagatgcttccatagcgtcgctgagtgtggataccgccctcccggccagccacctgcagctctcggtcagagattcgggtgcaggtgtgactactgaggccggcgggggggcagtcaccaggggtcccttgtccacgccttcccacacaccgcgctctgtgtccagtgcggtcactgtggccaagcggcgagacccgtcccagccgcccaccacgcagagccaacgcccgtccacgggtgccgcgtcgtggtgactgcgcggggggctgccccgggctcccaatcgtacggcctggcccctagctgggtcgaaaaccaccgtatcgctgctgggctctcacgctcctgctgctaggagaccacatgcaggccaggcacnatnccttccgcggtttccc

SEQ ID NO: 7238 - DNA, 489 bp, Homo sapiens
cacgagctgcttttccccgctcgccacgccctcctgctacccggctttaaagctagtgaggcacagcctgcggggaacgtagctagctgcaagcagaggccgggcatgaccaccgaagcagcgaacgcagcctgcaagccttccaggattatatccggaagaccctggaccctacctacatcctgagctacatggcccccttggtttagggaggaagaggtgcagtatattcaggctgagaaaaacaacaagggcccaatggaggctgccacactttttctcaagttcctgttggagctccaggaggaaggctggttccgtggctttttggatgccctagaccatgcatgttattctggactttatgaagccattgaaagttgggatttcaaaaaaattgaaaagttggaggagtatagattacttttaaaacgtttacaaccagaatttaaaacccagaattatcccaaccgatatcatttctgatct

SEQ ID NO: 7239 - DNA, 510 bp, Homo sapiens
tcaaggttgatgtttattagttttcccatctaaagactaggtctgacgccaacaaatcagacttttttttcctgcatctatgatcaagcacttgaacatttccccacgaatgtggatgcgccctgggttagaattgttttctgctgtgagccaaggctgagttccagctctcatttacctgcaaggaggagagggatgcaaaggatcgtcagtggtggagaagatgccacttttttggctgttttccacagcattcagattcatatctgagttcaacatgctttgtatgttttccccacatgctggggacaggcctgtttttaaagacaaggttgaagagtggagagaagaggcttgtttatgcacatggtcatcagtacagcacaatctgtctccaaaatgggaaaggtcccctcactagggatgagcttcagttttggtctgtctctggattctcacctacctgattttccactcttatcccccaatcttgggcctgtcctttaactg

SEQ ID NO: 7240 - DNA, 288 bp, Homo sapiens
atggtttctggcctgcctccgttgccagggtcctcactggtgtgaccaaccatctggcttttaacactaaaaagccccacatcctgaggaatcccaggacacagaaagtcctgggttttgtcagtgatgcagaaggttgggtggaaagtatgaaacccacacagagggatgacagcaccatttgtagcatcggatggaaatggcgtggatgatctgcctcgagtggtcactgtcgccatgttgcctgacgtggatgctggcatcaggacttgtgattcaccatggatc

SEQ ID NO: 7241 - DNA, 377 bp, Homo sapiens
  misc_feature (1)...(377): n = a,t,c or g
tccacttggcttttcctgggctgcatcttatatattaaaccagtaagcataactacagtgttttgctgagttctgtgagtagctctaccaaattactgagcttcagggaagttatgggagtccccagtttttaaacagtagctcagaaccatagatggggcccatgggatttatgactgggcatctgcagtgaggaacaatgttgtggggaccgagccctggaatcagggtcttgtgctggactctggggtagtgttaggaaatcaaatgttattacaataagttnggtgttggagaattnttttgatgtttcagccaaatgctaccagatttgggtgcccagaaaggaggtttcctgggaggcccggggcccgggg

SEQ ID NO: 7242 - DNA, 598 bp, Homo sapiens
  misc_feature (1)...(598): n = a,t,c or g
cgcccggaaccagcaacgcggcaaaggggtcctgcacgtatccgcgcgcggccagggaacgcttgctgagggcgctgctgtcgttggtgttctgtaccgcgcctgcccgacgctcacggctccggggcccatggccagaagagactcaggaatggcagtctgtcacggttgtgagccgccccttggttagcacacacctcacggacctcggtagggggaaaaaaaccacccatgctcctggacttccccttccgccggcacttgtgcgtcacttccgggaagagcgcatctcgccaaccagaattgaggagggtgtagccagtgctaagttcgcttgcggctgacctttctttggaatgttgtgagttccatttgtcccagaatacggtccgctaccgctgtgacatgagtgttagggaaggcgggttgtcacgtttctacaagccttccagtcaaaagggaaaccttgcctaagtccttgtagttgagaaatctctaagaggtgagtctgtggggactgacgacttggcttccttggaccgccaaggaagggtctggtaggaaccaanaagggtcggcaccacggaccttnagtaag

SEQ ID NO: 7243 - DNA, 316 bp, Homo sapiens
tggacatgcaaataacagccgattaatttaagaccctaataggtgcatgtggaaagcatttatgtgcaatgtggtgcacttcctcttggcacctttttctgtgtctttgcagagataccagttttttctgagtgactcagggtgaatactgggcactgagaatgctgtattcagagtcattactgtgaacatggttaatacatttcttccatattataaaaagtatgaatcctactctgcctcacaaaggcttttagtaaaagattgtttatagtaatttggattcatggaaaattttcacattccagataaatca

SEQ ID NO: 7244 - DNA, 620 bp, Homo sapiens
tgtacttattgacataacaacctgaaattcttgattttagacaatttctcctcaagttgattcagctgcatgactctcagaaatcagtcattttttattgtagattgctggttttcttcctctagtttgtatcgtgtattttcctcctgtggagaaaatgtggttggcaagaaatgccatattttaaagctgtatcgtggctgttaatgcagaaaacaccagtgtactgcaggctgtttggcagtggggctggggctgagtgtcctgccctcagtggcctgtgtctgtgctcttgttcgctgacatgcagatacaggggcagatctgagggtttgatggagtgcaagaaggccacacgtgtggctttctgtaaatgcaagaaacattggaatccttgagcagacacttgtcttctggagcaccttgcatggatttcgcctcctgatgcttcattgccgttaatagagtggtggtggttgtgttatgagaaattttgtctaacctggcttctgaaatttctcaaactaaatattcatgctgttttgtgtttttcttaatgactgaggctagtgatattactcagaaaagtaacagtaacttgggtcttctgagcgtcagga

SEQ ID NO: 7245 - DNA, 269 bp, Homo sapiens
ccgctttttcctttcccgtaggagttaacaccctccctaacatttaccttcctatcagtttcttatgattaactgtgttgtgtattccctcccattagaatgtgaatatctgaaagacacttacagtttgaaaagtgcctggaacgtagtaaatgttcaataaattgcacttcattgatatttattggcaacataacattattaccactcctcagaagcctgccacatcttccctatcatttatacctctccccaagcctgggcgacag

SEQ ID NO: 7246 - DNA, 913 bp, Homo sapiens
taaaacattattatataatagcagatagttctcttcagaaatttatctctagcttcctgtaaaaggtccagtcaaatcatgttggctgtttttggcagatttcagcctcgcctcaataccaatttttatttgaataactgattcccaacatttaagaagaacttgatgctgaactaagtaacctaagctggattcagggccattggcaggcaggcaggcaagcaggaatttttcgtattgcagacagcccctggtggtcatcatctatacatcggatctctaaggacgtgccggaaaaaaaaatctgtgaacacaatcttcccatgctgtattcacatgctctattcacatctttagtttacccaggttgttagagccttgggtaagatgattaaaggcttcacgatggaaatttctcaaaatattttttctcaatttctggatttttccccattgttcgttgttcataacaacatataatacaagtttcaaatccgctgatatcttttagagttttcagcaatggctccaaagactcttcatagtatatgcagtcggccatcagtatgaagtcgggtggagaaggaaagccttctatttcttccccccatttcagtaccttggcttgaacagaaccagtgacaagatgcttgttcatattaatattcatcttcagcaagtcttgcaattcctcaagatcggtgactacaacatcagccctataaaataacgtcgactgaggtgtaggcacaggggggaaagcctgtaatccggatttccccagcaagaaggcgcccccacatcccgcccgcccgccagctcttacccgagggtagcagccatgagccccacggccccggtgcccgaacccagctccagcaccgaccgccggtcagcgcgtgggccccgtcgc

SEQ ID NO: 7247 - DNA, 791 bp, Homo sapiens
tttttgtttttttttttttttggttttcagcaagatcctttatttatcttctgttccccagacatgtcacatgaatgcaggtagctaggtacctgcgcgggctgttggttttgtaaacgcagagcagagcagtcacgatgtgtagaaatcatgcacctcagtgattctttaacaagataatgagtaaaaagacttcaggtatgtttgaaatgtctgccttttcctgcattctcatcactgacaaatatctgtgtagacattttactcaaatgtagacgtgctctttgcacacttgctagtacctgcctggtgcatttcaactgtgttttcttccaacagttgtacctcttagaagctgctgttttccatttggatctaaacactggacctggcacctgcgaccagctgtatattccaaaccactcctcggctttataaatctgacactgctcataatacattattcagaaaaggcatctctagtgtggctggccgcgtacggctttcacacatcagctaacacaggctatttctagagtgagtgcctcaaactggtctcctgggaccttttccttcgggaagagatccacatgttcttcacaggagaccagaaaaccagcacaacggccacgggtcctctgggcatgtaggtcttctctgtctcctcactagcacacactggcttgggtcattgtcacgcagtgcacacctttgtgcccatgacaaagacacagggccaactcttccactatctccaagtctagtgtttgaacatttatgtacagacaaat

SEQ ID NO: 7248 - DNA, 314 bp, Homo sapiens
ctcaaatatagggtagcagtttaagagatggtgattcctaagggacagagttggaagtacatatttactgaattctttgaacccacagctgatggaatgttcaagctatagatgtgaaagaatttttaggtcaggatcttgggaagctaaggagagcaatttttaaaagacagtttttctgttttcctaggaaattcccaagaagcttgtgtaggaaaaagttggtaattatggatcttttggggaggaagagaactatgaattcattctaatggtgaggagagataccatgttagaataccttccatacctgg

SEQ ID NO: 7249 - DNA, 556 bp, Homo sapiens
gtatttacaaagagaaggggccactcgtgtgtgagcagcaccgagggacagaggtaccttgcctgcttgtgtcccctccaagtccttctgatattttcctttccagctgttgcctagtttcctggtattaaggagaatcaactctctggataaacgtggtaaatatggcccatagtcccatctttttacaggcattttttacacctggagcagccagaggacgcatgcatggctcttcggaagccttctcctgccacggcatgcacccacacatgcgagcctcccgggtactgtcatcctgaattctgagaccatccagcacttcctttagttttgccctggtgctgttgacttttgtttactgaagagtgtgctggaggcaggacaagggacatggaaggctgcaatttaagagtctaaaaggttttagaatcctgaaggaggtttaacaagctgaattgaagaataatacctttctcaactggagagaatttacatgattgcattattgttaaaattaacatctcatctattaaaagcatttgtagattaaaaa

SEQ ID NO: 7250 - DNA, 459 bp, Homo sapiens
  misc_feature (1)...(459): n = a,t,c or g
tttgctaacacactagtacactctatgcattcaccattccactggaactgtttattcccttcacattaacttcagatttaaggctcttgggtatttaggctcacaggttcacattctgcattcaggctgtatattctatgtgtgtcatttgtggacactgccatctttgctgcttcaaagtagcctaactctgtgggactgtgtaatttttgggtaaattagggatgaatttttatacacgaataggctactctcataattccaggggaagagagcttctcagggcatttaggatttttctgggatcaggtggcaatttacaaaaaagtggggggctggggcacagtgggctcacacctgttaatccccagcactttgggggagggccgaggccgggcgggatncatggagggtccagggaggtttgaggaccatcccgggggtnaatatgggtnggga

SEQ ID NO: 7251 - DNA, 146 bp, Homo sapiens
cagaagcggaggcgtgcagcattcgcctccatggcccactcgccggtggctgtccaagtgcctgggatgcagaataacatagctgatccagaagaactgttcacaaaattagagcgcattgggaaaggctcatttggggaagtttt

SEQ ID NO: 7252 - DNA, 592 bp, Homo sapiens
  misc_feature (1)...(592): n = a,t,c or g
tgactagttttggtgtcaaggtgatacctcagagtgacttaggaagaatttcattatcctgaatttttgggaagagtttcaggaggattattattcttagtgcatttggtagaatttggctgtccatttatctactcccgagcttttctttttcaagactttttttattactgcctcaatcatgctactcattattggtttgtgttactgttgtatccattgaaatgtcgtgttctttcactgctgattgtttatttagatctgtcttctgcttttggttaagctagctagcagtttatcaattttgtctttttgaaaaatcaactattctgttgatcatttttattgttttatggtcttaaattcatttgggtctgttctgatttttgttttttttttcttgtacttggaatttggtttgttattaatttctagtccttgaagtgtgatgncaagccttaatatgtaacttctacttttttgatcagnattagntataactgcccctttgactatattgcatacccacaggttaatatatncatctatncacttttccacaatttnaattcattaatcctttgaganggtt

SEQ ID NO: 7253 - DNA, 321 bp, Homo sapiens
taaccagaaataagttgcatctttctgctggacaccactctttgccgagatatcaagtatatttgttttaagagctgaaatttcctataggatgttcaccattaggacagtacataagatggggaggaagtggatgggattttcattttcagccacatgacactttcccatcaggtacttgatctgaagaaatatattcctcagaacttaagaacttggatcctggagatgagagtcaaacctcctaatgtttataggcaccaaacaagcccagagtggtgaaaaggcctgcgtggggtcacagttcttaggaacaaggcc

SEQ ID NO: 7254 - DNA, 135 bp, Homo sapiens
cttgttgctatttgaaatttttcattaactagattttgtattttgagaccttaagagttaaataaaaggagctaagtttccagctttatgcaactgcttatttaacagttctccacacgtgactctggcatggtg

SEQ ID NO: 7255 - DNA, 4305 bp, Homo sapiens
aaagcaaaagaattcgctgcgtttccatgaaatcctgcggagtgtcgctcgctaccgccgccgctgccgccgccgctttcggtgatgaggaaaagaaaatggcggcgggaaaagcgagcggcgagagcgaggaggcgtcccccagcctgacagccgaggagagggaggcgctcggcggactggacagccgcctctttgggttcgtgagatttcatgaagatggcgccaggacgaaggccctactgggcaaggctgttcgctgctatgaatctctaatcttaaaagctgaaggaaaagtggagtctgatttcttttgtcaattaggtcacttcaacctcttattggaagattatccaaaagcattatctgcataccagaggtactacagtttacagtctgactactggaagaatgctgcctttttatatggtcttggtttggtctacttccattataatgcatttcagtgggcaattaaagcatttcaggaggtgctttatgttgatcccagcttttgtcgagccaaggaaattcatttacgagttgggcttatgttcaaagtgaacacagactatgagtctagtttaaagcattttcagttagctttggttgactgtaatccctgcactttgtccaatgctgaaattcaatttcacattgcccacttatatgaaacccagaggaaatatcattctgcaaaagaagcttatgaacaacttttgcagacagagaatctttctgcacaagtaaaagcaactgtcttacaacagttaggttggatgcatcacactgtagatctcctgggagataaagccaccaaggaaagctatgctattcagtatctccaaaagtccttggaagcagatcctaattctggccagtcctggtatttcctcggaaggtgctattcaagtattgggaaagttcaggatgcctttatatcttacaggcagtctattgataaatcagaagcaagtgcagatacatggtgttcaataggtgtgctatatcagcagcaaaatcagcccatggatgctttacaggcctatatttgtgctgtacaattggaccatggccatgctgcagcctggatggacctaggcactctctatgaatcctgcaaccagcctcaggatgccattaaatgctacttaaatgcaactagaagcaaaagttgtagtaatacctctgcacttgcagcacgaattaagtatttacaggctcagttgtgtaaccttccacaaggtagtctacagaataaaactaaattacttcctagtattgaggaggcgtggagcctaccaattcccgcagagcttacctccaggcagggtgccatgaacacagcacagcagaatacttctgacaattggagtggtggacatgctgtgtcacatcctccagtacagcaacaagctcattcatggtgtttgacaccacagaaattacagcatttggaacagctccgcgcaaatagaaataatttaaatccagcacagaaactgatgctggaacagctggaaagtcagtttgtcttaatgcaacaacaccaaatgagaccaacaggagttgcacaggtacgatctactggaattcctaatgggccaacagctgactcatcactgcctacaaactcagtctctggccagcagccacagcttgctctgaccagagtgcctagcgtctctcagcctggagtccgtcctgcctgccctgggcagcctttggccaatggacccttttctgcaggccatgttccctgtagcacatcaagaacgcggggaagtacagacactattttgataggcaataatcatataacaggaaatggaagtaatggaaacgtgccttacctgcagcgaaacgcactcactctacctcataaccgcacaaacctgaccagcagcgcaaaggagccgtggaaaaaccaactatctaactccactcaggggcttcacaaaggtcagagttcacattcggcaggtcctaatggtgaacgacctctctcttccactgggccttcccagcatctccaggcatctggctctggtattcagaatcagaacggacatcccaccctgccttagcaattcagtaacacagggggctgctctcaatcacctctcctctcacactgctacctcaggtggacaacaaggcattaccttaaccaaagagagcaagccttcaggaaacatattgacggtgcctgaaacaagcaggcacactggagagacacctaacagcactgccagtgtcgagggacttcctaatcatgtccatcagatgacggcagatgctgtttgcagtcctagccatggagattctaagtcaccaggtttactaagttccagacaatcctcagctctctggcttgttgatgggaaaagccaataacaatgtgggtactggaacctgtgacaaagtcaataacatccacccagctgttcatacaaagactgataactctgttgcctcttcaccatcttcagccatttcaacagcaacaccttctccaaaatccactgagcagacaaccacaaacagtgttaccagccttaacagccctcacagtgggctacacacaattaatggagaagggatggaagaatctcagagccccatgaaaacagatctgcttctggttaaccacaaacctagtccacagatcataccatcaatgtctgtgtccatataccccagctcagcagaagttctgaaggcatgcaggaatctaggtaaaaatggcttatctaacagtagcattttgttggataaatgtccacctccaagaccaccatcttcaccataccctcccttgccaaaggacaagttgaatccacctacacctagtatttacttggaaaataaacgtgatgctttctttcctccattacatcaattttgtacaaatccgaacaaccctgttacagtaatacgtggccttgctggagctcttaagttagacctgggacttttctctactaaaactttggtggaagctaacaatgaacatatggtagaagtgaggacacagttgttgcagccagcagatgaaaactgggatcccactggaacaaagaaaatctggcattgtgaaagtaatagatctcatactacaattgctaaatatgcacagtaccaggcctcctcattccaggaatcattgagagaagaaaatgaaaaaagaagtcatcataaagaccactcagatagtgaatctacatcgtcagataattctgggaggaggaggaaaggaccctttaaaaccataaagtttgggaccaatattgacctatctgatgacaaaaagtggaagttgcagctacatgagctgactaaacttcctgcttttgtgcgtgtcgtatcagcaggaaatcttctaagccatgttggtcataccatattgggcatgaacacagttcaactatacatgaaagttccagggagcagaacaccaggtcatcaggaaaataacaacttctgttcagttaacataaatattggcccaggtgactgtgaatggtttgttgttcctgaaggttactggggtgttttgaatgacttctgtgaaaaaaataatttgaatttcctaatgggttcttggtggcccaatcttgaagatctttatgaagcaaatgttccagtgtataggtttattcagcgacctggagatttggtctggataaatgcaggcactgttcattgggttcaggctattgggctggtgcaacaacattgcttggaatgttggtccacttacagcctgccagtataaattggcagtggaacggtacgaatggaacaaattgcaaagtgtgaagtcaatagtacccatggttcatctttcctggaatatggcacgaaatatcaaggtctcagatccaaagctttttgaaatgattaagtattgtcttctaagaactctgaagcaatgtcagacattgagggaagctctcattgctgcaggaaaagagattatatggcatgggcggacaaaagaagaaccagctcattactgtagcatttgtgaagtggaggtttttgatctgctttttgtcactaatgagagtaattcacgaaagacctacatagtacattgccaagattgtgcacgaaaaacaagcggaaacttggaaaactttgtggtgctagaacagtacaaaatggaggacctgatgcaagtctatgaccaatttacattagctcctccattaccatccgcctcatcttgatattgttccatgggacatttaaatgagaccttttctgctatttcagggaattaacccagtttttgcacca

SEQ ID NO: 7256 - DNA, 490 bp, Homo sapiens
  misc_feature (1)...(490): n = a,t,c or g
tgtcatcatgaaataccttataactgaatttgttggtaaagaaagtaaatttgcaacttgcaaaataggatttttctttgtgctaaagaaggtactgtttcaattgaattgaagaataagcttttgtttagattttatataatgagacatcaaattatttttactatgtaatttctttttgtttttggttgttaaacttagcacatgaaaaatatggattgtggtttccaagggattattactgtgattaaactctgctaaatgtgtaccctagatagtatcttcttaaagttggctcttcaggctgggtgcaatggctcatgcttatnataatagctctttngggaggccaaanttgggaggattgtttgggcccaggagttcaacacccagcctggacaacataggggagaccctggtctctacaaataatttttttttttttaaattaagccaatgtggatgggcatgcaccctgtgggtccccagc

SEQ ID NO: 7257 - DNA, 313 bp, Homo sapiens
tttaagccttatgggccacatgctgtgtctgtttcatattctgctccttttttatttttattttttttaagaaaagacaccctttaaacatataaaaaccattctgagcaacaggctggtgctaaaaacaggtcatggtaaccattggctctagggttgtagtttactgttgatatagattgtacactgataagccaaaatacaaacctaatgaaactgacatacttaaggaactttactctttgttagcaatcattgttaatatttattgaatgggtgactacgtgggggaatgctgttccaagtgtgatag

SEQ ID NO: 7258 - DNA, 317 bp, Homo sapiens
caaaccacatcactccttcaatttttttctggtagatagtgaaggtcagcacctgtgggaaaggatgaaaaatgggtctgaagaagcaaatggaagaactcagcagagcaggagatgtgaatgctcacagagatacagctagagaccagcatgaatggtggaagtctcttggtagagtcttgcaagttgggaagagaaatcacacatgttccgcccctgagcagtgtccccttgattgcagcaccgtattagattgctgcaggagtgtgggtgtgtgtgaaagagcttgcagaacaccccctaacattcctgggcca

SEQ ID NO: 7259 - DNA, 286 bp, Homo sapiens
caggcgtgagcccactgtgcccaacttaaaaaacaggttttgaaagcaagtttgataaagcaatttattacaattttctcttcttcaacaagctattatttcagctctaactctggtcatatacttgtttttggatctctgcttctttttctggcaacatattcaagaatttaaatattcactaggctttatggagcagtaaattcggaataatgtttaaacaaatactcctaaaatatttttcaacaaatgtttgtaaatggatgttgaaagtaagcctgtttta

SEQ ID NO: 7260 - DNA, 542 bp, Homo sapiens
tttttttttctactactagattaaacttggttcctgtgaatgtaaatgtaattttgtgaacatttaatgaggatctactttatgtcaagtgctctgcatagtgctgtctctaagctataaaatgaaccaagcatcattaaatgaaacctaacttatgtccttgaagctaattttcatttgagtaaaatttaagaatagtgaagacaacattgttgtggcttagcaaagccgtctggagatttcttattggtggctggaggtgctgcaggctctgtcttggttcttatggatggccgtatgcccctcagtttctatcctggtggttttctgtattaggggttcaatccatatttgtcaaacctaattttgctttaaaaactgactacacacacgcacacacaaagtgatggaacattgaacttcaaatgtagcaggtggtctgtttgagtcagtgtgcttcttagtacgcaaaaatagatttgaattcagaaatctgtgtgccagttgttatgaaatttgcaattgagcaaatcaaggttcat

SEQ ID NO: 7261 - DNA, 485 bp, Homo sapiens
aaaaaaaaaaggcctcacgggactagaagcgtcttaccctgacctcacacctgctggacatcaggctggggagagaatcggggaagagggcattttccaacaggactggaaggccagtcgtggtccttggtggtgagagctagccaggccaccgctttctccccgtaagcctgcaggggtcccctctgatccctgcacctctggggggtcacaccaactgcgggtgtttcctcaccacgctgggcgcttggtgagcacgttctgccttgagacctggcatttctttgataacatttcttctcgtttcctgctcattctggaactcctgtcagtcagatgttggggccttttgggatagattctgttgagtccttctttctacctttgcttgtagataagattttccttgaatccaaacacacacactctctctgctttttaaaaaattagttttggggctggatgtagtggcttacacctgtagt

SEQ ID NO: 7262 - DNA, 1789 bp, Homo sapiens
gttattgagagagagaggaaatgggagcaacagcttcaggaagagcaagagcaaaagcggcttcaggctgaggctgaggagcagaagcgtcctgcggaggagcagaagcgccaggcagagatagagcgggaaacatcagtcagaatataccagtacaggaggcctgttgattcctatgatataccaaagacagaagaagcatcttcaggttttcttcctggtgacaggaataaatccagatctactactgaactggatgattactccacaaataaaaatgggaaacattaatattttaggaccaatttggggaacacgacctctttcacagagggagatcccaaggaaaggaacaagtaccatcaggagcagaattggagaggcaacaaatccttcaggaaatgaggaagagaacaccccttcacaatgacaacagctggatccgacagcgcagtgccagtgtcaacaaagagcctgttagtcttcctgggatcatgagaagaggcgaatctttagataacctggactccccccgatccaattcttggagacagcctccttggctcaatcagcccacaggattctatgcttcttcctctgtgcaagacttttagtcgcccaccacctcagctggtgtccacatcaaaccgtggcctacatgcggaacccctcctccagcgtgccccaaccttcagctggctccgtgaagacctccaccacaggtgtgggccaccacacagtcccccaccccgagaagccattccccttcagcttcacagtcaggctctcagctgcgtaacaggtcagtcagtgggaagcgcatatgctcctactgcaataacattctgggcaaaggagccgccatgatcatcgagtccctgggtctttgttatcatttggcattgttttaaagtgtgttgcctgtgagtgtgacctcggaggctcttcctcaggagctgaagtcaggatcagaaaccaccaactgtactgcaacgactgctatctcagattcaaatctggacggccaaccgccatgtgatgtaagcctccatacgaaagcactgttgcagatagaagaagaggtggttgctgctcatgtagatctataaatatgtgttgtatgtcttttttgctttttttttaaaaaaaagaataactttttttgcctctttagattacatagaagcattgtagtcttggtagaaccagtatttttgttgtttatttataaggtaattgtgtgtggggaaaagtgcagtatttacctgttgaattcagcatcttgagagcacaagggaaaaaataagaacctacgaatatttttgaggcagataatgatctagtttgactttctagttagtggtgttttgaagagggtattttattgttttttaaaaaaaggttcttaaacattatttgaaatagttaatataaatacataattgcatttgctctgtttattgtaatgtattctaaattaatgcagaaccatatggaaaatttcattaaaatctatccccaaatgtgctttctgtatccttccttctacctattattctgatttttaaaaatgcagttaatgtacccatttatttgcttgatgaagggagctctattttctttaccagaaatgttgctaagtaattcccaatagaaagctgcttattttcattaatgaaaaataaccatggtttgtatactagaagtcttcttcagaaactggtgagcctttctgttcaattgcatttgtaaataaacttgctgatgcatttaaaaaaaaaaaaaaaaa

SEQ ID NO: 7263 - DNA, 122 bp, Homo sapiens
aaggacaaagttgaagggggaacataccctcccaccctagcaattctgccattcaagaagcccatctacaaactgtttatcaccagtcagcaaagagataaggaacactttttattgaaaaa

SEQ ID NO: 7264 - DNA, 808 bp, Homo sapiens
attagactaggaaatataatttatttcataaaaattaattttgttacaataggaatgctaaaggttatttataggttgcagtttacagaataaacagaggtgggattgggggccatccctggggccctggtacccccctctcccgggcatataaccatgtccacagaccttggcaggggtccagcccttttgccccaccaagagctccctgcaccaaagctcctggtcacctcccctaagggacccggctcagctgcctaaggagctggggaatagggaccagaagtgccctggagggtccaggagatgagaaggatccccttgcaccctcaggagaacccctacccctgaagctctggagccgggggcacttgtgagagaaggcagagggagaggcacgtagaagattacattgactgaccctgtgggcttcagggagggcagaagacaggcacaccaaaccctagacgttccaaacctgggacgcagaggagcacacacacacgctcgcttcaggttgggacacgttgcacatgctctccgaggggcatcctgatgtgcccacagagaaaagcataggcaagcacacgcgcacgcacacacgcaccccagagaggagagagagagaaatacctgcgtaagggccctgcaacccccaagggtacctgagctgcttcccaccaggtacatgccctcgggggctacctcttgggtctgaattggaggagaaaccacccatcccaccccggaggcaggcagcctccacagacggatggagtcggcaaagcctttctgggcatttctcata

SEQ ID NO: 7265 - DNA, 1352 bp, Homo sapiens
  misc_feature (1)...(1352): n = a,t,c or g
agtacaagttaaccatatagtaaataagtatcagggactggggagtaaatcagtgtgacaggtggagttttctgcctggaaactttcatttttatagtacttttaacaacaaaagaacaggaggcctctcaagtaccaaaagtaaggaaatttggaggattaccagcaaatgtactgtatggaatgatgctttttcaagacagctgctaataaaagaagttacagcagtccctagtctgtcagtattgcatcctctaagccctgcttccataagagctattaggaatttccatacttctccacggtttcaagctgctccggttcctctcttgttgatgattcttaaaccagtacagaagttatttgcaatcattgtagggcaggggcataaggaaatggtggcagggcacttcctcctaacaagaaggaagtagttaaagaaaatataaggaagaataaatggaagctattccttggtttgagtagttttggattgctctttgtggtgttttattttactcacctggaagtaagtccaatcacaggaaggagcaagctactattattggggaaagaacagttcagacttttatcggaactggaatatgaagcatggatggaagaatttaaaaatgatatgctaactgagaaagatgcccgatacctggctgttaaagaagtgctttgtcatctaattgaatgcaataaagatgttccagggatctctcagatcaattgggttattcatgtggttgattccccaattattaatgccttcgtgcttccaaatggacaaatgtttgttttcactggatttttaaatagtgtaaccgatattcatcaactttctttccttctgggccatgaactagcacatgcagtacttgggcatgctgcagaaaaggctggcatggttcatttgttggatttcctaggtatgattttcctcacaatgatttgggccatttgtcctcgagatagcttggcacttttgtgcccagtggatacagtctaaattgcagggagtatatgttttaataggaccatacagcagaaaattgggagggccgaagctgacaaaattgggactacctgcttgctgcaaaggcttgtgcagacataagagccagttcagtgttttggcagcaaatggagtttgttgatagcctgcatggccaacccaagatgccagaatggttatctacacacccttctcatggcaatcgagttgagtacttggatagacttatacctcaggctctcaaaattagagagatgtgtaattntccaccactgtcttaatccagaccctcggttactattcaaaatcagcacggagcatttttctttga

SEQ ID NO: 7266 - DNA, 1129 bp, Homo sapiens
tttttttttatatttcagaagaagtttattaagaggttttaggctttaagcatatgtgaaaagcaaaaattacattttaaagtatataatttgcattttccaccttctcaatgccaatgaaatattctaggagactctataagataaccaattgattttctactactcccaaattttaactttgtaatttaaagaggaataggcaaatagagctgctgtggttctggttctccctgcaggatgaagggggcctgcaaaatgtctcctacttccattctagtcattcagcaaggtgccttcctctggatgcactgtctgtatacttttgcccatgttgcatcacataatgattctgcccaccttcaccatttgactgtcagtaaaagaatgtatgtgctcatttcttcttttattatagcgcagtgctcttcatgaagtctgaatcttgtttcatttgtgattgtaattagcacttgcttcttcaagactggctaaatgatgataatcagtgaagttctgtgatgggcacatggatgtgtattatatttttctactttggttaatatttgaatattccaataagttttaaaataacttgtttgtttctgttattagaatggcctgtccagaagacagccaaatacatccttcaaacagacttcactgcaggagacagagtggattcatcctgtattctccatgtagacttccatcttcatgagtactcccaagaagatggttcagttgactattgcaaagattggtttagagtatatatttcaccaagttctggccagcaggatctgaaaagatgtcagttggcacttctgcaaaatgtgtgtgcaagagatgtgtgccaggaaaaccttaaacatctttcctgctttggctttgcatgtgaaagaaaatatgatgcttggatgtctgattccaaaatggcggcatggaagcaagctggcttcatggcccccaaccacagacaaccagaaacaaatgtacagcactgagattatcaccagcaatatcccagaaatcaaatatgaagatgagacagttcctggggccacaaagaagtgaaaaaactccaagcagacgggaagataatcaaacttccacatccatgtcacct

SEQ ID NO: 7267 - DNA, 207 bp, Homo sapiens
ccactttggctgagtcaagacctgtttccctagcagggtcaacaacaaagaaaatgctcttcccgagtactgtaatatgatcacactataagtctagaccttgagaaatgttgaacttttaataagcatattgcattgaaaattggggctgaggagttgcttttatttggaaatgttttatttttgcccaacaaagtatgctggggg

SEQ ID NO: 7268 - DNA, 310 bp, Homo sapiens
atcaaatccctcactggagacgttacattgtaaatttggctttggattattttccttctaagttattactctgtactgcttgtacagagtcatatttgtcattttcttacacctgttctgcattcttttggcacttacagtataatttctaaacacctaacattttgctgcttgtttaaaatcatctgcaggtttggagatttttgccatgtaccttattcagattagtggtaaaacagtgaaatcaaagaattccctttaactatgtcttggcaatccaactgtttatcttcctgttttgaaatatacc

SEQ ID NO: 7269 - DNA, 440 bp, Homo sapiens
ctccctctgccaagctggtgggaaggcccttgccaaagcgcacaagaccccttcacacagcaggggcacaagctcttcgaggcagagtcgcctgcaggtggggtggaaggggtgcgccccagacccaagaatcgcccgcctctccgagaccatccctggctgctggcccagtgacgagcaccatccggaagtgaaggctgatgggcacttcctggccctgcggggtgccctgtctctggctggagctgatgagccgtggtgtgatgcttgcctgggggtcggtgttgcctagaagtgaggaatgacctccttcacccctggctccttccggcagcctggccacttccagcatgtggagggggcccgggccctggcagagacggtgtggaaccgccggccgcatgcggggctggagttcggggctgccaatgggctaaggc

SEQ ID NO: 7270 - DNA, 477 bp, Homo sapiens
ttttttttttatcagactaagcaacttgatgaccaggaccatatcccctatttcttagtattctcttcagcattttagccagagtaggagtcggtgttgaatacaagtttgtcatcttatggattatatcttagggtgaatatcagagctggtgtccatcatgtgaacaggcagcatggtactggtggggagaggggtggaagtacagagtactagggccccaggagctaatattgctaacttgacaatattggtaaaagctagacctgttaagaactaccagcaatggttagtactgaaagcaaaagggaagattcatcaggctaaaataaaaagggaaactagcaggttggcatagggcagaaccaaggaaaacaaaacaaaacccccaaaaaactactagatttcctgaaaagtggaaaagcctaaatctcaagacaatggatgacagcaagtattttcaaatgtaggtcgacc

SEQ ID NO: 7271 - DNA, 345 bp, Homo sapiens
gaatttccattttgccaagaattataaaaccctgaggttttaaaattcagtttcttttctggggatttaacatggaaggacttggagggcaaatggcccagtgattggaaaggggaaaaacaattcatttcatttaaaattattcaataaccattgccagcatttgggattctgagtgctgtttatgaagccctttcattgatataatttcatctatctctcacaaggctgtaagcaattcctatgtccatatggcagtgaggaaatggagatttgagcaggttaagggagttttcacctggaagctcttcttttttttccttctgccacagtagggtcatcaaa

SEQ ID NO: 7272 - DNA, 453 bp, Homo sapiens
  misc_feature (1)...(453): n = a,t,c or g
annnnnnnnnnnnnnnnnnnnnnnnnnnnnnnnnnnnnnnnnnnnnnnnnnnnnnnnnnnnnnnnnnnnnnnnggcacgaggattggcagtctggctgagaacgcattctcagaccctgcaggcagtgccaaccctttggaacccagccaggatgagaagaggtctgctggtggcagcggtggtgctgtttgctgtgatggccaagaggaaacaagggaacaggcttggtgtctgtggccgattcctgagcagcagagtttcaggcatgaatccctcctcagtggtccaccacgtcagtgactctggaccggctgctgaattgcctttggatgtaccacacattaggcttgactcaccaccttcatttgacaataccacctacaccagcctacctcttgattccccatcaggaaaaccttcactcccagctccatcctcattgccccctctac

SEQ ID NO: 7273 - DNA, 362 bp, Homo sapiens
tttttttttacacatcattattagggtttatttagcccagtgtgtaatggtagaagaaccagtgggggagttgggtgcagggaggtcttccccaagacatctcagtcatgtctgagcgtcactttccctagtaaagttaggacattggattagatcttaaagtccctggttgctcagatatcctaaggatcctagggcatgagctggctggatggatgcacagaacccctagggatggtcctcatgagtttaaagtgtgatgagcagcttagctgggatggagtctgattgttaggtggattctgggctggcccacacgaggtccctccacccttgttccctcccgggaagattactgtggc

SEQ ID NO: 7274 - DNA, 79 bp, Homo sapiens
tagtagtaacaattgtttcaatccaagaaatccaaagtgctaaaatccaatggggaacagtttgcggtgaaacagtgta

SEQ ID NO: 7275 - DNA, 466 bp, Homo sapiens
agcagcaaaggcatcgtgatcagttttgacgcccgagctcatccatccagtgggggtagcagcagaaggtttgcccgacttgctgcaaccacatttatcagtcaggggattcctgtgtacctcttttctgatataacgccaaccccctttgtgcccttcacagtatcacatttgaaactttgtgctggaatcatgataactgcatctcacaatccaaagcaggataatggttataaggtctattgggataatggagctcagatcatttctcctcacgataaagggatttctcaagctattgaagaaaatctagaaccgtggcctcaagcttgggacgattctttaattgatagcagtccacttctccacaatccgagtgcttccatcaataatgactactttgaagaccttaaaaagtactgtttccacaggagcgtgaacagggagacaaaggtgaagtttgtgc

SEQ ID NO: 7276 - DNA, 372 bp, Homo sapiens
agaaaggggcagcaactctacagacatttaaagaaaacactcaagaaattcaaatggaatgaaatgacatactatgcactcatattactgtgctaaacgatttaacatttaacaaacatgtgaataaatatgcacacaacaggcttctatgaacattctcctcacagtgcagatccattcagtgttggactagtcctgagcagtgttgttctaaggagccggtaggcaccatttccgttttgcttctttgctttctttgttgctgtatatttcaacaggaagccctggcaggtgttgcttaacagaagatgtcttttgttagtgatcaggatgttccagcttattattctcataatttatatttactgtcca

SEQ ID NO: 7277 - DNA, 450 bp, Homo sapiens
cttaaaacagctgagagttttgttttcttcagcgttcaccttccttgtctccagttccgatgctggcagtggttcctacctctgttgggtttctagatagtttgggaacggggttgatgggtttctgtgaaacacattttccaagtcttgggctttctctggaggggaaggtggatgctggcgggtgacttgcagtgggcgcctggcagtgggtgtggactgtaactgacaggtggaaatgagtaggggcactattgttccctccatgccagctttttttttgctggaaatgccccctccacacccctggtagctctgtgtcctgagaaatccagagtgtgggagacatcacttgcatctgttcccccccagctttctgtgaaggggaagctgtgggcctctttttgaatgtgggggaacaactgaagattcagggggtcacccagaggt

SEQ ID NO: 7278 - DNA, 127 bp, Homo sapiens
acctcagttttcaattcaattgggaacagcagtggttccctaatttgattccataggcttcttcagaatcctctggagtaattacagatactcacatagattggcaagtgccatctctagaggcaga

SEQ ID NO: 7279 - DNA, 2595 bp, Homo sapiens
ggagcaagaggtggttggggggggaccatggctgacgttttcccgggcaacgactccacggcgtctcaggacgtggccaaccgcttcgcccgcaaaggggcgctgaggcagaagaacgtgcacgaggtgaaggaccacaaattcatcgcgcgcttcttcaagcagcccaccttctgcagccactgcaccgacttcatctgggggtttgggaaacaaggcttccagtgccaagtttgctgttttgtggtccacaagaggtgccatgaatttgttactttttcttgtccgggtgcggataaggggacccgacactgatgaccccaggagcaagcacaagttcaaaatccacacttacggaagccccaccttctgcgatcactgtgggtcactgctctatggacttatccatcaagggatgaaatgtgacacctgcgatatgaacgttcacaagcaatgcgtcatcaatgtccccagcctctgcggaatggatcacactgagaagagggggcggatttacctaaaggctgaggttgctgatgaaaagctccatgtcacagtacgagatgcaaaaaatctaatccctatggatccaaacgggctttcagatccttatgtgaagctgaaacttattcctgatcccaagaatgaaagcaagcaaaaaaccaaaaccatccgctccacactaaatccgcagtggaatgagtcctttacattcaaattgaaaccttcagacaaagaccgacgactgtctgtagaaatctgggactgggatcgaacaacaaggaatgacttcatgggatccctttcctttggagtttcggagctgatgaagatgccggccagtggatggtacaagttgcttaaccaagaagaaggtgagtactacaacgtacccattccggaaggggacgaggaaggaaacatggaactcaggcagaaattcgagaaagccaaacttggccctgctggcaacaaagtcatcagtccctctgaagacaggaaacaaccttccaacaaccttgaccgagtgaaactcacggacttcaatttcctcatggtgttgggaaaggggagttttggaaaggtgatgcttgccgacaggaagggcacagaagaactgtatgcaatcaaaatcctgaagaaggatgtggtgattcaggatgatgacgtggagtgcaccatggtagaaaagcgagtcttggccctgcttgacaaacccccgttcttgacgcagctgcactcctgcttccagacagtggatcggctgtacttcgtcatggaatatgtcaacggtggggacctcatgtaccacattcagcaagtaggaaaatttaaggaaccacaagcagtattctatgcggcagagatttccatcggattgttctttcttcataaaagaggaatcatttatagggatctgaagttagataacgtcatgttggattcagaaggacatatcaaaattgctgactttgggatgtgcaaggaacacatgatggatggagtcacgaccaggaccttctgtgggactccagattatatcgccccagagataatcgcttatcagccgtatggaaaatctgtggactggtgggcctatggcgtcctgttgtatgaaatgcttgccgggcagcctccatttgatggtgaagatgaagacgagctatttcagtctatcatggagcacaacgtttcctatccaaaatccttgtccaaggaggctgtttctatctgcaaaggactgatgaccaaacacccagccaagcggctgggctgtgggcctgagggggagagggacgtgagagagcatgccttcttccggaggatcgactgggaaaaactggagaacagggagatccagccaccattcaagcccaaagtgtgtggcaaaggagcagagaactttgacaagttcttcacacgaggacagcccgtcttaacaccacctgatcagctggttattgctaacatagaccagtctgattttgaagggttctcgtatgtcaacccccagtttgtgcaccccatcttacagagtgcagtatgaaactcaccagcgagaacaaacacctccccagcccccagccctccccgcagtggaagtgaatccttaaccctaaaattttaaggccacggcttgtgtctgattccatatggaggcctgaaaattgtagggttattagtccaaatgtgatcaactgttcagggtctctctcttacaaaccaagaacattatcttagtggaagatggtacgtcatgctcagtgtccagtttaattctgtagaagttacgtctggctctaggttaacccttcctagaaagcaagcagactgttgccccattttgggtacaatttgatatactttccataccctccatctgtggatttttcagcattggaatcccccaaccagagatgttaaagtgagcctgtcccaggaaacatctccacccaagacgtctttggaatccaagaacaggaagccaagagagtgagcagggagggattgggggtgggggaggcctcaaaataccgactgcgtccattctctgcctccatggaaacagcccctagaatctgaaaggccgggata

SEQ ID NO: 7280 - DNA, 387 bp, Homo sapiens
ccccgccttctctacacaggaaagctcagtggcccccaagccaggatgtcccaagcttgggtccccggcctcgcgcccaccttgctgttcagcctgctggctggcccccaaaagattgcagccaaatgtggtctcatccttgcctgccccaaaggattcaaatgctgtggtgacagctgctgccaggagaacgagctcttccctggccccgtgaggatcttcgtcatcatcttcctggtcatcctgtccgtcttttgcatctgtggcctggctaagtgcttctgtcgcaactgcagagagccggagccagacagcccagtggattgccgggggcccctggaactgccctccatcatccccccagagagggtcagagtatccctttct

SEQ ID NO: 7281 - DNA, 477 bp, Homo sapiens
acaaaaggaaatactgccttctgtaaaagaacataatttctggataagtaaaactatttctttaaaaagtatgttctcaaatgagaacatcaaaatactgggaatattctgaataatacaagtactctttaagtagatttgttaatttttttttcccccaggaaaaaaatgttcattttgtgctgtgtcttacctctactaggaagaggaaagtttgagattggaagattttggactaagttttaaatagtaccaccagggaaaaattaggcagttggttcatacgagcaacaaacttcagctaaaactcatggcctctggaacatgcttcttatctaatgcttctgataatttagatctgtgataagccatttaattcatgatttctcaaaaggacattttgcaaaaacgttattctcaatgataatttcttaaaaattttcagtgatttcagaggacgagtcgttgaaccaagag

SEQ ID NO: 7282 - DNA, 495 bp, Homo sapiens
gagatattaacttggagacctaatgctctgtaaatagtcatttaaactgttggttttagtggttttgtttctaaaatgttttcttttaccgtgatgcaccagtatgagatggtgctgacactttctatgaagtggttatgagcaggtttaataaatcctctatacaagtgtttgaatcaattttaaaacataaaaagtggaaatttccttttttgtagacagtaggaacaaggaattatatgcatttttactaagtagtaattttacactgaattgtaaatgtttttacagtgagttttattaatagaatgcttcaccttaaattggaaaacaataatagtcttggactaagtctttgtactaaagcatttgctataattatttttaaaaaaacaaacagatgaaaacctcagagaaggcatgtggattataagatttgtctagtaaaaattgtaattgaatatgtttaaatatttaatttctcattttgggggg

SEQ ID NO: 7283 - DNA, 612 bp, Homo sapiens
gattctgttgctggtggggtgggcaagctgggactccagagcaggcctgccttgccctcctccctatcaggtacatgggctttgcatctgtccccaccagtcggtgcacactgtgagtgctgccaagacctgcaccaggatcatccatgacatgcagcagagcctgggcacccccatgcctgctgggatgaatgccatgctctactctgcctggccatacctgccacaggtccgcccaccccatatctacctttctggttctgcctcagaatgtgagtgccatgggatgtctacagttgtcactttgacacagctgtgtgtctggttatgtgagtggaggtgtgtgtgatgtgtgtcagcacaacacagctggggcgccactgttgagttctgctggcccttcttctactgtcatccctgagaggatccctgttcccctcggtcctgcagacatgagtccttcaacccctaatcccaacactgactcttatccttcagctccatggtgacctctgacctaattccatccttaacctctgacctctgatctagcctgtgactgtgaccctgtgggtgtctggaaggggatttgtgtgatgctcacattaatga

SEQ ID NO: 7284 - DNA, 1576 bp, Homo sapiens
ggcgcttcctccaccccgggatacacagaacctcatctcctacggtgctgaagcctgcagcagggcaggatgggcaggagagcagagccgcggagtctgcggcgcgggtgaagagcggcgctgaattcccgcagcaagattgttccgcgcccgcagcccctggactagcaggatccgaaccccggcggctgcgtgcttataggcgcagacgtgcagagagcccgcggcttaaagcgcgtcgcctggctagcgccaccccctagccttcttcaaggcctccagggctgggccaaagcgcccgctcgacggcaccctgggcccagaggactcgcggggcctcatctccaatgattcagaactcacgtccgtcgctgctgcaaccccaagatgtcggagaacggtggaaacgcttatgttacatccggtgatcaaggctttcctgtgtggctccatcagtgggacctgctctaccctccttttccaacctctggatctccttaaaacacgcctgcaaaccctccagccctcagatcatgggtctagacgtgttgggatgttggctgtactcttgaaggtggttcgcacggagagtcttttgggcctttggaaagggatgtccccttccattgtgagatgtgtccctggcgttggaatctactttgggcactctctactctttgaagcagtatttcttggcgaaggccaatcccccaaccgccctggaagtcaagtcatgctgggggtgggctctcgctctgttgcaggggtctgtatgtcacctatcactgtaatcaagacgcgctatgagagtgggaaatatggctatgagagtatctacgctgccctgaggagcatctatcacagtgaggggcaccggggcctcttcagtggcctgacagcaactctccttcgagatgcgcccttctcaggaatctacctgatgttttacaaccagaccaaaaatatagtgcctcatgaccaggtggatgcaacccttattcctattacaaatttcagctgtgggatatttgctggtattctggcctcactggtaactcaacctgcggatgttatcaaaactcatatgcagctttatccactgaagtttcaatggattggccaagcagttgacacttattttcaaagactatgggactacgtgggcttcttccaaggtggcatcccccgagccctccgcaggaactctaatggcaggcaatggcgtggacggtgtatgaagagatgatggccaagatgggcctgaagtcctgaccaagagaggactgggaacgggtgaaatctgttgccctgcttggtttctgccaagggctgctgcttcttactattctgcagtaagatgaagtcctacctgggaaaaccagggcagaaattgtgttgcctttgccttcagtaatccccttaaggagaaaatatatggacctgatttcagccttcagaatctccaaaagaggagtcatcaattcatagagcacactagggtgttaggagagagctttgcatactctgagaggctacttggaaaggcattttcccaggagagctctgtcaggtggct

SEQ ID NO: 7285 - DNA, 643 bp, Homo sapiens
  misc_feature (1)...(643): n = a,t,c or g
tttttttttttgacgggattaacagggcggctttttgttttatttctgtttttttccctttttcttaaaaaaattaaataaagttctcattatttccccaatatacatcaaatgagttttcatgcaaagcagcagtcacagaggcagaactgtccccagctcgtgcctctcggcttgaagaaccaccttctcccggccccgggttctctggtgttctcactgaggatggacgacgcccactgtctctcccagctggaactggctatgacgaaacttggctggcgtagggagaggagtcctcccctctccccagggatggggtctcaggggacagcaagctctggggcctgatccccatcacttgtccttccatctgagactcccagtgtgacagcttgggacaggtccctcttcccaggaatgcgaggctcctcctctcagctctcaatggacatggcattaatgagctgctccaccttataagccagccgctgcccgccgtgcctgctcatcctgctctagggccccgatgagctcctcactatacttgctgacataggagtagatctcattgagggcattcagcatgttgaaatccacggcngtcaaggcgggactgctcggcgaggtaggcaatcatgtc

SEQ ID NO: 7286 - DNA, 352 bp, Homo sapiens
gctggacttaggctagactgtgatgctaataccgtaaacctagcaagagagagctctgctgacggagcggacagtgtatcagcacagagtggagcttctgttcagcccctagtgtcttctgtaaggcccctaacatcagtagatggtcagttaacaagccctgcaacaccatcccctgatgcaagcacttctctggaagactcttttgctcatttacaactcagtgggagacaacacagctgaaaggagtcataggggagaaggagaagaagatcatggaatcaccatctttcagggcagggtaccaggcaccagacacctccattgaagaaactgaatcagatgccagtag

SEQ ID NO: 7287 - DNA, 373 bp, Homo sapiens
ccctttaaggtgagtgacttgcgcaatcaggtctacctggaggatggactggaccccttcccaggcgagggccgtgtggtgggcaggcagcggatgcacaaggccttggacagggtggaggagcacccaggctccaggatgactgctgagaaatttctgaacaggctccccaagtttgtgatccggcaaggcgaggtgattgacatccggggccccatcagggacaccttgcagaactgctgcccattgcctgcccggattccaggagattgtggtggagacgcccaccttggccgctgagcgagagaggagccaggagttcacccaacacgccggcacccccgctctccatgctgcgcatcaagtctgagaa

SEQ ID NO: 7288 - DNA, 1150 bp, Homo sapiens
ggaattagtgactctaagtgaaggtcactgacacagagaagcagtatgtgtctggggcttccaggacctgcaggcccactagcgtgcacttaccagaatggcatacacaggacctgatcatgaggaagaccaggtttccagtgtaaactactcttgttcccaccacctctggagcactcagggagccccatacagtacttacaatgtctttaatggacttgattctgtttaattttttgttttatattaggcacactgtattaattttccaaaatgttataccacactatgttcttggtcctgacctattgctctggaggaaagagttgtataagaacgtggctcatgtgaacttttgctagcttcatttgaggacctgagaatcatggggaaaggggaggtaatgttttcattgaaatcatcacagtgatttttattccctgggaacacagcgtgtacctaaaaatacatgagaaaatagcatgtatatgaaagctattctcaaaagtcacctgagctcaccatcttcatagccaaccctaccagttataaagatggcagctctatcacttgattaagtgggaggtggtcaaatattttggtgcctcattttcttcatctgtgagatgggaactgttatgcctggcttactaagagtcttgtgagagactgagaagttgattttgttcatatccaatctgtaaatgcgaagtcaggggaagtaatgtccctgaaataaacgggttcatgccatctagggacaataaatggttttcttgttgtaacttctggttaatatcagtaccttgatgtcatcaccgtgatgacaaagagaagagttattgttgatcttcttggttttggtctgtctcttttcttaggataaagaaaaacttccaaactagaaaaacaggccctggttcccttagtttgcacttgaacccaatatgttgccttgtacatacttggtccctgtcacattgactgcttgggaggcttccagggagaagtatgagaccctgaggggtgagaatgggcagctagcaagaacatggaaattctgcttggcactacagtcataaatagaaaacactgtgtgtgctcaggggagcaggggatgccactgaagaaactcaagggatttttattt

SEQ ID NO: 7289 - DNA, 2252 bp, Homo sapiens
  misc_feature (1)...(2252): n = a,t,c or g
gcgaaactacccacgcaagaacatggttgaatcacatttgcttgacttagggcaaagtacgaaagagagacaaaagggttctcttggaaacaagaagagttactccagatgtggcctgaataattgccatgttaagttaatgcaaaagatcagaacagggctacatttgcacaggcagtttctttccgggccgtagttttcactgatgatcacctttcacagcattttccccaaccagcatttcacttagtcttctctatacccagcacctcccccggcacccccggnaaagcccactatcacttccgacttccaacgtggcatccgtgagatctgtccacattaggcgaagcaggagaacactgagagcagcaggatgggtttggaaagagcatgcctctggaaacacagcttcctgggaattcacatgaggccagtcctacagagagcaagatgcaccccaggatttcttcattttctaatagatgtgggagtgctccattttccccgacagcgaatttcccctgagaaacgatactagaccctgggtttgcccaccttgtaactcttccttatctcctccttttcatccctaattcatcctccctctggcatggaattgacgcccgtgcagtacatttgccaagtggcaccttctttcaatttatgttttattttgctatggtggtgattctttatttgctggttgtcttttctcacacatctttctctctgtctctctctttcctgctctttgtttttctgcccagaaaaacctgacttcgataccaaaaaagatgaaactacagaaactcaaatttaaaaaaaactttaaaagaaacaaaaaaatactcaacgattctttcagctttattaacattttccattgtttcttgcgacttgtgtctcgttctttgtagtattgatgatgaacatttgataatgaatgttcttgtatattcagataaagaaaaaaaaaccaaaaaagcggtctgaatttaatagtgtttataataaaaattttaaaaatgaccctcatagcacggaaaacaggatggggaatttcccctcttctttctgtgacaatgcgcatcattcctgcattagtttttaacaccagactacctacattcatcatttccctcatttttcttttattttcttgcatttgtgaattagttcaagaatgctagaaaagtgtcgagttgtgcacatccatttcttgtttcacaatgtttaaaagtgacagtaattcattttgtaaactaaaaaaaaaaaaaaaaaaaggttggaatagtgagcataataggtacaacctaacacattattatgtttattaactttgagacccagaaataaattcttttcttttcttgattcttgctcttaaaaatacaaaaaaaaaaatgttttgttttgtgttatttttggtttgtttattggggggctttttttaattgtcaggattatgatcttgctgtttttcttcaatatgtatacaaggtgatgtgaaaagatgacttgggcagaggagtaagaacaagtaggcttgttcttctactttgcttcagaattcagttaatgccaaaagcgaagatcaagcccatgttgatgtctcgttgctcacctgcatttccagagagtgtgacactcatgcagtccctgagaaaaataaaatcagggacatacttctccttttagccttttaaaaattcaaaaacgtttagtccaagggaactttttatgctatcaggaaaggtttttgctgtttttgattctgattatcacagccaagtactttgttttatttctccctaattaataactacattccatgaggcctcttccaaccaaagaggccttttcttccaggagagtcccgcaggagatgctggtatgatgggcaccattggttaagtaaactacatgcaggaagaagtccttggggccagtctgccagctgagtcctggttttggatgaagagttaatgagatattggggccaggctcaatgctgtagttttaatgctaagaggttacgtttacttcacagagtacacctcttagtaacctctgacttaggcagctgcttaaagcaaattgcaaaactgggcttggatttgggaatgttttttattaggaggaaaaaaaaggaaaggccattattattccgggaaaaaaaatttcatttttaaattaccatccattcaacaaattatggttccgtaaagtgggtncggaacctttaggtt

SEQ ID NO: 7290 - DNA, 347 bp, Homo sapiens
  misc_feature (1)...(347): n = a,t,c or g
gatccctagattttccacagaatgagcctcagatcaagaatcagtttaataagaagctatcaggaagacttgaaaatacaaaacagcaattgcagctgcctcttcatccttcatgggaagcaagcagaaggcgaaaagaacagcaatctaatattgctgtgtttcaggggaaaaaaattacgtttgatgattgattagtgcctctttctgcaaacttttccatctaaaaaaaaaaatgttttttttaagacaggatctcattctgttgcccagactaggagtacaatatnnnnnnnnnnnnnnnnnnnnnnnnnnnnnnnnnnnnnnnnaagtgatcctccccacct

SEQ ID NO: 7291 - DNA, 377 bp, Homo sapiens
accatatttcattctgcccaataactccttagccattattatttaaaatggactcagagatcatagcaaatatcccattttcatcaccaaatgaaaaaatttcaaaaatgtaattgaaaatactcacaaaactccacagagaatactcgtgtgaggttttgttaaggcaaaggatatggtgcagcaagagaaagaatgcgtgcccatatgctatgtcagacacaaatccaggcagttttccagactcccattcatacactgatatgattcacttccagatcaagccaccaatatctgagagagaaatgctggcttcaggagagctcaagtcagatgatcccatgcagggattttatacccttctggggtaacacagt

SEQ ID NO: 7292 - DNA, 1111 bp, Homo sapiens
  misc_feature (1)...(1111): n = a,t,c or g
gcagtcacaaatgctggataaatagactgataaaacctcttattttatttatgtggcaggttgcatatttatgtggacacataggttgcactgctaggcattctgtattgttttaaagaggatatattatttagaaaaatggacatatgaatattattaaaaattgagtcttaaatttaaatgggaagggaagaaaacaccaaataagaaaaaaatttgcctttaagagttacttttgttgaatgtatttgacttagttcttattttaaggctaaaaaaactttgtcatatttaagtcggcagctttctaatttaatcttagctttgtaattcatgttttgcttttgtggactaaggtaaggacagcatttaaatatttgtgctggagtgaggggaagaagctgttacagaagtggaatggtttctggtggtatttctgaagttaggtaaagtgctttacttgccttggttgttaattgaaatagaattcagctcaagcagttgttttcagtgagtgagttaacaataaaagcttctgccaatcatagatcaacattcctcaaaaatacatacactcatacttatggaaattttattttgattgaaaacactctgaaattatctgatattttgtaatggcatcagttaaactgtgagctggattccatctttctgcagtaacagcgggcagaaccatttcagttagcatgtgcctcactttaagaaagtcctgtaggggaaaaaaaaaactgtcagagcgaattcatgcattcaacaaacacttatgagtgcctggagtatgccgtccactgtgcagatgtaggacaggggctaatcacttagagttcttcagtttattagaggagtgactacaggttttctttacaaccatggcctctagtatacttaaaataagcgtccagttataaaaagcctatttgcacaactttttgggaatacttctattaactaaaatgaggtaagccattattttggacatagaaacagattctttgtatccttgtcaccaaataatccttacctcctagtctacttacaactttgtaagggtttcctaagcnatggccatttaattcccaaatattaagtg

SEQ ID NO: 7293 - DNA, 214 bp, Homo sapiens
atctccagtaactcgaagaaggtcccgctctcgaacctcaccagtgacacgccgccgctctaggtcccggacacctccagctattcaccgccgctctagatctcgaacgccactgttaccacgcaaacgttctcgaagtcgctcaccacttgctatcccgccgccgctccagatcccgtactccacgaacagctcggggtaaacggtccttaac

SEQ ID NO: 7294 - DNA, 189 bp, Homo sapiens
cacaggcttgagggtcaagctaggctgtaagacagaaattcactctgcatttctaggaagatggcttgtggcttttacacaggaggactctgaagaacctgctatatcaagtgtcagttatgtgcaagaaacgggattagatactgtggatgaatagggaagtttactagtccttgaccacagggagtt

SEQ ID NO: 7295 - DNA, 3111 bp, Homo sapiens
gaaagaagtgatatcctccccagaccatctgctttggggagcttggcaaaactgtccagcaaaatgaaaagactcacgtgctttttcatctgcttctttctttctgaagtatcaggcttcgaaatccccataaatggactttctgaatttgtagactatgaagatcttgtggaactggccccaggggaaatttcaattggtggcagagaaccggagatatcagagaagccttccaggagaatcggaagaaatgatggaagaggttgatcaagtaactctttatagctataaagtccagtctactattacttctcggatggccaccaccatgatccagagcaaagtggtgaacaattccccgcagcctcagaatgtcgtgtttgatgttcagatccccaaaggagcattcatttccaacttctccatgactgtggacggcaagacatttaggagctctattaaggagaaaactgtgggcccgagctctttatggcacaggcccagagcaaaaggcaagacggctggccttggtgaggagcagcgctccttgatatggaaaacttcagaacggaagtaaatgtcctcccaggagcaaaggtgcagttcgaacttcactaccaggaggtgaagtggaggaagctgggctcctatgagcacaggatctatctgcaacctggacggctggccaaacacttagaggtagatgtgtgggttatcgaaccacagggactgagatttccttccatgttcccccgacacatttgaagggcccatttcgatggtgttcccggtcatttcctaaaggacaacagaaggcgcacgtctccttcaagcccacggtagcacagcagagaatatgccctagctgccgggagactgcggtagatggggaactggtggtgctgtatgacgtgaaaagagaagagaaggctggtgaactggaggtgtttaatggatattttgtccacttctttgctcctgacaacctggacccaattcccaaaaacatcctctttgtcatcgatgtgagtggctccatgtggggagttaaaatgaaacaaactgtggaagcaatgaagaccatattggatgacctcagagcagaagaccatttctctgtgattgatttcaaccagaacattcgaacttggagaaatgatttaatttcagctacaaaaacacaggttgcagatgccaagaggtatattgagaaaatccagcccagtggaggcacaaacatcaacgaagcactcctacgggcaatcttcattttgaatgaagccaataacttgggactgttagaccccaactccgtctcgctgatcattttggtttctgatggagatccaacagtgggcgaactaaaactgtcaaaaattcagaaaaacgttaaggagaacatccaagacaatatctccttgttcagtttgggcatgggatttgatgtggactatgattttttgaagagactgtccaatgaaaaccatggaattgcacaaaggatttatggaaaccaggacacgtcttcccagcttaagaaattctacaaccaggtctccactccattgctccggaatgttcagttcaactatccccatacatcagtcacggacgtcactcaaaacaatttccataactactttggaggctcagagattgtggtggcaggaaaatttgaccctgctaaattggatcaaatagagagcgttatcacggcgacttcggctaacacgcagttagtcttggagaccctggcccagatggacgacttgcaggattttctatcgaaagacaagcatgcagatcccgatttcaccaggaaactgtgggcctatctaaccatcaaccaactgctagctgaacgaagcctggctcctacagctgccgccaagagaagaattacaagatcgatcctgcagatgtctctagaccaccacattgtgactccgctgacctcgctggtgatcgagaacgaggctggggatgagcgcatgctggcggatgccccaccgcaggatccctcctgctgctcaggggccctgtattacggcagcaaagtggttccagattccaccccgtcttgggccaatccttcaccaacgcccgtgatctccatgctggcacaaggatctcaggtgctagagtccacgccacccccacatgtgatgagagttgaaaatgacccacatttcatcatttatctaccaaaaagccaaaagaacatttgtttcaatattgactcagaacctggaaaaatcctcaacctggtttctgacccagaatcaggaattgtagtcaacggtcagcttgttggtgccaagaagcccaacaatggaaaactaagcacctattttggaaaactgggattttatttccaaagtgaagacataaaaatagaaatcagcactgagaccatcaccctgagccatggttctagcacattctccttgtcctggtccgacacggctcaagtcacgaatcagagggtgcagatctcagtgaagaaagaaaaagtggtaactatcaccctggataaagagatgtccttttctgttttacttcatcgtgtttggaagaagcatcccgtcaatgttgactttctgggaatctacataccccctacaaacaagttctcacctaaagcccacggactaatagggccagttcatgcaggaaccaaaggttacacatcttccaatgaggagaccaggaaaggaccctgagaagccagaggcccagccatggaagtgaaggggcagaagctgatcatcaccaggggcttacagaaagactacagaacggatctagtgtttggaacggacgttacctgctggtttgtgccccaacagtggaaaaggattcattgacgggcattacaaggattacttcgtgcctcagctctacagctttctcaaacggccttaaaggtttatagtttgggaaattatatatattaatatacatctttcccctgtcacttttgcagatattccttcggtttgaataattaaaatgaaccagatatcagggtggttaattaaaatgaaccagatatcagggtggtttataaagcctgtaaacacacctaagaaaataaacattttacaaatg

SEQ ID NO: 7296 - DNA, 613 bp, Homo sapiens
  misc_feature (1)...(613): n = a,t,c or g
gacttcacctttataaatggagatcgttaagcctggagccagctccatcaggtcacggactcgtggccttgggtagaaggcccagtcgcgctgctgtgatttcagcactcacccttgttggaaatgttgctttttcttcatgcacatggctgttttttcaaaagtgctgcagaaatgtggccaagacagcagaaaaggtgtgagcatccctggctacaaacgtatttgaaaccaaaagggaaaagaaaacgcaggcagccagcagttgctacagaaacgtgattttcaaagcatctgcatcacccgcaacctcatggaagcctcggtttggtttacaaaggagcgagtggtcggaaagacgatttgaccactttgtattcgtatgattcattcggagcagaagtttaaaactccatgaaacacttgccccgtggtgggcacggtggaatggggcttcactgggggcttttgaaagcaaaggctggtttaacaaaagttctgaaaagacagcacctctggggggtgtgcaaaggcccccacctccacgtggttcacaagaaagaaaaaagggaaaggaaatntggttaacagaaaaggaggtttccccgattgt

SEQ ID NO: 7297 - DNA, 413 bp, Homo sapiens
ctaaaggatcccactaagggctgttcacctgccccagggactcagaacacacatgactctccccacttgagctcaggatcccggcattacacggggcgcgctgagccccagatgtccctaacccctttccagcaccctccagccttgcagaagcagccaccatgccagtctctaagtgcccaaaaaagtcggagtccctgtggaaggggtgggaccggaaggcccagaggaacggcctgcggagccaggtatacgctgtgaatggcgactactatgtgggcgagtggaaggacaacgtgaaacacgggaaaggaacacaggtctggaagaagaaaggagccatctatggagggggactggaagtttggggaagcgagacggctacggcaccctcagccttcctggaccaacag

SEQ ID NO: 7298 - DNA, 319 bp, Homo sapiens
  misc_feature (1)...(319): n = a,t,c or g
acctcctcctcctccccctccccccaacaacaacaacaacaacaactccaagcacaccggccataagagtgcgtgtgtccccaacatgaccgaacgaagaagggacgagctctctgaagagatcaacaacttaagagagaaggtcatgaagcagtcggaggagaacaacaacctgcagagccaggtgcagaagctcacagaggagaacaccacccttcgagagcaagtgggancccacccctgaggatgaggatgatgacatcgagctccgcggtgctgcagcagctggtttcccncacccccttccatttgagggagg

SEQ ID NO: 7299 - DNA, 785 bp, Homo sapiens
ggggttcacgtaaagacagcgagatcctgagggccagccgggaaggaggcgtggatatggagctggctgctgccaagtccggggcccgcgccgctgcctagcgcgtcctggggactctgtggggacgcgccccgcgccgcggctcggggacccgtagagcccggcgctgcgcgcatggccctgctctcgcgccccgcgctcaccctcctgctcctcctcatggccgctgttgtcaggtgccaggagcaggcccagaccaccgactggagagccaccctgaagaccatccggaacggcgttcataagatagacacgtacctgaacgccggcttggacctcctgggaggcgaggacggtctctgccagtataaatgcagtgacgcttaacattggtatcccttccctgacaaagtgttgcaaccaacacgacaggtgctatgaaacctgtggcaaaagcaagaatgactgtgatgaagaattccagtattgcctctccaagatctgccgagatgtacagaaaacactaggactaactcagcatgttcaggcatgtgaaacaacagtggagctcttgtttgacagtgttatacatttaggttgtaaaccatatctggacagccaacgagccgcatgcaggtgtcattatgaagaaaaaactgatctttaaaggagatgccgacagctagtgacagatgaagatggaagaacataacctttgacaaataactaatgtttttacaacataaaactgtcttatttttgtgaaaggattattttgagacctt

SEQ ID NO: 7300 - DNA, 476 bp, Homo sapiens
  misc_feature (1)...(476): n = a,t,c or g
ggtcagggaccattctacctaagccagtccacatctgtgatcccctaaccccaaataaaaacgtccatttctttatgtagccaatatcacagtcgtcattaaaccaattcatactaaagtgtgaatgacagcccccacagagttctccataggttttccaaggaacttagggaatttacatgaatctttaattagtatagaagtacaagagtttatttctggatgaggaatctttgcactaatgttcttcaatcatatataaggctgcccatgggaagaagggagagaatgagactttattgtcctcaacctaatcaaaggaaaagagatcaaatgctctacttcctcttgcttttgctcaaccctaataccttgattccctcgtgccnnnnnnnnnnnnnnnnnnnnnnnnnnnnnnnnnnnnnnnnnnnnnnnnnnnnnnnnnnnnnnnnnnngttatncaanntnaancacct

SEQ ID NO: 7301 - DNA, 476 bp, Homo sapiens
aggtcatgtacttattagtccctcttcttaaccgagggaatgataaacataaactcacatctgcaggcttttttgtggagcttctccggagtccagtggccaagagactgcccagcatatactctgttgcccgctttaaagactggctacaagatggaaatcatctctttagaattctcggcctgaggggactgtacaatcttgttggacaccaggagatgagagaagacatcaagagcctgttgccatacattgtagacagcttgcgtgaaaccgatgagaagatcgttctgtcagccatccagatactcctgcaacttgttagaacaatggatttcactaccctggctgccatgatgaggaccctgttctccttatttggtgatgtgagatctgatgttcatcgtttctccgtgactctctttggagccgccataaagtctgtaaaaaacccagataagaagagtatagagaac

SEQ ID NO: 7302 - DNA, 375 bp, Homo sapiens
gtttattatacagcagaagtgtatcaaaagggtgatggtagttgcaggaaataaatatatacctttaattgtatatgcataaacatctttggaatgatacctccaaaatacaaattcccatattgaaagagcacactgagtacccagcatggtggatggaaatagatcatgaagtttcaaactaataggaagaggtagaagattctataggcttttgggaggggagatgggagaaaagtttaaggcaaataacaaagaatcagaacggcatccatcttctctatggtgctgatgtgctccagtgtgtaaccatcaggaacaaacctattagttcaaacctgagtatattggctcattgcaacagaggagacagca

SEQ ID NO: 7303 - DNA, 292 bp, Homo sapiens
ctccagcggaggctccgagctggggttcggaccaggccgcgggtgggcgggagtgcagaaagcgggctaacatcctgtgttgctatcccttcggagtcccacacggcggtgagtcgaggcccaggcgctgatttacaccagctacttgggctggtcgggttttcccttcgcgccgtgcgggtcaggagttaaggttctcgggtttttagacaaacaagtggtgacagcacagcgaagtaattccaaagcatccgcctacaatctgcttgaaaatgtctgaaaacaattcatg

SEQ ID NO: 7304 - DNA, 126 bp, Homo sapiens
ggcctctcctggcttcttaaccacttacattaaaattgagaggagaaaggcattttcagtttctttaagttaataaaaagaagccatttctggaggagttttatgcctgtaccagcagaggttcag

SEQ ID NO: 7305 - DNA, 305 bp, Homo sapiens
  misc_feature (1)...(305): n = a,t,c or g
attctgactttggttttgattctggtttggtataaactgtaaaagtgtgtgtgtgccctttttacctgttctttgttttgtggtgtgtgtatggtgtgagtgtggtgttttgtcttgaggaagcatgggtcaggcacaaagtaagcccaccccaccaggaactatgttgaaaaatttcaagaaaggatttaagggagattacggtgttactatgacaccaggaaaacttagagctttgtgtgaaatagactggccnnnattagaggtaggttggccatcagaaggaagcctagacaggtcccttg

SEQ ID NO: 7306 - DNA, 1399 bp, Homo sapiens
  misc_feature (1)...(1399): n = a,t,c or g
tcggaacgaggcacctgcgctactggctccactatctacaccccatcttgaggcggcnggcttgcgctacggctctatgtcatcaaccagcatggtgaggacaccttcaaccgggccaagctgcttaacgtgggcttcctagaggcgctgaaggaggatgccgcctatgactgcttcatcttcagcgatgtggacctggtccccatggatgaccgcaacctataccgctgcggcgaccaaccccgccactttgccattgccatggacaagtttggcttccggcttccctatgctggctactttggaggtgtgtcaggcctgagtaaggctcagtttctgagaatcaatggcttccccaatgagtactggggctggggtggcgaggatgatgacatcttcaaccggatctccctgactgggatgaagatctcacgcccagacatccgaatcggccgctaccgcatgatcaagcacgaccgcgacaagcataacgaacctaaccctcagaggtttaccaagatttcaaaacacgaagctgaccatggaaggcgggacgggcattggggtcagtgcggtaccaggtcttggaggttgtctcggacaaccatctttcaaccaaatatcccccgtgacaattgggcggcttccgtcgtagccccctcgggggctgacactaatggacagaggctctcggtgccgaagattgcctgccagaggactgaccaacagcttggctggcagctgctctgtggaggacctccaggactgagactgggctctgttttccaagggtcttcactaggccccctagctacacctggaagtttcagaacccactttggggggcctcctgcctgggcaggctcttcaagtgtggccctctttggagtcaaccctccttcccgaccccctccccctagcccagccccagtcactgtcagggttcggccagcccctgcactgcctcgcagagtggcctgggctaggtcactccacctctctgtgcctcagtttcccccccttgagtcccctagggcctggaagggtgggaggtatgtctagggggcagtgtctcttccagggggaattctcagctcttgggaacccccttgctcccaggggaggggaaacctttttcattcaacattgtagggggcaagctttggtgcgccccctgctgaggagcagccccaggaggggaccagaggggatgctgtgtcgctgcctgggatcttggggttggcctttgcatgggaggcaggtggggcttggatcagtaagtctggttcccgcctccctgtctgagagaggaggcaggagccccagggccggcttgtgtttgtacattgcacagaaacttgtgtgggtgctttagtaaaaaacgtgaatggaaaaaaaa

SEQ ID NO: 7307 - DNA, 634 bp, Homo sapiens
tttttattttcaatcaaatttctttttaatgaaaactaatttttaagggcaagataccacagcagaagaaaaacctcttgcaagaaaagacttcatggtttacaacgatcaaatgtatgggctatttgcctgattggtggcctggactcagcaagagattcctttgcagcagaggttggccacacatctgggggctgcaacaccactgaaaagacagctttctaagcattagtgtaaggcaaaaagcagagtgcctaaacttggccatttccaccaagaaaaaaagtttcatagcaaccttccttcaccagaaaggcttactttatgatatgctaacagaacagaaaagcaggttgggacaagatacagactttgttgcatttagctatgacccttctctcccctctgtggatgtgggcagggtggggagaggcaggaagaggcagtagagggaaatgacatttgcactcaggcttcccgcccctacccacccctacccttcgcccagacagacgtcggatctatgctgcaccaggggtgggtcatggagtccagctaattgccaggagctgaggcgtgtacaagccatgaaaagagctgccccacggcctccccacattactgtcctacatgc

SEQ ID NO: 7308 - DNA, 435 bp, Homo sapiens
  misc_feature (1)...(435): n = a,t,c or g
tcaagtgaaaaaacacaaaaaccatcgtatgctcttcctttccctttgttcccctcccctcacatattataagcccctagttcctgctattattaatgtcattaagttctcctaaattcagccatgacccttcccttctgtctcttagctcaaggcttcttccggaacctcatagctgattgtcttcttttgggcattgcttttctcaagtcattttgtacactgcaactagagtgaactttttataaaaggcagcctgatcatctgtcctacttgaaagccccagtagcttcccatttgctcttgggatgaagtcctagtgaagggttatatgctcatctttaggttcctctaaacagcttccctgaccctctggcatcttctctgatnagatttggtgtgcctttttataagctcctttgtgctttcatgacg

SEQ ID NO: 7309 - DNA, 237 bp, Homo sapiens
aatttcagatacctctccatgcaaatgtccacacagaacaaatagaagatgaatatgaatgctgtcagaaatactttgcatgttcaaaaggaatctctgagtagtattttagacctgaagggacacctaaggctctttggcttttgcataaggcagggctagactgtaaactcctgggagggaaggaccacgccttagttttgtttatacattcccccaccccctatcttaggtgcc

SEQ ID NO: 7310 - DNA, 241 bp, Homo sapiens
cttggcctccactggaatacctttaaatacttttcacacctatgtgggtgctcctgaaactgagtgggttccccctgtgatagggcacggggtaggggcacccttccaactcctccccggtgtcactctctcccttatcacctttagtttcttttctacctgtgccttaggtgtcccagtcccctatcttcggtgaatccaaaaatccatatccttttttttgccttggattctgtttttt

SEQ ID NO: 7311 - DNA, 264 bp, Homo sapiens
cgtggcccctttgaaaatctccaggtagacttcacagagatgacaaagtgtggagataacacgtatttactagttcttgcacatacctactctgggtgggtggaggcctatccaacatgaactgagaaatctcgtgaagtaacccctgtgcttcttcgagatctgattccgagattttgactggccttagggatcggctcagataacgggcctgcgtctttggctgccttggtacagaagacggcaaaggtattggggatcaac

SEQ ID NO: 7312 - DNA, 110 bp, Homo sapiens
ggccacctctaggtcttcaagaccaaggaacacctacactccaggtgtctccttgccagatgtttcacctgcattggtaaaaggcagaatcctcaggcaggggtcggatg

SEQ ID NO: 7313 - DNA, 403 bp, Homo sapiens
  misc_feature (1)...(403): n = a,t,c or g
gctactttctggcaagcagccatcaaattatcccctttgtgtttttctgccttctagaaaactgaaaatgctgtctgatatggtcactttttcagtttccgtctgatacactctaggattagcagggaatttcatggaatgcagttgacagggagatcaataactgtagaagccagaagttctaggaagataggaaaaaacttaattttgcaggcagtaggaggggagacgtcctgaatactgggtatggtgcttgattctgtgcatatcatctcatttttccatccacaatagccagaagtaggtactattacctttacattttgatgaaatcgtggctcaacttaatgacttgccatggggtcctagtacctacttntttcttatagtgtgatactatgtc

SEQ ID NO: 7314 - DNA, 148 bp, Homo sapiens
aaggctcagattgcttagaggtatattcaccatcattcattcactcattcaacaaaataggctgggcacttctatgtgccagaggactgaagttagtaatagctaacactaatttaccattattatatgctatagaatatataaataa

SEQ ID NO: 7315 - DNA, 263 bp, Homo sapiens
aaacctgggatgccctagagagagggtgtctgcctggggtcccccataaaaagactgcttttagcctgtctagagtgagagaagaccccagaggaggcagaggataccatcagaatgccctcaggtgctgtttgcaaggaacagccttcccatatatgtcgtatttattttggcaataggagtattgggtaggagaggaaaaaacagtgcaaacctcctttgtgcaacttcagaatctcgtctttggagggctgttcccgtgg

SEQ ID NO: 7316 - DNA, 367 bp, Homo sapiens
actactaatactttacaaataatgatcaaaccaactacttacctaaatatttaggaaatgaatttaacaatgcaaggttaatcaccaatgcaagctatcctgtcaggtggataaagtaagaaatcatgtctttttaatctcctgctctcatttaatagctcttccaatgtgcttaagttatttacgtttattaaacgacgagacaacctttcaaaaatgcagagatcaccgtgctgaataacctcaggcttaagtcgaataaaaggtatctttcaatttttctaggaatttaggctaaacaaaatcccacaatgtgccatttcataatttttaactgggcatacaaatggcaaaatgggttgttaaa

SEQ ID NO: 7317 - DNA, 455 bp, Homo sapiens
  misc_feature (1)...(455): n = a,t,c or g
tctcatttgctttagaaactttcaaaagattcgtgttgtccacaggataaaattcaaactccttattgtagcattcatagtcctctgcatactggtcccaacataacatgtgaaacttcactttgtctgaactgaatttcaaatgtagttgtggtatgtatttggaaggaaaaaaaaatcccaaatgtattcttttttcactatctttatttttttcatttttggtgacacgagtctcactctgtggttccagactggagtatagtgctatcagagcttactacaactttaaacttctgnnnnnnnnnnnnnnnnnnnnnnnnnnnnnnnnnnnnnngctaaggactgcacgtgcacaccacccagtccagctaatttttaaaantttttcctgtagggnnnnnnnnnnnnnnnnnnnnnnnnnnnnnnnnnnnnnnnnnncggggctcaagtgg

SEQ ID NO: 7318 - DNA, 1060 bp, Homo sapiens
gggcgcgccgtgctgagctctggctgtcagtgtgttcgcccgcgtcccctccgcgctctccgcttgtggataactagctgctggttgatcgcactatgactctggaagaagtccgcggccaggacacagttccggaaagcacagccaggatgcagggtgccgggaaagcgctgcatgagttgctgctgtcggcgcagcgtcagggctgcctcactgccggcgtctacgagtcagccaaagtcttgaacgtggaccccgacaatgtgaccttctgtgtgctggctgcgggtgaggaggacgagggcgacatcgcgctgcagatccattttacgctgatccaggctttctgctgcgagaacgacatcgacatagttgcgcgtgggcgatgtgcagcggctggcggctatcgtgggcgccggcgaggaggcgggctgcgcgttgtcgacctgcactgcatcctcatttcgaaccccaacgaggacgcctggaaggatcccgccttggagaagctcagcctgttttgcgaggagagccgcagcgttaacgactgggtgcccagcatcaccctccccgagtgacagcccggcggggaccttggtctgatcgacgtggtgacgccccggggcgccgtagagccgggcttggctctgtggaggggccctccgagggtgcccgagtgcggcgtggagactggcagccggggggggcgcctggagagcgaggaggcgcggcctcccgaggaggggcccggtggcggcagggccaggctggtccgagctgaggactctgcaagtgtctggagcggctgctcgcccaggaaggcctaggctaggacgttggcctcagggccaggaaggacagactggccgggcaggcgtgactcagcagcctgcgctcggcaggaaggagcggcgccctggacttggtacagttgcaggagcgtgaaggacttagccgactgcgctgctttttcaaaacggatccgggcaatgcttcgttttctaaaggatgctgctgttgaagctttgaattttacaataaactttttgaaacaaaaaaa

SEQ ID NO: 7319 - DNA, 154 bp, Homo sapiens
attttggtttttcatggaggacttttagcaggtctcaaaagttttcttctaatagttttcttggtgttctatcattcataggtgttgaatttaccaaactttttctatttcaagtattacatttttactttgttcaagtaatattgtatcatat

SEQ ID NO: 7320 - DNA, 369 bp, Homo sapiens
catagcatctcgtagtagagaggtttctgggttcagaggaggtggtggagggcctgcttatggtcccccaccgtcacttcatgcacgagaaggacgttatgagcggagacttgatgggtaagttccaaggtttctgtaggcaggtattttgtatttgatatggtgagaaacagaaactcatatttaggggccccagatggatttaaagttttgggcattctcaatgtttcctattttgggttggaaacggaagtgatttatatcccaatggctggtatcttatggaatcgtagaggatatttcctgcagctgattggatatctgttcctgagatataatgtgatggaagatttcctatggaagcttcat

SEQ ID NO: 7321 - DNA, 361 bp, Homo sapiens
  misc_feature (1)...(361): n = a,t,c or g
gtatagtatacacaaaggcatagcttagattcagctgtccctggagttgtttgccattcattctcagcacagtttagagaaagcaggaaaaagggattcaaagctaatgttgagtataacagggaaaacaagaagtgagaatttaccattgctcattttgtaacctcatggggagaaaaacaaaagaggaaaactggctcatcccatgtcactgtcccattctttaaccctaaatctaggaaaatactagcttcagtttcctcttccctcctatcttgatgtgttttctatatacaaaactgactctgctatgcctgagccacagaggacagggnccccatgttcccatctcatggcagct

SEQ ID NO: 7322 - DNA, 1808 bp, Homo sapiens
tttaagtttcaaggcctgggagtaatcttcagctcactgctgttctctgggcttgttgactgtctcagagtcatctttactttttcacaaaaggtagcacacgtttgcagctgagtatcaacttatcagtttgttcttcttttatattctctaaagctttctgttaaaaatggtggtgcttctgctgctataacgttgtcaagaaacttgtgggtcttttacatatgtcacagggatgcactcatttagataggaggctcctcacgtatctttcctggaaaatcctgtctctgtttttggctttttctgaaatagctgagaggatctatgattcacacccttaatatcttcaaagagtcttgtgtgtgacctgatactcagaccttttgatgtttctgaagtattagcaaaaggttatacagccatatcttcatcactttctctagagtaaaggctgtcctgacggtgaatcttagttttagtggcttttgcaatttgaataggccgcgaatttcccaaatcatcaagtccggggttctttatatttaacaggtcttccctcaatctacctctttccacattttactataatcagcaagaagacagcaggctgtaccttccacagcttgcttggaaatatcctcagctaaatattgaagtcatcacttaaaagttctgctttacacataacggcaggacacaactcagcttagcttttcgccactatgtaacaaggactcctttcctccacttctccagtaacatattcctcattttttaccaacagtctattcatgatgatttagatattctatggcaatcgaggtattctctattatgctcctttcttcaaggccgccctagcattaacattccatatttctactaacagtctgtttaaggcagtttagcttcttttctggcatgctcctcagaattcttccagcctccacctactgcccaattccagagccacttttctacttttaggtatttgttacagcagcacctcaagtacctagaaaactcttttatgcctgcttctctgccagatgacttgaatatggtactagatttggaattcacctttctccagggtcactgtttatttcaaagaggtgaatttacctgtgctagggttttcacactgggagtgctaccagaactaccacaggatgaaagtggtgagcccaccactgcagagaagttttctcagtgccgtaatatagaggaattctcaaaataagccctactccttttcacttactgaaaacaacttggataatgtgtaacagccagccccatttcaaaaagattaccaggggtaaaacaactttttcatgggtcaaaatcatcttccgaagaaaatgatttcttaaaagaattgaacattgtaaatcaaagggcattgtcctgttttggattaacaaaacaggaaaaataaccaatccttgtaaaattatttgaaattttcttgtttttatcagttgagtgcctatagatgcacatacaaaaacaactgccatttttgtatataatagtcttccaagatagagatttacattaggagagaattaaacatccaggagggatgaacagtatttcatgtgtgctatgtagtgttttgcttcattgagagtcattttcatgaattatttttactactgcagtcatcttaaatttataatcatctcaaaaaagatgtcacaatgaacagacaaccatctgtgaggtcagtcattttgcatgatgtatgtaatcaaaaagtttgaaatgtctgcttactaataaagaatgttttcactgaa

SEQ ID NO: 7323 - DNA, 327 bp, Homo sapiens
  misc_feature (1)...(327): n = a,t,c or g
tccgaggttaggataattacctcaagctccatccatgtggctgcaaagacatgatttcattgtattttatgactgctcatgtatattatttcagcctccaaaattttgtatgttatttataatgatataaattatgtggttttatcgtgtactctatctcactcaggaaatacatacaattcttcgttcccaggctactctgggagctgaggtggggagggatcacttgagcccagggagttcaagaccagccgggggcaacagggtggaaaccnttgtctctggaaaaattaaataattacacaccccacatggcacacacntcca

SEQ ID NO: 7324 - DNA, 1541 bp, Homo sapiens
gcgacatggatcccctgttccagcaaacgcacaagtgagggccggtcggggagcgggcaggggctagacgaggcgaggcaggcaggtccacgagatccagtcttgcatgggacgcctggagacggcagacaagcagtctgtgcacatagtagaaaacgaaatccaagcaagcatagaccagatattcagccgtctagaacgtctggagattttgtccagcaaggagccccctaacaaaaggcaaaatgccaaacttcgggttgaccagttaaagtatgatgtccagcacctgcagacttgcgctcagaaacttccaagcatcggcgccatgcaagggagcagcaggagagacagcgagaagagcttctgtctccgaaccttcaccacttaaacgactctggacaccaccattaccaattgggaccgaattcacttgcagttttaacttccttcccttccaagaaagtttcacaacgggcatgggattgacctcatttttaagattggggcacaatattttagatggactgaggacccagagacttgacccttgaaggggacctcagaagaagatccttgacatttcccacattgctgggcttgtccaacacaattaatgccgcttcatcgagaaaccggcttttccggaccagtaccttattataggttggattcttcctgacctttgtgggcattgttcttgtggttccaataccggacatgagccagccacgctcagtggctgaacagcattcccacagccttgcaagtgtgtgtgtgtgtgaaagagagaggggggcccagagcgccgccttttgaaatgtttgcctgtctgaactgtgaagacacttgggagtgattgtggtctaatttccaacctgctctgttttctgtgacatcttggagggggagctagtgccaccaccatgcgcggtgcttaggaaatgaaagaagtcccgggtctgtctctctcactctcgctctcactgggggagggaaagaatggctttggtggctttgttcacacagctgatgcgtgccctgggaaggtgtccacagtgagccctgtgtgcaggactgtccacacggttcacaccttgtcaccatcaggcctttctggctcctgatagggtggagcaaaagtggaaaggaaaggaaagaggccttttctcacagccattatattaaatagtaggtcgattcacatcctcgtgctcctggccaccctcccctgtgcctcagtgacatgtagatgactgactgccaatacttgtcaccattccctggaagcagctacctaggggaaacaagatgtagtgctattgccgataacaagtaagattttccacactacagctgggtgtttctcttttctaaagtgaggccagtgttatttcccgggagtgttcagtcttgaccctagtcactgattttttctaagttgttaataagagtggttgggcttttaaggttcagagactgtgggcttgggcaccctgcgcccaggcttttgtgggcctttgccccttagaaaagtagct

SEQ ID NO: 7325 - DNA, 447 bp, Homo sapiens
  misc_feature (1)...(447): n = a,t,c or g
tgggaaaaggagagtttggcttaagtacaggatgccagcaggggaccaggagagaaagctagaaaggaagagaggatcacactgcaggcagccacgggaactagcctctaccttagaggatgaagaggagccactgaaggtctttgagcaaatcaatgttacaatatcactgagttgggaggctttatatacacttggagccttatcaataatttatcttttcagtttacaagcactctcaagtatgtatttaatcattctttaaatggctttattgaatgggctccatctcctctatttaggaggcagtccaagccctggggatggaggacacatncatgttccccacattttggacccaccacacacagttagggcntagctttggaaaattncaggantttaaagcttgcctgggcttttttaaccgcctgttcacacaccttc

SEQ ID NO: 7326 - DNA, 459 bp, Homo sapiens
  misc_feature (1)...(459): n = a,t,c or g
gagagatcatggcggacgggaggaagactagccttgcagctctgaacagagcagcgagtgggagctcgcattgtaaactttagctccagatggacnggcgaaaacaaaccagcaatccccagaggacccacagaccctctgaaggaagtgggctgctcctgcaggacctgggagacaccccaaatactctaaggaggagagaggcacaaggtatatctgcagaagtaaccatggatttaaaagtagctacagcattcaatttaaaggttcaatgaaggaatgtacagccatgtaggaactacaattgggggaaacaggaataatctaatggaaatagaccgagtcgcgatacctatcaagccccgtcagctcagcttcttcttggcctctctgtgcagcatttctttctcccagggcttaccataggaggccctgccgaactggcacgctgcatgggag

SEQ ID NO: 7327 - DNA, 1060 bp, Homo sapiens
gccggttctggagtggctggcggcggggccatgggtgtccgcccagtgcccgaggacgtaggctttggcaccgaagcccggcatcagaggcaaccccgcggctcctgccaacggtcggggcccctcgggaccagcccttcgcggggctgctgccaaaaaacctcagtcgggaggagctggttgatgcgctgcgggcaccgtggtggaccggaaaggacctctagtgacgttgaacaagccacagggtctaccagtgacaggaaaaccaggagagctgacgttgttctcagtgctgccagagctgagccagtccctagggctcagggagcaggagcttcaggttgtccgagcatctgggaaagaaagctctgggcttgtactcctctccagctgtccccagacacgtagtcgcctccagaagtacttcacccatgcacggagagcccaaaggcccacagccacctactgtgctgtcactgatgggatcccagctgcttctgaggggaagatccaggctgccctgaaactggaacacattgatggggtcaatctcacagttccagtgaaggccccatcccgaaaggacatcctggaaggtgtcaagaagactctcagtcactttcgtgtggtagccacagctactggctgtgccctggtccagctgcagccactgacagtgttctccagtcaactacaggtgcacatggtactacagctctgccctgtgcttggggaccacatgtactctgcccgtgtgggcactgtcctggggccagcgatttctgctgccagctgagaacaacaagccccaaagacaggtcctggatgaagccctcctcagacgccttcacctgaccccctcccaggctgcccagctgcccttgcacctccacctacatcggctccttctcccaggcaccagggccagggacacccctgttgagctcctggcaccactgcccccttatttctccaggaccctacagtgcctggggtccgcttacaatagtcctccctctgttcctgaccccctcacacacactggaaagtgagggtgggg

SEQ ID NO: 7328 - DNA, 359 bp, Homo sapiens
gtagtttgagagacatgttagctgagggagaagagacaggatatttgcaaaattttgtagcttgaaaggtcaacagcatcagctacttccagcatttcaattgcaagggtagattcattgtcaatgtcatagtttagttgctgagctttacataggactagtttgtactggtaactttgatgagtttagtgagaagaggcaacaacaggaaaaaaatacctcaatgagaaacagcttattaaattaataccactcaaaacagatttatattgcaggttttaagcaaatacagttgttttaaaagcaagaggtttcaactgtattcttgttgatattgattaatatgtagggaaataaac

SEQ ID NO: 7329 - DNA, 323 bp, Homo sapiens
gaaaatctgtttctcccctttccccaattctcagaaactgtttatcctagaaatctaattcccttaccagatagtgccatctgggtgactgggacacaaaaatcacatgggttctttctgtagcttaaacagattcttacaagagaaaatacataactaaataatcacttaaactagggcatatacttgggaaaaatcatctataattcctgtaaccgagaataaacaattgttgacgttttgtcctgtttgccaccagttttttcctgtgtattaagctttaaaaatatacggtggattaaggtatattatttgtttaaaaa

SEQ ID NO: 7330 - DNA, 430 bp, Homo sapiens
ttaaatggttggaaaaaaaataaaaagaatattccatgacatgtgaaaattatacaaaattcaaatctcagtgtccataaataaagttttattggaacacagccatgctcatccatttacatattgtctatggctgctcttgcagagttgaataggtactaaagggatagtatcatctaacaagccaaaaatatttactagctagtgctttacagaaaaagtttgccaacccctgggtctagagacaaacctggggttgtgaaaaatactttttactgatttcatttaatactttatagttttccctggtatattcacacctattactttcattttatcttcactccaagtcagtgaggttatatcctgtttaggaggatgaggatcgcaagtttgaaagtgggacttgccccaagggtcatgcaggcag

SEQ ID NO: 7331 - DNA, 358 bp, Homo sapiens
cagctatctcaactacaagctacaagctcctctaagtgaacccacgctgagccagcatactcatgattatccctacagcctggtgagccgggagctacgtgggatcatccgagggctgctggcgaaggcagcagggtctctggagctcttttttgaccactgtctgttcaccatgttgcaagagctggataagacaccaggggagtcactacatggttaccgcatctgtatccaggccatcctgcaagacaagcccaagattgccacggcaaacctaggcaagttcctggaactgctgaggtcccaccagagccgaccagcaaagtgtctcaccatcatgtgggccctgggtcaagca

SEQ ID NO: 7332 - DNA, 279 bp, Homo sapiens
gccgtggcggtgaccggagcatgccgcccgacatgaactcgctggaacaagcggaagatctcaaggctttcgaaagaagacttactgaatatattcattgtttgcaacctgctactggacgctggagaatgcttcttatagtggtatctgtctgtacagctactggtgcctggaactggttaatagaccctgagacacaaaaggtagaagttttgttttaaaatcattagcataattaaatgagataatggatattgtagtgctttgttaatgataaag

SEQ ID NO: 7333 - DNA, 409 bp, Homo sapiens
  misc_feature (1)...(409): n = a,t,c or g
cttaaagcattatagtaacctctttaacctggtccttttagtccaacatcaagtaaaaccccaacgttatagaggtccacgtttgggcacagctttagactatgtgttttaggagtcacggaacaaccgaggaatatgcctcctatggaacatgatggggatgttatagaacagtcaaacataagaatttcatctgctgaaaataaaagtgctccagacaatgaaacatccaaatctgctaatcaagatacctgtagtccttttgcagggatgctctttggaggtgaagatcgagaacttattcagagaaggaaagagaaatacagactagaactgttggaacaaatggctgagcaacagaggaacnnnnnnnngnaatngaaggagaaaangatttaaaactcagggt

SEQ ID NO: 7334 - DNA, 373 bp, Homo sapiens
  misc_feature (1)...(373): n = a,t,c or g
gtttaacactgagagtcatctggcccatgctgtttaaagctttcttaattttgtgcctttcttagccttgatcttctacaagtcgttcatatttactcttgtacttgtaaatatcttgacatttttattgaggcacaatgttttgttttaagtttattaaggagttgtgtataggccggtaaaattatggaactgctaaggaaaaatatttctaatgaaattgtacatgtgagcagtaagtgaggttgatttatgggtacttgacaatggtatagtgaagtttggtattgcatagaatgcctttcatcagtatccagcccttgctcatattttacnnnnnnnnccaaaattannnnnacttggcctttcctgg

SEQ ID NO: 7335 - DNA, 96 bp, Homo sapiens
cacaggacctgggcccatggtttcttatacagtcaatgtacaaatgctcatttatattttgcacaataatgaagataaaaataacaattatagcaa

SEQ ID NO: 7336 - DNA, 873 bp, Homo sapiens
taaaacaaaagtattaataatctggaagacagtgttgcccaggtcaggagtgttttcttggtggttccagcccccatcaattgaactgtttctgggctcagtcagacacagacattcatctgtgtctgaccaaatcaggggacttccccacctgtggtgggaggcacagcttagatgttttgtacacctggtcttttctagaaatccctgcttggagctgcagaagggttgccttctgtaggtcggaggaatggaggcttactaaccaggtaagccttctatgcatccacaccaaaatcctgcagaatgtaagtaagctctgctttataagatggggttcaccttcatcgcagacttgaaagtttcagtttttatttttttcagaaagcacggaaaaattatttataatagtctgggagaaaaaacacactgtaatatttcaagtgtatgccagtagaatgtactgtaactgagccctttcccacatgtctaggctccaatgtctcctgtaggtccacctaactgtgtgttttcagggacaatgccatccatgtttgtgctgtagacttgctgctgctgaatcctttctggggactttctcatcgggcagggagcagagggcttctcgttcatgcaccctttgcctgaacacccatgtagctgctgtgttgtgtatatattactcttaagaggagtgtgtgtgtctgtgtttgttttaaaagtcacttatttcttacagtgatttcaattgcaccatgacttcttcactaaaaccacaaagtcctgcttaaaactatggaaaacctaacctgattagagccttgactattttgaagattaaatgcacactttttatataaaaaaaaaaaaaaa

SEQ ID NO: 7337 - DNA, 2004 bp, Homo sapiens
acccccccatagggcatgtgtgtgtatacaaatatacttctctttggcttttcgacatagaacctcagctgttaaccaaggggaaatacatcagatctgcaacacagaaatgctctgcctgaaatttccaccatgcctaggactcaccccatttatccaggtctttctggatctgtttaatcaataagccctataatcacttgctaaacactgggcttcatcacccagggataaaaacagagatcattgtcttggacctcctgcatcagcctattcaaaattatctctctctctaggctttccacaaatcctaaaattcctgtcccaagccacccaaattctcagatcttttctggaacaaggcagaatataaaataaatatacatttagtgggcttgggctatggtctccaaagatccttcaaaaatacatcaagccagcttcattcactcactttacttagaacagagatataagggcctgggatgcatttattttatcaataccaatttttgtggccatggcagacattgctaatcaatcacagcactatttcctattaagcccactgatttcttcacaatccttctcaaattacaattccaaagagccgccactcaacagtcagatgaacccaacagtcagatgagagaaatgaaccctacttgctatctctatcttagaaagcaaaaacaaacaggagtttccagggagaatgggaaagccagggggcataaaaggtacagtcaggggaaaatagatctaggcagagtgccttagtcagggaccacgggcgctgaatctgcagtgccaacaccaaactgacacatctccaggtgtacctccaaccctagccttctcccacagctgcctacaacagagtctcccagccttcttcagagagctaaaaccagaaatttccagactcatgaaagcaaccccccagcctctccccaaccctgccgcattgtctaatttttagaacactaggcttcttctttcatgtagttcctcataaggcaggggccagaatatctcagccacctgcagtgacattgctggacccctgaaaaccattccataggagaatgggttccccaggctcacagtgtagagacattgagcccatcacaactgttttggactgctggcagtctaaaacagtccacccaccccatggcactgccgcgtgattcccgcggccattcagaagttcaagccgagatgctgacggttgctgagcaacgagatggtgagcatcagtgcaaatgcaccattcagcacatcagtcatatgcccagtgcagttacaagatgttgtttcggcaaagcattttgatggaatagggaactgcaaatgtatgatgattttgaaaaggctcagcaggatttgttcttaaaccgactcagtgtgtcatccccggttatttagaattacagttaagaaggagaaacttctataagactgtatgaacaaggtgatatcttcatagtgggctattacaggcaggaaaatgttttaactggtttacaaaatccatcaatacttgtgtcattccctgtaaaaggcaggagacatgtgattatgatcaggaaactgcacaaaattattgttttcagcccccgtgttattgtccttttgaactgttttttttttattaaagccaaatttgtgttgtatatattcgtattccatgtgttagatggaagcatttcctatccagtgtgaataaaaagaacagttgtagtaaattattataaagccgatgatatttcatggcaggttattctaccaagctgtgcttgttggtttttcccatgactgtattgcttttataaatgtacaaatagttactgaaatgacgagacccttgtttgcacagcattaataagaaccttgataagaaccatattctgttgacagccagctcacagtttcttgcctgaagcttggtgcaccctccagtgagacacaagatctctcttttaccaaagttgagaacag

SEQ ID NO: 7338 - DNA, 463 bp, Homo sapiens
cgtatctggtctggccttcgaaaatcttcccagggtttggaaaagggtgtggtgcctcttgttttaaccgcaaatggctgaggctaactggggttatggcagtaggtgaacgcccaaacctttcttcaccatcctgccagccacagtgaactgggtcgagtcgttggccgctcctctgcctctcgtcttcccaggcctcctctctcacagtgatgagctgcttcctctcctcaatcatcatttggctctctcgactttctgtgacccgccaaagcagattagaaatggcactatcatccgcaactcctccttcttcctgcaggttaaaacaaacagggaacatggcagagtactggaagagaagagcctggtcagggcatcgcaatcaccttcaagtattttgtgcctgggttcaaacagcagcatgcacgtgctcacacaatagggtgatgtgaacctcagg

SEQ ID NO: 7339 - DNA, 355 bp, Homo sapiens
aaaacaacaacaacaacaacaacaaaaggtgattggtaaaaattcactgatgcaatgccatttgcaaccttcagtgcaagtctgattttgacagagttcttaccaattattgcagatgtaaagagattacctttttagcttatgccttgatattatgtgttttgctttaaatggtttggtggttggttggtttgtgggataggttctttttggctgtgtagtaatgacatcaaatgcccgcagagaattagttgtaaatggtaatggtctttttaaatggtttaactgctgtactcaaaatactcttcaacctgatctggtgtcctaaaagtttagtacttctaataagatctaa

SEQ ID NO: 7340 - DNA, 635 bp, Homo sapiens
  misc_feature (1)...(635): n = a,t,c or g
ggcacgaggcagcgagcagcccagggagccaggccccagacaccgcactcagggccatggccgacaggggcccgtggagggtgggcgtggtgggctatggccgcctcggacagtccctcgtctcccgcctcttggctcagggaccagaacttggcctaaaacttgtttttgtctggaatcgtgacccaggacgaatggcagggagcgtgcccccttccctgcagctccagaaccttgctgcccttggggaaaggcgccctgatctggttgtggaagtggcccatcccaaaataatccatgaatctggggcacaaatcctgcgccatgccaatctcctggtggggtccccctcagctctaagtgaccagaccacagagcggcagtctttggaggcctcacagcactgggaccacgccgtgtttgtggcccgaggggccctgtgggncgcttgaggacatcaggagattggatgcagttgggggcctccggagccttcgtgtcaccatggccacacaccccgatggcttccggcttgagggacccctggctgcagccacagccctgggccttgcactgtgctctacgaaggccctgtccgtgggctctgccctttgccccgcgaaattccaacacca

SEQ ID NO: 7341 - DNA, 499 bp, Homo sapiens
  misc_feature (1)...(499): n = a,t,c or g
ggggacacagagtgagactccgtctcaaaaataaataagcaaacaaatataatggaatccttccatgcgctcccctctggtaccatcgctcttcgtctttgtctgaaggtaaccactgttttaaagttcatacttgtcatttctgcatacgtctttatactacatannnnnnnnnnnnnnnnnnnnnnnnnnnnnnnnnnnnnnnnnnnnnnnnnnnnnnnnnnnnnnnnnnnnnnnnnnnnnctgagacaacaagaacaatccctcctcttccncctcctcctcagggnaaacacangtgtaaagncgatgacgatgaagacntttcatgatgatccacttccaatttnaataaataggaaatanaattntccccttccctanggattttccctaagaggttcctttcnccaagcttaacttggggngacaatggagganataatacntattacntacggaatacgngggtttgggtttgggttttgggttttggaga

SEQ ID NO: 7342 - DNA, 212 bp, Homo sapiens
aggtaacctttatcaaaaggatggagttgggaaaaggaaaactactcaggactggactgaatgcgttgcatcaagcagtgcatccgatccatggccttgcctgggaccgatgggaatcaagttgtcctaactgatttgcggcttcacagtggagaggtaaaggcagacatcaacacccagggccgcattcactgtgcatgttgggacccagg

SEQ ID NO: 7343 - DNA, 304 bp, Homo sapiens
gccaccatggcgctgcctccaggcccagccgccctccggcacacactgctgctcctgccagcccttctgagctcaggttggggggagttggagccacaaatagatggtcagacctgggctgagcgggcacttcgggagaatgaacgccacgccttcacctgccgggtggcaggggggcctggcacccccagattggcctggtatctggatggacagctgcaggaggccagcaccttaagactgctgagcgtgggaggggaggccttctctggaggcaccagcaccttcactgtcactgcccatg

SEQ ID NO: 7344 - DNA, 384 bp, Homo sapiens
gattgacctcgatgggaaggagcgttctacccattttccttgttttcagtgctgcggtatcagtcagtgatctgaggaaatcctgtaggggaaggcaggctgcagtgaaaacaggagctggtgaaaccgagccctctgcatctgcgaatgtgccctaggtgctgctgctggggacatggatgccaagcggaggcctgcgtggcctccttgagcagcagctgaccgcccgtctcatgctggacgggacccctgggcgggtggacatgagaccactgttggccagggacgccgtgcggaggcctacgtggcctgcctgagcagcagctgaccgcccgtctcactgttgggccagggctttgtggccgtgggtgttttccagtctgc

SEQ ID NO: 7345 - DNA, 550 bp, Homo sapiens
atgtttcatgaatgccatccttcagtcactcagtaacattgagcagttttgctgttatttcaaagaactgcccgccgtggagttaaggaatgggaaaacagcaggaaggcggacataccacaccaggagccaaggggataacaatgtgtctttggtagaagagtttagaaagacactctgtgctttatggcaaggcagccagactgcatttagcccagagtccttattttatgttgtttggaagattatgccaaactttaggggctatcaacagcaggacgcccatgaattcatgcgctaccttttggaccacctacacttggaacttcagggcggtttcaacggtgtttcccgctcagcaattctgcaggagaattctactctgtctgcaagtaacaagtgttgcataaatggagcatctactgttggtcacggctatattcggaggcattctccaaaatgaggttaactgcctcatatgtgggacagaatctagaaagtttgatccattcctagacctttcattagatattccaagtcagttcagaat

SEQ ID NO: 7346 - DNA, 205 bp, Homo sapiens
acattttgtggaacattatggttcaaaatatttatcaaatgcaaagagctaagaagtggcaagatacttaaaacaacaacaaaaaaggaacacaatatagaaggattaattctttctggtatccttgtatcccagagttatttatttattatggaaggctattagtaattttaaaactgtggttctcgcacaaagggcacataat

SEQ ID NO: 7347 - DNA, 223 bp, Homo sapiens
ggcggagttttaaaatcttcttctaccacgaactctacccctgacaaacggtgagaaaataaatagaattgctagtcttcatcacacggaaaagagctagtgagctatttcgtttcctccctttttctgcccccttctcttttcccagcttcccatttatagccctgctttgcagagacagcaacagatactctagaagcaggatgaacatgagagtggattt

SEQ ID NO: 7348 - DNA, 211 bp, Homo sapiens
ttactcctatatgagaacagaatatcaatgcttcttgactacagtctcccctactgatacttaatgtgccaagttaaaatacttgcatagtggacaataaggcagcatggggatttcctattcctgtttcctgccaaattgacaggttgcattgcagcaggtgcacctcaaagtgattaagaatgtaagggctgacaaaacatgtgtgatg

SEQ ID NO: 7349 - DNA, 395 bp, Homo sapiens
tttttttactttaggagcttttatttattctgtaacacgtgagatctggtaagacagtggggggtaaggaaaacagacaagaccatgactcttctttccctcttccccaaaacgtgcctcttggaataatcttcagtgtgccctccagcagagccgaaatcaggcaggcatagactccctcctctctcatcaaaccgcagaaatagagttccttcatcataaccgcaaagcttcctcctcccctttgcaccctgcctcagctgcattttcttgtcgcttctacatgggagtgcttgctgttctgggaagagtggggagaagcggtgggaatccttgagccaattgaaactgaggtcatcttcaggaaaaccatgtcttcctgaagttgaaagatt

SEQ ID NO: 7350 - DNA, 291 bp, Homo sapiens
cagacttctttatgttttgcttgtgacagcagtacttggctatggcagttaaatggactgtaagatgttagcttgatttggagtaccctgagtagctgcacaggtagacaaagtacaaagatattgacagcttttttcttcctttagaagaataacatatctaaaacaactcttaaagcaagagagctgcagttgcacactaagaaaatactgcaatactgccatgacttggttataggtgatgctaacataaatgggatattctgtttctcattgcaccagtcatgcaga

SEQ ID NO: 7351 - DNA, 70 bp, Homo sapiens
tgtccctaaggtattttccactgggagtatttggttaaattgctgttttaaagttctttgaaataattgt

SEQ ID NO: 7352 - DNA, 279 bp, Homo sapiens
acatgcaaaaaatcattaaaatagcagtttgacacaatgtatttgacaatttcattttttcgtctctaagttatttcagaagtgaattcctgctttgaacactgaaaatgcaactctgaaagattcccaaaaccctgggatccagtcccaaacaaatcaggaaacaggctgttgggctttttttttttccttgtttccttgttttctcaattgccaatttgttttattatttgaggggaggagggagacaaagtcccaaaaataaaggccctgcttgtt

SEQ ID NO: 7353 - DNA, 375 bp, Homo sapiens
  misc_feature (1)...(375): n = a,t,c or g
atgataattctcctctgagttcagttgagcggtatgacccccgaagcaacaagtgggattatgtggcagcacttactactcccagaggtggagtgggaatcgcaacagtgatgggcaaaatctttgcagttggtggtcataatggcaatgcatacttaantacagtagaagcgtttganccagtgctgaataggtgggagcttgttggatctgtgtctcactgcagagctggagcaggagtagctgtgtgttcctgtttaactagccaaattcgaggatgtaggtcatggttccaataatgtggttgactgtatgtnaatttgagttctggccaccaacaatttagtcatatctgataggtacaaaaggaaacca

SEQ ID NO: 7354 - DNA, 2327 bp, Homo sapiens
  misc_feature (1)...(2327): n = a,t,c or g
tttttttttttttttgaaggttaattacacgggcctttttattccatctggaaaatacaaatattcacaagagtctgtacaaccttagggacaccagccctggccctgccctcagctgcatgccaccctcatatcccacccccatccccagcctcctgccccgacacccccaggctccctgctctggttgaagtattttctccaaggcaggaatgagtccttgatccaaccacagcatctattacaagtggatgtcaaacaccccatcctccaccgtctgtacctcctcctcacggatctctggaggcctggagcctcgcctgccagggcgggcaagagagaagctgaaggcgcggtgatggtggctgtgcatgggtgagggtgagggtgcagacccctccaggctcacactctggggccctgcgccgacactcaactgacaggcgatccttgcactgcttgtggcagttcactccacaggctcggcatttgaggccctgcttgtagatgcccaggatcagggctttgcagtggcggcaggcgacggggcgcaaggagttgctctcctggaagttgtgtacgaagcccatgcgcccccccaacacagagctggagcgcaggaaataggaaaccatctcctccctgctgatgcagccatcctggttctggtcgaggtccccaaaggcgctgaggtaagggaagttcccacggatgatctggaattcttcctgtgagatgtggccatccccatcgacgtcaaagttccggaacacagactccaccatcttctcgatgtgctccaccacgagggcctgatccagcttgggtttggcagccgaggtccactcctccagtaccgggggccggggtggtggggtgcaactcgtggggctggttggcgaggacttggagcgcggctcccgctgcagggacagctggtacagctcatcctccgtctgatactgatccagagacaccgtgagcaggctcagcaggtcggggttggcctgtactggtggccgcaggctggtcaccatggccagctcctccaggatgctaaagagctgcttcatcttggccccgttgagccgggtccgggctgggtccagccagtcaggcagtgccagctgcagggccaccaggtccttgaggtgcacacccaggatcgggaagcggaagcccacacaggctgccagccgacgccggtagttgccatagttgcctgtcgccgtcactagttccgtgagaccctcccagagcttgatggtctcagggctaacgtggctgtgggtctccttgaggcgggagatggagctgtggctcaggcccccgaccactgccatcagcgtgttgaagttctgcagctgtagcagcttctccgccacgtggacaaagtgtgtgatgaccagggcccgcctgcggggctgtgggtttgctgaggatcatgagctgcacccactgtgagacgctgttgaagagggagatgaaccgctccaggacggggttgtccacagtgcagccatgagtcacgaaactgtgatagtcctgaaacaggatcttgcagaaggagcgatactccaagtaggtgagatgctccgccagctccatgggctccaggtggtcaaacaacagggacatcttgcgctttttctgtcccacagggttccgctgagtcacctgccgcttccacttgtaggtagggacgctgtctatgtcgattaggctgctgtgccgtcggttcccttcttggtctagcagagccttcagctccttgatctgctcagccaactccgggttcaagtcaaactccgctgggaaggcggagatccagtacctgaccaggtggcacgttttcacctgcagggaattggagttgtccttccgggattgttggtagatgtggagcagcttggccgccagctgagaggaggggatgtaccaggggtgcatcatgaggaacatgcgcaccagctgcgggtcccgancccttcccggagtcatcgaaggcttcgatgcacccgcggagcagctcctccaccgtgcagcccttgtccaggtccagggtgcctgccatggccgccggcgcggggtgggctgggcccaggctgcgctccgggagcctcccaccgggctcggaccgaaccccgttcccatggggctaacccggcccgggaccgggcgtcttcctgcaggcagcgggtggcacaggcctagtggaggtcgggggcgtggggacagctggtccttgagatagtctgggggatgggctaggacaagatgggaatattttggggagagggacctgtggggagcgaggaatgaaatcg

SEQ ID NO: 7355 - DNA, 295 bp, Homo sapiens
ttgccacggccactccaaggcactgtccttttctatcagagaactggtacaagggggagggttgtagtgacagtcgccttcgatcctttgctactcgggtgtagatgaggtttttccttttggtttagttgtaggaagttcacgttaactggctttaggttccctgctcccagaccttggtgttttttcttgtaggaagtcagcacgaattggccttaagttccctgtctccagaccctattctcctgcctcacttctgtataagtcaataccatcttaaaacaaatctaacttt

SEQ ID NO: 7356 - DNA, 468 bp, Homo sapiens
  misc_feature (1)...(468): n = a,t,c or g
tgcatgatctaaggtagtggaaatggttgtggacaaactataaatgactaaactggatgattatctctcttggtctagtcattactgtggtgctagggttactttttacaatcttgttctaattttttttaacttcttgcatttcatcccagatcctggttcctatcctagttattaaggtaaaatagagaaccagaatagtttatcaggtatctgcattccttcaatatgaattataatggtacagatatggggataaaaggaatctttttctgctattaagtttatcagaaaagccccaatagttaaatatttgttttcagtagagggtataataagggaaaattatataacattatatgccaaataggaaactgatcttggttggaaataaagttgtaggaagaaaagctagccaattaagtggctgagtanganggggactgcctgtccggtgggcctcaaaac

SEQ ID NO: 7357 - DNA, 272 bp, Homo sapiens
  misc_feature (1)...(272): n = a,t,c or g
ttttttttttttttaggtcaagtttctgatctttaatgttgtcaattttttaaaactttcaaaaacttgtattggccaaacaaaaccatgtctgtggccgactggactagcggtggccatcttttaacggctgctagttacgtggtacttgtagaggctaagtgacttgggtgtgtggtaatattacatttagaacccactctctgagtttcttaatgtcaatgagagtgactttgggttatataganacaattttatattcataanttact

SEQ ID NO: 7358 - DNA, 339 bp, Homo sapiens
  misc_feature (1)...(339): n = a,t,c or g
ggaaagaaattgccaagttaatcacattggaacaagggaagaccctagctgatgctgaaggagatgtatttcgaggccttcctgtaaattttatttgcgatcatccggacatcaaagcaatcagctttgtgggatccaacaaggcaggagagtatatcttcgagagaggatcaagacatggcaagagggttcaagccaatatgggagccaagaaccatggggtagtcatgccagatgccaataaggaaaataccctgaaccagctggttggggcagcatttggagctgctggtnancgctgcatggctctttcaacagcannccttgtggtataagcca

SEQ ID NO: 7359 - DNA, 212 bp, Homo sapiens
gcggaagtgagtcggagctcctgcagcagaggggtggaacagctacacgaagatccgaagtcggccaaaaataacagcgctttccagatgagggagccagttgtccagcacagtgtcatgggacagtgggccctggtgccacaatgcccggcatctccaccagatacagctttgagatcttcatgatgaagcttgctccccattccaagggg

SEQ ID NO: 7360 - DNA, 827 bp, Homo sapiens
  misc_feature (1)...(827): n = a,t,c or g
aaatggtttatatttttagctaaattttcaggagtgaaaagaaaaagaggaaggaagaaacccctctcaggcaatcatgtacagccacccgaaacaatgaaatgtaatacattcataagacaagtgaaagaagagcatggcagacacacaggtttgcgctaagtgttgtctgtaacaaatatggcctacaatacttataaaaatgtcaacccacctgtttcaaacttggtatcccgcctaaatctttattcttctaggcttgtggtaattaatgagtataaatctttatcgcaactgtccactctattgtaatcccagcatatcaagataacttaggttggaatggtccattgcattcagtattaagaaaagatagacttctattaataaagacacagacaggcttgcctgagctcagaatccagcaatgtgtcacccctcacactgtgacccctgtaactgtagttctctgttctttaaagaaatagacattccactaacaacacatacaaactgtgacaagaagtgacaggggctgttatgtcaaagacttaagggtaatttttaaaaatcctcttaattcannnnnnnnnnnnnnnnnnnnnnnnnnnnnnnnnnnnnnnnnnnnnnnnnnnnnnnnnnnnnnnnnnnnnnnnnnnnnnnnnnnnnnnnnnnnnnnnnnnnnnnnnnnnnnggtattgaaatttaaaaagttacagttttatatgtttaaaaaagcctcttaattcatatagttattgtaagcagagaaattttcatttttactttttgtaacattttattcattgttacagctggccaaaaaa

SEQ ID NO: 7361 - DNA, 868 bp, Homo sapiens
ttttttttttttttggtacaagtaaagtagtataatccaaatttattatatctaagaggctatcatgggctgtaagtagaatcaaaggttaagaacattttatgcacttattccacaaacatttactgagcatactaggtgctgggagtgtgaccagtgagcaaaaaacacaagagtgtgcaaagagtgatcaaaatgtcaacccagtaagaacaggggaagagctgctgaggcccaagaggagacgactagttctaaagatgtgtggatttcacagcctggtctctggttttgagcctgattgcaatttgacatgactcttggcttaggaaatggtaatccctaataagacagggatgatattgatgtagaacttgacataagatctctattttcttgaaaagagcacaaggtttgttttaagtcctgaagtagctcaatctcttccttcaactgctgccacctttgttgagatgcatgaatttttttctctattgctgcttgaaaatttacaaatgtgtcttcgaacaatctacagtcaaaaagtgcactcccgatttcttcatagtctgattctgaagtagtctcatccatgagtttttctggaattgaatgaactttgtctaatatttcttcaagtaagtaattaagaagtcctgcttccttgcatttcttaagaaaaggaactttcacagttgcatctgtgtgtctgccatgctcttctttcacttgtcttatgaatgtattacatttcattgtttcgggtggctaggagagaaaatcaagattgcattacattgattttaatattgcataaaatgaaaaccagtcttttgctgtgcataactaaatgatatgcctacagtaa

SEQ ID NO: 7362 - DNA, 361 bp, Homo sapiens
tatgcactaaatgtgatttgtttagaaggtaaaattcttgcattactatattatgatttctttagaatgtataatttttgcattacatttattgtaacatttcaaagtttataaactgtcatggagattaatacagatgatgaatttgttttctgtaactcccttctgaagtacatattatcctcacattataaattaggcaactgaggttctaccaagatatttgaatttactaaggtttactcagccaataaagtaatttaaattttatatgtaactttagaggaaaacatattaatagaaaatgattatttaagaaaaaattcttgaactaggctttgattaaagagatcattgcagg

SEQ ID NO: 7363 - DNA, 1118 bp, Homo sapiens
  misc_feature (1)...(1118): n = a,t,c or g
tatacttaaattaaatagcatgatttaatttagttggtgcttaaccctgaatcctcttaagttaaaaaaaaagttataattaactattaacgttaatgaatttaaaccttccagaaagcatgaatccaaaaggaaatgtccaacaggtgatatgaaccagatattttatggcctttcctgtttcagtctcaaactttctaaacatcaatggggaaaaaaaattctctagagtttttcagttttattcttctagagcacaattttccggcctgttactgagtacggtcttctaacaggtacacaattaactcataagtagacaacacaatggcagtatttgggatccgccggataagctgggcaaacagtcctctataaaaggcgaggtagccttcttcctggaacaccaggcgcgccgtctggacaaaagacttgtacttggtgccctcttcccggagcctcgtccttataacttcgtgtggataagcaatgcaggaggcacagcccttagaaagagcagcagctgccataagtccaaaaaaacttgtggaatttttctcagtcccatttgcagaagaggctaatggagcttctttcagatacttctttaaactttcataaatagcaaagcagattatagtttcggaaattccagcatacgaggcagttaatcctctatagaagccacgaatgccttcggtctggtaaacgtaacgagcacactggagtgtattcatctgcttagagcccctcactttctgttctagctgcattcgggttttaaccatccatataggattcattaaggaatttgtgataaaagctgcagagccagctgagaaaatatgcacaatattgctgttaggcacgaaaatgccattaaattgctctttggctttggagtaacatgcaaagtatacagccttcagaacctgaaagagtccaggtgtcacggatgttggtctcaccattccagctccactaatggtccccagatgaacctgaggatagtagactgtccggagagctaatcttgaagactgcaaccgtgtcttaatgacttctagtggacaagtgaaaataanaccaactgtgcctccacacccgccggcgaagag

SEQ ID NO: 7364 - DNA, 172 bp, Homo sapiens
gagaaaacagggagcccaggagacagaagaacataaaaattcaaagcagtatgttcagctggagattcaagagcatatttatcatgctcataaagcaagaactgactgtgataaaaatgaataatcagagaataagaaagagttcttgaaaattaatcatatcgtataattt

SEQ ID NO: 7365 - DNA, 716 bp, Homo sapiens
gaacgtccagtttctttttcaccacctcccacctgcccaccgaaagtagccatttcccagcggcgtaagagcacctccttcctggaagcccaaactcaccacttccaacccctgctgaggactgttggccaaagtcttcttccacctggtggcagcccaactaactggacaccagaggccgtagttatgttgggtactacagccagtagagtaactggagagtcatgtgagatacaggtccatcctatgtttgaaccatctcaagtttacagtgactatagacctggactagtacttccagaagaagctcactattttattcctcaggaagcagtgtatgtagctggggtacattaccaggcccgggtggcagaacagtatgagggcattccatacaactcatcagtactgtcaagtcctatgaaacagatacctgaacagaagccagtacaagggggccctacttcaagttctgtctttgaatttccatctggacaggctttcctggtaggacaccttcagaatctaagattagattctggattgggtccgggatctcccctctctagtatttctgcacctatcagtacagatgctacacgtttgaaatttcaccctgtctttgttcctcattctggcgcctgctgtgttaacttcataacaatggagagcagaagcaacttgtgtatttgaatttccaagtttcacataccagg

SEQ ID NO: 7366 - DNA, 743 bp, Homo sapiens
  misc_feature (1)...(743): n = a,t,c or g
aaggaaaaataaaatatgaatcagagattgcaagactggaggaagataaagaagaactacgtaaccagctgcttaatgttgatctcacaaaagacagcaaacgagtggaacaacttgctcgagaaaaagtctatttgtgtcaaaaattaaaaggtttagaggctgaagtagcggaattaaaggctgaaaaggagaattctgaggctcaggtggaaaatgcccaaagaatacaggtgcggcagttggctgagatgcaggctacagtcagatccctggaggctgaaaaacaatcagctaatttacgggcagaacgtttggaaaaagagctacaatcaagcagtgaacaaaatacctttttaattaataaattgcataaagctgaacgagaaatnaatacattgtccagtaaagtaaaagaacttaaacattcaaacaaactggaaatnacagacatcaaactggagacagcaagagctaagagtgagctagaaagagaaaggaataagattcaaagtgaactggatggattacagtcagacaatgaaattctcaaagcagctgttgaacatcacaaagtgctcttagtagaaaaggatcgtgaattaatacgtaaagtacaagctgccaaagaagaaggttatcaaaaacttgtggtattacaagatgaaaagttagaactcgagaacagattagcagatttggagaaaatgaaagtggaacatgatgtctggaggcaatctgaa

SEQ ID NO: 7367 - DNA, 992 bp, Homo sapiens
tgcagttcgcggtacagtctctagtagagcgcgtgtatagaggcagagaggagtgaagtccacagttcctctcctccaagaggtagaaggggcgcggggaaacgacctggtatcggttttccgcttgctgatcaagagctccctttaatgccgcacgcaggccggcgcccctcactgataaacgattggggctgggcctcggcctggaggggttcgtcctctcagtgccctcagctcgtaaaggaggaaaccgaggcgtggggttgggcgagaacccaggggtcctcctgcacccccgccgccgtgtgtctcgtgttcagcgtggctggaagcgccttaagcctggcgcggtgtagttctgagtggaacttctgacactgcccttccttccccgtccagcctgccgaccatgccccgcgggggtgccaatgtccaactaccttgaaaatgttcgcagccagtctcctggccatgtgcgcaggggcagaagtggtgcacaggtactaccgaccggacctgacaatacctgaaattccaccaaagcgtggagaactcaaaacggagcttttgggactgaaagaaagaaaacacaaacctcaagtttctcaacaggaggaacttaaataactatgccaagaattctgtgaataatataagtcttaaatatgtatttcttaatttattgcatcaaactacttgtccttaagcacttagtctaatgctaactgcaagaggaggtgctcagtggatgtttagccgatacgttgaaatttaattacggtttgattgatatttcttgaaaactgccaaagcacatatcatcaaaccatttcatgaatatggtttggaagatgtttagtcttgaatataacgcgaaatagaatatttgtaagtctactatatgggttgtctttatttcatataaattaagaaattatttaaaactatgaactagtttcattaattgaatttgctaagtggagtatttctca

SEQ ID NO: 7368 - DNA, 545 bp, Homo sapiens
ttgctttattgctttatttcaaccccacctaggcccacaggatgcttgtgctaactgagggcacttcatagtcctgaggaccttgggctacttcctgcctccttgatgtcctctccatcccccctcccctaagccaggctattggagatgatggtgtcaccagctgctgggactacccacagggctgggtgtgagggaggagaggtcaccagatcctcaggtgtctcaggaggctgcagcatgggccacagccatgggaatgggctcctttcagactcggcacccatggcctgccctccttctcaggaagacacagaatgggggtaggcacacaaggcctgctgcatgtgcaagggaagtggaagaatcagatccaggtgtggtccctgcagcccctcctgtgcactgtactagtcttggaggggctggtttgtcttaaaaagcacaaggcattgaggacaatcccattttcctcatgataggtctaaacggtaccacctctaggaactgtgcctgtggacagttcctcatcaggatgtctggga

SEQ ID NO: 7369 - DNA, 382 bp, Homo sapiens
agaaacagttatgcagacggattttgctgttttaaactttagcatctttcctcagcatatagatcaaaagaaatatgtagaacttggatatgtatgtcttgttaatgaaaacaacatgtgcaacagaaaagccttctcaaagtctcaagtgtgggcaaacaacagcaggagagtctagaacactgcaggacaccagaaaaactcatttccaacaaagaatagtaaatagttttcacaaatgagacttgttcatgtggtgatggcttttaaaagtctggttccatcaaagcatagccatggaagaagctgtgtaatttttcattacaggagaattctacttgaagccatctgatccagttaagaaatctggggatgatttgat

SEQ ID NO: 7370 - DNA, 578 bp, Homo sapiens
gatttgcatatcctagggctaatacttgccgttcattatcatgcatgtactatcattttttcaacatctggttagctcccttatgttacctttctgaatcctataggcaattatttacatttctgagccctagaattgggcagcacagactaaatatgcatctttccctacagaaaagactgttcaaataattgaagtccactgtgtctttggtcctctttttgtaaggtaataagtttcagttccttctagtgccatcactgctctgcacatccctttaattgtctaggcctcttttaaaacatagtactcaggaattggaacacagtggtggagagttggggattcacagactcccattattcttttcaactctaaagttaccgttttttcttttttttctttttcttttcagagtccgataaaccttaaatgttgagtagatcgggtggatattttctgttttgtctgcacagtgtccttttcctcggggcatagcactctcctcttctctgggacctgctcctctccaggtcccactctgggaattgctaactgcttgttagcaattctctctc

SEQ ID NO: 7371 - DNA, 424 bp, Homo sapiens
caaatctgtggattgtagtagggacttatggtgcctcttctgggtccccgtgggacaaattggcagccactttcctcctctctgaggtccataaaagccctgggctcagccagagcagggcagaggatggccagaggacaaagagggcagagaggtggtgggatgaccagctgcagagaggagtactctctgctgatagctggagacaatgggatggctggctgcagagaagagctaccttctccactgagagctgcagagacaacctgccagcagagagaagccaccctttccagggcctcctctccactgagaactgagcactggacagatgacctgcctacagagaggagctacccactgtgggcctcctctgagctgttctagcactaaataaagctcttcttcatcttgttcacccttc

SEQ ID NO: 7372 - DNA, 830 bp, Homo sapiens
gctcgacgttcaggtgcagtttattcaactgatgtgtgtgtttgaaaaataagacgaaaacataatgctttatttgaataaactttaataaaacaatatataatgtatggacataaggaaacctaagtcctcggggattataggggaaaccaaggcatgaggttacctaacaaggaaccttagaacataatcttacctggctcagtacaagtaggagagaatggtagcaggtgaatgggcagtgagcatggacctgaggagaaatgaatttgcctaactttcttgctaaataaatgtgcttttggatgctgacatcgagagagtggtgtgtgaagtaccataaatatttgctttattgtctgcgcggtgtgactgcattctgctcatttgcaggtgggcaatgggcactccaatgaggcagccttgatcctccacagaaaagggtttgattgtcggttctctagcaaaggcacagggctgttttgttctactactcagggaaagatattggtacagaaacttttaaacaagtttattgtcgaaagtctcacaccttcatcactatccttgatgcattcacctcccggcactcagaatataagtgagatcaacttgagtccaatggaaatcagcacattccgaatccagttgaggtgaacctgactttcacatttggattgagaatcattggcttttatacctttcttggtttgacgtgcaataaagaagcacattattttagcttctggctactgtgagaacatgaattctgtgattctgtgggttttttcttttttcttttaccagtacagtaagaaaaaaaaaaaaaa

SEQ ID NO: 7373 - DNA, 895 bp, Homo sapiens
ccgggcttgtggtgacgaaagcagttgccatggagttgctctgagtaaccctgaggcagtgggacgccaagactggagaggaagcgactgcggtggagtatttccattttaaccgggaaacaatccctgaacccacaggaatgaatgcctaatggtggagtttcagccatcagtgacaggctgaacccagactcccaggggcacctgcttgcacctttgaatgatggcctgaactatgaacaaacgggactatatgaacacttcggtacaggagccccctcttgactactccttcagaagcatccacgtcattcaagatctggtaaatgaggagccaaggacaggactacgaccactgaagcgttcaaagtcggggaaatcactgacccagtccctgtggctgaataacaatgttctcaatgatctgagagacttcaaccaggtggcttcacagctgttggagcacccagagaacctggcctggttcgacctgtcctttaatgacctgacttccattgaccctgtcctaacaactttcttcaacctggagtgtcctctatcttcacggcaacagcatccagcgcctgggggaggtgaataagctggctgtccttcctcggctccgtagcctgacactccatgggaaccccatggaggaagagaaagggtataggcaatatgtgctgtgcaccctgtcccgtatcaccacgttcgacttcagtggggtcaccaaagcagaccgcaccacagctgaagtctggaaacgcatgaacatcaagcccaagaaggcctgggaccaagcagaatacactttgagggttcccacggaccctagtagtcctaaaggcctaagcatagacagcatggtttgacaataaataattttgagctgttg

SEQ ID NO: 7374 - DNA, 341 bp, Homo sapiens
cagtcgtgctggaaagaaaagcagaacggaatcacaggataaagagtacagggcagctgtatttgctgagacgtggaaattttccggtgtattctaagtaataaagtgcagaagagtgtgagtagggctgtgtgtatgtggtatgtgtgtttgcatctctggaagtggttgcttcttaggatggtcactgtgggactaggagtggaggagagaaagaaaacttgcttttcaccgtactagaatcttctgcaccttttgaattttgccgtttatactatgtctttacctgtaaagaaaaaagaactttgaaataaagttgcatttgcttgaaaaataaaaaa

SEQ ID NO: 7375 - DNA, 283 bp, Homo sapiens
ctcctgctgctgcaatctgttgatggaaggtttttgaaacagaggagcctgctctctggcaaccaggatggacaaatgagctgggacctgcgcccctctgccctaatcaactcgccccatgtccagctcagctgcagaatgggcatgaactcctgaagacagcaggaaaaggagtacgcccttgtgtggctgccaagcaggggaatttcacagcaaatattcactaaggaacttatttttctgtttcacaaatgactaatactcagagaagttatactatgtg

SEQ ID NO: 7376 - DNA, 260 bp, Homo sapiens
cggaagctggagccacctgcggccctgaccctctattctgcaccctgtgagccaccgagactgaaccaaacccaggaagcggcgccaccaaccagcctcgcagaggcagaggccctggagcagtgacagcacaggagatctgctggctcgggggaaggggaggaaagaggaaaacaaagggagtgatcgagtgagcctcgccccgccctccctgcgccggcccatgatgtgtcaagtcagaggcgcggcaaggaccagag

SEQ ID NO: 7377 - DNA, 509 bp, Homo sapiens
taaatactgttttgtcttttttttttttcctggttataaaatgcttacagatattttgtccttagagttatacctatccctcacaaataacctgaaacataaatataataacagagtatgtcacaaagataggaaattcctggtgattccagagaaactggaatctctagtttgtaaggaaaatagtctctatctttggcttctttggcttgtaaagtgcttggtattatacagattgtccccagtttgttgactcctattatgacttgaacctgctctagaaaggcttttgccccccattactccaaggaaactgcagtgatcaaggttgcaaattacctcgtctttttaaaatcaagcatcattttccagtcttcattttactggggcttatcagcagcatttaatatggttaatcaccttcttttccttcaagtactttgtttattttggcatcctagggacattatggctcacttgggtttttctcgtatctgtctttcttgcct

SEQ ID NO: 7378 - DNA, 442 bp, Homo sapiens
  misc_feature (1)...(442): n = a,t,c or g
anaccnctttgacatgcntacgaatttaatacnnnnnnnnnnnnnnnnnnnnnnnnnnnnnnnnnnnnnnnnnggcacgagcaggcctcttctcagtttagaaaatttgggcactacaactacagtccagctgttgcaggaggtggctagccgattcagcaagctgtgttacctcattggtcagcatggagcctcattgagcagcttccttcatggggtaaaggaagccaggagtttggtcatcctgaagcattcaagtctcttcttggatagttatacagagtattgcacatctattacaaatttcctggttatgggaggattccagcttcttgctaagcctgccattgatttcctaaataaaaaccaagagctgttgcaagatttgcagaagtgaatgacgaaaacactcagttgatggaaatactgaatactttgtttt

SEQ ID NO: 7379 - DNA, 248 bp, Homo sapiens
  misc_feature (1)...(248): n = a,t,c or g
attttgtttttctnttgttttacaatgaattcttaactccgagattcatgtatctcgaagtggtgggcaaccacagctggagacctcagtcnnnnnnnnnnnnnnnnnnnnnnnnnnnnnnnnnnnnnnnnnnnnnnnnnnnnnnnnnnnnnnnnnnnnnnnnnnnnnnnnnnnnnnnnnnnnnnnnnnnnnnnnnnnnnnnnnnnnnnnnnnnnnnnnnnnnnnnnnnnnnnnnnnnnnnnnnncct

SEQ ID NO: 7380 - DNA, 633 bp, Homo sapiens
  misc_feature (1)...(633): n = a,t,c or g
tttctgtaccatctaaaccccctaaaaataatcttgaaacctagtgaaggaacttgagtcactagtgacagtcggttgttgggatagcttgtgaaggctggtggatccatttggttgtagctaatggcgtgaaagaattattaaagttttaaggtttttaataggagtttggaagaaaccttagaacctatgaagtctaatcttgacccaaatagctgtttcttctaaatatctcttgtcagatggtcatctggtttacattcaatttcttttatataaagattttcactgtgttgcccaggctggtccgtgaactactgggctcctcctgccttggcctcccaaaacttcgatagcnnnnnnnnnnnnnnnnnnnnnnnnnnnnnnnnnnnnnnnnnnnnnnnnnnnnnnnnnnnnnnnnttccgtttctagtgttaatacttatgtctgcattagaagaaattatagtgagcttgcctaccaaattgttgaagatctgagaaaggcaccaaggcaacaaaattggaatctcagaacatctcagcagtatgcaacagggatagaatataacaggatgacctttttttcttttttataaagaatatttttaaagttgtgaacaaggatgtgtc

SEQ ID NO: 7381 - DNA, 315 bp, Homo sapiens
  misc_feature (1)...(315): n = a,t,c or g
ctttttatgaaaaaagtagaattttttaaagagcagagaaaagcacaatgaagacagaaagatcacctgtatattcttattgaccaaagatgatctatttggggtaaatccttttttttttttttgagacgnnnnnnnnnnnnnnnnnnnnnnnnnnnnnnnnnnnnnnnnnnnnnnnnnnnnnnnnnnnnnnnnnnnnnnnnnnnnnnnnnnnnnnnnnnnnnnnnnnnnnnnnnnnnnnnnnnnngattacagggcatgcaccaccacggcccggctaattttgtatttttaataggggacagggtttctcca

SEQ ID NO: 7382 - DNA, 257 bp, Homo sapiens
ctagttactatgttttaaatagctccagcccccaacacggtggttcagatttcagttaggacagtttattaactgtgcaatttcataaagcacaaagtttgcttctagcttgttataccacaaatcactttataaataacagacgtgcatcacgatctctaaccagtcattctcttcctcttaaagcctgttggtgactggtcacttaacatctgctcttcagtttatgcacagacagcaaggcgtgtagtttgtgt

SEQ ID NO: 7383 - DNA, 466 bp, Homo sapiens
gtcttttggcatgtgtgcccaattagaatactaaagcaagtcccaagcaccatttttctcttctcacgtttctaataagtgttagggactttgcctcttttacttaccacgtccccaaaagtgtcaggtagacatgtcacaaatggctctgtagagagccatgggaagagagaggaggtggatgtggaacataaagggttcagaaactccagaagaggagtgggttttggatagaagcatttgaggacagctgctccaaagccttatgtgtatgatgaaacttaaccacggggaagagactcttcagtagcctgttctgtctggtgatttttattttaagtgaacctttggatctatctttaactctctttattgtgagtctaaattccaattctgcagcagatcagtaaactcacagtatttttcctgtggaaatctattcaataaggaaaccaagacaggataa

SEQ ID NO: 7384 - DNA, 830 bp, Homo sapiens
  misc_feature (1)...(830): n = a,t,c or g
agatattatagagaaatcttaaatgtatgagtaaccttttctgaaaaacaaaagtgggatgaaatatattggtaaaagtatccacttatcttgattattttcattttacaacatacctctgtgtacctttgtgttttattttgcaatctataaagaacttgtccataatcacacagttatcttttcaatattgagatactgtgttttttaaaaatcagtagaggtattttacttaagcattggccaagaagaatgtttaccacatatacagtttatattctttcatgctacaatatttataatcggccgannnnnnnnnnnnnnnnnnnnnnnnnnnnnnnnnnnnnnnnnnnnnnnccaggagttcaagtgtatacatatatgtatgcaggtgtggtggcacacaagcgtgtagtcccaagtagctggaactaatagcgtgcgccacccacgcccagctaattttgtatttaaccctttcttaaactgtgaatacatgtgcactcaacatcctattttgtatacatagaaagcatggtaaaaatattgaatatttcttttacacaagtgatttgctgtatgttgagcagctctctgggaggtcagattatttacccacaggaagtggattgagtaggaataagtttacttcacagatatactaactactctttttcaccctataacatgttttgttttcttctcaacctatcaagcagatcttttcatgcttttccatggaagagccagtaatggtagtgaagaatcacaaatttccctggatctcttgcctgaagcagttcttcataaagactcttgtttcgtaccga

SEQ ID NO: 7385 - DNA, 426 bp, Homo sapiens
gaataagagttttacgatccatgttattgaagtaggtaaatggaatctcttatgtggaattctcggtcagggaccagctcaaaggctgtccctttttaaatttatttcctgggtcttctcctggcctcttccctgcactcggtggagatgcctgccccatggttttcagtagcgttggctcttagctgttccgttctggggaaggattggttgttttccttttctccatgtgtgttgtgaatttcattctgtgtcaccgcatcacgcgaggtgggtagggaagagaacttttacgctccccgctgtcgttagtggcctgattacgagtctggccgggagctggcggagaccaggatttctcctcgccgccgttgctgttgttaggggaaacagaccatctgcatctagacctgcctctctctccgc

SEQ ID NO: 7386 - DNA, 977 bp, Homo sapiens
tttttttcagaaattaaaacatttattacatgaagaagaacggaatggggatggccaggttgccggcctgggtggggaggctgggggcgggcagggcagggggaatggggtccattcgacctccccgagggcaacgtccacagctgtagccgagaaaagggcaaatgcacgagggcccaggcccatgcccagctcggggtgaaggcggggcactcaggctggtggggcagggggcgccctctctctgccccttcccaacttaaataggcataaataaaaagcgtccagaccctcaggccaacagaggctgccctgcccagccccgttccgcaggctaacactagtgccggtcatcagtcggtgggccagccggccaggaagaggccaccccaggaagggggccggtcccaggccacggaggtagttggagtcagtgtccggggcggcctggccctcacagcacgatccacgtatatcgctcgctgtccgccagaaccttcagggagcaccctttgtgcagcgcctcattggtcatcctgttgacgtagcggccgctgctctccggcaccagccacttcatgaccatgtccacgcagctcttgcggtaggagctccagacactgccgctggtctgccctttgacctcagtcaggtcgcctacactgactgtctcgaagatccctgtgttgaggtcccatgccaccttgaggctggtgtgataggtctttggtcggagctggccctcctcagtgggggacgggaaggccaggagcagcaggccaatgttgatgaggacctggttggtttctgggcagacctccagaatgacgatgtcatagtcgctgaaagaacagaactgatggccccaggtagcgtcgtggcggatgacctcattgataacatattcgaagtctagtgtgagctgctccactgtcaggtactggccctggacagcagtccgctcccgcatgggccgc

SEQ ID NO: 7387 - DNA, 610 bp, Homo sapiens
  misc_feature (1)...(610): n = a,t,c or g
tggagatctgagtgccaaaacaattcttgatgtaactttgtacatatcttctactaccgttgggggctcttggggttagaggtgggggcggctctgtgggccattgctcccctccacctctcaaaagaccttacagtatttcacagtatctctacccgcacgcgagtattacagtatctagctggaatatccccctacagccccccaggaccctatgaggaagggaaggagccagggagagtgaagtaaggtctgggactggggaggtgggatctgaatgaactcatttgcatatcatttgcatcctccgcttggcagccgctttctacaaactcattcactggagtctgggtcccaatcagccgggtccaggactcctctcacacagacacatctccgggaggctgggcctcctgaaaagtgtttgcttggggtgtctgtgtaacaacccctccctattcatatttnttggggaccccctacccagccagccagggtgatctgaaaggtatactttgctagctcagtgagctagttcactcaccatgttggtgagcagagagccacaactttccccatttttaccctggggaaacttcaattccaacca

SEQ ID NO: 7388 - DNA, 405 bp, Homo sapiens
atcaggttatcagaggcattagtcccttaactttaaaatagaataatatttaatagtctaaaagtaatttagattagaacaaattaacaatgagtataaaaaatgtttctgttcagcctgctatgagagttgggcattttacattcaaatcaccccacacgtggcagaaaactgtttccttacagtggccattaacccaaaggaagaacaggaaagttggaggacgctggtgttccttcctcatctctgccatagagacagtaccattggggctttcacgcaaagccatgtgagcagtgacggcctatcctctttttgtagacgcagaagttacactgtctactagcagaatcaccatcacaattccacccagacctcttagaagggtcagagtttctggaaatc

SEQ ID NO: 7389 - DNA, 45 bp, Homo sapiens
caggctgttcctagatatttgatatatgacataattaaattcaat

SEQ ID NO: 7390 - DNA, 697 bp, Homo sapiens
ggaaatttctttcttacttgagtatcatgctctaaaaaacttggcttcagtcacagaaacgctggctctcctgtgcttatattgaagccaactgcctttaattcttgggccctcttatatttttaaggtgcaaaatttgaagtctcagtcaccagacacaggttctatacaattaatgatgagctggagaagtaatatgtagctaatttttcaaaagcattgaatatactttccggaaagaaaacagaaattaaatattgccacatcttgccagaatcccatctgacaccttaactttgtcaggtttcctacaacttgctaatcaagttttatacattctaaatctccccagtttctttggggctggaagatgcaacttccatttaatagaaactttgaaatcttggggtaagggagcagtggggggactagggagaaggataagaaatagaattattgaaaagcccccaccagggaccttcctggccagaatatgcagagtaattcctgctggcttcacctttgaaagtccctcgaaactatgcagatgaaactgagtctgtttttgatattgtcagatgtattctaccttggaagtcccaacacctaaactggaattcttgtatttacatctcctccactgtcccccacaccacccctcaattcctgctgcccctgctaatgttaagcatttttc

SEQ ID NO: 7391 - DNA, 1082 bp, Homo sapiens
  misc_feature (1)...(1082): n = a,t,c or g
tacattccaacccactggaagtctttagaggtattttgatttaaagtatacttaaattaggatttcttaaagaaaacatagggagaaaactttacatgcaattaaaaatggactttcctgtgatttgtttttaatcattcatttggagaagaggcatgacctttgtatttcactaagtttaaagcaagagcaactgatgattaaatgttgctttttaataaggtttttaacttgaaaatttgaaaatatttaatgttgaaagacttcaattagggctattagagttatatctccctgtcgtaggcagcttcttcggagaagtgaaatataacattactcagtggacggagaagtctgttttgttacagagacatgcctctcagaaggtcaggaggttttgagtacctatccttgccacccatacaggaaatccaaagtttggtgnnnnnnnnnnnnnnnnnnnnnnnnnnnnnnnnnnnnnnnnnaaacccctctcactccctccctccctctctccttcccctatttgcaatcatattctccctctgcttcttttctcttctgccctccttgtgggcagtcatgaaaatcaattcagactgtgttcattagcagatttattattctattgagaaagcactggaatgttttgtgagattatttttatatgaaggaatagcctgaactcaaacagatggtaagaatagtacaaacaccttagcacatcactgcacacacagtattctgaaaggagatttgacacttaattcccattttcttaaaataacagttttgttgacttaaaaatatgagatacataggatgtgaaaaaaaatgtttgcagtactcagcaaaaaatagggtacataaagcagggtggctgtccatccactgattctggggtgagaagcgatttctacctcgcaagagtgactagaaagtttctaggagcacctccaggcttgcaaagaaagtgaggcctcttggtatcctttcctcagtgtgtatatgacagccagtataatcaataccctaggttatgcgtctatatgatactcatctgtgaatattattggttttgt

SEQ ID NO: 7392 - DNA, 331 bp, Homo sapiens
  misc_feature (1)...(331): n = a,t,c or g
tcaaccacaagaacaaagctgtgcagaagcctgaacctggagcttctgcaagatgaggtggggaatgagctaacccagctggaaagcagcctgctgatccctgggagagacggcgcttgggccaacccaccctccccaaggtggtcccctgcctcagctccacccgcttccccagatgaacttctttctctccctccagcgcttcagaggatgcacagctgtgtgtacttgaccctgagcctgggctagtgctggggacatagccagtctggctgatacccatattcagtacagaaaggtgncctnacccacttnatgcactagttgcatt

SEQ ID NO: 7393 - DNA, 413 bp, Homo sapiens
gagagaagacctcatcctgagtcttcgcgctgtgctggcttctacaccacgatttgctgagtttctgctgcccctgttgattgagaaagtggattctgaggttctgagtgccaagttggattctctacagactctgaatgcttgctgtgctgtgtatggacagaaggaactgaaggacttcctccccagcctttgggcttctatccgcagagaggtgttccagacggcaagtgagcgggtggaggcagagggcctggcggccctccactccctgactgcgtgtttgtctcgctctgtgctgagggctgatgctgaggacctccttgactccttccttagcaacattctacagggtaatggggccgtggcagcccaggaaggggagtgagcacaatagaaacgacattccttgc

SEQ ID NO: 7394 - DNA, 488 bp, Homo sapiens
ggtgggaggatagcttgaggccaggaattccagaagcaatgtggaaaggacactagggaatgtaggttctagtctttatccaagctctttgacttcaagcaaatcacatttttctcctggaccttacattcttttttctcattgcccttagtaccttctgtctgacttcaaccccacatctgcttgacaagaattaactcaaatatctcttcttaacacctacctgattctggcatacagtaagtgcttataaatatatgttaaatgggtgagaacctttcccttaggtctgtggtactttcactgggcttgtatatctaccactccatttaaaactctacttacagctttttaagaaaatgtatttctaagccaggcacaagtggctcatgcctacatttccagcaagtttgggaggctgaggtgggtggattttgtgcttggaaattcgagaccagtctaggcaacgtgtgcaaaaccccatctct

SEQ ID NO: 7395 - DNA, 1201 bp, Homo sapiens
ttttactgaatgaatattttttgaatatacaaagacacggaccctgtgcccgcgcccccgccacacacagcgaaaacaggtttctacattgtaaacacaacctccgtgtagaccccaacccccaaaaaggcaagacaacggcgtagccaaacagattggtcattattgtacacatagctggaagggaggggtggtcccggggtaaggacagggctgcccaatatttggggggaggaagggactcttcttccaaatgggcttgtccgggaaccggggtcccggggagctgggcgcctggtccacatggaccccctccacctccccacatacgctgtggaagaagggcaggagctagaaatgctgggggaggacgaccctttggtctgagatgtggaggtgatcataacagttcccgcccgctggctgttttgttgactttggagaggccttcccggaacccagagtccgtcattacttgctccatctgaacatcctcctcgtcctcctgggggcagctgcaggtacgggttgtttcctgtgggctggaacttgtagcccgtgagcacgaagaaggccagggtggagccctccaccaagagctggtacagccactgccactgaaagggcacagccacctgcagcaggatggcgatgatgcgggtgaagtagacgtagcagatgacctgcaggggcgcacaaggcgtgggggcaggacatgacatagtaatgccggaacagcttcagcttggccaggttcactgccaccttcccgtctgtgccagacgcatcctggagatgccggatggaccagactacggggaacaggatggcaccacagcagatgaggtccaccaggaacaaaatctccttccacagcacgtagtcgctggcgccttctcgcgggactcgatgatgatgtagccacgttggccaggacctgcatggggatcacgatcccaaagaccttcttctccttatccgacaggacgtacttgatgaagcccagcctgagccaatcagggcgatggtgatgaagaggagggcgcccttcagcaggtgtgcgatgtagtacatgacggcaaggccttcgatggggtggccctggctgttgatgaagtagtagttgatgctgtggaagaggagagagatgctcttggtgaagaacttttacattccagttgagctcccagcaacatttcaa

SEQ ID NO: 7396 - DNA, 506 bp, Homo sapiens
  misc_feature (1)...(506): n = a,t,c or g
aaatgactctaatctggagacatttgctgagacccttgtgcctggtcacttccgctcccaggatccttgagatgcatcctttcctgagcctaggtacttcccggacatcagtaaccaagctcagtcttcatacaaagcccagaatgcctccatgtgacttcatgcctgaaagataccagtcccttggctacaaccgtgtcctggaaatccacaaggaacatctttctcctgtggtgacggcatatttccagaaacccctgctgctccaccaggggcacatggagtggctctttgatgctgaaggaaacagatacctggattttttttccgggattgttactggtcagtgttgggcattgccaccccaaaggtgaaatgcagtggcacaaaagcagctcggccgnctgtggatnacaagcaccntcttnttccaccttccaatgcatgattatgcagagaagcttgncgcatttnttcctgaggcttttaaggtcattttttggtga

SEQ ID NO: 7397 - DNA, 338 bp, Homo sapiens
gagtttttaaatgttgaacacctccaacaaaatatgcttcctggacttccaactcaatgcatggaaagtgacatcttcatgatctccttaccccttgcccaaccacccttgccttcttgaattgcctttatatgttagtaaaactagtgggttctgtctcaaacttgcttatacatggagttacttttgagtcctctcctccatcctaggcttgcataaatccaactcatgctttgaattcgtattgacactgtcctaggctcaggacctagttaggctttcacgaggattattggcattaggcttgttaggccgtcctccttcccctggccaccttt

SEQ ID NO: 7398 - DNA, 334 bp, Homo sapiens
caaagaggagacaccatatatatttttggaatgaatgaaacagaagcttagagtcagagattgtgggtttggatgccaactctgtatcccactgacaatttttccgagcctcagtttgctcatctcatcagtaaaatggggaatgtacacttccctcacagggtggctgtgagattaaagtaagaagacacctttggaaatgctagtttgctgcagatttggctagtacctggaattcagcaggcactcagtccttatttcctgtttcaggtgataaccagagagaaagcctctacttcaggagactacatctcattgtgccttttgcttcttc

SEQ ID NO: 7399 - DNA, 573 bp, Homo sapiens
ggtggcggcttgaaggatgctccttgtgcttctccttatggtctctgctaatatgtgggcttgaatgtttgctcttcccactgccttcatcagaagagctgtgtctttctgaagaagaaacttttattttcattttcagttcttctttactggcgcttttatcagtgggtggtattggaatccgtaatttcagtgacccactcttttcctttttatctgccatgtatttttcagtatttgcgataggtattttcattttaatgggagaagtaacagaactgctgctggctgcctgtgactgcccttgtttgtgctgctgttctacctgggcagctatataatgatcccttacatcgagatcaagagtttctagtttacgcttttctctatatttatctaaagacattttctgaggaattattcctggagtagtggaaattggcccatggtgtttactgctccctgctttatgagtatattcttgcttaacagaagaatgatctgaaattttgtcaggtctgtgatgtaatcctgaatgcagtgatatagaaggtccctgctggaagttgatgt

SEQ ID NO: 7400 - DNA, 364 bp, Homo sapiens
gctttggtcccaactggctgtgcctataggcttgtcactaggagaacatttgtgttaattgcactgtgctctgtcaaggaaactttgatttatagctggggtgcacaaataattggttgccggtcgcacatggattcgggaagaactttgccttcctgaatctttttccctgcactacgaggaagagcttctctgcagaatgtccaaacaaagatcgacacattgattccagctgttcgtccttcatcaagacggaaccttccagcccagcctccctgacggacagcgtcaaccaccacagccctggtggctcttcagacgccagtgggagctacagttcaaccatgaatggccatcagaacgg

SEQ ID NO: 7401 - DNA, 281 bp, Homo sapiens
tggaagatgaatctctggtttctcccggggatgatgtttgttttttctgtttggctgctatggccaaagtggatgcagtagccgcaggttccaaagggtcttgggcaggaggtcagggttctttggtgattctgtgctgatcctgaactttggggaaaaagtccctaatgggcagtcagtactatccagggttgctgagaaagggaaaggggaatgcctcaggccctggctggagcagccttctcagatacaaagggagattagtctccgggttgtccctg

SEQ ID NO: 7402 - DNA, 6136 bp, Homo sapiens
atgttatgttcgtttattgttgtaacattttgttttgaacatcaaacactgcaccaaaatattagccattcatcttgcaacaattgctttactgtaactaagagtactgtactgatgatgtttacaattaactttggacaacttaaaacttattagtgacattgctgtctaataatcaaatacttcatcataggctgaacataattattaaaagagcaaagtttcccctccctttcttactttcaaacaaaaccaaaagagtagttttcatctggaaagagcacttacttcagggaaagactcaatttttaaccagttttattaaaccctggaaggctctacaacacgggaaaacatcgaaattccccggaaggtctgtttttgccaacttgtaaaaagtgaaagagctgacttccttgtttattctttaaagggttggcctgcacctgcagtgccaactgtggaagggctgtgtgcaggccccacagttgcaggggctgttccgggccagcgcttcccagtcatccaatctcctttgtccctcggttgttctgtgactttgagcagctttcattttaggacatcccatttttaagttttttctttttccagttgaaaactatgcagatgtttttagacagagcaaaacacaacacagtacccaaaaacggaggcagcctgcatgctccaggtctacacgagcacctcacagcctgacaaggggcagacagcaactcacacgggacgagcttcagcacacagacagcaaagcaaatacgagacttagactgaactgcaaacagggaaagggccatttcaccaatggagtaactgagagaataatgacttagagcccaatctgcctgccatctccctgagccgtcacccgtcactgaagatagcgcgagggtgatgcttcaactcaccatcctaagggtttgtgtacaaacacactcgagggcatctctttcacagaaagaacaaatgtcatttgtaccaaatggcaatggattttcagcacaaacttaatactttcctaacactacagcaatagtaatcatctactttcagcaagagggactcctttaaacaaggaaagactcacattaattagcctatgtacccactggatcaatctgcagcaacaaagtctagtgctagcagacacagggacagagggaccagctgccctcaacacagggccaggagagccgggtcctagactgaaccctctaagaaggcccatgtgtccaaagagaagagctgtcaagaaaaagaaactagtcaaaaactctttaaaggacaacctaaaaaggattaaagatgtatattaagatttttcagtaccatacatatgcaaagaagtcctactataagctcagttaaacacacaaagctctcattcttcctctaaatagaaggtagtcaagaggacacacagatggcatctatgaaataaggtggctgcatggctgctgtactagaattcacaaactgggaagaacttcatataaacagaacccaggatccctaacctactgtagataaataaactcattaaacaattagtccttatcaactatttaagctgggggaagctttgcatgggagaaggctcatgtggtcccttctctgggaacatgagccttcctaggttttgccactgagaactgtgtttaggggatttcaacattgtctctgcatccgacaagcactaggaaaatggctgaaatcagtcagggactttcaactctccaatctggaaaaataaccacccctatttctctatctctagatcagcattattttaggtgaagcaaactaaaacatgtagaggttccactacaacggcaggggcatgaagagttggccacgagaccaccccgagcgccaagcctgtatctgcagatccctctctgctcaggaaccaccacgtcctgtgttctcgccaatggagaccaagacctggggttggttctgggctcctgacagttctcttgatgttaagagtgcagctctgtcaacactcagcataccaaaagctctggagcagcttatggcacacctttccctggtgccatctcttcagacacgatgtgagctcattacaaccgcatcagtaaatggagctaccatgtatattttagtgaaaatacataggcacccgtgtccccatggggtctcacagggctaggctggggacactgctcggggggcagtctgctccataggagctccaagacccctctttgacgctgcttccacgggcccgattacagggtgtgatcccaaaagccaaagtcacacactgctggccagtgcctttaagcaagcttcactgtgcttccctgacaaatctgaatcacagaattttagaaatcctgtcccaaggcaagatgctttccaaaggcccacaccaggcagcaagcagagggattcagcgctcttcccaggaccccactcaaccgcctatctgcatttcggaggcctccctaaaagcagagttgttgggggcggggcggggtttggtctgttttaagacccaccttcccacttttattacagacatcaaatatatacttgtgagacctgttcttctggtgaggactaagaaattaagggctcgtggagttggcacagatgagaggaggatgctctgtggggatctttccccaaagagggccaggtttatgggactgggctcagtggctctggtgcatgggccctgcaggggcgggggtcctgcccaacttggcccactggagcagctgaccccttcagtgtagcaggaaatgaggcgaccagagaagaaacgtgcacaggcagcttcagccagcatcactgactgggcccgcagcagttcagggaccctgacatctgaagacagccctggttacagaagccacctcaactgcccagtggaaactggaacacttcactgtgtgcagtgttttggtccactcttttttagctgcttttttcttcctttaaaatgatgcaatggaaggaggccccagctcacagcaggaaacatgtgtgcgacccacaaaggagggatcccaggcctccagccccaggcccagttcctcccttctccttccaggagctgagctgcagacctgccgagcctgagcagctggcctgggaaggcaaaggaggatggcgggaccagctccagaagcacccgtccccgctggggaaggctggtatctgaggtcagcagaagagccagctgccttcccttgctgtggggagggggaccaagccctgcccacccactgaggtgccacctcaagacaggtcatccaggtccacttcagggatcgggtctcgccagtagcagaaggagctgaactccgggcagggaaaagcggaattctgctccttactgagaagggggaacacatgctccacgagctcactcagcctgtgatacgatgacttgtttcctttggttctttcttgtattaattcacccttggggttcacggtgaatattctacagtctggaactccaacttgtgtgtaggcatagacatcatttggacggtttccaaaggcagcatagaagggctgcttagacggggcaaacagattcttgatatcatttagacactcaattttgaacttctctggtttcttttctatcacttctctgtggaaggcggagaacaagctgctgggggacagcatcagggggccccggggcaagattgtgcccttgtcattgacccagtgcaggtagccacgggtcatgtcggccatgccgatggcacgagccgagcagtacagaaacttgtagccattctcattgatggaatggtagagctttgctataccctggtgggtccagtctttgcccagctgtgggagaatctgtcccaaagcatccgacttggttattgtcccatcaatatcagaaatgatgatcttgtcattccagttccacaggtaaatggtccctgcacagcgacaggtgccttgatactgggttgtaatactaaacacaacatcatttgggccatcgtggagcttcagttttgcgatctggtctgaggagaggcggagagacttcttatatgaagttgtgctgccgtggctcaggggctctgtggggatggggtccactgtgatggattcttcgagctcctgtgatccctcgtcactcgaggagtcattctcggccggcctggcaccggccggctccttggagctggatggcaggtcactggctggcggtgcctcagattttccctccttggattctggcagctgtttggtcatgctttctctctttcgccaaaaccaccagcgaccagatttctttggcatcttgtctttcacccaggactcaactgtggccttaggcaagctcttctggaatacttgcaagctaaggatcatgggagctgccaaagcccagttatagtaacgattatatatccttattacaaggttaggattgtctataagtccagggttttctgcaaattcgtgataagtaatgatatgctccatgaatttttcttttgaaatttctccattttcactgaggcccccgcaaagggagagggtaacgtcaggcaagtccatggcagaatctgagaggcactcggtgccgctatctgcagctgcgcttcccacggactgtggggactgggagccagagagtgtgtcagactcgggccactgcctggaaccgggctccgattcacttttagggaaataaagagctgcaacttcaggttctagaccctttaagtcatcaaggtaaatatcatcaggtccctggtgttggcttcttttgtgaacacctttcttctttgacggcgagtctactttagctgccggtttggattctgagggcgcctccgctaaggctgcgttgggaaggtggtcagcatctaacatagatgaaatctgagtactctcaagaggaggttcgagaagctctgccacagatgttgggtcgctcatctgtgtacccagggctctgggtttgggcttcactatggtacagacagtgtcttccatggaagcatccttctcaacttcactgatgaggttgtcctcactgggaattacccgaaaatgagtattttctgatggtgtaattgtagctgtcctaggatgatggtcagatcgttctcttttgctgaccttggtggactctgggaatccgccccacgtccactccatgtgagactctgatctgagcaggctctccgcaggtttcacctccagctctgaatcactcttaggacacgctgtctggggataggtggtctctaaaggggaccaatctccatcagataaggggtaatgatccccagaatggaagagcaaaggctctttacattcttcttctttcaaggaagcatttgaagatcctcgtgctgcctgggcccccttgtcatcatcggagctcacgcctacatcacatgtgtcttctgcagcagcagatgcggcctgctcttccttcttactgtcctgtttgtatttctttctccttcgttttttctttttcacagaacttggagtaaaaattgtctctgtttccaagacgtgtgagatgtctgaactctgagatggtgtttcatctccacccgatttcaccaaaggggtgtcaatatctttaaagaactgatcttcagtaggaattggtgaggtggcaaggtaagcaggaagcttttcatattcttcttcagtctcctcaacaaagaaagcttctccgttatcacccaacttcatgtgaagatccactgcactgccgttgatttctatatcaatcactttctctttggatctcaggactcccagctttccaaaccgaacgtgaaaaggtgaacactgatagctgccatcctgctgctgtacccacgatgacatcaatgcacccagagagggtggcctggttaatgcccttgtagagttccttcacagtgacaatcacctgccccagccagctgtcccacataattcatggtttgagacaagatacccaggaggggacttgtcatggtaaacatcttgagttttacttaatgagcctttacaaaccacctcatcttccttgtcatcttctaagtaaaacatcttgaaatttaactagcatgtcttttttcagagatgaagg

SEQ ID NO: 7403 - DNA, 1196 bp, Homo sapiens
ttttttttttaatggtcagcaatgtctttttaatacagatgtggtacagaatgtttaattacagcagggcagtgattccagttaaataaaattaaaaacctttattttcccaaatataaaattactaaattaatgtcttaaaagaaaatataacatggtgacagctttaaagtacaccaccattcaccacaggatttatgatttaccaattacatactccaccattttggcaaaaggatgaaattcttaaaactgtttataaacctaatatagtaaagactgtatacatctccatattgcacatttttatgtacaagaataaaacattaaagtgtattgcatatactggaacagcacaaatttatcacaattaaacttaatgcataagcccatgtgagtattaaaaatgtagaaatgtaatacatatatgtacagaatgccaggactgtattaacaatgatatgtacataacaatatactgtactactttgtacttttcagcatagttgcggttattaatataggcctttggttctaaactgcttgactagttttaagctcacataattccttaagctttcatattttcttaaatgcaaggaaatgaatataaaagcactaaatctccctggttcactggtacaaaaattacaatggtcagttcccttaggtcatcaaaaactagtcacaaaaatagttcttgtattcaacctgaatgtgccacaggaaaaaaaaaatattttcaagattttccagctcagcctcgaggcaaaaggtcccccaggcatcaatgtcagtgcagccctccctgccatgtagatcccagaaccttttttttctgtaggccatctattctaacactactctgcaaggaagaataaaatctaagtccagctcaagagtgtctaccacacctttgttaagacacaatgaaaactttgaatattgccagtgagatttaaaaaaatatgtgcaccttcttacaactcctatagaaagtctgttaagaaataacgttgttctttatttcctttctctccccttccccttggtcctccctgtgctcggtctccccagtgattggctttggaaagcatcctgagtttgcaaatgacaaagcaagtccccacacacgggccatgagatgtgatcacacgaccgaagacgagctggtcatcacgtgaaccattgtgctt

SEQ ID NO: 7404 - DNA, 472 bp, Homo sapiens
tttctcattgcatcactagaaaggccatctggctatacagcgttccttcctccagggccagccgcctgatccttcaggctgcagctgcagtactccaagcacacccttttttcaaggtcctcctttgatagcctctggctcatactctacttctctgctcctttcccaatccaatccaatccaatccaatccaatccaatccaatccaatccagagcagtctctgatcactccatatcaaatagctcttcctaccctggcacttcctgatcccacttcaccctgtttcttttttacttcagagcacactattagttttatatatttaacctgttatctccctaaaatataagctccatgaggtcaggaatttgttttgtgcctggtgtgtagtgggtgctcaataaacatttgttgaaggcagggatccatctactctgtagttcctggaaagtagtctgaaaagagtctgt

SEQ ID NO: 7405 - DNA, 1825 bp, Homo sapiens
  misc_feature (1)...(1825): n = a,t,c or g
cggcacgaggcaagaggtatgtggaactgaccaactactgtgattataaagactacagggaaactatattgagcaaaccaatgttgttctttattaatgtacagaccaaaaaagacacctcaaaagaaaggacgtacgcgtttcttgtaaacacgaggcaccccaagataagaagacagatagagcaagggatggacatggtcatctcctcagtgattggagaaagttaccggcttcagtcaatgcaatgttcctctctctttcagtttgattttcaagaggcagtgaagaatttcttccccccaggaaatgaagtggttaatggagaaaatttaagctttgcatatgaattcaaagctgatgcattatttgatttcttctattggtttgggctcagtaattccgttgtaaaagtaaatggaaaagttctgaatttgtcaagtacaagtccagaaaagaaggagacgattaagttatttctggaaaaaatgagtgagcctttaatccgaaggagccagtttctctgaccgaaagttcagtgtaacttccagaggttcaatagatgatgtttttaactgcaatctgtcacccagatcatctctggacagagcctctttttgggcaggattaccctttccaagtgttctggaatctgaagagacacccaaccaatttatctgattgaactgaacattgtagcagttgctcccgcactccaggcctgtgctagactataggctggggcgaaggtaggaggttggaagccagatacttccacctgcgtgtcaatctccggctcctccatggcttctatggaggactcctctcttctgcttctgtggatgtgatgccctggcaggcccagggagctgattcccctaaaacttatgattaccaggatggaaaggccttggtcccatggcactgggtggggctgggggatattctctactttgancacttctccaaagaggcagaagggccacagagttctgccaccctgaacatttttctcagttccctgggagtttttgtggcagcctttgtgggagtggtctgactggctgttgacctagcatgcttcataaatcagggtttggccctctgcttggagcatccaaccccttgaactcaaacctgtcgagcaaggggttaagagttctgttctcttgccaacctggctggggcaaaagcctgtgccatctttcactgggaggcaaatatgtttttcatcctgccatatgacacctatgagaaacgttcacagtgaggagtagccaggttgctaggacagtaaccctgccacacactgcctgaaatcggaactcccttggcctccctcttaactaagtgacccatgtagaaggaagccaggagatatggtaccgaacaatgacaggggaagggtattggacacggcagcgtcctccttattgaaaacacattatgtcagttgggaattttaaataagcttttagcaaacctaacactaaaagcaaaatagaagaaagctataccattaccataatacatttttcatctcatggctacaatggaattcttgaaaaggaaaaaaaaatcctatctacatataaaaacctgcatgaatgaatcactacatatgcttataatgaggaagagttatgggtcctgagtgtaattttttatcctttcttaaaaagtttctgtattatgcattttgataacactactgatgatccttccacttatatttgaaatgttatgtaccacatttgcacaattaaaacttttcttagcattcaacctagaattgattaaatttatgactgaggcttcaaaaaaa

SEQ ID NO: 7406 - DNA, 408 bp, Homo sapiens
ggaaaggggtactccttatgctagcagattcaaagatatgcctaactttattgcccttgagaagtcatcagttctccgccactgctgtgaccttttgataggcgttgcggctggatcaagtgataagatttgcaccagcagtctccaagttcagagacgattcaaggcaatgatggcatctattggaagactttcacatggtgagagtgctgatctgctaatcagctgcaatgcagaatcagccataggttggatcagctcaagaccgtgggttggagaattaatgttcacatttctatttggagactttgaatcccctctacacaacgtacgcaagtcaagttagttgccaagaaagcacagatgacaacctattaatgctgtgagaatgtttctagatcagtgcat

SEQ ID NO: 7407 - DNA, 546 bp, Homo sapiens
gataaactctttgtgggtagctagtgctggaagctgaagttagttgaataaaaatcagaccacggtttctatttctcatctagaatgaagatgataaccgagccagtgagcgcaagaaacccaaaacggaggacaagaattcagcaggccataagccatccagcaacagagagtcatctaagcagagtgctgcaaaagaaaaggatttgttgccttctcccgctgggcctgttccttcaaaagatccaaaaacagagcatggctctcggaagaggactattagtcagtcttcttccttaaagtcaagcagtaacagcaacaaggagacgagtggcagcagcaaaaacagttcctccacatcaaagcagaagaagaccgaaggggaagacttccagtagctccaaggaggttaaggtaaagtgttggggggcctggggccttttgaaaaatcattcaacttgccatgtgacttttccagggtgacactgtggctttggaaattatttgttaacatcttcagttaaatatattaggcctatgtctttt

SEQ ID NO: 7408 - DNA, 337 bp, Homo sapiens
gggaaggcggttggggttctgacagctgcgcgcgatcctgctctctctcagccgcctgtggacatgcgcaaagggccctctcctgagtccagatgatgctcataccaatggcttcagtgatggcggtgactgaaccgaaatgggtctcggtctggagccgcttcctctgggtgacgctgctgagcatggtgctggggtccctgctggccctgctgctgccgctgggggctgtggaggagcagtgcttggctgtgctcaaaggcctctacctgctcaggagcaaaccggacagggcgcagcatgccgcaccaagtgcaccagcccgtccacggagctc

SEQ ID NO: 7409 - DNA, 1404 bp, Homo sapiens
gcccaacatggcgatgcacaacaaggcggcgccgccgcagatcccggacacccggcgggagctggcggagctcgtgaagcggaagcaggagctggcggaaacattggcaaatttggagcgacagatctatgcttttgagggaagctacctggaagacactcagatgtatggcaatattattcgtggctgggatcggtatctgaccaaccaaaaaaactccaatagcaaaaatgatcgaaggaaccggaagtttaaggaagctgagcggctcttcagtaaatcctcggttacctcagcagctgcagtaaagtgcattggcaggagttcaggaccagctcatttgaaaagagggagccaggaagtgggacggaaagttgacacttctccagacttccacaatcaggaaaatgagcccagccaggaggaccctgaggatctggatggatctgtgcagggagtgaaacctcagaaggctgcttcttctacttcctcagggagtcaccacagcagccataaaaagcgaaagaataaaaaccggcacagccccgtctggcatgtttgattatgactttgagattgatctgaagttaaacaaaaaaccacgagctgactattagaagacacattagtgcagaagcttccaggctgtagagccctgcttcccttctctgacctcacaaagataaacatccttcacctgagttcgtggccatccacctctgctctcccagacccagtgcctgtgactttgagtagtttgttctaaatgtggtgacaaacaagtcatttctgtaagacattgggtcttactttatgtcatttttagtaacagaactgcaggaagatcaagacaatgttgtaatcccggcaagttgctaactgtgcgtttctcccttcttagaatgaatgtctcccccaaaactggctggcaccagcttcatctgtgatacccttcaagaaatgttctctggttttgttttatgctgaaagtagaacacaagtcacatttcagatggaggctgtaaatatctggcattttcttatattgttttatgttttcttgtttttgctcttgttgtttttatcttattttctttggggtttttttgtaatgcctttgtacagctcatactttcctgctgacatatctgatcatctctttcatgcagttgcccaatattcataactgaaaataatctggtttatcataagtaaaatgggaaacttgcctctgttttttgcaaggggaggtaaagagtgtttagtaattacctatcttaaatctttctgagttggtagtagattcatgttcaaggaacaggaaaaatggaaaaacataagtttaaatcagttctttttaaataactttttattcttttgtataaataaaatttcacaggcttc

SEQ ID NO: 7410 - DNA, 245 bp, Homo sapiens
ctttcagttttgggggagagccttggaagagaatgagggaatttaatcaactagcgggacctttccaacttacatttcccagtgtttgttggatgatacgtttgcctaataagttaaagcttccaaaaatagaaagtaaagcttggtgacactaagctctggcatgctgtcatcttctggctaggggtcttgtgcttctgtttttctatttctgaccaaagacataaaatgtgttgtgacctctc

SEQ ID NO: 7411 - DNA, 453 bp, Homo sapiens
tgtttcttatattagactttcatacttatagagttgtagaatattagaactattaatagatgagaattcaagaagattgagtctaacccctcattttatagataactgagccccagagagattatggatactagagtcatatattatggtgttacttttacagtaaataaaggagatggtagtctactgtattggtgtagacccatagtaaatcatgcctatgggtattcatgctattgtatagtcatctctctttgtatctcgcctagccctgtgactcactttaaccagtagaacatagcaaaaatgacactttgctatttttgggtacaagccttgagcatgtcaggcagcttctacttttgtactcttgggagctctgagttgctgccgtgcaagaagctgtcataccttgctggagagatgatgtggagaggaagagattccaggact

SEQ ID NO: 7412 - DNA, 175 bp, Homo sapiens
cctaagaggtgcagattttttctctttaatttaaattctctgggaacacatgttttaggtaatgtgtattcttcctcatccctgtggagacttctgggctatgcttaacttttgagagagagagggaatgttttttttttaaagagatggaagtctcacaacgtttctcaggctg

SEQ ID NO: 7413 - DNA, 324 bp, Homo sapiens
ctgagcttcaataccctgtgttaagccttaaattctatcctttcatcagataatacaaatgctggggttccacacttccataactttttctgattattttcaatgatcaaagtcaaagagaatcaaatacatggaccattttatcctctaaaatgaaaggacagattttctttctgtagaagaaaaagtccaggcccacgtagctcattctgaccactttccatagagtgagggataagaaacaacattcggattcaagcactttattactcactggttaaaatgatctctcttgccacaggcaagcctgactctgaggtcaag

SEQ ID NO: 7414 - DNA, 171 bp, Homo sapiens
cccaacgcccagccagaatctagttttttcttccctttgaatccacagtgggcatttgaggtttagagggggccaagagtatttaaaatgtaaagggacttttccctactccatcactcctaacagctagacagcgattgttcgttgtttttacctgtacttttttttttt

SEQ ID NO: 7415 - DNA, 1497 bp, Homo sapiens
gaacttgccaaggcacaatccgggtcttgcctttcagcaaacatcaaatactcagcccattcctatattgtatgaacatcaactggggcaggcatcaggactaggaggttcccagctgattgacacacatcttctccaggccagagcaaatcttacccaggcctcaaatctttattctggacaagtacaacagcctggtcagacaaatttttataacactgcccagtcaccaagtgctctccagcaggttacagtacctttaccagcatcccagctttccttgcctaattttggatctacagggcaacctctaattgctttgcctcagactcttcagcccccattacagcataccactccccaagcacaggctcagagtctgagtcgtcctgcacaagtaagccagcctttcagaggattaattcctgctggaacacagcataggcatgattgcaaccacaggaaaaatgtctgaaatggaactaaaagcctttggaagtggcattgatataaaaccaggcacacctccaatcgctggtagaagcaccacaccaacatctagtcccttccgggctacttctacaagtccgaacagccagtccagcaaaatgaacagcattgtctaccagaagcagttccagtcagcccctgccactgtgagaatgacacaaccatttcctacacagtttgcaccccaggcaaagcagagagcagaggttcttcagtccacgcaacggttcttctctgaacagcaacagagcaaacagataggaggaggcaaagcccagaaagtggacagtgattcaagtaaacctcctgaaacactgaccgaccctcctggggtctgtcaggaaaaagtagaagaaaagccaccccctgcaccctccatagccaccaaacctgttagaactggaccaatcaaacctcaggcgatcaaaaccgaagaaacaaaatcttaaaggctatggtttattgcaggggattgggtggggggcgggaaaacatggagaattaagtcagataatgctggcagccaaaggggcaaaatggcctgtgacattatcctgttcagagcttggagatgtacaagggacataggagcaatttacactgacacacagctgctgtaccagtgaaaacgaggctttgcaagcttgtacctactatataacatgtgcttggttgatggccatgcattttcagtcagaatttatatataaatatatgcacccatttttttgagtgcatataatttagacctaaaaatccttatgattagggtgaaacacccaaaaatataaggaaaataacacagcagaggaataggctcagcctgaacagtgtgatggtcccagctactacatcagatgcggtttttttgctcccttatgttcttcggatatggttatggcatttgtaggcttggaggtaaagaactgaagataactggtgctggatagaggagccttattttttattatggcagcttgctatttt

SEQ ID NO: 7416 - DNA, 568 bp, Homo sapiens
  misc_feature (1)...(568): n = a,t,c or g
taaaggagaggctccagggccagaatgggaattctcccaggaggactcagcagtcaaccaaagttggacaattaccatgtagaagagagtgagcaaatagagtttgcttagtgaaaaatgatactgaatnctacataaatgtaaagtctttaatctgaggaccctgccccatgaattgtgcaggctgcattgaaacgccttggtgatctcatatttaggaagaaagttaaagagttggtcagatggatagttcataatgggtggttccattctgagagcccattgccccagctttggttttagttgtgtcataatctctgatcattaatcctactgactgagtggactatttcagttaataaaacaatatgattaatagagagagctgtcattgagtcccaaaatgggattgccagttttaaaataattattataaaatgtatgctaaccccaaaataatactaggcatgaggtgacctctctgatttggtcaccttgtagaaccttggagggtgtcagggcatctctttgagtatcagttatgattattcagaagtatagatgtatc

SEQ ID NO: 7417 - DNA, 154 bp, Homo sapiens
acctgtttttcccccaaatcataaaacatttataggtttcacagtgtaggatgtagatatcttttggtggaccattttccagcttatcacactcctataaattatttggaaaagtaggaaggttgcttttgaagtagcaacttgtagaaatatc

SEQ ID NO: 7418 - DNA, 1111 bp, Homo sapiens
ttttttttttttttcaaaacagtttattttattttatttttttttttgtcagacaaacacattgatttctggaccacagtagaggatggaaacctttcacaaacttatttatttgaaaatacaaatataaaattatactttccacatctgtgatgtgagagactgccatccacatagtaattttttacaacagggctttaagaaagccacacacaaagacctgaaagatgcttgagatatatatatagatagtacatatatatgtatatatataaaaaaaatactcactaccaaagttctcatcagtttcatactaaagtataaaagtaagggtgaggtcagccacagtgctagggaaagttttatttagatacatttatgtccacatgaaacgcttagacttgcatcctattacatatggaattcggagtttacaatacaccatgaacggcagattggctagcccacgctacttaagaggacactcacagattccacatgggatggtacattatgtacagaatacagtagtagagaaccttcgagggaggctctggaacttttgtctctcagcctccggccccctcccccatcatgcccctgcctcccggaactgaaatcctgtctgagacaatacattctgattatttgatagccaggtgtttggattaaggttgcccccctgcaggtccccgacaagagggatggattttatttatatgtttttgtgttttagtttacttacttttttttggtagaaaaaaaagaaagaaaaagaaaacaaacatattacagtattaaagtattgcttaacttccagcgtctccttgtgtagtgtctgtgcccaggacggggctgagctgacgtctgctagttttctgctttggggtgagggtggggaaacccgccagtgtctttcttcaatgtgcttgcctgcagtcagtccctctgctctcccactgtctgccttccttggaagatagcctggcttgcgaagcacattcaagaaaaaaaaaaaaaaaatctcccctcccccaccagccccccactctccctctgttcctgcgtgccacttgcaaccaataaagagaagtatgagttagtgtttctt

SEQ ID NO: 7419 - DNA, 309 bp, Homo sapiens
  misc_feature (1)...(309): n = a,t,c or g
gtgtctgggctcagggttggccagcttgcagaggagcaagctagtagaaatattgcagggttcccaaaaccaggtcaagcaagatgccatgtcacccctgagcatgcctgtcttcccaggggtgtacctcttggctggcaaagcccaaggccagtgggaacttgtataaatcacatgggtatgttcttggttcagtgatcttggagtgatgatggtaactgatgaacagagaactttccagaacttnggtcctgtcttcctccctgaacctagacaagtttcacccctcctcctgtacccaaccccatt

SEQ ID NO: 7420 - DNA, 435 bp, Homo sapiens
atttaaaaacatacataaatataggcgatcagaaaaacctgcaatgaatttacaaagagatggaaacaagtcaatatccacaattagcataatcaaatacgtgtctatttgagacaattaatttgcatttctttgggcaaaagcacttgcatgattttcagctcaatataatttacataataaattatattaagctcaaagacaataaaaagctaagaaaactcagtagagtatgctagatgagtaagcatttttaattttaaaatctttcataatttttcctctaagattccatctacatgactatttgaccagtttagaatacaaataaatatgctccactgtatttattgtaacctctcatcttggatttttgaggaaaagaaaaacttcaattgtctgagatggatatgataaaaatatgtgacagggtgg

SEQ ID NO: 7421 - DNA, 351 bp, Homo sapiens
tttcatgaacttaatagcttgttaatcttggttccacaggatttcaaatatgcgtgcattagagaatgattttttcaattctcccccaagaaaaactgttcggtttggtggaactgtgacagaagtcttgctgaagtacaaaaagggtgaaacaaatgactttgagttgttgaagaaccagctgttagatccagacataaaggtaattaattttgtgtttgatcattagcaaaattattgccactttatacagacatagtttgctctttgggtcccattctgttctgcagaacttgctctctccatggtcctcccttactttaatctggtggttctcaaccagggacagtg

SEQ ID NO: 7422 - DNA, 555 bp, Homo sapiens
ctccttggctctcctatttcagtgagcggccgcgtctctgttggaaccggcggcgttgcgtctaaaaaggcgaaagccttgcaggttgaaggtgggacgagcctaatgaagtggttagtcaacgaccgcaccgacccttaagcgttcttaagacgagagctgtgaggggaaactacgcaaggagcccttttcccttaatgtcccttcgactttcctttcacttcgaaatgaatgtggaaatgctgtcacgccttatttttctaattcctcgatgttgggttttttctcttctttatatctcaacttttaatgctcttcttcctatgacctttcatctaaaaactgaccactcctttacaggtttttacggtaaaaaaaaaaaaaatctgtctttctttaatcttacatagctgaacgaattcattggctcagtatttttaagataactagtcagtatatactgttctgtaacttaaaagatgacctgaaaattaacaggccctctcctatttctcttctcactctatcccccatcgaagagggctcagaaaaaaa

SEQ ID NO: 7423 - DNA, 472 bp, Homo sapiens
ttttttttttttttttttaaagagaagttgactttattaacagcaaaggtttgggggtggggaacaaacaagtgaaaggctcacaaacagaccactagaaaagtgctttgctgctcacaataatggtgtctgaaccagccctgaatgccctgggactcagtcactgtcactatcagcttcactggaatcagaagctgcagcttcactgccatcctcctgggccgagtgctcgctgccactggggaagggactggcgctgcggctgtggctccggctccgctggccacccccattgctgccgctgtctgaatcattgtcactgccaccttgggcctgtcctctgtcctcatcatcagagtcggcatcgtcctcagaatcagcatcactgccaaagatctcctctttgtcacgggcagcccgggcctcatcctcgctgctctcgtcctcaccactgccactcttgtcactggcc

SEQ ID NO: 7424 - DNA, 294 bp, Homo sapiens
  misc_feature (1)...(294): n = a,t,c or g
atcaggtttcataattttactttagccttcgcaatggaatttaaattgtgccagccatcttttatctgtcagacccaggggatttttattgtcattttgaaccagatctatttttgcttaattctatgggaaccacacatagtttgtacatttgccagaaatttgttttccagtgaatattactcaattctaagtaagtacattccgcattttcatactggggacatagtagggggtgaggttcaatttagggaccatcccttttttaaatttattatggatgttaggggnctt

SEQ ID NO: 7425 - DNA, 705 bp, Homo sapiens
aaaatgggttacctgtgatatctgtgaggctaccatcccggcgtgaacgctgtcagttcacactcaagcctatctctgactctgttggtgtatttttacgacaactgcaagaagaggatcggggaattgacagagttgctatctattcaccagatggtgttcgcgttgctgcttcaacaggaatagacctcctcctccttgatgactttaagctggtcattaatgacttaacataccacgtacgaccaccaaaaagagacctcttaagtcatgaaaatgcagcaacgcatgaatgatgtaaagacattggtccagcaactatacaccacactgtgcattgagcagcaccagttaaacaaggaaagggagcttattgaaagactagaggatctcaaagagcagctggctcccctggaaaaggtacgaattgagattagcagaaaagctgagaagaggaccactttggtgctatggggtggccttgcctacatggccacacagtttggcattttggcccggcttacctggtgggaatattcctgggacatcatggagccagtaacatacttcatcacttatggaagtgccatggcaatgtatgcatattttgtaatgacacgccaggaatatgtttatccagaagccagagacagacaatacttactatttttccataaaggagccaaaaagtcacgttttgaccta

SEQ ID NO: 7426 - DNA, 406 bp, Homo sapiens
accatggaggggttttagaaccttcactgtgcgacttcattgccagtcttcatctctggttctcaagctcttggatcatgggcacggataacctgttgtcctcctctatggtcaagaggctgcttttgcaaagaatccagtgggagagagtcaatggcctgcttgacgtgaactccaaagtcctcctgatcagaataccaatttcttactgggtctggaaaggaggagagaaggatagagagtttcttctaggaccaaattgattcctccacaaataggaagatccccagactgtgtgcacacaccctcctcctccttccttctccaaccctggctggaccatgacatcacatggtggaggctgttttttaaaaagaactcaggccagatttacaagaatgatgct

SEQ ID NO: 7427 - DNA, 368 bp, Homo sapiens
ataagtagtctgtttcaaagactttttggatctgatgagttggggacaacctcccgttggtcccctttcatctttcattcttcctggtagattggattttagatgagattagaaaaaggacttgtggttcctaattttccttgattctgttgttcttttgaggagggaggggaggggctctttttttttttaatgaaaactttttgctatacccgtgcctatagaaagttaaatatattgtatgtgtacagcccagtggatattctcaaagcacagatgctcgtcttttgatgaaaaaaaattctttttaggtgaaagagcgaaaaaaacaattaaagaaggaaggaaaacctacaattgtagaggag

SEQ ID NO: 7428 - DNA, 124 bp, Homo sapiens
ggcactgaaataaggaagcagcaggtcagaaccccctagatagttcttgagttggttctcagtctcactaaggaggcagaataattgctgccctgaaacttctctgatagtcaaaggtaacttc

SEQ ID NO: 7429 - DNA, 394 bp, Homo sapiens
gcaagcctgttgttggaaataggttttgataatttaagtagggacctatacaaaatatattacatttatcagatttttaaatacattcaattaagaatttaacatcaccttaaatttgaattcaatctaccgttatttcaaactcacaaatataactgcattatgaatacttacataatgtagtaagacaagatgtttgacaggttcgtgtgtaattttctattaatgtttttacattgccttgtttttatgtaaaataaaaaatatgggcaactggtttgttaacaacacaatttcttcttagcatttcaaaaatatatataaagttgttctttttcctatttcatgaactatgttttttttttaaaataacatggttaagttttatatatat

SEQ ID NO: 7430 - DNA, 2223 bp, Homo sapiens
cctgtatttatctagtcctatgtggaaagggtttgcatcatagatttttcccagccttataatataccataagctcctacttccctgcccctccctaatcagtattctttcaagagttctttggtgaagccatctatctgaaactaaaatgaaccaaacccatatttcactggtggttggagaaaaccatggccaaaacgattgtggcaggtctcaatcttgggagtttttaagaaggaatgtgccagaggccgattcccaagaacagagttttcttttgttttgcagaggcattcaatgtgtctagtgcttgctggccacagcagttactaccacagagccttctgggaggggccgttgtgttgaaggaggctcctgcctgagggacagcatcaggcagtgggctctgtagagtgagaaccaggtggaggccttctgtgcccagctcagagttctgcaccacgccaggactgcccaggccaagggctactgacgcaagttccactcattccactctgtggggggcgccttgggcctctcctggaagggctcttggagaaggaattggagttacgtacaagtgacctaaatgggaagcttttctagatgagattggattaaattccatgtgatttctctttccctttaatccaggttggggacttcgtttctttctggtggtttcaaagcttgcccagatgttgcaatttgatttttatgtttctgtagagaagtatttttcttttcatcttcaggattttttttgccaccaaaagaaaacattgggaactctgtgtttcctcttgattgtgacttcccagtgttgacagttaagtccttagtgtcgtaggtcccagcccaccaatactatatcaaacactgttatggcacataatgcaggcactgtggatctaatttaaataatacttttttattatttatactactatatataatatacatcaacacttttgctatataacctaagtgataaccctcttttagttacctgccaaactctggacttggtttatattgcagttaacacagttacaaagctgtaatggtgtctttttttcctttgtaacggaatgtgtaaatcaaagtatatacattgtgtggtgttcctgtttctggagtttcatgaggatttacacatggcattcagtgttctgtatagatctgcctacctttgtgaattcatctgttaacccctcttcctttgagagagcaccggcgatggtgggttaactccttgtgttttctctctctcctactggttattcttgaattaagcacagactcgtcagctcggttgctttatcatgaataatgtgtgtgaccttgcagttcttccacagttcagcaaacaagtgctagcttcactgaccaaaaattaaggaaggaaaacacagtttttaaaacgatccatcttttaacagccgaaaccgatgtgtctatggtgctgcacccttgctgttgtacttctgaaatcagacgtgtgtgaacgatcatttctgacttaaccgtgagatgctcacgagtacccttcctgttgttttgttagcattgaaatcgagactatttatttggaatatatacaacagtgtttttccactgtatttcatttgcaaaagttgagaactgctttctctaccttttgcaaaataattgatattccatattggattctcaaagacttcgatatggtgaacctattaaacctagaaattgtattcatcctttcatgactgtggcctgagttccccagcccctctcctccttttttttagatgagatttagcacactctcagttatttaaacatgcaacatttcttgagtatgtatgttgaggccatctgagctcatagctgattcagtaaccagtttcatgctgtgtcattcacactcactacttaatactgccatggtgaaaatgtggaggaaaaatgtatccatgtgtgtctgggaagcatatacacttgtacattttttaatactctgattctgtaacatttctgagttttgttttgttttacagaaaaaaaaaaaaagtgataaagcaatcagaagaccaagaggtttactattgatgcttagggtcgtctgaccttggctggccaatagacctacacggccaaattaatttacgagagtaataatttttcaaaagccaattttttttctgtattttctgtatgaaactgccaattatcatgaat

SEQ ID NO: 7431 - DNA, 1462 bp, Homo sapiens
gagtcctgggaaaggcgcatgcgctctcattgcagcctcggcgtttgtagaagaggagcatctgctccagatggaaaatgggtaaggaacaatcaaattcaattcgggaagaatatagaggtggtaataattggtaaaagtctgcagggttttttttaaccaaaggaaactggtttgagaaaattgtgaaatcagcattgaaatttgttacctactccaatcaagatttgcaaactacaaaaaaatcattctgaagctttcacctataaatatataccaagataatttcagataagaatgtccagcaaggaagtgaagactgctctaaaaagtgctagagatgcaatcagaaacaaagaatacaaagaagctttgaaacactgtaagacagtgttaaagcaagagaaaaataactataatgcctgggtttttattggcgttgctgcagctgaactagaacaacctgatcaggcccagagtgcctataaaaaagctgctgaattagagccagaccaattactagcttggcaggggttagcaaacttgtatgagaaatataatcacataaatgctaaggatgacttgcctggtgtttaccaaaagctcctggatctttatgagagtgttgacaagcagaagtggtgtgatgtctgcaagaaacttgtggatctatattaccaagaaaagaaacacctagaggtggctcgaacatggcacaagttgataaaaacacggcaggaacaaggtgcagaaaatgaagagcttcatcaactatggagaaaattgactcagttcctggctgaaagtacagaggaccagaataatgaaactcagcaattgctttttactgcttttgagaatgcactgggattatcagataagattcctagtgaagatcaccaagtactttataggcatttcattcagagtttatccaaatttcctcatgagtctgctagattgaagaaggcctgtgaaggaatgataaacatctatcctactgtacagtatccattagaagtgctttgtttgcatttaattgaatcaggaaatcttactgatgaggggcagcagtattgttgtagattagtggaaatggattcaaaaagtggtccaggcctcattggcttaggcattaaagcattacaagacaaaaagtatgaagatgctgttaggaacctaacagaagggttaaaggaaagccctgtctgcacaacgtggatggtatcatctggcagaagcccaagtcaaaatgcatagacctaaagaagctgttctttcatgcagtcaagagtatttttgatactttttgggttgacatataagggtgaccaaccctatttgtttttatcttaaaggacaaagatagtgatttttaaaaaccaaaatgcctatattttggtattttaaattgctaattttaatttccaataagtttaaataaaagtctgcatgcatgtgt

SEQ ID NO: 7432 - DNA, 745 bp, Homo sapiens
ggaagtctgaggaccacacacccaggactgcacccggaacgggtggaggggtggaggggtggaggcttctctgtgaagcgctgggaggcagaaggggtggagggagccaggtcagataggagctaaccagcctctcccctgccctgcacagccttccccgcggagggcccggagcagccagaacatccccgtgcagcaggcctggagccctcactccacgggcccaactggggggagctctgcagagacggagacagacagcttctccctccctgaggagtacttcacaccagctccttcccctggcgatcagagctcaggtgaggaccggaggaaagcaggaggaaacaatagctagctgcgagcgacaggcagcccaggacatctgtcttaggctccagtggacccccgtgcctcctaaggcttgagtgcaggtacccgtgttcctagagcacaggacgctgtctgcggctccccatcttccctgccagctccagcctgaactcaaggattgttaagaccactccactgatccctaaagctgttgatgacaagttgattcatttaaaacttctgtacatgcattctcagactcatcttttttgtaattaaaattaaaaattaagttaaatttagtaataatcatctaatttctatacattctaaaatatattcagcatctgtagtttatactttgtttctccaaagtatgtgggtaaacaataaaaaaaaactataaatattc

SEQ ID NO: 7433 - DNA, 495 bp, Homo sapiens
agtcctgtcacagactggtactgataaatggcgtctctgagatgtctgtgcaccttatctgtattgggcagaatggtcctgtcccactcctgcatatggccactgcatggctaaatggtaaggcccagagggcatgcagcttggcatcagtaggaatctagatttgcatttcagcttcatgtccttgttagctgtggggggccttcatttctcaaggtccatctctttactgtaaaataggctcaagggttgtcctgcacagcccaccatggggacggccttgagagaggcatggaaagctgtccagggaaagttggttgtgctgtgaaatcctgtgtcattgttaacagggatgaaatgaggagtcttgcactgttctctttggtatgtatcctgccctggcaggtgctcagactgtgcctgatttttttttattgtataagggaatccccttttattgtatgtggaaatcccacaaaggcgattcccacatac

SEQ ID NO: 7434 - DNA, 307 bp, Homo sapiens
gatgttcacgtttttgaacttacacatattcttctgtataagtaaaatatttcataaaattaaaaaagttttataaaattaggaacagaatttcttaaagatcaacatggtactaatacatcttacaatctgtctttcaaagtttcaatagacttaacttagagtcattttttaaattgcattttgatgccaatataattcatgtgtcattttccgctataatacaatgaaaatccagataatggagatggattttcttctgagtagccacgcatattaggtttcaggctccaattgcctggttttg

SEQ ID NO: 7435 - DNA, 655 bp, Homo sapiens
gtcttccaccaaaaaaaattttttaattatatttttatatcaaaaaaatatatactttaaatagcaaataatatgaactttaaaaaatgctgtggcctcattaaactttggtaatagcttttctttttacttcagaaatccaaacattagagaattcaccaaagtaatcctctttagaagggcatcttgaattatattatccatccgtatttatggagattggtaaagtagttgaaccgttgacttggtgatctgctcttctccgtgactcttgtatgtatgtgtgcataaactgaaggccaaataattcccgttcctcttcttcatctgtgccttcactgggaggaagtgatactttcaatttcagtgggttgtctctgaagttgacaaacctagaagttcatcaaaaaacagtatttttataggtgtcatggaagtgtacatttatttccctggagaaaggtcaaatgataatatactaaattactcgtttttaactggtttcaataactgaacgacttggtgagatgtgatatatctcaaggaatcttatgtttttttcctaaggaggaaaaaaaaacactaggctttaggacaacttactttccaaagcttataaaagcaactgttagtctagttgcacaggctggagtgt

SEQ ID NO: 7436 - DNA, 444 bp, Homo sapiens
tttttttttattattgatgttttgcatattcactatgatgtatctcaatgtagttttttaatttacactgcttgggattcactgaacttcttaaatctgtactttactgtcttattagttccagataattctccatgttttctctttctctagtttcctaactgcattctatatgtgtcctcatctataaaatgaaaataataacagtacttatcccacatgtaagtacttgttgataaaatataaaatgcttagtacacagtactcaatgattgatagctattgtcattacaacacttaaagtgaattttccccaactttccttaatgtcataaagttttagaaatatgcagataaattcagagataagcagatattaaataatcactagctaggcaaagtggaaaactgaagcactttccattagaaatcagtagagcaagt

SEQ ID NO: 7437 - DNA, 196 bp, Homo sapiens
atggtgtagtcttttatccctaagcacccccctactctccctgaccctttccgctgagtccctaaaacccactgtatcattcttacggctttgcagaaccaaatacttctttctagccaaaaaaattcaaggtagaaaaagataattctcaaatttttgatgacatctagtttatattttacttctatgtaataag

SEQ ID NO: 7438 - DNA, 424 bp, Homo sapiens
  misc_feature (1)...(424): n = a,t,c or g
caaactattctgtgaatcttttgtgtgtttggggctgtttgtagaggaaaatttcatcaagcaacattttgggaacattggccttttgtactctttcctaaataaacagaaacttgtactccccaaaataaaatgtttctttgtatattgttacctgcaagttattgataatggaaggaacaccttttcaatccttagtcccctttcccccaacacagcttttagattgtcgataaacttcccagctcagtaattaactgagctcagtcattgcaccctgtatccatgtggattttttttttccagtgggaattacattattaggaggcactttacacagccagttttggctggcggcagcccggggggncaacagcagtgcccttttttcacaagggnatgttggaacgggggnccaatgttt

SEQ ID NO: 7439 - DNA, 358 bp, Homo sapiens
attgagtgacacacagcgtgatgctgggcaggccccaagctgaaaagcatctcctccaacttactttattcttagcaattcattcctttggtttgaaaattcttcagcatcttcaagagtcctttactaatggatcctttgggggagttgtgctaaattatcaactcacaaggatgagatggctggctctagggagccagcctgccaacatggatgggctgtcccagggtctcaagtgagctcaggtctgtacactgcactccagggaagagtaaatgtgcctggggcatagaatggagactttggagtttggagtttggagtgggtttggggacatcagcttctctcttccagttag

SEQ ID NO: 7440 - DNA, 373 bp, Homo sapiens
ctttaagaggaccatctgacatcgatgtttatcggggaccacgttctgctgcctgccaggccgctttatgatatgcctgccctacactctcccaaactgagcccttcccttccatgaggcccccatcccgagggaactaggcccttgcctgctgcatctgaggcctgtgtgcttgccaaagctttggagaagcagctggtggcagacagaccagagggactggacttcctgtgtacctctaacagggagtggggatagccgcagctgctctgggatgctgtgcttgattaggagctcaccaaaggacccaggggatgccatcatgagctctctgcactcttggcatttgagaaagggagtgagaagaaggagg

SEQ ID NO: 7441 - DNA, 232 bp, Homo sapiens
actcatggtcacgttcacgttctcgttcagcatcaagcaacagcagaaaatctctgagccctggagtctccagggacagcagcaccagctatactgaaaccaaagatccctcttctggtcaggaggttgcaactccaccagtgccacaactgcaggtctgtgagccaaaggagaggacttccacctcctcatcctctgtccaagcaaggcgtctgagtcagcctgaatcagt

SEQ ID NO: 7442 - DNA, 245 bp, Homo sapiens
  misc_feature (1)...(245): n = a,t,c or g
tttccaagtgaaaggtgatggaatattttgacagcatgctgctaacttaaacatttttgtttaatgtaatttttgtgtctaagtgctcccaaccaccatttccaagacaagaagactcatgagcattcagaaaacatttggcactgtttcattttaattttttacttctccttgactctttgagcctagaaagaattttctctgtagttgctcacccaggtacaagtgtcccctgngtgtaaact

SEQ ID NO: 7443 - DNA, 418 bp, Homo sapiens
tttttttttttaataacattttttgcagaaagacttgtagaagtggcaagtgctgctgatgaatccttaatccctggggttgcctttaatgatgagggatctttagtcacaggaggggccttcttcttactggctttcttttggtgagcttcagtattctcacaagaatcttgggtaggtttcttggtcttttccttattagttaagtctgtttcctttctttgttttttatgaggatgatttagatcagaaatgtttcttctctttttgtgagaattatgcaaagtcccaggcaactccgagttatcacaatttgatcctggctctgattttaactcatctttttttacttcacatgaactgggagattctgtggtcaagtcgatataggtttcctcaacaatgcattttaaaggcc

SEQ ID NO: 7444 - DNA, 482 bp, Homo sapiens
gggccgtttcctttctttctgatacatagagattaaatgtgttccctatgagaagactgagggctggtgttttaagtaatgcttgttttaactggttaaggcttttgagttttaagattccaagtattagttgcttgagtttcttttatgaggtggtataaagggtgaggtatttcaccatatccaggtacccacagtctgcaaaattcagtaattcctaagaatccccttaactgttaaaggaaatgggcttaatcctttccttacctggtgctcttgtcccttctgataagactagacctaggtactttactgaagtctgacagagctgagctttagattttgaagtcgtatatcccctttctgccaagaaattgaagagagcctcagtgctttcctgttacttccttggttggagcacagaggagactgtcatttatatacttcaaagtttaaacttgagggtgagaaaaattagaaaa

SEQ ID NO: 7445 - DNA, 524 bp, Homo sapiens
tctgacccatcagggctgctgaaaccagcatcttttgcagaaacccaggcagcaaaacaatcactttcatccaaagtaatagttaacatccctgtttttaagtctactgagaaccaatttggcacatacaccattttaaatcttttcttaatttcatcttcaaaatccactttgcccagatcttcaactttacatgccttcaatacatcccaatatgccacattattattggtatctttggttaatatatgtctcttatcattaagaatgtggcactgaataatactagcaccccctttaataacctggtcaggttgtgtacaaagaggtgttataggatttgtacagtcattgtcataatctccagaggctctaaaattatgaattcctttcaaagtctaaaattacaaaatttgttatttgatcatgttatgctctacaagctttgccagcctgtttaaagtggcaagaaaaataaagtcaaaaaacaaacaagaaaacctcaacaaccactacatcaaccg

SEQ ID NO: 7446 - DNA, 1219 bp, Homo sapiens
  misc_feature (1)...(1219): n = a,t,c or g
cagccctgtggtggcgacgacgatggaccaggagccagtgggcggtgtggaacgaggagaagccgtcgcagcctcgggagctgcggccgccgcggcattcggggaatctgcagggcagatgagtaacgaaagaggctttgaaaatgtagaactgggagtcataggaaaaaagaagaaagtcccaaggagagtcatccactttgttagtggtgaaacaatggaagaatatagcacagatgaagacgaagttgatggcctggagaagaaagatgttttgcctactgttgatccgacaaaacttacctggggtccctacttatggttttacatgcttcgggctgctacatcaactctctcagtgtgtgacttccttggagagaagattgcatctgttttgggtatcagcaccccaaagtaccaatatgccattgatgaatattatcggatgaagaaggaggaagaagaagaagaagaagaaaacaggatgtctgaagaagcagaaaaacaatatcaacagaataaattgcagactgattccattgttcagacagatcaaccagagacagtgatatccagctcatttgtgaatgtcaattttgaaatggagggagacagtgaagtaattatggaaagcaagcaaaatccagtctctgtcccaccataaaatgaaatgactatcaagcttcaaactcttaagttttttttttttaatacaaaaactttcacattctttattcagtgggacttaatacaattatttatattttaaattattaaagtatctggaaagggaaaatgttttcttcatttttaggatctatctagcaaaagccagatctgaaattcagatatttgtactgtttttactgtgtatagaaattagtgctttggttttaaaatgatcttttaaaaaagttaaggacatcctagagccttaatagttaagaagagttaaattatcaagcctatttgtgcatttgctttttttgaaaaaggtaagttgctgattaagtctaattggaattgataattccatagtcttagattaaaatgaggatattttctcctagattttctcatgttatgccatgcatttatatatctaaccattaatttcacactaaggatgcttcaccatataataaaaggagcaagatggaagcactttgaattttctttcattgagaataactggtttatgtaagaatctgnatttata

SEQ ID NO: 7447 - DNA, 577 bp, Homo sapiens
  misc_feature (1)...(577): n = a,t,c or g
ttctgtttcggatgtttgactttccttccttaatttgtaagagtatcctatgtagtaacaaaatcctttttttaaaaatttttaaagaaaaagtatacacacaggacttttttttttctaattcaaaaaatacaaaggcatgcaatgaaaattaagtctgttccactaccacattttccagttttttgtgtatctttctaatgatagataccatatgagtattcaaatatacatacacatacacttaaaaaaaaaagatggcatatactcactgttctgtttggggctttttggtggtggtgtttgtttgacagggtctcactctggcctcccaggttggagtgcaccttggaactcctgggactcaagtgatccttcacctcctccttccaagtatctgacactacagggcttgcatcaatatggcccagcttatactcaccatagtgggtcngtactcccctaaaatattccggagggccaggcatgctnnnnnnnnnnnnnnnnnnnnnnnnnnnnnnnnnnnnnnnnnnnnnnnnnnnnnnnnnnnnnnnnnnnnagacagcctgttaactgg

SEQ ID NO: 7448 - DNA, 437 bp, Homo sapiens
  misc_feature (1)...(437): n = a,t,c or g
acagtgagagtgcacacgttgctatatggctctgagcctgctgagtcagggccaaccctctgatcaccctcctgtagctccaagaaggagggcagttattcaccctccacgccgttccttcctgggttcgggggcagctccccggagggctcaggtacccacctttcctgcaggtgtccaggctcctctgcctaccagtggggtggcgaccatcaccaaggtgtgaggggcggggggacctgcctgggggtgatcaggcaggtccanagcctctntnaatgacttcaccaataaaatttctaacttcctgttnnnnnnnnnnnnnnnnnnnnnnnnnnnnnnnnnnnnnnnnnnngtttttatttagggggnccgaangtttttttncctttaagtnagggttaattttggtttggaattgggccttngttttaaat

SEQ ID NO: 7449 - DNA, 260 bp, Homo sapiens
cattattgaagcattcactagtatcaactttggggttacctggccacatcctctgacctacctataagggtatcacagctaacggagcctctgtttctcagaatttaggcagaagcagttcaatttatcacaaactactctatatccagcataagtgcccaaataaaacaattgctaaagttctttaggcatttactgtttgttagttagatatttagtcctcactacaaatctgtgatacaggtattattttaattaac

SEQ ID NO: 7450 - DNA, 536 bp, Homo sapiens
aaaaagactgttcgtgatatttcatatgttttagctacaaacatttatctaagaaaacagctccttgaacacagtgagctggcttttcacacattgcagttgttagtgtttactgcccttgccattttaattatgaggctaaagatgtttttgacaccgcacatgtgtgttatggcttccttgatatgctctcgacagctctttggctggctttttcgcagagttcgttttgagaaggttatctttggcattttaacagtgatgtcaatacaaggttatgcaaacctccgtaatcaatggagcataataggagaatttaataatttgcctcaggaagaacttttacagtggatcaaatacagtaccacatcagatgctgtctttgcaggtgccatgcctacaatggcaagcatcaagctgtctacacttcatcccattgtgaatcatccacattacgaagatgcagacttgagggctcggacaaaaatagtttattctacatatagtcgaaaatctgccaaagaagtaagagataa

SEQ ID NO: 7451 - DNA, 387 bp, Homo sapiens
gatgtagcagaaacagaggagttggagttgctactaaaaagagaggtgcctttatctgatgatgatgaaagttacacaggtttgtttcagataatctacattcatctgttcgtttgacatgatatttgatagaacattctggattcatttgtaatatacaaaatgtttgaatactttagaataatgctggctagctagaataatgcttagctaactagctaagaatgatgaagttagtaacctaggtgtttgctacatataccctgtgtgaatgaagtcataatgccattgccccatttctgttttctataaattgctgaactattcattattacttttaagcctgctgcagaacctctccccatggcagagctaccaccactcgct

SEQ ID NO: 7452 - DNA, 829 bp, Homo sapiens
aagaagacaaaaaaggaagctggaaataagaaatccacaccagttagcattctttttggttatccactctctgagcgaaaacagatggcacttcttatgcagatgacagcaagagacaacagtccagattccacaccaaatcatccatcacaaacaacgcctgcccaaaagaaaactcccagttcttcatctcgacagaaagataaagttaataaaagaaatgaacgtggtgaaactcctttacacatggctgctattcgaggagatgtgaaacaagttaaagaattaataagtttaggggcaaatgtgaatgtgaaagattttgcaggttggacaccactgcatgaagcttgcaatgttggatattacgatgttgctaagatacttatagcagctggagcagatgttaacacacaaggattagatgatgacactccactccatgattctgctagtagtgggcacagagatatagtaaagctgttacttcgtcacgtggaaatccatttcaagctaataaacatggggatgcgtccagtggatgtagcagaaacagaggagttggagttgctactaaaaagagaggtgcctttatctgatgatgatgaaagttacacagattccgaagaggctcaatctgtaaatccttctagtgttgatgaaaatattgactctgaaacagagaaagactctctcatctgtgaaagtaaacagatacttcccagtaaaacacctcttccatctgcccttgatgagtatgagttcaaagatgatgatgatgaagaaattaataagatgattgatgataggcatattcttaggaaagaac

SEQ ID NO: 7453 - DNA, 602 bp, Homo sapiens
ctcctggcaaagccagcaatgaccacagccctggaacctgaggaccaaaaaggacttctgataattaaggcagaggaccattactggggacaggattccagctcacaaaagtgcagtcctcacaggagggaactctatagacaacacttcaggaagctctgctatcaggatgcacctggaccccgtgaagctcttacccagctgtgggagctctgccgtgcagtggctgaggccagaatgccacaccaaggagcagattttagacctgctggtgcttagaacagttcctgagcattcttcctaaagacctgcaagcatgggttcgagatcatcatccagagaatggagaggaggcagtgacagtgctggaggatttggagagtgaacttgatgaccctggacaaccggtttctctccgtcgacgaaaacgggaagtactagtagaagacatggtatctcaagaagaagctcagggattaccaagttctgagcttgatgctgtggagaaccagctcaagtgggcatcctgggagctccattccctaaggcactgtgatgatgatggtaggactgaaaatggagcactagctccaaagcaggag

SEQ ID NO: 7454 - DNA, 339 bp, Homo sapiens
ggcacgagctgggaagatgtttgtttgtaaggggtaatctgtgtctatcaaagcagatagtattggttttgcctagtttccaaacatggttttataagtcagtatatcttgtgaaaccattaggacaaaagtttggaacaaaaagaaatctcaggctcattgcaaagcttttttaacgttttcagttccctccatgttctgagcattatcataacgtactgaactgttctgttcagagaccactagggagaggagatgaggaaccagagcagccaggatgtttctccctgggataaaatctcaagcattcagacaccctcactgtgggctccacttctg

SEQ ID NO: 7455 - DNA, 256 bp, Homo sapiens
  misc_feature (1)...(256): n = a,t,c or g
aacctttactccttattacactaactttatcgttagtgttctactctacccacaactctggggaaactgaggctggggtagcttgctggtgcactagtaattccaaacttgaacgggagaaatgcttattggaagcactgtctttatatagtttgcaagttgtcattactttttatttttagagacatgtcttgttctgttgcccaaggctggaatgcagtggcatggcccaatgcaagtngaatggtgataagcg

SEQ ID NO: 7456 - DNA, 395 bp, Homo sapiens
acattttcagtagacttaaaatcaatcacaaaaatgataagtttgtaagggtatctaatggctatttcaaactttgtaaaataatagaataactcagataatctttgggagagccagactctgggtttgaacctgcacagccagaaacaatgtccaaactatgccatggagcttctctgacaaataccccattgatgtccccactaggtatggacattacagcctgcactgtccccacttaggtgtggacactagtctgcacctttatcgctggccactagatgccagtctgccacaacacctcaaaagctagctacctttttagctttttactggagtcctttagtaggttatctcatttaatccataaagcaacctggagaaagtgactgcaa

SEQ ID NO: 7457 - DNA, 375 bp, Homo sapiens
tgggagcacgctgctgggtcactctatggccgctgctacctccgccacttcaacgagctggagcacgagctgcagtcccgcctcaaccgtggctacaagcccgcctccaagtacatgaattgcttcttgtcacctcttttgacactgctggccaagaatggagccttcttcgctggctccatcctgggctgtgcttattgccctcaccatttatgacgaagatgtgttgggctgtgggaacatgtgctggaccaccgtcacactcctgggggtcaccgtgaccgtgtggcaggtgcctttatcccggaccagcacatggtgttctgacctgaacaagtgctccgcgagatcctcgctcacatacactacatgccc

SEQ ID NO: 7458 - DNA, 373 bp, Homo sapiens
  misc_feature (1)...(373): n = a,t,c or g
aatgagccagtgtcgagaaagtcagaaatagaaatcaataaagctaaatttcaccaagaagaggcagctttgcagtggaatgatagagaacattgaggccaatggatgccaaactcaataatgcacatccttaaactctcacggattagggaaagcagaaaagaaaaccagtgtcttgggaagagtcagaagggatcagagcttgaggaatacaccttgctcagtgggaagaggaaggatgggccaaggcntcagagggctcagcttcttacggccgggacaggcattagcgtgatgcacaaacctcctgggagccagcgttaaacatcttcataaatcatatgtttgcagctgtgtgaccaaaatagaccgt

SEQ ID NO: 7459 - DNA, 445 bp, Homo sapiens
ggatccacccagttgctcaagtaaaaaccctgagagacaccttacgccatctgggaacttgttagaaattcttaaacctcattctatacctgctaaatcagaaaatgtagggattaagtctgattatttgtgttttcgcaagtcatccaggtgattctgatgcatggaaagtttgagaaccactggtttaggttattaaaagttcttgtctccctatatcttgttttgcaatatcattgcattcaccccagccccacaaagctaccatctattgaccgttttgtagctattgagctttttgaagcaaaaatatgagcaagtcaattctctgcttaaaacctttcaatagatttctagtggccttaacatagcctacagagcccttcacaatctgaggtcctcacatgtctccagcctcatcccgagccactcccttgtgaggccc

SEQ ID NO: 7460 - DNA, 277 bp, Homo sapiens
tagaatcagaagtttatatattctgtgattccatttacatggcattccgtaaaataaaactggggacagaaatcatatccatggttaccatggagggagggggattggagtaggcgattgatttcagaggggcctgactttttggtgtgatagaaatgtttcctgtcttgaagtgtagtgttcacacagctgtataagtttttcaaaacccacagaaccatctgaaaaggtgaatttaactatatgtaaattatacttcgaaaaatgaataagaaaa

SEQ ID NO: 7461 - DNA, 1127 bp, Homo sapiens
  misc_feature (1)...(1127): n = a,t,c or g
ggccctccgattcctcttgggctttctgcttgccggtgttgacctgggtgtctacctgatgcgcctggagctgtgcgacccaacccagaggcttcgggtggccctggcaggggagttggtgggggtgggagggcacttcctgttcctgggcctggcccttgtctctaaggattggcgattcctacagcgaatgatcaccgctccctgcatcctcttcctgttttatggctggcctggtttgttcctggagtccgcacggtggctgatagtgaagcggcagattgaggaggctcagtctgtgctgaggatcctggctgagcgaaaccggccccatgggcagatgcctgggggaggaggcccaggaggccctgcaggacctggagaatacctgccctctccctgcaacatcctccttttcctttgcttccctcctcaactaccgcaacatctggaaaaatctgcttatcctgggcttcaccaacttcattggcccatgccatttcgccactgctaaccagcctgtgggaggaggagggagcccatcggacttctacctgtgctctctgctgggccagcggcaccgcagccctggcctgtgtcttcctgggggtcaccgtggaccgatttggccgccggggcatccttcttctctccatgacccttaccggcattgcttccctggtcctgctgggcctgtgggattatctgaacgaggctgccatcaccactttctctgtccttgggctcttctcctcccaagctgccgccatcctcagcaccctccttgctgctgaggtcatccccaccactgtccggggccgtggcctgggcctgatcatggctctaggggcgcttggaggactgagcggcccggcccagcgcctccacatgggccatggagccttcctgcagcacgtggtntggcnggcctgcgccctcctctgcattctcagcattaatgctgctgccggagaccaagcgcaagctccatgcccgaggtgctccgggacggggaagctgtgtccgcnggccttccctgcttgcgggagcaaccccctaancgctgtgaccacgtcccggtggtttgccaancccaaacctggcctctgaagcgggctctgagtaaa

SEQ ID NO: 7462 - DNA, 285 bp, Homo sapiens
gcagaacctcacctggtcagttgcctgctaagacaaaaatatgaacatgtttgcataaagtttaaagaaggcccagagtctcataacaaaacattcacagtgtctaggatatcatccataatgacttgacatctgagtaattctcatgtacttgccagggaaggcagccaacagatgccaaccccaagatgacacaaatgttggcgttatcagacaaagattttaaagcagctagtaagaccatgctataagaagtaaaagcaaacattcttgaaacaaacaggg

SEQ ID NO: 7463 - DNA, 447 bp, Homo sapiens
tttttttgctgtaaaacaaaacacacaactgggaagtattttattttttctacttcatataacattgttcaacaccacaagattttaaaggtctctttccccaacttttatgatttagaagtaccacttaaaaatatttactgatgctgtaaatattactgtttttgtacatagtaaagattttaatgaatgccatatccattatacctcttgctcctttggtcagaaagataaacagaaactttaaatcagatgtttggacattcaaaaatggttttgaaaagtatacccaaacaaaccaaatatatatcagcaactattaaaaatcagttttagtagttattaagaattcttaacaaggaagtatcgaagcatgtgtgagattttaaaaactatatacaattttaaaaacaaatttaaatttttaaataacaaagattaatggcc

SEQ ID NO: 7464 - DNA, 204 bp, Homo sapiens
ggcacgagaatgacagcatcctggcgactccacagtggagctgagcgccactccctgtagccgatctgggactgaaacgcttacacctctgcctcagaaggagtcccccatgccctgcctgaaatgacttcactggacacagcggggctgcagctaacggggtacaggtaggagctaactaacttcacccctgagtccacttgc

SEQ ID NO: 7465 - DNA, 419 bp, Homo sapiens
aatggaaaagatggaagaagaagaaaatggagaaagacctagaaagaaaagggagaaagagaaggaaaaagaaaaggaaaaggagaaagagaaggaaagagagaaggaaaaagaaaaagcaacagtatctgagaatgtggctgcttctgctgctgccaccacaccagccacaagtcctcctgctgttaacacatccccttctgttcccactacgacaaccgctacagaggaacaagtcagcgagccaaaaaaatggaaccttcgacgaaaccgaccacttctggatttttgtgtccatggaaagaagcttgaatgacatggatgactatgacagtgaggatgacaatgattggcgacctactgtagtaaagagaaaagggagatctgcatctcagaaagagggaagtgatggagacaat

SEQ ID NO: 7466 - DNA, 1008 bp, Homo sapiens
gtgttttttttgatttggagatggacgttattgagaacatgttggcgagttagatttgacaagttgacgtgttacaattagaaagttgatctgctattacataagctgcgaacttttcaaaaacactacaggaaatcttttatttctttggatgttgctgttccatgttgagctcctgagatatattttgtctttcagcttcattttcatcttccttggaagatgaagaatcacattcctgacatatccatccgtagcctgtctgtttaggagactttttcaaaggaggatccaaacagccaaaatggtagcagagtctgcattcatcacacctgacaagattttcattgtctccagttcccttgcaagttgcacattcagttcttaaatcttcagccttgggcttcttttgcaacacagactgtctttgtcttctctctctaggaactctttcctcatgtttttcttcctcaggaacgaagcttcgttttcgtcctctggttctcgtgtttcttatcggaatcttcttgggttctggtggcacatcctgtggaacaaatttcactggttccttaatctgcctccttgatcgtttggttccatctggtagggtttccatggccatatctgcttccatgtcactgctccctgcctggtcacattccgagcactgccaataactgtttttggtctttcttggcatccttgtaagaggaggatccagacatccaagatggtaatgtagtttacaggtatcacacaataaaagaagatgctgatcatggttcttcttacaaatcccacaactataaagtactgcaggaagagtagatgtcttttgtgtgcctccttcttttttacttggttttctctccttgggtgctcgcaaaattgccggtatattcaacttctgccctgtgattctgcctagtaaagcccatattccttgtccttcacttcgaagttttccattcaggttttgtagttcttctaaagattcacatagct

SEQ ID NO: 7467 - DNA, 479 bp, Homo sapiens
ttacaggtgtgagccaccgcaccgcccaaagtcatttgcccaaagtcatttttttagtagtagacagttctaatttacattagtaatctcttcatatacttagtatttattttttctgtcaagagcaatgagagttaattagaggagataataataaagttgttcacgtggctgtctgctttgaaagggaatttcagaatttgactggagtttggatctccctcctacctagtattaactttgccataagcatcaccagcaggtggcagcagttcccatgttctaaaaatatcgtcactagttaagacaggtatagagtatgttgttttgttacagaagtagatttaatttctggtatttaaattttcctcattatatttcattatagtctgttttatactttagtagacagaatggtatctaacagtactatcaaggcaggaacagcagtattatcagaaatttttaaatactcaaaa

SEQ ID NO: 7468 - DNA, 384 bp, Homo sapiens
cgagaagctattgcacattgggagagctttttcgtgggtttttgccagggtgtctttaccctttctggcttactatgacttgtaaacttctgtatgtgtctagtccatactgctttttgggctttctaagttttctatttaaagtattagcacagggatttccttcgacttgaaccacacaaagctcgcaggaacactgcaggtgttagtgtctcatggctgctcatatcctcacaagctttcatcttgaaacatggagcagcattcatcccttcagttcccagctgcttatcctctagcactctcctcagggctttgtccagctttgtttacctctgggtgcgtgttggctgcagcgtacccagaatgggtgtgagggcaaaa

SEQ ID NO: 7469 - DNA, 236 bp, Homo sapiens
aatcaggtgatgatactttggtgtatgttcaggactgaaaccttcttattgtgctaacttgatggtttctttaaaaataatagtcttgccataaattatgaataagacttgtttttttagccatatactcagaagaacactagagttctccaactggctacgcttagttcttgctttgcccaggtagtcccacgcttactataatgttcaatttagagttctaagtataaaatatt

SEQ ID NO: 7470 - DNA, 456 bp, Homo sapiens
ttaaaactagggaagctccctcagtgtctctgcatccacctacagcggctgagcatggtccagccacggcacgcctctgaagcggcatgagcacgtgcagttcaatgagttcctgatgatggacatttacaagtaccacctccttggacataaacctagtcaacacaaccctaaactgaacaagaacccagggcctacactggagctgcaggatgggccgggagccccacaccagttctgaatcagccaggggccccaaaacacagatttttatgaatggcgcctgctccccatctttattgccaacgctgtcagcgccgatgcccttccctctcccagttgttcccgactacagctcctccacatacctcttccggctgatgggcagttgtcgtccaccatgggagacatggcactctgggacactttgttcatttaccgacggtccccaccttc

SEQ ID NO: 7471 - DNA, 817 bp, Homo sapiens
  misc_feature (1)...(817): n = a,t,c or g
ctccttcgattttggctgtagaaaatgaatacatttccacgaggaaatattgtagataattggtgagttacataaatttataaaacattagttcctctttctgcagggtaaatttctgagagtgaatatctctgttctgtatcctgttatcttgatttctgagtttcatactaaatttcatgagatgaaacttggtacctcctagaagtttttccctatgactaattgtttactacattatttttaatagaaataatacaataataaatttattatctgaaagaaatagatacttttgctttttttattgaggtataaaatgtaagtaccttaaaatttccttcccttatatgaacactgtgtttgagtaattttgctggatttttcaaacacgtagtttcaaaaaccaagtgagtaactctaacatggaaactaaagcttgagcccagtgtctcagagcctaaggcttaatattgagccctacaaaaggaggttattaaaggaccagctagtttatttatgggggatgctccccctgcagatgtcccagcctgctcacaccagccatggaagaagcctttctgctgacagagccctggaaagctgggggacccacaggcaaatgcagttaggattaagatgaaaaggggactgagagggtcttactgatgataaagttggtaatgtttttgaggcagtttctaggccttngaatatcaaccaagttagggttatgtaaaaaaaaaaaaaaggattcccaaggggttttgcaacagggaaaagttccnccttttaaaatttttaggggttcnttagt

SEQ ID NO: 7472 - DNA, 308 bp, Homo sapiens
ccggggcgcaatgcgagcggctggcgtagggttggtggactgtcactgccacctctccgccccggactttgaccgcgatttggatgatgtgttggagaaagccaagaaggccaatgttgtggcccttgtggcagttgccgaacattcaggagaatttgaaaagattatgcaactttcagaaaggtataatgggtttgtcctgccatgcttgggtgttcatccagttcaaggacttccaccagaagaccaaagaagtgtcacactaaaggatttggatgtagctttgcccattattgagaattataagg

SEQ ID NO: 7473 - DNA, 499 bp, Homo sapiens
  misc_feature (1)...(499): n = a,t,c or g
ctcaggtcacctggcaagttagaggtcatgctgggacctgaacttgtctcccacatattcgtcctttgtccttcccttcatagctgcctgatgtgggttgtaatttaccccctgacttccctttaataagctccctccttccttaaggatcgcacaccccagggcagttggattcattccatgcacactgttttctcagtcgttcatccttgctcaggcccaaacttaacttacagagcagtcagggaaaccaggaactgtctttccactctgtggacctccaatgtgggcggttacctggcaggttccaccatctgctacgttgggataaaatgttctccccccagtaatgagtttgctcccagggcggtgctttgaaaacactcagagatcttcaaatgggaaagcaggatttcagagggcaaatttagctggccngggccgaaacaatggaggttttccattnacagaccaactnttgttcaattccatttaattt

SEQ ID NO: 7474 - DNA, 342 bp, Homo sapiens
acactgcttgtcgcctgggcaaccggagaggacgaagcaggacctaggtggcggcggtggtaccggctgcaatggtgtccaatcccgtgcatggcttgccctttcttccgggcacgtcctttaaggactctacgaaaacagccttccacagaagtcagacgctgagctacaggaacggctatgcaattgttcgacgtccaacagttgggataggcggagaccggctccagttcaaccagctgtcccaggctgagctggatgagttggccagtaaggcaccagtcttaacttatgggccaaccttaaacaagccccaccttgcgggttttatttccttgcggc

SEQ ID NO: 7475 - DNA, 575 bp, Homo sapiens
ccgccggcagccctaccccttcgagcgcatgatcttcggcgcctgctggcctcatcgggcagtcggcctcgtacccgctggatgtggtgcggcggcgcatgcagacggccggcgtcacgggctacccgcgcgcctccatcgcccgcacgctgcgcaccatcgtgcgggaggagggcgccgtgcgcggcctctacaaaggcttgagcatgaactgggtcaagggtcccatcgccgtgggcatcagcttcaccaccttcgacctcatgcagatcctgctgcggcacctgcagagctaggggaccctgagctgctctcaggacggtggaccggtgacccctttgtattctgggcccatggaacggtgggggggtgcgcttgattctacttcaggaggcacatggggcgctttatggaacgagcaggtgggcctgaggggcctgggctcagagtccacgtccaaacgcaaagctggcagccctggaagtgcagtgttggggcgatggtgtggggggtcccgcagctcccctcttccttcctctgcagacgctggcgctgtctgccggaggtgttgccca

SEQ ID NO: 7476 - DNA, 397 bp, Homo sapiens
ttcggcacagcaataccctggaattacttttcctcttttacttactcaagtcctgcaaaagccagttccattatgctggtctcactgacctctttctacatatttctggtaagaatgaattactttctcctgaaatacctctgccatattgtttaaaaattgccatatggtgctggacatgagtatgtgttcacatgtttattatctactctagtctcaatttctaaggtcttgaatataggaaccaatttattcatcaccttattccagacatgatggaactcagctttattgagaatcaagtgattatagtaggatagtgaccatcctgagtatgttcatgtgttacataacaatgttttgggtcaaccaagggactggcatatagggaagggtg

SEQ ID NO: 7477 - DNA, 70 bp, Homo sapiens
gaaatagtagtaatggcctaagaccatgttcagtttgacaagctttatatactgtacataatttcattgg

SEQ ID NO: 7478 - DNA, 3255 bp, Homo sapiens
ctagctagaaaaggtgtttcctcccattttatttcataatacattttcacagaaacatgatatatttacaaatatacaggtaagagactgctggtcagaaatcttaaaactcaaaatgtcatcaaaaattaatttacaaaagccaccaagggtccatggaggcggccaggtggatggtgtggccggcgtctgcgtgagcctggcccagaagcccacgcagcctcccggctctgcctccgctgggccccgtctcaggaagcgctggtttgcaggtttttggaagctgcaagcatcgctctgactttggccatgagatcctgagtgattttgctctgcacggaagaaacgattgctgaagagatctgggcttctttttcctgagagactcccctggagcgctcctggctggagccccgactctccacaggggagacgctggctgagtgcgccgagtgggccgcgggggccgcggggccggggcgctggcctgccttgctgggtgacaaccgactgagacctggccttggacttggtccgcgaccgggaccgcctcttcttcttcttctcgtggggacttctggagcgggtccgcttcctgctggccccaggggctgcggctcacgcggtaggcagtgggcacactcctctcttccctccgtctctcaggggagtgggctctcctccgaggggaccgggagcgggacctcgaccgccgcactgtccgatagggcactgggaagagaatgctttgcttttgagtgtgatctagacctggacttggatgacgaatggtacttgggagaacgtgatcttgttcgagatctttttttgtgctttttctttttcttttctttctcttcttctctcggtggatctttgcttttgcctcgaaggccctatcgggtggtttaacttctaaagtaggcagaggcctacctccagtcagtagagggcagggccgtagtgctggattcctcgacactgaaaggactctcctcaattttcccagcttctgcttccggcagaggatttttgagggtctgtaaaaataacgccgctttccttttacgttctgcttgaagctgtttctcttttgactccttagacgcctgggcgagcttttcccgggcagcagctgcgaggcgatcttccagcttttggctttgcttgctttgcttctagctcctcctgggtaagttgaggcttcttctcctcaacaactacacagggtggggcaactgctgggttagtgtttgcagcactactagaactttcttggccttctttgctttcttcatcatcatcactgtcatcatctagcttaacacgatttttttccaggggaagcagatcattttctttggccttgattgcaaagcttattggagcaaaggaagctttcaccagcttcccgtccgggacggtcttactggacgatgcctccttcttcccgcctgagcctgcccgtgctcccacctcggctgcgtcttcaggcgcgccatcctccccagcatcacttggcttctcgggagcagagtctgtgggagcctcttctggtgcagacacagcctgcatgctatcgcccccttctttctggaggaagaactgcttcttaaactcataataagcattatactggtaccacggctgcaggaactcaaatctttgatcattcttggcacgaacactggtctcgaacttcaggccgttcctggcgacatactcggccagcttgtcaatcacgggctggacgtcggggggcggggggatgatggcggccacgggggcaagtgcacttgtggtggtggttgtggaggtggccccgctgctagtctctgctgtggttgggggcggtggtggtgtggtcccaggaggtggtggggcggtggtcgtcactccaggggagttagacacggtcacgccagcaggaagggtgctgtagtaagtagtcacatcgattccgggagggggcggcgcccaggcagtaagtgccgtccggtagcatgtagtagctgtaatacatggctgccacggtcgagtctgccgtgtactccacctgggagggctgcacaggcgcaccgtctgcgttgtgtggggtgggagtggaactgtcagcctgtgccttacgaacaagtgctgcgaggggatgatctgggtccactaccttcaagggcttcatcagctcttcaaggcggttacacttcttggaggcaaagagagagggatgaaggtaattcccatcttcttcatcatcatcatcttcattgtcagagctgactcctgatttttttttctcgtcacttttgttttctgccaggacagtgtagcgtccctctttcatggctttctggatgaacttatagtaggggttgaggtagtggtcgaagcgcagaaagtcaaactgggagttcggggcctgcttggccttcagcatgatctcaaactgtgctccctgcctgcacacgaagctgggacgtgcgctcgatgatggcgtgcattttagcggttggtggcaactccacgtcagacgggacgctcaatcctaagggggcaacgaagggctcttcattttcctctaaattttcggcctcatttttttctctctgtttggaaggctcctcctcctccgtcggctctgacgggtcgtaatagtcgctaccgtaagtgaaccccacgggcattgtagctcccatcctctgctagtgcttcactgaatcgcttgtattcttcctcttgccttgcctcctcctcaagcaagtccgtatgcaaggctaaatacctctcttcatcacacagggcctctattcgcgcctcctcttcagacagctgataatctctgttccacgtggaatactcagcatcgtactcagaaaggtcatgcaggtgaccacgtccatcatatctgtcgatgaggatcttgtggtcccccatccaggggatgaggtgctgtccctgttcctgagccagggcccgctcgtcgtcccggaacagcttgcaggcatagccgaaaaccaagagctccactcggctgcccccagccgccggcaccgcctggcccggcctcctcctctgcgccgcttttcctctcagggtattcgcggcccccgctcgcgccgtacatgacagcgtccccggcgtccaggctggtcctcttctgtgccgcgcgacgtccctgatacctccacttggcctaccccttcactcaaagaccccgcatcccggacccaacctcaacaaccgcgccatagcgggcca

SEQ ID NO: 7479 - DNA, 240 bp, Homo sapiens
tgatcatatctgcagtgctcttatttctaaataaggtcacattcatagattccaggtggacatgaattttagggggacagtagttatatactgtgcatcacaacacttagaaccaagtaagttgggtttgcttcacattaatagtcttaactataaaaatattttggatttttatttttatttatttgttgttttttttttaaacagagcctgggtgacacagtgagaccccgtctccaa

SEQ ID NO: 7480 - DNA, 1035 bp, Homo sapiens
atttttacttagaagtgcagaactggctcttttgctccatccagtggatcaagcaaatactcttaagtctcctgtttctgaaagtgtgagcccagtggtacctgattatttgcctacagaaaatggggattttttgtcttcaaaaagaaaacaaattagtagggatataaatagaattagaagtgtaactgttaatcatatgtcagacaacagatctatgagtgttgaccttagccatatccctttaaaggatcctttgctttttaaatcagctagtgatacaaatctgcaaaaaggcatttcttttatggactatttatcagataaacatttagggaaaataagtgaagatgaaagtagtggacttgtttacaaaagtggctcaggagaaattggatcagaaacaagtgacaaaaaggattcattttatacagattcaagtagtatcttaaactacagagaagattcgaatatactttcatttgatagtgatggtaatcaaaacatactttcaagtactttaactagtaaaggaaatgaaaccatagagtccatctttaaagctgaagatttgcttccagaagcagcttcactctctgaaaacctggatatcagtaaagaagagacccccccagttagaacacttaaatcacagtcatctttaagtggaaagcctaaggaacgttgcccacccaacctggctcctctctgtgtttcttataagaatatgaaaagaagctcttcacaaatgtcattggataccatttcacttgacagcatgatattggaagaacagttattagaaagtgatggaagtgatagccatatgtttttggaaaaaggaaataaaaagaactcaactacaaattacaggggcacagcagaaagtgtgaatgctggtgcaaacctacagaattatggtgaaacttctccagatgccatcagtacaaattcagagggtgctcaggaaaatcatgatgacctgatgtccgttgtggtattaaaattactggtgttaatggggaaattgacacc

SEQ ID NO: 7481 - DNA, 115 bp, Homo sapiens
catgcgggtggggtggtgcagggtgcccccccacagggtgcccccaggggaggcacccccacacggtgcccggcagtcctgcctgcctggagagctttctctgcagaggagactc

SEQ ID NO: 7482 - DNA, 2764 bp, Homo sapiens
cttgaacttgagaagcagaaattgcaagaagagcaagaaaatgcccccgagtttgtgaaggtgaaaggcaatctcaggagaacaggccaagaagtcgcccaagcccaggagtcctaggctgaggctgcaccaagacctcgtgtgtcaccccacagagctgtctgtgggtgccttctcaatctcagggcaaaagcccctggagaatatttcagccagcagagaattttgacttgcagtaggatttggtttgattttcctacgatctgggtggatgccttgcctgtgacagttgcagttcctattcgccaaatgaagggcagtgccccgcacgtaaagttggaatgatggacctgtgttcagagacttaacagaaccaacaagcaaaacaagtgagaacaggaaaaaggaagaggacactggaatcaattcttgagagtttgcactacttggtttttcttccattccaagtttcgtggggacccagagccttttttcttttaaaagctaaaaaacaagtgtttaattcctctttttgttatctgttagataattgagatcacctagaaatgcgtttaatctgttcactcactgtaaattttgaggacccagaattgtcttgtttaatttatactttcacccctgttgcagttaacaccagagaaggaacgtgaatgtcgagcacagccactacccttgttggcacttaatttagaaatagggtgagaagtttaaaagcccatcttgattttattttcattccttttggttctctgtgtaataatagcaggctacatagtgacattccagttccaagaaggtacatcctgtccattcattaattgctttgattactaggagggtttctgttcagttttgtttttaaatgtcttgctgatctagttctttcagatggaataaccttccagtcccttagagagtggaactagtccatataacccagcttcagtagcaaaagtagaagccgccacatcttttcatttctccaagaggagagtggggaagggttcccatgaccagctgggcagtcaggatttctctaggcattctaatgtgaaataagtgtagactgctgtcaaggaggcttcatcagaagatgtatagcatttgaatgtctaatgataatgcatatcattagaatccaagctttgaaaatttctgattaatgctcatgtatttctttatctttgtttttccttgtgaagaaagactttcaccactgtctgagtgatgatgctgttgataaggatgatgtcgatgactactatattgcatctctcaggaacagctgatgggaagggaggggctgctgagttcccttgttctagctagcagcacgctcctcagagagggggccgagttacagacagcagccgcattctcatgcaaaattagttttaaactgctagtgtgggcatcggtaccttttgcctgggtgataccgaagaattgttgaggatttagtatgctccgtagagacagttcagccagtcatttctgcattggagagacttctcatactttctttgaagactcatagaaagctggatctagagcttttgaatccttaattagcacagtagaaattagctttctatgggaatgctttagtgttagcagttgacaattaggcccatattcaatctgaatgggaacaaaagtaaatgcaatgataatatactgctagttagagaaacatgttagttgattatacctgaaatggattatttatctcatcagcaagtattatttgaataaaatgagaaatgcttaagaaaaattgttgctctatagtaatttggtttcgaagaatggaatggtaactattttttcccatcgttcttttgagagaaggaagtgtgatgactgatgatcttgaaaagcccatttctgattgcacgttgactggaattctttctttgtgtctgtggactagcgatgctgtttgtaaaatgaagattcgggactggctcatatctttttatctaactagatgtcagatcttgaaatctgtattctcgaagcaattctgccacttgatcgtattcacaggggccctggtaggctcctttagaaggaccatttctgttcctagagcttaactagaattcattcttcactgaaaaaaaaaaaagttacttaagaaagcatttctttcctaatctcactcaaatctgcagaattatttgtaattagtaatacaaaatctggccaaaaggagacttgtaaatagcgtaaagtggtgtcttatgctaaacggtggaatgtataggcagagaagctctttgaagttgtcagatgagctgggctcacaagcctgattcaaacaggctgtcggtctcctctcaccccttaatactgtgcagcccaaactcctaggactcttgaacatctgagcagttttgtgctttgagccactttttgacaaaaatggctccatttttccacagcgtggttttcttaaaatagtttaatgttttatagtctcatagtagtagtgttgctttctaagctataacagtcgactttattcttctactctgaaaaatcttgacttgtttgagtgtatataatatatataaagggagccttaatggattggttttcataatttaatattttttgtatttgctcttgtataattgtttttaacggaaagtattaaagaattgagggtggaattcttagaaccaaagttattcttaataaaaatcaccacatgcttggacaatgaaaaaaaaaaaaa

SEQ ID NO: 7483 - DNA, 733 bp, Homo sapiens
  misc_feature (1)...(733): n = a,t,c or g
ttttttttttggtgaggagctttttattattattatatacaaaaagatattcagagacctggatctcacttgtataaaagagttctgtgatcccaccatgatccttgagaaagaaaaatcacannnnnnnnnnnnnnnnnnnnnnnnnnnnnnnnnnnnnnnnnnnnnnnnnngaaatgagagaaaagcgtgacttttctctcttcttttaccccagttgtggggggcaacctgtttcctaaaataagcactgatttttatggactctggggagtataccacgtccagaggcagtgtctgcatccaaacgcttgctgggcagttggatctgaatgcaggtccatttctctatcacagacctgccttttcagattctttataaattctgtctgaaaatggtctatcaacgccactacctttaaggagttatgctgccaaatactttgatttcagacttctttcaaatcttagctttcagaagcactttataaaacataaaattcaatttgtttgatttggtttgactgagcatgtttcctttctcataaactctgatatatccagaggtttgtgaaaccccttttggnggcccaagacctcagctaaacagcgagtnaaaaccaagatggctcacagttgtctttctgggtactggttcacttcagcaggcaggacaactctcttggagagtcacacacacagttaaggagcaggacagggtgctagggcctgc

SEQ ID NO: 7484 - DNA, 293 bp, Homo sapiens
ttaacttttaggcacaactcataactttagtgacaaataactcatccatacagatatcagcacctcagggtaagaaaatttggggcctaatgtagggggtcaaactaaaaggccaatccagccacagtccttcattcaagtactgtctatggcttctttcacactgaaattgcagagctgagtagctgccacagagaccatctggcctgcaaacccaaaacagtttgcagaaagtttccaatgcctgagctactatactatcaatccaagaggcttttcaaataaaatcagga

SEQ ID NO: 7485 - DNA, 406 bp, Homo sapiens
ttttaactggggagaggaggaactctttctgaaggccagggacatttaaatgaatgcgccatttcttctctttgagaattgggccgtaatctctggaatgcatcccagggccgtggtttggaatgggtgtctaacaggaaattctgggcagtctatgcatacattacattcctttcccaccctgaaagagtggtcaacaaacacaactgtcctctgtttgaataaaagggggagtgttgggagtggtaagaggccagggcacaaaccgcacagagttcaaaagcagatgtggctgctgagaatccaaacatccttttcttctagaaaagagactcagtcactaagagtcaccttttggagatacccagtcagtccttctcctatttccatgagataaatgtcccca

SEQ ID NO: 7486 - DNA, 239 bp, Homo sapiens
gcttactcggaagcatgtccccaccccatgctagatccagctgcattaaaagtaaaaattaatggcaaactataaattttaagatcatttgcttcacacataaacacagactagctgcatggtggtctcaagagatctcaagtcttgctgacatgcatatagggtacaacttattacaggttcataacatttgcttctcaattcacataaaagagcaaattgctgtggctttgcttttt

SEQ ID NO: 7487 - DNA, 632 bp, Homo sapiens
aaaagagctctgattagtttttgggaatctgtggaacatttaaagaatgctaacaagaatgaaattccacaattagttggtgaaatttatcagaatttctttgtggagagcaaagaaatatctgtggaaaaatcactttacaaagaaattcagcagtgtcttgtaggaaataaaggtattgaagtattctacaaaatccaggaagatgtttatgagaccctaaaggataggtattacccttcatttattgtcagtgacctgtatgagaaattgttgataaaagaggaagaaaaacatgcctcacagatgatttccaacaaggatgagatgggcccaagagatgaggctggtgaggaagccgtggatgatggtaccaatcagatcaatgaacaagccagttttgctgtaaacaaactgcgagaactaaatgagaaacttgaatataaaaggcaagctctaaattctattcaaaatgcaccaaaacctgacaagaagattgtttccaagttgaaggatgaaataatcctaatagagaaagaacgcacagaccttcagctgcacatggcaagaacggattggtggtgtgaaaaccttggcatgtggaaagcctccatcaccagtggagaggttac

SEQ ID NO: 7488 - DNA, 671 bp, Homo sapiens
aacagccttgccaaactgagtgtccatgctctgagtcgccttggagggtatttggctgaagaacaagcaactccagaaaatccaaccataaggaaaagcttagctggcatgctgacaccctatgttgctagaaaacttgctgtggctagtgtgactgagattttgaagatgcttaacagcaacacagaaagtccatatttgatatggaacaattctacaagagcagaattacttgaatttcttgaatcccaacaagaaaacatgattaaaaaaggtgattgtgacaaaacttatggatcagaatttgtctacagtgatcatgccaaagaacttattgtaggggagatttttgttagggtgtataatgaagttcctactttccaactggaggatccaaaagcatttgctgcaagtctcttggattatataggctcgcaggcccaatacttgcacacattcatggccatcacacacgcggcaaaagtggagtcagagcaacatggagatcgcttaccgagagtagaaatggctttggaggctctgagaaatgtcataaaatacaatccaggttctgagagtgaatgacattgggcactgtaggtgtatattttctcttctccgcgtttcatggagctggtcaagtacagcaggttggctttagagggtgtgaa

SEQ ID NO: 7489 - DNA, 340 bp, Homo sapiens
  misc_feature (1)...(340): n = a,t,c or g
agagacagagaccagagtctgactggtaagaaattcttacctttttgctggcatgtcaggcttctgagttctttctccctgagtggccctagtggccctgcttaactgtatgcagacaaacacattgctgtgaattaagaatattcacaaatagtttacaaattttggaaaaattaggcagagagagaaatatgactcaaattctatttatgaaagtatgctcaacacacttaacatatcagggagnttaactccaaaaagctagtttaagnttaaaaagccggtgtgttccattaattcctgaaagcctgacaaaggtagcctagggattttcagctaa

SEQ ID NO: 7490 - DNA, 443 bp, Homo sapiens
tagggtgggggcagtttagttcccaatggatatttctggtttttgcagaaaaagtaggaaagggaagtgggatggtttacctctttgtcaggaaagttaggtaactattagtaaaaaacaattatacactttaaaatcctgcaattattttacagaaagcactaaaactgcatgcatgggaagatcactccatttcagatgtatttgttacacagtatcttgtttatgctgtgcttagtaggcatggttgaattcaataaaagcacacgtgaatgcattttatttaagacactatggctaataccactgtttacatataaactggcgtatctatgtgagaaactcaagtttgtgaaattctgtgcatctttgctaattgctgtgtttgatcattgacatttctgacatgccacatgggcctgcggggctggtcatcccctggg

SEQ ID NO: 7491 - DNA, 460 bp, Homo sapiens
tttttttttttgactgtgaagtatacattttatttaacattccattaataagccatatttacatatataaatgtatgaagtcttaatataaaatagaaaaattgcctggactgaaacaatcactccatatggagttactttacttattgaagaccttctgtttacataaaaatttacaataatttatataaattattttcttccaaactagatatttaataatccacactattctgatgactttacaaataggtgtacattaaaatcttcccaagaaattacagcatttttctgcgtaaaatttgctttggataggaagacagtttctttctgttccttccaagacctgttcctgtcacttctgtagtttttcttggtttgctcttggactccgtcagctggggctaggccaagggggaaatcagccgaatttctatgggaggaggtgaccaagcacttt

SEQ ID NO: 7492 - DNA, 771 bp, Homo sapiens
  misc_feature (1)...(771): n = a,t,c or g
aaaccctaaagagagtgtccttaatagcaatcagcacttgtaagcttatatactggtgcatttggttttctgttgggtgaatgcggtgtgtgggcgtttgtggattctgaaagagaaagccgtgtgtcgtgtgccatgacatttctattgcacattctttgtactggcttctttaacagcgatgaacgttcttttccctcctgggttgttcatccacgacagtctctccctgtgctccttcatcacctttccctctctctttgatggctacagagtggtagggcctggtgcttagtcgatgaaggaatggtagccatctacagtgctgctggagatttccgccagagcgctggagaccttgcgctcagatcttctctggtgatgaagaggcgaggaatcaagtgactgatctggaagaaatatctcgcagcactgcagctaacatcacagaacttaagtgtgttttgtgtgtgtgcccacacgtagacaaatgtgtacggtgcacacacacagtgcatcattttttaagggcagattatatatatatatgagatgtattaattcagtggttaccatttgtttgcaggaaaaagaaatgtatgggtgaaaaaatttatggttgataaatccagccaaggagattaaaaggggtttggataaattctgggtataaatgctcagactaaaaaaaagaaatggcagtttttgcacagtgctatggtcttgcactagttttttgtttcncatctgaaaaaaaaaaagtaaaataaa

SEQ ID NO: 7493 - DNA, 207 bp, Homo sapiens
ttttccaccacagggcattgggcactgggcactttcttatcgagatagtcactcccacgtctggttcgtgatgggcttggccctccagctcagcacaactgcaagaatggattttgtattttctagacggacactgtccaagatgggtagccattgggcacatgcgacacatttttaatgaattaaaattaatcaagactgggaaat

SEQ ID NO: 7494 - DNA, 507 bp, Homo sapiens
ctgtacatagatatagacacacactttaaaagacttaccaagcactttttaaaagaagaaactattttgcagtcctcccctacccactccctgcccttcccactgcagagatgacatcccctcttctcccactggccttttggcagagaatctggttctgtctcttttttaatgtaggaactaactatttttaacttcttcctggggcctgagcagggaagggtgggactggaaggcactaaggggaagggagaagccctcagggcaggccctgctccccctacctccttgccagggcaagggtggagtgtggaagacgtgggtcccccagagcaggcctggcccccagctgtgagggcctcagggaggcccgagggggagtgctgggggtctcagctggcttagctcctaagtttaccaaatgttaatttagtcttggggagaacagcaagggctggaggccagtgctgcagggccagccccactcctgacacctgggcccttgaa

SEQ ID NO: 7495 - DNA, 647 bp, Homo sapiens
agcttttaacaaatatactgtgcctatattctttcctaaatgtatattttacaatttaggtctgcgtttcttagttcgtctctgcacagatcttggattaaaagatgctcaagaatatgccagaaaactgaagaggttggaaaaaatgaaagaaataagggaacagcgcataaagtcaggcagagatggcagtgggggctcccgtggcaaaagagaaggaagtgctagcggtgatagtggccagaactatagtgccagtagtaaaggtgaacgactaagtgccagactcagagctttacctgggacaaatgaaccttatgaaagtagcagtaacaaagaaatagatgcctcctatgtggacccacttggccctcaaatagaaccgaccaaaaactgcagccaagaaaaggatcgatgaggatgattttgctgatgaagaattaggagatgatttgcttccagaataatattcactttaatatttattaaaggaaagaaattgccttatgagatcatcctcatgttaaaccttggattaaatatctaacctgtaattattttttttcactgtcaaaacttaagtaagtgtattctattctgtatgtatgcatttaagttgtttttttcttttaaggaataaaaacagg

SEQ ID NO: 7496 - DNA, 300 bp, Homo sapiens
gtctttcccaaagaaattccccatgtctcagtcagtgcctcatatttacattcaagttaaagaatttatttatgccagccttaaattttcagagtcactacaccggagctcaacagaaatagacgatatgcttagaaaatcaacaaatctgctgctgaccagaactttgagtagctgtttactgaaccttattagaaaacctcatataggtttgacagagctggtacaaatcatcataaacacaacacacctggagcaagctttgtaaatatcttgagggactttataactaacattaca

SEQ ID NO: 7497 - DNA, 700 bp, Homo sapiens
tttttctaagaagacatcatacttgaaatgagaaaatattttgaactgaatggcagtgaaaacactacacatcaaaacttagggaaatgtggttagtgtggtacgttgagggaaacttataacctcacacgcttgtttcacaaaacaacagcagacaacagagatttccaactccagcaatgacaggctagggtacctagatgaaccatcacactgaaaacacatgctgcagtaaatactgaatttctccttaagagctgtgggaatctgacaagccaggaaggtagaaacaagggagaagtgagggacccaggggcccaggaaggtcgtgagcgccaagcacccagtgctgctgccccagggcgtggccagtccaggcttacggggctcaggtcctagggggctgaccagcagggtggggcagacaccaggctccagcccagcctcaggtgagagtgaagggagcacctatctgcagcaagctgaagcccccaaatctaggccctgagggtgaatcggtaccaaccccctcgccctatcctgaatgtgagcggggaaagtgctcacctggcaagatctggcctgcggcccttcaggggtcagcatgacttgtgtgggtcagaaagcctcagccccaaacccggtctcagaggcttaagaaccctctccaggaggatgatccatataacagctctcaaat

SEQ ID NO: 7498 - DNA, 388 bp, Homo sapiens
  misc_feature (1)...(388): n = a,t,c or g
cttcaataccctgcttaaaaaacttctactgactctctactgctctgaaggtaaaaggcgaactccttaccatgagatacaaggtctgttatgagtttgaccctgcttccttcacctctgcaaactgccgttcatcttctctgctctagctatgctatgcctgggaatgtaggcattatttctcatgtttgtaggctttgcacatgcctccttctgtctggcaatgcttcattcatgcaaaattcaggctcaggatgttaaccttttccaggaaagcctttctggggggacctttctttcattagggggttggccgggggcaaaatactggcttagggggntacactttatggctggaaaaattatttgtttgttttattggggccat

SEQ ID NO: 7499 - DNA, 874 bp, Homo sapiens
  misc_feature (1)...(874): n = a,t,c or g
aagatatccgacccgaatatcgagaggattttgttcttacagttacagggaaaaaacctccatgttgtgttctttccaacccagaccagaaaggcaagatgcgaagaattgactgcctccgccaggcagataaagtctggaggttggaccttgttatggtgattttgtttaaaggtattccgctggaaagtactgatggcgagcgccttgtaaagtccccacaatgctctaatccagggctctgtgtccaaccccatcacataggggtttctgttaaggaactcgatttatatttggcatactttgtgcatgcagcagattcaagtcaatctgaaagtcccagccaggccaagtgacgctgacattaaggaccagccagaaaatgggacatttggggcttccagggacagttttgtcacattcaggtgttttttagtgtcacttgagcttagttaagagtgtcacagacacccattagctgcaggaactggcccaaatttttctctctcagatttggaaagttcttcatactacagcatgagtccaggagcaatgaggaggtctttacccagcacatcctctacgagctccacaaagcgcctcaagtctgtggaggatgaaatggacagtcctggtgaggagccattttatacaggccaagggcgctccccagggaagtggcagtcagtcaagtggatggcatgaagtggagccagggaatgccatctccaaccacactgaagaagtcggagaagtctggtttcagcagcccctcccctttcacagacctccttccctggggaacggctttcacacagcttcaccgacntttcattacaggacccagagcaagtncactgcaacaccttcgatt

SEQ ID NO: 7500 - DNA, 325 bp, Homo sapiens
gcagtgaagtcatggtctaaggccagggcggaggtggaagagctaccggtgtcatagccacatttacctggtttctgcagctgtgggagtgaactgtggatgttgtcactcacctggtggggggtggggtgtcttcctaaaaaagcaggtgaaggacagaatagcgccagtgtggagagagccgaggaagaggaaactgcctgggtgaccaagaatacgtagtgacagaggaggacaatacgcgatcacagacaccaggaatgaaaaaggtggctttctggagatagcgccccttccttcatcataacccattcattcagaccct

SEQ ID NO: 7501 - DNA, 369 bp, Homo sapiens
gggtgctaggttgtctcacatctaggaaagagaatgttcatattatatagaaatgggcattttccctgtggcctgatatgaggtatccagaatattcctttaggtattattaagtcataggtttctgttttgatagaaacagcaggtggttcagttagtatttttgttgttgtaatagtagcttagatctcttgtttttgttttctttggccaagacagaaaacattctgccacacacattacttcatgactctggttatatattgagagcagcattaaaaaaaaaaaaaagtccaatttagtcccttaggccattcttgcattggtataaaggaaacacctggagactagggtaattttttaaaggaa

SEQ ID NO: 7502 - DNA, 94 bp, Homo sapiens
cctttccctaagctgagcttccggtgagagcaagagtcaaggtgtgttgggatatagcacatgtctgccattggttctccctgaccagttgtac

SEQ ID NO: 7503 - DNA, 821 bp, Homo sapiens
ggaaaggaagagacattttcagcctggtacgtggatggccgcgttctggtggtgatagttacctttggcataattctccctctgtgtctcttgaagaacttagggtatcttggctatactagtggattttccttgagctgtatggtttttttcctaattgtggttatttacaagaaatttcaaattccctgcattgttccagagctaaattcaacaataagtgctaattcaacaaatgctgacacgtgtacgccaaaatatgttaccttcaattcaaagaccgtgtatgctttacccaccattgcatttgcatttgtttgccacccgtcagtcctgccaatttacagtgagcttaaagaccgatcacagaaaaaaatgcagatggtttcaaacatctcctttttcgccatgtttgttatgtacttcttgactgccatttttggctacttgacattctatgacaacgtgcagtccgacctccttcacaaatatcagagtaaagatgacattctcatcctgacagtgcggctggctgtcattgttgctgtgatcctcacagtgccggtgttatttttcacggttcgttcatctttatttgaactggctaagaaaacaaagtttaatttatgtccgtcatacccgtggttacctgcatactcttggttgttatcaacttgttggtgatcttcataccctccatgaaggatatttttgggagtcgtaggaagttacatctgctaacatgcttattttcattcttccttcatctctttatttaaaaatcacagaccaggatggagataaaggaactcaaagaattt

SEQ ID NO: 7504 - DNA, 1154 bp, Homo sapiens
tttttttttttttttttcacaagactagatggagaattaatgaagaagaaatagaaatgaggcttatttaaggtacaaaattcttgtatttgtaataacctagatttatagatataaaacaagtcttttaaagacttccctaaaatactcaatataaaacaggagttacttatcctagatcatccttagttaggtacacatgattctctgtgcaactagctggtggacatggattaaaagctgctgggcctataatgtactaaaacatttttctcccttcagcaagacaggtaggggttgaaggctaaatgcatcagaggagtattttccttaggcattttgggacaatctttttgcagtaggttccataggttttccccagcgaaagttgactcagacccagagtaactctgacacaagttgccaagagggaaaaaatacttcatttgctagattaccccaaatgtgtagcttcatttaattaccaaggtaagaatcatccccaaccacttttcagctgagaacacttgcccagagaatgtctctggatgggaatagatgtggtaccagctaggccactggactacccgagttcagctgccaggaaatcagagccacctcaaatattgggcatgctctgattcagcagtggcagtgccctataactttcagatgattatctccatgtgctatgttaaccaaaataggcaaattatttacgaaaccatttttttctgtaaagcaaaataaatatatacaattcaagattcttttctcttctaaaaaggtacagatagtgtgagctgaacatcagtaggaaaattatttcagaatctggatgtataataaataaacattattgtatatcatgttttcaaagttctaagagaccgggaagccacaaaacatagagttagatgggtaaaaaatgattgtgaaaagtactgggaaatatgattgtatgaaatttgaaaaaaaaatttcacaatccctaaattgatctcaaatcttggagggacatgaagcattatagaaccatgtctctgttttgcaaccaaaaagttattccattttaagtatcctgtacatttctgtttgcttctgtaaacttgcaaaagaagtggtgagagattgctgatgtgtggggacttgac

SEQ ID NO: 7505 - DNA, 803 bp, Homo sapiens
  misc_feature (1)...(803): n = a,t,c or g
gagagcttataaatacattaggacctggaattcggttgtccagccacaaaggtgacagcatttaacaaagcttagagaaacctccaggagactgctaccatggcagagaagcccaagctccactactccaatatacggggcagaatggagtccatccggtggctcctgggctgcagctggagtagagtttgaagagaaatttataaaatctgcagaagatttggacaagttaagaaatgatggatatttgatgttccaggcaagtgcccaatggttgagattgatgggatgaagctggtgcagaccagagccattctcaactacattgccagcaaatacaacctctatgggaaagacataaaggagagagccctgattgatatgtatatagaaggtatagcagatttgggtgaaatgatcctccttctgcccgtatgttccacctgaggaaaaagatgcccaagcttgccttgatcaaagagaaaataaaaaatcgctacttccctgcctttgaaaaagtcttaaagagccatggacaagactaccttgttggcaacaagctgagccgggctgacattcatctggtggaactttcttctactacgtcgaggagcttgactccagtcttatctccagcttccctctgctgaagctctccaggacactggccccccacactgtatctctcactgagaaaaggtggtcccatggccctgaaaaccagaatnagcaacctgncccacagtgaagaagtttctacagcctnggcagcccaaggaaagcctcccattggatgagaaatc

SEQ ID NO: 7506 - DNA, 393 bp, Homo sapiens
aaatttttaagactgaactgtcagatttaattaggcaaccaaataagcaagattatatgaaatatatttttctaatggattaggagaaaactggaaaatgctcatttttaaaaccatgtatttgggggaactataaattccagtttcccctttctctcattgcttagtgcaagagtcaagagttcacagggtttatggcacttaaatcagtcaacctgttgtatattcttatctaaaatcagacatcttttttattaggcatccacttgtacttttatttttttgacagggtcctgctcggttgcccaggctaagaagtgcagtggtgcaatcaaactcacttgcaagcctcccaggctccaggcgatcctacctccagcctcttggagtggg

SEQ ID NO: 7507 - DNA, 1076 bp, Homo sapiens
cgagaagggaaacccaagcgggacaaggacttttggggggaggtcaaagggcacgaagttgtgcctacagctgttaccatagtaaccgaggaccggatgtggcgatcttggcggtgcgacagtcctcttctcaggccctctggcccgagagcctgttgactctgtgacacactctgaggagctggttgtggtgttttccagcgagggaagaaaagagtaattttttcaaagcatttatagaaacgcagcaaagggaaggtgtgaggttgccgccatgcctggcagaacggagggaggcagttggctccggaatgcggccgccgcagatgttctccgcaaccttccggaagtggaatggcgggagcctcagcattgctgcccaccgaccccccggaagcggaaacagaatccccgcgtgccccttcctcactaccctccaaatcccgctgcagccattgccgcagacacgatgccgaaacgaaagaagcagaatcatcaccagccaccgacacagcagcagcccccgctgcccgagcgggaagagactggagatgaggaggatgggagtcccatcggaccacccagccttctgggccctccccccatggccaatggaaaacctggcgaccctaagtcagccccaaactggataccacccacatgtccatcatcagtagaatggataaataaattgttgtgtatgcatgcaatgggactacactgcaacgaaaatgaatgaactgctgctacaggcaacctggatgaatctcacaaacatgatgttgagcgaaaggagccagacattaaagaatgcagactgtatgattccatttttgtgaagtttaaaaacaggcaaaaactaacctatggtgtcaggatagtggttacctttggggaggagggtgggtaatgggaaaaggggcacaaggggaggatcttttgaggtgctaataaggctttatctcttcacctggtggtggaaactcaagtgtgtctactttgtgagaaatgggttgtgcacttaaaactggtgtgtctttatgtatgctgttcttcaataaaaaaaatttttttaa

SEQ ID NO: 7508 - DNA, 143 bp, Homo sapiens
gcagtatgtggcgtccacacctctgctccttcagtgtcttttctgggagtgagatcaagaagagagggtgtcccgtcccagcagatggtgaaaccccgtccagtatgtggcgtccacacctctgctccttacagtgtctttac

SEQ ID NO: 7509 - DNA, 279 bp, Homo sapiens
tctgatcttatgccagactggcagcagatagttggccttgtgttgaatgatgcctgacacggcataggcaaaattcttctagatgtggaaccacttgacgaatggattcacattcccaggacccctggtaaggtcagggttattctccacatcttacaaacaaaaattaggaccaaaggtcaaaaattaggaccaaagtgccttactttgattcaccaaatatttgtaatcaaataaggacttagaacactggaaagcagttctgattccaaatggctg

SEQ ID NO: 7510 - DNA, 638 bp, Homo sapiens
  misc_feature (1)...(638): n = a,t,c or g
ggtgatgagcccttgggttctcgctccgactgctaaattcgcttggccgggtccaccttctcgtggcctcactcgccacacggatcagaatccggagcaggcagttctctctattctgaggctcctgcggctgccgcgctgacttccctgtgtgcgggagggaactctgggcaggctggttttcttggaatgtgtttacgatgttgaatgggacttgaacaggaagctggacgctgcagctggaactagcgtgccaagttatttatgattccatctgatatacataggagagaaactgatagaagaattctgatggcaactgtatgatagaagctatataaagtcaagtgtccattttctttcaactatatttgagcatacccaggatttaagtcgtggaactgaacatttatttggctgatcctcatcatggaaccgtgcttttagcaggaagaaagacaaaacatggatgcatacacctgaagctttatcaaaacatttcattccctataatgcaaagtttcttggcagtacagaagtggaacagccaaaaggaacagaagttgtgagagatgctgtaaggaaactaaagtttgcaagacatntcaagaaatctgaaggccaaaaaaaaaaaaaag

SEQ ID NO: 7511 - DNA, 1266 bp, Homo sapiens
cagcaagtcaacatttgacatatagttatttattagttgatcaaagcatgaatatttcaactttagtgcatagtcttttttattcactgattttattttgctgtaacatttcagatattaattattttattctgttttacaggaggggttcaaaatgggactaactcttgaaggcacagtattttgtctcgacccgttagacagtaggtgctgacatcaagaacaagaaatcctgattcatgttaaatgtgtttgtatacacatgtcatttattattattactttaagataggtattattcatgtgtcaatgtttttgaatattttaatattttgaaaattttctcagttaaatttcctcaccttcactattgatctgtaatttttattttaaaaacagcttactgtaaagtagatcatacttttatgttcctttctgtttctactgtagatgaatttgtaattgaaagacatattatacaaatacctgccttgtgtctgagttctatttagttagcatcttgaaatttgtattcattttccagatggctagtttattaatgatttcccaaaagccataccttaaagataactttttaaattctgaagggacatgccaatgtcaaactaaacatgttctgtttttaaaccaacaaacatgttactattcattggacagatatcattttatgtataaatactgttcacatcactgggaaaatgtaaactttaaacataatgccacaaggtcactaatttctagcaggtaaaattataaggatataaattccaataataaaccaaatgtatttagagtatttattagtaaatgcaaggtgatgttagttatgatcagttatactctaaatatttaatttgttttataaaggtagtgaaaaaatgaaaatttgctatttattaaaaaacattaaatttcattccaaatgagataagtgatattactataacatctaagcatcatctgatttgatattccctaaaaaacatttggaatatatgctatctatagattcagtatctactacccatatttactttaccaaatatatttctcctcactgcataaggactactcttctcatattttcttctttgatgaagatatttttcaccaaagtttattttgtgatgccctcttggttttgatactttaaaatctgtggcacccgttctacatgaattatcaatatttggtaaattcaatctgtatttgttttgttaaagtcaaaaatctcattttccaaaa

SEQ ID NO: 7512 - DNA, 468 bp, Homo sapiens
tactttcaccattactgtgagaggaggtgagaaaactctagtattttgttggcagagtaatcactttgttctcatcgctcaaagcatttttaggattatttttctagcgtaacctttagagagaactggaagaaaaaggaaattggtctactaggtattgtagacacaaataagtaacattaggctaaccccttatgagacatttccacacaatttcatcgtgcctgtacttttctctatggtaaaagccagtgtttacactttgtagggatcagggtgtatttgttgaattaaacaaaatattttcaatgatggcaagtctcttgacttttgaaagcaagtcagattccttatagctaatgctggtgaaaaatgttaaattggagagatcccttttgggagtgaaaccaaattgtaactatgaggagaagatggtcttctcattggctcttgatgtagctctgaagg

SEQ ID NO: 7513 - DNA, 1942 bp, Homo sapiens
accctcggtgacacagtcttggtggccaaaccacaccggctagcccagtatgacaacctgtggcggctgagctgcgtcccgcggagacggcacgcctgcgggctctggaccaggctgactcgggctgccgatctctgtgcctcaagatcctcaaggccatatgcaagtccaccccggctctgggccacctcactgccagccagctaaccaatgtcatcctccacttggcccaggaggaggctgactggtctccggatatgctggccgaccgtttcctgcaggccttgaggggacttatcagctacttagaggctggagtcctgcccagtgccctaaaccccaaggtgaacttatttgcagagctcacccctgaagaaatagacgaattaggatacactctgtattgctcattgtctgagccagaggtgctgctgcagacgtagggcaggtgaaggccaaagcgggtgttggtggtcaggccctggattctccgttagatacacttggctacctagttggtgcctcacagggttcctgctgcctggtgtcttgctgatcatcaccctggtcacttcatgctgattagaatgacatctctttcgtctcctattttgttacccaactcttcctatttttgttaccaatcactgtgctctctgccgccccctggctccaggctaatttttctggaatgaattgagaaggtggcgtgctggcctgagctgatggaccacttggtgttttgcgttttggcccatgtttgctgcctctatctggctgccttgcccgtttgcctgttcctattcagtgtcttttctattttttcctctctcgttcatgccttctgttttgctcttgtccctggagcatatctgcctaattaagatgttgccttttagttgaatgccactgaagagctgtgatagcatgtttcaaagctgaactctacagagcgagtgctgagacagtatttagggtttctgggagtgaggctggtagaagagttggcctttgaccacggttcctggagtagaagtccatcctccccccaacctcctgacccattcataaatgctgagaatgtctctcatgggaacactgttaatgacccacacaggataagctgaatgcaaagttatttgcaggttgaatttcttggtggctattagcagaagtgcagagtagggaaccagagctggttaagggcctagtgaagggtttgtgtgcccagtgtctgctcgtcatctgtggctgcaggggtcagacagacaaggatggggactgccagggcaccacttcatcatgaatgctggttttcacaccttttccttattttattgccaatcaggacaaggccttgaaggaacgcagcctttagacatcaggtgaggatgatggaggtagacagtcgactgaatgtcagctggaaaatccagtcactagttggggtttggtggccatgttttctacccagacaggccctgcttttctaggatgtggccttagagcaagaacagacccaacagccagcccttcatcctccagcgtctgccataggaatgtgagaggggtgtttgctgagcgctccgggcacggccagagggcaagtgagcatgcacggacctcttccccctgtcctgtttctcacccagcacctggggagatcggtgctaccaaggaagagagcacacagataagacagaggggaggaggtgggcatttcctacattcctccttgtttgccgctgctgagattgcagtatttattgcaatgtaaatgtatcctgaaggtggggaggaatgtttaatctaccatgtccgtgtgtcatcttggtttgtgtttttccctgtttgtagcaagactctgatgataattctgtttctcatctgcccattcaagtattttgttttccttccgtcaaagttgtcttaattttttcaa

SEQ ID NO: 7514 - DNA, 413 bp, Homo sapiens
  misc_feature (1)...(413): n = a,t,c or g
gaggtatacccctagaaacacttaaagaagaaagtcagtcaagacatgttctacctgcaagttttgaagtcaacagtttgcagaaaagcaactgggggttcttacttactgggcttgtgggtggcaccctggtggctgtgtacgctgtagccacgccgtttgtaacgccagcccttcgaaaagtctgtttgccgtttgtacctgcaactacgaagcagattgaaaatgttgtgaaaatgttgcgatgccgaaggagggatcccttgtgggacatcggtagtggggacggacgcattgtcataggcggctgcgaagaaagggtttcacagcagttggttatgaattaaacccatgggctagttttgggtatttcccagattacccgcgctttggcagnaagggtgtngcatggg

SEQ ID NO: 7515 - DNA, 177 bp, Homo sapiens
tgttgggttcaacaagcttgatttaaagtctgtttgctagtgaattttaaaaactttttgggggtcacaaataggaaaaggaatttggtttatttggtttatttattgcagagaacctggaacatacgattaaagcatgcctctatgtgtggggatttttttttaaacttcatgagg

SEQ ID NO: 7516 - DNA, 375 bp, Homo sapiens
accactttattaaaatcactcgttcattaaaatattttagggcccctccctaatgtgcctaggtgttgttcctaggtattagagatgtgtcagcgagcagtgaacaaaataaataaaaattcccgctctcattctagcctgagagcagatcagggcacctgttcaactgtagggatggccagctgccagtgcaggaggaggcgggcagaggtcagctgctacctccgtaacatgcagctcctctgatatctctgtcccctcatctctaagggaatacttccagggcctgccagaaaacatacagagtacagctcaacttggagattgctggtataatctttacttttttttccagaactacctaataattcattg

SEQ ID NO: 7517 - DNA, 494 bp, Homo sapiens
tcgtatagtggttaaatctgtgctcattacacctgggtatctcttaggagtttcttgtttgccctcttgtgtaattacggtcttgtttttttcagtaatgtcctgtttgcccttcttatcagcatctatctagctacattctgacaggataactgcaaactgaatgattcctgggcatcataatggatgtttctttctacttaggtgtctcccctcctctctgcttatatctagcatgcctgttttgggtggtccctggggttgtgggatttcccaggggctacccttcctgctcttggctagatatctgccttctctaacaatgtcatcaaagattacactttgggaacaggcattttcaaggatacacagcttcaggactgctaatgttaacttttttctgcatattaattcatagtactctgttatgacaggtgctacagacccacagtccaaggagacattagggacagcccaagcagctgacagagcgg

SEQ ID NO: 7518 - DNA, 491 bp, Homo sapiens
agaaaggaatgagcaatgggtttctagaaggcaaggtctttgaaggaggaaaagtgctgctgctttcagaaggcccctagccttgagaaggttccctgccggtattggtttctacctgggaacaggtggggctaaggagggaaggaaccaccctgtactgatgtctcgtgtgtgctgggtattgtcaggcactccatggacacaaacagcccaatgtggtgggcactgtccccttttccagatgaggaaactggcccagagagggtgggtgacttgtctggaggtcacacagccagggaaggggcagaaccacaatcagcacagacaggctaaatgcagatctcacagcatttgccctgaggagcaggacagcgggcagctgaactctaggaaagaattcccttctaccactttcagagcctcacccaccagtgcgcgtaaaacgccagggccatcttcttacttaagccacatcctgaaccaggcagctt

SEQ ID NO: 7519 - DNA, 497 bp, Homo sapiens
tagttgactgagtctgttacaaataatctcttaattatgtgacttactccactcaaaagacttcagcaattcaccattcctctgagaccatttacaggttattaaaaaatctaagttccgtatagttggccttcaacttggatgttaagcttgacatgattcctttccacgtgttttcattttcttctgcgacagcacctcctgccccccagaatagtgcatttatctcccaaattcaatcatctatattaactggggacctgctatctggataagtgatatccacaagtgttccaagaaactttaatattaataactttatcgcaatcaatagttccaaattcatcagacaggatttcactagagttgccaaaaaggaatacaatttaactggctctgagagccttcaccctgttctcatcccgtgtttccatggaagatgcaaagaacagagacacacgagaaaggtggacaggcagagtcaagaatgaaacggg

SEQ ID NO: 7520 - DNA, 365 bp, Homo sapiens
tcatggtaaatcagctgctgtaacagacagccccgaatctcagtgacttcatacagtggaagtggatttccctctcctgtaacagcgcagtgcaggtattcagtgagcatctacccgccattcacgtggtgattcagagcccaggctccctccctcttgtggctctgctgtccctcagaggttccaagccctctgctgggtccctgcgtctttccagcagtggaggtgagtgggagaaaagatcacatgggaggtgttctttagcccaggcctggaaatcgcatgaatcgcttcaattcaatcacgtggccacacctagctgcaacggaggctgggaaatgtagtcttgcatggcccaggaaggc

SEQ ID NO: 7521 - DNA, 310 bp, Homo sapiens
agtagggcaggacttcttgaaggttatggctacaggacaccccactgtctgaagtggtttacccagccccattggtgtgcctttagggccctcaggaccctggcctgcagcctgcagtgtggaccctgggactgcttgtgcccaagtgtggcgggcagggcggctcctggaggtgggatctgggtcagagttacttcatgcatgtccagtggcttccagtagacgtggtgccggcagttctccagccttagaaccgtctttcatcctgagggctgtggctttcatcactgcacatgctcgtgtgtgaacc

SEQ ID NO: 7522 - DNA, 449 bp, Homo sapiens
gcgtcgacccagaaaaatgtaacagatgtacagtcttcaactgcaggtgtgctttcaaggttgttcaacagtcctcttatttacctttccatctcactccctttaagctgttctaagactttactcttctctttaagtttgctatccaatcccatcccctcatttaagcagaaggtcttgtctcctgttttattgagaatattaaattcatcagatatgattatgtcagtttcctgccctccacttaaaaagttatcttcatctgcttttatccttccggactgcaacaaaggtccttccttctgtttaaagccaaatctcttccctcacatgtcctctgggactttgcctcatcatttacatctctctcttcaaatctgcagcctccccctctagacaagcaccagtttctctaagatctatagcaaagcaaaaaacaaactcaaggg

SEQ ID NO: 7523 - DNA, 380 bp, Homo sapiens
ggcacgaggaacgcagcccagaatcgagtattcttgatggaatgataagacagttgcagcagcagcaagatcagagaatgggagcagatcaggatactattccaagaggactttcaaatggtgaagaaacaccccggagaggttttagaaggctgagcttagacattcagtcccctccaaatattggtctgcgtcgtagtggacaagttgaaggtgttcgtcagatggcatcaaaacgctccacgcagtcagattgctacagaacgtgacctgcagggcttggaaacgaagagtggttgtaccagaggtacccactaggcatatttaggaagctggaagacttccgattagagaaaggtgaagaggaaagaaatctttat

SEQ ID NO: 7524 - DNA, 226 bp, Homo sapiens
ccctctcccctggttcatcaagtataataccacatacttgaactcctgcccacaggggacctcccatctcctggcccctctcataggatcactgggcctacctgcactgtggggccaagccctgtctttttcccaagccctcaagcacacgcatgaatgttcatcccgacttggtagggggcttttcacccttacaagatggcaaaagattcacattgcttttttt

SEQ ID NO: 7525 - DNA, 352 bp, Homo sapiens
aaacgtcgcagagctgaagcagaagatcgaggacacgctatgtccttttggcttcgaggtttaccccttccaggtggcatggtacaatgaactcttgcctccagccttccacctaccgctgccaggacctaccctggccttcctggtactcagcacgcctgccatgtttgaccgggccctcaagcccttcttgcagagctgccacctccgaatgctgactgacccagtggaccagtgtgtggcctaccatctgggccgtgttagagagagcctcccagagctgcagatagaaatcattgctgactacgaggtgcaccccaaccgacgccccaagatcctggccaaacagcag

SEQ ID NO: 7526 - DNA, 543 bp, Homo sapiens
cccagagcctcttccctggccctgctgagaccactgctctaagaagagaccaccagactgagagaggactcccagctgccctcagagcggaggccgagtgctgcacagccacagctgctctgaagcccttccatgaatccccggaagaaggtggacctgaaactcattatcgtcggagccattggtgtgggaaagacctccctccttcaccaatatgtgcacaagacgttttatgaggaataccagaccacactgggggccagcatcctctccaagattatcatattgggttgacacaactttgaaagttacagatcttggggacacgggcggtcaggacggttccgctccatggtgtccacgttctacaagggctccgatggctgcatcctagcttttgatgtcaccgacctggagtcttttgaagccctggatatctggcggggtgatgtcctggccaagattgtccccatggagcagtcctaccccatggtgttgttggggaacaagatcgatctggcagaaaaaaaaaaaaaaaaaaaa

SEQ ID NO: 7527 - DNA, 325 bp, Homo sapiens
  misc_feature (1)...(325): n = a,t,c or g
ggagaaggagtttgagattttacatcccaaacatatttcaattctagtgatggctctctgcccactctgccctcattctatcccaggcaatcagtattacttgcccagactactataagagcttcctaattggtcttgatatttcctctgttttgctctctcccccaacatattgttctcaaagagacagagtgagattgtaaaaatataaatcaatcagactatgcctctgatttaaactattaaaagcctacccatttcagttggaataaaatccaaactcttgcactgtgggcttatttaagncaatttgtccctctttggt

SEQ ID NO: 7528 - DNA, 318 bp, Homo sapiens
tttaaatttttaaactttcctctcctctccggtcccctggctctttaatctctttgggccagggtagtgctgacccagaaatcctcaggggttgcccagtctatgctacagcctggtgggaggcaagaggtgggcaggggatgaggacagtgggaagtggcactgactccaagcttgggaacctacgagggacatgaggacctagctatgcctcgccagatccctccccccaccataagtgagcacactgttgcctttgctcaagtgcctgtccttgctggcaatagcttaggtagggcggttccaggggccacggct

SEQ ID NO: 7529 - DNA, 84 bp, Homo sapiens
aatttaatgaaatcattacctactctgcctgtgaaattttaccagttatagtatttggtctagtgacaggtgttctattttttt

SEQ ID NO: 7530 - DNA, 271 bp, Homo sapiens
aagtctccctgaattttgttgtcaaaaaacacatatgtggtttgttcatcttgaattttcttccactcgatcctggggtcacttgtctgcgaatccgtaatgatgcaagacagttccacacctaacacgcaaagaagaaaaagagctctcggtgaatgtggagtgcttctacgttcagctgcacccagaccctgcaagctctaattcaagaggcctttcatgcagattaaaaacgtagccaactccacactccaagagactttgagaaagg

SEQ ID NO: 7531 - DNA, 421 bp, Homo sapiens
tgatggcagaataggaaaaacaccaggctacattgaaatgtttaaaaagacaatgtctttttttgtgataagaggcacaaaccaactgtaattgtaccagagcttcctttagatttgaggtcacaggatgccccttagaattgaagcatctaagactctttagttgggcattactgacattacacaggctcagagatttccatgtatacatgaggaacggtgttgaaggtaaacacccatcttggacacatctgaggcaggccagtggatttacatccacattttcttttcactgtttctttcatgagggggtttgttcaggatccatgaaaatatcaggaaacaggatttagaatatgaagtaattacaggttgtactagtaacttaagctattttatacacagatattgcatcataact

SEQ ID NO: 7532 - DNA, 711 bp, Homo sapiens
aaggtcccttgatggttaacaacagcaaacagggaatacttgttgtcattgttgagactgtccgtgggctgctggtactgtccattcatcctgctctctttgctggaggccatgaaaggggtcatgtccagctccagggggaaggacacatacgtggtgatcttccgccgcagcttggctgagtgttcaaatcgtttgagatgaaaacaggctactatgggcagtttcttcatagtgagctgctttgtggactcctggtagctatggcaaccgctgcacttgatcttggcgctgctgcccaagtgctctggtctggtgaatctacaggcgttcaaaaaagacaggagcggtaagggagatgcaagagacagaaaaatgagaggaaagaggtattttatctctttcattgggttgatttccctaccaaaaacatacacttacaactaaaaatggaaacaatggaaaaaaagagaaaatgttgtcccacctttggctgccctgtctctacagaatatttatcttaaataatttttttcccaggaaaggccctggggaaatggtaataattttctaagtaccatatgacccagcagttgaatttgagccagagaaatgaaaactaatgttcacacacaaactgtccacaaatgtgcaccagaatgttactcacgagagtcacaaaactggaaacaccccgtttcttcccatggc

SEQ ID NO: 7533 - DNA, 477 bp, Homo sapiens
taagcaccgaggacagcaaggcttctgttcccgatcccatgaatacacataatatagccttcttctctttctcccttacccctttcctccctcccttctttccttcctttgttccttctcttccctccttcccccttccctcctctctctctcccttcttcgagctaacctccttttctttttcccagtctctccctcatgctccctgtcctccccactggaattctccattttaacaagcatttattaagcagaccttacaggacaggggccctgctcccacaactggggatacagtaatgggcacaggataaatcctgcccttgggtagtttagaatctcacaggggagataaggctcgagtataaagaactctcatctgggcttcatactgataggcatcataatggctgggcagataaggggctgaggggttgtaggagggaggcggacatgggagggaccagggccctagtt

SEQ ID NO: 7534 - DNA, 642 bp, Homo sapiens
tttttatggatatttagttttatttgatacacttggatgcaactttactcattaccatttttaaacccatgtttaaaagttttaaaatttgggtagaggcagaaagaggaggttgagttggagatgctgggggtagtcagcagctcagtcatcggtgcttgtgggctttgtttgatccgtgccttgactctctctggaatgggaggcttcgacgtcaagagggagctgctgccacccgtagttctgagcttgaagttgctaggacttctttcaaacttgtgtgctgaagagactcagatgttggtctcagctcctaggctgaattcagcagatcggcccatgaaaacttctgtattgagacaaaggaagggatctgtcagaaagcaacacttgttatcttgggcttggcagcaaggaagaggacaggtagtggagatcctgcaatctgaaaagcagactgaaaggtgacaaagaagctgaagatgggtggtggagagaggtataacattccagcccctcaatctagaaatgttagtaagaaccaacaacagcttaacagacagaagaccaaggaacagaattcccagatgaagattgttcataagaaaaaagaaagaggacatggttataactcatcagcag

SEQ ID NO: 7535 - DNA, 1481 bp, Homo sapiens
ggctgctactgttggccaccctgtgtctagtgatgctctctgtgctcacctcctaggccatggagcctgagggggcctgcaccgggtttgctgaaactgacagagcctgggctccagacctctctccctcctacagtgctctccctccctgggcagattggcaggacaagtgggagcagatggcctgcctttggctgagagggctacctgcccagcccctcccccaacaagatctcttggactcaggcctcagagcctgggcctggttgtaagtgtgtgtccctgtgtgtgtgttgcgggaggggaggactggggctggaagtccagcacccaggggaagatctgtcctcctgttcttgggaagcgttgcctgacggcttctcggctctaccctcacccttctggccaggatcccgcagggcaacagccccatctgcttggctgaccccacacccaggaccactgtccggctctaacacagctattaagtgctacctgcctctcagcactctcctcgcccagttctgaggtcagacgagtgtctgcaatgtcttcccgcactctattcccccagcctctttctgctttcatgctcagcacatcatcttcctaggcagtctcttccccaaagtctcaccttttcttccaatagaaaattccgcttgacctttggtgcactgcccacttcccagctccactggcccaagtctgagccggaggccctttgttttgggggcggggggagagttggatgtgattgcccttgaagaacaaggctgacctgagaggttcctggcgccctgaggtggctcagcacctgcccagggtaggcctggcatgaggggttaggtcagccaatgtcagctgcttctcttggggccctctcagagtctatctccccaagacaggaagggaaaagcaaatttctaattcaccagcaataaaaattggaggaggcttggccctcagcccttatatctctctctttttcactctcttcctcccacccccaagactgagttttggggggcaaggtggagagagctggcaactactgtgagcaagtcccctagcccctgaccagcctcctcccatgactggtgactgtttaatgagctgtgcatcccccacaaaaacatgagtgcccctctgtgtggcctctaaccctctgcacagcccttctgggtggtcctcaccaggtctctgagctgggtgggaggccatcctggcgaccactgcccattccattcacccctcactgtacctgccctagaacctaggcctaggccacaggggcagggagaagagaaggcattagtaagaaaaaaatagaaaaaaatatgaacagactcagctttgggacgtccaaccacaaaagaaattatatataaatatatataaatatatatctctaccatatgtgatggaaagactttttgttttcctttcccaaagaaataaaacggaaaaagccaaaaaaa

SEQ ID NO: 7536 - DNA, 466 bp, Homo sapiens
acagaaaggatgacttttatttccatcctgaatgattcacaccattatttaaacatctgaaaaatcctgaaataatttaaactgaaggcacagaacaaaccaaaatatttaactatcagaactaaaaatgagaaaatccaaatagttctatagtaacaataaattatgaacaagtttccgtcaccaaatatcactctgaccaaaaatgactgtcttttgtcataaaagctacagcttaagctgattccaagatttctataaaaatgagagtgaagaaatttcttctttcaaaatactcattatgccaccaggttcaatgtaagtattttgtatataacaaagtagcagtcaggatatttgttgatggatggctactccccaagaaatgacacattcttacaaactttaaaaaaatagcaaagttggttacaaaattctatttggggagcagggaaaaaacttgttc

SEQ ID NO: 7537 - DNA, 141 bp, Homo sapiens
ttgactttgttaattcaatacaattattttcctaatctcaacttggccactaaataacggtgtgtccttgggctattcactcaacttgtccaagtcacagttttcatacttttaaaaagagtgttgaactaatattgatta

SEQ ID NO: 7538 - DNA, 703 bp, Homo sapiens
gaagtcctggtaatctggtccttgttcccgtctggataccagcttccttcagcagcgcaggcgctcggtccctgaggcccgtggaaggagtcaaacttgcgggaattttgcagtttatctgcagggctgttgtttccagcaagacccaaagctagaaaaggaggaggaagaaactgacccgatcagtgccagaagtcattgtattcaaagaagaataagcaagaaagaaaagaaggaaggaagagaggtagacagatacaagatgaaatcctgtcaaaaaatggaaggaaaaccagaaaatgagagtgaaccaaagcatgaggaagagccaaagccctgaggaaaagccagaagaggaggagaagctagaggaggaggccaaagccaaaaggaacttttagagaaaggctgattcaatctctccaggagtttaaagaagatatacacaacaggcatttaagcaatgaagatatgtttagagaagtggatgaaatagatgagataaggagagtcagaaacaaacttatagtgatgcgttggaaggttaatcgaaaccatccttacccctatttaatgtagtttaccttgatttttatctgatattaacaataccatatagcttgctttttattagcatttcctgatattcctttgtccatatttctacttataacctgttgctattaatggttttagatgtatc

SEQ ID NO: 7539 - DNA, 369 bp, Homo sapiens
aaaaaaaaatctgaagtcaatcatggtcttctactttctggactgagcatttggcagaatgcagtatcttttcctgtgttttgacatgaaatagcacatggcttctacaagatagttttaacttgttggggtcaccgggagttatatgatggtcaaccccttttcccaaaattcattgtggtagttttagtggaaaacgtaaatcaagaaatctcatatcatactttaataaataaataccaaatacatagtgacatataggtttgggaagaaactagtctgtggggaccattataagagaatcacattatatattacacagtatatggatattggaatgtatcacttgtggggggttctcttcattag

SEQ ID NO: 7540 - DNA, 382 bp, Homo sapiens
  misc_feature (1)...(382): n = a,t,c or g
tttatttgtgatacaagcaggcgtggggaaagagaaatgaacagacttggaagcttctccgaggccctagagaagacctctgggttccgaacaccagacaccaggagtaaggagggtagttgatgatttcccactctttctccagcccctgctcctctgtttctccccttcacccactgcagcttcctcaggtcctgggtcccgnggccatcatctcttcgaatgacctcccttctattcctgttaataaaggagcatcagctaagagaatatggtgatttgcatacacttacattgattcataaattgtgtttaattccacacaagaaaaagaatgtggatctttttcactgggaaaaaaagtcgccatgtatcatcttaa

SEQ ID NO: 7541 - DNA, 618 bp, Homo sapiens
cattacctgggaactcaggtgtggctctggctatggctcctgtggacctggcaggctgagggatctttctcattccctggtgcctgcatgcccctgctgtcttctatgcgtggatgcatttgggaaatgcaagtggacactcatagtcgtttcctcaaatgggatactgttgtagagctgatcttgtgcttctcaccctgtcacagagcccccactctcacttgtggatttttgggagagctgaggatggacactttattgggctgtgagctctgccatgatggcaatcgtgaggtctggggtgggcacagcccagagcccaatggagctggcccaaaaggaaagacaggacggaattccccgggaagtccctacagctgcctgtcctacccatagagttcccattgtcttctcctctgcctaggattaaacccagaccgacccaagttcatcctaggacaatcttcctgaccctagagaagtgatgacaggctttaataacacctgtattatacatcagagcaacacctagattagtgtttgattgaataattgagactatgtcctagtcaagggtgacacacaaaatcaattattaccatgattaatattttatat

SEQ ID NO: 7542 - DNA, 169 bp, Homo sapiens
cacacaatattcaagctattctgtaaactccccgtagcagaaattttgtcttatttactactaaatccccagtatctagtataatgtgatctatgatggatactaaagagatattataataaataattacccatttttacagaaaattatgttttttatcatcccgcat

SEQ ID NO: 7543 - DNA, 394 bp, Homo sapiens
  misc_feature (1)...(394): n = a,t,c or g
atcaaacccaggtttctgtgacactacagcgtactcttcacacctcaccaagctgcccctcacaagagagtaggtgtgatgcctgggctgatgaaatggcagcttaggacgtaaagtgaccatttcaaaggcagcaaaactgcgatttcatctttgacgttaataaaacggcaacaagaagccatctcagtaaatctcgtacaaagaaactctccagaatctaatgggcatcaagatcctcgatcaggaatataaccccgattgtcttgtttctatagagaaatcagatttcatttcaggtattttatttcagtttacagttctttctcaaggactgaataacttaccaaatagccgtgtttatactatggaaggtacatccggctatnctctt

SEQ ID NO: 7544 - DNA, 380 bp, Homo sapiens
catatttctaagacaaaagcagtaacaatgactcaaggatgatgcccaatagacgatttaacctataactttgctaattgtcatattttcaaaacagccctatgggaagggtacacaaatgtctggggagtatttcctgctttttagcacccagggaactacaaccaggagcccagcttattttggattggggatggggatagacaagaagagatggggcagggagaagagacggctggtttattttacatacacatattttatttataatacatctctgtgtctaggcgtctctatgctgttctcataaaatctgaattatacaaataaaagtttaattcctggctgttttgaatgacttgggcctgtattacaaaatt

SEQ ID NO: 7545 - DNA, 425 bp, Homo sapiens
ggagcagttccgctcctactcagagagcgagaagcaatggaaggcccgcatggaattcatcctgcgccacctgcccgactaccgcgacaccgccctgacgcagtggccgcctggaccagctgctctccctctccatggtctgggccaaccatctcttcctaggctgcaggtgcggaccccagcggccggctgatcctgtcccctatcttccgaccctcaaggcctctcccagggctcacccctgacccgaacctctgccccagactgaacccgggcccaacctcgatccgcattggtcggcccgaagactgattcccaccctggaggccccgtggaaagatccttatctttgagcctcagttttctcttctggtaaaagggtggttatgatggctgtaataattaaagggtgaagagctaaatac

SEQ ID NO: 7546 - DNA, 719 bp, Homo sapiens
gagagtattctagacttctcaatgcttttattgttgctgaaaagcaaaaaggacttgctgtggaagtgggagaagacttcaacatcaaagtgattttttctactctcctaggaatgaaaggaacacaaagggacccggaagcatttcttgtccagattgtgtcaaaatctcaattgccatctgagaatagagaaggtaaagtgctgtggactggctggttctgctgtgtatttggagacagtcttctggagactgtttcagaagatttcacctgtctgcccttattccttgcaaatggagcagagtctaacacagcaataattggaacttggtttcagaaaacctttgactgttatttcagtcctttagcaatcaatgcatttaatctttcctggatggctgccatgtggactgcatgcaaaatggaccattatgtggctactactgaatttctttggtctgtaccctgtagccctcaaagtctggacatttctttcgcaatacatccagaggatgcaaaagctctatgggacagtgtccacaaaacacctggggaggttacccaggaagaagttgacctattcatggattgcctttattcacatttccatagacatttcaaaattcatttatcagccacaagattagttcgtgtttcaacatctgtagcttcagcacatactgatggaaaaataaagattctgtgtcataaaaaaaaa

SEQ ID NO: 7547 - DNA, 366 bp, Homo sapiens
atcccatatcatactaggtagccatttatacaatttgatttatagtctccttggcagaaatttggaactttaaactctttaagcattttatatataaaaatatgtaataatacaaaataagagtttacaataaaagataattcactttggaaaaagcatatttgtacttagagtttttcattcattcattcattttaaacaaagtcttcttctgcaggattctaaactgccttcctcggttcgcagtacacttctggaactgtttggtcaaatagaaagagaatttgaaaacctttatatcgaaaacttagaattacgtagagaaatcgacactcttaatgaacgtttagctgctgaaggacaagc

SEQ ID NO: 7548 - DNA, 314 bp, Homo sapiens
aaaaataataccaaagacggtatccttacctataatgaagtaaaagcagcccatttccaaaattaatcctgaaccttaattttgaaaatttttatttttctcttgttggcatgagtggaaaatgaaaaccagaaggtgaattacagagtaggacttctgtttattcagatacactttagccttatactgatgctcagagaaggaagagaagtttatagtggggcccagtgagacagatggtttctgggtgtgtagagaccactagcaaattggcattgtcatgacagcatcctaagatttttctggagaatgga

SEQ ID NO: 7549 - DNA, 447 bp, Homo sapiens
  misc_feature (1)...(447): n = a,t,c or g
aaaccctatgacattgnnnnnnnnnnnnnnnnnnnnnnnnnnnnnnnnnnnnnnnnnnnnnnnnnnnnnnggcacgaggttcatttgttttgcccattttctaattggtttgtttttggctttatcgttgaatttatatattctagatatgtggatatttgttagatacgtgctttgcagacattttctttcagtctgtagcttgtctataatttcctcacatgggctttcacagagaaaaaggtttttagacatctcatttgtcagtatttccttttatggattatacttttggtgtcaagtctgagaattctttgccttgctctagatttccaactttctcctgttttttttaagttataattttatattttatagttaagtccatgatccaatttgtgttaatttttactcaaagtgtgagatttaggttgaggttcttctttg

SEQ ID NO: 7550 - DNA, 342 bp, Homo sapiens
  misc_feature (1)...(342): n = a,t,c or g
gcgggcggagggctcgggaggcgcaggggactggaagagttggctgcgccaaggcaccaggttgaagaatttccataccagccctgcggaggtgcctctgtttccagaggcgtttttgtacgaagggcattttgaaagcganaganagccgtagaatcagcggcgagcctgttgaaagaacccacaggtgcatttcacagcactctgggcgaaaattggatgtgaaaatgaagccagaccgagaaacgaggtcttcacttctgtttgcttcagcctgggtctttaaactcattgtccttcaaagcaatctttcctgttattcaagcctcctaaagtcttgga

SEQ ID NO: 7551 - DNA, 373 bp, Homo sapiens
ggcacgaggtggtagcgtgcgcatatagtgccagttactgggaaggctaaggtaggacaatcacttcgcctgggaggtcaaggctgccatgagccatgatcttgctagtacccgatgtgtgccaagcacattttaatgagaaaaatgtgtgtgtccttagtgagaaggaagacaggaagcaaataaggagtgttaagagccagaaagaaaatacagcagggtgtacaaaaatggaacatcatggggaggtggtcaggccaggtaccgcctcctctgaggaggtgctgattgatgaaaagttctgcagggagtgagcagggagctctccgagggcctgcaggagtgtgtgagcagcaggagggaccagtgcccc

SEQ ID NO: 7552 - DNA, 340 bp, Homo sapiens
  misc_feature (1)...(340): n = a,t,c or g
atggcttctgcttatagtgaattactggacgttatttacatacaaaaggatacatttaagcgctttaaatagtttaatacccttggcaggtaactagtacttatattggtttcttatggctaccctaacaaattagcacaaattgggggcttaaaataacaaactgattctcttactggagttctggaggcaggaagtctgaaatcagtttcactgagcagaaatcaaccacccagatgattgcttcctgggactccaggggagaagtgtttcctttttctcctagttcccggagccacctggactccagccatgactgncatcactgcaacctcttgct

SEQ ID NO: 7553 - DNA, 190 bp, Homo sapiens
tatgtgtgtgtgcgtgtgtgtaagtattaggagatacgataaggaaatttccccaagtaaaggaagaactgaatccgcaaaaagaaaagagagtgggttgtatggaaacccagtaggggggacccattgggaaaaattggtccaaaataatagacaccccaaaaaaaataccctggtgattactgaaatt

SEQ ID NO: 7554 - DNA, 195 bp, Homo sapiens
tggaagaaaacctacattcttttccaggtgacagagactagaacacatttcaggagacactttaagagtgaaagttttgcaggatgaaaagagttacagagatggatgatggtgatggtcacacagcatcatggacgtgtttaataccactgaactgtacccttgaaaatggttaaagatgagtctcgctctgct

SEQ ID NO: 7555 - DNA, 1414 bp, Homo sapiens
  misc_feature (1)...(1414): n = a,t,c or g
aattcggcactagggcggccaagctgctcttcgccaacttcaaccaggacaacacgtccctagctgttggtagtaagtccggttataaatttttctccctttcttctgtggataagctggaacagatctatgaatgcaccgatacggaagatgtgtgcattgtagagagattgttctccagcagcctagtggccatcgtgagccttaaagcaccaaggaagctaaaggtttgccactttaagaagggaactgagatctgcaactacagctactccaacacgattctggctgtgaagctcaacaggcagaggctgataagtatgcctggaggagtccctgtacatccacaacattcgggacatgaaggtgctgcatacgatcagggagacgcctccaaaccctgcaggcctgtgtgcgctgtcaatcaacaacgacaactgctacttggcgtacccagggagcgcgaccatcggagaggtgcaggtcttcgataccattaatttgagagctgcaaacatgattccggctcacgacagtcctttagcggcactggcctttgacgcaagtggaactaaacttgccacggcttcggagaaggggaccgtgattagggtattttccattccagaaggacaaaaactctttgagtttcggagaggagtaaagaggtgcgtgagcatctgctccctggccttcagcatggacggcatgttcctctccgcctccagcaacactgagaccgtgcacatcttcaaactcgagactgtgaaagaaaaacccccagaggagcccaccacctggaccgggtacttcgggaaagtgctcatggcctccaccagctacctggccttcccaagtgacagaaatgttcaaccagggcagagctttcgccacggtccgcctgccattctgcggccacaaaaacatctgctcgctagccacaattcagaagatcccgcggttgttggtgggtgccgccgacgggtacctgtacatgtacaacctggacccccaggagggcggcgagtgtgccctgatgaagcagcaccggctggacggcagtctggaaacgaccaatgagatcttggactctgcctctcacgactgccccttagtcactcagacatacggcgcagctgcaggaaaagcctacacagacgacctgggtgctgtgggtggcgcctgcctggaggacgaggccagcgccctgcgcctggatgaggacagcgagcacccgcccatgattcttcggactgactgaacttgacctgtgacctctgacccggggagcagagaacactggcttcacagaggactttgtgcattgctgctatgaactttgacctgagtcgggggagaggatggcagagactttattaaaaaaaaaaaaagntttttagtggtagtcttaact

SEQ ID NO: 7556 - DNA, 901 bp, Homo sapiens
tttttttttcaacaggagatatcctttcctatatattgtgctattctgtattcactaccttttcagtttttttttttttttttttttaagttaaatgcttttcagtaatggattctcccaggcactaaactacttaagccaggagtataactacttcaaatacactatgagaacctaaacttgggtctctggagatctgctgccagagtctacttgttctaacctgtgtatgcgcaagatacaccacattataatagttttgcatttgctatcatacattagttatgtagaatctgtgtcagcaaatgctggactctccctaatactgaaatttaaaaatcacctcagaaaactgccagttctgagttctcaaggcagcttttagaggtaggaattccttctctacagaaagctatcttattctttcagaacaaaatgactgttttatttccacaagtaaagtagataaaagtgaaagctgtctgaggcttactatacccaagagaaagtctactcactacgtagcaacctaggtaggtgccacccagctacatttccagttctcatgaaaagatctgaaaatcccatcaatagacaattcagcacatttggaaataggaagagccctaacaaataattgaatactccaaattactgagtgtttgcacacagcatgctgcaaacaggaaatgtaaatggtctgcagattagaaaagcactcactgaagcaattaacagcatctccataagacatgcaaaatgtaatttcttgacatacaaggagtaggaaaataatgaaactaaaagacatgccatgttaagacatgaaaagagcaggcggaggtggattacttgaggtggaggagtttgagaccagccgggccaacacagcaaaaccggc

SEQ ID NO: 7557 - DNA, 347 bp, Homo sapiens
ttgttataggcaacagtgaaagatcaactgactctttcttggcttatttatattcaggaagcaggaagattgtgtgtaggtaaaggtggatatggtgattataaacttaggattgatttagattttggcaagttgcttctgtgggcttaatccattcaagcctgcctcccatgagacagcctgggctcaagggccagctgggtggaggagcaatcacgggatttgcaggaagcagacagctctgcctacctaggaaggctatccttcgcctctcagagcctatgagatagggataattctaaacctcatagtggttgttatctagataatgtgtggtaagctgtggg

SEQ ID NO: 7558 - DNA, 398 bp, Homo sapiens
gttgagagaacggagcggacgccatggcgaccaacatcgagcagatttttaggtctttcgtggtcagtaaattccgggaaattcaacaggagctttccagtggaaggaatgaaggccagctgaatggtgaaacaaatacacccattgaaggaaaccaggcgggtgatgcagctgcctctgccaggagtctaccaaatgaagaaatagtgcagaagatagaggaagtactttctggggtcttagatacagaactacgatataagccagacttgaaagagggctccagaaaaagtagatgcgtatctgtacaaacagatcctactgatgaaattcccactaaaaagtcaaagaagcataaaaagcacaaaaacaaaaagaagaaaaagaagaaaaaaaaa

SEQ ID NO: 7559 - DNA, 1783 bp, Homo sapiens
ggagtcctgagttcaaaggggacagaactaagggcaggagaagagaatggatgtgtcttctctcccatcttcccctcatcatcgaccgaggagcacaaagaagttctgtttctgtttttttcagaaactttattttagctgtcaagcagagaatagcttgaactattcagactattgttggcactgtttagtagtgaccacacgctcttctacccgggaaggaacatatgacgacatgctcctcccatgtcccctgatggtgtctgttcccacaatatccttctagtctgcatcgtgaagtggcttaggccaaagccttcctgtgtgatgacgcacgtccgagactgttccatctcattcctcgcaaatttgagctcttctgatcaattctaaatatttgattaattttaattctggaaagaaaattttgaggatttaagcttaggggattttatttttataaataccagattattgttagacttaataaatcactgttaaatttaaagatgacagttaccttggaaagttcactaatacttcgctccaaggcgtctgtaaaagaagatatctttattggagcaatgttcatgtgactgggaatgacagaagaatgggagatgagtagggacccctcaagcacagctgtcactcagaaattttaaatttgaaaaagaaatcgattttcatctgtatgccgtcaaggaaggaattcagttacagggcatctgtaacttaaatattgtaagaataacttatatggaagttcaagctatttttatactataatagagttatttaattttaatttgttgaattattagttaccactgtcatttcttcagctatggatatgtggctgatgttggggagacggacctcagtgtgttttatattgtctggtgttaagatgataaattactttgtgattacaagcaaattttctatttgacaaagcccttggtggagtccaaatgatttttctgtaccatattgttctcttacacatacgtatgttaggaaaataggcacactttcaaagagaatgttctcttacacatacgtatgttaggaaaatagacacattttcaaagagaatgttctcttacatatgttaggaaaataggcacactttcaaagagaggtataggggctttttactgccttcgaaatcacttttaataaaagttgtatgataaatcattaaaaatgcgagtgtaaatatttttttttacctctatcagggtttttatttgaaagtgtgctcttaccatttccttgtttgagtaagagagtgaatggttctgagtgtttaggaaggatttgcttgcttgcagcagaagttctaggaaaagcaggcacctcccaaatatcttgaggacactggcagccttatggtgactaaatccacactttctttaaagagatgcagatgaattacttttctgttaatatatagaaaaatacacaggagaacatgcagatacatgtaaatatctacatacagggatatttgtatgtgtggttgtgaaacccatacacaagtggatttggccatctttgggcagtgaggtcaaatgtgaatatgtgtaaaagtgcttttcagaactgcattactatgagaaaacatcaaaactgctgtagttttccatttctactgtatttcagttgcaacctatttttaataaactttgtatgtatttaagtgtatttgctattgttttgaaagtgctgacaaagtttatatttgtaacatcagccttcctcgcccatctctttccat

SEQ ID NO: 7560 - DNA, 505 bp, Homo sapiens
  misc_feature (1)...(505): n = a,t,c or g
aggaatgtggttataaatatactattttaagtggatttatacgttgtatttgttctgcttataatgggaaaaaaagtctttacatataaaaatagtggcaaattccatttgtattttttaatctctgaaatttgggaagcagaaaatatcaaacgaagaaagaaaccagagtctcaacctgctggacactattggaagtccatcatttaacacgtttttagtatatacttttagcaggagacagctctgagtcaactgtgttgaggtgccaccacagcgagtttaggcactcagatccctgcatactcatcacattgggccataatggcaaatagaattntttggtnttggttttgtttgtttgctttttctttcacatagaaatagtaagttgtaggagtgtgggtcagaaagaaaaggtggccctacctctgatggttggcaatgataggatacaatggggggataagctatctacaaatgggagtgggagaagggatatatg

SEQ ID NO: 7561 - DNA, 1120 bp, Homo sapiens
taagaaaggatataaaaggatgttacaagtttgctaaaagaagagaggggaagaatttaatggactgtgaatttcaaaaaaaaaaaaaaagactgtcaaatgaacttttacagaatgcattaaaaaaaaaaaaaaactcctgtgtcggtcagaacaacttgctacttatcatttttgtataaaaaggaaattagtctttttctttttttggtaaatttttgaaaaatattgctaaaagtgcatttaaggagattgggagacaattagcagaatggagaaagtaagtcttttttttttccaaattattaattgtcctgtgtctatgtacctctagctgttcttttttgtacttttctggttccaaaccagtttattctgtggttctataataagttttgatataatcttggcttcttaaaaactgtgtatcattaaaatatatgttctgcaagaattaaaactgagtccatgaaaataccataggaagacataaaactttaaaaggcaactcaaagatgatggaaacgcacttacaagtggtgaccaaaatttttaggtgaagtcgagcactctaattagagaactggaggaaccacatataacacttaacttcccctaccctgcccctccccaaaagaaaccatgacaaacctagcttttaaaaaatattttaagaaagagaatgaactgtggaatttattggcagccaaggaatgtgtccaagacacatgctgaggttttgaataaaaagtgaacttttgtaatttgaattgggtcccgcttagttcttgaattgttatgaaaatcctatatctgtttgtatatttgcaaaccctttgtattataattgttgatattttccctttttaaaaaataccattgaaatcagcatgacaaaaataacactgttggcacttataggtaacgtgattgattcagtatcttagagtttacagtttgtgttttaaaaaaactgaaggttttttttttaagtgcaacatttctgtatactgtaaaagttataataactgaactgtttggtcgagtctttgtgtgttatattccaaggaaaattgaaagtattcagaaattaaaatattatttgatatctgaaaaaaaa

SEQ ID NO: 7562 - DNA, 248 bp, Homo sapiens
aaaggctgacggacaggctcggtcagataaggcaattccagggatgggggtttcatgtggaactggttggacatttgcagaacagccaagtaaatggccaaagtcaggtggtcaaggtgtgttttctgtttagagcagaaaaagtcagaaatcttgaggttaggatgctgaatgagcccccagctgatgcaagtatcaagaaagagggaccccttgagccaggtgtaaagtctggatcttagggagtt

SEQ ID NO: 7563 - DNA, 362 bp, Homo sapiens
ggcacgaggatatgaaatcaaattagaagtattcaaacaccaatgctgctaacttaaaaagaagtgaaagtactgaaaagttgccttcagcactgtttgtgtctatctcttcaaccttttctagttaaaacaattttgtattgacatcaatgtgtgcacgttatttggatcccaactcaaacaaactatagagagaggaatgggggcagagattggaagtttgaacactgactgaatgttggatgaattatttttaaaaataagattactataattacccattttagataatccttaaagtgatcttgtcatgctgtcttgtttactcatgttttaggaattcgtgtattcatcgttaagta

SEQ ID NO: 7564 - DNA, 378 bp, Homo sapiens
ggcacgagattagaaatcaagaaagaggcaagctgcaggctatctaataataatacaaataataataactaacaattgcccctctcttccatccttagttcttagcagcctatgtttattctcaaagaaagtcttcttccttcatcttagtttatatggtaatagaaatgttagtttaaaaattgtgttctacaccacatgctgatgaaggtagttttaggcattaggatttacattagggaaagaaggactcaggaaacaggggtactagggtaaccgtcttcttttcacatgttatctccatttatttctcatgggaatcctttaaggtccatattgttacccatttacttgtacaaatgtggaaaatgaagccct

SEQ ID NO: 7565 - DNA, 737 bp, Homo sapiens
gccttttagcatttctaagctggactaggcgagagtgtcacacctgcttcccttggcttccatcttgcctcttccagtttatttctcaagctgcagtcaaactgatcttagaaaacacgaatctaatcatgcagcacccctgactaaggtcttccggtggctgttcagagcctcttgggtagcaaacagatggcttctgttgtatacaaagccccttaagagaggtctcctcatctactttttctagcctcttctctcccaactctgtattctcctgtaacactggactgaggcactgcagggcttctgccctttgcacatagtaaggcatggcatttctctctgtctgaaatgctctttctgttgttcatctagaagactggttttcccttgaagactcagccctaagcatcacctcttctgtgaagtcttctgctactttcccaagcagagtgagtgttccttcccttgtcctgagtgccttggccattgatgtgcttatcatgttgtcttacgtatcaaattatttgttgtcatatctgtccccttcaccatactgtgagctccaaagaaaagaagtgatctttatacttcttatgcttagtacacaactagacatatagtgtgtgtgtgagagagagaattttttaatgaaataattgaatacattggaagtgtttcattcaaaatactcatccattattctttggatagtagcataaatttgatgttttatg

SEQ ID NO: 7566 - DNA, 321 bp, Homo sapiens
  misc_feature (1)...(321): n = a,t,c or g
ttcaaaaaactatacctttcattcaccccttcttagcaggctactggatgagttttcccacgaaacaagggagaaatccaacaagagnagtctgagaataagaatnagaagcagagatccaacgcagaagagaggcaaagggaagggtgaaggtgaaggacaattgcagtatggcagctgggcaccagccacagacgaacctccatcaggtgggtcaggttggaaggctctgcgttgggattaagttggagagaacacttgcctcatctaaatgttttcagacaggatttagataagggaaaatcaagaaaggtacatcag

SEQ ID NO: 7567 - DNA, 160 bp, Homo sapiens
gatagaaatgtaatcaggtgacagaaaccacacagtaatttgaacaggaaagttcaatacaaagaattactatttcagggtattagagtaatgagggcttggctagtgaaaagtaaagagaactctaaagaagaactctaaagcgtgcaggatagcaatt

SEQ ID NO: 7568 - DNA, 370 bp, Homo sapiens
gaacttcctgataaatcccccagtatttgccaagtagccacctcaatggggggagtggttaccctcttcaccctgttaaaatgctgcatgccagattgcacccttccatggatgcctttctgacattctgcttgggctccaacacatctgtgtcaggctgccactcttcataaatgcccttattacgatgcttgggccaggtctccccaagcacatgaaaaactgcactgttttcgtgggtttggataccaaagaaaattgaatgactgaaaagtactgaagagtttaccttaaagggaggaaactagagcagaagttctccaaatgggatctctagactcagaacatcagcaccccctggggaacttct

SEQ ID NO: 7569 - DNA, 257 bp, Homo sapiens
attgcttttgtcacttttaatttttatattaaccctcctaaactagttacctcttttattcgtatataggtaaaacaaacgatgagccattttcatcaaataagcaaggtattgagtaaagtgtaagcatatagtatacaacttgtaaggtaaaatggcaatttactgtgtggcaccaggtatttaaatgtgcactgaaaaaatttaatgtatcattcaagtatgtgctttagttatttagcgttcgttgttatttt

SEQ ID NO: 7570 - DNA, 184 bp, Homo sapiens
cagcggcggaaagcttagatcagcctttccacagctgttagcagcatctgccccaatttcagctgaagattcaggtgccccagggactgggaagaaattacagtgcctacttggaaagaagaagagatagcgacttgccccagtccaaccccagagcgggagctgtggctaaaggaagtggagg

SEQ ID NO: 7571 - DNA, 522 bp, Homo sapiens
  misc_feature (1)...(522): n = a,t,c or g
gnnnnnnnnnnnnnnnnnnnnnnnnnnnnnnnnnnnnnnnnnnnnnnnnnnntnnnnggnngaggtnggnncccctccctcccccctnngacaccttntgacatgactacgaannnnnnnnnnnnnnnnnnnnnnnnnnnnnnnnnnnnnnnnnnnnnnnggcacgagggaaaatgatgatttgaggtttatttgaaatacaacaatgtccaagaggaaaacactgcaactttcttcaggtgttgagaaatccaatagagacctctgcttgtctcctcctttggcaagagctccaaggggagagagaggatgggccaccacgatgaatactacaggctgcggggaaggagaaccctagtccagaccattcctacaaaagaaatggggaatccgaaaggaaaaggaagaaatctcactagcacatgtcaaagagccaggagaggcacaattcaccaagcagaggaagaaatagtgaccgcancgggggccggtgcagcacgnagtgagaacggncggagccgt

SEQ ID NO: 7572 - DNA, 1009 bp, Homo sapiens
ggctgatgtggcggcctcaggccccgggctggcgttcctggcatacccagaggcggtgacccagctgcctatctccccactctggggccatcctcttcttctccatgctgttgatgctggggcattgacagccagttctgcactgtggagggcttcatcacagccctggtggatgagtaccccagggctcctccgcaaccgcagagagctcttcattgctgctgtctgcatcatctcctacctgatcggtctctctaacatcactcaggggggtatttatgtcttcaaactctttgactactactctgccagtggcatgagcctgctgttcctcgtgttctttgaatgtgtctctatttcctggttttacggtgtcaaccgattctatgacaatatccaagagatggttggatccaggccctgcatctggtggaaactctgctggtctttcttcacaccaatcattgtggcgggcgtgttcattttcagtgctgtgcagatgacgccactcaccatgggaaactatgttttccccaagtggggccagggtgtgggctggctgatggctctgtcttccatggtcctcatccccgggtacatggcctacatgttcctcgccctaaagggctccctgaagcagcgcatccaagtcatggtccagcccagcgaagacactgttcgcccagagaatggtcctgagcacgcccaggcgggcagctccaccagcaaggaggcctacatctagggtgggggccactcaccgacccgacactctcaccccccgacctggctgagtgcgaccaccacttgatgtctgaggataccttccatctcaacctacctcgagtggtgatccagacaccatcaccacgcagagaggggaggtgggaggacagttagacccctgggtgggccctgccgtgggcaaggatacccggtggcttctggcactggcgggctggtgacctttttaatccaggccccatcagcatcccactcctggcgggat

SEQ ID NO: 7573 - DNA, 415 bp, Homo sapiens
tttttttttttttttcttcaacatgatgtttaatattatgcattagccttgaagtgatgtagggtcaaattcaatgtaaaagccttgcagcatacctacatttcaggccctggaacctgccctcatttctttttatttttttcaacttgcagtctaaaatatcacagaggaaaatttctagctgttcttcctagatgctgacaagtctacttaggagagtaaagatttagagacatagcataacattggtacaagtctctaagactcagactttggcccattcccccccacccctttttttttaactgatgcaaaaatttgaatcccagagaaaggtgacttatctgagtttacacagaagttagttaggggcagggctgggatttcaggcttaggtcttctggttccccatgta

SEQ ID NO: 7574 - DNA, 899 bp, Homo sapiens
aacgatctgaactcctcagccaagcatagagccaagatggatgatattgtggttgtagctcagggctcccaggcctcacggaacgtcagcaacgatcccgatgtcatcaagttgcaagagattccaaccttccagccccttttgaaagggctattgagtggccagacttccccaacaaatgccaaattggagaaactggactctcagcaggtgttgcagctctgcctccgatatcaagatcacctgcatcagtgtgcagaggccgttgcttttgaccagaatgctttggttaaacgaatcaaagagatggatctgtctgtagaaactctgttcagcttcatgcaggagcgccagaaaagatacgccaagtatgccgagcagatccagaaagtgaacgagatgtccgccatcctccgccgcatacagatgggcatcgaccagactgtgcccctgctggacaggctcaacagcatgctgcccgagggcgagcggttggagcccttcagcatgaagcccgaccgcgagctcaggctgtagctgccgcccggcctgcctggggctgggagccccagacaccgacaccctgaggacgtgtggagctaaggtcatatcatctgaccaggtctggaggctggcgggaggctccctgaaagtgggtgcgaaggagtccggctggcatgaaaatctgactttgcccagctcttttccttgatgcagtttcccggtgtggaaggaacctaaccagttctcggtgataactgaagctggaacgtgtgaattattaggaattctttgaagaactctgcattgagaattatttttatttagttttttttttttttaattgagagtatatagtccagtccaggtaccggaataaaaatatggagacaagggga

SEQ ID NO: 7575 - DNA, 2369 bp, Homo sapiens
  misc_feature (1)...(2369): n = a,t,c or g
cccagaaaaccacactgctcttttattcaatggaacatccccgctttagcgcagtgttgaatctaacaccgaaaaaagcccagagaaatttctgcagataaaccagtgaagagaacgcgcagtatacattattgtcaacagaatcacttcatggagagggaagcgggaggaaaaaggaaggagaatgaacaaggggctcaaacccctacacactgcaaaacattcagacatttgggattaaaacaaaacataaaaggaagccttccaggaaggagaggaccaaatggaatctgaggcagctcaggtgatcaaggagcacaggaagaactccaggctggcaggccgagccccgaggggagctcaggctgcccacccactgctgggcaggatcgccaggacggatggggaatccccgaaacccctggagatgaaccctacccctcgggcaaacttttacaagactccccttgacaaggggtggcagagattaaaaaacccccacgctttaaacaaacatatttgggggtgggctatggcaccttgaaaaaccccacaaccagcttgacatgaatggccaaagccccttgccccaaaaccatttgctcccctctcccttggtaagggaaggagaactggagagaagggaaaggaatctaaattgcagcagaagaccggggagagcatctcccttggacggagtctgaagaaaggaaaagataaagaagtaacaaaggaaaaagaaaaaaattaataaaaatttcacgatatggagccagcgtgttccgattccgtccacaaaaataactcaggctgctttgccgaaccatcctgtccaccaggggcgttgctgaggctgtctgcctggaagggtcaccaatgggcgcggaaagtcctcactctccatggctcgggccatgccgccgcggggagggatcctggcggcccggtttggggagaggcaaagggagttgggtgaggagagaaagaagacaaagaagacactcgatgcttacggggcgccaggagagccccaagctggcgcccctactaccacctgcccgttcccaagcgaatcctcagtcgcttggcccagcccagtgcgtgcacacacacacatgcgtgcacacacaatcacatgcgtgcgtcccaatgtctggctccatatggtgaggttcggcgtgtttaaacgagaccaattctctctatatataatatatattttcttaaaaaacaagtctagttctgtggtggaggcggtgggggagctggaggcatcccgaaggcgcatgcccgcaccccatgcccatcatggtgacaaagttagaagggtccatggagcgagagaggggcgggcaacatcatgccggcggaacagcgtgaggcggcggagggggaggggccccaggcggcagaggcggctggaccccggggggcaggggcaccatagtggggttgccttgcatctgaggggctcctggagaagctgcggcagccgcctgctgctgttgccatggcgggatggaccctgtgccagcgctcgtggtggtagtcgtcgtattttgctgccatggcaagggggtactggaagccatactgctgctgggcggagggggtggcggaggctgctgctgctgttgttgccatgggggaagaggaccagagggagggggtgggggctgcccactgggaggcggcggcggcggcggcatcatgcccataggtggtggcggcatcataccttttccttgatgcaggcgatagaccccagagcccacaggcgtacttcccaggtactgatccattggaggaaggccccatgttccccaggagggtgggggccctggttcatcgttggtgntgttggctgcatccaaaggggtgggggtccattggggttgtgctgcatgggatgtcccaccatgcccacctgtcaggctgggtaatgggtgtgggaagctgtgggggccacctccgggcccaccaggaccacctccatgcatgccgtggtagggccgactctctgaagggccagaattcatccagggtgggcggctctgggtggtagacatnagagacggtggaggtgggttgttggcgggagcagcaggacgaggtgcgctggccagtctccgcctccccgggcccggggaagtctccaggctgtttttttaccctgcagcgagaaggatggtgtggatatccaacggatgctacctcccttcaaaacttaagccaccaccaactccaacatactggcgtccgccctcgtgccnnnnnnnnnnnnnnnnnnnnnnnnnnnnnnnnnnnnnnnnnnnnnnnnnnnnnnnnnngtcataagggtntccananntncaaannnnanannnctc

SEQ ID NO: 7576 - DNA, 413 bp, Homo sapiens
gcccagctcgagtcacatgcttattcctgtgggccacactggcaaggaactagggtcccgtgacttgacattccctgcagaagccgcagcaggattggggagggccattcccccaatggacaagagaagctggaccacagaaccagcaggtatccatggtggcatctgctacggccggctctcctcccatgtggaggtctcggggacccacgtggaagaattatcaaggtcattcttcttgccttcgggaggactggaattaaaaataatccaaggaagggattgccaagcttttggctttttgaatttcccctgagccacaaaggctgggaagtgccttggcttgggcttcttgcatcattagtttcattaatccttgtggaccaggacagaaggcaacccacaaggcaggc

SEQ ID NO: 7577 - DNA, 216 bp, Homo sapiens
aaaagttccagcaccctgggtctgacatgcggcaggaaaagccctcgagccccagcccgatgccttcctccacaccaagccccagcctgaacctagggaacacagaggaggccatccgggacaactcacaggtgaacgcagtcactggtgctcacgctcctggacaagctggtgaacatgctagacgctgtgcaggagaaccagcacaagatggag

SEQ ID NO: 7578 - DNA, 450 bp, Homo sapiens
cctggggaatccacattcagatcagccttggtatgttttgctgagtgagataagagttggagacttcatgctgggacatgtgcaaaaggaagggaaaaaattaaaaggggaggggaaggaactaggcaactaaaaacagcccactcgtggcaaccaaatctaaacagaaaaacattgcagggagccaaacgcaaaagaaaaaacaaaaaagtttgagatatttaaaggttctagcagtttcttagttcagtgcacagtcccttcccacattcctctgccccattactctgttctctaaaccctaagactgtattcgtgcccagaatgctagaaacacaagataagatctgccagagaagcggcagagtactagcagctctgtctgcctggctcaacctacttcttcgctttggaacgggagtggagtccattttcttttactttattctg

SEQ ID NO: 7579 - DNA, 460 bp, Homo sapiens
ttgtctacttacttattatttatttttaaaatatatttaaacagcagcagtcacttccaaaatgcaaaaaaaattacaatttttagaataaaattataatgtttataatgcgggtcagaagaattgaaggtacaacagaatcaaatcacgcagcactggaggcggctggagaagccaaagcccactggtcaggggtccaagctgacaagaagtcccaacctgagaggtctccacacccaaatcatacccctcagcttcccactgacagagccagtgtcctctgggttagagaaggagaagcggcaaggagctggccctctgtgtgggtgtcccaaacccagtcccccccatcagccagggacctgctaatccacctcctccatgttgctgtaggtgggggctggccgatccacagggggggcgaagtttcaggggctgtccgcgtgggggccacctcggg

SEQ ID NO: 7580 - DNA, 427 bp, Homo sapiens
  misc_feature (1)...(427): n = a,t,c or g
gcatttcttaactgttttacaatataatatctaatatgtttttccaagccaggattcatattttttcagtatctctgatagttatttctaccttttgctgaatataactttcatgttagcctattaattttttagaaattaagaaactataattttgtatttcttcttgttaatttaatgacactcttctctggtcacagtctcagaattgtgactttagtgtcacctatattgtgaaatattcattttaaaaattagnnnnnnnnnnnnnnnnnnnnnnnnnnnnnnnnnnnnnnnnnnnnnnnnnnnnnnnnnnnnnnnnnnnnnnnnnnnnnnnnnnnnnnnnnnnnnnnnnnnnnnnnnnnnnnnnnnnnnnnnnnnnnnnnnnnnnnntacaggcacacaccaccacgaccagcctttttaa

SEQ ID NO: 7581 - DNA, 512 bp, Homo sapiens
ctttggaaaaaaaaaaaagggaaggaatgaagacccaactgatcgcctgctcaaggggaattacagcaaagacctcattgtgacaaaacaccttaacaaacattcctgtttcaactcacatggcactccctcaattatgctcggaaaaaataaattcagcaccccttgccatggtctgaatgtatttccccaatttatgtgttgaaacttaatccctactgtgtggctaagagatgaggccttttggaaagggctaaaggcatgaggcagagcttaatacagcatgagttccttctaaaaagagaaaaaggccttatacagcatgtattccttataaaaaatgctgcagggaactagtgtaggccctttttgctcttttgtttgtcccctgagcatttgtctcctctgcagaataggtgccatctcggaagcagagagcagccctcactagacatcaatgccagtgccttgatcttggggcttctcagcctccagaactgtggggaaataca

SEQ ID NO: 7582 - DNA, 1743 bp, Homo sapiens
gaattccgggcggcggcgtagccactgggccgtcgaagagcgcaggaggccggtgggccgggccgggccgcgcggcgcagccatgccctggctttacgtgctgcgtgccaggctgctacaacaactcgcaccgggacaaggcgctgcacttctacacgtttccaaaggacgctgagttgcggcgcctctggctcaagaacgtatcgcgtgccggcgtcagtgggtgcttctccaccttccagcccaccacaggccaccgtctctgcagcgttcacttccagggcggccgcaagacctacacggtacgcgtccccaccatcttcccgctgcgcggcgtcaatgagcgcaaagtagcgcgcagacccgctggggccgcggccgcccgccgcaggcagcagcagcaacagcagcagcagcagcaacagcagcaacagcagcagcagcagcaacagcagcagcagcagcagcagcagcagcagtcctcaccctctgcctccactgcccagactgcccagctgcagccgaacctggtatctgcttccgcggccgtgcttctcacccttcaggccactgtagacagcagtcaggctccgggatccgtacagccggcgcccatcactcccactggagaagacgtgaagcccatcgatctcacagtgcaagtggagtttgcagccgcagagggcgcagccgctgcggccgccgcgtcggagttacaggcctgctaccgcagggctggaggctgccgagtgccctatgggcccccagttggtggtggtaggggaagagggcttccctgatactggctccgaccattcgtactccttgtcgtcaggcaccacggaggaggagctcctgcgcaagctgaatgagcagcgggacatcctgggctctgatggaagtgaagatgaaagagatgaaaggcaatgaaaggcagcattcgccacctgcgtctcactgaggccaagctgcgcgaagaactgcgtgagaaggatcggctgcttgccatggctgtcatccgcaagaagcacggaatgtgaactggtgccccggcagcctgctgggactcccagaccccatccagccagggggaccgcaggccatttgtttgaactcctctatactcctgggcactggttgacagtactgaggcttaaggcagctggactctcttgctggtgacctggcatcctcaattgtttcctcctgaagtggaagctggggccttagactctgccctggtgacaccagcaattatgactttgtctacccttcctcccccagttattgttgccagattctggttaagcagaggcttcagaaccactgaacttgaaacttaccctctagggatgcaggtgggatgtccagggactataggtttgggaaaaccataccttaaggttggtcagcagtcagacaactctaatgtgtgtagtgataagagattcaagtaacatcagttctcctccttttcatgcttttcccttcccaggtgcagcctgtgattctgatggggactggtaaatctgtgcctctgccctcctaggacttattttcccaggaggccatttacaaggggatctggatgacctgctgatggagatccagcttgccagggacttaggtttatcctgttttgtttgctactggttacaaattctattttctgtacaattagtcagactaaagttttcactgtgtttgtttggcaaaacaaattaaacaaaaagtaaggttttt

SEQ ID NO: 7583 - DNA, 704 bp, Homo sapiens
aaaaattattttgcagtcattattttctgcttagaaaaagcactattaggaagctgttatttttaggggaagttcattacgtattacttgcctgataaaaatcacttacttgcaatgaaatatttaaaatagttggcatgaatgaatatgtaacttcttggtacttagaaaaataatttaggccattctaaaagtacagctaacctctattagagggagaagggctgacttagagtgaacaggattcccaccctctacggacagattcgatttcacttgctggttttcttttcaggatagcgtcaaataatgtgcaggaaaaggaataccgtgtgtgggagcgtgagtcttacgtgcactaagaacaggacagttagcatcgttcccacctccagagatcctcacggtggttatgcagcctcgtgtgctcagaacagtgtgaggtggatgaggcactggtggatgtttgcgtggcaaggatggtgggaccccaggcccacgttcttcccgttagctttctctggtgttaactgtttagcatcatttctgctgtttttatagaacaggcgctttttgctttttgtatggactcaagtgaaataaaaactagcaccgccgtaccttataaacgtgcccccttttgtatctgtagttagaaaggtgcagatggtattaaaagggtagcttacttcagacactgtctc

SEQ ID NO: 7584 - DNA, 408 bp, Homo sapiens
gcaaactacttgccacacttgaggctgcatgactattcagagaagggaggagccacttctgaattcagagtaggactgcatcaccaggcaaatacctgttctgagccagaaagactctggcttctgaggagatcctgagagtctgagtagtgccaggaagcagcctcagaatttgggggcccattacacaccccagccatgttcctgcgacggcttggtggctggctacctcgcccttggggccgccggaaaccaatgaggcctgacccgccttacccagaacccagacgggtggacagctcctcggagaattcaggaagtgactgggatagtgccccagaaaccatggaagatgtggggcatccaagactaaggactcgggggcattgagggtttctggggctgctt

SEQ ID NO: 7585 - DNA, 304 bp, Homo sapiens
acaatttggaaaaagcccccccactccaagtttcctacccttcccacccacagaaaccaggagacaggggaactatcttccttgatgttaacatttcaaagaggtggttctcaggtcctagagaaagatattcctgagttgtaaaactgggaagaggctggaagaagatttagatctcaagaaatagaaagaactacagcaaattttctaaagcaaatattcttaagggaggtcaagggcctgaagtcaggaagaaacctatttggtcaagctgaggggaaagttaaggctatcttgtcacaag

SEQ ID NO: 7586 - DNA, 358 bp, Homo sapiens
ttgaaggacccatattaactaaaaacaaattgccaagacaattattcatctctccctcccacctaatcaagaattatgtgaaagttctaagtgcctctgtccctcctctttctctctgtctggattccttgggactgacatcatagacatggaggagtctctgactttttaaagtttttgacagtcttgaatgttgtggttttccagtgagttatgggaagagttggagaggactcaaatgcagctctaatgcttcagtggaatcaggagacggttagagagtgaaactctggaagctttgggggatgttgtaaatgagagaatgtacggtcagtagtttctctggcattttaataga

SEQ ID NO: 7587 - DNA, 491 bp, Homo sapiens
  misc_feature (1)...(491): n = a,t,c or g
cacaaaccaaagctgggcttcatctggatgctctatgaaagattcctttgctcgcctcttccaattcctgggtggttgctggcattccttgcattgtagactcgtcatcccaacgtcttcctccttgggccccattgccttctcctctcctgtgtggggcatcatcaacttctccctttccctccctcttaaaaggatatgaatgtgactgctttaggacctaccctnnnnnnnnnnnnnnnnnnnnnnnnnnnnnnnnnnnnnnnnnnnnnnnnnnnnnnnnnnaacttctcttttctttaatcatatgagttaacatgtacaaatttcagagatgagaacatggatatctttagggtgccattttttcagtccattggaaatggtagatgtggaagaagaggagctaaaantcaatcagactaggggtctgcaatctgtagcctgcaagtcagtgcctgtttttgtaaataaagttttattggagtgta

SEQ ID NO: 7588 - DNA, 331 bp, Homo sapiens
tcattcttgaagacctacctcaaatgtcacctcctctttgaagccttccttgaccctttcaggtagaattagctgcccaacccccaccccacaattaatgctaaagaagcagggaatcgatccccatgatctttgaatctccagactcttacatggcatctgaaagggaacatgattgttgatttcaattaaattgaatctcaaccttctcactaaagaattctgaagagttttaaaaagtataatttcgtccctcaacctatcctatctctacactaccactatgaagactacgggatgtaaatgctgtgttttagacctgaaagtcaaa

SEQ ID NO: 7589 - DNA, 581 bp, Homo sapiens
  misc_feature (1)...(581): n = a,t,c or g
ccttcaacttgagagtgattaaatgctctctaccagaagcatcttctgcttttaacttgatggtactgaagcaggtatccgcatacacaagtttatcccaaccaagagttcctatctcttcaataaggcttgagtagaactggggaggaggaggtagtgcatacagctcttgtctattctttaaggcaacttccaaaagcatcttcaactccatcataaagctcattagatcaggagagtgctgcattctctgttgtactattcgatggtatccactaagtattgttctcagctgccaactacataataatcttgcattcttcagttgtaaatcttcaggcaacactatcctaaggtggaagtctcttccctgagccgagatgaatccctcatacacggttttcgaccggttctggggcagaagcagggggcactggcgcaacaggctcgcttccgtcaccgccatggctcgaagtccggagaaacacagctcgtgccnnnnnnnnnnnnnnnnnnnnnnnnnnnnnnnnnnnnnnnnnnnnnnnnnnnnnnnnnnnnnnnnnnngttatncaantnncaa

SEQ ID NO: 7590 - DNA, 353 bp, Homo sapiens
attttaagctgagtctttgagggaagagtaggacctgcactgaaacaaaaagacaatttgtggggttggggagaggaaccagatgtaaacaatggaaaggttttggtgtcactttgagaaggattttttggaagggttttgcaatgtccattctgtatcttgggttaacactagtaagtcaaatggagaataatttgagtgtcactcattcctacagatagaaaaattttaaagtagcttgggccgggattttccttttatcatgtgccattgtgtacgtgtctgctacttcatttagttccttttttaaaaatggaatttttatcacttctgtgcaaaggttaaattttttt

SEQ ID NO: 7591 - DNA, 123 bp, Homo sapiens
tcctaactttagtttgtgttccttgctgttctcttgtccttagatatacctcactaaagcagtactgttggcactgtgcgcaaaagtgaaataactgtttttactgtggttattttgccactt

SEQ ID NO: 7592 - DNA, 361 bp, Homo sapiens
tcggatcagagagggcggcttcccatgttgctcaggctaatctcaaactcctgggacgtgagcaagatcttcccaattgctgagattgcagaggaaagctccccagaggtagtaccggtggaactcttgtgcgtgccttctcctgcctctcaaggggacctgcatacgaagcctttggggactgacgatgacttctggggccccacggcttgttggctaacttgaggtagttgacaaaggaaaagaacttgttaccgagttcatttccctgtagctggctcctaccgctggcccaacacgggtctctgctttgtgatgagagaagcggtgaccgttgagattgaattctgtgtgtgggacc

SEQ ID NO: 7593 - DNA, 269 bp, Homo sapiens
taacccctgagaaccactgatttgtcctccatttgaaaaatttgtcataagagtgtcatataaatggagtcgtagaaatgtaaccttttcgattggcctttttgctcagcgtaatgttcgctctgttttgttgctgagtggtctccgtggtgtgggtggactcagcttatttatccatggtgagaaacacacattcacccgtccacacccaaagactgggcttggagacacacagaacagcagaaatgagacttttttctttctctctc

SEQ ID NO: 7594 - DNA, 392 bp, Homo sapiens
  misc_feature (1)...(392): n = a,t,c or g
cccctgaggttcctgggttaagaacatgaattttgggggcccatgaattcagccccccctcctaaaacggggtaaccatgcagtgtcctggattgtgaggaacaagaccaggccttggttacaggtgggcctgccgaaggaggacgcctgaggacccttagaggaaatgtttcccccgggcagccgggagggacatggctttggcagtggcaacatggactacattttcaaggagtgtggagtgaaggggaggaggggcctggttcctggaggcagcaaagttaaagtagtttttttttctttacccaaagggagacctaattnagtctcttggccagcagagaaaggaacaagcagcagtgagggaaagagaaaatgcaggcaagaaaggt

SEQ ID NO: 7595 - DNA, 657 bp, Homo sapiens
gaattagccaaattgagttaacctttggcacggagctgtgcctcggcttgcccgtgacagccctggaagccggttttggatactggcaacagaacatctagaatgacaagtttcgcactgtaggaaatagagtcgtgtgtccttctgcaggattgtgtccggtgatcggcatgtgtgacaagtgacatattccttgatatatcttctcaagacattttctatctgtttctgttggaatcttcctttgattacaagttggttattaccatctatagaaccacttgtacccaattcagccaacaaaaatgcaaggagatgtttgggctgacgatgtaatagtttacagatatctgtaaagttgacaaaagaagttttcttggttcctactcggacgacttgtggaggtttcatgacaaatttccttttctccccagcaaccatatctggattcttttccctcatgatgttgaacactcgattcagcagctcctcgtatgtgtagtctctttctgatgcctgcccaagcagggcctgtctgattactgaatgagataccatcatcttttttgttgtcttcatcttctagagcttcatctttctctagtatttcatcctcatctgggaacttaacattcttctttttcttctttttattgc

SEQ ID NO: 7596 - DNA, 1513 bp, Homo sapiens
aattcggcacgagcggacctcggccagtcataaaagatgacaacagcagccaggccaacctttgaacctgccagaggtggaaggggaaaaggagaaggtgatttgagccaactttcaaagcagtattcaagcagagacctaccctctcatacaaagataaaatacagacagactactcaggatgcccctgaagaggttcgtaaccgtgacttcaggagagagttggaagaaagagagagagctgctgcaagagagaaaaatagggatcgtccaacccgagaacatacaacctcctcttcagtgtcaaaaaaagccacggttagaccagattcctgccgccaaccttgatgcagatgaccctctaacagatgaggaagatgaagattttgaagaagaaagtgatgatgatgatactgcagctcttcttgcagaactggaaaaaattaaaaaagaaagagctgaagagcaggccaggaaggaacaagaacaaaaagctgaagaagagaggattcgtatggaaaacattctgagcggaaaccctctccttaatctcactggcccatcccagcctcaggccaacttcaaagttaaaagaaggtgggatgatgacgttgtcttcaagaactgtgcaaaaggtgtagatgaccagaagaaagacaaaagatttgtaaatgacacactgcgatctgaatttcacaaaaagttcatggagaaatatattaaatagtacagttttatgtgcttaattaaagactgtaaaacgtaaaggatcattctgactttttttatgagtttttttttttcttttcccctgtctaaattgtgtgtgggcttccccagttttaaactcctatctttttctttagtgataccttacttgataatggacttgggaataggtttaacccagtttgcattctccaaatgtttccagtgatatgttttcctggggaaaagcaaatctgcctgtaataaatatttttaatctaaataaccaaatctgggtgcccaactttttgttgggaatttatgctgctaggtaatacattccataatatcttttgaaaaggaaaaattaccattgtggtattgtggcttgtgcattaacttggtccttttccccctgtttctctcacatttaagatgagttaattccatattttcccccggcattttttaaaagagtgtaatggaagatgagagggattctattttggacccacatgttggtgtggaggagtgtcattgacagtaagcacccccaggcgtgtgtcctgggagagcattgggtatcgcctcacttctgcaggtacttggttttttttctcatggccgaagaggagagctctgtaagcattcttttaaagtatacggtactcacttgtgttctggatactcaactgccatgtttcctttgaaagagattgaatatgcacctgacatgcatttagtgcaaagcctgagaaagcttcaaacaatatataaaataaaacctttggaaataaaaaaaaaa

SEQ ID NO: 7597 - DNA, 458 bp, Homo sapiens
  misc_feature (1)...(458): n = a,t,c or g
atttaagtgattctcatttcttcatttctacttcttttatttatattccatttcttcccactttgctaacttgcttccctatcctttactgtatattctctacttagttgttctggttccttataacagcttcatatttcctcttcggtcttgtgacctcagttaaatgtttaattatagaaataatgtgcacgtggttaaaaaaaaagtcaaatagtaccaaaggctacacaacagnggttctcaaccaggggtgactttgcccccaccccctgcaggaaacatttagggcatgtctgggaaacatttttggttttcacaactgggggagggggtggtagtgggaaagaggtcaaggatgctgttaaaacaacctacaaaactcagggtcaggntactcacaataaggggattttntcacccaaaattttataggtggntgaggggtgaggaattcc

SEQ ID NO: 7598 - DNA, 366 bp, Homo sapiens
gacagaagagctgcaagaggacaaataacttactttgttgttcccctatgcatgtagccgcaaggaaaagaaagagaaatatgttaaacagaaatttattttaaaattatgagggttttttcttctactttctctggatattaaaaaaaataaaatgatgaggtttttcttgctagagtgaaatcaaaacaaatgatttaactattcactgacatctcatacatacacatacagcatccagagctcatggacaagtcaaagaatccacataggttacatgaaatcatacatttataacagcaggaaacttagggacagttgcccccttttctttctatttgggattacctggggtatgggaacgtg

SEQ ID NO: 7599 - DNA, 488 bp, Homo sapiens
ctgcaggtcgacactagtggatccaaagccagcatgctcaaacactgagctcaaacattaacattactaataaaaaaaaaaagggtgactttaaaaggttctttctatccagggtttctcttgggatactcatatgggatattactggcttatattccaaaattattttattcaacatgattgactttggccttttataatttacataaaacataattttcctcagttctgtaatccagattttccccattgagtaaataatacaattaaatttacatatggtaatttagacattaataggatattgcataggtagaatactttgtcagtacttagttactacctatatgtatttttgtgttacttttcagtgatttaaagaaatctaacagaaatctgcttaaatttgttttaaatagtgaatatcctgcttgctatggaatgaataaacaggtaaatttgatatgaaaaagcacctcagtatgatt

SEQ ID NO: 7600 - DNA, 369 bp, Homo sapiens
atggcaagatcatggataagacagcaggctttgattatagagctctgagttcaaatcctggctctaccacttgtcagtggtgtaacttggaggaagatgcttagcctgagcctgttttatgttttgaagattgggtaattgtccttccttcagtgttcctgggtgaggagtaagtgaagtcatgtctataagagatgtagcacagtctccggcatgtagaaatggtcagtaactcctagtgtgtagctagcctctgatgagatggtaaacttcaggaggctggcaccacggctgtgcttactcacggttcatgctggaagggatgcagaaactaaatgaatccacagctacttactcatcttgcctctg

SEQ ID NO: 7601 - DNA, 331 bp, Homo sapiens
gtggttttaggtttgggatgtggacgacgggttctttttgttgttgttgttggagctgaagatgtcccaggagtaataggtccaaagtctagtttggtctgcagtgtctctgggcgtggcgtggttttatgtttgggacgtggacgacgtgttcttgttcgttgcgatgtttttggagctaatgttgtcactgtagcctcagttctcacagttacaggctcaatgtctgtggtgggaactatggtcattgagggagcttcagtttcacatggaacaggctcagagacggatttagttggtggcatgtctggttctgctgtggtttggggtt

SEQ ID NO: 7602 - DNA, 361 bp, Homo sapiens
ctggaaggccaacgctgttcttatcactgctacacagagctgaaagcaatgttagaactgtgggttaaaaagaaactagtcaagttcttcaacggatgaatggcgttatctttgccatgcaatcctactcagcaatgaaaataaactgactattggcacatccaacaccttggctgaatggcaaggtaattgtggtgacagaggaatgccagtccaaaaaagttacatagtgtgtaattccacttatactgaatttgtaaaataacaaaattataggaatgaagaacatactagttgccaggggttaaggaggcagcagaggcagaagacagctgaatgcaattagaaaatggtgacaggg

SEQ ID NO: 7603 - DNA, 1333 bp, Homo sapiens
  misc_feature (1)...(1333): n = a,t,c or g
aacgcctccggtccctgctgcatactctggagatcaccgaccttgctgacttctccccgctcaccctccttgctaactttgccacccttgtcagcacctacgccaaaggcttcaccatcatcatcgagccctttgacgacagaaccccgaccattgccaaccccatcctgcacttcagctgcatggacgcctcgctgggccatcaaacccgtatttgagcgtttccagtctgtcatcatcacatctgggacactgtccccgctggacatctaccccaagatcctggacttccaccccgtcaccatggcaaccttcaccatgacgctggcacgggtctgcctctgccctatgatcatcggccgtggcaatgaccaggtggccatcagctccaaatttgagacccgggaggatattgctgtgatccggaactatgggaacctcctgctgggagatgtccgctgtgggtccctgatggcatcgtggccttcttcaccaagctaccagtacatggagagcaccgtggcctcctgggtatgagcaggggatcctttnaggaacatccagaggaacaagctggctctttatttgaganccaaggatggtggccgaaaccagtgtcgccctggagaagtaccaggaggcctgcgagaatggccgcggggccatcctgctgtcagtggcccggggcaaagtgtccgagggaatcgactttgtgcaccactacgggcgggccgtcatcatgtttggcgtcccctacgtctacacacagagccgcattctcaaggcgcggctggaatacctgcgggaccagttccagattcgtgagaatgactttcttaccttcgatgccatgcgccacgcggcccagtgtgtgggtcgggccatcaggggcaagacggactacggcctcatggtctttgccgacaagcggtttgcccgttggggacaagcgggggaagctgccccgctggatcccaggagcacctcacagatgccaacctcaacctgaccgtggacgagggtgtccaggtggccaagtacttcctgcggcagaatgcacagcccttccaccgggaggatcagctgggcctgtccctgctcagcctggagcagctagaatcagaggagacgctgaagaggatagagcagattgctcagcagctctgagtggggcgggtggggccataaacggttcctggtgactcctgagtcttgcctggccctggttcccagcggcggtggtgctagaaggtcttatgaagtcaggtgacatttctcactgtcacgtccacagcctttaatcgcaggagaaggcagctatccaccaggtacc

SEQ ID NO: 7604 - DNA, 611 bp, Homo sapiens
attttgcgtgcacatctagattcatatatctgtattttaaaacttaaagctgatgttgagacagttttaatacaatggaggctgcacaaatgtccgcatttccctgggaagtgttcctgtttgcgggcaaaggagtggcaggacaagctctctagttaagaaacgaaaagcgctgtcattcaggggatctatcctgtgagccatctctcttcctctgcagggttgctagcaaactccactcataaacacagttaccagagaacaaatcccaatacaagttgcttactatgggtggacggccttattatgggatatttcctgtgaatgcaggaagagggaaggcattcttgtgacttcaagcaatatatatatacacacagttttctaaattctatgcacagtctctgccggagagcaatcttcctaatcagtccatgatcacaattcgactttctcagttttgtaaccagaagggagagaaaggatgtttaaaaagttttaattcacactctaaaataattttaaagtatatgcagactttaccctaaacttcacactgctattcaattctgcacgggtaaataacttaaaaatagcttttaattagttat

SEQ ID NO: 7605 - DNA, 376 bp, Homo sapiens
ctgcatagggctggcgtggatgaaaatgttatagacatttaacaggaataataaaataaaaattaagacaagaaaagaaacagactaagagtaaattaagaaagctaacttatcaaaactgatcagtacttctcagaaccagttacacataaagctcatctggaaattagaactgatgagggttggaataacgtaactttcttaaaaatctcgccagtgattctgctacatggtcagggctatggctacttcactttagtgaaaagaggaggctcattgacaaggaaaaacaagaatgatgtggtaatgtcaatagatggaaatgaggaaactcacattgcaaaaacataaagataaatgagaaacaaacaaaaat

SEQ ID NO: 7606 - DNA, 983 bp, Homo sapiens
gggaccaggatgctaaatgtcaaggtagtcctatacagtgaagaattgtcctgctcaagatgccaggatttccccagtgagaacatgctctaaggaatgaccacccctttcttttattctcccacagtgctccatgtacagaagtaaggcatagcagtcatatgagcaaccacattcctgaacctttcctcatgctgggctctacacttaatcctttacttgtatgtttctgtaattcttacataaattctattaagagggtggcatactgtagtggatgaagctgaggcttatagtaggtaaggcacaaagttaaaaagtaacatcactgggtttcaaacctactggtctctgtgactaaagaacactttcagaaccacttcttgattctgccaccacttgatcccataacaggctaccccttggcctcatgctggagttgtgtgtgtctgtcttcatcccaggctgagctccttgaggtgaggatgttgtgctgtttgcctccctcacagtgccttggtcttagtggatgcccagttgtcttgtgaatgacttttaagaagtgtacttaagagaaaaatcctaccttatttgaataattacaagtcatgtttttgttgcttaaaggtgataaatcagtgtatattatttgttaatgtccattaaagccagtttttaaaaaaatcactggacttttgtgtttaccatttaaaacaaccattttaaacaaacttagaacgatgccttagctgtttataggtaacagaatgtaaactcccaccacctggagactaggccatatccagggacctcacactgactttcctaaaggagagaagcagctacgctgttcatactgatagagaagagggcaagaaaagatccagagtggctgttactttgaaaattaaacgaaagatgaaattctgaacttaaaacacttctgtttggccttctataactgatcacccttctttgctctg

SEQ ID NO: 7607 - DNA, 381 bp, Homo sapiens
  misc_feature (1)...(381): n = a,t,c or g
gtcatgtccttgtcttatttttgatatcagggtaattctgggcttcatagaatgagttaggaagaattccttcctcttccactttttggaatagtttgagaagaattgacgttacctgttctttataattttagtaaaattcagcagtaaaaccatttggtcctcggcttttctttgttggaagatgtttcattactgattcaatctcattactcattatttgtctgttcaggttttctgtnntctntcctggttcaatcttagtaggatatatatattcaggactntatttcctctaggttttccaatttattagtgtatagttgttcataacagtctctaatganccnnngtatttctgtgtgttcattgtaatgtctc

SEQ ID NO: 7608 - DNA, 410 bp, Homo sapiens
gaaaaggaaacctctaattttctggggcccaggtacactcagagaggaaaaatggcccagggtgggagaacacacagggccctctcttcccccactctgcccgcctttcagccttgcaagaaaatctggcttttccctcggggtgtttgcctcgctgcttctcccccccagacatcacctccctcacagcccagctccatgttcacccccaccaggaagtcttcctttctaaaccgtttttctctgcatcctctcagagtggctatatttggttcctgcaatataacttcgtatatattgcatcagggagagggggagattcctgaagctgggttgttattttttgtgaagctatttttttgggtgcattttctttctattccagaaaattcttatagtggggtgggatt

SEQ ID NO: 7609 - DNA, 1073 bp, Homo sapiens
gtcgacttttttttctttttctttgaaaaggtcttgtgttagggaggaactggcaagagagcacaaagcctgtcccaaaggctcttgaagcacattcttttttgcagatgagcatatccctttagcatatgagcaagaaagcggtggctaaaaagcctggaggtgagctggagccagatcagaagaaacctgaacatcactctcctaaaaaggctggactgaaattagtggaggcaactcaccgacgacttctgacaagatggcagaattcaatgttcgggaagattagttacgtggagatgggctggatgtggcctgggtgggagtgggggtttgagtgccacactggccgggattcagggagcagatactggaaatgacgacaaagcccacgactgggagaagggagaaatgttaaaacgctgccaagtgactaaggactaattctattaacagattaaaaagttgatttctagtatctattcagggaaggacaaaatacaggattctgttttacttataaatgtagttttggcatcccacatcgctgcagcacgctgtactgccggagactaattcctctgcgttcctaaaggctacttcctgctagccaaagcacatttttaaaaagtgagagtcatggttcataatccatatttggcaaaaagcacaggcagtgccaagttgaatttgggtaagcagtttggcataagctatttcaacaatgaaatggccgatgtgatgatcctcagggaatacaaaaagcctcctagcagccttctgttaaaaactttttggtagggatgagtctttctagctactctaagacacatctgatcaataaaacgcccatcccggagcagcatcttggccctccggagatcaacgtttatagcgggctcctcttggactctccctctccctttccctaaaggagcgcgcaagaccaggcctcaccggaaaacagcgcagtgaccgtcctccaccccgggagcaggggccgggctcccctcccccagccgaggccggcgtagtgcggcgctttcaaaggcctggagcctggtactcggcgc

SEQ ID NO: 7610 - DNA, 541 bp, Homo sapiens
agcagcagcagcgactcggcgcctgactgctgggaccaggcggacatggaatccccggggtcggccccgagcggggatggagtctcctctgcggaggccgaggcccagcgcgagcccctcagctcggctttcagccgtaagctcaacgtcaacgccaagcccttcgtgcctaacgtacacgccgcggagttcgtgccgtccttcctgcggggcccgactcagccgcccaccctcccggccggctccggcagcaacgatgaaacctgcaccggcgcgggataccctcaaggtaaaaggatgggacggggggcacctgtggaaccttcccgagaggaaccgttagtgtcgcttgaaggttccaattcagccgttaccatggaactttcagaacctgttgtagaaaatggagaggtggaaatggccctagaagaatcatgggagcacagtaaagaagtaagtgaagccgagcctgggggtggttcctcgggagattcagggcccccagaagaaagtggccaggaaatgatggaggaaaaaaaaa

SEQ ID NO: 7611 - DNA, 1147 bp, Homo sapiens
cactttataaacaatccactttatttagcacaggccttcaagaaaacaccagacactgacatgatgaattgctctcttgggagcacgggtgggtgagactggggaggaggatgggaagtgagaacttggtccgtttaccggaagacagcagcacacagatctgcttgcaccctgtacctcattgtctaggataacaggattccacagccttgccctgatagaagcaactcggcaattaatgggttgatggcccacagtccttccaaggaaaacccatgtttgcttgctgcagccacgtggacaacaggcaggctcaccacagtgcctgcaggcccttcctggtctctcaatttcactccttcaaccaagcgtttagcagatgcctccttccttattaccttctgtattaggtgctggggatacactgggagaaggttcttgttcttaaggaacttctgatcctacagcaagccagtgatgaggggagaagtggtagaatgggggggattcacctcatcgcccctttctaagcatcagcccaattcttgcacatccatcaaatccttgtccagacacctcctggaactcttccctgcagccccctacaaccatccccacctcttccgggtaccccgcaggagctggagaaggatgaggtcggggcgaggagttcgcggaagcattggcaggcctggactctcctttgcgctgtttcgtggtttatttcccagctctaaacaaggacgtcctgcaaacttctgatgggtttggttttgtggtaacttcttagagagctcagagcatcaaggaagaacatttcctcaggatgctgaggcatggactggctttcatctcaagtttcttcagctgatttccttcaatgttgtttttctcactcggcggaacgtggtaactcgctccactggccaggcttcccaccatctggagtggagtccgggtgctcctaccagggatggatgagctccaagtgcaggcagcctggcacaagggccgcggccaccaatgctggaagatagagcctcctgcttcctgcagacagcagagcagtgaggatggcgctttgtgcttttctggttacaaggtgctattgtgaatcactcccttgaccaatcacaagcatcccaag

SEQ ID NO: 7612 - DNA, 796 bp, Homo sapiens
gtcaaaatttatccttcattccctcattatatgtttcttcatattcataaaggggagaaattaatgttccttttattttaatttctgaagtaatttcattctaagttattaaggtaatttttcctatgatattctattctcataccttaatgtattaaagctttattttcaaaggtttggatttcccactgtaactattcacacatagaatacttgatattttatattatatttggtaagttttttccagcaacaattaaaccttcacaaaaagttttggattttcatgcacaacagaatgcttttttttttccagaagatacatgaagaggttttgagtgggagtagtacaagtgagaaagcgatgagcttcctgtctttgctgtggcaataatggaagaacattgttatgtacttatataagacactgccatgttttttttccagtgcaaattgatagctccttaatttaatagcaataaatctattttgatctgcataatctttggggaaaagtgggaggtattgttttccatttctcatctgattttagtatgatttttattacaaaaaaatttaaaattactatgccttattttgtagcattatgtattagataaatgtagtatgtgtttttcactaaatttattttgagaaatgatagttatttgaaatgagctattcaacttttatgtcttattaatacatgggtattattttatggttcccacctgttatttggtacccaattatgtataatacagaatagttttatattcactttacatatatgtca

SEQ ID NO: 7613 - DNA, 362 bp, Homo sapiens
gatgggtctgcaatgacttgggactgctggtatattggtagcatttgccaatttccatggtgtaaatagtcacatcatgactgatttcaaactaccaacattctgtcaacagtctccagaatttctgaaaatttaatgaacatctttgagaaccagtatggaccagctccagcataccactgcctagggccaaatgatgaaatggaacctctaccaaactgggaggcaggagttctgggtccaggaacagttttactggaactgaattcattgggtaatccctcatatttcctactctgggcctgagtttctccagctgtcaaaagatgaatatagtatttgctctgcctgcctcaaaggca

SEQ ID NO: 7614 - DNA, 745 bp, Homo sapiens
ttttttcagtataaataacatttataaaaaacaaaatgaagttgcaaatgaacttatgtcaaatttacagtttctatatttaaacaaagggtcaatgtcatcaacattatctgtaaatcaagttatcatcagatacatttaataattaaatataaatatgacaatggatcaaaaatgatcccagctagtttaaggattaatctcattaatcccacaatttaatgagaccatcccaaccacatgttatgaccttagaagtttcatgaggatgccacactgcacctatacacactttatcatgagctttaaatcgactgtagagttttgtggtcttccagtcccaaatgtttaattttccatttccatctcctgaaatcacataactcatgtctggtgaaaagtccacctgacaagcatagcctggctaccatatggcccttaaaaatttttttcttatttaatctaaatctgttctgtgctccaaaaattaagatttggttgtccattgattggcatgctagccattttccatttggagacaaagtcactgcaggcattgagtgcatactgggttctgctatgtacttgaaatccacagggatatccctaaaaattttaaatagcatatcagaataagcaacttttaaaaagtaccttcagaattatctctggaacaaaggaataatatgcaaataaaagcaaactcttgatattatatatttaataaatctttcatgaaactttc

SEQ ID NO: 7615 - DNA, 348 bp, Homo sapiens
cttttaagaagattcctatggaagacagacataatatccagacacatacaaactatttggctatgctggaggaagtaaattacataaacaccttcagaaaagggggacagttgtcaccagtgtgcaatggaggcattatgacaccaccgaagagcactgaaaaaccaccaggaaaacactaaagaagataacctaagcaaacaagttggaacttcaccaagattgggtagaactggtatcactgaactaaccctaaagttttacagaaagtagtgctgtgattgattgccctagccaattcacaagttacactgccattctgattttaaaacttacaattggcactaa

SEQ ID NO: 7616 - DNA, 317 bp, Homo sapiens
tttggtgtctactagtgtgtatgaatttgagctagagtccttctgtggcatgcactttgaccactcctggcagtcacatggcagatttccaagtgcaaatccttaatccaaacaaggatcatctaatgacaccaccaggccaatccctgctctcctccccgaaaagtcagggtcccttcattggaatcctccacccacccaagcagaatttagcagagatttgccttcaaaccctaacggcccccttgttctctggtccttctcaaacccacctttgtaggccacccagcattgcaggacagcgtgtggggcagctg

SEQ ID NO: 7617 - DNA, 536 bp, Homo sapiens
ttagaagaatagtgatgtgggttgggctcaggctctagttctggttctgtccctcatcagctaggaaaactgtaaggaaattaatttcacacttgtaggctttatttcctcatctctaaaatgagaaagtatgatcaggcggcttctaagtcttccagccaaaaaggaaggtaattttaaatcttgcaccactgaggctgtgtgtcgccgtggaaactccacagccaggctgcccaaagccaaaggagccactactgcagttggtggctcagaatcctctgctgccacctctgctcctcaagtggatgctccaaatccagaagtggatttcatgcttcccatgttgaaaacctaattcattcataacctgagtaactgggaaataataattcttcagaatggggcaatttgtaaacttcaaaaaactgcagaactctacttgcttatgttgtcctaaatgtctaccataaattttaaatctctaaaaaattatagcaagggttcacttcaaagtcttcattgctgacataacgtgg

SEQ ID NO: 7618 - DNA, 406 bp, Homo sapiens
gagatgtggctatgagattgacacaagttttcttaagagcttcatcaaacatatggaagcagttccaaaaagtttcccaaatatttttgggcagtggcagcagtaactcagagttttaaaattcaaatcagaattttaagaaaccttagagattattcctttattacaaatgaagaacctaaggttcaggaaaacttttgacgcatcagttggttcagatagtcagtggcagaactgcaaagaactcgccctctgactcccagttgagttttagcctgaacccccattcactcccatccaaaaacaagtgggggtgggggttgcagggagggaaacaagtttcccacaaactgaatttttaaaatattggcagaattttgctgggtgttctctgcaggtttaccag

SEQ ID NO: 7619 - DNA, 803 bp, Homo sapiens
ctgacacgcagctttggttatagagcgggcgcacaggaggggaggagaccgcgcgggacggggaggaatggcctgtccgcgttaaaccatcacaagccatggttgcggaagggccacgcgtcccccagtaggagaatgactccgattcgtgaccctcagcgccggtgcatgtcgatagtcaaggaaacttttgagctatttacagcttgtagcaattatgtaaagtatactcctctgaacaaaatttggagcatgtttgtttctctctacctgatttccccagaatctggaaactatctatatttattgagtgtctactgtgtgcccaggcacctatatctatgtgcatagaaaaaccctggaaggccatacaacaatatatatagagtgatcgtctctgccttgctgagcctaacaggggtgtcaagcttccattttggtatctacttctaaatacactcagaacaggagaaatttggactaattttcaaactacagacactttctaatcatgatgcatttcaaaagtggactcgaattaactgagttgcaaaacatgacagtgcccgaggatgataacattagcaatgactccaatgatttcaccgaagtagaaaatggtcagataaatagcaagtttatttctgatcgtgaaagtagaagaagtctcacaaacagccatttggaaaaaaagaagtgtgatgagtatattccaggtacaacctccttaggcatgtctgtttttaacctaagcaacgccattatgggcagtgggattttgggactcgcctttgccctggcag

SEQ ID NO: 7620 - DNA, 404 bp, Homo sapiens
ttttttactatttctatatttctctctctttgactccctctttttctctctgtctctcttctctgtctctctctctcctctctgtctctctctcttagccattacaaacttggggcaggtatacagcccatgttgagagctgtatacctaaattgggagggacaccagggataagactccctgggtttatagcctagatgcctaaggacacagtgtagagcttccttagatccctttggagttacaacttgctagaggaaaggaaagtctgaaccattagtacctaggaggcagggatcagaggaagtagattcagaggtaaggagaattttgggactacactttcaagaaagtcatggtcaggacccaggaggtatgggtcagaaggaaaggtaggagcgccc

SEQ ID NO: 7621 - DNA, 610 bp, Homo sapiens
  misc_feature (1)...(610): n = a,t,c or g
ttttttctgacaaaatatgttatttaagcttttattatttttaaaccaattagtgaaagctcttttatatataaacatcaaacacataatacatataaatccatagacagaagttaaaggactcattttccaagccaggaattgaacgctgaacccaggctgccattgtgaagagaaagcatggccacatggttacaaggtcaagctcccaaggacatacaagacaagagggaaaccttatccagtttttttttgttttgtttttttttttttttccagggacctgcagcaaagcttataagtgatcagtttgcttggctgtcttgaacagcaggcttatgggatcctaagcccaggttttattctaaggtattccaccttatgacagaactatacagaaagacaaattcatagcacaaagtataacagattcactacagcttaagactagcttcacaaatcctttttccaattaatcagaattttacagaggagctaaacagtgatttttaccattcattcttccagttctcgtgccnnnnnnnnnnnnnnnnnnnnnnnnnnnnnnnnnnnnnnnnnnnnnnnnnnnnnnnnnnnnnnnnnnnngggt

SEQ ID NO: 7622 - DNA, 2896 bp, Homo sapiens
tatcgaattccgggtggagggacctggcaaagcgccaggccccgcgtgggctcccggcgagcggttgatggcgagggggcgcggcgcgggctctgtagcccgagttcccgacgctggaggcccggcccgcctcagccgcattgtcccgggccgcgcgcaccggccctgagctgcgccgccgcagcacccgcccgccgcccgcggggccatgcggagagccgccgggatggaggacttggctccgcggaggaagaggagtcctggtacgaccagcaggacctggagcaggacttgcacctagctgcggagctggggaagactctgctggagaggaacaaggagctggaggggtccctgcagcagatgtactccaccaatgaggaacaggtgcaggagatcgagtacctaaccaagcagctggacacgctgcggcacgtgaacgagcagcacgccaaagtctatgagcagctggacctgacagcccgggacctggagctgaccaaccacaggctggtgctggagagtaaggctgcccagcagaagatccatgggctgacggagaccattgagcgcctccaggctcaggtggaggagctgcaggcccaggtggagcaactgagaggcctggaacagctgcgagtgctccgggagaagcgggaacgcaggcgtaccatccacaccttcccctgcctcaaggagctgtgcaccagcccccggtgcaaggatgctttccgcctacacagttcctccctggagctgcccgcggcccctggagcaggagaacgagcggctgcagaccctggtgggggcgctgcgctcccaggtgagccaggagcggcagcgcaaggagcgggcggagcgcgagtacaccgcggtgctgcaggagtactcggagctggagcgccagctgtgcgagatggaggcctgtcgcctgcgtgtgcaggagctggaggccgagctgctggagctgcagcagatgaagcaggccaagacctacctactgggtccggtacgaccacctggccgaggccctgctcgcacccctcacgcaggcccctgaggccgacgatccccagcccggccgcggggacgacttgggcgcccaggacggggtctcctcaccggcagcctctccaggccacgtggtgcgcaagagctgcagcgacactgcgctcaacgccatcgtggccaaagacccagccagccggcacgcgggcaacctcacactgcacgccaacagcgctgcgcaagcggggcatgtccatcctgcgggaggtggacgagcagtaccacgcgctgctggagaagtacgaggagctgctgagcaagtgccggcagcacggggccggagtgcgcgacgccggcgtgcagacctcgcgccccatctcccgggacagctcgtggagggacctgcgcgggggtgaggagggccagggtgaggtcaaggcaggagagaagagcctgagccagcacgtggaggccgtggacaagcggctggaacagagccagcccgagtacaaggcgctcttcaaagagatcttctccaggatccagaagaccaaggctgacatcaacgccaccaaagtcaagacgcacagcagcaagtgacccttctccggcctgcagcctcccccagggtggaagccgtggggtccctcaggcctgggcggtgcagcttccagagagcgagcgccctttagcggcctgccaccacagcacgcggcctcctgatccggaagcacgcagcatgttccctgctgagcggaggcagcccacctgtcctgcctcccaggagcccttggccacctcgcgccagcccaaaggcgcagctctgagttcaaagccaaatgtccccactaccccagggatcccccagctcccccagcccctggcttcctgaccctgcgcctcaccctcagactcctgaccaggcttctgaaagccattctggatcagttgggctttttttttttttggttaatttgtttttctaaaagatttgcaatcaaggtctccttgaccccttgccacactggaacgcttaaaggggaccccagggccagcgttaggggtcctggaccacccactgcttctccccaaccctgatgcgctgacttcccttagcaccagctgtcccacctccagggtcctgaccaggtcagagatgtcccctgccatgcagagcaggaagcctcagctgggcctggagtgtccctgctccagccctgccagggacggtttctccctggatacacttggcccaccgcagatctgtagccagtcagaggaggaggagaaggagcccctcagcagagtggtgcagtttcgctcagagcttgtctccttggcttccttccccagaaatgacctgctgggccttagctttccaggggccggggcagtggggagcccccatcccttcacaccgccaccaactaaccaagcttggcctctgactcccgtctctgtgcttgcccccatctcagggaccatgatgtctcagtcactccacgctccccacaggccaaccctggcacaggtcatgtctgcagcccccagaatgttctggacatgcaccaccagccggtggtcccaatgtccacccctgcctccccttcactggggactggggttttcgccccatgctgcatcgtgttgtattgggatggggctgaggaacatgctccctccctccctcccataaaatgcctgctcttcacctcccacctttgtggggggcttttgaggacccagctgcgtcaggagttttgcttcaagatgtcagaaagtcaagttcagctaagagacacccaggtccccagcttgccctgagcagcccttcagggtttctggttccttctgccgcccttcctgagaccttagaaaccagaaggag

SEQ ID NO: 7623 - DNA, 512 bp, Homo sapiens
ggtcggtggcgcttctctctggcccgagccagcactgatccgctgggcccccagcgcaatctcctggaagagcccactcaccctggacgagctcttcggtagcctcagaccgtccttgaagaggatgactgagacattatgggccacgcgctgtgtgtctgctctcggggaactgtcatcattgacaataagcgctacctcttcatccagaaactgggggagggtgggttcagctatgtggacctagtggaagggttacatgatggacacttctacgccctgaagcgaatcctgtgtcacgagcagcaggaccgggaggaggcccagcgagaagccgacatgcatcgcctcttcaatcaccccaacatccttcgcctcgtggcttactgtctgagggaacggggtgctaagcatgaggcctggctgctgctaccattcttcaagagaggtacgctgtggaatgagatagaaaggctgaaggacaaaggcaacttcctgaccgaggatcaatc

SEQ ID NO: 7624 - DNA, 435 bp, Homo sapiens
  misc_feature (1)...(435): n = a,t,c or g
ctgagcccctaacgctggggtccctgataaccgcggcagggtcagactgaactgaattacaggatgcctggctggtgtctgcagaggactggcgaattgttggtgtggaaaacccacacatttggtgcctgatgtgtagtgtgggtggaaatatccccggagcgacagggttggcacagctgcagactctaagtgccagctactgtcactctcaaagcctcatttaagctgtcactcattcaacaagccgctcatgacagccggctaccttgcaggtgccaagggcacagtgaggaagtcctgaccctgccctccaggagaggacagcccctctcccttcaccatgagcctcgtgccnnnnnnnnnnnnnnnnnnnnnnnnnnnnnnnnnnnnnnnnngtattaaattcgtaggcatgtcaaagcggtnttcaaa

SEQ ID NO: 7625 - DNA, 268 bp, Homo sapiens
ccaagggtggttccattagggaacaacctttttggatagttgattagtatattgaagtaatcctattgattagtttattagtatatcctgagtaatgcacaagacagaaaaatcctcaattttgaggaagtagtatcttacaaatcataatcattgatatcctaatggataaaatactgatattttatccataatttgcttatggataaggataatattctcctctgatatccttatgaataaaatattttttaagtgttcaggagag

SEQ ID NO: 7626 - DNA, 382 bp, Homo sapiens
ttgggctcctactatgtgctgcgtgctccatgctcagcctctcagtcctcattcctcgtatatccacctagatttgaggatgagtggcctctcccatcagccacaatcacatgcagtttctcctctatcctcagctcagggagcatacggacgttgcgcagtgaatgcagctggctgggggaaggctcaggaaccgcacccaggaagcccacctacagatcccacctcaaaccacgacatgctgcagcctccccagtggccagagcagcttaacaaagcatctttgtttcctttctgcaccccagaaaatagctgtgttggtctcttcgccatgcagagtgaataaagaataagacaaacaccaaaaaaaaaaaaaaaaaaa

SEQ ID NO: 7627 - DNA, 976 bp, Homo sapiens
  misc_feature (1)...(976): n = a,t,c or g
tttttttttttttttgagtcaacggcagacagctatatttagtggtgcctcgacactcacgaaccgccagcgtggcgcctggatcttgcccagctgccagctccccccaccaggactgtggttcctcagtttctcctgccagccccggctcatctcagggcaaagctatagacatggtagatctcatcggggaggttctcctgcctctcctcggccaggaggctgaggcctgcactgcagatgatcctgcggaccacgtcaaggtcccggcacacgctgctgtccacgtcgtccagaatcacgccctcctgggccatgttgtctttgatgacgatgatgccgttgggggcggaggctgcccttgcagcgccgcaggaactcggccaggtgctgatcggtgaggtggcctatcacccactggatccagatcacgtcgtaagagtccggctccggggtgaagtcctggagcccacaacagaagtagttcctcaccctcttgccctcctcccccaggtaggtcttggcttgaaccaggaagtcctccgttatgtcgaccatatccacctctctgaacagcggcaggagcagccgcttggtgatcctcccaatgccagctccacagtccagggcacaggacgttcctgtcttgttcgggccttccctcaaaaacctctgcagaaacttccgggagctgttgatgtcgatgctggagatgtggccataccccccaagcatgccgttcaccgtgggtgggatttgtttccagtaggtcttggccttggaatagaattgcttctcgtcttctatcacctcgctcgtcatgctgtcaccaaccacggctctactcaagcaccacgatcagcaaccgcgactctctccgggcgggggctcccgggaccgagagaagaagatggggaagaggaagggagggcggcggcggcggagacgccacaagccaaccgcatntccgccagac

SEQ ID NO: 7628 - DNA, 93 bp, Homo sapiens
agacatgaggagcaacaacgttgaggactgcaagatgatggtgagactggaggtgggaaaggaggtgacagctgtgagctgcagagatgcagg

SEQ ID NO: 7629 - DNA, 93 bp, Homo sapiens
gtggacagaggagtgtgacaatctctggtgggatgcattcacgagtgagttctttgaggatgatgccatgttgaccatcactttctgcctgga

SEQ ID NO: 7630 - DNA, 1401 bp, Homo sapiens
  misc_feature (1)...(1401): n = a,t,c or g
ttttttttttgctctagagggggtagagggggggacatgagtgattttttttttaacttacatttttaataatattatttttaaaaaaacttggagctgggataagtggcagcagggaggaggggcccagagctttacccctctattaccagctgcctaggggaaggagcattcaacgaagccccgtaactttaagtccctaagggctgtgggtatagacaaccccaggcttgaaaggggtaaagtcagggggatgggaaacccacaatctggggtgaagatggaggcaaatgcccctgggggggtggtcaggacatgtctcagaggcccaggttccaagtaggcatccacatgagtaccccctccccctaaaaggctctgtagaggcccaggcccagcccagggccactgggggggcaaatcttgggcacctgcccccagagagtccagttcctccctgaagcgggtggatggaggctgcccattttagatgctcagtctcttcattctgtcttctgctccctggggctgtgaggggtggggcaggtaggcagagcactgggtggccacagcagggccttttactgggaggcctgtgacgtggggttctccgatttgctttcttggctggacggaggcttgctgttccaggggctgttggcgcccagtgcaggggagttgttaaagctgtcctcgtcgtcaatcgcgttggctgcgtcaaactgggtgttctccagccgggtgatgagcctctcgtcctcgtccccgaactccccgcccatcagggtgggctcccccaccaccatcacatcctgagagtggcggaggtccccaaacataatcggggcaagggctcgcccggcccagggcggcagatacccccagagccccagtacccaccctggaagctcaagagtccccacccccncctcatacccgaatttaaaaccccaactcctgacaccctcagctcctggaatccttcctactgaagaacaccagagcatcaaagcctttagcccatatccattacattctagaagtcactctactcccctagctccctagcccatctccccaaaattttaggggactcctcaacttctgtccacatgtaagaaagggagcatatcaaaaacatgagggagggcagtgtgtgcatgtgcaagggtatgtattctggatctgcaaacactccagtctgcatgtctatcagtgtgagtgtgtgtgctggatggtctgtgagccccaagctgtctgtcctgaatatccgtatgtcctcatgggtgtctctgtccctttatgccctagcttcctatggctgagtctgtgtgatcacacccatgcaagtgcctgacaagaactctctcaccagtaaaagcagttagcccatgctggcag

SEQ ID NO: 7631 - DNA, 1598 bp, Homo sapiens
tgtttccttgttctgtttttatttaactccaaatagctaataacataaaaacattttaaaaaaatctccaatacccaactattacttttggttgacaacatttgattatttagttcttgcttgtttcccacatgtagtacagaatctatcataatattttaaaagtttgcagcaggcttaaaacctgaatatttagatcctaatcaaaaaccatgatgtagttattagttttgattttaaataccttgctcccacagaacttactaaaacgaataaccataaataggctaggctattaattagatctcaatgaaatgcccacatacagcacatacatataggtagtatatatgcttttatcctttactactcaaaggatgatgtacagtggagttatatcataaacacatttaacttacattaactcaacaaatgaggtcagtgaaaaggaagccgtaagggaaataacatgaaatcctgtggcgatcccacctaaaatgaatgcacacccttgagtaaacccaggtgggtgctgtccatccgctgggtgggcgcttcactccttgtcagttcacatctgccactagcggggcaagcatcttgcgggctgattctagtgttaaaagttatgtgctttttttttttttttttttaacaaaatggcccctaaacaaacaccaacaacttcacttggtcttcaaacaaagaaacagtctttttttccaacataggaggaaaagctacttgttgtggatgtacaggtttccaacatggcacccttctaaagggctttcaaggatcatcctaatagcccattttacctatgtactgaccttggaagctaacccctgagtatgatgcaactccactctaatgtaaattaaaatgccatgatcttaaaaatgccataatattgtcagtataatttaatttccagtttagttccatcttcacatttagcagtgtgtgtctgtggccgtctcctggtgccagcatttcagaatgtactatcactggctgagaaaatctcacggtgagaagagtagtgtgtcataagatctgaacaaaaaagctaccaaagttgatcagtctcagtatgattcaggatatgattttcaattagcaaatgggtgcgactgaagccagagagtggctttggttttgctacacccagtgctcccaggaatctcctgtggcctccttttcatgggtttctacgctggcagctacactctacttcttaaacacttggccttagcctgaccaccgccccggttcagtttctatttttaagagcaccattctaatggaaatgtccctgccctgaattaagctgggactgtgcactttaccactagctagagctgttatatatcatagcgtttaggttaaattggtacggtattgatttccttgactgtgacttcgaaacttgcttctgcttcttttagccatgtaggatttctacctgggctgtagatgagggtaaaatatcccatggaggactccttcaataaccacatttggaaaatcgctggctgcaggcaagacatatggatccctgaggaacagcagcacagtctgaagagtcaagcaaa

SEQ ID NO: 7632 - DNA, 379 bp, Homo sapiens
gtcgatggcttctcacggggctctgtttcctctggatcctgggagacattgcgaatgtcaaagtcattcattctgaacctcctagaagactatgggccgactctagcaatagtcatgcatgtttactgagcacttactatctgacaagcacatgatgtggaatggctcaatggcttgggcaggcatgcagcctctgctctgtgaatgaggaaaccaaggctcagaggcattgagcctcaccttccccaacgagcacctcatcgccagtgatgagcaggctgaccctggccgagcttttcctgtgtgcctgcttggagagatagtggcgctgccattaaccccatttacagctgaggaaactgaggctcggagaagctga

SEQ ID NO: 7633 - DNA, 220 bp, Homo sapiens
ggaggtggcctggggatggccaccaacaaccttctcttaggactcctgtgtgtggttgctgggcagacccctggcctgaccctgtttgtgcttctctgatctgtagggaggaggctcattgctgctttctgaggtcctgttgtgtcccttccagaaagcatccttagaagagaggacccggtttgatcttctctgaagctcctatcctcttttcttgagg

SEQ ID NO: 7634 - DNA, 1552 bp, Homo sapiens
  misc_feature (1)...(1552): n = a,t,c or g
cagtgccttggtaatgaccagggctccagaaagagatgtccttgtggctgggggcccctgtgcctgacattcctcctgactctgcggtggagctgtggaagccaggcgcacaggatgcaagcagccaggcccagggaggcagcagctgcatcctcagagaggaagccaggatgccccactctgctgggggtactgcaggggtggggctggaggctgcagagcccacagccctgctcaccagggcagagcccccttcagaacccacagagatccgtccacaaaagcggaaaaaggggccagcccccaaaatgctggggaacgagctatgcagcgtgtgtggggacaaggcctcgggcttccactacaatgttctgagctgcgagggctgcaagggattcttccgccgcagcgtcatcaagggagcgcactacatctgccacagtggcggccactgccccatggacacctacatgcgtcgcaagtgccaggagtgtcggcttcgcaaatgccgtcaggctggcatgcgggaggagtgtgtcctgtcagaagaacagatccgcctgaagaaactgaagcggcaagaggaggaacagggntcatgccacatccttgccccccaggcgttcctcacccccccaaatcctgccccagctcagcccggaacaactgggcatgatcgagaagctcgtcgctgcccagcaacagtgtaaccggcgctccttttctgaccggcttcgagtcacgccttggcccatggcaccagatccccatagccgggaggcccgtcagcagcgctttgcccacttcactgagctggccatcgtctctgtgcaggagatagttgactttgctaaacagctacccggcttcctgcagctcagccgggaggaccagattgccctgctgaagacctctgcgatcgaggtgatgcttctggagacatctcggaggtacaaccctgggagtgagagtatcaccttcctcaaggatttcagttataaccgggaagactttgccaaagcagggctgcaagtggaattcatcaaccccatcttcgagttctccagggccatgaatgagctgcaactcaatgatgccgagtttgccttgctcattgctatcagcatcttctctgcagaccggcccaacgtgcaggaccagctccaggtagagaggctgcagcacacatatgtggaagccctgcatgcctacgtctccatccaccatccccatgaccgactgatgttcccacggatgctaatgaaactggtgaggcctccggaccctgagcagcgtccactcagagcaagtgtttgcactgcgtctgcaggacaaaaagctcccaccgctgctctctgagatctgggatgtgaacgaatgactgttctgtccccatattttctgttttcttggccggatggctgaggcctggtggctgcctcctagaagtggaacagactgagaagggcaaacattcctgggagctgggcaaggagatcctcccgtggcattaaaaaagagtcaaagggtaaaaaaaaaaaaaaagtcgacc

SEQ ID NO: 7635 - DNA, 69 bp, Homo sapiens
cctgtggcaagatagatgtggttgggccatcgtgggttccctgagcccagccagcctgggacctcccag

SEQ ID NO: 7636 - DNA, 403 bp, Homo sapiens
  misc_feature (1)...(403): n = a,t,c or g
ggagtacaaggccaaactgcaggggcacgtggaaccactgaggaagcacctggaggcagtgcagaagatgaaagccaaggaggagaggcgagtgacagaactgaagagccagatgaagtcagagctggcagcggtggcctcggagtttgggcgactgacacggtttctggctgaagagcaggcagggctggaacggcgtctcagagagatgcatgaagcccagctggggcgtgcgggagccgcggctagtcgccttgcagaacaggccgcccagctcagccgcctgctggcagaggcccagggagcggaccagncaggggggtctccggctgctccaggacattaaggagactttcaattaggtgttaagaggtacagctgcagcccccagaggttttggttc

SEQ ID NO: 7637 - DNA, 473 bp, Homo sapiens
aaggcctttaaactgctgcatttgtacaacaagactcacagccttgctgaatgctaatgacagcccagccctcctggggagagtgacacagtttgtctatcgcccctcactcccaagagagccactgagcaccacataagccaggagcttcacagacctgatcctgagttggctgctcacaaaaattcccaacaacctactctcaaatttgtagcccagatagtccatggaagggaaagggagagcagtcacatgttttatagaattgttggtgcctggaaagagagtccacataggcaatcacaacacccactgcatccagaggtgcagaacctgagccagccattaaaggagtatgagaggccctgcaaagaatccagatctgaggttacacagacctaggtcctactcctggctctgccacttgctacctttgtgactttacctaggggtgatattcaaatatgtaataa

SEQ ID NO: 7638 - DNA, 480 bp, Homo sapiens
agaattattttataataccagattagtgatggtctttctaactatactataaaacctacaagccattaatgaaaagatgaataaagtcaactgtgtaaaaatgtttaacaaattttacctggtaccaaccactacaaacaaaagacaacctgagaaaagaatatatgcaacttgtcacaggcaaaaggctaatttccgtaatatatacagcattcctacaaactaacaaggaatgcattgttaatttttgtgcattgctagtgagaaggtaaagtagtgcgatctttgcagcaacaatttgtaagtatcaaaattataaatgcacatgccctttgacttaggaattttacttatagaattgtgaatgtacagcttattcattgtagcattgtttaaatggcagtacctcaaaaatctatcagtagggactaattaaatgaactctggtccattatatagtcatagaaattaatgaagagg

SEQ ID NO: 7639 - DNA, 79 bp, Homo sapiens
aacagaaacatttatttggccagaccaaataggtggtcattcccttgatttagcaaatccttgaggtagaatttttttt

SEQ ID NO: 7640 - DNA, 231 bp, Homo sapiens
ctgcgtccagagataagcctgataacacatgcctctattggccaccttcccttccttgtctccctttcccactccccaaccaatgttttccttcacctcccagtaaattcctgtacacagatccttgtctccgggtctgcttctgggaaaactgaaactaagttagaattcttctgagatttttagataaggatgtctgctattctattacgattcagcattttactctag

SEQ ID NO: 7641 - DNA, 266 bp, Homo sapiens
atctgatccatgtagtcattgtgcatgagtgaattaatggtttaaaatttgacttgtactgcttgataaaagaatgtttctattaggttcttggcagggtctcagaatgtgattttattcttagtttgtgtgctctcatctaatattgcttctttgggtagggacagaagtaagtttttgccctcagtcttttgttttcagtaattaagaacaaataatacatattgataatctgttaatattgcataatatatttgaaatgaaag

SEQ ID NO: 7642 - DNA, 293 bp, Homo sapiens
ctggcctgaaaatatactttgaatgatatttgtgtagtttaatttcctagaagacactgttaactgacttaaagaattttgttcattataagttgtgagttgcattataagttttggcattgccaaaatgttttccttaaaaggtggtaccaacataaacttccatcgactgagtgtgagtaaatattgttgctcacactgtgttactattactctagtctaaggtggacaaatgacataagtatctttcagtccatttaggttgtacagttagatgagttttgacagatgtc

SEQ ID NO: 7643 - DNA, 466 bp, Homo sapiens
  misc_feature (1)...(466): n = a,t,c or g
ttggaattcgtnacngctatgacnnnnnnnnnnnnnnnnnnnnnnnnnnnnnnnnnnnnnnnnnnnnnnnnnnnnnnnnnnggcacgagcgaattaggggcactgtaaccagggtttgggttttgaagtagtgggtgttcgactttagagttgttttcctggaagcgctgatactggacttagtggaggagaacgacggtatcaatgtgtttctggatgactgcctggacaagggagttcaacttttgggagactgactgggctatgaagtgtacctttctactctgcagaggctggaagggcaaaaatgatggctaaggcttccttgcagccgctgatacagaagcctgagggaacacactccccactacgtccttctccaacacagcanagccaggaaggacccggatggaagttaggacnaagaggcccagaattggcacagataccaacanaccattcgttg

SEQ ID NO: 7644 - DNA, 397 bp, Homo sapiens
ttcaataccctgtataattcatttatggtcattattggtcctataaagggatatctaacaagttaaacaatgaggttatttatctggaggagaggcacagaatgcttaaatcaagagagaaaaaagcccacagaatcacattatagctactctattttgttaaaaaatacaaataaaaaataaaaataaaaaaaggtggggggacagtctaatgagctagattttaggagtaccaagagaaggaaacagctgcttcaaccatcacctcgtaatcaggaaaattatgatttaaaatccttttgattcttttcagatatataatgattattctgaagccctcaaatacagtccattcgggaaagcctctagaactgcctgtccatgcctcatggctgca

SEQ ID NO: 7645 - DNA, 203 bp, Homo sapiens
cataaaccccagtcagtgtcacctggagttataaggatggggcgacttacctagtaacggaagactctcagtaatctgaaaaagaaaaatcccttcactttataactgaggagataacaccaacaagtcacttccggcagagctcatggccacagtgcaagttaaaaaaggtaaagccttattgaaaataatcttaaaacaat

SEQ ID NO: 7646 - DNA, 431 bp, Homo sapiens
agagcctgcaattaccaagcttcctgagatctcacatagactagaggcattttatggtcaatgttttggtgcagaatttgtggaagtgattaaagactccactcctgtggacaaaaccaagttggatcctaacaaggcctacatgacagatcacttttgtgggagccctactttgatgagtatgagatgaaagacagggtcacatactttgagaagaatttcaacctccggaggttcatgtacaccaccccgttcaccctggaggggcggcctcggggagagctgcatgagcagtacagaaggaacacagtcctgaccactatgcacgccttcccctacatcaagaccaggatcagcgtcatccagaaggaggagtttgttttgacaccgattgaagttgccattgaagacatgaagaagaagaccctgct

SEQ ID NO: 7647 - DNA, 1199 bp, Homo sapiens
ctcctgcctccctgcagggagctgcttatgggacaccgcttcctgcgcggcctcttaacgctgctgctgccgccgccacccctgtatacccggcaccgcatgctcggtccagagtccgtcccgcccccaaaacgatcccgcagcaaactcatggcaccgcccgaatcgggacgcacaatggcaccttccactgcgacgaggcactggcatgcgcactgcttcgcctcctgccggagtaccgggatgcagagattgtgcggacccgggatcccgaaaaactcgcttcctgtgacatcgtggtggacgtggggggcgagtacgaccctcggagacaccgatatgaccatcaccagaggtctttcacagagaccatgagctccctgtcccctgggaagccgtggcagaccaagctgagcagtgcgggactcatctatctgcacttcggggcacaagctgctggcccagttgctgggcactagtgaagaggacagcatggtggggcaccctctatgacaagatgtatgagaactttgtggaggaggtggatgctgtggacaatgggatctcccagtgggcagagggggagcctcgatatgcactgaccactaccctgagtgcacgagttgctcgacttaatcctacctggaaccaccccgaccaagacactgaggcagggttcaagcgtgcaatggatctggttcaagaggagtttctgcagagattagatttctaccaacacagctggctgccagcccgggccttggtggaagaggcccttgcccagcgattccaggtggacccaagtggagagattgtggaactggcgaaaggtgcatgtccctggaaggagcatctctaccacctggaatctgggctgtcccctccagtggccatcttctttgttatctacactgaccaggctggacagtggcgaatacagtgtgtgcccaaggagccccactcattccaaagccggctgcccctgccagagccatggcggggtcttcgggacgaggccctggaccaggtcagtgggatccctggctgcatcttcgtccatgcaagcggcttcattggcggtcaacgcgacccgagagggtgccttgagcatggcccgtgccaccttggcccagcgctcatacctcccacaaatctcctagtctaataaaaccttccatctcaaaaaaaaaaaaaaaaaa

SEQ ID NO: 7648 - DNA, 439 bp, Homo sapiens
  misc_feature (1)...(439): n = a,t,c or g
caacaggtatgctcttacacatcttctgtgtgaaaacactatttagtgggtaatttggtttactctcagggtaagtttttaaaaactgcaagtcattaagaatcatttaaggaaaaatgaaatattaagcatttgtctttgctacctttacagatcgaataagaaaatagcaatgatcagcaccaagctccttatggagaaagagtgggtgaaatattttctcagcactcttcctacaaggcgaggtcaagagtcaccttgtgttgaaaatcttactagtatagtactcaacagaaaatatattccccaaatgcccgtaagaattcctacttcaaacctcagacttcaaataactctcgtgccnnnnnnnnnnnnnnnnnnnnnnnnnnnnnnnnnnnnnnnnnnnnnnnnnnnnnnnnnngtcaaacnggtntcaaat

SEQ ID NO: 7649 - DNA, 407 bp, Homo sapiens
  misc_feature (1)...(407): n = a,t,c or g
gctaaaagtgctcctacttaaagcagttttctttattagaccaacaccttccagcaaagttagaaaccaaacacaagtgctcatttgcccaaattaaccagatagttatgtaaactgttcatattaagtctttagtggtttacaaacaataacattctggcttttcttccataccttttaggaatcagccttaattttaagtatagcagtcactttcctcaaggtactatgcagcatactttagattgcttatttatcattataaggtgataggtaataaatttgaggtttacttgtcatataatttcatatggcagatattgattcaaggagcattctattagggaaaaggttggataaaattatcctccccttacaaatatcctcntggcnttggggngccgggg

SEQ ID NO: 7650 - DNA, 161 bp, Homo sapiens
aacatacccattttataagtgaggaaaatgaggcacgaaaagaaaaaaagattaaaaatagctaaataacctgatcccgactacctggctgatgactggtggaaccaggactcaaacacaggcattctgactctagaatcaatcaatctatctatctatct

SEQ ID NO: 7651 - DNA, 354 bp, Homo sapiens
tagaaacgattcctagaggaggattgctgggtgcactttgaacatttttataaattttgacaaataatgctccagaactcttgaaccagtctacactcccatcagcagtgatacatgcaccctcccatcccaccttagtgccagtgttactgactctccactagaagctgccctctgcctggactggttggcacttgagttaacatttttgttcaaccgtgatttgctttcctaagacacaataaactcaacaaaacctggtttttcaatcttagataatttgccgcagtagcattattccctggagaacagtatcagaccagactttcctgggacttaccaaagcatacactg

SEQ ID NO: 7652 - DNA, 462 bp, Homo sapiens
gacacctagtctcttggctaattgctgggttctgaaattttcaatagataaattttatatatttgtacctatgagtgtattatattgcctattctgttattctgaatcactaaactaatgtatatgggatattcagcaatacttaaacagaagacgacaaaatgaaataatggccaaaatccaagcagctattatacagattcctaaacctgcatcaaatcgtactttgaaagcactcgaggcccaaaaaatgatgaaaaagaaaaaagaggcagaagatgtggctgatgaaattaagaagttcgaagcattaataaaaaaggatctccaagcaaaagaaagtgcatccaagacttctttagatacagcaggccagacaaccaccgatttgttaaatacttactcagatgatgagtacattaaaaaaatccagaagcgccttgaagaagatgcttttgcacg

SEQ ID NO: 7653 - DNA, 2349 bp, Homo sapiens
gcgtccgcggagggacgatgcgcgagtacaaagtggtggtgctgggctcgggcggggtaggcaaatccgccctgaccgtgcagttcgtgaccggcaccttcatcgagaaatacgaccccaccatcgaggacttctaccgcaaggagatcgaggtggattcgtcgccgtcggtgctggagatcctggacacggcgggcaccgagcagttcgcgtccatgcgggacctgtacatcaagaacggccagggcttcatcctcgtctacagcctcgtcaaccagcagagcttccaggacatcaagcccatgcgggaccagatcatccgcgtgaagcggtatgagaaagtgccagtcatcttggttgggaacaaagtggacctggaaagtgagagagaagtatcgtccagcgaaggcagagcccttgctgaagagtggggctgcccctttatggaaacttccgctaagagtaaaacaatggtggacgaactctttgcagaaattgtgaggcagatgaactatgctgctcagcctgacaaagatgacccatgctgttctgcatgtaacatacaatagcatccaaatatggctgtcctggatgggatttgcccaatgtcgtaggtgatagaaaactcgcctactccactgcagaacttgcagaatgcgtggtgttaatctacagagaactgcagcccttattcagaattgagcagtgattgtcagttgatatctctgagtaacatttgggttcagtaactacagttttcaccatttgtcctcagtctcctttatgcatctgcaactttaaggcatagtccatcgatctacagggtgatctcatttgaaagctatgatggcattgtcgctgagttgacagaagcaactattgtacaaattaaaaataaccataagggagaaaccagaagaattcctctgaccacttacaattaaaatattttgtcttctttaaaaaaataagtaaaggagaaatattttcctacaagagtactgaatttcaggaaatgggatagagcttctaaccagtgtattccgtcaagtaagataataacagctgacctgccaacagcattacagggagattctttgctcagctaacacatttctgtttttcaaaattgatgcttaattgtagctgttattctaatttgtgacatggaactaactcatgcttcaatccttgatagagcaaaactcagaacaggttatgtaaaaatatagtctggctttagaatttgttaattcacctgctttgccacagaaaatggaggctttcacaagggtttgatcagaattaaaaccccaaacccgccctctgttaggggtggtctttataactttactgaacaagagggaagcaactgtgatgggaagagattacctagccttactaacaagaagcattctaatagataaactagtaccatcatgtaaggaagatgaagccatgttgcatccacatgttcccgtttgcagaaacctcacaggacagtacgaatatctggcatttttaagttcattaaagcagcaaattccttctcgcctttaagggctatggttgtagtgtgacccgtggctaacctgctttcaaaatcaagtatttgctgtagcagagctttattgcaggcattttaaaaattgaataaccatgtgaaataatttgggcttaaaagtgaacataaattatagagtggaaggtaagggacaaaagccttttacctttaattttcctggagaattatataaaggttttcttagaacaattttgccctgattactgaagcgtcaaataaagctggagtgaaaattttgttttgaaaaggtgctcaagctctgacatttttggttttcatagtcgtgaagtatttatcatttgcatgactaatggcacaggaaaaacctattcataagttttacaatcaagtatagaggggtcttcagctaacttagttatacataaatgctgaaaagattatcttgagctgggccttgggagaagaatttggccttcagaactgcaatatcactgagcctgcgatctatacaccaccccacattttgttggtttcacagtcttgtgcaagtaacctctggtcttacgtgtgtaactgagagaagagtgtgtgtttgtgtgtgcatgtgtgtttattgttcctaagaatttggcacaagtcagagataattgcctatactaagaatctatactgcagaatatagtgtatcaaaaacttttttcttttaaattattaaagtgtcttttatacttttatgaaatcattggtagccccccaagtgtttaataactggcattaagcttagagggtgaaaaaaaaaaaaa

SEQ ID NO: 7654 - DNA, 289 bp, Homo sapiens
tggaagtcacagtccctttgcaaacataataaaacactttaaaatatttgctaaagttacaaaccaattatgtaaaaatttaaaaatcacctactacttttaaaagcagagaaggcatccatagactatttccttgcttacaagctcagtgaacatactgaattcacttataaaaagaattttctcaattttagttgcttttcaaaaaattcttattccttttatttgtaattctttgacattgttgctgcttcacagttttggtaattggacagtttggtctttatta

SEQ ID NO: 7655 - DNA, 427 bp, Homo sapiens
aaaggttcacatcaaaactcagcgaacattgaaaagggataaatgaaattgttgactctgcagcttcctgaggcaatcaactttggatctttgcctgtgggagcatttcatctgagtgagagaaaaggtgagcaggcatgagacagatgactttcccaggtctaacagttctgccagagttgtgtgtgtgtgtgtgtggttttttgtttatgttttttaatctcagaaggaagttatctttgtggtatctttcattcaaagttcttccaacacatattaagaaaataacaaactatggattttattttaccagtacatttgtgaagactaatgctgagcctaagactaaggatactagttgtcatctgaatatgaatgtgtagagaaaatagagatgctatgtcttaatggataagtgaattgaagg

SEQ ID NO: 7656 - DNA, 193 bp, Homo sapiens
  misc_feature (1)...(193): n = a,t,c or g
aggtccaggctgtggtgagctatgattgcattactatacttcagcctggggtgcagagcaaggtcctatttcttaaaaaaaaattaaattttttttaaagaaggaaggtgggggaaaagggacacaaacaggtggaacaattagganaacaatgggtgagatggttaggantttaatttccacgntttaaatt

SEQ ID NO: 7657 - DNA, 677 bp, Homo sapiens
ttgtattgtactaagaatgtaatcaatgtctactttagttgtaaacatttctgatgtcaaaactttattcattactgttgattttaagaatacgaaatcactgcctaaatattaccaaaagccactgtctctacccgaacttcccagtttgggaaagaatcgttagataaaacaaaggctctgccctttctgataccaaactccacagatactttctcacatcttttaaaacattttgcaataacatattgtttatagggaagtttacagggtatgcaatgattaaaacttttaagtgaattgatagttgcaaaaggaaaggggtaatatttaaggtcagtgaggtaggcaaggccaatcttaaagtttctgtaatatctggctctctgttaattatagagcaaagtttcccttacagaatccttttatgaacagcaagctagagtctatccctagtggttatagcacctgctgcgtttttcaggagacagttaggccagggtgatttgaatggatagatgtgctgttttgcctgcttgtagaattcagcccagtctttggtctctctctctctctctccctcctccacctctccctctctcttcttctgcaccagagcctaaggctgcgccaccaagatgcgtcattttttccagaggcttctttttttttttttt

SEQ ID NO: 7658 - DNA, 443 bp, Homo sapiens
gcggcacgaggggaacttactgatgacaatagactccctcctaaagggccttccatgtaagcagaacgaaccttggcacacaattcagtgtggatatttgggaaacagttccaagtggaatatataatatcagtctggaaaagatttcattaggatagctttttgtgtatgtatatgtatatttatttttaggaatagatctatagttgtacatgaattcctgttaggaatactctgaatgagcttaacccacttgccaaatatccttgtcccttccatcattttatttttgagatggggtcttgcagtgttgccccaggctggactcaaactctggggcttaatcatccttctgagtagctgggactacataaaggccaaagtataattgcttttgatttttaaaatcttcttgcccatcatttttataaaaataaagctgt

SEQ ID NO: 7659 - DNA, 774 bp, Homo sapiens
  misc_feature (1)...(774): n = a,t,c or g
ttttggatttacattttattcaaaggataaataccaaattaagaaagagtttcaaattcaaagtaaatatgcttgatatttcaaaacaattctacatacaaagtacaataggaaaaaaccaaaagcccccataaattagagtggctagacacattcaagtctagcagaaagaaacttgaaatttaatgcaacgttatttctcttgcctagaagctaaagccttaattgtctcagatatcttccatctccttatgggcattacttgaagataacaatggagcaagctttttaatgaacttgccatagtgaaaaaccaatgacagatgcgacactggaaagaggacaacaatgtaacctaaaagggagctactggcagaaataaaaactagtgatactgataacatctagacctttgcagacgtttagagtactgtacaatcttaaattattgtttatcaacctttgggtctcacagattaagaatgtactagttaagaaccaaggagttatacccagttcacaatactgtttccttcacttgccctttagatataatggatctggaattctcaatgagtgttacatggtttgggaattctggcaattttccttccaagacctccctatacttatctccatttcaaaatatgcaaagctgagtgacagaggcaaaaattaattcctaaagatccaaagggtacacaatacctgtcaaatttcgtatgtctgggcagggatgcggttgcttacggctataataccngcacttcggga

SEQ ID NO: 7660 - DNA, 303 bp, Homo sapiens
gacatttatgatgccatgaattcacaagtgactaagtcacagtgttcagtgtagtaaatggaacctgtgaacatgtctgcagctatgtggcctggacagagaagtctgtcccaagggagaatttgttgtctattttgacctagatggaatgggtttgaaatattaccagacagctgtgtccttgatgattctttgcattgggagtgaccaggaggtttataatagcctagccttggttatcttaccaggtgttttgttgttgtcttgcattgtgggatatgatattccaggagcatttaatga

SEQ ID NO: 7661 - DNA, 309 bp, Homo sapiens
gcaaagttcagcggcccgcaagaccacctccagatttaacagttcactagaaggacccacagaactctctgaaagctgttatattcatgtatgttttattatagcataaggacacacattaacgctaaccgagggaacaggcacgtgggaccgagtctaggagaattccatgcctggagcttccggttgtcctatcgcagaggggttatagacagagctaacttctcccagcagggatgtgtgatgatatgcacagagtgctgcaaccttggaaatgcacctgagtcttggtgtccaaagattttactg

SEQ ID NO: 7662 - DNA, 1349 bp, Homo sapiens
  misc_feature (1)...(1349): n = a,t,c or g
ggcgctttctcctgaccatcatgggaagtgtctgctggattccattttctaagagtttctgagggtgaggctcttatttttttttttaagggatcctgtctatttcctgcacttcgagaagaatcaaaatgttcctgaatttcaaatacctcatgcaaaatgtctcctgaaataagggaaaaaaaaaaaaaccacaactttgaaaatcttaatgttgaagttagcaatgccgaaaggtttctgtcttaaaaaaaaaaatccttgtacttatcaattttgccccttaggcagtcagttttgttgagaactgtgtcctgcatcctggcgcagaacctacctgatgcggttcctctccacgcatctcgaggcggcgttacctccagattccgtagagttagagtcacatttttctttgcagcgaaactccatcttggtgagagatgaatttggatatttatttccttctctgtttttgggaaacgagaggctacaaccaagacagctgaaggagaatgaaacacacacatccacagaaacagagaggcgtaggtggccctgccgttgaccgcagcctctctggacaggcaaggggagttggcgcaggtgaggactcagacgacgtccaccgtcccaaggctgtcactagtatttctctgaagtgcctgaaggtaggaattggccggcgattgggaccagctgggccccaccacggccacgccagggcaaagcgccanaggccctgcactccacgctggccaagaaggctttccacgcagaatgacaagactgcaaaaatccgatgtgcttccttccctgggcgcagtcgctccttcgagccgctgccccccacccaccctgcacccctcgccctccccccaccacagaatctaagacctttcagcttcgagccagggggcgggggatcccgagcaaaagccttccgtggacatcaggccccgtggcctcaagggctcccagggcaaacctaattccccccaaaacgtgaagtcggggaagctgcggctacacattccacaaagtgctggcacttacacccacaacccggaaggctgtggaccgattcctctagggtggtgacctcccattagcaaacggtgtcatggtttggaatgttcattatcgccaagaacctggttagaggcataaagaccttttttcaccgttacctaattttttcccctttcaagaatttttttttttttttggtgtgttgtacagcagtataatttttcacttatttattccatcagtagatatggtttgtacaatgtacaattgtttcatttcagaaaataaaaatttcaaatcatgaaatanangtntttacc

SEQ ID NO: 7663 - DNA, 608 bp, Homo sapiens
taggaaagaagggaatttattgctgtaaccagatacaggcagaaggctggagataattccaccaggccaacttaaagtgttaacaattgtcttagtgtttatataggttgggattatgcgcctgtgtgcagtacagcattcgcctaagtctactggtaacttaattttgtttcaactagaaggtcagaggcaaaaatgctttctaagtcgggattaagctgtgagcggcccagtacctacaaggcctgtctgctgtggtaccagagtgattatttctatcttatctcctttacagcttggtccagagagctgccttagactatccaattgatctattcaaacagctgcctgttcccttaacttgtcttcagattttgtcgacccgagatgggtcctggcactaggaatgtaaaaccgttcctattattttggcttgctccagcaaaagagaagcccatgcaaggctcctgctgaccatgtttcatttctagctttgatgtctgggcactgatttccctagatttaactatgtgctcaatggtaaggcagtgctgtggaaatctgtctgtgtaactggggtgctatgcaggcctgtctgggtgactgtc

SEQ ID NO: 7664 - DNA, 574 bp, Homo sapiens
ttttttttcaagtgaacatacagttttctttataagtatgtaaataaatttcatagcactacaaaaatacaagtcatctgagaagtttacagtggtcccagtactgtaggagagaattaaataaaataaaatagctgtagataattaaaagctaattagataaatcaagttacagtatcatccttcagattaaagtgctctgatataaccaatgccacagcaaacgaaatcctggaaagagattgcactgccaatgattttgtctcttaacctcaatgtaacaaggacacacataaaagagattcctgatttaataactgctatcatcttcacccccaaccacgctattagcctgtgatattcttcccctaggagagatgtcaagattagatgagattctatcatagccagggaaaaaaatgagaaataccagaaacattctaattccagtcttaagtgagtaacaacaaaattacctgaagaactgaactagtgcttttagttaaggggaaaagtgccctagcttttaaaaaatatgtctataaatctagttttaaaaacatagcaattggct

SEQ ID NO: 7665 - DNA, 618 bp, Homo sapiens
  misc_feature (1)...(618): n = a,t,c or g
ttttcacagaactcagggaaacacatgtttattacaaggctattttaaaggctacaaatagccagatgaaaagatacacaggatgaagcctagaagagtcccaagagcaggagcttctgtctgcaaggagttgcgaagtgccattctctcagcatgtggacgtgttcttgtccaccttcctggaagcccccacacatttggctatccacnnnnnnnnnnnnnnnnnnnnnnnnnnnnnnnnnggagccctcattacataggcatgattgattaaatcattggccactggcgatcaacgtcactttcagtccctctcccccaacctctgggagtttggggggtgggctgaaagtttcaacccctctaatcatgccctggtctttcagatgtccagtccctatcctgaagctacataggagctgtccgccatcagtcatcttactagcatacaaaaagacatcactttagagatctcaaggattttaggagttgtatatcagaaggcagagacaaagaccagatatatatttgataatattacagtagaaataaagacattttagatattccagctccggaggctactaaaggacaggctccatcaagaagagaaccccg

SEQ ID NO: 7666 - DNA, 270 bp, Homo sapiens
ggtaaaactattactgtggccataggacttgtagacctgctactgttcaagtgggaattcaaagcaaaaagagatgaggccaggctcgtcttgcttaaacagaagacctgagtccagtcacaatctaggagaatgttggtcttctgcgactgccactgttacttctaattgttgtttttgacaccttctagaatatgacagggagtacctgaggatttggggaaaggggaaaatgcaaccacttgttcattattttaaaggggaaaaaga

SEQ ID NO: 7667 - DNA, 193 bp, Homo sapiens
aagtgtattggtcagtcctgataaagagttatgtgtgcatctgtgtgacgtgttaaaattgcttcctgccactgctcgtgtttggtcagatagtaggttaggctgaaggaaagagaggtagtagccacaggacagataagctttgagaagccagagtggttggtaaagtatttggctttcatttagtatctct

SEQ ID NO: 7668 - DNA, 677 bp, Homo sapiens
  misc_feature (1)...(677): n = a,t,c or g
tcaatgcttttctttttctgtcctttttttggtgaaaatacttgaccatcttcagatgttgtctctatgttacccctctctattccaacatcatcctctttctttttcttaattggtttcttttgaatttttgctttcttcttgttttcatcatgagctcgatcagatgtctctcgatcttcagactggtggtgtcctataatgtcctgtgcacgcattcttgagctttccaggatttctgtctgttctctctgtttatctacagaagaaactttctccttgagttcctgttcttcgtagcgccttgaactctctttcctttctggtttacgatcctcctctttccatctaccctgtctgtcttctgtgaggtgcgagggactaagagaacgagattcttgaggtcgtacaacttggctcaagagtctgtgtttttcatttttatcatctccactgttgtaggcatcactgtccggagaatgttcacgccggcgcttcggggactgtctagggctgggactcccttcatttctatagcgcttctttgattttctttcatcatgtccatctcttggattcctatcttctcggatctcttctcgcttttctctgcggtcatctcgtccttngtcttngtcttcccaatcccttcnaaagnaannnnaanannnnnnaaa

SEQ ID NO: 7669 - DNA, 401 bp, Homo sapiens
  misc_feature (1)...(401): n = a,t,c or g
gcggctgcccgtgacctgcctgggcgcggggaactgaaagccggaaggggcaagacgggttcagttcgtcatggggctgtttggaaagacccaggagaagccgcccaaagaactgatatccaaagagaagaagaaaaagtgaaacgatctgtgaaagatgctgccaagaagggccagaaggatgtctgcatagttctggccaaggagatgatcaggtcaaggaaggctgtgagcaagctgtatgcatccaaagcccacatgaactcagtgctcatggggatgaagaaccagctcgcggtcttgcgantggctggttccctgcngaagagcacagaagtgatnaaggccatgcaaagncttgtgaanattccagagattcaggccaccatgagggagttgtc

SEQ ID NO: 7670 - DNA, 315 bp, Homo sapiens
ttcaaaatcaggagttcaaaatcagtctggggcaacataatgagacctccctgtctacaaaattaaataaatacaaaagatgtgcttcaaggtaaaatgagggggcatttaagaattgagaggaaacttggactgttcgtttaacccctaacacattgaaattgccctaatcttaaccagttggtatacctggttgtatacctaccagaggaacaggttggtcagtcttgtccaatctgcagcctgggacagctctgaatgccgcctaacgcaaatccctaaactttcttaaaacctgatatttcttttgcaatt

SEQ ID NO: 7671 - DNA, 334 bp, Homo sapiens
ttttaattattcttactagaagtttatcaattttattactctttccaaagaacaagcttttggctttgctaattttctctattatttacttgttttaaaaaatgtattggtttctgctcttatctttattatgtttttcttctacttagtattaatttagtttgttcttttcctagcctcttaaggtagaaacttagataattgattttaagccttcctttactatatgggcacttgaaaagctatacatttccctctgaacactaccttcatttgctacaaacatttgctacattcaacaaatatttgaatgtgtgtgttttaattttcattc

SEQ ID NO: 7672 - DNA, 465 bp, Homo sapiens
  misc_feature (1)...(465): n = a,t,c or g
tttttttttttttttttttccctttttatagatgtatttttgttttttacaaaccaaatagcagaggttgattattagtacagtagtttggggttttttctcatcattaaccacttagttactataaatgtgttttaactcacggggaaaaagtccagcataccgtaaaacctgagtcccacccagccagctcggaatggaaggcttccaaggcccgggaggcgcggctctgtcaagttgctgattcgggagatagcagtgaatcggggttccaccacgcccccagaatactattcacagcagctttgtcattgaccgttctcccttttgggacgagatctgaaacaaagcttccaatcacttccgatcctaataggcgttacctctcttagggtaggggtttaagggtttttagtcaatttcaactcaagtagggttacccggggacnttttaggggnttaacc

SEQ ID NO: 7673 - DNA, 417 bp, Homo sapiens
aataatataaaggatcatgtcatctgcaaataggggtagagtttcttctgtttcaatctggatgcttttttttttttaataatataaaggatcatgtcatctgcaaataggggtagagtttcttctgtttcaatctggatgctttttttaaaaaaaaaataatataaaggatcatgtcatctgtaaacggggtagagtttcttctgtttcaatctggatgcttttttttttttttttttttttttgcccattttctcttacttgagcctctggtataatatggaatataagtgtcaacagcagacatcactgtctttttccttattctttctattcatagaacttcttttagtgtctcttgtaaggtgggtctgctagcaacacactcttgcagattttgtttatttggtaaagtct

SEQ ID NO: 7674 - DNA, 193 bp, Homo sapiens
cccttttttaaggctgaataatattcccactgtatggatatattacatcgtgtttatcccttcatctggtgatggacacttgagttgcttccactcactcccagatgttttttcccctctctgatcctcaaggaatagaaaatgcccagccttcatttttacattttacaggtagtggagctttaaaaaagag

SEQ ID NO: 7675 - DNA, 299 bp, Homo sapiens
ctgtgccatctgggaggcccagaaggtgctggacaggggctgtctgcggacctggtttcagcgctggtgggactgcagccggagtcagcccagcagagactgcagctggagagggcagtgcaacaccaccaccggcagctgctgctggaggggctggccggttggaagacgcaccatctgcagtgtgtcaggaagaggctcctgcacaggcagagcacccaactgctggcacagagactcagccggacctgcttccgccagtggagacaacaggtgggaacccaggagatgtcccctct

SEQ ID NO: 7676 - DNA, 288 bp, Homo sapiens
tccttcttatttctgctcctgggggacggagatctagaagatttcctttttatggtttttgatgttcttggcgatctggaagaactcctgctcctcctcctacgcctttccctgctggaactacgagatcttcgcgatgcattgtaactcctgggtggtgttctggattttttatccttctttcttttttcatctatctctttggatctgtctttttctcgttccttttctttgtcctgttccttttccttctctttgtctcgatccttctcatgctctttttcccgt

SEQ ID NO: 7677 - DNA, 445 bp, Homo sapiens
  misc_feature (1)...(445): n = a,t,c or g
ttagggcctagttaaatataaaatagcctaaccatacttgtatcaatttttccattttcaggttcgtttagcaaacaccaaaactaataaatcatctaccatctatgggacagagtcttacgtggtgtccctgacaacaaagtgagtaaagaggagtagtatcactagagtctggaagtgttaggaaaatgctgtggggaagtctggactgcaagaccatagtatgaaaggcaggagaactggtagcaggaagcacagacaaggttgtgtttgacagagaaaggggctttcttggtgagataaaatagtctcttcctgtatttctctcctttctccttttttagttgctctggggaaagggattctctctgggtcatggcagntgggtaccctcgtttagggtnttttcttttgatggttgaaggcnctgggagagttcaccggt

SEQ ID NO: 7678 - DNA, 441 bp, Homo sapiens
gactggtatcacttttagtaagcagttgaacataacttgtagtgtgaatatggttaaaacaaaggacacctgatgtctgtgaagtctgctaaggacaggtacaaaatttatggcattgctttttaaaaagtttaaaatgaggaatgcttttgataatcagaaaggctaatgtaaagtgctgactgatgtcctgtctgcagttaaggaagacacccaactctcttcttcctcatcatggtattctctatgtatagatctctaaaaatgcaaacttcctatggacaagacaatatgatttgctataatatgaattaagatatggtaatatctaatagtctccactgctaggattctgagtaacacaaaaaataggttttataaaaagcccatgcacttcaattggtgggggaaaagaataaagtcattttcagtcgactgact

SEQ ID NO: 7679 - DNA, 1160 bp, Homo sapiens
  misc_feature (1)...(1160): n = a,t,c or g
cttgaagttactagttacagagaacaagagtctataaactcattcttgtaaaaccaaaggcaaaattgtttttcttctccctgtgttgagggagtgctgggagagtctccggagcacattagataatattatcaagacttttcctgagtctgggctgtgccctgttgctgcttctggaacaagttagcctaaaacaggaaaacttatttctctttcctttttaattttattgttctttaatttcccgcctcaaccttactgcgaataatattctggccactttatttaaatcctggcttagtttaagggagaaacgtaaagatgggtttcctggtagaatagggangtaaacnggnctgnctgtgncctccnctgctaatganatgnncctnccttttacctttctcccaagacgngaagatcncccttaattggcatggnggcnctgtttgaaaagtactnacnntttccccacctgcattgtgattgatgtgntgaatcccctgacccagncanctacaganacataatttaantgaagggggttaaaaaattgtccctttgtggaaagtgtggagnaggacccnccaagntgatatcaagcagaanagnaaagcttaaaagaattcaattaagaaaaatgtaatttttggtacctctattaaaaatatattttgacttttttaaaaatgagcaattctttgtgtttaaaatggaatgttagtggggatatttgtggtatgttctaaatgttctgnagaactggatttaggtatttgagtaccagcagatattagagtgcatggttatatatacaacaatgttgtcagtattgaaanacacattcagtgtcttanactttataagaagatttttgattgcncaaaanccattcattggtannnngnctcttctanaccnngtttcacttagcatctctttgagaatttacatatctgcatgtccagatccactccacagcgattcctgcctagtcttttataggatacactaattatgaaaatatttaccaataaataagcactcattaggtttacagacaactgttgtcagaagtgtttgtggccatatctttttacttgcacatgtaagcatagatgtaaaataaaaatcgtatgacaatttgagttaaagagttt

SEQ ID NO: 7680 - DNA, 1857 bp, Homo sapiens
agttcgtcatggggctgtttggaaagacccaggagaagccgcccaaagaactggtcaatgagtggtcattgaagataagaaaggaaatgagagttgttgacaggcaaataagggatatccaaagagaagaagaaaaagtgaaacgatctgtgaaagatgctgccaagaagggccagaaggatgtctgcatagttctggccaaggagatgatcaggtcaaggaaggctgtgagcaagctgtatgcatccaaagcacacatgaactcagtgctcatggggatgaagaaccagctcgcggtcttgcgagtggctggttccctgcagaagagcacagaagtgatgaaggccatgcaaagtcttgtgaagattccagagattcaggccaccatgagggagttgtccaaagaaatgatgaaggctgggatcatagaggagatgttagaggacacttttgaaagcatggacgatcaggaagaaatggaggaagaagcagaaatggaaattgacagaattctctttgaaattacagcaggggccttgggcaaagcacccagtaaagtgactgatgcccttccagagccagaacctccaggagcgatggctgcctcagaggatgaggaggaggaggaagaggctctggaggccatgcagtcccggctggccacactccgcagctaggggctgcctacccgctgggtgttgcacacactcctctcaagagctgccattttatgtgtctcttgcactacacctctgttgtgaggactaccattttggagaaggttctgtttgtctcttttcattctctgcccaggttttgggatcgcaaagggattgttcttataaaagtggcataaataaatgcatcatttttaggagtatagacagatatatcttattgtggggaggggaaagaaatccatctgctcatgaagcacttctgaaaatataggtgattgcctgaatgtcgaagactctacttttgtctataaaacactatataaatgaattttaataaatttttgctttagcacttggccccattgtagattgccctgtgcagtaaactttcaaggtgtcggctgccccagattgcttcatttgctgggtgtggaaagagttgctatggccagggcatatgggatttggaagctcagcagaagtgacttctgctctgtggttgctgctccccggctttcacagacatggtatggcagccattcttttatctatttaaccaagaggatgctggggaattgtgctgcttgtcctgttggctggtggctgcattatgtcctggggtgtgcatgtgggtctatttagagcttctgtcccttccttcccattgcaagttgcacccagatgagacagctgtagtactaggtctctttcacctctcattgcctgtccctgcttcgagctggttgtcttgtgcgtgggacatgggccttcctatctgtgttttctcaaagtcaggagctgaccaggagcacactaaggtgtggtcatgcatcataaccaacattcactcatctgggacattcttaagatacatttataaatcatttcagcagtagtactttgtatgtgttgagagtttacagagctctttgacatacgcgatcttagtctttacaaataaggaaaacagctcagtttgggaagtatcagagatgggattcaaacccagatcctctggtccaagttgtatgtgcactgaactaatcaggcaggaaaaaagcccagccactgtctcacagattgttttttgtatattgtagcaaaatcctgaaacaatggggtccttccagtctcatcatacaaaatggcaatcttggctgggtgcggtggttcatgc

SEQ ID NO: 7681 - DNA, 516 bp, Homo sapiens
atgaaagagcgagactcaatctcaaaaaaaaaaaaagtttctggcacctgaaacaggaactggtttccatcatcaaactccagaaaagcaacttaaaatctaggtggtgattcaagggaggagcaggggaagacagcctcctatggtggcatgaataagatgcttccagaactagtagggaaataactaacctcttcaggctttatcaggcctggaggggaaccttgctcatgttagcaagaaaggtatcctagagaagccactcaaaaggctccctaatccagcctgtctccacatacatactgaaaattcttccctactctgaggcagggtgtagtggtttaggggtttctccagactggaatcctacctatctgtaccgacaattgagcaaacaacagttgagagagtccaaaaaaaaaaagtattaaaatgtgattgatgtaatttaccatgtttactttatgcatgcattttattggggaggggaggtcagaataattcacccaagatcta

SEQ ID NO: 7682 - DNA, 459 bp, Homo sapiens
aacaatcctagtgaaatcatccaaagtacgtatcaggagacacagaacaaaagttctagtttatcaacttcctcaattttgtctcagcacaaagaaaataacttagatttgacaagcagattcaaggagcaagaaatgagcaatggaattgataaacagtattcaaattgcaccactattgacaaacagatttgtacaaataagtataaggaaaaaataataaatgagaactataatccaaaattctttggcaatcttcagtctgatgattccaaaaaaaatgactcaaaaataaaagttactgtgttggaaatgtctgaatatttgaacaaatatgaaagcatgtcctcaaataaagactcaaaaggcctaagacatgtgagcaaaatactcaacttaatagcatagagaattatctcaataaagataatgaaggtttcaaatgtaaaaagtcagacc

SEQ ID NO: 7683 - DNA, 424 bp, Homo sapiens
tagaaataaaaacttttgtggcggtagaggcactgctaactgattcaaaaattaattaggttttgcctgtgggtgtgaggaatgcagagaattaatgctttagcttttctgcagttttggtgtcggggagaggttccaagcaaactctattaaatggggattttttttttccccataaccacctgaatgtgatttgtgggcttatgtgttctgatttgaacttcatatagcaaggttgtggcttttggcagatgcagtatgttctgagcgcggctcctagagtctacaatttgggagtccagggaaggggtggctgtgggagacaagtggagtttttgtacctccgtaagccacccttttttcagggtccagttccatgtgttagtatcaggggcatctcagatgattaaactcatgggaaaaa

SEQ ID NO: 7684 - DNA, 573 bp, Homo sapiens
ctaagatccattttctaaactccaattgagcattctctgtatctgggtggtttttacttttttacttaatcttgcttgatcaggaactctggtgtcttcttggccccccacgtgatctcgttcatggtcacttttttgtttatctcattttctctgaggctggtccttcctgttaacgtcttggcatttgtgggaagcacaaaatgttcttgtccctccaactctgcttttcgctccctgccctgccattcctctcccgcgcctgccctctcccttccatctttcccaggtacttttctctcccagccctgccactcttctgccgcacctgcgctctcccctccatctttcccaggtacttttgagccttgactccccaggtcccttcattctgtgctcactccatgatgtcattttgttctccagttaaagaaagtacagacaataaccaccaagtcgaactcgatcaaacaggggaaaaaccaacttttccctgttgtcatgaatggcaaagaagatgttttgtggtgcactgagctcgaaaggatctttggctttcctgtgcactacaca

SEQ ID NO: 7685 - DNA, 1013 bp, Homo sapiens
  misc_feature (1)...(1013): n = a,t,c or g
gcttatgcgtgcccctcacctggcgctgcgacagggacttggactgcagcgatggcagcgatgaggaggagtgcaggattgagccatgtacccagaaagggcaatgccagccgccccctggcctcccctgcccctgcaccggcgtcagtgactgctctgggggaactgacaagaaactgcgcaactgcagccgcctggcctgcctagcagggnaggctccgtttgcacgctgagcgatgactgcattccactcacgtggccgttgcgacggccacccagactgtcccgactccagcgacgagctcggctgtggaaccaatgagatcctcccggaaggggatgccacaaccatggggccccctgtgaccctggagagtgtcacctctctcaggaatgccacaaccatggggccccctgtgaccctggagagtgtcccctctgtcgggaatgccacatcctcctctgccggagaccagtctggaagcccaactgcctatggggttattgcagctgctgcggtgctcagtgcaagcctggtcaccgccaccctcctccttttgtcctggctccgagcccaggagcgcctccgcccactggggttactggtggccatgaaggagtccctgctgctgtcagaacagaagacctcgctgccctgaggacaagcacttgccaccaccgtcactcagccctgggcgtagccggacaggaggagagcagtgatgcggatgggtacccgggcacaccagccctcagagacctgagctcttctggccacgtggaacctcgaacccgagctcctgcagaagtggccctggagattgagggtccctggacactccctatggagatccggggagctaggatggggaacctgccacagccagaactgaggggctggccccaggcagctcccagggggtagaacggccctgtgcttaagacactcctgctgccccgtctgagggtggcgattaaagttgcttcacatcctcaaaaaaaaaaaaaaaaaa

SEQ ID NO: 7686 - DNA, 481 bp, Homo sapiens
ttgtaccacattttatttacaaaaaaaaaaaatgtttttaaagaagcaatactagctcctggataaaggttgggttgagcagttacacagactacaatgctgccttcactaatctttagctgtgaaaaaggaagagaaaaacatgccattttgtttgctgatttgcacttgaaccccagcaaaatgtcatggtcctaaccctctgggtgtaacctgtctgggagcaatagcatgggtttatttttaggaatctgaggtgacattttctgtttgggtaatctgtcttaatttcagatggagctatagatatggatatagataaaatttggcattttcaaacttgtactttcaaagactttagaaccaaatgtcattcagctgaaaccataatgtattataaactacgtcttctagagttttgttgcatagaggcaaatgagatgccaaatgctagcaatcctatttaggaggcctactatta

SEQ ID NO: 7687 - DNA, 215 bp, Homo sapiens
gtcctggcatgatagggagagttcaaagcaagtatttataggttattagaattgattttcttagttgtgaaactgtcttgttccacagctcttggataagcacaagaatacagagagcatggtggagcttctggacttgtatcagttggaggatgaagcctacagcagccttgcagaagctacaaccgaactctatcagtatttactacagccat

SEQ ID NO: 7688 - DNA, 302 bp, Homo sapiens
cacgcccggcctagttttaaaatgtttaattgtgaagttgaaacttttgttggtgtgcgcgatgactgcaaatctattgtcttttgccttccaagcatagttctacttttccaagagccatgcaaaataagccttcatatgcttttgagtctatgtggttttttcacgaagagaattcattgctagagaatctgtaaatcttttatgggcatattttaaaaaataaaataatgggaattaagtaggaaactgttaaacgtttctactttatttaattgatataggattatattcttagatta

SEQ ID NO: 7689 - DNA, 422 bp, Homo sapiens
tcccacagcatggcctccacgcccagcaggtgccggtagatgagctgggcctcaaggtcatggtcaagagggtcattccactcctgcagggtccaccgtgaccgggtcttatcgcagccctgacctgtcttctctttttggtggcagcagctccacttgtccccacggaagacgccagggtggtaggagcccagcagtccggtgttgttgatgctcaccttccgcagcgcagacagccactggttaagctcattcacacactgtctcgtctttttgggggcagcagctccacttgtccccacggaaggcaccgggatggtaggagcccaggaggctggtgtgggttggatttcagccgccgctggccccttggccacgctcgtaggtattccagaacccgccaaatatatttggtggccctg

SEQ ID NO: 7690 - DNA, 368 bp, Homo sapiens
tggaacatttgggggatagcaaactccaaagagatgtatctttggattctaagtacagagaaacttgtaaacgagacagcaaggcagaaaagcagcaggcacattccactggagagagacgccacaggtgcaatgaatgtgggaaaagcttcactaagagttcagtactcattgagcaccagagaatccacactggggagaagccatatgaatgtgaagaatgtgggaaggccttcagccggaggtcaagcctgaatgaacattcgcggagccacactggagagaaaccctatcaattcaaaacctgaatcagaatatttcaaaagagaggaaataaaagttcagcttaaaactgttctgccctaaaa

SEQ ID NO: 7691 - DNA, 398 bp, Homo sapiens
acattccactttactcctgcagcgtctctggagtagttgtttgctgcccgcggaggcagcttctgaaatcgtgagggatgtctccgagcagctatgggctgggctggctgaggtgatgtctgcacctgtgcccaggtgtctcagggagaatgggcttcggggaataggcttgcctgcttcatctcctgactcctttgctaggcactttgatccggttttccagttcttgcacaagcaagtttgtgtcagccacgccctggggaggatccactggatcaccgccgtcactgcctgttcctggcggcctctccggcttccctaaagagagcaggtgggcatctgcgtttttgggggaatgcacagcgttgtggcatctgtgtccatgtcacgtggttccc

SEQ ID NO: 7692 - DNA, 922 bp, Homo sapiens
ctggctggtatttgtgggtctcactgaagaatggcatcaccccttatcttcgctgtgctgcattgtttttccactatttacttggggtaactccgcctgaggaactgcataccaattctgcagaaggagagtacagtgcactctgtagctatctatctttacctgcaaatttgttcctgctcttccaggaatattgggatactgtaaggcccttgctccagaggtggtgtgcagatcctgccttactaaactgtttgaagcaaaaaaacaccgtggtcaggtaccctagaaaaagaaatagtttgatagagcttcctgatgactatagctgcctcctgaatcaagcttctcatttcaggtgcccacggtctgcagatgatgagcgaaacagtcctgtcctctgccttttctgtggggctatactatgttctcagaacatttgctgccaggaaattgtgaacggggaagaggttggagcttgcatttttcacgcacttcactgtggagccggagtctgcattttcctaaaaatcagagaatgccgagtggtcctggttgaaggtaaagccagggctgtgcctatccagctccttacttggatgaatatggagaaacagaccctggcctgaagagggcaacccccttcatttatctcgtgagcggtatcggaagctccatttggtctggcaacaacactgcattatagaagagattgctaggagccaagagactaatcagatgttatttggattcaactggcagttactgtgagctccaactctgcctcaagacaatcacaaatgacgacagtagtaaaggctgattcaaaattatggaaaactttctgagggctgggaaagtattggagggtcttttgctccatgtccaggttcacttacatcaataaaatatttcttaatgg

SEQ ID NO: 7693 - DNA, 196 bp, Homo sapiens
  misc_feature (1)...(196): n = a,t,c or g
gttctgacttctcagtgtaatgtttttaaggttcatccacattctgtatcagtacttaatttgtttttttgggcagatattatttnnnnnnnnnnnnnnnnnnnnnnnnnnnnnnnnnnnnnnnnnnnnnnnnnnnnnnnnnnntctacttttaagctattgtgaatagtgctatggacatttgtgaacaagtact

SEQ ID NO: 7694 - DNA, 402 bp, Homo sapiens
  misc_feature (1)...(402): n = a,t,c or g
atgatggttctttttccatatccttaatatgtatctttcctactcatcaggtagtgatagggacaggaggtagggaaattctgggcagaagagggtgggtccccagcaaccaccccaccctcaagcctggaactgtggcccactgtgagagcatgcattcctgttttcccgctcgaatgttcccttttccaaaaccacccatggcctgccccacagccccatcctgtgcccatagaaaccccaggttccacacagcagagaagagaagagaagagaagagaagagaagagaagagaagaggagaaggcagttgaggttgccagaggattatggttgggacatttgaaggagaaggcagctttgatttcagaggggttagntttgatggtntttgtttcagtt

SEQ ID NO: 7695 - DNA, 1022 bp, Homo sapiens
tttttttttaagtttttcaaactgcaaaacccttttatttttaataaaaggcctcacttccaaggagagcccagcccaggagatccccggtgaatcgtcaagcctgggtcctcggggagccggcgttcctgctgagctgatgttgtacttctgaaggcctgtgatcgctaactgcaccatgaggcagaatgcagggtgctctcaaccagctgggggttggggttcaggctttttttcatctttcggccaaggcagacaacaacggactcatcatcccacgcgactgagtgacgcgaggcttcaaacgcaagcacgagtgtttagaatcctgcattttcaaaggctcttgccactgggaactacatggagaggagattaagaacaacaaccaaaagaggcagggggtggggcaggcgtgaggtaggggtggggtggggatgacagtcaacacagcttggaccagaagcccatggcgcctggctccctggaaaggcacagggcacagacggatgccgcctttcttgctgggacactcctgccaccatccacagctcccccgtcactccacgttcttgtacttggtgaacaggttgtaaagaaccctcagggtggatttgaggtccaagttaaccacgtcttcaggacgagccttgggtttcttgaggcctccgtccagcatcagctcaaaggcgaaggacacattgtggaccttctgatcgaagctttccggagtcaggtagaagtggtggagaggaacaaagtagtcttccagaaggcccatgagcagaaccaggtacacgccatctgcaaactgggtctccagttccgtcacctccaaattcagcttgttcaggtgcttgttcacaaaagtgatgagagacttcttcaccacgctgagcttatccggggcgtggtcgaacagcgtgtcgaaggcatcccgctcgaaccggcccatcatcatctctgtagttgtggtcagctcctccgagatgtggctggaatgcagcaggccttcccgtttc

SEQ ID NO: 7696 - DNA, 657 bp, Homo sapiens
  misc_feature (1)...(657): n = a,t,c or g
gcacccagcctatctcctagatcttgaatcaaaaataaaatgtaaatcacttccattctgctagcatgagggtttgttgctaaaattgaggattctatctgacgtttannnnnnnnnnnnnnnnnnnnnnnnnnnnnnnnnnnnnnnnnnnnnnnnnnnnnnnnnnnnnnattataactcactgtcaaactcctggactccaatgttccctccccttttagcctcccaagtagctgggtctacaggcatgaaccatcaggcccagataattaaaaaaactttttttggtgaaaacatgatcttgctatgttgctcaggctggttgtctggcattttctttgtcctttattctttatactagctaaaccctggagtatccttgaagcctttactggcatacagagtacctgaatcttactttggagcctagcatgggtcataaatatatctgattcattaacctgtgagacagctgagagaacacagactccttacctgtatctccagggcatatctgggtttttctctgccaataggattttcctgctttctagttagtaatattgaggaaagaaggaaagggcttatttatccatttgctttttttccactgtgaatccatctgttctttccatggaacatctgggggagcacctc

SEQ ID NO: 7697 - DNA, 800 bp, Homo sapiens
tcattttgtttctttcatttccaagttttaattaaatatctctaatggttagaaaatcaatgtcaaatacgaacattggtatacagcttaaaatacaaatgtcagcaattattaaagaacatgattaatcattgttccaagtaaatgctagatcattatttcccaggaggcaagttaagcatcaggtgcctgaggggtaagggacagggcttcagtcggctctgatagctgcatggctgtcccaatgagctttccactcagatagtgccaggggcagctctcatcacaggctggctcactggcctttatccccagctccaaggaaacaccagggctttttctgccatgagaatcgtgtttcagagtcaaatgatccactttaagatgaaatttggacagctcagttccagaatattctagtttaacctgggaagttaagacttcccaaaggctgaagataggctactaggggctgatggacaagagtcaggccagagtcactctaaacacatctttgttttgttctgtataattaattatactgtatcttctttaagtaactcaagttcaagctctctatatttcacttatgtttaaaagatgccaatttgattgtgtctaaactgaactttacccagtgtgctgaatactaaagaccttttaggccaaaggaaaaagatgtttatatattaacatacctcaaagtttacattttcattataataaattagccttaatgttaacaaataacatctcagaaagctgaatctaagtagcctgatctatcatgctaatttgag

SEQ ID NO: 7698 - DNA, 376 bp, Homo sapiens
  misc_feature (1)...(376): n = a,t,c or g
gtggagctcagaacacatggcctgaccccatgtgggttgttactggagcagttgttttgatctgtcttacatctgggggatctgcaagagatttcgagggatgagggccagttcccttgctaaaacttagaatgtttaaaaaaaaaaaaaactcccttgtactattgagcttggtacatctttccttgaaaggagctaaagtgaaataacttatagatcctgacatgcaatgagctgggtttttttccaattttctttgctncttgtctctgaacatatgcctccttataattcttcctatatgtgttngatagcattgttctctgagtaatagtaaccatgagaagaatatctaacatttattccatgcctattg

SEQ ID NO: 7699 - DNA, 267 bp, Homo sapiens
tcaccgagaatggcatatccagcagtagtgtggaatatagtggaatatttgacgcagcatggacttacccaagaaggtcttttagggtgaatggtaacgtgaaggtggtggaacaacttcgactgaagttcgagagtggagtcgccgtggagctcggaaggacggtgatgtctgctcagcagccagtctgttgaagctgtttctgagggagctgcctgacagtctgatagtgcagctgtagtctcgatcatcaactcttcagatgca

SEQ ID NO: 7700 - DNA, 780 bp, Homo sapiens
tttttttttttgtatcttatttgatgatatttattttctctgccaagctgtatagtaaaaggaaaataagtcacatctggtcattggcatttgtatcgtcattctgtaaagacaaaagagtacctatataagaagctccacgtagtgcaaatcgacatctggtaggctgctcgcccccaggcagcagcctagagtctgtaattctctgcgtcatcctcttctttttcttcatttttgctttttcttcgcttgagttcttctctgaaattatatgcaaagagttgtgggtcttcatcacacatttttctgtatacatcacagaggctcttaaagtgtgagatggagagctggcggggccgaagagtagggtctatgtctgccaactctaacagcctgcccgtgctttccaagcgctgcgcttcagggaataacattctgagccctcgatggcagtatttccttcggaactgaaatacattctgaaccactttttccaccagcttgaatggctgctctatcttgggctgtatcaagggagtgaagtgcaccacgcccacgtccaccttcgttgtaagcaaacatattatcattctgtggcatgatatgtggcatagtgtgatcaatcaactcatccttgtaaaacaggaagatgggctgtcaacagcctgttttcataaacagacctttccacgtacttcggtttcatctctaggcatggaagatggtacattctggattcgcaaatgacatggagaaatcagccggctgcacctgttctct

SEQ ID NO: 7701 - DNA, 351 bp, Homo sapiens
ttcgacaaagcttttgtggatgtggatctgctcctgggagagatcgatccagaccaagcggacatcacttatgaggggcgacagaagatgaccagcctgagctcctgctttgcacagctttgccacaaagcccagtctgtgtctcaaatcaaccacaagctggaggcacagttggtggatctgaaatctgaactgacagaaacccaagcagagaaagttgttttggagaaagaagtacatgatcagcttttacagctgcactctattcagctgcagcttcatgctaaaactggtcaaagtgctgactctggtaccattaaggcaaaattggaaagagagcttgaggcaaac

SEQ ID NO: 7702 - DNA, 337 bp, Homo sapiens
agaagatctcacaattaaaagatgaattaaaaacatcttctgcagtctccacaccatctaaagtgaagacaaaaacggaggcccagaaggagttattagatactgaactggacctccacaagaggctgtcctcaggagaagacaccacagaattacggaaaaaactcagtcagttacaggttgaggctgcacggttaggtattttacctgtgggtcgaggaaagaccatgtcctctcaaggtcgaggaagaggccgagggcgtggaggaagaggaaggggctcactaaatcacatggtggtggaccatcgtcccaaagcactaacagttggaggatt

SEQ ID NO: 7703 - DNA, 518 bp, Homo sapiens
ggtgaggtgaggtttagaaagcacacctgagccgcagtgtgtaggatgctggaaatggtggagatgggcctgcgaaagtgatgacccaggagcagcagccgggcacctaacaatgggtcagcaccgtgggcgtggagacgagagcggggattggatcaatacccggaagaagtacaatgtacaggacttgggttccatttggatggagtgggtgagggagagggaggagtcagaaatggcttccggtttcccagcttgggccctggggattggagatgtccccactgagagtagggcacaagtgaggaaatggtttggagaggaagatgataagttaccatcatggacatgctgagtctgagttgcctatgggacttggaatggggggtggcaaaatgtgtgtgatcttgagcaagatattcaacccttctgggccttggtcttcttatttgtaaaatggcgataagaatattacttcccatttgtgttgctgtgaatattaaatgcgctaccacatg

SEQ ID NO: 7704 - DNA, 844 bp, Homo sapiens
  misc_feature (1)...(844): n = a,t,c or g
tttttttttttgcattccacaagtatttattgatcttactgcataccaggccctcagatggggacacagccacgaatgaagcatggtccctgctaccacaaggtcctcttcacttacacacacactgaggactactgcttcgtcacgctttccgaagcagctgagtggggctatgtaagtgaccttgcagatgaagtcgccacctgcaagaactcacaggtgagaacagagggtggccaccaaaaggtcactgaactcccccgagaaaactgttgagccacacacatgtccaactttccaggtccaagacatactgcagtactgctttgtaatagccaccaggtgcaaagccaggaagaaccagagggaaacaggtttttctcacatgagggaagagcagcctgcatcacttaatggttggactgagttaatgcaggacttaggcctcttaaaaggcaacaatgagaacccttacttggacccactccccaccacggttgatctctcattatgctgagcatatctcttggaaagnnnnnnnnnnnnnnnnnnnnnnnnnnnnnnnnnnnnnnnnnnnnnnnnnnnnnnnnnntttgctagagacacggtgcccaggccctatgggcacacccacttgaacatatattcaggagccagctcagaaaccaagagactcaggctgcccaaatcttcaggtttccttcctaggcaggcagcagaagagttcagacaggaaatttctcctcgtgccnnnnnnnnnnnnnnnnnnnnnnnnnnnnnnnnnnnnnnnnnnnnnnnnnnngngaacggtcntcagantttnnagngggganatnnaanncct

SEQ ID NO: 7705 - DNA, 378 bp, Homo sapiens
  misc_feature (1)...(378): n = a,t,c or g
tcactaaatacttgacttatacatgttaagataatatttatggttgagtaacattgaaattgattataagtgttacttgggatactaactctgagggatatactactcatcagataaatgtgaatgatcatacaaagatactccatttttatatgaatttttcctcttcattgccattttgaaaataatttgtattttatattcagagatactgcccaagagaacactaaaatcctgctttgtgtttcagttaatgcaattttagtattataatcaaaagccattaagaaaatttcacagnnnnnnnnnnnnnnnnnnnnnnnnnnnnnnnnnnnnnnnnggcttcagccatttggggagcctgaggtggggagggtc

SEQ ID NO: 7706 - DNA, 202 bp, Homo sapiens
gagaagatgaatcatcacccagaatggttcaatgtatacaacaaggtccagataactctcacctcacatgactgtggtgaactgaccaaaaaagatgtgaagctggccaagtttattgaaaaagcagctgcttctgtgttatttctcccaaaatacatgtaaaatcttgcacacatcttagctgcattggatgttgagggaa

SEQ ID NO: 7707 - DNA, 359 bp, Homo sapiens
tcttacaataaacctgttttacagcttcattttacacataagaaaaactgaagcagagagaggttaagtaacatttccaaagttatacaactagtaagttgggattcaaacccgggaggtctgctgtgagtccttgcattaaagacaatgcttgccaagtaataagttctcaaaaaatggatgatgatgatgatgataagaaaatagcctggcatatagtaggtactccatataagccatgctgccctcttctgtggctagccctaatcctaaacatctatcccctccccgcagtaaggcacattttctttttccttcttcacctcttttctgggccatttggggtgctctgagcaagc

SEQ ID NO: 7708 - DNA, 716 bp, Homo sapiens
  misc_feature (1)...(716): n = a,t,c or g
cttgcgctctacgcccaagggagccgggctgcagagctggagaaacttccgcggctacgggtgcagttgccttcggttcccggttccgggccgacacccgcgcagggctgagacaggtgtctgcgctccccgcaatgggctgctccagcagcgccctcaacaaggccggcgacagagcaggttccccagcgtaacttcaaatgagcatttttcaactgcagaagaaagtgagtcctgctttgcccaaccaaagccacatgcactgggaagaggaatctactgttgatggcaatgtacaaagggaaagccgtcctcccttacaaaagctcaaggtttcatcagagcctacagctaatggtgttaaacccctccaagaacagcccctggccaaggacgtagcccctgggaaggggatgccacagaccaattcagggtccacagaaaagactcagcctggagagggactggaggaatctgggccgcctcaaccaggtggcaaagaggatgccccagcagcataaggatagaagaaagatgcaggagcagggacagaggccgagtctctaaaaggaaatgctgaagctcagcctttaggaccagatgccaagggtcacgcctttgcaggcagcagtanagaaggactctctnagagcagtggaggtcactgagaatccacaaactgctgcaganttaaagcctctangaacaactgagaa

SEQ ID NO: 7709 - DNA, 194 bp, Homo sapiens
gcttggtcccattaaaattgtaattggtaaattaagtgctggaaaagtcaagggtttgaagaagcaagacactgctgtctctgaatggaaaaaggtccacgtgtgggaaatgaggaaaccttgctcaatggagcaccctggacaagagcacccatgcctccagcagtgggagggcaggcgtgacgctgccgatt

SEQ ID NO: 7710 - DNA, 1068 bp, Homo sapiens
ggcacgaggccagccaccctgctctcctccagccccttccactgttccaagccccttcctcggaggcgtctccccaaccctcctgctggtggccgctcttgcactgcttgggtgggcgggcaccaaatccggggcttggctctgggcttgactcctctgctgccaccctgagtggtcattgcgcctctctaggccccgttccactcctgtgggagggcagtgatgctggagagcgtgaggggcggcgagtatggccctgggtggcgtcatggcacacaggcactgagtggactgttggtggctgcccccgagtgtggtcctgggtggcgtcacggcacgtgggcactgagtgggctgttggtggctgcccccagtgtgtgtgtcacttacagggcatgatgctactgaagtttgtgaagttggtttcattgacgctgttactaagactgtaatgtcagacatgttgggatctgttcttttcacatgaaaaggatgacttcctcttgttgggtgtcacctagtttgggcggagtgggagccgtgactcttgactcattgggccgtctggctttcccgggacacctccacctggaggagtgcctcctgagaacctcccagagtctgccccttgtgttcctcagatggacttttcgtttcctggagttttgtcatgaggcttaattaactcatgtctctctctcttttctttcagtctgcaactgtgtctgatggcgagttgacgggcgccgacctgaaggactgcgtcagcaacaacagcctgagcagcaatgccagcctccccagcgtgcagagctgccggcgcctgcgtgagaggagggtcgccagctgggccgtgtcctttgagcgcctgctgcaggaccccgtcggtgtccgctacttctctgattttctaaggaaagaattcagtgaagaaaacattttattctggcaggcctgtgaatattttaatcatgttcctgcacatgacaaaaaggagcttttcctacagggcccgggaagattttcagtaagtttctctgcagcaaagccaccaacccggtcaacatt

SEQ ID NO: 7711 - DNA, 299 bp, Homo sapiens
  misc_feature (1)...(299): n = a,t,c or g
aattagactgcctagatgccaataccagtnttggtatacaacaagggggtgtctttgggcaaatcacttttacctccctggacctcagtttccccatctgtaacgtgaggtacacccatttaacgtggttgttgggagaattagcacagtgctaggcacatagcacgccatacatatgtgattcttgtctagtcatgaacagagtgcaacaggcttcgagactgacttctccatctaattagccaccctgtaccaactcaagattctaaaggatacaggttgtacaccccactgtatct

SEQ ID NO: 7712 - DNA, 344 bp, Homo sapiens
agatcacaagttgtacccagttgaaatgcagaaataagcaaaagagccaaatacggttgtaaaggagccttagccaggaatatcgttcataaatcaaggtctgcggcagctggccctggccctgtcatggtatagccaaagtgtcttcatcacggaacatcggggagcaccacacagaccagagtagaataatgtggaatacagagctggtcagcacttaattggtttacacctgcttgtctgtttcccctgtgtttctctgcaggttcgaatcgtcctcccatgccatcagtatgagcgcctatctgcgagaacagagaagggagctctatagtcggagtgga

SEQ ID NO: 7713 - DNA, 371 bp, Homo sapiens
cagccatgataaagagacctccattaaatacgtcagccaccagcaccccagccacccccagctcttcagcattgtccgccaggcctgtgtccggagcctgagctgtgaggtctgccctggccgtgaaggccccatcttcttcggagatgagcagcacggctttgtgttcagccacaccttcttcatcaaggacagcctggccaggggcttccagcgctggtacagcatcatcaccatcatgatggaccggatctacctcatcaactcctggcccttcctgctggggaaggtccggggaatcatcgatgagctccagggcaaggcgctcatcgatgattcccggacttcccagcagaagggcaggagttgat

SEQ ID NO: 7714 - DNA, 371 bp, Homo sapiens
gtcttttcatgaacctgaaagtgaggccctcaccagacaccaaactggttgagcattgtcttcccattctctagaactataagaaataaatttctgttatttataagccacccagttttcagtatgttgttacagccgcccaaatgggctaagacagccactccactagggaagcctgagtgtggagccatcaaagccagcttggggaaatagattgctggcctttggcacccacatggctcatttttgcccagtgggggctaaaaatatctcctaaatgctgctgccctccctattggtttgggccatccttagtccatcccaatttaggccctgtatttccctctttcccccggttccctttggggaaa

SEQ ID NO: 7715 - DNA, 83 bp, Homo sapiens
cgcccacaaggggtagctgtggaccaggaagggcgcatcattgtggcggattccaggaaccatcgggtacagatgtttgaatc

SEQ ID NO: 7716 - DNA, 929 bp, Homo sapiens
  misc_feature (1)...(929): n = a,t,c or g
tgtaccacttctggaaaatggaatgtcggagttcaggcagctgtgtgtaaagacgtggaggctcctcaaatcaactgtcctaaggacatagaggctaagactctggaacagcaagattctgccaatgttacctgggcagattccaacagctaaagacaactctggtgaaaaggtgtcagtccacgttcatccagctttcaccccaccttaccttttcccaattggagatgttgctatcgtatacacggcaactgacctatccggcaaccaggccagctgcattttccatatcaaggttattgatgcagaaccacctgtcatagactggtgcagatctccacctcccgtccagggtctcggagaaggtacatgccgcaagctggggatgagcctcagttctcagacaactcaggggctgaattggtcattaccagaagtcatacacaaggagaccttttccctcaaggggagactatagtacagtatacagccactgacccctcaggcaataacaggccatgtgatatccatattgtcataaaaggttctccctgtgaaattccattcacacctgtcaatggggattttatatgcactccagataatactggagtcaactgtacattaacttgcttggagggctatgatttcacagaggagtctactgacaagtattattgtgcttatgaagatggcgtctggaaaccaacatataccactgaatggccagactgtgccaaaaaacgttttgcaaaccacgggttcaagtcctttgagatgttctacaaagcagctcgttgtgatgacacagatctgatgaaggaagttttctgaagcatttgagacgaccctggggaaaaatgggtcccatcattttgtagtgatgcagaggacattgactgcagantggagggaggaccngacccaaa

SEQ ID NO: 7717 - DNA, 536 bp, Homo sapiens
ggcctcttcacgcgtttcccgaggccgggcgcacgaccctgcggctccccgcccacgacacccccggggccggcgcagtgcagctgctgctctcggactgccccccagaccgcctgcgccgcttcctgcgcacattgccgctcaagctggctgcggccccgggtcccggccggcactccgcccgagcgcacgtgctgggcccgcggccgcgatcttcgtcaccatcagccctgtgcagcccgaggagcggcggctcagggcggccacccgggttccggacactacgctggtgaagcggcctgtggagccccaggctgggccgaggcctagcacagaagccccaaggtggcccctgcctgtgaagaggctgagcttgccctccaccaagccacagctttctgaggaacaggctgctgtgctgagggccgtcctgaaaggccagagcatcttcttcactgggagtgcaggtagtgggggcagagaggaggtagggggacagtggtggggtgggatagaggaacagggagacctgtcta

SEQ ID NO: 7718 - DNA, 225 bp, Homo sapiens
cttgtgtttaaggcaatgctggagaccatgttggtttgtctgattccagcctgttacagtctgagaggccacactgccgccccacagtggtgtccctacagccccccgggtgtctagtgctgaagccctacttgggtagcatctcatgccctgtggccacggccaggaggcctggtgcctcccccttggctagtattgagcagcatttgggtctttgagatgaaa

SEQ ID NO: 7719 - DNA, 394 bp, Homo sapiens
  misc_feature (1)...(394): n = a,t,c or g
atgagagctgtgctgaagtatggctttatggcactgtggtaatcatacgcagctgggaagttgagactatcggatagcaacagtgacccctttatccgcacagctatggcccagtgactgctgcagagtatcctaggtaaaagaacagctggtaaaattttggttatctcttaaattatattgaatacaaatagtatatgggccccctcatttcagctgcttagtgttgtaaaaattaattctatgagctccaatatttttgtttgcnnnnnnnnnnnnnnnnnnnnnnnnnnnnnnnnnnnnnnnnnnnnnnnnnnnnnnnnnnnnnnnnnnnnnnnngtattcacattggtacaatcctccattcaccatccatccccagaactcttttatc

SEQ ID NO: 7720 - DNA, 248 bp, Homo sapiens
gacagagctaagctagggatagctttgctgataagttacattgacagcatctgttaccatgtaattggtgcctgagctgaagcatctttcaggcattactggccatttgtacctttgcctgacgttatctcttgaaatgtctacactggcctcgctttacccatgggaaaccagaagcccagaggagcagtgccttgcccaaggtcacacgatgaccatgaaagcagaagtggagatcactctccact

SEQ ID NO: 7721 - DNA, 522 bp, Homo sapiens
ggaaactccatcaagaaaaaaaaaaaagaaagaaaagaaaacgtcagctatgttgtaagcaaagcttcaatacgttgctgtgaaccataccattctacgtagcagcaacaatgactcagcaatgattcagcaaatgaatcatgcttcagtcccagcacaattttcttctggtcagtgagtatgcagctggaggaagcctccttggccaagatcacaggcaaggatagggctgtcacagggtgcccttcccggcgagggggagggggggctacttgcacactgtccgcagccagtgctctgtcagctgcactttgccttgggtgaggggccagatggctttctggcctctggaacatccagtcctgattctccaggggacagagggcagcagcactcagggacccagtgggacagctgcgtgcctgcagagggcgtggttttgattccccaggcaagggcatgcatggtctaaccctttacaagaggcctcgatgttggtggccgacttactttttcttttag

SEQ ID NO: 7722 - DNA, 777 bp, Homo sapiens
ggccctcgaggccaagaattcggcacgagggaactcaagtgtcctacataggccaggactgcagagaaattccagagcaccttggcagggactgtggacatttcgcaaagaggcttgatctgagctttaaccttctgaggtcactggaaggactgagcgcattcaggagcctggaggaactcatcttggacaacaatcagctgggggacgaccttgtgttgccagggttacccagactgcataccttaaccctcaacaagaaccgaatcactgatttggagaacctgctggatcacttggcagaagtgacaccagctctggagtacctcagtctgctgggcaacgtggcctgtcccaacgagctggtcagcttggaaaaggatgaggaagactacaagagatacagatgctttgttctgtacaagctgcccaacttgaaatttctggatgcccagaaagtaaccagacaagaacgagaggaggcgttggtcagaggagtcttcatgaaggtggtgaacccaaggcttctagtgaggacgttgccagctccccggagcgccactacacgcccttgccttctgcttccagggaactcaccagtcaccaaggtgtcctggggaagtgtcgctacgtttactatgggaaaaactcagagggcaacaggtttatccgagatgaccagctctgaagccaacttctgtataccttcacccatttcatgaaaataaaatcaaaagggaaatcaaaaataaagaaaacgctaaagaaaaaaaaaaa

SEQ ID NO: 7723 - DNA, 345 bp, Homo sapiens
acaagatatgaatataccagagtataatctgtcataggagaggtcaagccaagtcttaggtctttcagttagaatttcatacaataggacatttccgttttgaggtgtgtatcatactatctttagtgctagaagtaatactttagccaaggaagtttaagttcttttgaagcattcattttaaaaaatagctttagttcttctgatctcagagctatacagatggtttggaccaagaggttttagtttaatgaacatgctttgcatgtttgcaaaggattttacctataaagtgagtcatcattagagtcttgcagtggtacaggggaaagatccataagcttt

SEQ ID NO: 7724 - DNA, 257 bp, Homo sapiens
tcagttgatttctatgttgcatttcactctcttaagtttttaggtcatggaaatgtctgtgtattactcttaggctactgacaattgtgtagcaagacacaccagcatctgctttgcaagtgtgttcctcgaacaccgtctcctcccggcctctgcttctttgctcctgggtattattactttgaccccttcgttgcacccttttcccatgtttctggagccaagagcatatttactctaataatatggtaaaaggc

SEQ ID NO: 7725 - DNA, 714 bp, Homo sapiens
aaacatatggaaaggatgcctacagctggagctaattaacacccatcacctcacatagttactgtcttgtttcttaatatggacatttgcagctatgaatttccctctgcacactgttgtcatcacacactctcagttttggtattttgtgtttttgttttcattcatctcaaagtattttctaatttcccttgtgatttcttctttgaccccttgattgtttagaaatctgttaatttccacacatttgtaaatgttccaatttttcttttgttattgccagcttcattccattgtgttcagagatgatacagtcagtgcctgttcttatgaagcaaacattctataatagtaggaccagtaccctgtctgtttcattcaccacagtcagcatgccccaagtgcccagcatggggcggatggccaggaatgagtgaaaacttcccttcctgggtagttgcgactagtagagaggaaaaataatataattgcctgcttactgcatgccaggcattgggctgggaatttttatattggatctaaaataactcttaagttaggcattatccccattttatagatggagaaactggccccaaaaggtgggaacttgtccaagacgtcacaggtagcaagaggtacttttacctggctccaaatctgtgttctttccactgacaaatgagatatgggatatggtgcatctttacagta

SEQ ID NO: 7726 - DNA, 778 bp, Homo sapiens
tttttttgaatttccaaaattctttaattggtaagtgtaatgcccagcaacttaaaaaacacacactgaagcacagcaactcatattgataggtaaaaaaagttacaggacacaaagggcccttactaatttgacaaaatagaaagaccaggtctgttgttctttctctgatatgatttatcttgcaattgctggatttgagtggcaatttggaagtatcatctgataccaatgtgatatatagctaggaaagaccaatgataggtgaagtccttaccataaaatgtttcgaagagcttctcaagacagttgtttctatttaaaagggaagatataaagagctaggttatctcaaacaatcctgtgaaagaagtttaaaaagatttaagaaggagaaagagggaagggaagcttcctgggtatgacaccatttgcaaggtcacaacgaacaccccaacggagtgcagaccttttcttctctgttggtactagataattgtttgggacatatatatgctgaggtttggattggggttctgctcgacaaagcatctgctctcggacaccccagcgtaattcctttctatgatcttcaccaggtaaacgtattgagtcccagtcccgtttgtactcaaaataccgggctacccggtctgtcttgccccggtttcggcttaactggtccagctttgggagaataaaggacttgggtctgctggcaacaatcaggtcttgttcgtaagctggagagcccattccttctctttgcctcgtgccg

SEQ ID NO: 7727 - DNA, 163 bp, Homo sapiens
gtcaaaattatatctcccttctactactgcagctggcaagctcttgaaagcatcacttcctcgctagaggccaatgaactcaagccactacagcaactcagaacaactctgccccagagaaggagaatacaacaggtaattctaccacctgcacaccctagct

SEQ ID NO: 7728 - DNA, 421 bp, Homo sapiens
caaatgtattcatctcaaaataatgaagaaatactcctaactattacaagtcctcatttctgcaactgtcactggccctagctggtatttgtaactatctttacatcttgctctcacagccatttcctttggttctggtccttcccacgcgcgcgtccgctagcccaggcccggcggaaatgactgtgagctcaaggtgtgaagcggggggctaagaatgggaaagagagtgactttcgcctgagaagctgcagttgtcgcctgtagaggggccggcgacttttgagacggtgaagagcagggcggaggaagcagtgaagagcagacggtgaggagcaggtggacctttggccgttggagtcccccagctgactctgccagagtagaacgtccaaagtgcccaaagactcgactcttggct

SEQ ID NO: 7729 - DNA, 465 bp, Homo sapiens
  misc_feature (1)...(465): n = a,t,c or g
ctccgtgcccccaccatcaaaagaaaaaatcagagatcacctatgaaatcagcaccacaaagccagactgtggcaacgtattggttttctaggactgccagagcagagtataaggggcagggtggctcaaccaccggttcctcatagttccggaggccagaagtctgagaccgaggtgtcagcagggtgggctccttctgaggctcctctcctgggcctgtagatgccctnnnnnnnnnnnnnnnnnnnnnnnnnnnnnnnnnnnnnnnnnnnnnnnnntgctcaccgcttcctcgaaggacaccagtcctttggattacaagcctgccctaacaacctcattttaantatgttcacccatttaaaagttcantgttttccaaataggagttcccnttctggaggntattggggggtttanggatttcancagttaggatttttggggaggacacanttttaggc

SEQ ID NO: 7730 - DNA, 337 bp, Homo sapiens
tcagaattgcttttgttttaaaatgaaaatactttatcttatagactatcttttaaaaagtattctaaggcaatgaaaatctaggaattccacccacacataggttcatcccctcctgtactttcattctttttagtaataccacaggaaatataaataccacagccaatcttaacctgcccctctccatttcttctttatggcctttggttcttcacttggtattacaaagtactgtgtcttttgggaaccttagttatagacaccaggaaatggttttgttctaaattgccacttgcacccaaagcaataggaaaccctttttgggaggacaaag

SEQ ID NO: 7731 - DNA, 827 bp, Homo sapiens
  misc_feature (1)...(827): n = a,t,c or g
aaatctaagaagctcatacataagaaacacacaaaacataagaaacacacacaaaaacccgacaccatgcctggcctaggcgggctcattttcgctgggagtgtctgctttctggtcattatcggtgcctgctgttcctgaatcactgctgcctggagacatcttcctgttctatctggaaaacttcctggtcctacagcctgtgaatggctgatcagggctcatgagccaagtagaactctggggacccaatccaattaaacaatggtggaggtcactgtggcaccgtgtgccccacaaactctgctccacgccctgtggcaggcctctcctctgggcctcagcccaccctgcaccacactccccaggcccatccgccttccccttatcangggaaacgtgaccgtgattttgggcttctttgccttccagaacttgagggaatacacttctgttactttataccaccttcgttccatgtcctgtgtcaagtcagcccccgtaacatgagccccagctggagaaaggaccactcgctagggttagagggaacaatcccccagagctcacacnaggctgggaatagggcgtctagccatcagtcagaggcaaacacctcctcattcgtggggcgtggcatagagcacccagaaggacttttcctcaccaccgaggaatntctgctttcctacctaacaaagcaaggtccccaaggatgaaactgttaagtgacgtgatagtgtcccacagcaaagctcaagaatgtttggaatacagaaacatccaacacccagaaacgtaacagtcacaatgtatggcattcaatt

SEQ ID NO: 7732 - DNA, 530 bp, Homo sapiens
  misc_feature (1)...(530): n = a,t,c or g
tttactgaatcatacattcacttactccttcagtaactccccaagctccttgctttataccagcctctcttctgggctctgaggagtcagaaatagaccagacgtggttcctgctctcaggaggcttctagtctcaggagaggacggtagaagaaccatctgctgcacacagaaggcgaccaagaccccacccctttatgccatcctgacattcttggtaccttgtggggtaggcatggtggggtgtcatggctagcaccaggtaggtgggacacagagaggcaggactgaggtcacccagagtgggactctggtctttcctacaggtgttggaccctgaggcctcaggtggcaggcccccattttgcccggcccccaccctggggcacccccattgcagcctggggttttgccaagttgcccaagagagagggaattcacagtattnggatttagacccgaatttctgggcaagagatgtttgaacggaggaangaggtngtaactttttgnaacttnccttgnctttt

SEQ ID NO: 7733 - DNA, 384 bp, Homo sapiens
tggatgtggttttctgagggccctatcggtgtgagcccagcccatttgtcactaaggacagctgtggccccttttggcttctccaaaggtccatgcccctcctactctgtcctcctgtacaaagtctcagaaatgacttcggtcttcttccccgcctctgaggattgatgggagctgaggtgtggggacccatccccttcaggtacactgcctcatagtatttcttctccccgcttggctgagcctcctctcttcagatgggctaaagcaggcacaacccccacgttgccacacagtcccataaactcctatggatacaggtcagtctctctccaaaactccatcctcatatccccagcaccacatgggacctagaatagcaac

SEQ ID NO: 7734 - DNA, 5300 bp, Homo sapiens
caagtgcaacgtctgtgtgcatcaggcatgctacgggatcctcaaggtgcccacgggcagctggctgtgccggacgtgtgccctgggtgtccagccaaagtgcctgctctgccccaagcgaggaggagccttgaagcccactagaagtgggaccaagtgggtgcatgtcagctgtgccctatggattcctgaggtcagcatcggctgcccagagaagatggagcccatcaccaagatctcgcatatcccagccagccgctgggctctgtcctgcagcctctgcaaggaatgcacaggcacctgcatccagtgttccatgccttcctgcgtcacagcgttccatgtcacatgcgcctttgaccacggcctggaaatgcggactatattagcagacaacgatgaggtcaagttcaagtcattctgccaggagcacagtgacgggggcccacgtaatgagcccacatctgagcccacggaacccagccaggctggcgaggacctggaaaaggtgaccctgcgcaagcagcggctgcagcagctagaggaggacttctacgagctggtggagccggctgaggtggctgagcggctggacctggctgaggcactggtcgacttcatctaccagtactggaagctgaagaggaaagccaatgccaaccagccgctgctgacccccaagaccgacgaggtggacaacctggcccagcaggagcaggacgtcctctaccgccgcctgaagctcttcacccatctgcggcaggacctagagagggttagaaatctgtgctacatggtgacaaggcgcgagagaacgaaacacgccatctgcaaactccaggagcagatattccacctgcagatgaaacttattgaacaggatctgtgtcgagcaggcctgtccacctcattccccatcgatggcaccttcttcaacagctggctggcacagtcggtgcagatcacagcagagaacatggccatgagcgagtggccactgaacaatgggcaccgcgaggaccctgctccagggctgctgtcagaggaactgctgcaggacgaggagacactgctcagcttcatgcgggacccctcgctgcgacctggtgaccctgctaggaaggcccgaggccgcacccgcctgcctgccaagaagaaaccaccaccaccaccaccgcaggacgggcctggttcacggacgactccagacaaagcccccaagaagacctggggccaggatgcaggcagtggcaaggggggtcaagggccacctaccaggaagccaccacgtcggacatcttctcacttgccgtccagccctgcagccggggactgtcccatcctagccacccctgaaagccccccgccactggcccctgagaccccggacgaggcagcctcagtagctgctgactcagatgtccaagtgccctggccctgcagcaagccctaagcctttgggccggctccggccaccccgcgagagccaaggtaacccggagattgccgggtgcccaggcctgatgctgggatgggaccaccttcagctgtggctgagaggcccaaggtcagcctgcattttgacactgagactgatggctacttctctgatggggagatgagcgactcagatgtagaggccgaggacggtggggtgcagcggggtccccgggaggcaggggcagaggaggtggtccgcatgggcgtactggcctcctaactcacccccttccctgtcccaggccctgccctggtccccccacaaggcctcagcccagtcacaactgccatttccagtctctgctgagtgtcccagaccctcgaggctgccactccgtcgtggttttatttttaatatagagagagttttgaattctacactgttgtctttcctctgtgctggcctaggacattaggattccttccacggctccggccgctaggaccctgccaggtcccgcgcaccatccctgccctgcccacgtggtattgctgggctcctggctagatgcaagcaaggtggacaagagctcaggactccagcccactgccactgggtgacacagactgtcgtttgggcattatttcatggcagatgggccagtccagggcctaccccgccttgcccccagatcccactggggtccatttggggggtcctgctacactccaccgatccccaaggaagtataataaacgatacccagccagagtctactcactgtcacaagcacaacgagtttatatgagaaagcactgagggggtgcagagggcccgctagttccaggggaactgaaagctgttcctgatcagcccgtatcatctgaggcctgcctgcccaccctgccaccctcccctcccttgctgctctgcccctgccagtgcccagcccagcggctctgggaaggggttcccagaatccctcctgagctgtgccatttactcaggggactcccaaacagccagctgccagtgcaggtggagggctgtaggggagggccagtgcccagacagggtcatggggctcagaccagcccactgtagagaatcactctgaggctccaacttccttccttccttcggggccagtctcggccgaagtctggtcacgctcagacagagctgaccagaccagaccgtttgccttttcaagtttcctagtcctgctacaagatgagcttcttccgtggtttccttttggaaactcctccttccaacaagcagtgggatcccggggcccagggcgggccggtgttggccgctggggctgttgtaagtcttgctggatgttcccctgttcctgagccttaacccctcgcacagccatcccccccccccgtcctgccatccccccccgccgtcctgccttccccaccccacccttaggtcccaggtagttgctctgaagagtttcagtagagtggccccagggtgatagctcagggaacaacaaaaaaggaattccgtgaaaacatttttttttctttgatgaattactcctgggtcacttccaccactggtaaagccagaacttctccaaaaagaaccttgcaaaaagtccagtgaatcagtcgaatcattctgtggatgccaaagaatattttgaccataatacagcacagcctggacctgacaacttgtcatttggacttttttttaaatggagttctttagcaacaaagtatagaaacatgttcattgcacacacccaaggagaagagctcaagcgcttggaagaggatgctttgctgctgctgaagtgtacctgggtgttagatttcagatcctgggctgagcccactgtgagctttcctaaactgtgagactcacagaggggaaagatactgacggtgaaaccagcatggaaaacgtctttaccatgtggttccctcctccccaaatacataaagcaaataagcaggatggggaacagcttgaccttcatccacccctaactccaaaactatcaaggtacgacagtggcattgtcatcgacactcaatttcatgtgaattttagcaaaacaggaaacaaagataatgactcagttcagaggatcggacaaatgtgtctagtccgggtggactcggagggagtggggtgggcttcaaggattctgggcgttgggatggcatgagctaccctgtagagtttagtctgcctgcccgccttggtagtagtgaccagtcagtgtcagcatcagtgtcccaaccccagtctctgtttactgcctttgaacagaacttcttccttccccatgctttgggtcacctcgggctgcaaccctgtctgtgccagattgcccggtctgaccctgcaggaagcaaagaggtgagcttaaagaacaaccaaactctgccaggggtcccagaaagcccagggtccagcagtctcagcacttggccccttgccccttcacaccatcctggggcaggggctgggcctccctggtggcaggggtgggtggagaattagggagagggtgcaacgagtctggccccttgcctcgggctggctggtgttcttccaagagcctctgctcacattgttggcctctggattctggcccttcttcattggctgttgctttggactggactgttgctgagcctgtgtcctgcagaacccagatgtctgttaggctggctggctgctgcgaggggaggggggtggcctttcatttggggtgccctttcactcccaggccaagccctggagcaatcttcttcaggcagctgtctccacctccaggatgtccagcaggctgcaaggagaaggatgccagccacccatcctcccccagttcccagcctttcccctgttggtcacagccgcttctgtctttttccggtctactgtccccagtgtagagggctttgctgtccctgagactgaggcaggttccttttccaggtcagaggtggaggtagatctttctctcaaccacatctgcctccacacacagctcctccgcagggaaggagaagctgctctgtaactcattctggctatcgtcccccttctcactgacctgaccgcccaccacctccttccccctcatcacatgacaaaggataatgtgcaagaaaagtatttttatgtatcataaatgtattttgaaacaaatgagaagaagaaaggtagaagggtttattttattaaatgagcctgacttagtgacagtgtgtgagcatttgcaatgtaagggcctcagcttccttggagaagccaccccaggtttccagacatagatgttgaattgtttgtggggggtgtgccaggccacgtctcgtgtgtccgtatgcaggcatgcctgtgtatactgtgtatgggcacactgtgggactagctgggacaattcctagagattcaactgcccaattctaaccaacattggcagcggctgaacttggcatttccttgctaactgccagatgtggccaacctttgtccatatgcaaaccactgaaaaatgatctggatttctatagcaaggcccttggggagggcactctcccatgcccttggcctcgctggccacattggccaatgagccagggctggagtctgagacctttggttgttctttaaggcacctcctgccactttctccctcagaggcacaaacactttgtgttccacgtcagtttgaggggacggtggggggatgatatgaatgtcacaggaggagacaccttctgtctttgtttcaaagaaagtgatgtgccatttgttaatatacaagagaaatattgaaaatatattgaaaagagcaattttaaattaaaaaaaaaaaaaa

SEQ ID NO: 7735 - DNA, 836 bp, Homo sapiens
tttccagaagtaaggtaactttactcagataaaacacagatggtagcagatagaggccacaagctcatgggatgccattccagagggcccctcacccacagaggagcccctgtaggaaggaggcccaggccccatccgcacagcaagtcccggtgaggggctctaacacacccccactccagcctctggtcatggacacagcccatagcgggcacagcatcatgatggaatggactctgcaggccacgcatggctcctgggaacccccagcccctcccttctcctcccagcctttccagctgtcttcccaccaggagggctcggaggtcacagcacggaacgtcttccaagagcccctgccctatatttctgcctggatgtaggcaggagctggggctggtgcaggagccagggcaggaaccagagatggggtcaagcaaggagtcctagtccaagcagggcctagactgcggctaaggctaggctggattctgtgctaagaaacagcatagaaacctgcaggcagaggctccggcccagcctgcggagcacaggatgcagcaggtgatttctgtgcccagcacacaagctccggccttatcacattttcctccactggccctagaatgagcaaagagcttgggcggatagcctgagccttcagccagggagcaggcttggccttcgagggagcaggtcagcccaggaagggaggggtctgcccatgaccaggtggggtgtggccacagtagctggagattggcagcacccacccgatctcccatccccagggaactttcttccagcttgccaggtgtgacccactccatctcacg

SEQ ID NO: 7736 - DNA, 599 bp, Homo sapiens
ccggccgcgaccgcaacccgctaggccttcatcgcgagctacgcccggaccgagaagccccggcatggccacgtccatcggagtgtccttctcggtgggcgacggggtgcctgaggctgagaagaacgcaggggagcccgagaacacctatattctgcggcctgttttccagcagaggttcaggccctctgtggttaaagactgtatccatgctgtgctcaaggaggaactggcaaatgctgaatattctccagaagaaatgcctcagcttacaaaacatttatcagaaaacattaaagataaattaaaagaaatgggatttgaccgatacaaaatggtggtgcaagtagtgattggagaacaaagaggtgaaggagtattcatggcttctcgctgtttctgggatgctgacactgacaactatactcatgatgttttcatgaatgacagtttattctgcgttgtagcagcatttggctgtttctactactgaatgaatctttgaaaagctggtaaaagacatgaccatgaagaaatctgaactttttaatattgttaaatatcttgacaaaataaagatgttagtagtttgacaactg

SEQ ID NO: 7737 - DNA, 504 bp, Homo sapiens
tcccataagttattacatagctaaagtttattcttaaaacttagtatctgatgagaactaagagttttctcatattcattatatttaataaatcactctcaagcatgtattctctgatgagttttggtttaaggctttcacacatgcaaatcggcttttaaggagtcctcttcaatgtgaattttataatgattagtaagggatgacctctggctaaagagtttcccacatgcattacattcatagggtttctctccagtatgaattctttgatgtgcaataagtgatgagctttgtctaaaagttttttccacatgtattacatttaaagggtttttctcctgtatgaatcctctgatgttgtataagagctgcactttggccaaaagacatcccacattctaaacatcgataaggtttctctccagtatgaattctctggtgaatactaagcgatgagttacacctgaatggtttggcacattcgttacacttatagggtct

SEQ ID NO: 7738 - DNA, 397 bp, Homo sapiens
gagaggaaggaaggaagaagagaaggaagaagggaagacaaaacccacagcctatgaaggacatttgcaggaagatgatggtaaacggcctcatgctgtcttggagactatgacaaatggatcaaaactggacacccactttctcagccactaccacacacattccgagctctcattcttgtgaggccagttcacagaaaatgtttttatttctgtgaccctgagcatgactcccactttgctgcataaagtattttctgagtgaaccttcgcggccttccatgctcattaatctctaccacctacccacacatacttcccactcttcaaacttctcttgtggatttgcctactattttttctttaccatttttttattttaaagtaagatattgag

SEQ ID NO: 7739 - DNA, 441 bp, Homo sapiens
ccaggtactgtgctagatgctagggatcagttgtgaccaggaatagacatggtcccttccctcatggagtgtagcttaccatccagtggtcagggagactcagtaatacagtgcaaatcatgcagagctactactgaaaaatgctgtgacggtcataaacataaatcaaatggagccccactttagtatattgtatatagtacagacatttaccagtgatgtaggctatactatggtgcatacaataatagtacaaaaacagatcacagaaagcatagaggaggcagggacaattgtggaaaggggaaaggatggataagggcctcacagagaaaagaaactatcaggactcttgggtgcaggtaacaaaatataattaaaactgattctaaatgggatgtattggcctatataattaaaaacccaagagcttaaataata

SEQ ID NO: 7740 - DNA, 553 bp, Homo sapiens
ttttgacagcaccgttttattcatgacaatctgcaaaaaaacaggtggatgggtcagaaagtcactgcaagcctacattcaggggctccacccgcagccaaagcccgccctcggcgcgcatgatcagttccagcttcctgcggggctcagtgtggtctggcaggaaccggaagtgcagcagcatcaacgccaggaccactttcatctccgccatggcgaagcgcctgcccgatgcagttcctgggccctgcggagaagggaataaaagccagaggtgacctccccttgctgttctctgggtcaaagcggaaggggtcgtagacctcaggatccggccacacagttgggttgtgatggacccctataatatcgatgaggcaggtaatgcctttggggatgactcggccatctgggagaacaatgtcctgggtgcagcatcgggagatgaagggagctgggggatgtaacctcaggctctccttcacgcacatggtcaggaagggcagctgggccaggtcgtcccattcaatctctttaggatcgcggtccttca

SEQ ID NO: 7741 - DNA, 844 bp, Homo sapiens
tttttttttttttgtttttattgttattgcttttattattattgcttttattatcattaaaactctagttcttgttttgtctctccgaatgaagaagtatgtattttcattaggccaagtctgcgggaaggctggggcagcagcatgaagtgtttgaggaagtgggttgggtatgtcagtttccatctcctctctgagcctgtcagggtgtttctggagtgcagagcaggagcaccctgctggagaggccaaggcatagctgtgggcaggctcgggcttcagtttttccatgcccaccatttgcccctttgtcctagggtactttgacccagcagggtatgttggtgctcatactccccaccctacatgttcccaggttctgtcccatggcacaggtgatggtctccctctcagctctgggtccatctccctggcctagttctccagcatctgctcacaggttcgagccacatcactgagcttgaggcgggcatagtccactcgcttcagagccatctgacagtccttcctcgaagagtagctggaaccctcatggggctgccctgtggccacctgggtgaggtagcggatctgagctgacagctccgcctccacgtgttgcactgaagcggtgaaggccgccgcctgccggtctaggagccgctcgttagttttttccttggacaattctaggatcacagtacctgcattctgaaggatggcgccgatttcccgttcaatgtcttccagagcgcgtagtctctcgttcgccaggctgtaggtagccattatcactctgggaattctcaccaagagtttctcctcagaaacgcgacgcttgttc

SEQ ID NO: 7742 - DNA, 499 bp, Homo sapiens
gcgttatcgtcttgcgctactgctgaatgtccgtcccggaggaggaggagaggcttttgccgctgacccagagatggccccgagcgagcaaattcctactgtccggctgcgcggctaccgtggccgagctaggtacccggctgcccacgcctgggcctcccgggcagtggcacgcgccgcgctgggggagggtgcgcgggcggcttcgcgccggcagtgcgcatcggagaggtcgccccttccatgcccgcctggcagaggtggcggtggaggccaggcccgcggtgggaggaggagggattgaggtctccacggccttttccttctaatctcttctaatgcttcccttaggcatgtgctgtggtgcttgaatgttgtactttaagaagcttcgcaagctgtcattcctctgtaggaatcattttccttttcatgaggatgacctttttaaaaacgtaatctgttttccatccttactgagatcatctctgtggtttat

SEQ ID NO: 7743 - DNA, 569 bp, Homo sapiens
  misc_feature (1)...(569): n = a,t,c or g
agaaaagtcattattcccttgtatttcagaatcatgttaatgaggtagcttaactgctattcagctgcaggctcaactgagtgaaaaaggacaactagtaatggtaaactgaaggaaagactagtggaatcttgagaaagaataagagaaaaaagagaaatgttattgttttgatattacagattaagctaaccaccagtacctgattcttagcaggtgccacaataattatttagtcaataattaatggagcaaatatttattaagtaacattgtatgtctgtgctgtctagttgaagaatatacaaaagaaaccctgaggctgggtgtggnnnnnnnnnnnnnnnnnnnnnnnnnnnnnnnnnnnntagncagaaggagcacttgagcctaggagtagnnnnnnnnnnnnnnnnnnnnnnnnnnnnnnnnnnnnnnnnnnnnnnnnnnnttagccaggtgtagtggtgannnnnnnnnnnnnnnnnnnnnnnnnnnnnnnnnnnnnnnnnnnnnnnnnnnnnnnnnnnnnnnnnnnnnnnnnnnnnnnnnnnnnncaagatcttctc

SEQ ID NO: 7744 - DNA, 179 bp, Homo sapiens
ctcacctggatgaatgctcctgcggaaatctacactaatgatagtgtgtggatgcctggagctacagatgaccgttgccccgctcaatcaggaaaaggcggcactgcatttaatgttaccatgggttacaaacacccacctctgtgcctcggacatgcacctggttgtatccatctaag

SEQ ID NO: 7745 - DNA, 583 bp, Homo sapiens
  misc_feature (1)...(583): n = a,t,c or g
aaaaacaaatacagcatttaaatgaattgacattgagaaatttacaatttacaaatttatattaactgtagtttccaaaatatgttactgttggtcctgtaagttacaaagagactgaagaactttctttttatacattagagcattttcccctggaatgagtattgattaaaaagataacatttattaattaataaaggcaatttaaaatttagtgttatttgaagactgtcaacatctgaaggtatgaaacttggtacagtgaaataatttctcctttctccttccttttagttattcccacagaaaactcagcccagtgggaatttgtcatattatgcccatgttttaaaaatattcatagtttgaatcttattgacattttaaagaagagttttttcctccctgggaatgtaaaacaaaaatattttttaatgatgtggaagtatatatttcatggttcattatggataaatctaccaacaaatggaattggtttttatgggtggagttcctcctataagagtatattaaatgccttcagagtggtattaatttggttcnaaataatatacccccttgg

SEQ ID NO: 7746 - DNA, 444 bp, Homo sapiens
  misc_feature (1)...(444): n = a,t,c or g
tgggtatacaggagccctctgttctatctttgcaacttttccacaaatctaaaactattccaaaagaaagaaggttgtttttttaaaaagcaacgctatgtacagcacaaaactatcattgtttttaaaaatatgtccacatatgtatgaatatattcattataccctaaaatgttaacagtggttctctcccgagtggtaagactgaagacgatgttcatttccttgtaccttctagatcagtggttctcaaagggtggttgccaggtcagctgcacgtaganacgcactnnnnnnnnnnnnnnnnnnnnnnnnnnnnnnnnnnnnnnnnnnnnnnnnnnnntcagacactctagaggtggggcagatgattctgatagatgcaagtttgagaacacggttcttagatcacagaaactgggtttttggtaacaagtgccactt

SEQ ID NO: 7747 - DNA, 189 bp, Homo sapiens
cacgcaggactggctggggctggcatggcctcttgccagcaaacagcctggttgaaattttttctcatggtccaagatctttccttggaagctttctttcctttcacagctaataaaatggccatatctttcagcagggagttttttctgtttgtttgttttttctatttttaacagaatcatataccg

SEQ ID NO: 7748 - DNA, 440 bp, Homo sapiens
tcttttaaattttgatcctgggtgacagaagaaatggaaatttagaagagaggttggtttcggagagaagatggaactttggttttgtcatgtccaatttgaagtgatgaactgaattcaactgatgatagttggagatgtgggactagaaggggagttaaaagttaggactatagataccgtgtggagtgtcagggaccttggagagggggaatagaaagttagcacaagagaaagtacacagaaagcaaaactgagcgtagggcctgagcttggggcatcatggcactccaagcactgtcataaaagcggaggtggaagaacatttcacaaagatgtgataggtgatagatcacacctagagccatcaattataatgaagatgagatgtagccaccgatttaacgatgactttaccaaactgttagaagaatggtaag

SEQ ID NO: 7749 - DNA, 417 bp, Homo sapiens
cttaaactcttcatggattcttgaaattctctcatgttcctgtcggctttccgaatgatgtggcaatctgctcatcactgcatccagctcatcaaacttcctcaggacagcctgaacttctgcagacagctctttgtactctgaaaactggtcttggaacacagctttatagcgttctcgctcatcatctgtctgaatcacagggtattttgccacatagtcgggcatcacgataggtttaggaatgtggcctggggggatgtgtccactcagtagttcaggtttcatttttgctgttctcagttccttgaaattaacttctgagtctctttgtctgtcaccactggtgggccatttcacacattttccttttcgatgacaatgatggctcatttatctcctggttgttccatatat

SEQ ID NO: 7750 - DNA, 447 bp, Homo sapiens
ttttatgcttgtttggtcggtggaatatgttgggatttatgtttgcctctgaacaagtgtcttgctcacatcgtaaatgactttctctccgaaacgctaaatattctttcccgcaggagctcatatccttattttccatgacagatcttaacgacaatatatgcaaaagatatataaagatgataactaatatagttatactgagcctgatcatttgcatttcgttagctttctggattatatcaatgactgcaagcacctattatggtaacttacgacctatttctccgtggcgttggctgttttctgttgttgttcctgttctgatcgtctctaatggccttaaaaagaaaagtctagatcacagtggggctctaggagggctagtcgttggatttatcctaaccattgcaaatttcagcttttttacctctttgctgatgtttt

SEQ ID NO: 7751 - DNA, 584 bp, Homo sapiens
aacatttaaaaatacttttagtaaaatactctgtaccctgtcaaaactcctttggcacacagtaaatcatagtgaagaacaaacatagcagaattgccttagttgaggctacagtgtaagagagaatacaacttagaaggtaataatagaaaaatcatagcattttccagcaattgatatgacagtaaatttataaagaaatacaataatttcccagtgactcttaactgttcaggatgccagtgctaaaccaggttgccatacataattcaaagaaagctagaaaacacattccacatattaaattgaagataatttttgttcagagagcaactgaaacatatagtaagttatatattttttagatataagataaaattcttttgcttttagttaaaatgatttttttcatacattctaatggacatatgaaaaagatatttactttttttcatcactaaccctgaggaaggaagaacaaatgtggagtaggccacaaaactcactaggaaccaatctccacacttttcccaattgtgaatagcaattaatgggagaagttcaggatactacactcctcgtgc

SEQ ID NO: 7752 - DNA, 1702 bp, Homo sapiens
gagagaactagtctcgagtttttttttttttttttttgactaagagtgtttggttgcttttttgtcacaagtaacttggaaaatagaagcagaatagtaaaggttctattcagcaacatagttcatggattttgtggaggttctattcagtaatatggttcatggatttagtggtgactgataagattttatttttgaaggaaaaattgcttatactaagtccagagacatgcaggtgagcccttttgtcaggctgcaaatcatgacatgccgatggttgtttattttgtttttaggtgtgcattctttttcttcttagcaattcctttatgatcaccttcccttcttgtttcactccctcccgctctctcaaaaggaacttgggaaacttgtgaaacccaggaaaacctttagtcttatacctcaactacctttcagtcctgtctgggttttaaataagtgaagtagaagaaattgagtattttctgacataagaatatattatcaatacagttttatgcagtaagctctccttaccataaatgtttcttggttgacaacatctaagacaatattagtgggatgaagaaagaaaagcaggggtgcttttggaagcagtgttagtgttcctcaaaagtcggaacaattgcctgttgatatattaataagacattaaagtcaaattttaatgttggcctctcaaatgatttggataccactctgcaaagtatttctaacctttaattcccagttttaaaacagatataataatagcatttaattggaatatactaggcagctggaaaagtatttgaaactaaattgacattaaaattaagatttgttttcaagtggatgtccattaaaagtagaaaaatatttgggataagtgagtgtgtgtttccttacatggctactaaataaaatataatgagtatacaagtatatctcctcttttgctatggaggctccatgttcaaggcaatggctttttaaatcttggctatctaaaattttttccctttgttttgaatatttgtaagtttttaagaagttagtgtcagcaaattaattgaagttatgcttctatactgggacatatttaaatactgagtatagtactgctgctactgcttctacaatgtaaaatgtatgacttggtgttttaaagtaaaaattatgatgttacttgtggagaaactaaaaatgttgtacaactgaccgaaagaaaacccttggggataagtttagtgaggggattggaatccccaaaaagataacatttttcttctgcttttaaaaactgaaattccctgttctagttcctaacaattctcattacatactatgccagattacaaaatacttatttttaaaatgaaatctatatattgactttcttatcaatcatcttactgtgcaatcaaaattagagtactttggtttgaaaacaacacttagagcctccagataacttttaagacttatttagctttgtgggtggtattttcatgcaaataagtaagggtgggttttatattttgtagaagttttcggtcctattttaatgctctttgtatggcagtatgtatatattgtgttaagttcctcaagaatctccttaaaaactttgaagttaatacttttgtgcaactgtgttttgaataaagccatgacagtgttaaaaacaaacaaaaaaaaa

SEQ ID NO: 7753 - DNA, 169 bp, Homo sapiens
aagcacagacattctggggtacgaagccttggtggtcagacagggcttgtttcctgcagggcacttccttcagttcattgaatgagagtgttcattttcaccattctctttccgccataaatggctttcatccagctctttggggacagctttttgggagatgcccgat

SEQ ID NO: 7754 - DNA, 241 bp, Homo sapiens
gagatgaggactaggtacaggctttagaggagagccaccgccccggacttctccctctgtcaccccgctttccatgaccctccttgcctgactttgtgactccttgcctcgctatcaaaacaagtgctgcaatctcagtgctttccaagagccctgcattgttagaaacttcccagcacgcagcaaaggctgctgcaatactcgctctgcctgcctttgccctgcgcttcctacttaccct

SEQ ID NO: 7755 - DNA, 326 bp, Homo sapiens
tgtcgtattagctatttaaaaactcagacagctaacatttaaataaatccctgctgtctgggaatgatgtctgaatgaatattgtgaatacatatgctaatttataccatattaagattctaaacaatacagctatttaatatatcttgataactggtatttgaaaataagtctatttttctgggtagtcttttggagaaagtgcactgaatatagtttccagtcatatgctactttcttaacttgtacttatctaaacatcttctcatcaggagagagttcaatagtactcgaaccaaaagtctagtgagtctgacttctccaat

SEQ ID NO: 7756 - DNA, 172 bp, Homo sapiens
attgaaaagaaaacagatattagcaatcaggctgagattagaaaggaaaaacatatctaaaaatgaaaattataaggtgaataagctagtcaagaagtaatttaggaatatatattagaagttaatactaaaactagacctaggctggaggttaggaaaagtagagaaaggc

SEQ ID NO: 7757 - DNA, 156 bp, Homo sapiens
atatatactttagtttacaactatgattctagagacattttaagtactctttgccatctaaaaagcatccttttttcagtagcatcttcccaaacagagctgcccatagctttaaaggaaacacataatcataaattaatgtaataattaaaaaca

SEQ ID NO: 7758 - DNA, 205 bp, Homo sapiens
agatccagttgtttcgcaaccttgccagcctttgagataatgtgttttttttccattaaattatccattctaatatgtgtgtgatggtattgcattccctagtgactaatgctgcttagcatcttcttttacttatttaccatctatgtacctcctttggtgaacactgtctaaattttgcccactttccattgagtgttcttcg

SEQ ID NO: 7759 - DNA, 243 bp, Homo sapiens
atacatcttaaaatcagaacactgttccctaacagtcacatatatatcagtgaaatcgaattcattttaaagaaatttaattattcactgtagtttaatttactatatctcttaattctaaggtgttgaatataaattaaatttagatgttagccagatatcccattatttcacttatcttaatatgatacatgtaaataattctttagtcttagcttctttctttgatagtaaactcacaca

SEQ ID NO: 7760 - DNA, 518 bp, Homo sapiens
tgttaatataatcttctgcagtcccatgacttcgaatagcacttagatgccgatgacccccccaccaaagaaaccccactgtctcccacagactccaggtctgtatctccaactgcctactcaatacaacacgtccacctgatgcaatgaacttaatgtgtctaaaccccaattccacatttccagtcctcctaccggctcctcccccagtcttctctactttactatatgacaactccatttttcccaatactggttttaaaaaccctggagtagtccttgactccagtctctctcacctttcaaccaattcagcagcaaatactgacagctctacctttgctcatcaaagcatatccccaaatcaccctattccagactgcacactgtcatctctcccttcaattacagcagtagcctcctaactagttttcttgattccactcttgcccatcagcagtgaaattaccccagagcagttaaaatgatcttttaggatgggcacggtggctcacgcc

SEQ ID NO: 7761 - DNA, 475 bp, Homo sapiens
aaaaaacactgacctcactgtcatcccctatagcttgttagtatagctgtttgtagtcttttttctaaacaatgtattttcaaagaaaaaacagccaaaacaaaacaagccagacccaaacagagcaaaaacatggctttcatcccagcatgtacggctagaagaggtatctccagaccctctcaacctcatgtggtttgaaggcagagctacctctgcctttcccatgagtatgcccctgagtagttttctcaggttctcaggacgggctcttaactggcagaggaagactctaagacgcagcccatagcagctcctgtgagcccaccttccacctcgggctgcctaccaggcccttgagagcactctgttagcatagagaggcaacctcaaagcctttattcaggaacctggctcaggttcccagccactgggtattgagagagctttaaagaccacaaagtggagaattttg

SEQ ID NO: 7762 - DNA, 483 bp, Homo sapiens
acacccttctgtagtcccctcccacactgcgtcagagattatctgtgtgaccagtagattatggcagaagtgatggtgtacaaactctgagacttagtcatataggcatttcaggttttgccttgttctcttggagtactcaccatgggaaatcagcaaccattgagaagactctcacaaagccctgtggcgcggcactgaggtctcctctcagcagccagcacccacctgccagatgtggatgtgcccctcttgagttctcggcaataatgagtgattattgttatttttagccagtaagtttcagaataatttgttactcagcaatagatattacattgtttgagcagtttttaaaaacggcttcagaatgtggctctgagctaaatagaagtctgtgaaacatgttttcaacaaatcccatgatttatagaacagattacctagttatatacctacctcctcagagactcaaattgttct

SEQ ID NO: 7763 - DNA, 429 bp, Homo sapiens
  misc_feature (1)...(429): n = a,t,c or g
gactccctaagccagtgcattaaagagaaggctgctaatcagctaaatagaaagtggaatctgttcacatgaagtctctctttccttccatcaccagagggacaccaccgtgttctgaaatacactcttgacatcgtttggcaggaaaccctattttgctgaacatgattcatcccttaggttactgtttttaatattagaaagtgagctttcaagtgccaaacaaattttgcagcaggggacaaaagatattccaagtggtctccctgggaccttctaccaactgcgggccaccaaatggcttaaaaggaaaaccttcctgtgggtgcttcaggaaattgaagcaggagacataggntacatccaactatttaccntaattacagggattttgtttntttgagtcttngggtntttttggggttccgg

SEQ ID NO: 7764 - DNA, 227 bp, Homo sapiens
gtgattggtggcacaaatcatactctggaaagaagcaaccagcttgcttctgaaatggatggagcccagcatgctgcctggtctgacacggccaacaacctgatgaactttgaggagatccaggggatgatgtaggaagatggtacaccactgccttttgccctcgccactgaatgactggggccagctccctaatgaaggaactgaagtttgttttttattatcat

SEQ ID NO: 7765 - DNA, 1458 bp, Homo sapiens
tgtgggagaaaaattatctccatttattttgtttcatatacatccatagttgaattttaatacaaaagaaaaaaattagaatctgacaaatgtttacaaacaagataccttcaaatagattttactcactttagcctggtgcagagtaattgacaaattgtactgttatattcaaggcaacagagtctgtagtccagaccacttagcccaacctttatgcaagcttaattttaatctaccatgaacaataaactcattgttgattcccagttgtgtgtgtgtgcacatgtgtacatagcagctcctttcatagaaagaaaagacatctagaggtcgtcttgtacttttacctacaggaatcatgataagatacagatgattatatgtaaccggggctggattttataagaaaaaatacttagctgacaaatgagggcagcaataaaaaagcgtcttttttgcaacaataaataaatacagtcaaaagttttctgtgagactctaaaccagcttcttcactgaagagcagacgtggcatttccatggagttacacttgaccccatagtatctttttttcttgctttctttttctttttttttcaataaacaaagttttctcgcttctgccacaatagtaaaaccatctgatcttgacaagataatggtgtcgttgactttgcttttttcttgtccgttggacaaaattggccaagaatataattggactgttatgaccaataaaaacgaagtttaggtcaagtcttgtcaggatagcctgactaaaaacatctggctccttaatttaaaatagttcagacaacccagaatcttgcctgtgttttaatgttaggttaacacgctgaaactttaaagaagctgtagactgcaagtttgttgttatgagacctgctagctttgaagcctttcaatttctgtacaaagaatgattcgagaacttctgcacactggtaaaatggggagtcacttggattgtagtaacgacagttatcaaaaattttggtcatatctgccacaaattccgtcagcttttcataatatcgtctttgtactctttcttccatggtggcaaggtccataggttccttaataacaccataataatctggtgcatcattagggtctactggttcaaggaaaggccaggccatcttatgggcctgtaaggaacggagcaccctcttcaacccctcataatccttctctgttagtggcgtgagcactgtcatggcatcctctgttgactggcactgtggacagacatactcatcaatgagctctgcctcactttgcaagatgccaacgcagcgcccatggtaccaattctgacaccgatcatggccaataaaaaatctgcaagatccaaaatggaaatgtgagttcaaaacagatgggatgatgttacttataataaagcatgcacctgaaaatttgctaaa

SEQ ID NO: 7766 - DNA, 347 bp, Homo sapiens
gccacgaggttgaagctgtgtgaccgtctggccagtagcttccctctgacctcccctcttccatccagttacttcggaaatatggatcgatgtgccaggttaagtgctgacttagacaatggtaacaagacccaatccctgccctctgggagctcatgttatggtgggtggggaagacagatggaagattacaggcgtgtaaatagcacattgtaagaccatttattcacctattaaaacctaacctaacggtgcctagtgtgctaggcactgttctcagcattaaggattcagctgtgaccaaaacagagtctctgccctcatgaggctgacactctagtactatg

SEQ ID NO: 7767 - DNA, 381 bp, Homo sapiens
acatagtggtctttagtagcacatgagaaagactatccccagtgatgtgcttatgatgttgtgttctcattgtagcctagggcttttcctcgcctcctctgtttccttttccctagagccctgtgtcagcggcaatgaatgcttaagtaggctctgtcaggaaaactctccgtgaccttggaaacggtatttaacctttctgtggatcagcatccaaatagcaaagcaataatgacaggagctgcctccttcacaagcctatgagttgtgactaagaaaagggattgtaaaacactctggaacatcttaaatactacgggacaaatctaacaatgtttaatgcactcaccagctcatgcccagtggtcatcaccagaccct

SEQ ID NO: 7768 - DNA, 214 bp, Homo sapiens
ggaaacaaggatttgaaatcttgggactagagttatagagatttattaatgtagtgtagcatgtttgggaaaaaaatggagttggaggtcagaggtctgtttgcattgaatcctggcttaactaaaaatacattaggtgtgtccagtttacaaaatagcttagaaatgagatcttttaagaaactctatacaccatggaatactatcagccata

SEQ ID NO: 7769 - DNA, 271 bp, Homo sapiens
aaacttgttaaagtttgtagaagctgagttgttgatttctgtggtggataaaagccagtgctgtatctggaaactgttttcctgtttttcttagataccccttgaatcggatctgtttaatggaagaggatttttctgttaagctggttataatgccggttaaactttgtgtttaggatgttaaagtcctggaatgaatataattacctgcctatataaaaaaagctgaagtcatttgatgaaaagttaacaagtgcaggcatgtgagcta

SEQ ID NO: 7770 - DNA, 549 bp, Homo sapiens
  misc_feature (1)...(549): n = a,t,c or g
aggcccacaataacctctcatctttgccccatgacctctttaccccgctgaggtacctggtggagttgcatctacaccacaacccttggaactgtgattgtgacattctgtggctagcctggtggcttcgagagtatatacccaccaattccacctgctgtggccgctgtcatgctcccatgcacatgcgaggccgctacctcgtggaggtggaccaggcctccttccagtgctctgcccccttcatcatggacgcacctcgagacctcaacatttctgagggtcggatggcagaacttaagtgtcggactccccctatgtcctccgtgaagtggttgctgcccaatgggacagtgctcagccacgcctcccgccacccaaggatctctgtcctcaacgacggcaccttgaactttttcccacgtgctgctttcagacactggggtgtacacatgcatggtgaccaatgttgcaggcaactccaacgcctcggcctacctcaatgtgagcacggctngagcttaacacctccaactacangctttcttc

SEQ ID NO: 7771 - DNA, 275 bp, Homo sapiens
cttgatactggaagaacaaaagaaaataagtaccatgaaagcagtcagatgagttctttggtggagacgtttgtcagtaaagccagtgctttgcagcgccagggaagagctgggcgggtcagagatggcttctgtttccgaatgtacacaagagaaagatttgaaggctttatgggattattctgttcctgaaatcttacgtgtacctttgggagggaattatgccttcatattatgaaatgtaatcttggttctcctgaagatttcctctccaa

SEQ ID NO: 7772 - DNA, 485 bp, Homo sapiens
tcgacctaactcctacacaactaggagttagcatggccattttatatggcagtggtggtgggaaggggagcagaggcttggagatgagaagagctgggaagcaagccctgggtatcccagagcttatgggtgggaagccaaacaatgaatagaacaggggaggccacaggaatcccaggaggaggatgccgcaccgcctgccctggccggacgtgccattcccagccttctcccagggaaccggccaccttgttcaagaaaaagaacgttctcctcttgctgcaaagagccccagaattaggatcacccccttacaggatctgctggtcacaggaagacagcacaataggcccctggtgggagacctaaaagtgggttgcaggaaccagttaaggctggatgaacctggtcagtcccttacatggatcctgaagcaggaaaaagcccaccagcatcagcataaaagaaaggcaggcaagggcagg

SEQ ID NO: 7773 - DNA, 42 bp, Homo sapiens
tatgtatatattaaaacctaatatatgtaactactttcatga

SEQ ID NO: 7774 - DNA, 446 bp, Homo sapiens
tcacttcattttgggtcgactctacaacttccagcccttcctcactcgcactgaagtttacaaaactggtgtcacacattattttagcttagagaaagccaagaaagagctaggttataacgctcagccatttgacctccaggaagcagtggaatggtttaaagcccatggtcatggcagaagttctggaagtcgtgactcggagtgttttgtttgggatgggctattggtcttcctcctgattatagcagttctcatgtggctgccttcttctgtgattctgtcactgtgaaggaggggccagaaataaggtgatcacagttggctgagatggttctcaagaaacatgggttttaaaatgtgtacagtgatatctggtgccaaacattggctcttcaaattgctacttaagaataggttcttggattgaatctttatgtcttatt

SEQ ID NO: 7775 - DNA, 605 bp, Homo sapiens
aagcttggcacgaggttttttttttttctctttaactttatattccaaatggaaaaatggtgcaatactctggtaataattttcttgcattagtccacaataaaaagctgctaaaggtaggtatacatgttatttctccagagatatacactgtactttttaaacgcagtcacagagtccttgagtaaacatttacacatgaattgtcgcccacccctgtcctaggaattctctgtaatgtataggattagctaaaggaagggcgaggacactcagtgcaaagttagaagctaataataacaaccgtttgaccaatgcgccaaaaaaaaagcgtatactgaatacaagggaaaacccacagttaaatcctcacacgctttcaaacacacaaacacagaaaactggcacgccgtgcaggagcacgcgccacacatgcacacacacacacacttctgtttcaacacgcacacatacacacacgtaggctatgaacttagaaatttttcctagaggggagattatgacttaaactttgcttgatgactaaactcatcattatgaagattcattaaagcacaatattatgtagaaatatagtaaactgt

SEQ ID NO: 7776 - DNA, 123 bp, Homo sapiens
acacacacactttttttcccaaacctggaaataagttgtagatgtcatgacatttcacccctaaatactttagcatgcatctctcaagattaatgacattctcggccgggcgcagtggctcac

SEQ ID NO: 7777 - DNA, 362 bp, Homo sapiens
aacaaaattacgaagatatgatttctttcattgttgtagaaccattaaataagtcatcagattatgatttgaacccagggcacccagtcaagtgctctttccctatgcggccttagctacggggatttacatttacagttgagaagtgaaacaagaaaaatttgtttttgaaacataatagtaccatctagcctggctgaccaacccttccccagcaccaccagtggacatgcgcatgtacatacacacatacatacccacactttaggctgagggagagtcttgtctttttgaatatccttcatagtaacctctgggatttcaagggtacctgattatttaaggaccttttattaaacctt

SEQ ID NO: 7778 - DNA, 130 bp, Homo sapiens
gtgccccccgaatggttttgagtacagtgcttaggaatgtgaagaagtccaagaaacatctgttcctaaaaatcatctagatttttaagagttcgagaaaggattggggcttgtcaaaaggaaataggga

SEQ ID NO: 7779 - DNA, 1425 bp, Homo sapiens
gattgaaaatgatttattaaagtccaattagtatgcttttcatttcaaataatccatatagcctccagaaaaatatgcacatgtgtaaaagtccacgttcatttctttcacttccaatataaagtattctgtattttgtataaagtatgtgcaaacacctttctgctaatcgggtccccacattcttttcactacaggtactttacaagtctgccctctgctcaaacactaaccgtgcactgacatcctccttcctagacagccattcatctcccggacttctttctctcagacatcctcctgacctcccctgacctgcttcaccactgtgttacctcactggttacttgttacagcaaactgatgcaactactaggtctacctggacaacatattaaacaggtatcacctaatagggtggcagcctatcggggtgattcctggcgaatacacagtaaccaaccacatactgacacactcaacccatttgctacagatggacccacactaattgatatgacaatcctttattcactcggcacatttggtttctttgcattttcttccattttacattgcaggtgtggctaccaagagctggataacgagtccctcaaacaaagtttggaattgcgagatatattggggtaccttgattcttgagacagttgaattcttctagttgatcttgttgtattaaaaagtcactctcaactgaagtgaccactgcatttcttttgtaaaaaggtcatttgactggcttttcctcacaactgccacccatgcagtacaaaagcaggaaatcccttttcatgaaaggtgtaagtacaagatgacatttcacatttttttaaaaaaagaatccttcatgggaatatatcctaataatcaattatatggagacagttttatgtacaccaaatttctgcaactttataataatgaaaattagaaacaacctaaatagttaacaacatgggaatggttaaataaactgagttgcatccattaaatggaatataatatagccattaaaattatgtttttgtaaaatttttaatgccataagaaaatgtggcaattttgcaatgaaaaagatctacttataaaactgtttacagtatgactccaattatgtaaaaaaagtatacaatacacatataggcatacatgggggttgctttttaaaggtggttacttctgggttgtgatattatcagtaatcatttttgcttttttatacatttctgcatttttcaagttttctatgatgagtatattattttacaaagactacgaaaattttcctctgatatactggtaattagaatgtacttgggtattttaaatatatgggaacaatattatagtgcttcatcttctatgacttttttggaatacatatcactttggtaataaacttac

SEQ ID NO: 7780 - DNA, 354 bp, Homo sapiens
agcctttcatagcctgaggttccatccacatgggaaacttatacataatgtgacacatctttacattcttccattcaaaacgcttcaaagttactgccattatgaaggaataacttcttcaagatcatggaaccccaaagggtttctttgtgttctttttgacagctaattttatagatggggtctttgaaaatgtgattcttggattgctctataacttcccttgcattatctttttagtcctctccaagtggactttcactcttcactgggccagaaccactcctggcactcaccccccatgggggcggaatccgggggcatttctcagcttcatcttactctgctgcatca

SEQ ID NO: 7781 - DNA, 189 bp, Homo sapiens
catatcccccctgtatccaaaaccattttaatagggaaacccctagtaaaatttatgaatgccctccattttgggcctttccccagacctatttgagttattccaagatagcccataatgttttaagtagcgacattcttttattaccttcctaattgcccttgtaaaatgcattgttatggcccggca

SEQ ID NO: 7782 - DNA, 602 bp, Homo sapiens
cagtctggtgcgactcaatctttctagtaatgaactgaagagtttgccagcagaaataaatagaatgaaaaggttgaagcatttggattgtaattcaaatctcttggaaactatacctcctgaattggctggcatggaatcactagaattgctttatttgcggaggaataaattacgttttctaccagaatttccttcttgtagtctattgaaggaattgcacgtaggtgaaaaccagattgaaatgttagaggcagaacatcttaaacatctgaattcaattcttgtgctagacctgagggataacaagttaaaatctgttccagatgaaattatactactacggtccttggaaaggcttgacctaagcaacaatgatattagtagtcttccctattcattggggaaccttcatttgaaatttttggcattagaaggaaatccttgagaacaattcgaagaggattataagtaaaggaacaccagaagtcctaaatatctacgaagcaagatcaaagatgatggacctagccaaagtgagtctgctactgagactgccatgacactaccagtgaatccagagtcatatcatgcctcattac

SEQ ID NO: 7783 - DNA, 496 bp, Homo sapiens
gtgtgggcacctgccagcagcccccggaagccctggccttcaattggccatttctggggccgcgacagtgtatcgcctcggagactgcctcgctgcccatgatcgtcagcatcaaggagggaggcaggaccaggccccaggtggtcagcctgcccaacatgagggtgcagaagtgcagctgtgcctcggatggtgcgctcgtgccaaggaggctccagccataggcgcctagtgtagccatcgagggacttgacttgtgtgtgtttctgaagtgttcgagggtaccaggagagctggcgatgactgaactgctgatggacaaatgctctgtgctctctagtgagccctgaatttgcttcctctgacaagttacctcacctaatttttgcttctcaggaatgagaatctttggccactggagagcccttgctcagttttctctattcttattattcactgcactatattctaagcacttacatgtggagatactgta

SEQ ID NO: 7784 - DNA, 433 bp, Homo sapiens
  misc_feature (1)...(433): n = a,t,c or g
cctggttataaatcctgcaatatattacattttttaaaatcctagtacaacaaaaacaaatcttaaataaaattgaacaaacaaacaaataaaaacagtagcagcagtggttacctgtctgagcacctacattttcttaggaggggatcgtgtctcaccagccaaatagcccataaaccttctcaaaaaaagtgagccaggagaaaagtataacacaagatttgatttcacaatgtctctaagccccacaagccccaaactgggggattcactgattggaaacaatttgcttctccattgctttcttcttgggggaaaaggggatgattttcaaaggtcaatggccttcaatatgttcttcaaagtctgataatgtgcttgatggatggcccaggtctcttgttgggggttttccaccgttccggggnaggtt

SEQ ID NO: 7785 - DNA, 384 bp, Homo sapiens
taaagcataaagaaatgcccctcaatataatgatataacttgttgaattaaaatagttcagctgtcagttattgaaaactagtaaaaagacttaactttcaccacaatctttagtaaaacttagaatgagacttacttctacttatagtcttggtttaaaaagcatagcacactacatcaagtaggccctaggcattcatatttgtttgcagaataaatatgctatggtccatttctcagcagtctaactctgtaaggcagttcttatattttaagtgtctaaaacacgtgtcttcttgatacaggaggaaatactgaattattcataacacagatgaaagtatttttcatctacttatatccacccttcttaaaaagcatgcc

SEQ ID NO: 7786 - DNA, 461 bp, Homo sapiens
  misc_feature (1)...(461): n = a,t,c or g
tttttttctaatttctcacttaaagctggtaaattttcctctaagggcctactttagttgagcccacaagttttgaaaaactctacccttataatttggatatttatcccaatattctctaagatgcattgtaattttttaacctgtagattattcacaagcatgttactttccaagcaataacatatttcctgtatctttgtggttaaaagttagcttaatcttttttcctgttatagttcgaagttatgggtgcatgctgatttagttgggttttttcctgcttcattgggtttctccattataaaacatctctgttctccagtgatgttctccaaggtagtatcttaatacataataaacactttaataagaacaattctcctcgtgccnnnnnnnnnnnnnnnnnnnnnnnnnnnnnnnnnngagtcgtattacgncgnatcagcaagctgtagacc

SEQ ID NO: 7787 - DNA, 970 bp, Homo sapiens
  misc_feature (1)...(970): n = a,t,c or g
agactgcatagggctcggcgtggatgattgacctatttgaaacaaactcactgcacttaggcctcacttctttccacctctctactgggtcccaactccagttctgagggcactaactgagatgctgtgttagtttatagtcaatttttaagaacagcttaattgaggtgtacttgacttactataagattatccctttaaatgtacaatccaatgattttagcaaatttacagagttccgcagcgacccccacaatccggttttgggtcgctccacttctccgaagctcccgctgccacctccagccctgtgcagcccctgacccgctctgtgtctctaaatgtgcctttcaaaggacagtttatccgagtggaattacatataataatacgtagtcttgtgtcttgcttcgttcacttagcacagtgttttcaatgttcatacacagtggtagtagatatcatttattcctttttaaattctaaatatctccttaatcttatagtatttacttagcaaggttcatggtacttgtgaatttatttcngtttttggccatttatgaagggcttgctcttgaacattcataaacacactgtgtgaaaatatgttgccatcttgtacacntcccaacgggtggggctgcgacatcacattgacgaacattctcaagataacttgcctgcaccccttgaaaatgggggtacagaagaaaggaaactaaagagcacgccaattaaatgcaacgtgtggtcctggatcagattctatgaaggacgcgaagggacaaccggcctaacacctgaagagctggtcacaacgtgactgcggggctccgctcccactgagcgctgactcaggtctgagtggggcctgaaaatgttctcgtgccgctcgtgccnnnnnnnnnnnnnnnnnnnnnnnnnnnnnnnnnnnnnnnnnnnnnnnnnnnnnnnnnnnnnnnagctg

SEQ ID NO: 7788 - DNA, 302 bp, Homo sapiens
tacaactccaaggatctcacaagcatgaatttgactcccgatggaaaagcttcaacttagtaaagaaatcaatggaaaatcggctccatgggaaaaaacaacatatcagagcactgttgattgatagagtaatgtaacagcatgagctacggacactacctgttgagggttgtgattccaaaaggatccatcaggatatgatcagagatctcctccgttaacctacaggtccatccatctcagttgagaattaggcgccagcaaccatttttggcggccttggagcctattacctccggtgc

SEQ ID NO: 7789 - DNA, 386 bp, Homo sapiens
ttttttttatttcctcctttccttcctccagtgcactgaccctgagctatagctcctgtttttatttactacctgaaacagcttcaacacgtcaaacttgagaaatcaaaacaaatgcattcgtagttttagaccctaaataatgttaaagccataatcggattcagagggcctcctgtggtgtcactgtagttctgttccaagcactgtgagcgtggggagcattattccatagaggcctttaaccatctgatgcttaaattaaccaccatctctttattccacaaaaatccaggcatagccctttattccttgcacatagtagaagtctgcctaatgagagctaagacaaggtctcaaaaaatttccttattctgatttctggg

SEQ ID NO: 7790 - DNA, 356 bp, Homo sapiens
taaacagggtgaaaccaagacgtgcatgttaatttaagatatgataaaaggttaattcggaaaacataggaggtggagaaagatattgggttctacatatcatgacatcaaaagggaatgagagaaaaaaaaggcagaggctaattatcccttttgagaaagctttataaaagaccaaagaaaagggtatttaacaagaccctaaaatttctatcaggaaaaaaaaagcaaacgtggcaggatggggacagggtatcactgaaaatgaggctttccgtcccagtaacagcaaagatttgctcagttgctgaacagctttcaatatagtttccatacccatagcagcaattgcttga

SEQ ID NO: 7791 - DNA, 335 bp, Homo sapiens
agcctgtgggaaggccactggaagctcagcctccgggtggcatgactttgccccttgcatggggcttccctggttggggaccaggcagctgaccagggtggcaggtgttggctcagggaagaggctgctcactcttggcatcttgacccctttgtccaggatcctgctctgcaacatccacttcctgctcccgatctccctgaaggggctgctgcttgtgggcctgctctgcactgtgctgcaagtgagcagtgctaagggggcctccagggggaaataaagtcacagcctgagccggggaaccgcagctcccacaccatcaacaccctcggagg

SEQ ID NO: 7792 - DNA, 359 bp, Homo sapiens
taacagatgggttgattttattactcaaatcagattccctgaaaatttggaggctagagttttttcaagatagttaggtgggctgggggctagggaatgggtgctgctgattggtcaggggtgcaatcatagagatgtagaaaatggttcttatgtgctgagtccacttctgggtgggggctataggaccaggtgagtcttaagtcttgggtctcagtggagtcatccaaccatcagaagtgcagaagtctgaaaagacatctcaaaagtccaatcttaggctgctttgagccaagcatttccccaggctcccaagtagcttccattccagcagagaagccatgataacccaatcaaat

SEQ ID NO: 7793 - DNA, 144 bp, Homo sapiens
ccatgagtataccttctgaaatgatctgtttcatcaatctatttgtctttctcagtagttccacattgtcttaattatagctttagaggaagtcttgaaatttggtagtaagtcttccagttttgttattttaacaaatttctc

SEQ ID NO: 7794 - DNA, 467 bp, Homo sapiens
  misc_feature (1)...(467): n = a,t,c or g
ggagttatttaaggcaaagcaataaagtgaaaatcctggggtattttcaatattaagccactcaaaacattgtactgttacaatgcaagtttactgtgaactgacttttttttagatagcaatagctatttaggtttttttcccttatgatctcttcaggtcctcattgagatatagtttaggatctgtcagaagcaagccagtttgcatggaagtcattgtttcaggttcactgtgaccagatgtggtcttcctttaaattggtgttaattggaaaaagtaacacttttagaattaagaaaagctctgaatccattttctcctcgaagcaattgtggattggtctcacctcacccccactgatagtggcatgtgggaaggttctggnctttccgccattnaagttnacagcggngaagctgtcctacaatnccccaccctttcaggctgnttttacagacacttga

SEQ ID NO: 7795 - DNA, 576 bp, Homo sapiens
aagaactccagtttcccaaagagttgatggaggactggagcaccatggaggtgtgtgtggactgcaagaagttcatttcggaaatcatcagttcaagccggcgcagtctggtgttggccaacaaaagggcccgattgaaaaggaaaacgcagtctttctacatgtcctcgccaggcccctcggagtactgcccttcagagaggacgatcagtgagatctgagcctcgtgcctttcagctgcttttgtgctacgagtcagcgtccgtgcgcgaggacactgagccgggctggctctcctttctgtggttttatttaatgggcttgaatttgcattagatcagatttttgccgcatcacattgttccacagactgaatgctgtgttcgtatcgattgatgaaacgtgacaggtccgccaattgctcgtttgcactgagagaggacaacagtttgaaacttacttttgtgtgtgtgtggctttggaagccagtagctacttccttagttcagttctttactgttcctcgaataatctcctgactaaggcaaaaaaaaaaaaaaaaaaaatctttaatta

SEQ ID NO: 7796 - DNA, 1519 bp, Homo sapiens
gatggaaagccattttatttttctctaaattttaaaatagaagactttaatggaaaacatttagtaccatcatgtcaccctgaatgccagcaatacctcgacttttacacacgcaggaagcctagtaaaagccccgtcagtagtacacatttctctatggtccttcaacagttttgcatatacaaaattttctgctattttgctttagcaaacagcaataaacttttgtgtttcctatatgacacctaatatccagtcctacagtaatatagttagaaaaataaaaggcttaaaaatttcatagtacgagttcatggtgctaataacagaatctctttaaacataagatcattttaagcctcttacataaccaccttctggtttcatttgaaatccttaagaattaaaatctagtaagattgttaaatcaacgtacgtcaatcattcattttcacttgccttgggagagttaattcccactgtccactgaatgaaatgcctttcaaaatattaataaatatattacagtatttacaagcattcttatacactccgacactgacagggagttaagccatggagagggaagcacaggtttcccaatagtgtgacttcatgacgtatgggacaaaaggaaccggtgctcaggcctggagggagctgagatgagagcagggatgatggttcagatacgcacacatgctctaagacacatcagactctagctgagaccagcccagacatttcttttgttgttggattagaagtaaaagctgaacaagaaaccaggacaaggaaggaagaactggaagctatgccctaaagtcagacccaggctaaggattttaaaaccaagctcccacaagctcttagtgaattaccctgtggaaactatgtagctgacgtgaagtgtggaggggggtggtagaaaggggggttaaatgtaagactttgttttggcaacaaaaaatgatagtaatttgatttctacaactttaactgtgccatgtgccctttcttaccccactttctgcagattgtttcatatgaacgtaccctccacgtgacctctttaatgcacttggcaaactccgttaatgctgttgaagaatgtatgttctgtgctgtggtaagaggtgatcgtaatgcccaaatcatccaatacactatcataaagtgaagtgaaagacatgtactagatgtttgctttgtgaatgtgaatgaaagtcttattttgggggtgtagtttcttatgttttaataaaaacagtagtcattattttaaaaagcacattctcctaggtgcatatttatatacatatacaaataccatttccttcccccttgtgcccttctgggtagtcattttaaaaactcaagcctggggtcatcaaaaggggtagatttatactcccacctaactgtctggagtatagagttcagatagtctcttaggaagttttataaatgagattcacccagtacaattctgaaagctcttaaacaggagtctttaaag

SEQ ID NO: 7797 - DNA, 695 bp, Homo sapiens
caacctaccaagtattattctttaaaactaagcatggatgttgatggctaacttctgcggcatataagctacagatctcaagttacttctctaactgtaagcatgtaaatgactttaactcctttctataagttatgattttaaattttcagataagaattgcattttaatatggatatgtgtgcccttaaaagctacagataccaaattttcctcgtccaggtctactcggacgaattttcccccttaatctggccttaaactgagactcggcccttgagagccagggcctggcccagcagtagttgctcatagacctgggaagcaggggcctgctggaaggaatcactagattgctgcaaaaactcacataatccacagtttcctctttttctttttaaaataagttatcaaaatgttttaaaaacactttatgagaccatagtactcagtgccttttgtgagacagtgggtcatttagccttcagcttccctgtttttgatgtagagaaagcttctatttcactggcctcatcccacaagattgtgcgacctttccccgtcatagcctgtcgtgacaatcacgctattgaaagtggctttctagttaaaatgcaattggaaacttgacagtctctaaatgaattaaaagtttcctttggggctatttagcttaacagcagtctacaaataat

SEQ ID NO: 7798 - DNA, 488 bp, Homo sapiens
  misc_feature (1)...(488): n = a,t,c or g
ggtggtgcagctagaagggctggagaatgccactgcccggaaccttctgggcaaactcatcaacatcctcctggctgtcatggcagtccttttggtctttgtctccactgtagccaactgtgtggtccccctcatgaagactcgcaacaggacgttcagcactttattccttgtggtttttattgcctttctctggaagcactgggacgccctcttcagctatgtgggaacggttcttttcatcccctagatgatgctggcacagaaggcattgttccctaccctctggcgagtgcatgcagcagagagttagacagcaacttacctactctgaagttttctacaacaaaaaaagagttgagtgaatctgtttacatttagaataatgntnttttcttcaaganacgcanttgcaatnggattttttagattntatccnanaanntttttgggcgannatntnggnncatttttatgtagcatggacc

SEQ ID NO: 7799 - DNA, 361 bp, Homo sapiens
  misc_feature (1)...(361): n = a,t,c or g
cctgttctggtagattcactcatgcatcatcaccagtcctgtggggaagtggaaatttggtgtacataccaggtgcactttcattcttctcaaaatgttatgacaaatagcaaagagaacaccttttcttttatcattagctcatccttaagcatctcgttaggggtaaagcaattaaaaaaaaaaaacaagttttagctggacgtggtggcgtgcccctgtcatcctagctgctctggaggctgaagtgagagggtcccttgagtccagggagttgggaggctgcagtgagctatgattatgncactgcacttccagcctggggtaacagagcnaagactcttcatctctggnaaaaaaa

SEQ ID NO: 7800 - DNA, 389 bp, Homo sapiens
caagctcataggttgttcccgcttgaaaatgcctcaaaacaggttctggttggtgtcgggctcctccgtcagcacctccacagcctcccactccccggatcggctcgacctcttgatggcatccaaccacgctctgcatgtacagcccatcctcgaaggaggcggccatggagacaggggtgcggtcccaggtgcgacggtcgccctgcccctggaaggaactggcgcaaggcctgcaccatgtagaccatgcccttcaggtacagcagcgggacatcctggggcccctgctcaggcagtcctgcgcccactgccagcgagtccctcaagagcagctcctcttgcgtggcagagttcttctgcccatagaggtcggctccccgggcgaa

SEQ ID NO: 7801 - DNA, 558 bp, Homo sapiens
ggtagacaccggtgcatcctacatctcaggttctaccagctccatagagaagctcatggaggccttgggagccaagaagaggctgtttgattatgtcgtgaagtgtaacgagggccttacactccccgacatctctttccacctgggaggcaaagaatacacgctcaccagcgcggactatgtatttcaggaatcctacagtagtaaaaagctgtgcacactggccatccacgccatggatatcccgccacccactggacccacctgggccctgggggccaccttcatccgaaagttctacacagagtttgatcggcgtaacaaccgcattggcttcgccttggcccgctgaggccctctgccacccaggcaggccctgccttcagccctggcccagagctggaacactctctgagatgcccctctgcctgggcttatgccctcagatggagacattggatgtggagctcctgctggatgcgtgccctgacccctgcaccagcccttccctgctttgaggacaaagagaataaagacttcatgttcacaaaaaaaaaa

SEQ ID NO: 7802 - DNA, 326 bp, Homo sapiens
cctggtctgacccaggcctgcctcccttccctaggcctggctccttctgttgacatgggagattttagctcatcttgggggcctccttaaacacccccatttcttgcggaagatgctccccatcccactgactgcttgacctttacctccaacccttctgttcatcgggagggctccaccaattgagtctctcccaccatgcatgcaggtcactgtgtgtgtgcatgtgtgcctgtgtgagtgttgactgactgtgtgtgtgtggaggggtgactgtccgtggaggggtgactgtgtccgtggtgtgtattatggctgtcatatca

SEQ ID NO: 7803 - DNA, 819 bp, Homo sapiens
  misc_feature (1)...(819): n = a,t,c or g
gtgtgtgtgtgccatgcgcgtgctaagaaactgcatgttaagattccacctactgaatcatgagcggaggaagtcgtgggacacatggctggtggagaagccatctagcatattattcaagatgacaccagctccaagtctggaatgagtctgtgggaaaccaaggtacttcttggacattcacctataactcacgtgtttcgtggactggtcacagtggttcggataaattgaacagaactttatgaacacctcccagcaccaggtgttgttatagaaactaagaacagagcaatgagaaggacccaactcctgctctcaaatggatgcagtggaaaataagcagactttgaaccattggttagtcagaagagacttgagagactgaaaacttgtttcaacttggggccagaacaaaaaattaggaagcaacacttgctgccaacatgatttacaagtgccagcacctttcacctctgttacttccttctcactacacactgaaagcagttgctcttgttttacatggacnnnnnnnnnnnnnnnnnnnnnnnnnnnnnnnnnnnnnnnntagtggaattgagattgaatcagttccaactgacttgcaatcttgtgcttttcagacgatcccactaattgtccatatctgttccaaagccaaatcaagaggaacaagagcaaaatctgtcctctcatattattcatggtcctgcgtggatcataaatggcatgctgactgtctgatggagacttacttttccttccccctggacacctgccatggaatgacagaggctgtattttactgagtggagg

SEQ ID NO: 7804 - DNA, 464 bp, Homo sapiens
gacagcagacgtaagcagagagaaatcagagagcttagttcttcctctggggcgcactttgtggttaattaggacatgcaaatgagctagaagctcatttaatatcctccctgacatgtagccccaccccaccctgccccacttccctggcaggtacaagggccacctgattggcccaggtatctgtggaaggttccacctgcttctttgtggcccaggggaacagaaaagagtccctgctgggcatggctagtggggccggcctgggtctccctcctcccttttctcttcccaacctttcagacttggggacctctcttttccctcttcctcagacacttcccttgtgccccgcccctcagggtgatcttctgaaacccaaacttgccccaaagaaggttgctctgtcctctccacatccccatcttccttccctaggggccttgttgggggagagggttctt

SEQ ID NO: 7805 - DNA, 535 bp, Homo sapiens
  misc_feature (1)...(535): n = a,t,c or g
cgtcctgggagttgatgggcttaaaagaaaagagatgaattttgaccaatccctaacaaagaacttgcttttgttttaaaaggccttacactgacaatcactcagatggaattaatatgcatgtttttctcatccctaagataaggtctcttgagctgctttttatctaaagaaagcagaagaaaacagcgaaattcaagaaaaaaaatctccaaggtggttggcttcttggaaagcctgaatggtggccaaggaccacctgggctcccaaggagtggagggaggagggattcagttccacaggaaataaatgggaacagcccggtggagaagacaatgacaactgcaggacaacacctcaaccactccagaaaacagcccttgctcctccttctggccttttcatatttccaagttactgttttaaaggaaaaaaaaaaatgtntgtgtggctgtttatttctctaatgtgacaaaaacatgaccatccgggaggagaggggcttaacggtgcaaccaactgaggctggaaaca

SEQ ID NO: 7806 - DNA, 142 bp, Homo sapiens
gaaagggaagagaggagaatccattccctgccagccaggcagctgctcactcccgtcagccccattttggggtgggggccggctagataaaacttttattctcctattggagggtctaatttgtcccaaaataggggcaagt

SEQ ID NO: 7807 - DNA, 275 bp, Homo sapiens
ggttcccttttctccacatccttgccagcatttgaagtccacatgaaagaaaattatatcttctgttcagttttgagaaaaaagtgttaaaagatcactgaagttggatggtctgttagaagaaaattcatttgatccttcaaaaatcacaaggaaagaaaagtgttataacttattctccaacaactggaacttggcaaatgagtctatttgcttctccccacaagttctgaagagcaaaagcacagaaatggactatcaaatgaaaaaaaaaa

SEQ ID NO: 7808 - DNA, 382 bp, Homo sapiens
  misc_feature (1)...(382): n = a,t,c or g
gcagtggaaaaaagtgactttatgatgaaagagtgcagacaacagcttagcactttaccgaccttcgccaagattttttggggcccatctgcccgtgcacggcccatctgtgacctctccatgggcttagtgaggtgtaggcacaaagccctaggctggcagccctaactagctggaacctgactctccctggaactgcttccttgccatggaggactcacatgatctcagagggcctctggttttataagcgttttttctggccccttctacccctcagggaattccaagggaagcngggtgtgtgcttgggagggttgactgtaaactgantagagccaagantgggacagagtaagttcccaggacttgggaaaaattg

SEQ ID NO: 7809 - DNA, 407 bp, Homo sapiens
  misc_feature (1)...(407): n = a,t,c or g
cttcagtaggtatatttatgcacgtctagtctgtttcatgctggataatatagtaggatgtggtttttgatcatcacttctgtttgatcctgattgcagatttggatatggtcagattgaacatgttctgaccctgggaagtttctataaaaactgaactcagttgcctttgttttgtttttcttccacaacaaggttgttcctctgaaaggaaaaacagagagttgggctggagagctatggggataattgactaaatgtagggattcagaaataaaacttgagctagaaccgtagtagtctcacacgtacaacatgcccaacaaatgacccaatactctgtggtttcagcaccttcggtgcagactcttttgntttgatatagctttcagacaggncttactctg

SEQ ID NO: 7810 - DNA, 414 bp, Homo sapiens
ccttcaggatgtcattatggagtcttaacttgtggaagctgtaaagtttccttcaaaagagcagtggaaggtagtgtgtgttttgaagagtttatttttcctctacttggttttcatttctcagggtggattttgaaatttccattatatgcaaagcccatgaaaggctaaatatcagttaagaggggagaggagggtggctcctaggtcctctaatgggcaggaaagtatttaaaacaacaatacaaaaagatctagaataaaatagaaaagtacaagttgatgtctgggagtttggtcagggagcataaggtaacactataagaaagtgctatcatatgaaatgatggtgttaagtttgggcataacataatgttcattgtattagaaacatgggctttaacttccataagc

SEQ ID NO: 7811 - DNA, 381 bp, Homo sapiens
tgttaaaatgatttcttttggtggagtgctgatcttttttatgattgtttcatatagataagaacagactacaaaaaaatatgcctttcaatcctgaagagtaacctgaactatacactagttttgtgctttaattttcatttgtaatctgccttcaataaagagttaagctagtggaatttatgtcttagcttgttataacacaaacacgaatatttgtctgcttggcattaaagggtaaagatattccatagctgggaatcttaatctgaggtacgtgtaaacattcagggactatatgatctctgagaatttgtatgttgtaagtctttgtggcagtgtatacatttgtgttgcaacttattaacacatacaccgggc

SEQ ID NO: 7812 - DNA, 463 bp, Homo sapiens
  misc_feature (1)...(463): n = a,t,c or g
gtgtncttngatacccgtnnnnnnnnnnnnnnnnnnnnnnnnnnnnnnnnnnnnnnnnnnnnnnnnnnnnnnnnnnnnnnnnnggcacgagaactggcacgaggatgaacaaagcagcataacaacaaagatggctcagaaacagagccccacttctataatgaccaccttttcaacaaagggaagggaaagtctttttaacaaatggtgctgcaatgcccatatanaagaagtatcagaaagtantancaatgagaattgtatctcctcannanttgaaaacttctgctaatcagacgacnccatacagaatatgatttggcangccgacangttnanaaantnnttnacanaacntatttgacnatnnnctantagtncnncgcanntnnttcctgnntntttgccntnangaggnctnngtntatgccnnctnnnctttcnntganttnnaacntnggtg

SEQ ID NO: 7813 - DNA, 681 bp, Homo sapiens
  misc_feature (1)...(681): n = a,t,c or g
gcctctcgggggtgtgtttttaaattgtcaacagcttccacatggtgtttatatccttaacttttggcattgggggcattcagatgaggtcatccgcttgggtccatttcctgagtgttgatcattttgcgacacagagaacagcgtcttctattcttagagccttcaagcctaaatgctccctgcctgggctccaggcccatgcccccttcctccccacccactttccccagaaaatttttgttgtggaaaattacacattcacaaattgtgtttctttcctcacaccaagcatattcccacacagagacagattctggaatgatctcatggatgactcatgccattatctggctgtttataggagctgcctttagacaaagatttggtcataagctacgttaagaccccttcattgtcttgccagttgcccttgcagggggatgggcttatgggcttatccgatgggagtcctggagtggggagtgggggaagggganttcttaggacttaaaaagctngctttttgganttccactttttgttcccatccaactgtngggaccctggttcccattgtncttcttggaactcttggnaggcaaccttcntgcttngatgtccagccaagcaggcctgggtcccaagatggccagctgcacttgtantccgggaaggggc

SEQ ID NO: 7814 - DNA, 1202 bp, Homo sapiens
tttttttttttttttgcaaacaattaaactttatttgaaccttaaaaatttgcagagtggaacattattgtaagatctaatggcaatagagtacaaattcagtacagagcaaataatcaagcaaaatgctatataaaatatgacttacaatcacctttgaaaaaaattagctctctaactgttcacagaaaaacaaataaaagctaagcaaacataatgagaccatagcaattagcatattttctaacaagccatgttgtttaaatttatattaatgatattattatgatcttgaagagtatgtgatatattgtcaagggtgtaaagaaaactctccctggtttgtatacaaatgatttcatcaaatgaatataaagcagtcatgaattgaaagtaatgattatttgtcctgtcactccagttttaagtcttttctttcctttcttatgtctcccacctatattcaagttttaaaagaacaaaggccggtggagatctgaacagaaataacaccttatttctgtattgtcactgttcacgagactatctggcttggaactgttggtcatcagttggcaaaggactccctctcctggattaactgtaaaaggaggcagaaatctagatgctttccatcatgggcgagtttgtgccatgggggaagggtttcaagaggttttgtctgcaatgaaaagctgctgccatctactggcctaggactaaaaacttcttttcaacccaaagcacaaacccaaatccacaaaggctacattgtcatgggaaacaacggcttttgcttttcagctgctcaagttttgaaaaccagtccactaaagtcgtctttggttgtctaacttttgccaagataatttcagtctatttcaatggcactatatgaggaaaaggtaagaactgcacaaatgtaacttctgaaaactttaacttcacaatgtctctctatataaacttgtttactcacaatacctaaaatcaaatttctttttttttttcacatttgagattggatgatcatgatattgagggggtaatggtaaagcagaccctctcaaacactgcttataaacagttttacacaaataatggagattttaaaatattaccagctcagatacatgtttagaatctttataaagcaaagatattgaaaagttccataaagataatacctgataggtaatgat

SEQ ID NO: 7815 - DNA, 131 bp, Homo sapiens
attacatctcagaaacagcacaattctaattttagtgacaaaatcaagaaaatgaattccctcctgagggtggcttgggggaaaaagtgctgagaaaaaggctggaattaacactataggtcaatagttgt

SEQ ID NO: 7816 - DNA, 480 bp, Homo sapiens
aaactgatttctagttgactttggctattactaaattgtgacatgcatgcacttctttttaatttaacagttgttttctgctgttttctcagtttgaaagtagtaattatgaataagaattcctagaaatattcttcttccataatgatatgtcacagatgtttgagtgctacacacacactcctctccatttttaagtcaatttagtggagataaaatgtagataatagctgtgtgttgtaatgactctgggcccactccccagaggctctgtatttccataagttatggggacccctctgatctttctgaaatggccaccatcagatcattgagacttgacgtgcagtttaaaatgtgtgtttctgagatttctatatatgatttggacacagaataacttgtgctgtttccaaaaccacattctttgtcctcttatagaacccccgtgaaaaggaggaagccgtggccctaaaatgt

SEQ ID NO: 7817 - DNA, 433 bp, Homo sapiens
gcttttgagattttctatttatcactggtttgaagcagtttgattaagataagaccttgtatagttttctcttttacatattgttctactttatttagtttcttgcatctgcatgcttatagttctcatcaaatttgaataataatgacatatatagtcttacctatggcatatacaatatattatatttggcatacatacatcaaatatatataatgtatattctattctttctctctatcttctccttcaaagactccagttatatttgtattagctgctttgaaattttaccacagctgactaatggtctgttcatttttgctggatcttttctttctctctgtttctttctatttccatgtcttggaattgattaatctttcttcagcagcatctaatctgctggaatcctatccaggtgtattttcat

SEQ ID NO: 7818 - DNA, 321 bp, Homo sapiens
gaaaattgtttttaagtaactttattgtataccaaaacaaagctcaaataattttaacacaaaatgcaaaaaaatccagcacccaataagttacaatgctcaatgtctaaccccaaataaaataatgttaggaatgtagagaaacagaaaactgtaatccatgataagaagggggaaaaaaatcaatctacttaaactgacttagaaaagacacatcaggtgagaattaaaaaacaataaaaaggacacagatgagagaatctgtagataagcacattgaaacaaatataactgtataccttgtattaaagaagctaggcc

SEQ ID NO: 7819 - DNA, 325 bp, Homo sapiens
ttgattttaatttaggaatgaattttttaaaatgcatataaccagctcagggtctgtgcttcatcatcaccctggctttttttttgtgctaatttttcctcttactacttttatgagtaccagaaaattatccaaagctaagagaagaaataaaacactgtttttgctccttattaataatttgcttctaagtttttgttagagagtaggtaaaaacgtttggcaaagtaagattgctcatagagtttagctatccatgctttgtttttacctttacgtttagttttatggcaggggaataggacttgttgaagggagtgggaaa

SEQ ID NO: 7820 - DNA, 3060 bp, Homo sapiens
gcagaaccacagagaggctacagccgtcctggcctccctccggccctgagagctcctctggcctgtcccaagtcttaacgtctcaagcgcagactgccggctccgaacggggagaccaggcttctgcaccggaaacaaggcaccggttgtgacgtcacagccgcagagcgcccgacttcccagaaggcaccgagtccctgccgttctcctcaactggcggcggcgcgaacgaatagtcgccggcgacctcttggctctctggcagatttcctctagtaagaggtggctctggaggccccgcgaaacgagtgtggtgtgtggttgcaaggcatgatggctgcaaaagtggttcctatgcccccaaagccaaagcagtcctttatactgagagttccgccagactccaagctgggccaagacctacttcgagatgccactaacgggcccaagaccatccaccagctagtgctggagcacttcctcaccttcttgcccaagccaagcctggtccagcccagtcagaaagtcaaggagaccttggttattatgaaagatgtgagctcaagccttcagaacagagtgcatcctcgtcccttggtgaagcttctgcccaaaggagtccaaaaggaacaagagacagtgtctctgtatttgaaagctaaccctgagctggtggtctttgaggatttgaatgtatttcactgccaggaagaatgtgtgagcttggatcctactcaacaactcacgtcagagaaggaagatgacagcagtgtcggggaaatgatgttactggcagtcaatggcagtaatcctgaaggtgaagatcctgagagggaacctgtagaaaatgaagattatagagaaaagtcttcagatgatgatgaaatggattcttccttggtctctcagcagcctcccgataaccaggaaaaggaacgactaaatacatccattccacaaaaaaggaaaatgagaaatctgttagttaccattgagaatgatactcctctagaggaactctcaaaatatgtagacatcagtattattgcccttactcgaaatcggaggacaaggagatggtacacttgtccactgtgtgggaaacagtttaatgaaagttcttacctcatttcccaccagaggacccacactggagaaaaaccctatgactgtaatcactgtgggaaaagcttcaatcataaaacaaacctcaataaacatgagcgaattcatacaggagagaaaccttattcctgttctcagtgtggaaaaaacttccgtcagaattctcatcggagtcgtcatgaaggaatccatataagggagaagatatttaagtgtccagaatgtgggaaaaccttcccaaagaatgaggagtttgtgcttcatctgcagagtcatgaggctgagagaccatatggttgcaaaaaatgtgggagaagatttggtcggctgtcaaactgtacccggcatgagaaaacccactcagcctgtaagacccgaaagcagaagtaatactgggaaccctttctgggtctgatggtgctgcctcaacctgagagctttcataagtagttctgaattcccaagctgcctaaaaaggtataaatgtgtaaaaatctcattattgccaaaattggataaatgcccatcttagctaaaacctcaaattgctagaaaattcacagggaagaaaacatttcaagggctatacctcagcatctaggctttttggactaaggagctttcctttttgaagttatatgataatgtacaggtcacagatcccctttcccaacactttgaagatgaatctggagtctgcttacttggaaggcaaagagtgacttgtgtctattgaaagtatatccgttttccccccacatggggattcatacttgagaaatagtgcaaagatgcttatctggaactgtgttctggtgaaagaaccaaattactggcttgttagccaacagcttctgatagcaattcatataaccctctaagaatacctgtttaagtcttgagtgttgaaaggaattgtttactttggaatataggaaaacagttgaatgtcagactctcatttgtatgtgatctaaatttgcaatcaatttcaataatatttacaatttgtgataaaactgacttttacagattccttttcacaacataatttaggtgtctactgttcttattgtattttgttctgctgttgatctctccagcagccgtctcatgcttctcccttgctaaaagaagtttggattactcaggcagggccatccagccccaccactagaaaagctcttcagaatcttgtccctctgttgagcccagatctcatgtgctacgaaggaaaccccaagacccagagaggaagggtcaacctggaggcaggaaaaagttggcttggatccatgtctcatcaataaccttaccatatgcttaggtcccctctatgctgtcatcagacctttggcaatggggtggtcactacctcacaaggcaaagtgttgtatgattagaaattacgtctccagtggttagctcacattgcctctcaagagacaggtttccaggtgtcttcattgtagtgggtattaattgtcttcagcctcttgatatccataccttcctgtcctctgcctagaagcaaggccagcggtgcctttacggactgatcgtgtggtgcgatttagggattcttcagttttgcttgctttaggtttccaaaagttatacattggtgttttgattggaataaagaaatcctataagctatttgggaaaaattatagtgtatgtttcccatccagaaacatgcctttctatttattagagtattatattcctgtgaaaatttttctaattttcttcacttgttttacacaattttgttattgtagttttttccattatatttttatagttgattattgcttttacatgggaaagttatttttaattatatatttgtatagtcatctcactgttgttaattttcaatagtttgttggtttagttctgttaacttttggtaaaatgacaccatctaca

SEQ ID NO: 7821 - DNA, 181 bp, Homo sapiens
cttgctagcgggatcaaccttactgagcagtggccataccggacttcatggctcatattatatttggaagagactgaaggtattccagatcaaatgacattaaaaaccatctacgaaagtgtccttgatgtcaggacctaggaagaagatcatttgcaaaccaaaaagaaggcccttaccg

SEQ ID NO: 7822 - DNA, 385 bp, Homo sapiens
ctgtctgctgaaaagatgatgtgttagaataaattctcattctcgtttttgaggagcagggcaaaaaaaaaagacttgtctctggcttttttcctattttatttcttgtttctttcttgaagtaacgaacaataatttgtgataaaagaatacagacaagacacctgattatccacatggcagtgtcactgcaggtcccatcacctgcaagctcgcttgctgggccgctagggagcacttgggcagtggcagctcccttgtcctggggaaggccctgagaaatcagatactccgttggtactctgtgttctctcgggacatcattttccactttcaggaactgtctgttcttttttgttcagcttacaagtaaacttttggggaa

SEQ ID NO: 7823 - DNA, 329 bp, Homo sapiens
caaggttacaaacacaagaagagcactgtattttcatgaagcggaaaatgtgctttacaatcgccagctactaagagccttaacggtgaagcgctctgcaagaaacaggaaatcgtcaacacactttctgcatgaattgcctggagagttgtgtccatagacaattcctggttagatgcttaattgtagcagactccataacggggtttagcgggtttccattcggcagaaagggctccacgttctttttcacagaaaggtttatttttcctcctcaggcggacgaagtgagcgtcgttccgtgaaggtatgaaacccttttccttcct

SEQ ID NO: 7824 - DNA, 200 bp, Homo sapiens
gggggaaaaatgactagaaggacagaaaccaacatataacatgattgtgtgcatttacttatttaacaaataattgagcaatttatttctgtatgatactattctaagcgttttagagttaagcaaactcacagtaaactgtattgcccatgataaaaactgcagttacataatttaaaagcaagaatcgcagcaattca

SEQ ID NO: 7825 - DNA, 1746 bp, Homo sapiens
  misc_feature (1)...(1746): n = a,t,c or g
ttttttttctttaaaagatatttaaattcatttgaaatatagttcaagatgttgactatacagatcaacttttatccaaatcgggaaaactagctgtgccgttgcatattacaggatacagtcaatgatatgtggacatgcatcaaagctttctcctgctggtgaccatcatagccgtccaatgaccatgacatccaccacctcgcctttgtggagctccacgtactgttctgtctttggaggtagcatcaacaatccattggcactgcgcatgctcatcagacggctgctcatttgattacctgtactctgtgcccaaggtagtggttcttggtgatgccaagttagtatacaccgatggtattctggacgaggatcaagttttacatcacatgataaccttgctttgatgatggttggccgaggatccaagatgccctgcattttcctcagtgcaggcacaacaaagagattgcaggtgaccacagccgatacaggattcccaggtagtgcaaagattatttttcttacaccatcaatatccaaagttgcaaatgttgttggcaagccctggtttcataaaaaccctgccaaaatggatctgagcatgaagatcaatgtccagcacctgcttgagatagtccttttcccccatggatacaccccctgatgtgatgatgacatcagcacgactgataccctcattcaaggcattgagtaagtcatctgggttgtctcctacaatacccaagttgatcgtggggtaaccatgttcctgaattgttgctagaagagttgaacgattgctgtctcgaatcttccctggtaagaggtcatcttcaggaatttaagcagctcattcccctgttgaacatgactgcaaccactggaaaacttattaacttcaacctctgtgacacctacagttgccagaagaccaatctctgaggggcccatgtgggttcctttggccaaaacacattcccctcttttaatgtcatggccgatgggtctgatatcttggcctggccgagcttgcaccagaattcgcacttcaagttcttcagtgccatcatctgattccctgataagttcggtatcttccacttgtactactgcatcagcaccgcagggtattggagcacctgttgtaacccgcatgacttgtcctggcattactgtctgagttggctgttcaccagcttgggattccccaatgatgaaacgatctcctgggccatcagcagctcggacagcatagccatcttttactgatgctgggaaggggggtaaattgtcttttgcatatacatcttgagcaaggactcgccccattccatctcggtaattgatgatttctgtcccaagcaccggagtcatctccaggactgtgataaaggctttgtccatagatgtcagaggaaaaggagacatgcgatgtcttctagccaccttggtgatatcgacagcactgtgactggctctgagatctatggacaaagcctttatcacagtcctggagatgactccggtgcttgggacagaaatcatcaattaccgagatggaatggggcgagtccttgctcaagatgtatatgcaaaagacaatttaccccccttcccagcatcagtaaaagatggctatgctgtccgagctgctgatggcccaggagatcgtttcatcattggggaatcccaagctggtgaacagccaactnanacagtatgcnnggccaagtcntgcgg

SEQ ID NO: 7826 - DNA, 238 bp, Homo sapiens
tcacacaggacctttggccgctccttgtccagcgatcccagggcggagcaggctatgacagcaattaaatcgcacaaacttttgaaccgtccttgccctgcagctgttaagtcagaggaatgcctaactctaaagtcgcatagactattgactcgatcttggtctggagatccacgatgtgagcacaacacaaacttgaagccccataaactgttaagcaggtcttactctataatct

SEQ ID NO: 7827 - DNA, 679 bp, Homo sapiens
tttttcaaaattgcacttctgaatttactccacactatcaaagtttaatcagtacagtccaaaagatctatacagaggtatgattcttaaaaaattataattgagttgtacagagccagtgctcagggaatgccactgacaggaattcccgacagctccagtcattgtgtgtgcttcttgggcatgggttcaggtctgtgcgtactcggtgttgttataaaggtagtccaagagtggaggattgggaaaaggggaaggaatattcagaattggagacatcttgctttacacattccacataaattacctgaggcacacatccaaaatatcctgagaattagatacagccatttccagtttggaagaaggacagaataatagagaaccttctggaacttattcagaaaatcaaaggagttcataaagcaagattagtgacagaggcaagagctgaactgaagtaccttgacttattccagcactaggatttaaagcagcagctaaaatcccatctgtctgatccaggagacttgaacgcttgggcactgtggctgggaataggggaaaaagtctccatcccattgcccacacactgtgcaatcctgaaatctttgttttctacagctccctctagctagtatcagtttccacatcggggtgggtttagaagcaaaataac

SEQ ID NO: 7828 - DNA, 281 bp, Homo sapiens
tgctacatgcggatcccacggaacccacaggactgctcctctcttagatctaacagtaagaaatgggagtgtgaggagtgttcacctgctgcagccacagactacatacctgaaaactcaggggacatcccttgctgcagcagcaccttccaccctgaggaacatttctgcagagacaacaccttggaagagaatccgggcctttcttggactgattggccagaaccttccttattagaaaagccagagtcctctcgtggcaggaggagctactcctggag

SEQ ID NO: 7829 - DNA, 313 bp, Homo sapiens
  misc_feature (1)...(313): n = a,t,c or g
tgacccctgaccattttatgtactcaataaatagcaactataattcatctaatgataacaatgctcattttgaagctttaaaaatatgtaaaagcataaaggagaaagtagacataatctctagtcctaccactcagaggcaacaaatgttaatgttttaggcatcttttcttcaccttccattcacacacatatatgtccacacagttgattttggcagtgtggcaaacaactttgtacggtgtgtattagccgggggttttcatcaggaggagggaggggccaccttcangttcatggggtaggggagatc

SEQ ID NO: 7830 - DNA, 394 bp, Homo sapiens
atgctcagagagtcatttgcccttggtcacaggctaagaagaggcagagctaggacgtaaacccaactctggctctatggcatctcatatagcatcatttttcctccagtcctctgactagaaagggtggccccttcaacctggtgctgagaacagacactggcggccccacacctctgaaggcatggttccagcaaatagaaattggactggcaaggattaaaccgctggtttgggcttcattagctatgtgatctcaccaaccacagagaattaaccagagtggagccatctctttacagacttaacacaatgtaccgaggcaatgtggagaacagtcactgaatttattgagcacctactacctgctccagacatgccattaacacgtggg

SEQ ID NO: 7831 - DNA, 86 bp, Homo sapiens
gtggaagcaagtgatggatcaagcaaatcgcttttaattttacataaattggttttctgctttcctctggggcagaagtttgctgg

SEQ ID NO: 7832 - DNA, 457 bp, Homo sapiens
  misc_feature (1)...(457): n = a,t,c or g
acccaacagtccatccacaatcttaacgattgccctctactgctccttgggccccctgtccccaaaagcctgtccaggcaagactcacagcttcagatgagtggcaaccaccagaagcggccgtctcagggctactgccatttgctttcgtgttcctcttcgctgctgctggaacaccagggcggtttctctgccaatattctttgaactttttcttggctgcagctaatttactctgtccagtttcttctgccattgtggggtggggagggaggcggggctggggccacgtcagccaaatcccagcgagcgctgatcaacacgtccagtcacccttaaagaatcagaaataaatagggtgggcatgggtggttcatgaatttaattcccagcatttttggggagggcaaaagtgtntggggtttacaagtttgaagccaccttgcctgggnccttt

SEQ ID NO: 7833 - DNA, 1613 bp, Homo sapiens
  misc_feature (1)...(1613): n = a,t,c or g
ttttttttttttttttttgagagaaataaaacaatttaatgatggcttccttgatttacacacaactctaagacaagaggacaaaattttctctccatgcactggtacaacgaagttcagggacaagaggcaacccaagtacaggggctgtggtgttcagatccacgctcagcctcgagtctcatgttccaaccgaccgtctggctcagtgactgtggacactggggagaggagggactgcccagacccctcaagtgcaggtgaggggaccggcagcagagtatgcatgggcactccatgccccagtgcgagaagtgcacaggggacagcgaacaccagcttccagtgcaccctgaagacccagtgggctcagggggcccagctctcccatcagagctgtcctcagggctggagctggggctggggctgaggcgctggggctgggagggaggtggtgataaagaaccactgcagaaaggaacacatgctgaatgctgggccatgctttcctcccagacactgagttcctgaagacccagctttatcttccaagggtaacaacattcccaagactcagagctggaaggcggcaagagtggagccaggagagacagatcgcatccactcctgaggccgcctcgaatgtctccattcccttctggcctgccttccccctcccttcaaccccaaagacccaagaagacaacggagatcagagaccacatccctcttccctaatcaaaatagccaagtacaacatttctaaagttagggagaaggaggaaaaatgccacaggcttttaaagggaagactggaaccgagggaagggagaagtagccccctgctttgtccagcctggaagctggcagccatggtgttggggccttgacccaaccacaccagcccatctagctgagcatcttgtgccgatcgaagactgtcttccgctgctcctgcacctgcagcttccaccgctgctgggcaccttccacacgctccaggactgtgtttgctcggggtccccccgagggatgcagcagctgcctgcccatagagcgagcatcctcattctcctcctcattgtgcagttgctcagtgtatgcatccggctttcggatcagagggtccaccagcatcaggaaggccatgtagagcaacagggcacccaccacggacaggtagatgacaatgatgaccttgatggtggtggtgctgcgctcctcgtacctgcactcgcacagcaggcagtaggcctccacgtcatggccaggcactggcatgggctccaccacgtgcaggcagttgcagtccttctgggatacattctggttgtaaatgtgcccactgatgtttctataaggtggacagatgcatttgcaccggatatcttcagaactctccctcaccttgttggcttcagctggggggcaccagcaaacacccgaccacagccaccaaagataagagcttcatgcttatcaggcttgctgggccagcaaagccggacacctcacattgcagtcatagagggatctgtgggtgttagagctttcagctcctgctctcgggtncattgtgggacagagcctagcagggagggagcagaggccgc

SEQ ID NO: 7834 - DNA, 868 bp, Homo sapiens
attcggcacaggcagaaaacaagagccacttgtagctggtttaattagacaaggatttactacctggcccctggtggcttgcaaaattgttggaagagctggagaagcagactctgctgaatttccaggaactcccagcgccagattcatcatgtctgttgtgaccaggaaagctgcccccatctgcaggaagccactatgccagaaagctgctgactgcagaactaggctccctctgccacggtccgtgccagccaatagatgtcctgaggcctgcccctctcccacttcactcagttcccaaatctaaatttttacaagagattctgtttgggggaacttaagtcagatccagaaccttggctgcaaggggagtctgggaaatgtcatttccctagaagggaagttagggtgggtggagcaagccccacctgcgtttttctgccacagcatccaatcgtgaagaactcgggagaggggtggagtccacatctagggttgtcctgccccttggctctatccctgcccagaggtgggaactggaggagtgggctgcaagactgagcctaaatgtctccccggccttgacttttctttctagtcctggggcctagattctgcacttggggtctctgacacaacacaccatcccaaagtagccggaagagctaaacacagggggttcttaaaatggctgcccccgccacccgggcctcccttgggcaaaaggaattgtcagccctaccccaacccttcaactaccagaatctgggccaccccagcagtatttttatttaaaatgttgcccattttatgagttatgatcaatttgtattaaattaaagttacagatgtcaaaaaaaaaaaa

SEQ ID NO: 7835 - DNA, 424 bp, Homo sapiens
  misc_feature (1)...(424): n = a,t,c or g
ggttatttatttatcatcagttgtagcagttctttatgtattctggaaccaagtctattggattccaaatacggtattttctttgtatatatggtaaatagaatactttctcttttaagtcataagatatattttaagatattaaatgactaaaattatttaggtcataagttaaatatttttttcctgtggtggtattttttaatcccttctttccacctactcactttttggaatatctgtagcaataatagtaggaacagtagatgtgcctttggagtgaaaataaatagccatttaaaacataggcctttatcaacatttagttctttccaatttaggaaatgggagaatggatggtttgagtttttaagggggaatttaattggaatggatattttaancattttaggatggnaatccc

SEQ ID NO: 7836 - DNA, 2197 bp, Homo sapiens
gtggtgcgccgcccgggcgaggatgcggctgttccggtggctgctgaagcagccggtgcccaagcagatcgagcgctactcgcgcttttcgccgtcgccgctctccatcaaacaattcctggacttcgggagagataatgcatgtgagaaaacttcatatatgtttctacgaaaggaacttcctgtgcggctggctaacacaatgagagaagttaatcttctgccggataatttacttaaccgcccttcagtgggattggttcagagttggtatatgcagagttttcttgaacttttagaatatgaaaataagagccctgaggatccacaggtcttggataactttctacaagttctgattaaagtcagaaatagacacaatgatgtggttcctacaatggcacaaggagtgattgaatacaaggagaagtttgggtttgatcctttcattagcactaacatccaatattttctggatcggttttataccaaccgcatctctttccgcatgcttattaatcagcacacacttctgtttgggggtgacactaatcctgttcatcctaaacacataggaagtatcgatcccacctgtaacgtggcggatgtggtgaaagatgcatatgaaacagccaagatgctgtgtgaacagtattacctggtagctccagagctggaagttgaagaattcaatgccaaagcgccagacaaacctattcaggtggtttatgtgccctcacatctgtttcatatgctatttgagttgttcaagaactcaatgagagcgacagttgaactctatgaagacagaaaagagggctaccctgctgttaaaaccctcgttactttgggtaaagaagacttatccattaagatcagtgacctaggtggtggtgtcccacttcgaaaaatagatcgtctttttaactacatgtattctactgctcctaggcccagcctggagcctaccagagctgcccctttggctggatttggttatggtttgccaatttcccgtctgtatgctagatattttcaaggagatctgaaactgtattccatggaaggagtgggtactgatgctgtcatttatttgaaggctctttcaagtgagtcatttgagagacttccagtttttaataagtccgcatggcgccattacaagaccacgcctgaagccgatgattggagcaatcccagcagtgaacccagggatgcttcaaaatacaaagcaaaacaagacaagatcaagactaatagaactttctagaggactgaatgctgtggtcctctctgtgaagaaagattgccttctgcaagtcaaacagagagaactgctttctcccacctgctctgagcgtggcatcacacgttattcctagtgcttaaatgtgtattttctctctaccacctggactttcccaaagagtttttcctgtagctactccagatcttccactaaagtagtaactttttaatgacatcttgctgtggtgtgattgatgcctgtcaccgaagagcacagagcctccttacagctcttggtgccctcgtactctccatcttgttatcatagcatctgatgtcttcagtcgttccaggattctgtgcgcctttcccattccagatacagcagatcgtactgttgctccttgtgaccaaataccatatttgtcccaaacctccacctagggccctgggaccctgaaagtggaagacatcaggtggccatgccctgatgatttagtcccagagccctccgtctctcccgtgcctccctccgccactctatgatttagacttttgccttcttccatctgatcggattctcattgtgagatgtggtgactttcatgttagatcttcttcattgatgccttggttttattttaaaattcatttgtatatgtctgttgattaaagcattcgaaatgttatcttagaatttttcacccaactgcttggtttcaaagatcttaagtgaaaaactgcctcctggtcaataccaaatttgtacagagtgtgaagtggagtttttatgcttctgtcaaacttccatccatctaatactgtacctgtgtcatattttattcctttgtagtcttctaaggaattggaagtttctgtatgatgcgctttactagttgtaaaatagactatcagagggaaaaggcctctctagtttatttttgaaaaa

SEQ ID NO: 7837 - DNA, 496 bp, Homo sapiens
  misc_feature (1)...(496): n = a,t,c or g
gcgccgttgccagagaagccactagccggttactagctgcgcttttgttccacttgagcgggcactcttctgcggcaanaggtcataggaattcgcctggttcccacctcgcgtcccttgccttccttcctagtctacccactgtagtgccccctgcgtcccgctccctcctagccgactcagagcacaagaaggattgccacggtttccattgcagcagccgtggcgcctctgaccctttttttatatcgcggcgacggcgggctgtcgtcacgacgacgtgcggacgcagccggcggggggctttcagcttatgtggagaagtcgctgtgaagccacctataaatccatttactgaatttatggagaaggctgtaaatgatggaagtcattcagaagaactcttttgccatcttaaaactatatcagagaaagaagatttaccacggtgtanccagtgaaagtcatctcagctggtattctcatcagtatcagg

SEQ ID NO: 7838 - DNA, 1757 bp, Homo sapiens
ggggatcgcaacatctggatcgtgaagccaggagccaagtcccgcggcgatggcatcatgtgcatggaccacctggaggagatgctgaagctggtgaacggcaaccccgtggtgatgaaggacggcaagtgggtggtgcagaagtatattgagcggcccctcctcatctttggcaccaagtttgacctcagacagtggttcctggtaactgactggaacccacttaccgtgtggttctaccgcgacagctatatccgcttttccacgcagcccttctccctgaagaacctggacaactcagtgcacctgtgcaacaactccatccagaagcacctggagaactcatgccatcggatccactgcttccgccagacaacatgtggtctagccagaggttccaggcccacctgcaggagatgggtgccccaaatgcttggtccaccatcatcgtgcctggcatgaaggatgctgtgatccacgcacttcagacctcccaggacaccgtgcagtgtcggaaggccagctttgagctctatggcgctgacttcgtgttcggggaggacttccagccctggctgattgagatcaacgccagccccacgatggcaccctccacagcagtcactgcccggctctgtgctggcgtgcaagctgacaccctgcgcgtggtcattgaccggatgctggaccgcaactgtgacacaggagcctttgagctcatctataagcagcccgtcaccacttccccagccttcacaccaagggcccagctgccttctccccatgtactccgacaccagggccaggtcctcagacgacagcacagcaagctggtgggcactaaggccctgtcgaccacagggcaaggccttgaggactctacccacggctaaggtcttcatttccctcccaccgaaccttgatttcaaggtggcacccagcatcctgaagccaagaaaggctcctgctctcctgtgcctccgaggcccccagctggaagtgccttgttgcctctgccctttgaagtcggaacaattcctagcacctgtcggaaggtcaaggccaaaggcaaattcaaggccagactgtgacaaacccagggctgaggcctgccccatgaagaggctgagccccctgaaacccctgccccttgttggatccaggacaagggcagtggggaatcgaagcaggggcttccctagcttcatatcccccaggcccctgcgcctctggaatgtaccaacaaggggcaggggtttcagggggctcagcctcttcatggggcaggcctcagccctgggtttgtcacagtctggccttgaatttgcctttggccttgaccttccgacaggtgctaggaattgttccgacttcaaagggcagaggcaacaaggcacttccagctgggggcctcggaggcacaggagagcaggagcctcggtgtgaaaggaggggagaagagggagatgatcagaagtctgtggaggaaggggcttctgagggagaccagctcttcccttggggtgccagccagcctgggagctgccctctgcctgtgccctccagccctgaccccgtgctcagcactgtccactgggtgtgagtcacaggtcgaggcccacctttcttggcttcaggatgctgggtgccaccttgaaatcaaggttcggtgggagggaaatgaagaccttagccgtgggtagagtcctcaaggccttgcctgtggtcgacagggccttagtgcccaccagcttgcc

SEQ ID NO: 7839 - DNA, 321 bp, Homo sapiens
cctttgtctagatatgtcagagactcgctcatcagacccgccacggctcatgaaatgccacgggtcaggaggatcccagcagtggacctttgggaaaaacaatcggctataccaggtgtcggttggacagtgcctgagagcagtggatcccctgggtcagaagggctctgtcgccatggcgatctgcgatggctcctcttcacagcagtggcatttggaaggttaaggtggatgctgtggcgggaacgttgcttcatcaggcgttgcctccggtgtggagtttggggctttaggaaagcctgggttgggtggagcagaacc

SEQ ID NO: 7840 - DNA, 493 bp, Homo sapiens
tttttttttccttctgtacgtcgtctttatttatgagcacgaatttcaaactcagctggtatcccccagggcaaccccaggatgggaagggctggtctgtccccacccacttctccaggatcctcccagcccccaggcggcctttccctccaactgtcagctgcttagctgctcatctggggattggagctggagcatctgtcaaggttgtctccttgacaaacagcttcctctttggaaatggcttcactcaggtcctgcaggtcatcgagcaggacagagaggggacccttttatggactccctggtgggcactgctgctgctacaggtgcagatgctgaacactctggaggcctggggctggacaccacagatttcttcttatccagtagggaaggaagaactgtcaacagtcgctgctgcttgtaacgggagaggagaccttcctgctgcaaggtggccagcatgaggttcttatccctctctaagctc

SEQ ID NO: 7841 - DNA, 364 bp, Homo sapiens
tcaaccctcagtgtgagggttgactgtgccatggatcccctaaagatgtgttgtttctgggcaccagcctatccatcccttcacccaagaggtttttgggagcccctgcaatgtgcaaggtggtggttttagatgctgggatttctgtggggagcgtacattacaggtgtgagccacggtgcctggtctgaccccagttttaaacaggggttgttccccacacagttaggtttccagcttccactggaacaccggaagaggtgagcccatgtttccattggcagacggccacccctcttggatggggctttgctgcccaggtttgccccaaaccctgccactctctgctgcctcatccctagca

SEQ ID NO: 7842 - DNA, 759 bp, Homo sapiens
ggcgatcggcggcgttgaggcgggatccgggcgagccgagtgaagacctggtcctgtagacgggaaggagcctggacacagtgacacattctcaaaggccctgcaggaccaccatggcttatgatgactccgtgaagaaagaagattgttttgatggtgatcatacctttgaggacataggacttgcagctggccgaagccaacgagagaaaaaacgttcttacaaagattttttaagggaagaggaagaaattgctgctcaggtcaggaattcttccaagaagaagttgaaggatagtgaactttacttcttggggacggacacacacaagaagaagaggaagcactcctctgatgattactactatggaggacagtggttcttgttctgagtgccgataaaccagtgtgaaggaggagagaggtggagggctggtattttggaggattcagcatagaagaacagtctgcatttgtgatacaccagatatttcgtctttggaatcgtcacagaagaaaaagaaaaagtccagcccacagtctactgatacagctatggacctgttgaaagctatcacttccccactggcagcaggctccaagccctccaaaaagactgggggagaaatcctctggctctttcaaagccatttcgggagagttaaaaagggagcaccacagggaaggaaagtccagtgggaagccagttggggggaacttacccccttaggagggttgggtgtttttccccaccaaatt

SEQ ID NO: 7843 - DNA, 362 bp, Homo sapiens
ctgaaattctcaggcagtcagactgtcttaggcaaatcttgataaaatagcccttatccaggtttttatctaaggaatcccaagaagactggggaatggagagacagtcaagggttatgtcagaaaaggatgagtatcagtttcaacatcagggagcggtggagctgcttgtcttcaattttttgctcatccttaccattttgacaatctggttatttaaaaatcatcgattccgcttcttgcatgaaactggaggagcaatggtgtatggtgagtgcataaattgtgagattgatgtgaaacttgttgcttgagcgtaattagagacttgtgctcagatagcaaagtacccgaaactggag

SEQ ID NO: 7844 - DNA, 360 bp, Homo sapiens
atcctatttggcacttcttgaatttgtggcctgatgttattcatcacatttggaaacttctcagcccttaactatacaaatagtacattctcttttcccttttttcattctttctataactacaggtacttgcatatcagctttctcattgtgtctttaatgtcactttcccctcatttgtattttttgtttgtctatctcttcagtgattcatcctggttattctctgaactgatcttccagttcattgatactctcttcatctgtgatttatctgctattaaatctatccattgacttccttgttcttttattgtattttctcgttttcaggttttcagtatgttctttttgtcgacc

SEQ ID NO: 7845 - DNA, 397 bp, Homo sapiens
gagcttacaggattcctccatggtaaagctgaactgaaacaattctcaagaatgcatcagctgtacctacaatagcccctccctcttcctttgaaggcccgagcacctctgccctgtggtcaccgaatctgtactaaggacctgtgttcaagccacacccagtggtagctccaccaaatcatgaacagcctaattttgagtgtctgtgtcttagacctgcaaacagctaataggaaattctattaatatgttagcttgccattttaaatatgttctgagggttgttttgtctcgtgttcatgatgttaagaaaatgcaggcagtatccctcatcttatgtaagtgtgaattaatattaagggaaatgactacaaactttcaaaggcaaatgcttcca

SEQ ID NO: 7846 - DNA, 412 bp, Homo sapiens
  misc_feature (1)...(412): n = a,t,c or g
tcattttcttctgagaagcagcagtcacagagatgtagctaaaaagacaggacttggggtaattaggagcccaagtggcaaataaaggagtatttgacccattcaagctctgagagtacccaaactcagctcattcaggttgatggagaattggtagagaggcttcttcttaaaagtatctgcaatggaggaaaatcccctcaatatggaatttcattccaaacaaattgcagaaataggggaaggattctgtcttattaaaaaaaattggcatgggtgatgataacttgaggcaagatatactatgggtgaggcgcttcaaaaggaaaaaagcttattgttttatattcccaaagactactactattttttccacccttcccctggacttntttatttntttttggccact

SEQ ID NO: 7847 - DNA, 1268 bp, Homo sapiens
  misc_feature (1)...(1268): n = a,t,c or g
gggaccccacagaagagacgtggcccggcgtgaccgctttctctgagttccgcacctacagcttcccctgctacctcccgcagccgctcatcaaccacgcgcccaggttggatacggatggcatccacctcctgagcagcctgctcctgtatgaatccaagagtcgcatgtcagcagaggctgccctgagtcactcctacttccggtctctgggagagcgtgtgcaccagcttgaagacactgcctccatcttctccctgaaggagatccagctccagaaggacccaggctaccgaggcttggccttccagcagccaggacgagggaagaacaggcggcagagcatcttctgagccacgcccaccttgctgtggccaagggacaagagatcacatggagcacaaattcgggtaggatggagcctgtgtggccctcggaggactgaagaacgagggctgacagccagcctggaagaccgcttggcagcccttctggccacggctgtttcttctttgtgcttcccgtgtgcctccccagtagccctcacctgcataccaacccctcctttacccacgttggggctggcataagctgcttccctgagaggacatgaggggggggcggtcctcgtaccctctcccaccctggtgtttgggcacctgcgtgggatgcacacggatgacagaatcaaggcgccaggatgggcactctgccctggatacaggctctaccctcctcccccaggacctgcctagtgccagtttggtagtcccctttctggccccttggagcccacacacgtttcatctttttcccctctgagagcaagaagagacatggcatgttctctgggaccctggaatcctaggtacccacatgtgttgccaaagcctaccccacctgggcaggtgttcccacagcaacagaaggaatagtagtccccactctttccatcagccctaccctaccctcattccccgacaccctctggcttgaaccatggctgagcagtgccggcatacgctttgctggcatgcttggatgcccagctgtgtccagaggtggcctgggaccgccagttgcacgcctgccacctcagccagcccccgcccatgctcattcangtctgaantggatgttgccttaaaattggcaggtggtaccgtcactcactgcccttggagctgtgaccggctcctgcctgtccaccccttcccgaggtggctcctgcttaccttatcatcccagggctctgattagccaggcct

SEQ ID NO: 7848 - DNA, 629 bp, Homo sapiens
  misc_feature (1)...(629): n = a,t,c or g
ccagggaaaccacagacccctttcttttaactctttccagctttgcccttatggtaggttgtccttgagtcttttcccgggtccctggtttgatgggctgttgaccgtaagaagtacggtttctagagcacctactaccggcagcatgagttttaaggacttgatattcttcccaaagaacagtctcttgagtttcatttcagaagtttttaccacactctcttaccatctatactattttctttacttgatagttttctttaaataagactcagacctgacatctatagcatcttagcctcatcttcagagatgccattggtaaaattataggcttgatatactagtcccagttttttctaacatataaaacaattttaagtgttcatctatgaatcacctaatgcactcacgtagccctaatggaatatattctctttttttggaaaccaacagactccttgggatcttttttgttggctccaccacatccctttgaggaagggaccattagccccattttattgacccagagctggagcttagagacgtgagagaacctgcccagggccacttcaccagcttggaaacccaagcccagacacctcctctngagcccacaccagctt

SEQ ID NO: 7849 - DNA, 373 bp, Homo sapiens
tggggtctaattaacgaggagatttgccttctctgcctattcctgtcaacttatttcaattcatggggtcagtagttagattcaaagtcagctgactctattcttcccttttcctagaaatcacatgcctattgttaagatgctggatcattaaaagtcagaaccacagagcatcagtgctgcctactgtagacgcctcctcttccagctcatggggctggatgagctcatcctaattacatgggaaaactgaaggtcagtgcatcaaattaatgcaggcagcattatttcaaaggggcgcatgacctcccctccctattacaatttggtcagtgaaaatggttgtctcctccctgctgccaatattgtcaac

SEQ ID NO: 7850 - DNA, 360 bp, Homo sapiens
caaagaggtgccagcttgtgcacaaaatgagagaggagaaaaggatgggaggaggggccctggctctttttaacaaccagctcttgggggaacaaatagagtgagacctcaagcatgcctgaggaagagcattaatttattcttgagggttctgacccctccccaccatgcccaacaacatctcccattaggccccacccccaacattgagatcaaatttcaacaggagggacaatcatctaagtgatagcatagactcaggctatttactattctgttttcaagtatagattgagggcaacagcagcctttgttttctatgttgatggccaaaggtttatttttatattcttatactgt

SEQ ID NO: 7851 - DNA, 532 bp, Homo sapiens
attgttgtgtaattttaataattagttttttaagtacttgattttatgggcacatttttgtgggatgattggagttaatcaaataaagcttgtcatgtgtgtagtttggtaagataacttctttaaattcatgttttctctgccttgaggtagtgagggaaagatcttaatcagtattttggtaattaactgattgaattcaagcaaatgagacatcatgaacttcagtggttattgatatttcagggtatatacctgaaatgcctagaggatacagatttctcatttcattctttggtctttcatttctctatatacagaaatgaaatgacacttctgggaggcagtagaagcaggaaggcaatgcattgagtagaggggcccatttcctcaggctgtcattgatcagtgacaatttataaaaacaaactgcaaagtctgtggcaagtggctgcctgcttcctagaaggagcccatgaaggttaaactctgtggtcggtatttgcaagcgccgggcgtggtggctcacgct

SEQ ID NO: 7852 - DNA, 440 bp, Homo sapiens
  misc_feature (1)...(440): n = a,t,c or g
gtactttatttctgacaccagatatgtaggagttttcccccacacatcaaccagttctccaactgggtatccggtaactcactttaattctgacaccgtctgcctggagactaccacaagactgccttcactcagacactaatctcaattcacaggttgtgaccagtgcttctaatctactggctataagtcagggttcccatgaccactctttttgctttgataattagctaggacggctcacagggaaacactttacttatgtttaacagtttattataaaggaatattattaaatggatacaggtggaacaggccaggtggaaggtaatggcattggggcaagggtattgcgggttggggagagggtncagagctttcttgttgccccnttttggggtggcacccaaattnccccaggcatccccctgttgtttcaa

SEQ ID NO: 7853 - DNA, 390 bp, Homo sapiens
cagaactgggttaaaggatccacgtcaaccctcgtttcctggttgtttgaaaacaatgacttgagggtccaaatttgagacacgactgtccttttctctaaccaggtgtatctacgtcaaccggatctaattttaaaatgtgatgctttagatgcactaagaaatctcactctttacgagaagccctgcagtgaattattttaacaaaagcagcagtcttgccctggatgtgatcgcacctgctccatccatgacaggaggagagtatggtgggggcgccaggcacgggccctcactccaggcctgagcccacctgcctgctggtgcaccacagacgcggggaagtgaggctaccttcggggactgtggtgagctgaacagtgatcccca

SEQ ID NO: 7854 - DNA, 475 bp, Homo sapiens
gtgtcagggaagtccacgtttctggtgattgcgggtatggattggaaaggagattactcacaactgcccgtcccaactttgcttaagcaattccagggtgaggcattcgcaactttataaagagcaaattccattttaggattgctctagcttttaaaaaattcttcttaaagttgatccaaaattggcctccctgtaagcttctgaccgtttgtctgagttccgtactctggagccaggagggtcaatctacttccctccctccatgatagcaccttcagtaccagaggatggcagtcgcaccacctataagtctgtcttccttgctgcgcatcctttgtgccttcaaccgctctgggggggattccgactctctgcttctgtttgggctgcactccaccttacaagctgcagctccctgtgggcccccctgaaatgtgccctgggttacatactgcactgcacacaccgtctg

SEQ ID NO: 7855 - DNA, 1295 bp, Homo sapiens
  misc_feature (1)...(1295): n = a,t,c or g
agcaactgtttttgcagctgattttacgtattccctcaaacatcttgcttcctgaagataaatgtaaggagacaccttatagtgaggaagattttcagcatctccagaaagaaattgaacagttacaggagaagtacaagactgaattatgtactaagcaggcccttcttgcagaattagaagagcaaaaaattgttcaggccaaactcaaacagacgttgactttctttgatgagcttcataatgttggcagagatcatgggactagtgattttagggagagtttagtatccctggttcagaactccagaaaactacagaacattagagacaatgtggaaaaggaatcgaaacgactgaaaatatcttaattgctcagtagtcaaaaggaggagcctgtcaaaaagtagaatcataaggactgttcaaaccataaggactgttcaaatcataccagtgactgttcaaaccaaccatactttttattagatttgctttgtcaactctttcttgtattctgtgttttcctcttttttggtccactttgctgaggtatgaagtgtactactttgaactaggctgaagcatctgagtcttctaataagtgggaagggatccaacaaagaagccatgaccagttaaagatatttgcagagttacaccttggtcataagtcctttgtgaccttgattattttggcttactctttggatgagaccagacaagaaaaggattaaacgggtggctcctttaatattattattattgtttttgagacaaggtccctttctgtcacccaggttagagtagatttnnnnnnnnnnnnnnnnnnnnnnnnnnnnnnnnnnnnnnnnnnnnnnnnnnnnnnnnnnnnnnnnnnnnnnnnnnnnnnnnnnnnnnnnnnnnnnnnnnnnnnnnnnnnnnnnnnnnnnnnncagaaacgaggcctcactatattgtccaggctgagtggctcttttattaaccagtcattacactgcggaacagccaacatagagtacttgctctcgccctgtgaattttctttcatgagggagtcaatatgtagtggaaagaagcatgtagcaaaaaagacaaccttgatctttaataaaaaagaagttggtttatttccaaaataaatcccctgacaaaaaacctgggtgatgttaagtaattgactgtcttaggagtccagcagaagaccttagacaaaaaaagcagaacccactggagtaggaaagggagcatgtagcatatactcagtagtggaatttaatttactgactgttagg

SEQ ID NO: 7856 - DNA, 1290 bp, Homo sapiens
ggtccagaaggctcaagcagtcgtcctcagatgataagaggacgcttgtgtgatgataccaaacctgaaacatttaaccagttgtggactgttgaagaacagaaaaagctggaacactactcatcaaataccctcctgaagaagtagaatctcgacgctggcagaagatagcagatgaattgggcaacaggacagcaaaacaggttgccagccgagtacagaagtatttcataaagctaactaaagctggcattccagtaccaggcagaacaccaaacttatatatatactccaaaaaggcttcaacaagcagacgacagcaccctcttaataagcatctctttaagccttccactttcatgacttcacatgaaccgccagtgtatatggatgaagatgatgaccgatcttgttttcatagccacatgaacactgctgttgaagatgcatcagatgacgaaagtattcctatcatgtataggaatttacctgaatataaagaactattacagtttaaaaagttaaagaagcagaaacttcagcaaatgcaagctgaaagtgggatttgtgcaacatgtggggctttaagtgtgataactgtggcatagaacccatccagggtgttcggtgggcattgcaggggattgtcctccagaaatgtctttggatttctgtgattcttgttcagactgtctacatgaaacagatattcacaaggaagatcaccaattagaacctatttataggtcagagacattcttagacagagactactgtgtgtctcagggcaccagttacaattaccttgacccaaactactttccagcaaacagatgacatggaagagaacatcatttactagtcctcttcaacacatagcaatggtatcattgttaattatgtgcacagtttggaaagattctctgctttcccagaaatgacactcacagcatgagagcttcctgagtgttctcgtcaagtacagctctgcaccgttgtggctctagatcactgttcagcagctgaacattcctggtgagcaaaggtttccctgggtgaatttttcaccactgcgttttaggtggtgatcttaaatgggtgagatggaacgagagcacacattaaagagagagtaaattccaaaggtttcaaagaacttggtcataaatatgataatgagaagacaaagtatttatattaaaacagtttagtagccttcagttttgtgaaaatagttttcagcacagaaactgacttctttagacaaagttttaaccaatgatggtgttt

SEQ ID NO: 7857 - DNA, 368 bp, Homo sapiens
ggcacgagaaaatgtagacgacgttctgcagtcggtgctcggggctctcctgaaacaaaccatctgattcgtttcattgctcggcagcaaaatataaagaatgctaggaaatctcctttggcacaagattctccttcccagggcagccctgcactgtatcgaaatgttaacactttaagagaacgaatatcagccttccagtcagcttttcactccataaaggaaaacgagaaaatgaccggctgtctggaattctcagaggcaggaaaagagtccgagatgacagacttgaccagaaaggaaggtctcagcgcttgccagcagtctgggttccctgcagtgttgtcctccaaacgtcggagaatatc

SEQ ID NO: 7858 - DNA, 533 bp, Homo sapiens
aatacttttgagggccaccatgttccaggaaccgcagacacagaatccaactcttcagtggcttcccaacacacacaggtaaaggcagaacttcttgaaaggactccaaaccctgggaagatctggctctgctctttctctggccttctcggctccagccaccctgacagctgccagtctctggggtccaaccgtgcccctcccgccacagccccacacatgcccttcgccgctcattctgcttttcttcctctccctgcctggtgtgcgctgcctgtcctccaggtctcgctgcaatctgctttatcctcctatgcctctctgtgcaatcttgccacattgcacagtgcttgagttagcgcaataatgtcattgaagtctttaactctagcctgactctaaggccagggttcacctaatctccccatagcctggcccctagtcaaagccccataaagagttgttgaaagaatgaagagacatcagtgagcaaaatagatgctgcccttggaaagtgacactgtcacaaacag

SEQ ID NO: 7859 - DNA, 471 bp, Homo sapiens
  misc_feature (1)...(471): n = a,t,c or g
atgtttaacaaaacttagtaaatccagatgatctttggctagaagactcagagacactagtttgtttaggcttctttccttgcttccttccttttttctatgttgtttccctcattctgagttggttctatatgtagttcttattgactttcataacatttcagttacgacttatcccagaatagtttaatatcaagcagagtctcacttctcgagcccatccagggaggagagtgcatgacacagcttatagatggctgatttttccccaaacaagaaaagtggcaagtgggcatctgccttgcatcccacggagtatttttcttggcacagaatccttgaaatctgatgtgactggtattagcttcaggctcgtgccnnnnnnnnnnnnnnnnnnnnnnnnnnnnnnnnnnnnnnnnnnnnnnnnnnnnnnnnnnnnnnnaaagagtatccaaaccaanaannnactcc

SEQ ID NO: 7860 - DNA, 410 bp, Homo sapiens
  misc_feature (1)...(410): n = a,t,c or g
tgctttgttatataacatatgcacacatacccagaattttgcacatatgttcagagattcctaagacctgcagacctgcctctgtgtgtcccaatttaagaacctctgttctttcttcatgactggatttgcccaattttgtgtttttttgggacttaatttgtccctctttgggacatttccttatttattgccctcttcagagagtagatgtagaaaatatagagaggaaacctagattacttaatttttattttaacattttctatagatagcatacccacgccaagtgtgctcagtcttgatccccttctttctagcatctgccaaacattgtagagttacgcaagcagttgtaggtttgagctgcagcccagncatttcttttattctttaaaagcacatagatt

SEQ ID NO: 7861 - DNA, 338 bp, Homo sapiens
gaaactgggtctccctttgttatccagggctggttctccaactcctggggctcaagtgatcctcctcccttgggcttcccaaagtgttgaggattacagggcatgaggccactgtgccagggccaacattgtttttaatatatgacttgtaaggcaagttggggggcattaattccttattaagatgtactgagttgaataaaagcccctccaaccatcaaccccccaaaatatatgtccaagtactaagctccagaatttgtgaatgcaaactaatttggataaagagtatttgcatgtaattaagggaaagattcttgagattagatcctataaat

SEQ ID NO: 7862 - DNA, 651 bp, Homo sapiens
aaaaaaaaaataaagaagtaacaaaacagaaaaatgaacaaaacaatttaaatgttaaacattctattcaccaggctggtaattgtgctagcactgaggatacaaaaattaaagactctggttggcagcttacattctaaagagagcgaggaatagatttccagactctgtgctaagtgcagtaatgacagtaggcccaacatgctgtaggagctccacgtcagggggttacctgggggcaggagggtagagggttttaagaatgtcagacagaacaatgagtaaagtaggaaggcaaatagctacaaaatatcacaagcactgtgtatagctggaaccaaaagtgtgaggcaggacctgggtggagaggtagacagggtcagagcttggagggccttgatactatgctggaagactgcactttatcttgttgataatgggatcctctgaagcatttcaagcaaggaagtgacaatgtcagttttagtttcagcaggatcagatggtagttcaatatggaggaaatatgtgtggcagaaagatatggccctgaactagggcaggtatagtaaactttttattataagtatgtatgtgtataggtatatagatagatataggtatatatgtatgtatatgtattccaaatga

SEQ ID NO: 7863 - DNA, 518 bp, Homo sapiens
taaatgtaagtctggtcatttcacttctctgctaaaaaccttccagtgacttccccttttaccgagaataaaaaggtagtgatttacagtgatctttaagaccctacctacacagttgcctgcccctattctcttgagttcatatcctactagtttcttccttactctctatgctacagtaacactggcctcctttttgttcctcgaacacacagggtatgctcctatgcatgcactggctatttcctctatctggaatactctttcccctagataccacatgactcactacatcaccttctttagctcgttgatgaaacgtcactttgggcttggccggtggcctcaccctgtaatccccaacactttggggagggctgaaggcagggaggaattcacttgagtccagggattcaagactagccggggcaacatggatggaggacctcccctcttacaaaaggtaaactaaattagctgggcgtggtggtacatggcggtggtcccagctgctcagg

SEQ ID NO: 7864 - DNA, 440 bp, Homo sapiens
taataataataaggctagtatgactaaggagctaaattttaattttgttatacttcattttaatttagatagccatgtgtggctaagggctaccatattgagaagtgctgctaaagagcaagactgatttttctctctccctgctgacaggaggttatgagggagaggggattggggcctcttggggtttttagatctgacgctggtctgaaatctctacctgagggtaggagggagagtggggctctggaggagtgtgttattcacactcagagagtctgtgattggaaggtgcctgaacacccacttgcacctctccttttgttgtcgtttgcagtcttgaggatactggctaagcctctgcctacgcatgagtccctgttccttctcctctccaggtcttccctctttaaccaacatttccctctctgctgattctt

SEQ ID NO: 7865 - DNA, 423 bp, Homo sapiens
ccgccactcagtgcagaagaagctgccctgcgtcgggccctggaacaaacggatggtgaccacagttctctgatccaggtgtatgaagccgttatacaaagtggagcagatgaggcttggtgccaggctcgaggtctgaattgggcagcattgtgccaagcccataaacttcggggagaactcctagaactcatgcaacgaattgaacttcccttgtccctaccagcctttggctctgagcagaatcgcagagaccttcagaaagcactggtgtcaggatactttctcaaggtggccagagacacagacgggactggaaattacctactcctaacccataagcatgtggcccagctctcctcatactgctgctaccgaagccgcagagctcctgccagacccccaccatgggtgctctaccac

SEQ ID NO: 7866 - DNA, 910 bp, Homo sapiens
  misc_feature (1)...(910): n = a,t,c or g
ttttttttgaggcttagctgaggtaagttaactgaatcacaggctgcaacagaaatactatttaaaatgtcacatagaaaattcaatttacactttgctttgccttttagtatctggatggcagatgacaggggttatgtggccaaattggtctttcccacctggcagcagctctcttgacacccacatcccttgttcgtcttcaaaagttccttcactgcctcggcgacttatctcagccttcatgaacaaagtgctatgctgctataagtagttagaataaatgtgatttcagcttcatcgggtcctatcctttcaccttccttgtagctggtgtatgtcccacagtgcagccataaactatgaagcccagaagtatatgacttccactgaaactcaacatgcaacacacaggtgcttgtgggcacagaagaagaaaggacaaatgtctgagcctcgggacttgcagcctctgcccttgctcctgacctccgtgttttgcccagatcagcaggccttatggctaccaggcactggcaacaaaggcaggacacatgtcatctggggggtgacgcatggcaggagaatcagcagtggctgcaacgtggtcaggctccactggaaattatctgccctaaatggatctttctgtgagcaaagacctacatcaccacatcatatgcttaggaatgaaccgaatcctcacacctgaagactgaatgtataagaaagctgggacaaaaaagcagatctccatatctgaggactgtgataaaaatctcttctgaaatttcatttggccatgacctcgtgccnnnnnnnnnnnnnnnnnnnnnnnnnnnnnnnnnnnnnnnnnnnnnnnnnnnnnnnnnngtcataacggtattcatanntcaaannnaannncccc

SEQ ID NO: 7867 - DNA, 367 bp, Homo sapiens
gaaatgtatatgaattactttttaagatatgaaaaaatgtgttggtgaaatgtttagttctgtatttttataagtggattcttactctatttaacttaggagtaaaaacatactgtgaaatgtacatatgataatataaagttcacctgcctagtatcctgttctagaaattcaagtaggaacaagcttggaatattcagtaaaaatgtagatttgacatttgattgtaaatgtggcaaatgacaataattatttggcttaaagtatcctccacctccatttcactggatgtcagtaggtggcccacccacccttctctcccttcacacatagcacatagctcaggtgtgaggaaacaagattacat

SEQ ID NO: 7868 - DNA, 1173 bp, Homo sapiens
tttttttttttttttttttaaaaaggcccaaaactttatttagttttcagggaaatataagatgcatgtaaacataaaatacaaaacaaaacccaaatcttacagtctagaagcatgccaagacagagcattttctgcagaccaaagagtcccgtcaaagtgataaaggacacctggaaagtggcaggccaaggggctggtcccttccccaagggcactgcatttttgtgatgagattaaaaacaaaccaactccactattaaaaatgctagaaacatggagatagtttagcaccaccattgattctggaaatatttcagcacttcaaatcgactgcactgagtttaatgtcctttctccaagtttctctgctgaggaggaaagaaggaaaacctggaggaagggctcctcctgaccccacagagcccactaagagctgggaggggaattccatgaggaattctccaaggttctggagctccagagacatccaccagtccccacccagccatgcagtccacatggctcacgccttcagggattactgaagtctggccttgcccgggagtcacttcctgcagacctctgagtacctggtggggaaacccatttcccatcctgtgtcttggatttaaagaaaacctgttgcagataatgagttgtaaattcaaggagggtggctgttttgctgttctttctctgcagtaaactcttatggggagtgtgccttggttataaggcaacgcaaaatggtagggtatatccatggatgaatgttcatcacacccagtctaattcataccaggtggcaggctcagcaaactgaaccaccacaggtgtcagagatacttgagaatgactggtaccaacaagacgacaaaggaggttgccttcctcccagatgtgcccaatggagtctgaactctggttctaatttgtggaggtgggtccctactgtatgacccattgtggtcactgctctttgagccatacaacttgagagactggctttggattggacagtcaaagggaagtgggcaaaaccagctgagaacccgggagctggatgcatatattctggaatcagggcctgcaaactcaaagattggtttgtggctggtgacttctctctgctaagtaaatcaatgaccattcattgagaactgatgggga

SEQ ID NO: 7869 - DNA, 365 bp, Homo sapiens
cagagtactcactgcaggttgttcgtgggggccggtgcatggcatagggaaaggaagacaaaacaggagaagttagcagaggtagggaatggggtagagactggatcatagaaggagttgtttgccatgcttacccttaaaggctttctgagcagtcatcctgggatggacagggcagggagtggagagaccagcgagcaggtttttgttacggttcgagtgagggttgaacacaggcagtggtggtggagatgggttgcagggataatcttgagagagatttaggagacaagattcacaggttggaatggatgtgggagaaaggaggagcttaacgccttggcttagtagccccatctgagaaa

SEQ ID NO: 7870 - DNA, 498 bp, Homo sapiens
atgactgaagtctctagaaacactgagttttaaccaatatgagacacacgaagaggaaaatgaatgcttgcttcttggaagaactgctaggaaagttagcatttttgcagttctaactaatttagatgtgaggccaagtaaaaatgccatttttttggccattgaatttgaaaatcaaattgattatcctccagaatttctacaaactttgaaatactctctaaggatcaaagaagtcaaagatctatgtgtgtctcagaataatctccttcttctggtcacagtatctttgtctctgccaggtggctcttcatttctttggtagctatttttagaccttacagtcattcaccaatatacagttagcagtgttctgatagacacagtatcagtcatattctccgttggagtcataatttcaaactcaacaagatttcagaaaggtataatcatggtaatttctcatattaaaactggagaagagaggccaggcatggt

SEQ ID NO: 7871 - DNA, 336 bp, Homo sapiens
ggcacgagtggctgcttgcggctagtggatggtaattgcctgcctcgcgctagcagcaagctgctctgttaaaagcgaaaatgaaacaattgcctgcggcaacagttcgactcctttcaagttctcagatcatcacttcggtggtcagtgttgtaaaagagcttattgaaaactccttggatgctggtgccacaagcgtagatgttaaactggagaactatggatttgataaaattgaggtgcgagataacggggagggtatcaaggctgttgatgcacctgtaatggcaatgaagtactacacctcaaaattaaattagtcatgatgatcttgaa

SEQ ID NO: 7872 - DNA, 208 bp, Homo sapiens
ggctatgagaggggctgagggatccaagaaggccctgactgcgtgatggggtctgatgcagctctcacaggatgcgccattttacctgggccttgaggaatgagtaggagttcaagaaaaattccttccagttggaggaaatactgtgtgcaaatgcctggaggtgtatttagaagtggtttggggctgggcgccgttgctcacacct

SEQ ID NO: 7873 - DNA, 307 bp, Homo sapiens
caatgaccacctactagttgtccctggcactgcttatacatatgtccatcaaatcaatcctatgaagtagatactgtcttcattttatagatcagagacaattggggttcagagagctgatgtgattttcccagggtcacagagagtcccagattcaggcacaactcttgtattccaagacacaaccactacatgtccaaaggctgcccagagccaccgggcacggcaaattgtgacatatccctaaagaggctgagcacctggtcaggatctgatggctgacagtgtgtccagatgcagagctgga

SEQ ID NO: 7874 - DNA, 847 bp, Homo sapiens
ttccttctatacattatttaatacctattaaataaaattatttttggaataaagcttgtgggaacatttgggatctagagaaagtgatatgtgaaattctatctcatatagtcagttaaactttattatttacaagttaaattacacagcagctttacacagcatgagatggaaaggaaggaaggagagaaacgaggagaggaagctggctcctgagattcttggctgcctccacctccttctcttgggcgtagcagtcttcagtgctgcctccactccaaggtcaaggatcagggcttggaacacaggtttaagtcaggttctggctctgacagccccagggccaccagggctcccactagcagcttcttcacaggcgttggaggtgagtgtgaaggcatcagctgcagggagaaaggttaatgccagttgggggaggcacacaaatgttctaccctttaccccacccagccctacctaggactcactttatctagacgatggcgacaaatgaggccactggaattcaggtagaaagtggagtaggcatcataggtccggtaatgctcgtctttgtcacgcttgtagaaccgcaaaaagagcaagtggacgggcagccccacaagccgccaccgggcttgcagggtccagttctcagggtggcgggtcagctgtaaaacctccaaacgaaggtgtgcaaaataattccaggccaggaaacggcagagggtcagtgaaagaatgtaccatgtccggcccttggtacgtatgttgaggatctcattgatgaattccacatccaaggaatacagactgtagtcgtgggactgaaggaagagcttgggaa

SEQ ID NO: 7875 - DNA, 546 bp, Homo sapiens
aaaaaggtggggggaccaggggaagactcggagtgcgatggcggcgcaaattccaattgtggccaccacttccactcccggaatagtccggaacagcaagaagaggccggccagcccttcccacaatggcagcagcggcgggggctatggcgccagtaagaagaaaaaagcgtccgcttccagctttgcgcagacttcagtattgatgctcctccatcctttaagccagctaagaagtattctgatgtttcaggtctgcttgccaactacacagacccccagagcaaactgcggttcagcaccattgaagagttttcctacattcggaggctgccctctgacgtcgtcaccggctacctggccctgaggaaggccacgagcatcgttccctgagccccagaaagggagatgaagtggaaagctgtttcaaaaacagactctggactcatgattttgtttcacggaaacaaactcgttctgctgtcaatctgaaaatgccagtgctgtgccttggaaagaatgtttggctttaatttaagggttttt

SEQ ID NO: 7876 - DNA, 590 bp, Homo sapiens
attttgttttgttacataaattcaagtttataacaattctttgttataaagaacaatgaagctgttttgatcaatacaaaatttgggttaaaatcaactttaacatctatttttatgtttcagttgatttggagaattctcctagtcttggatacatagatggaagtgatgacaggtttataacagttgaccttgcaatctcagacatttaaaacaggaccagaagtttatataaatataattaataagcaaactaatgacatcaccatgggacacacacaaaagttcttgcaggagcagggtctgtgtggcttcagttgcctgcagcgctcccaggccagagcaagtgctctaggatctgaactgcccgcagtgcagccctgcagcctttcccagggcacgttgatgtgcacacagtttccctgaaggcaaagtgaacatgtggagagcttacgtgggcagcgcgtatgtcttcagtgtgtgttttagaagtccaactgttgtttttatgtttttaaaggaaagatttgaatcaagcagttatgggccccctgaagtatccttttttctagaacattctgaaagtcatc

SEQ ID NO: 7877 - DNA, 419 bp, Homo sapiens
ttttttttttttttttaaggtctgctgaaaaggcatgattttattgcacactcacaatatgacaggtgctgtgctactcatcaacactcttttcaaaacaggatttggagacaggattcttcaaaagagaactgcacattcaactaaacatgtccaaaaaacttcaactcttttgaattagtctccaaatctacacaaaccatagaaaatagaagatcattaaaatacatgattatacacagacaaatggacaaatgaaacagtaattaatattgcttgagctcagattgctcctgtaagatctgcagaaatcgtatgatggggtaaggttttctaggaacatttttcatcaggggataatggcagtatctcattagactaaaaggagatgatagatgctggaagatcagttttcatac

SEQ ID NO: 7878 - DNA, 383 bp, Homo sapiens
gaacgaacagctacttgtgacagtgtgaatcaattttagaaacaaagttgagaggaagaatctaatagcagaagactgtatatagaatggtaccattttaataaagctcaaaaataaaactaagatctcatttagagagatagatggcaaaattctttttaaaagcagaggagtgacaaaacacgaaattcagcatagtggttaagagaagcaggagagacgaggaggagtacatgtttagctttaataatattggtattccttggttcttcagttgaactcgtgggctattcattttcatgattatgcattataatttgataatgtatgtaattaacagatgtatgtatgtgacatatttacttttgggtaacaaatactac

SEQ ID NO: 7879 - DNA, 92 bp, Homo sapiens
ttataatgaaagtaatcagaaggaaggaaatagacaaaagcacaactatgaagaagcagaaaattaaaatagaaaacattaaaagaaagctg

SEQ ID NO: 7880 - DNA, 728 bp, Homo sapiens
attaaaataattaaggaaaatatgtctatacctgtaattgctaatggagacatcagaagcttaaaggaagcagaaaatgtgtggcggattactgggacagatggtgtgatggttgcaagaggactcttagcaaacccggccatgtttgctggatatgaggaaaccccactgaaatgcatctgggactgggttgacattgctcttgaactcgggactccttacatgtgtttccatcaacatttaatgtacatgatggaaaagataacttcaaggcaggaaaaaagggtatttaatgctctgtcaagcacatcagcaatcatagattaccttacagaccattatggcatttgactagacttcccaaataattttaatatatacttttagacccacagtgaaaccacagaaggtcatattttgtaccttaaaccagtagctctcaaattttagtataaaaacaattcctgggagcgttttttaaaaatcagttgtagacaccaccctcagagattctgattaggtagatctggagtagacccagaaatacacagtttaaagaaaactcccagtggttcaaacatcctgatcatcctaggcaaacattgacaaatactgctctgaatcctgttctatagatattggggggatgggtagagtgggaattttttcctaatcatgtttttaacattttaaaataaaatttaatactaagaaaaaaaaaaaaaaaa

SEQ ID NO: 7881 - DNA, 492 bp, Homo sapiens
gaaaaaagaagaaaaataaaaactcttctaaaccacagaaaaacaatggatccacttgggccaatgtccctctacctccccccccagtccagccccttcctggcacggagctggaacactatgcagtggaacaacaagaaaatggctatgacagtgatagctggtgcccaccattgccagtacaaacttacttacaccaaggtctggaagatgaactggaagaagatgatgatagggtcccaacacctcctgttcgaggcgtggcttcttctcctgctatctcctttggacagcagtccactgcaactcttactccatccccacgggaaggagatggcaacccatggctggcaggcttcacctgggatgagttgacaagagcctattcagttttgatataggcaaaacaaacatgggcacatttcaaaggcaataattcaaccttccacagccttccagtttccaccgttaggttattgttgttttgggagc

SEQ ID NO: 7882 - DNA, 298 bp, Homo sapiens
gcaagggcatatgggttggctgttatttattagcaagtcaaactaattttaatattaatacgaaaaagagaactcacatatagttttcttcctttcttgcatgaagaagaattttaaatttcctcttacaagttttttcaatttgtttttatttctcagatgtgtttgccaaatgtcactgtggttttatgtaaaactggttctagataatacttagtccttcagaagctgctaatttcagagctaataagaccaaatgacccctgtgtcctttccccagaagcagtcataggcttgt

SEQ ID NO: 7883 - DNA, 368 bp, Homo sapiens
  misc_feature (1)...(368): n = a,t,c or g
gacccctgacccaggttacggaccggaagtgctccagaactcaaggtgagcggggcctgagctggagggggtgtggcctgctgcaaaagcgggaacaatccagagggacgcttggctgctacgcgggattgcagtggtgcagccagccccgaagtcggaaggtgctctctagggagtacaggaagataaagtttgtgcttgatttagaattagctagatcctttgggggagaggggatcgagccgatttcgggaggatgttcactgcgcggatgatgctcaaggccatccgagaaatccagaaacaaggcgaccgaccttcgtcaagagaaaaatgatcctgttggagaaaaagtaaatgttcnctag

SEQ ID NO: 7884 - DNA, 353 bp, Homo sapiens
caaggagccgggaatcatggctcatcccttgccacatttggtctgacccatccccttgtgagacctcacctccccttctcctcacctcctgcacatccctccactgagccttgtgggacttagggctcagcagacccgccaggtcctgagtgttccctgctcagactgagctccaggggactgcagccctcttgagtgcttgtcatcctctcccctgcctccatctgagcccaggcccaccagggacagggtcctcgcctctcatgattgcgtctctgccagcctcactccctctgtagagaccctgcctttgggtctcaggcctcgtcttttttgctgcttctgcagacctt

SEQ ID NO: 7885 - DNA, 366 bp, Homo sapiens
ttagaaggaaataaaatgcaatattgataaaaatgactaatgtgctgttttttacgataactctaaaatatttgaatcattcattgctaatcataaaacgtattagacaatccaaaaacctccaagattgagtgctctatgttgactgtgatggtaaccttattttcatgcctacttgcttaaagtttgtctccttttcactgctatcctgcctactatcgatactttgggtaaattttaagtgaaaagtaaaagaaaatttgtgaccacacgggaaaataagcatgtaaaatagtgatttgtgctcagattgcattattttgtgaaacaaataaataagtggaaacaattggcactttgcaggtg

SEQ ID NO: 7886 - DNA, 2160 bp, Homo sapiens
ctgaagtggttttggccttggagtaggaattgccttcttggaactgtggtcactcaactgctagtatataatggtgtttaccaatatacatctccagatttcctctatgttcgttcttggttaccatgtatattttttgctggaggcataacaatgggaaacattggtcggacaactggcaatgtacgaatgtaaagttatcgcagaaaaatctcatcaggaatgaagaaggcaaaaaatatcttttgtacagaaaagcaagatgaaaaggatgtgaaatggtagatataccaacaaaacttcagactgtaaaattgccaggatgcagttttccccttgattggccgtgtgtgtatatatggaataaatatatatatacacacacacatattactgcaatctgtgattgcttcatctgtaaatcagttgtaaacctttacatatttgacttaaataactgtaagatatatatgtactacattaaaaagtgttgattaatagatgaaatttttaaattaattttttaaaacatgccatacattgtatcacaatgttaatgtgccaagatattgttcctgtcatgcagagtataagaatgctttgaacaatttgtagacttagtgaaataaaataagaggaaagccaaaaacaaacaaacaaaaagcatatggggagctggtattttctctttagcttactgttgtgcctttttatttttctaatcacagcagtatgagttatgagtgccctaatttgtggttagtttctaatttaatgttgtttcatagagtttggagtgttttgatacagggtgaaaatgaacttctggtttcaaacctgcgttactggagacagcccaaagagtaattttctgttttgacaggttttactgggaagtatatgtgatgagcagaagaggttatcagcattaaattgttttgggttctaaatttgggaacagtatatataattaaaagtaaggaacattagaggatttaattaggaataaatacatgttttgggaaatacagtgacctcttgcagtgtcacaaaagtgcaaagtgatattaggctgtcatctgcaatacaggatctcattgcttttgcacatgggagcatatagggaaactccaaacagatcacaatgaggtttctaaatctgttggggttctgtcttcttattggggttctgtgaaggcaaaccactgtaggctttagctggggttcagtcatatggacttcgttgggtggggatggcctagggtttttcatcttacatgcagtcttggggggtgggatgaatacataatttcttatgtattcgtgtatcccttagtggaatagttccaagtctgtttaagagtgtattgagatggcattctctgcatgttaaagatcttaatggcaaccagcacctcttaagtatggtttaaacatattcttagctaattttttccattagtttttgaaattggtggcagttgtctgatccacaagggcaagatcttctgagtactctggggtgtgagtatgtgtgcacacgtgtgtgttggagtgagtgagagaatgtgtctgtgcatgtggccatgctttcctagaatgtcaagtagatatttttacactttgagttttaaagcaattactatcagactgagatcttgtatgccaaactttaatctgcttttatgttttcaggctgaaggtgtgaaaatcctaagaggatttccatattgaatatgtgtacacaatcttaactatcgtggtggaaaacatactactataatttattattatatcttccagataatgttattcatttagaacaaataaggtatattttttagaatcaactttgtaagcactataaaatctttaataagttataaggtctatgatgtgtttactttaaaaattgctgttaaaagcaacacgtattaaatatgtaattatcatctgggttaagagtctgtttttccttcctttgtggtaagtcttagaatatggtactgtggattaatctaatgaaattaacatatgtggttgaagttaccaagaaacgatgaaaagaaactaaatatagttgacccttgaacaacaggagttaggggcaccactccccaacatagttgaaaatccatgtataacttttgactcctccaa

SEQ ID NO: 7887 - DNA, 408 bp, Homo sapiens
  misc_feature (1)...(408): n = a,t,c or g
tcgctcatccagacttcaagnttctactctgatccaactcaatcatgagggcctagagtgtctgaggctgctcaatgagataattgctgattttgatgagctgctctccaagcccaagttcagtggggtggagaagatcaagaccatcggcagcacctacatggcagccacaggttaaatgccacctctggacaggatgcacaacaggatgctgaacggagctgcagccaccttggcactatggtggaatttgccgtggccctggggtctaagctggacgtcatcaacaagcattcattcaacaacttccgcctgcgagtggggttgaaccatggacccgtagtagctggagttattggggcccagaagccgcaatatgacatttggggcaacacagtgaacgtggcc

SEQ ID NO: 7888 - DNA, 511 bp, Homo sapiens
tgagttttcatctgattgtggggaccaagtccctgagtagagggccaagagctagggacagggggaagagactggcccaggtggtagggaggaaagaactcccagagtttcctttagccaggaaacctgctctactgaccccgtgacttggacagtcagacatcaccctgagagtgacaagtgtaaaatgactcccttcctcccccgccctccggaagtatatttagatacttgaaagcagtccttttctaaaatggccttacctatgtggcctgaacgattaaaagaaagaactcagagttacaagggaaaaagaaaaagagttacaagggaattgtagtctttttctgaatagaatattagtactgtggtattgcatttcatgggaatggaaatgtattggtaaagctacctgatggaagctttctcttggtaacaaaaatggagggtgtattatgtgcagttatttaaatatatgtattccattgttgcgtggtttttttcccccctc

SEQ ID NO: 7889 - DNA, 1227 bp, Homo sapiens
tttttttttttttttttttaaggttttgcatttcatatttattatcagtgcttcaatatagaatgttttgtaatgattagcaacattgtaaacaccaccaggtttttccaacactaactgctagtcttttccagtaaatattttttccccagacaaaataaccaaacctaacacaatttcaagagatggtgataccatcagcataataacccaaattacaaaaatggcaatacttaaaatcatgcatattatttcaccatttcataaaacttattttaaaatttctacaaactttcccagtgtaaaagactcctcaaaagctgcatgataacattaaactacaaaattcactttggaaaagtagggagttatttttctaattttggctttaagatttttttttttaaatgggttaaaagatacggtgaggagtgtgttgagagaggtggagaaaaggagcttccagtcaatgcattcaccatatctgaaaatacttcagttatacaaagggaacacttcgagagtaaggatatattataaataagtctctcagcaagatgaacggatgaacagttcaattgcacccacaggagagaggtcttcttggagaatgcttgtttatagaatcttctgtaaaatagagttggctacttctaatgattcatcttgtactaaaacaatatcataagagtccatgtacttttctaaaagctcatccactctatcatttagatatccaattttcagaatgtgctcaacattggccactccatctgccattcttaagtctccttgggagtctccccagaagaattatgttactattgtcttttagttgattgaaatattctgtattcctcaaggcaccatcatgtttgttaaatacatgaattagttctcctttaaatcctttgagcaccccagtttcatcaaaatccataaaattggacacaactttgacattgggatgataaacaccagcttgacgaataacttcctctagtacatcgccgattccagccgaaaatatgaacacggggatgctatgttgttggagcttatcaaagaaattctcatatccttctttgagcataacgtcagattctgccacaatttctttaagtttagcttttggtaaagcttgctgaacaagcaaaccatgtgatttagtataccattccaccatataagggtacttctcttctacgctattgaagttgatcctgt

SEQ ID NO: 7890 - DNA, 1792 bp, Homo sapiens
ttttttttttactccgtgtgcagtgttttaatttatccatgtacataggcaattatcataatttgaaggacactttttacttattagactataagaaaaactgtacagaaagtttatactataaaattacatccctaagtgattagggtcctcagtaacacagaaataagaaattgaaaagggtcattgctcggcaatccacataactacagagtagagcgcaagctattgttcgtgatcagaaagagacttcataaaaacatcttcacatattccctagcattatgccctactagtaaaaggaaggcctatgacaatgccattgtttattttgtgtaacgcagcccttctatttccctcaaaagtttttttttcctgctataagataaagaaaaggctgtatccctaagatatatacctaatgaagattatctcaacagaagctccaacgttttccatttttcactgtctttcctgaagttcacctggatgttccacagcaattttctaaccctttcattgttgattagcctactaaaagtagaattctttagcaacacacaatacaaaagacacaggctaaaacaggcctcacaaatacactttgaaataggtatatttggatataaatataactttccagtccattattttttctaatgactaaactctaaatttttaaaaatggaagttttcaaaccaacgatgtgttaagcccattctcatgacacattcattttaacttctcattcagtatgggaaaattttatttcttccctttgtcttgcagaataatttaggttcccaccctgggcacgattcaccaaatagagtaagaccacagataaaagtgacaaagaaacacaggcaatgaagaacacttccaaaaacaaatacccccgagaatccagtatcataccagcaatgatggaaatgatggccaacccaagattctgaatggactgcatgaagccatatgcagttcccagctgatgttcaggaactacaaatgccaccattggccacaatgcacaggcaagcaatgagtaggagagtcccagaagacacatagcaaatccaagggttcccacatcgtaaaggcccagcatccatgtgggacacaagagtggctgctactgcgcaaagaacccagatgatgttcttccctgttttatccaccaggagcccaaacaccggggacatgggagctgatatgacatatacaacactgttaattgcacttgctgcctgggaagaaaatccaaatttctctgtaaagaaaactttcccaagtccaataaaagggaacacagcaacataatagcagacacagatgataaatataagccacaggggtaaggagaagtcctttacatcagttaatttaataacttcacctgtttttccttgttctttatggaaggattctctctgctctctgatcccaagtaggcaagagccaaggcacagattagtgaaagaatacacgttacacccccaatcataagtgtgatcccgagggttgtgtgaccagcagaacctaacaaagcttcaatcttagaatacagccatcccatgaggttcatgtttactgtacttccaattctagccatgctaagttgaagtccaaacaccaggtttaattctttgcctttaaaccagctcacagcatatgtattctgggcaactgctaaggactcgccaccaatcccaaatacaaatcttccaaattccatcagccaaaaagcattaaatattccacccagggcaaaaacaacctgtccaatgcaaa

SEQ ID NO: 7891 - DNA, 998 bp, Homo sapiens
  misc_feature (1)...(998): n = a,t,c or g
aatatgcaaaccatttattgaactatttactattttaaaatatcattcttaaaagaggccacaaaaattataacattcagaaattttaggtaaactccaaaagtaagcttttttttttttttggtagtcaacttgtaccaagtttagcagcaagaggatacttccttagagactttcagtggacttaaactcagtttccgctggtgctatgtaaagcatccacgatggttttattgtactctgcaatctgcttggtcacatttttcttaattggctggtaatcactctcttgactcttggttgctatgactaattacatgagttaagggggaaaacaatgtcaataaaaatctaattgtgcctgagaaaggaactaaatactgacatttttcatactgaagatggtacaaaaaagcacaattagaatactttaaaatacagtacatcattttaacagattaaggcatcaattaaaacctaaaatgccaagctaaacttaccgcaaaaaattccataatacaatataaacactttttaaatacttaaatangttatgcatttttaatctaatctggtcttagaacaatctaacgttcaatgaactagttcctatattcaaacacacatacacacatacacataccacgttctctagagtaccacaaataatttaaggcaaatttctagacttcgctctgctccaaaatcacctactttatgttgcacaaaactccagtgtgagacttagagcatactgtgaacaagtcctctatttttaaactaagttgcactaacactggcaacagagtacctaaaacaccttatctggaggtaagatggggtccaggctgcttctgagctgaagttcagcaccaccctgggggagaacctatgctgccactgagtcaggatctagttctccaggcagagacatccttgaatgctcgtgccgctcgtgccnnnnnnnnnnnnnnnnnnnnnnnnnnnnnnnnnngagt

SEQ ID NO: 7892 - DNA, 480 bp, Homo sapiens
  misc_feature (1)...(480): n = a,t,c or g
tttttctcaccaattacaaaaaggctttattatattttgccaaatgttaatcgctttcattatgtctccaaacattatttcaccactcatttttataacaagtgcagtgaagatatgcttatcgaatattgtacaatactgttgtgttctgtaacactctttcgggaacagcttagatgtaggtaacaagagatgcctgcgtatgaaagtgcttcataaactgtactgtataaatgtaaactactaccattttcaggtaaaatcagagaataaatgtctcttgttggaagtgtcctctcaggactcctctagtccaatctccccagtgagtggatgagggaaaagactgacgccagaggcaggaggctctggattggagagttagaggccaacgcaagctcgtgccnnnnnnnnnnnnnnnnnnnnnnnnnnnnnnnnnnnnnnnnnnnnnnnnnnnnnnnnnnnnnnnnccaaatntcc

SEQ ID NO: 7893 - DNA, 528 bp, Homo sapiens
tacactagaaaaatcaagttttttattttaaaatattttcaaaggctaaggccatagcaaaacaacccaagggtggttgaatcaaactcagggaattagaggagcatcagccaatgcaagcaggtctatataaaatacacatcatttataaatgcacacagcagaaagcacagtggccccagaggaccaggcagggggacaacagagagaaacagagcactatctggagggacaggcacacccgcaacactcaaagccctgggccccaagtgcacctccaaagtcacctacgctgcagcatggctcttgccctttctgagcctgggtatagctgaagaccaagttcaccagcatcttggcacatccacctataactggcacctctcatggcctctgacaaccaagcaaggctcagagaatggatttttatctctgtctttcagcaaggaccagggagaagtgctgaagcaagaagggttattttcctaaaaaaaaaagacggatgaaagggtgaaaggggctggttcc

SEQ ID NO: 7894 - DNA, 354 bp, Homo sapiens
ggaagaacatgcagaatgcccatcttctccaagagcctgagacatcttggagcaaatagtccccctgcctccagccagggccccagggctcttggccagaagctcagggctcactcagtgtttgctgagcaaaggcttgtgtcttccctgcagggagtggggacagcttgtgtaactctcaggtatgtcttcatttgatttgccagcaacaggctcagaaagttactgggcagtcccgggatgccctgggaaaacggacagaagccattgtcccagggggttcagggcagcagcacccaaaacagagaaacgccctattccccacctttattaggaaccatgacagcctttgac

SEQ ID NO: 7895 - DNA, 462 bp, Homo sapiens
cccctgtcttgcccccagctgtcgcctcaccatgcgctgtcgttcaagggcttggtgaggccatttcctgtgacggttacaggggcgggagacggggggatgggcaggaggaggaaggaaacacctccagcctacctccctggacagagaccccagaagccagaaacagatctgggagtggaacagcagcagttaggagaggacccttctggggtccaggagcccgcctgtcctggctggcccaaccagctccaacactgctggagggctccattctctgttcaggggaaggcccactggttagctcagagatggcttctgcgtgctttctcccttccgtcctagagaacacatattttctgtttcctcccttgccttctcccacttggacctgctcagagccctgtgtactctgtgtgtggctctctccctctctcttttcctcctctggggtttttccta

SEQ ID NO: 7896 - DNA, 259 bp, Homo sapiens
gcctttgagattcatccatggtgttgcatgtataatttctctctattgcaaagtggtattctgttgactggatataccttactttgtctatctgatcacccattggtggatatctggcttatcccagtatttaactattaagataaagctattatgagcatcttgagtaactgtcttcgtggacacacagtcatttctctctggtaactacctaggtgtgatattgctgagtcacatatatgtcagtgtatactctagg

SEQ ID NO: 7897 - DNA, 987 bp, Homo sapiens
ttttttttttaaagataaaattaatttatttgacttcacaacttcatgggccacacaggggccacacagtcctagaagcacagcctgtggcagtgggctggggaggccagttctctggactgcctgctcccttgtccagagctgccttgagccaggtccctcctgaccccatcatcctgttcccatatgcaagggctgctcaggtccacctgcaataaacccaggcctgcctctggagcacaggacagggcctcgtgggtggcagcagcactggtcctcgtggctgtgggtgtgggtgggtgggtaggtaggtgggaaggagggcaggcaggagggtgtggttcagtgcagagagctgctgttctgctcttcaaaggccatcttgcccagaagctggctgtccaactccaccccacttacaggcagctggaagaagttcatttcagctgctaaggctgccatggcagaagggtcctggcaaaactgagctcgcaacatcatgtccattttctccagcctcctcttgagccgcttggcctctcgctctcggatgagccgggcctgccgcttttccggggtttcattggcccgcttcagcctcatggcctcccgatcccgctgcagccggcgtgcccgctgctcgtctgtctcctgcatgcgctgcaagcgcttggcttcacggtccctcatgcgcctcacctcccgctcctcgggggtctcattgtcccgccggctcttcttggccgtgcgctctcgttccagccgctgcagccgtacttccaaaggctcattctgtcgacgtagagcccacttgcgtacactgggagtctgggcttccagcagtttacggtaggcagcacagttgttgcacacaagcagaattccagcagggtacactggaggactaaaggcaatatccttcccctcagcactggagggaccctcattgtggactgtgggtagggattccatatttagtacttcagg

SEQ ID NO: 7898 - DNA, 452 bp, Homo sapiens
ctcatccagcttagttgttgctgaatattggagacacttttggttacagtttaagtgaaacttgccagcttcatcctaaaatgcatgtactgaatggatttaacatttattagctttttccatgtttatttttctgcctaacagaatataatagggatggagggaagccataagtaaagtgttgcccttgctgtgtacttgccaggaggttggaagtaaatttcagattatcagcagttaaagtggggtctcctcccctgaagaatgaaatatcctgttgtagttctttgaaagtgccatagtagctggtgtttattttatgagggaaaaagaaaattttgaaaaaaattttttttcttaacagggcagatcaagcataagctgccctgctgagcaatcattttatgattaggagtccctaaaaggttccatagagccaactataagtcatt

SEQ ID NO: 7899 - DNA, 479 bp, Homo sapiens
ccagccgctgccgcagggtgcgcgatgccttgaacctgggaaactatgtgaagcaacactctggattttgaaagacatcttttcatcatgggacagcaaatttcggatcagacacagttggttattaacaagttaccagaaaaagtagcaaaacatgttacgttggttcgagagagtggctccttaacttatgaagaatttctcgggagagtagctgagcttaatgatgtaacggctaaagtggcttctggccaggaaaaacatcttctctttgaggtacaacctgggtctgattcctctgctttttggaaagtggttgtacgggtggtctgtaccaagattaacaaaaagcagtggcattgtgggagccatccacggatccatgaatttataccagtttattcaactttataaagatatcacaagtcaagcagcaggagtattggcacagagctccacctctgaagaacctgatgaag

SEQ ID NO: 7900 - DNA, 5648 bp, Homo sapiens
cccgagtgtcggttcactgtggagacagcggtggcggagtgggtctccagggctctgggctggcaaggcccccggaggggtggggcgcggaggaggctacagatccgcttccgcgcggcggggccgggtgcttgggacgcggctctgggctcccgggataaggggctcccgggacaaggggctcccggagagcccagtggttagcgatgctgctgtcgccgtcgctgctgctgctgctgctgctggggggcgccgcgggctgcgccgagggtgtggcggcggcgcttacccccgagcggctcctggagtggcaggataaaggaatatttgttatccaaagtgagagtctcaagaaatgcattcaagcaggtaaatcggttctgaccctcggtagaactggaagcaagcaagcaaacaagcacatgctgtggaaatgggtttcaaaccatggcctctttaacataggaggcagcggttgcctgggcctgaatttctccgccccagagcagccattaagcttatatgaatgtgactccaccctcgtttccttacggtggcgctgtaacaggaagatgatcacaggcccgctgcagtactctgtccaggtggcgcatgacaacacagtggtggcctcacggaagtatattcataagtggatttcttatgggtcaggtggtggagacatttgtgaatatctacacaaagatttgcatacaatcaaagggaacacccacgggatgccgtgtatgtttcccttccagtataaccatcagtggcatcatgaatgtacccgtgaaggtcgggaagatgacttactgtggtgtgccacgacaagccgttatgaaagagatgaaaagtggggattttgccctgatcccacctctgcagaagtaggttgtgatactatttgggagaaggacctcaattcacacatttgctaccagttcaacctgctttcatctctctcttggagtgaggcacattcttcatgccagatgcaaggaggtacgctgttaagtattacagatgaaactgaagaaaatttcataagggagcacatgagcagtaaaacagtggaggtgtgggttggcctcaatcagcttgatgaagacgctggctggcagtggtctgatggaacgccgctcaactatctgaattggagcccagaggtaaattttgagccatttgttgaagatcactgtggaacatttagttcatttatgccaagtgcctggaggagtcgggattgtgagtccaccttgccatatatatgtaaaaaatatctaaaccacattgatcatgaaatagttgaaaaagatgcgtggaaatattatgctacccactgtgagcctggctggaatccctacaatcgtaattgctacaaacttcagaaagaagaaaagacctggcatgaggctctgcgttcttgtcaggctgataacagtgcattaatagacataacctcattagcagaggtggagtttcttgtaaccctccttggagatgaaaatgcatcagaaacatggattggtttgagcagcaataaaattccagtttcctttgaatggtctaatgactcttcagtcatctttactaattggcacacacttgagccccacatttttccaaatagaagccagctgtgtgtctcagcagagcagtctgagggacactggaaagtcaaaaattgtgaagaaagacttttttacatttgtaaaaaagcaggccatgtcctctctgatgctgaatcaggatgtcaagagggatgggaggagacatgtggattctgttacaaaattgacacagtccttcgaagctttgaccaagcttccagcggttattactgtcctcctgcacttgtaaccattacaaacaggtttgaacaggcttttattaccagtttgatcagtagtgtggtaaaaatgaaggacagttatttttggatagctcttcaggaccaaaatgatacgggagaatacacttggaagccagtagggcagaaacccgagccggtgcagtacacacactggaacacacaccaaccgcgctacagtggtggctgtgttgccatgcgaggaaggcatccacttggtcgctgggaagtgaagcactgtcggcactttaaggcaatgtccttgtgcaagcagccagttgaaaatcaggaaaaagcagagtatgaagagagatggccctttcacccctgctatttggactgggagtcagagcctggtctggccaagttgcttcaaggtgataccaaggtatttcatagttgaaaaagttctgatgaaaagaacatggagagaagctgaagcattttgcgaagaatttggagctcatcttgcaagctttgcccatattgaggaagagaattttgtgaatgagctcttacacccaaaatttaattggacagaagaaaggcagttctggattggatttaataaaagaaacccactgaatgccggctcatgggagtggtctgatagaactcctgttgtctcttcgtttttagacaacacttattttggagaagatgcaagaaactgtgctgtttataagccaaacaaaacattgctgcccttacactgtggttccaaacgtgaatggatatgcaaaatcccaagagatgtgaaacccaagattccgttctggtaccagtacgatgtaccctggctcttttatcaggatgcagaatacctttttcatacctttgcctcagaatggttgaactttgagtttgtctgtagctggctgcacagtgatcttctcacaattcattctgcacatgagcaagaattcatccacagcaaaataaaagcgctatccaagtatggtgcaagttggtggattggacttcaagaagaaagagccaatgatgaatttcgctggagagatggaacaccagtgatataccagaactgggacacaggaagagaaagaactgtgaataatcagagccagagatgtggctttatttcttctataacaggactctggggtagtgaagagtgttcagtttctatgcctagtatctgtaagcgaaaaaaggtttggctcatagagaaaaagaaagatacaccaaaacaacatggaacgtgtcccaaaggatggctatattttaactataagtgccttctgctgaatatccccaaagacccaagcagttggaagaactggacgcatgcccaacatttctgtgctgaagaaggggggaccctggtcgccattgaaagtgaggtggagcaagctttcattactatgaatctttttggccagaccaccagtgtgtggataggtttacaaaatgatgattatgaaacatggctaaatggaaaacctgtggtatattctaactggtctccatttgatataataaatattccaagtcacaataccactgaagttcagaaacacattcctctctgtgccttactctcaagtaatcctaattttcatttcactggaaaatggtattttgaagactgtggaaaggaaggctatgggtttgtttgtgaaaaaatgcaagatacttctggacacggtgtaaatacatctgatatgtatccaatgcccaataccttagaatatggaaacagaacttacaaaataattaatgcaaatatgacttggtatgcagcaataaaaacctgcctgatgcacaaagcacaactggtcagcatcacagaccagtatcaccagtccttcctcactgttgtcctcaaccggctaggatatgcccactggattggactgttcaccacagataatggtcttaattttgactggtctgatggcaccaaatcttctttcactttttggaaagatgaggagtcctccctccttggtgactgcgtttttgccgacagcaacggacgctggcatagcacagcctgcgactcatttctgcaaggtgccatttgtcatgtaccacctgaaacaagacaatctgaacacccagagttgtgctcagaaacatctattccctggataaaatttaaaagtaattgctacaagttttctacagtcctagacagtatgagttttgaggctgctcatgaattttgcaaaaaggaaggttctaatcttttaacaatcaaggatgaggctgaaaatgcatttctcctagaagagctgtttgcttttggttcttctgtccagatggtttggttgaatgctcaatttgatggtaacaatgaaaccataaagtggtttgatggaactcccacagacccagtcaaactggggcattcggaagccagacacagactacttcaagccccatcattgtgttgccttgaggatccctgaaggattatggcagctatccccgtgtcaagaaaaaaaaggctttatatgtaaaatggaggcagatattcacactgcagaggcgctgcccggaaaaaggaccaagtcacagcatcattcctcttgcggttgtactgacactgatagtcattgtggccatttgcacactttccttctgcatatacaagcataacggtggcttcttcaggagacttgcagggtttcggaatccttactatcctgcaaccaactttagtacagtatatttagaagaaaatattctcatttctgatcttgagaagagtgaccaataataatgaggtcagagaatgccacagacaccagggtaagtaaagaagactaaacaggagtctcatctgtctttccctttacagcacagatgccattagaatgtgaattgggtcactattttaattattcttgaagtgattactggttttgaatcttaaccaaatcagatgggttttgatttattcatttccctaaactgtgatccattcttaaaaggggtaaattatgcattggttatttttcagaaagacaagaactattaaaagaaactccctattgaaaactctgaaatcaatgcgaataatagtttttgcattaatgtatctctactaaaatttgggggaattttaaaactaatctggtatctattcagacatttacctgcactcgtaccattaagaaagacagaaagaagccaaaaaaaattaatcttgtatatgaggggaaaaggaaagggcttctgagaggattcttagttgtttcttttgaattccttttaatagcaggatttggaaaatactaatttctgtgcttaagggtcacaggttctgggctctcaactgatatttaaggtgacattcatttttattaggtctaacatctcaagctaaaggagaaagaaaaatacctccttttaaatggcaaagaccttcattagcagcacacttttataaacacccatatagttaaaatgtggccttaaactttcaattactaaatgatgattaagttggatattttaaaatgtcttatacataagcttaaagtaatatattgaaactttaacagttgtgctgtaaaaactcatggactttctgggattctaaatatattatataatatgttacactcttaataactggtagatataaaatgtaacttggatttaaaggagtagagctaaagatctgtattatagtctcattagtaccagacagatgttgttgagaagtactaaataaattagtaatctagatatccttattatgtaaatgagtttaggtgttctatttaataaactattttctgga

SEQ ID NO: 7901 - DNA, 451 bp, Homo sapiens
  misc_feature (1)...(451): n = a,t,c or g
aagaggaaactaaaaccacatttattaatgctgtttaggtggagaaaagttggaaacaacctaaacatcaaaccataagagatgaggtaaacaaaggatgctgtagctatgtaaatgagtactcttacattacaattgctgtaaactaagcttgttcgctctagaaagttgttcatataagatattaagtgccaacgtngttttatgaaagactatacatgatattgtgacactacacttacattaaaaatatatggggtacatattatatatgtatgatactatatgactaaatgatcatcttgtctttggggtaagtaggatttggaagtagctttttcttctttttatttgtctacacttccaaagtttttggtaacaagcatgtgctgctttgcaataatgaaaaatagcaatgctaacatttaactgaaaaaagaaaagcacaatt

SEQ ID NO: 7902 - DNA, 932 bp, Homo sapiens
  misc_feature (1)...(932): n = a,t,c or g
ttttttttttcatttatgaaacatttattgaattagacattctactaaccatttatttttacaaacagttaactaaacatcactggttttctttgataaatggtaatcttgcaaaggctcatttatagatacatcattatttcatgctgtataaaattgacataggagttaagaagaaatcacttaagcagaaagtcaagggtatgggagtcctcggtaaggcttttttctttaatggaaaagaaggctccaaatcatttgctaacaaagaggcagcctgttaaagttgagctgcagacataggacaaggctgggcagcttgccatggggtgaatgccagcaggaaactaagggactaggacattttcaagatgggtggcttcatcttcccttctctgcccagccacgtgttacacaagatggacccaatcaactgggaaagccccatttgcataagattaggggtgggggcgaccagcctttccacatggcactttgcaaacgtcataaatgatgcaaccaatcagaaccacctcctcaaaccggactataaaatttgggcgcatttcaccaccaaccagtcttttccactcggagacacatcatgggccatgcccttaaagccacggtgtcagtgcagacannnnnnnnnnnnnnnnnnnnnnnnnnnnnnnnnnnnnnnnnnnnnnnnnnnnnnnnnnnnnnnnnnnnnnnnnctgtgtcctaaattctcctataacaatgaaccccagggtatgtactccagacaatgtacccacttcaaaagggctgaaagttcttttaaaaatagaggaaaggggggaaaaagtgtacttagcacctagttttgcaccacagaaggaaactggcactcacagatcctgctggtnntactggaaagggatcctggttaagactccaagagagggttc

SEQ ID NO: 7903 - DNA, 469 bp, Homo sapiens
ggattttctgcagttagccccgtccagagcagaacgaagggtatttcctagcctatttcctgggcaggctcctcaaatccagggatgaactactttctgcagtggccagccctccttttgattttattgtggccccaattccagggctttgggggttacagagaatcaggcttccggtgggagtagattgttttccatctataggtggagaaaattccaggaggagaatattgtctggcttccccgttctctctgggcaattgtttccttggttctctctccaactccatgttgtcttagtctcccagcaccccttcaggccttccatgtgggcccctagaccacactacccaccttcacacttgcattccacaactcagtccagtggccagcttgttgatgcctccataattctcagccagagcaaatccttgattggcccaccaggtcttgctgctccagaagttgc

SEQ ID NO: 7904 - DNA, 435 bp, Homo sapiens
agctggagaattcaaaggattcaaaacattaacttgcctgaacgtatcctgtagcacaaagaaaaaaattaaggagtattttaaagatacttgaaaacctctaaatatattttcacatttttttccacctgaaagaatctgtccaaggctgccctgagatgctttttggccgaattctaaggtagatcattaataaaagaagaagaaaagaaaatgccttagaaccatagtaagtaaggggctttcttgaacactggcgtactgctctttgagaacaaagggaaggggattttactgtgtcccattcaaactggtttgctttcttggtcgagtcacaaaagggcctgggatttctgggaagctccgtgagatgcgtctgtgcatacacactagcaaaagtgtgccgctcctttcaaagtaactgttccactcatt

SEQ ID NO: 7905 - DNA, 534 bp, Homo sapiens
  misc_feature (1)...(534): n = a,t,c or g
tggtttcataggtgtttacatatcaggttgcatacttaagatttgtgccctttatatgtcatacctctttttaaattttttttaatgggcaagcttgagaaatagacttggaaaagaaacagaaactaagagaggctaggtcgtcagaatgacaggcaatcaaggccatacctggttatgacactgctgttgctgtcactgtcactaagcagcctcatgtactccccactggagttagttagaaaacatcctcattctccattactcctgattcacagtcccagacaggaagcatgaggattgtactccagcttccgggggggcaggaggagggatttaggctttgccattcctttnctttaggaattttacatagttaagntaggatttctatggatcngcaggaaggggagattttgggatggctggaggcagggccaaaacagtggaccaattttacacaacantttcccaattcatctggaaccccgttggttccnaattgggggtcntttcttacccngtcccccccgt

SEQ ID NO: 7906 - DNA, 205 bp, Homo sapiens
ccacacctggccaagatagggcagacttttaaatggcgtctggcttccccgatagcaagagttccaagggacagcaagtagaagctgtcagcctcttaagatcaggatctgaaactgacacaatgtcacttccacttttggataaagcaatcagagccacccatattcaaggggaggagataaaacccttaggtcttgggggact

SEQ ID NO: 7907 - DNA, 392 bp, Homo sapiens
caagtcaaggttgcagagtgtatgcagccaggggtagcagccacttcaggatctgggtctggatttgtgctgagaaccactatgaccttttaaagccagtgaggaggttttctgggggcccagaagccctgagcccattggccagacctcctgggagaagcggagcggatttgcatcaaaaagaacactggcttcattgaaattctcctcatcttgagagaaacaaaaccacaaagaaaaggaaagttttaattctgagaaacttcactgaggagcaattttttttgagcttctaaaaatagagaggaaatgagcctctttgggtcactctagttgccgcctcccctgccccatgcccacccccactgctcactcaaggctagcctctctca

SEQ ID NO: 7908 - DNA, 1406 bp, Homo sapiens
ttttttttttttttttaaacaataaacagaatttattagctcatataacaaaaaaagtccagaggtaaggccaatctcaagcaaggcttgatcctgtacttaaacaatttcaccaaggacttgatctctttctgcctctcaactctcccttcagtggtgtcagcttcacgtgattcctggtcatgatcccaagggcccaaggtgggtcatcataaagacccaggaatactactacctttttcacattcaacaggggaattaaaacagcttctacccagcattcccataagtcttgaaattccctctggcttcattgtcttaactcacaagatcatacctaacccagttcaccataagctggaaagatggaaggtgtcattgggctagtccaggacatgtattccacccctggagaggctctggcagatcatatgaattcccaaacagaaatggggggttgctgggaaaggaaatggaggaatgaatgtggatgcaatcagcaagacctaccacttcccccattttatggatgggaaactgagactggagatgggaaaagctttgtccaagatggcagataagagctgggactacaacctggcctttcagtctgacgactctacattatttccactctactttatccccaccttgttcagaccaactcacccaatattgagtggtgataaataggaagtcagacgagtcaatttctccctatagtgaaatgaacccctttggagtcatcacatttcagatacctccaatgggtttccgagcaagtcagcagaaaacaaacctgtgtcccaagaattcttgcagtcgtaacatcaacctcagcacttctcctctcctcttggggccccctaagaaccaagtggctactgctacttttaaggggagaatgcattctgatatgcaaacattatcacagattcatgcactcaaaatctaattttagctgcaagagacttcattataagatgttcacataattaagccagctttcttccccgggtttggaagcctgtctattcttctctctcatttacacatcactgggactacccaggatgtgttttagttttttaaaattacatattttggtttttccaaattgatccacaacgggagatgaaatccataaaaattacatgttttaacacaggtttgtgtaactccacaggcttgctattaaagttggaatctgtagacagtcagggtttctctgttctgttctaaccggttcctgatgcatttgccacacttctgccctacatacagatcagcttttattccttggctggttgggagagtatcctctttactgagaagctaagagctgtagatgagacctaacttggagaaaaacaaatggactttcctgcaagcacagacagatcccc

SEQ ID NO: 7909 - DNA, 371 bp, Homo sapiens
ctcgaggccaagaattcggcacgagatggaatagaaaaggaaactgaggctcagagaggtgaagcaacgcagcgaggaaggggcagagccagaccggtctagctgattctaaacccagcactggagggtgggagtatgttgggggatacagaaaatgccagctcttgaaagctttctggatattctgctacgcctatgcattcgaggaatatcagaagtgttagggatgctggacactttgttcattcttgcaggaaatattcgagcccctactatgtgtcagggcaccatgctgatccagggaggggaccctacagtgctgaggggagagagttggggttccagttttaggacttgttttatttcctcca

SEQ ID NO: 7910 - DNA, 362 bp, Homo sapiens
ataacttcagaaactaaatctgaataaaaacctatgtgtaaacgatcatatagatggctgttagcaaagtggtacttttgtcaactatagtatagtatatttgacacgtttaaaatgtacagtttcataggttttaagatacatatatacacaggaagccatcatcacaatcaagatagtgaacataacctaaatctccagaagtccctcatgttcctttgtgatcttgtctcctgccccttcataccgtccatccccagggaaccattgcattctgtcatgagagattagttttgcgctttctaaaattttgcataagtggaatcatacagtagggacccttcaggagtggaggagggctg

SEQ ID NO: 7911 - DNA, 374 bp, Homo sapiens
ctggaagagcccttcgtggatgagcaaaagctgacccgccttttgctgcgtcaggctgggcggatattttcatatgatccctccctcactttcactgtggatttggatcgaccccttacatcttgatttcccttaaacgagtgaagtcatcctaacttttcccctactcttgccatagagaggaggagaagaaactaaccaacatgcagcacaagaaggggagctgtcagtcgtgtggcctgggagaaccaggagccgccggccaggagacacaaaactccgctcccaccgtgtcttcaagaagaaccatgttttaggaagaacgtgcacacataggcgcacacatccagactgttcccttcgcatcctgcaga

SEQ ID NO: 7912 - DNA, 544 bp, Homo sapiens
gttgccagcttacgtggcaattttgcttttctatgtctcaagagccagctgccaggacactttcattgcagctgtttatgagcatgcagcgattattgcccaatgccaccctaacaccagtgtctcgtgaggaggctttggcattaatgaatcggaatctggacattttggaaggagcgatcacatcagcagcagatcagggtgcgcatattattgtgactccagaagatgctatttatggctggaacttcaacagggactctctctacccatatttggaggacatcccagaccctgaagtaaactggattccatgtagagacccctggagattcggcaacacaccagtgcaacaaagactcagctgcctgggccaaggacaactctatctatgtcgtggctaatattggggacaagaagccatgcaatgccagtgactctcagtgtccccctgatggccgttaccaatacaacactgatgtggtgtttgattctcagggaaaactgttggcacgctaccataagtacaatctttttgcacctg

SEQ ID NO: 7913 - DNA, 563 bp, Homo sapiens
tttttttagcttttcaaatctgcttcagtttattatatttgtttctgtaagtttataacatcttttctaaacagacactaacggatctcttttttttcttcctttcttagccaggctaatcctaaaagggctctgctaaaggagatcactggaatttcccagatccctgccctaagcgtggagggtccttctcaaacactcttccatacagggccataactaagacaggcaaaggggctccacttcggctcctcaagcgtccatctcttgaaatctcataatgtctttcaggggcaagctgactcccacttagaatgatctgtgggaaaacataacgcgttccaaatgtgccactgagggagaagtcttcaaacttggtaaaagctgaccccacaggttctccacacgtttccaggtcagtggtttgacacttcagtaatgcacatatctggtaaggtaatattgggccttctactgtgtgcaggtccatcaaaagcacctaggggcataggatctcgtctgttcgcttctcaggacatcttgtaaggttaagtgacaacaca

SEQ ID NO: 7914 - DNA, 462 bp, Homo sapiens
  misc_feature (1)...(462): n = a,t,c or g
atttcggcacagggaaccaacatcagccattaggcttaggaaggcagagatcctgggatggcatcccaaggctcctactttcctcctcacatcgtagcctcaactcatgaccacttatgttgatttggacttctttagttgctctcacttcttccccgtgtcttgatgctcactacctctgtgctgccgtggcacccagcctctgtgccaggctgttgctgtgggtctttttgctgcctgtctcttccctcttgcccatctgggcctctcctctagggcttccctccattctgccatctataaatttgtaatggaaaatttaaccaggggcacagtngggcacatggctggtaaatcccaggctaattcaggggaaggctgnaggggnagggaggnattcaaatttganggcccggggaggnaaggaagtttncagttgaggccntagattnttgttnattt

SEQ ID NO: 7915 - DNA, 468 bp, Homo sapiens
agccagttaaaggttgggagaggctgagagggctgccctgggactatcacattcccctttgtgaagaaatttaaacagaagctagataaaggcttaaggaggatgttgtggagacttgtagattcgggatagggttggcataggtggctgtgaagtccctccatcctgagattctgtgaaagactttcttcaggccttgcttagaattgctaccagttagtatttagggcaaggattagaacccaggaagagatgttaattatctctttacctctcttagtttttctaacagccttgaatacattcaatatattcccactgcctttcaaatgttcctagtgtgtttgaaaagcatgtgtattatccattgttggcaatctatattttatatgtgatcatttgataaaacttgataaatgtgttgttcaaattttgatttcttgcctgttcaatctgtcaattgtttta

SEQ ID NO: 7916 - DNA, 908 bp, Homo sapiens
aaaaaaacaaaaaacaaacaaacaaaaacaacaacaacaacaaactcaacacttacagccataaagctatagacacaactcccactctccccaacatcctacagctctgtcttctttgtatgctatcacaaccgtcataacaagcttgctggtttagggcagctattaattaagaagtaggacgctacctggtgtggctttatgaacgggactcaaactttcaatctgaaaacttgctgtaagccagcatggggtgggggaggtgattatggctggggaagatgggcactcacccgacagcagcatctagcaccacagtgacagggacgttgaggtggcagagggctttggccattttcttactgaagatgacattttgagaacgttagagaaagtacaagacagtaccacagtgatgtatgtcacctaatgtggacagtggatgtttgcttgaaactcacattaatactaatggggttaaggggcagatcccaatactttgggactaagggaaacaaggaattttgagttcttttaggaaagaagtatttttggaaaactatactcttagactctgggtaagagatgtaaattcaggaaaaaaggaggaagttttgctttgattatcgtctagagagagggagatataagttacctattccttgataaaaatcttcatcaatacaatctctgctcttccacgggagttaactacttaagtgaaaccccctagatcatatactgcggcctgctgcaaattcagtgatttttcttccaaaggcaggaaaaggtacaatgaaaggcagtgctgactgctggcaagctgggggcacattctggttctgatcctgttggactgtaatccgcagtttgctctgtaaaattatggctgggcacataacgtgaaa

SEQ ID NO: 7917 - DNA, 735 bp, Homo sapiens
atgtccattaaggaaaccagattttcaattatttagtgagagaagagttagagcaaaagacagtggtaaatgttttattccgtctccatgaggaattgaaggagttggtctccacctagagatacatttgatttacagcttaagtaattcagaggctaagctctaagcttttttctctcattgctggaatgatttaagcagaagtccttttgtgtacttttaaaattgtatctttccaggagcccctcagattgtaccttgctttctcaccaatagacaccttcccgacacttttttaatgttgtagctgagcactttaacaagttgagcattccatgtttcattcttagaaccttctttaatagagggtcttccctcaacagcctgtgcctctggtctacctttgaccaccactgataactaatatattggtcacaatgactggaatgtgactagtgatctcaggagatggcactgtcctaaagtgctgtcagggtggcaccactgctctctgaacaacttaccttggtcagagggactcaggtttgggacagcacaagctgaaggctggagagtaacttgcatagtaggaccatacctcttcctttcccatcccacccacatatgatagacagcccctctgttgagatatggaggggacagatactggaatcgggggtgggacttgcagttacttaaaattttttaataaactgtgccctgaaacctaaactg

SEQ ID NO: 7918 - DNA, 169 bp, Homo sapiens
gtattaaaaagttcacaccaaacccagaacctctagtatatgcagaagccatataggtttttgcttgttttttgagaggctgcttctatcaccttacgcattttcagtgagttaaaataccatcagataactgtcactgccaaaagaagcctgtgaagacatagcaact

SEQ ID NO: 7919 - DNA, 93 bp, Homo sapiens
ggcacgaggtcacaggtcgtgttacagatcagggggacagacaaccacagaacccccatctcccagcacccagcctccgagtcagatgccccc

SEQ ID NO: 7920 - DNA, 56 bp, Homo sapiens
tcactcctctgaccttgacccacttaggtcctgtggtcacttatttatttatttat

SEQ ID NO: 7921 - DNA, 378 bp, Homo sapiens
cttttaaatgaggtactgagggccaaggtgttggaagttcctaattctttcctcggttaactgtgaaactctgcgtattgggaaggcctggcctcagtcatcaggccaggagaggtactggacgccgcgcacgcactcgtctgccagcgaggcccaaaggggaagcctagcggagctcagtgtggcagctgctggcctctgggccgctacttgtcaataccatgctttcctgtaatatttgtggtgaaacagtaacctcagaaccagacatgaaagctcacctaattgttcacatggaaagtgaaattatatgtccattttgcaagttgtcaggtgtgaattatgatgaaatgtgttttcatatcgaaacagctcatt

SEQ ID NO: 7922 - DNA, 803 bp, Homo sapiens
  misc_feature (1)...(803): n = a,t,c or g
ccaaaaccaaccatgaagctgcaaaggtgcttgctcttactgtttcaaatttttgcaactctgtagtgtctcacttttaaaggaacagcttgattgcaaaggagaaaatagataagcaatgaagttatctccaacttcctaaaggcttatgacttctaaaaagtgaatctatcagcattccacatcagatttaaagcatcaaatgcctgtgaaacagcaaagatggtaagcaaagcaaactagtttttccgtctaagtcgaaattgaacacttaccttcctcatagtacagtgaaacatactgtacctcaaggcaatggaaatgccttctagattaaaaaaaacttttggaaaaaagaaatattcaatagcgtattagaagtcctccaaattcaacacttggatttttttttttttttttttaaagcatgtgtgacacttaaaggctttattaatagagctgttgtttaccaatggcgatctggggcttgggagggggtatttttttcaaagtccatttttgatgaagacctttaaacatgcttcgtatgtttttaacatttttttcaaattagtcttttagtcaatatagggaatggcttaagtttggggtcccctttttacccctgtaagccattgcaaacttgacatttagttgggatgcctgacttgtttttagttctatggaaactacactgtatgggnggaaaatctattgcaaggggggcttttaaaaaggcaaaacctgagggcaggcatgacccgggggcccggccntggaggttngaaaaaggatggcccttg

SEQ ID NO: 7923 - DNA, 400 bp, Homo sapiens
ccaataaaacctcaacgttatgactggtctgaatggtattgagagacattgtggtggcactgaggtggggatctgcgtccacacctgggccactggtatgaggagttgtgtccttcagggccagggcagtaaagtgcaggatggccagtgagttccccaaggggaagggcagtctcagaaacagatgcccctgctggagattcttcctccagagccagccctgggagggacagaggttatcccagggaaagggagcctggggaattggctttacagaaaggagtggcctggtggccttgtgtaggacatactggtttgaggaaggtcctcccaatcccactctggccagttcattaggaactacccatctggctgctgctcctccagggatgttctaaca

SEQ ID NO: 7924 - DNA, 58 bp, Homo sapiens
gaagagcgccctgccacccatgaggtggccctgggggcgtcgctagcctttccagctg

SEQ ID NO: 7925 - DNA, 177 bp, Homo sapiens
tttattctgggaatacaaggctggttcaaaatttgaaaatcagtcaggataatttagtctattagtagactaaggaaaaccatatgatcatctctttagatggagaataagtatttgacaaactccagtatactttcatgataatttttacaggccaagcgtggtggctcatgcctg

SEQ ID NO: 7926 - DNA, 146 bp, Homo sapiens
gaaaatgctacagcaaccacttaaaaacaaagaaatatagctagtaagtccaaaatgggaaacaaaatcaaatcacaaaaaatatgtaagtagttcaaaagaaggcaggaaaaatgaaaccaaaaagaaatgggactggctaggtt

SEQ ID NO: 7927 - DNA, 393 bp, Homo sapiens
agtgagttggaggcagctagctcctgcattccacccagcagaagggagttggggtggagctaccaatcggtcacatctgccgagaagtgaaaggctcagcgagaagaggcaagaacaaaggcctggggacctagtctgagtaaagtagttagggctggagggctcttcaggtgtctcggagctgactcagggcagacggcaaggcctgtgctgaatgaacgaacgagggaatgggcaatggtgaggaagggcagggggacaggagaaccaggccactgaggggctgctgcgaccaagggagccaggcttcaaggaggaaagaaaggagaaaaggaaccaactttggtcaccagtagcctgtccatgaccttggaatagatgatcttagtggaa

SEQ ID NO: 7928 - DNA, 180 bp, Homo sapiens
aggacaattaatccattagtcaggcaggttaccaggtgttcactgtttgcagactgcttcatgtgctaggagctagggacttcaattgtaaataccccagggttcttttcaggagcagcacagatttacaatcaacattgcagccacacctccctcccagccctcatccccacctaaaaa

SEQ ID NO: 7929 - DNA, 1156 bp, Homo sapiens
ttcttttccatttgtttatttgtatattggtccataacacattgatgccttacagttccaagaattttttttttttcatatttgtggcaaactgtggtagagacaatgcttggcacagaataggtactagatacatattagtggaatgaacagccgaagcgtctgacttctaaatgggagcagattgctcatttcacttctgttcctccacctcaacaaacctttacatcctcactggtttgtgaggccagagaacaggtgtggccttggtgtgataagaaatgctaattttatacaaactgaagcaatctggtctcgactttgacccccaaatgccctcaaaatggatcaatgagccagggaggcttgaggaaggagggagcatctgcccttcctcctggccagaagagaatttgaatttgcattgagtagcttatgggcagggctggaaggtgcagttcatgactgtcagcagctttgaggctgatggaggcatggggaaggattaggggcctgggagaaagcattttatttccctgtacccccacccaacccaaacatgggggagaaaaacacaacagcaaactgaacagagcagaggccgaggcagcaagaacccaaagacggaagctgcttctagcatcaggctccaggatgcaactgcggctctcagctctgccggctgagcttccagatcctgcgaagcaagtcaggttccttccttccctgccaggctggagtaaggaggctgttctaggcaggcagtctgcagctgctcaccaaggtctggaacaagctgccttccttctttgccgagcagatgtggatggcggtgggcctggctaatcaggggtgttctgctccggacaggctcatctagatttccatcctgccaaaagtttgtccttctctcaaacgattccgggaggagcgcaaactcggctcttggggagggcaggcgggccgggtaccctagaacggcaggcgcctgatacagagcaggccccggggaagcaggactcgggggcacggtcgccaaagtggggacccgagcagcgatccggagggagagcattcaggcgcccgggctgggggctacactcgtggcgcgggatggcccaggacagagtgggcgctatagcgtgagtggccatca

SEQ ID NO: 7930 - DNA, 132 bp, Homo sapiens
tcttctagcattgcttctttattaatgtcccattatgattataaaaggccaaaatgtttatttaaatgtagtcttcaaatatttttagggcactcttactcagatttgaatttatttatttttttttttttt

SEQ ID NO: 7931 - DNA, 365 bp, Homo sapiens
gctgaaaacatagatgggggcctgtgcttaggaagagctctctgtatattgatgatctggtgagtaaataaggaaagctcttcaaacatcacatttcatggatatgtttaagattaaagtttaagagtgtgtgggtgaaatatttggtttaactggaattaaataactttactgtggttttcagcaagatgagtggtatttggagttttcctttgggactggaagaaaaaagcaaaaaaataaattttaatttgatttgcatagtgtggcctgatcgtttaagtgttgttagaaagagagatgactaaaattagttgagattattatattatggattaagtatattgccttattttcattatgat

SEQ ID NO: 7932 - DNA, 938 bp, Homo sapiens
ggagccgcaagcgacgcctcttctctcgcgccctcgcctcttcctccgcctcctccttcgcctcttcctgcctcctcccggcttccgccgccgccactccagcctaatcccaaccccagggcgaaggttttcttatttatttccgttttctcgccactacagcctcctgacaaggtgatccgggcgggccccgcaggaattttatcccctcaccggcctcacactagtatcgcatgtccactatccagaacctccaatctttcgacccctttgctgatgcaactaagggtgacgacttactcccggcagggactgaggattacattcatataagaatccagcaacggaacggcagaaagacactgactactgttcagggcattgcagatgattatgacaaaaagaaacttgtgaaagctttcaaaaagaaatttgcctgtaatgggtacctgtggattggaacatcctgaatacggagaaggttatttcagcttcaaggtgaccaaagcaaaaaccatctgcccagtttcctcttgggaggttggcattgtaaaggaggaacagctttaaggttccatggattctaaaatgaaccttaaatacgtggagaatttcttgaatagttttgttctctaaacccggtttggctgccttgtgaaatgattccctgcagtaaacggacttttcatttatttaatcattcaaacttccattcacatctgcatgattacagaaaacatggggtatgtagactagtaacacataagaaaattgccagtaagatggtaacaaaacctcatattgtctttacatgtttccaatggaaaatgttttgagtgtttattgttcagtttattcacgtttcacttgattaaatttttttgttgttgtattaaaccatgtacgttgcagcttaacaataaaaaaaaaatctatga

SEQ ID NO: 7933 - DNA, 399 bp, Homo sapiens
tttttttttaaagtgggagggtctacatgaactaaatgaaaagctctgaactgtcatgaattggagttttctagtaaaacacaatgttggcagtatagagcaggcactgatggtagtgaaaacaagtccacagaacagagtgttacaagaagagatggtttcttgctacggaggagttctccctttgttacaaagcttttctaggaagattctttcgattaaaaagaagttgcagaaacatggatttggtcacacaggtatgaagggaatcttgggctttaaattctctagtaatacatcaataccaggattcccaaacaattaatttcaattattaaatattaaatacaatgtggaggcagatgacattgaagcggatgctccattccttaaatacca

SEQ ID NO: 7934 - DNA, 584 bp, Homo sapiens
cagagtttatcaaatctaggatgtcttgggaagtatgatgcttactcagacatcctagatttgataaactctgaaaagcagcatttcctttgtggagaagtgggattatagttggatttttaaaggactgtggaacatatttaaccaccaaataccacttggcataatatgctgccaccctaaagagaccacatcaacaaaacccgtgttcgtttcagaagtatgctttagatatatttacattcacttatctaaatctaaattctgtagttttaaaatatcacataattttgagttaccagggaagttagtagttgtacagtaactggtcctataaagataataaatttttatcattaatttgattttatgtgataaaatagatatcaaaaatttatttcctgctaacaaaattttcctttcatattcactgggaaaagcacctttccaaagaccttttaagttgaaattaaatattatattttctgggaagtcaaatttgttatgcatgaaacaaggaagaggagttaacctctgttcccaaaaagcggaacagaactttctgacaactgctttgttccagt

SEQ ID NO: 7935 - DNA, 400 bp, Homo sapiens
  misc_feature (1)...(400): n = a,t,c or g
aacattgcttgtctgtaaatctgtgggatggccttgaagtgaaaggcgaggttgctgtaagcgnctaatcataggctgtggggacactctactatattctattccccgagcaggagatcgtgaacgaggtgaatttctgggtgactgcttaggtgacggtcgaggtgaattgcgtggtgatggtgaaaacctgttaacagcagggtatactgcatgatgcatattgtcatcttcatcatctaaactttgtgcatcaagttcctgatcactaaaagtaccccgtcttgtagaattgcaagatgaaccagaactgcgccgagacgtggtggctggcatattccttgccggagactttcttcctgcatccgggctagaatctgtacatcagttacatcattta

SEQ ID NO: 7936 - DNA, 462 bp, Homo sapiens
aacttttgaaggccttaaaggactagctttgcctggcccatctgtctctccagcctcaccttgaactgtgttcctgtcactgcacgccagtcacaccggcctctaggtcctcctgtaggccactcttctttctggcacagggacctgcacacctggagtgcccttcctcccccactcgcctgttcacccctgcttttcctttacacctcctcctcagggaagtgcccaccctccgtacatctttcacagccctgattgcagctgtgttcactcaccaggtacctgcaagaaggcctacagggtgccaggcacttctttaatgagttctttctttatgtgattatttgattaatctctgcctcccccactagacgtgtaagctccctgaaggcaagaatcctgtgcttatgctcaatattagctctcccttgggcacagagtaggcactcaacaaatgctccc

SEQ ID NO: 7937 - DNA, 1334 bp, Homo sapiens
cggcggcccagactatccgctcccaccgcgcccccggcccacctggtggccccggcctggccgccgcccccgcgctgtgcccgggagctcgtcccggacgcgcgaccgggcggcgggggctcggcggccaccgctgcctcaagggagcgaggcgggagggtgtgtgtgcgcggctgtgagcaggggtgccggcggggctgcagcggaggcactttggaagaatgactctggagtccatcatggcgtgctgcctgagcgaggaggccaaggaagcccggcggatcaacgacgagatcgagcggcagctccgcagggacaagcgggacgcccgccgggagctcaagctgctgctgctcgggacaggagagagtggcaagagtacgtttatcaagcagatgagaatcatccatgggtcaggatactctgatgaagataaaaggggcttcaccaagctggtgtatcagaacatcttcacggccatgcaggccatgatcagagccatggacacactcaagatcccatacaagtatgagcacaataaggctcatgcacaattagttcgagaagttgatgtggagaaggtgtctgcttttgagaatccatatgtagatgcaataaagagtttatggaatgatcctggaatccaggaatgctatgatagacgacgagaatatcaattatctgactctaccaaatactatcttaatgacttggaccgcgtagctgaccctgcctacctgcctacgcaacaagatgtgcttagagttcgagtccccaccacagggatcatcgaatacccctttgacttacaaagtgtcattttccagaatggtcgatgtagggggccaaaggtcagagagaagaaaatggatacactgctttgaaaatgtcacctctatcatgtttctagtagcgcttagtgaatatgatcaagttctcgtggagtcagacaatgagaaccgaatggaggaaagcaaggctctctttagaacaattatcacatacccctggttccagaactcctcggttattctgttcttaaacaagaaagatcttctagaggagaaaatcatgtattcccatctagtcgactacttcccagaatatgatggaccccagagagatgcccaggcagcccgagaattcattctgaagatgttcgtggacctgaacccagacagtgacaaaattatctactcccacttcacgtgcgccacagacaccggagaatatccgctttgtctttgctgccgtcaaggacaccatcctccagttggaacctggaagggagtacaatctgggtctaattgtgcctcctaggacacccggccctg

SEQ ID NO: 7938 - DNA, 424 bp, Homo sapiens
ggatatccaagagggagaatgaaacttcctgggcttatctggattcttctgggctatagatctcaaatagagacctgttggttgctagggtagtccagacaccccttagatgtcttcataatagtcctatctaccttcaaaaaccatctctatatatggcagactatattaacagctgctgaacaaatcagctctggaggtgattccacatcccctggcattatgctctaatgctgctcatcggagaacagacagccaggataaagtggcaccttctggagtacactggagggggcagcccaagttagaggccagcattgctgacattctggaatattttgcatctaaaaatgtttactcgttgcccttgctggcagtccgcacaagctgtggaggcaggaaaacttggactttgaaggcaggc

SEQ ID NO: 7939 - DNA, 252 bp, Homo sapiens
gcttaggatgcttcttcttgtctgatttctagaggggtctttaataacagctttatgtggtttaaaccctgagtaagattcagagcagggtgagtcctacctattatggagagcaagcaaagaaaatgctaacaaaacgtctgagttttatgagaacactgaggtcccagggagaagctatctcaaagatgaacaaatacgtaattatctttgtgatttcagaattgttttagtcaatgaattaactctttt

SEQ ID NO: 7940 - DNA, 518 bp, Homo sapiens
  misc_feature (1)...(518): n = a,t,c or g
caaatgctgcattatttttataaacagaagcaagctacaatattgtaacagaaatattgaagattatatttgaaaatattcaaggctaaacaaaagcaagttagatatcacctatgtgtccgcaatcagaaacctttgagactaaaatttagccttttgggaagcaccgtccatcttcccccagacccacccctgcctcttgggcaaaatcacagcaccatgctgtggactgagggggtcagtctaggaggaggcagaggcttgatttctctctaggggaagggcttcatgcaggagctctctggcttccttggggtttccaggacttcaccaggccttcttggggcctggaggttccctttcttctggaggtcaggggcnggggcttctggcnagggggaatacttgggggacaggtggatccntggggggacttgggaaggagggccccntggcaattncctgcagtttaccggggggttactttaattaggctggggcatttagggggtctttag

SEQ ID NO: 7941 - DNA, 726 bp, Homo sapiens
  misc_feature (1)...(726): n = a,t,c or g
ggactaagcccagcaactcctagaatcacctataaatgctaggcatagatggaaattattgtgttccaccagaagcacagctccaaactatacctaaaaaatatttctgcacttcccagagacctggacttcaaactttcccagtggagcctgattatagaacttgagggtcctatctcaggatgaaggggagaggccctggcttcacgggaaggtattccagcattgttctgcttcacccttgactgcgttgtctggcagtttctgtgtgctgccagggatattatatggaactggagaagttggagtcaggtctctgaagctaggagtttcacttaattaggatgcctctgtacatgagaactattactgtctgcaggtccatatagctaagctgccagggaaaaacacatttatcttcccaaaacttttcagagcatgtgcaggaacccctttcttaggcgttttcttctcagcattttctctgcctcccagaggctggcagccagtgacactgcagaggtcagcatgttctaaccatgcacgcagggcaggggctgccttggccctcctcaggctttcgttgggagagcaggcactggtggagcccttctgggtgcagtcctctggggttgctctttggaactcatgtatgagtnngactccacaaggcttggnatggataccaaancagttgcnncagattagntctgaacctggaacaga

SEQ ID NO: 7942 - DNA, 478 bp, Homo sapiens
ttttttttttttttttttgacattttaaacactttaattacttaaacaacaagaaaagaaacatttataaagcatataccaaggctgtctcaggttttaggatgtggagaagccaatggtaggctggatactctctggctacttaaagccttacccatttaagaacatttgtgggatcccactgactatggtcatggtactcctttgcttaagaggagtgcaagatcattcagagaacacagagaagcatgctccacttactccagcgtggacactggttttgaaccctggttttgaaaaacacatctctttgctcagcataactccctgcagtcaaaacatgaggccccctgcctcaaaagcttttaatgccccaatctattatccactgcttctgaggtccgcagcctcacctgaagtctatgtccctaagtctctgggactcaggtcaatggggaggaagaatttcccattctct

SEQ ID NO: 7943 - DNA, 514 bp, Homo sapiens
agctagcaccattcataccctgataactgaattggcagtacctttctgtgtttacagtgcaatacaatattgtattcagcacatgagaaagaattctagtaattaatatctaggcatataattgttttttaaaacttaggccgtttaatacatccacatttatgttcccttaggcaaagacattggttctgaaatgtctgcttacaactaggtaaagtctacacataagaaaaaaaagactggaggccgggtgtagttataaggactgaaagaggattagataaaatctcacacactgaggcaaccaagatttggccccttaagttgtaaataaggattattacagttttatccaggcctcagaaagaggaataaaaactccctgcctctcagattctgacctgtgggcagtgataaaaagtaatcgtgaagcataaacgcactcagaacattccccaaaatgacagttagaaatacggtagcgatgggtgactaacctttttttttttttttt

SEQ ID NO: 7944 - DNA, 1607 bp, Homo sapiens
tttttttttataaccaaatgttatttaatatcttaaaaagtaacacaatccaaaatggatatttcacacaacactacataaacaacatgaacacagtatcaccatagggagggactttcaaatatagacttacaaaaatccctgtccttttttttcttttaagttattatactaagcatgacaagtaatcatcatttacagtatggtacactgacacgataaaaaccatgttacaaatgtgctgttataaatcagtaacattagggaagacatttcatgaactgtaattatttcatatgaaatactatacaatataaacagaacatccatcttggatgacctttacagcaaccagagaccaagtaatttaaaattttttttcagtgcaaacacattttattcaaggcagtcttggctgcaaaactcctttctaacatacagtaaatcccacttgcacgtcttaattcatttaccctaatgcaatagtcacattcagtcactcagagaaagatacctgcagaattatgatccctttaaacttgacgtttaaatttaattctcttctagaacgtagtatctgtgtcaactgctctaaggactttaatttgtagctgtcaatacttgcatgaaggtgaccctagggcagctctattcctaacccagcaagtgtgcacgatactgcacagtgttctgcccttccaatgtggaaaccatggcggtgtgtcagtatctaggtgggagaatggaaaggaggacctcggaggaaaggaagtggaggagctgctgcatgtgtacttcatgattagtttcccggaactgcagaggacagatattggaggagatctcaggtctcacatttggtacctcttcttggtgggagcaagggaacaagtttactaagaccagccaagcttctaaccttacatttccaaccttccagaatcatcgctgcctgacttgaaacaccccattccctccttggcatgatgtgtgtgtgtgtgtgtccacatttgaagccaacaattaatgattacagccctataactgatcatgtacaatcgtaagaaagtttagttcccccttgagtcttgtagaatcctgaatcttgtgaatcatcaactgtaagtcatagaactgtaaaatcacaggactgtgtgttaggggagcccatctctgggaatcctccttgtgggctgctgcctgcaaaagatgcagagaattaactcaataggaaggtgccaatgtctgtttgaaacacacaaggaaatgtaataatgaatgttttcatatatgtaatttatgaaacatcgcctgaataaaaatctgtgggaaaatactggatgtatccttaataccataagaccttctgggaaaggaatggggtgacagttgattctatctcacttggcaaagctccgaccaatagtaatctttgtcctgcccacattttactaacccaaagcaaaacagtgttttccatgccttttgcattcatgtttcctgtgttctagctcccccaagccctaaacatgtgcagaaaagtcactcactaccagaagagccctggatgacattgacaatgggcgggatggacctgggggagatgg

SEQ ID NO: 7945 - DNA, 1072 bp, Homo sapiens
  misc_feature (1)...(1072): n = a,t,c or g
tttttttttttcagaaagctaacgcactgtttatttgggggattggggggaagcaccgtgccgctgctcactggtagccagccagctgcagaatggtggggtagcaagtacgatgggccatgcacttctggcggtcgatgaagacactgttggtcatggcggtgacgtccttctccaggctcatgtggatgtccttgaggttgcgcagggactgctccgcttgtagaagcttctcccgcagcgctgtgatggacttgtacagctcctccacctcactcaccagcttgggggtgttggggggtgtgagctggggctggggagggcagaagtatgcacctactggggtggaaggggacccaaaactcccaattgggagctggcaaggaggtcctgggaagacgccatgaaaggatcctaccaggaaagcggctctagggcagagcataaattacgaaggtcctcccaaggagcgcgggctgagtgggaatgagtgacccgcgtgcaatctcgaccctgacaggacaggactggcctcagccgaccaggctcagttctttccattcctgatatttgacggaaggaggcacccagttccttgaaggaactgaggggcagggaaggaagaaaggtacttaggctcagaaggggcccaccaggcatccgttaacaagggaaacaaaaggacggcccatctatgcctgtagcccaggcgtaggtcatactttccaccagaggtggggacagcaccctcagggcagcagggaatggccctctctggcctctctggccccgtggcctccaggagctcaccttgtctgaaggagcttcctcccgggaagatgaggtagcacagggtggggtgagaccacgtgggcacaggtccctggcacggggaggcccccgaccatgacctgccagngtcaatgttttntttgntttntaaggggtnttgggttttgggtntggccnaangctcccnccccctcanaacntngggggtttnttttgggttgggggnntttttggngggggnnaaannaggggtngttngggaacnggntttcnaanggcg

SEQ ID NO: 7946 - DNA, 2475 bp, Homo sapiens
  misc_feature (1)...(2475): n = a,t,c or g
atcgagccatttaacatggcggaggatgtttcctcagcggccccgagcccgcggcggtgtgcggatggtagggatgccgaccctactgaggagcagatggcagaaacagagagaaacgacgaggagcagttcgaatgccaggaactgctcgagtgccaggtgcaggtgggggcccccgaggaggaggaggaggaggaggaggacgcgggcctggtggccgaggccgaggccgtggctgccggctggatgctcgatttcctctgcctctctctttgccgagctttccgcgacggccgctccgaggacttccgcaggacccgcaacagcgcagaggctattattcatggactatccagtctaacagcttgccagttgagaacgatatacatatgtcagtttttgacaagaattgcagcaggaaaaacccttgatgcacagtttgaaaatgatgaacgaattacacccttggaatcagccctgatgatttggggttcaattgaaaaggaacatgacaaacttcatgaagaaatacagaatttaattaaaattcaggctatagctgtttgtatggaaaatggcaactttaaagaagcagaagaagtctttgaaagaatatttggtgatccaaattctcatatgcctttcaaaagcaaattgcttatgataatctctcagaaagatacatttcattccttttttcaacacttcagctacaaccacatgatggagaaaattaagagttatgtgaattatgtgctaagtgaaaaatcatcaacctttctaatgaaggcagcggcaaaagtagtagaaagcaaaaggacaagaacaataacttctcaagataaacctagtggtaatgatgttgaaatggaaactgaagctaatttggatacaagaaaaagtgttagtgacaaacagtctgcggtaactgaatcctcagagggtacagtatccttattgaggtctcacaagaatcttttcttatctaagttgcaacatggaacccagcaacaagaccttaataagaaagaaagaagagtaggaactcctcaaagtacaaaaaagaaaaaagaaagcagaagagccactgaaagcagaatacctgtttcaaagagtcagccggtaactcctgaaaaacatcgagctagaaaaagacaggcatggctttgggaagaagacaagaatttgagatctggcgtgaggaaatatggagagggaaaccgggcccnaaatactgttgcattataaattcaacaaccggacaagtgtccatgttaaaagacagatggaggaccatgaagaaactaaaactgatttcctcagacagcgaagactgattgtgtttgtaaaagcttgatgaaaggacagttaagtattttgatcactgcattttgtttgaaacttgtgtcattgatgtaatttaaaacttttgtttaaagcattacagtatttttctgtgaccatcaattaatgagggtttgtgctaccagagttaaagcatatgctatcattgtattctttaagaaccttattttgataaaatgtaaatttgttgaaccctgccacatttagtatccccacccccaaatcctgttccaatgaaaaaattaaaacctgatacgaaaaaaaaaaaaattccagttaacctattttgtgtctgtaggctgacctcaaccctgtaacgtaacccattaaaatgaannnnnnnnnnnnnnnnnnnnnnnnnnnnnnnnnnnnnnnnnnnnnnnnnnnnnnnnnnnnnnnnnnnnnnnnnnnnnnnnnnnnnnnnnnnnnnnnnnnnnnnnnnnnnnnnnnnnnnnnnnnnnnnnnnnnnnnnnnnnnnnnnnnngnnnnnnnnnnnnnnnnnnnnnnnnnnnnnnnnnnnnnnnnnnnnnnnnnnnnnnnnnnnnnnnnnnnnnnnnnnnnnnnnnnnnnnnnnnnnnnnnnnnnnnnnnnnnnnnnnnnnnnnnnnnnnnnnnnnnnnnnnnnnnnnatgaattttctagatgattgaataacagtagtcctttgatagaagataatgacttggtttatggccttaatatactacttaattacttaagatgtttattaatagaatgataaatgtacagagtaacctataagcatgacatacttttgctttcagtagtttcatgtaaagaaaaaaacttcgaaaatagtaatacctgagtacccatgggaataatagacactggggaggtagggtggggagcgggagaagcagctgaaaaacttacctactggggactgtgctcactacctgggtgacaggatcataccgtaccccaaacctcaacatcacacagtatactcagctaacaaacctgcccatgtgtttcctggaatctaaaataaaaatccgaaataatttttttaaaaaagaaaaagaccatagtattaccccatgggacaaaatttggtactatttagccagaatccttttgtggtccc

SEQ ID NO: 7947 - DNA, 878 bp, Homo sapiens
  misc_feature (1)...(878): n = a,t,c or g
ttttttttttcctttttggacttcttattctctttctcacactctttctttttaagaactgcacaggaaccaggacttggaaaaatcatattctgggaagcagctttgatagtagccaaagagatgtcttcccaaaaagccactaaatgttgtaaagttaagggaagaggagacttagacttcattgtgttatgcatggacatttcaaaagtggtctcggttttcccatcctcacatttttcatgcagaggtggttccttaagcatagacaataccttgtttttgttgatgctacccatcttagatatatctggtccatggggtgcaatattaaacatattcagtgcagatgatatttctaatgaatgtctattttttaacttggtttctttttcctctgtaggttgttggctatttaaactactccttataggagcatgttctttggaaagttcaggatgaaactttaggaaagaagaacaagccattgcatcatgtactatgccttcatgccagaggaaggaagcaaacacagctctggcacattcggccacagaaggagacatggcttgcttggctggctctaaaggcttggatccatctcctttgaaaagaaaactcgatttttcttttttgggcctggtgtgtctattagcacattttcgacttattttgggagatgctctcatttcctgttcatctttcagtggtgcttttccaatgctaaaatgaactttatttgaaccttcatccacactcttaaattctctgctgtcatcgcaggtgctgtctgttagacctcgtgccnnnnnnnnnnnnnnnnnnnnnnnnnnnnnnnnnnnnnnnnnnnnnnnnnnnnnnnnnnnnnnnnnnngggt

SEQ ID NO: 7948 - DNA, 446 bp, Homo sapiens
aaaagcacaacttccagggaatagaaaaaatcacacaggttagcatggcctcattgaaagaactagatcaaagactctttgaaaattacatcgagttgaaagcagatcccatcgttggctccttagaacctggaatttatgcaggatattttgattggaaggactgcctgcctccaacaggtgtcagaaactatttaaaagaagcactggtgaatataattgccgtgcatgcagaggtgttcaccatttccaaagaactggtccctcgggtactatccaaggtgatagaagcagtttctgaagagctcagtcgactgatgcagtgtgtttcatccttcagcaaaaatggagctttacaggcgagacttgaaatctgtgctttgagggacactgtggctgtttacctgacacccgaaagcaagtcaagttttaagcaggctttggaa

SEQ ID NO: 7949 - DNA, 334 bp, Homo sapiens
tcccctccttgaatctgtatctatcccctcatcaatttctaccttctggcagcttcaattttctctgcgtgggtcttgagggaggaaaagcaagttcccttagactggtaacaagtgttgataagaacaaggtacctgagggcacatccccaggtgtgttttgcatatgagtgatgtgtatcagtggggttggtagtgagtgatgattcctcctggaagatcagttcttttggggttacggtcacagggaactgcccactctatgtcatctggggagaagctccgcactgcccagggacttctgggaagcaaagcctgagtgtcactaccacct

SEQ ID NO: 7950 - DNA, 524 bp, Homo sapiens
ttttttttataatttaagaaactgaaactacatttttgcattttagtaaaatctgagattgtacagtttttaatctcatttccacagacacccagcaggcagcctcttttctcttagaaaaatcaaacatgcaagccgtgaagtcaggaatagctgaaccccttggataagcacacgctttgggcttctttaaagcgagcctctcatcaagagcatttcctttgctggcatgaggggagggctgtgcctgccagggctagcacctgggagggacgctgacaggcagccggagctgggaaccactgtcccacctgcacgtctggtggctctgagacccgagtgccaccacctgcagcttaaatgctcgttttcactagagccacttgtgggctggagaggaagaaagatccaaagggaaatccacaaatttccttactgaagactgtcctgagcttgtacctctaagctttaaaaagagacgaagacccctcaaacgtgtgaaggcaccaggcgtgacccatgtg

SEQ ID NO: 7951 - DNA, 374 bp, Homo sapiens
atctttccaaatgttgcaaaagggggaaatagttcatttatgtaggtagtacacacactttatatgtttaagtacttacaagcatagtgaatttaagatcaaagacctggtttcaaatagaggcaacactacacagtaatttggaaactgaaaaagtcatccagtttctgtaagcttccttttgcttgtaaaaaacagaatgagctgtcttttaggttcacttttcagcatcctgggtacatgagctgaagtgcatgatgggcacatttaggttattcaaggcattgtgatatttaaggaaggttcctgggtgctttggatgaggctttgcatcctaactgagctcctaaaaaattctaaggtggaaagtttac

SEQ ID NO: 7952 - DNA, 106 bp, Homo sapiens
ggcacgaggaaagagggaagccacccagatttcaccctatatatctctcccttttgctgcttccaacatgtatcttttttgctataataaaactgtaagtccagca

SEQ ID NO: 7953 - DNA, 706 bp, Homo sapiens
tttttaacctgtgacacattttatgtcagcaccacaagtgctgacaaaccaaggtttacaagtccctgcatcttgaatcagaattgtaacaccttgtggcattggagctatgcaagcagctgttaacctaaagctgttcacttgtacgggttggttaaacctcacctactggtgtataatttatggtctcaatagcagtgcatgattcaggtaagcctcttttagagtagtcaggcagtaagtattaagcacctcctccatacacagcgtttgggtaagtcaatgaaagggtcctaaggacttagctggcacagcccctgctcccaaaggcactgtcaattaaaaaatactttcatgcataaagagtggtacatgaccacaacctggggaaagccgtggaaaggggcataggctttgaaatccacgtcccagttctgggttccatctcttttttaatggaagggtaatgtaaggtaagaggaggaaggtggctgtgggtaagggaccacctttacaggcaaggtggggtttgcactgggcctttgccattccctccacacctaaggaattatggagagcctttctttcctagttccagtggcatatggattaccaaggccctttcaggattcgtttttttattttttattttttagaggcggagtctcatgttgcccagtctgtagtgcaatagctatttacaggc

SEQ ID NO: 7954 - DNA, 680 bp, Homo sapiens
gggtccggagccgcccaccaggttgccaggaggaggcgggacggggaggcgcccgaggtgagacgggggcaccctctgcatcataaaggacccagaccccggcaccctcaacatcataaggaatcagacggatgcggaaaccgaggcgggctggataggaaactctttccaggaaggctccggggcactcaactggtctccaaccttcccctgcaacctgtgacgcctgccattttcccattttaggcgatggcaacgcaacccctccgtttgctctgggcaaaacttcgagagttccctctgaagctggagctttttcctcagatccaagatccaattggtcaccaattcgtgatttccgtcggccaagtgcgtgggcattgatctacacgcgagtttctccacctctgccgaatggctacttcggggtgggggaggggccctcccaccgtggattgcaaggtgtttagcagcatctgtctcctccgctgactagacacatgccagggggataacattctccctcccgcttcccccagccgcggcctagtgtcccagcggggttgggagaggcatgtgagggcgaagttgccccctgttgagaaccattgctggcgcgtagtccttctctctgaacttgtgcagaggactctccaggtgaaggctcaagggtggatcca

SEQ ID NO: 7955 - DNA, 549 bp, Homo sapiens
  misc_feature (1)...(549): n = a,t,c or g
ccggtaggaggaggcggaggccgaggaccaggaatcaccttcaagcctatgtcgtgaggctttggcagaaattaagacggaaatatctccattgttcattggcatggaaaaatgttcagtgggaggattagagttgactgaacacgactcctgctttattagggaatatggccatggcaactagtctcacgaatgtaggaaactcatttagtggtccagctaatcctttagtgtctagatctaataagtttcagaactcgtcagtggaagatggatgatgatgttgttttttatcgaacctgtacaaccttcccccaccttctgtaccagtggtagctgatcaaagaaccataacatttacatcatcaaaaaatgnnnnntacanggaaatgattccaaaatanctctttcttcaaagnagtngcattnaaagggaangnnaagnnnnanattngcntggtnaataaaangnccnngaaaccaattnagggccanagaaaaanttctcccntttattgggcgaagancttctgngnctaaaaacagaac

SEQ ID NO: 7956 - DNA, 500 bp, Homo sapiens
ttgaatttcaaggagtttaattgagcaatgaacaattcgtgaattgggcagcccccagaatcacagcagatttagagaaactccagggatgccccctggtcagaacaaatttatagacaaagaaagggaagtgccatacagaaatcggcagtgaggtacagaaacagctggattggttacaggctggtgtttgccttatttgaacacagtttgaacactcagcagtctatgagtggttgaagtatggctgctgggattggccaagactcaactattgtaattgttacaggtgtatactcctaaattaggttttcaaccttgtctgcctattaaggctaggttacagttcatccgcaataactcaaatatagaagtatggagtccttctcaggccatatttagtttgctttaacagaagggacagagaggaagtgtgttgcaggactcaaagagacttggcaatcaatagattcttgatctaacttgctaagtaggttggt

SEQ ID NO: 7957 - DNA, 393 bp, Homo sapiens
  misc_feature (1)...(393): n = a,t,c or g
ttccgcagggcctcgatggtctctggagagagcaggtacttggggtaagtgggaacatcgcgtcgaggagtcaacttcttgtggttatccaaaaaactgtacttacaggggcagttggtcctgctgcttctggccgccagctcctccctcatcttcttaatgtcactcttgcatttctcaatctccaccacttttagtccttccaattccacgcgtttctctaggacagccaagtgatttgcaacttcagctttcagttcattgattttgaatgctcttgagaactctctgcaacctgcgccagcacgctctggattaattcttctctctctggagggatgcgctggccttcctggtagcnancctggggctctctggncctgggctctacct

SEQ ID NO: 7958 - DNA, 279 bp, Homo sapiens
  misc_feature (1)...(279): n = a,t,c or g
ggattggtatcccctctgctcccaggaatccagtaaaagtagcatctcttcctcaaagatgagccagccgtcatttgaagaggaggaaagactggattggggaagaatctggggcaaaatgaagccaaattgagaacgaggagaaaagaagatgctaaggccgcagataaggagttccatctcccgggctgatcctngctcctctncgatacgttctgcagatggtcctntntggcccagtcttccaaatgcacctcttcagggatgcccatccnttag

SEQ ID NO: 7959 - DNA, 355 bp, Homo sapiens
gtcaagctgcccctctccaacatcaaactgtagtctcttatgtccagctgcttctcctcttctctgctctgtcagtggagcctggggtttttatgggcataagattgggggtggggcgggacatgagtggttttggaaaaggcaacatcacatgggaaaacaggaatgcatgttctcacttggggccatggttccaggcttggacttgatgccttcacagctggattctatcaaatatttaaagaagaactaataccaatcctactcaaactattccaaaaaatagaggaggaggggatacttagaaactcatcctacaaggccagtattaccctgataccaaaaccagacaaag

SEQ ID NO: 7960 - DNA, 401 bp, Homo sapiens
attcacaggttccaactgctgttgtcttggggtgaaaagcagctccaggctagacgcttgcggtggattcatgataatgcagctcagcagctctgctttcagctgtcaatatgtttgccaaacatcctgtgtctataagagccatgccaggctatgcccaccacaggctgaggaatccagtgaaggcaacccacaagccagcagaatacatcaaagatccacacacttcagcccctactcttgacatctcatttccctctcctctgaatgtactccagcccttgaatgggaaatacctggagttttctgattttcaaagttcttatacagaagggagagagttgtaaaattctcaatgaggccttcctgacttctcgttcaaattccaattctccctaatt

SEQ ID NO: 7961 - DNA, 424 bp, Homo sapiens
ctaggtcctctgcttcaagatctttgcatggccgcagtcaagatggtagccagggctggggtctcaaggctggagtcaaggtgatggccagggctgggcttcctctttgagtgaggaaggacatgctttccaagctcatgtggttgttgggatttggttccctccagctgatggattgagggccttagttggtagctgtccatctgctgaaggccaccttcagtttgtttccacgtgaacctcctcaacatggccacttccttcatcaaagcatgtaaaccaagaaggcagtggagagtctaacaagacagcagttacaaccttgtgcagtgtaatcatggaagtgacatcccgcggtctttgctggattctgatggttagaaggaagtcacaggtttcatccacactcaggagcagaggaact

SEQ ID NO: 7962 - DNA, 363 bp, Homo sapiens
  misc_feature (1)...(363): n = a,t,c or g
ggcagaggaccttccccatcctccatcatgtgagcagccagagccgggcgctcgaacttgcgcaatggtggctgccgcaccaccggctcgggcgtcaggcagttatctgggagtccccgagggccgagtcggggccatgtgggcgggtcggggtcttgcgtttttggagcactgagtttttaacccctgcctacgttttcaagtctggcaagtgtagggagaagcctcctaacagaagtccctctaagccttcctcgtcggttggncttggaagcgtttctgtgtggtcnaaanggcggggcgaacnngnagganaanggngcncncacggattctttaccaantnnngnnntcccancttaa

SEQ ID NO: 7963 - DNA, 374 bp, Homo sapiens
accatcactgacgagtttgagcaggtgagggccccgccccctctcttcccgctgctagggttggggtagagtccccaggctccaggcagcccctgctggcctctgctcccttgcctccacctttcagctggcgcagtccctcagcctgaccaagtactcctccctctggctgtctgctcagcctggaacaccgccctctcatcctccacttggccagctcctaggcctcctgtaggtctcagcccaaatgtcccttcctcaaagaaaccttcctggagccacccagcccagtgcctcccctttgccagtgctgggcacactcgcttggggtgtggggatttttccagtatgtgttcctgcaccagggtgtgggg

SEQ ID NO: 7964 - DNA, 298 bp, Homo sapiens
  misc_feature (1)...(298): n = a,t,c or g
cacgtcttcaagcccactgatcttttaagctgctgttaagctatggccattttctgtatgagccattgtgttttttcatctctataaatttggttttggtatttaaaaaaatgtcttccagctaggcnnnnnnnnnnnnnnnnnnnnnnnnnnnnnnnnnnnnnnnnnnnnnnnnnnnnnnnnnnnnnnnnnnnnnnnnnnnnnnnnnnnnnnnnnnnnnnnnnnnnnnnnnnnnnnnnnnnnnnnnnnnggtcgggtgcggctnnnnnnnnnnnnnnnnnnnnnnnnnnnnnnnaca

SEQ ID NO: 7965 - DNA, 345 bp, Homo sapiens
aggaaggaaggaagaaaaaaaaattgtgtatcccaaaatgtctctccagaagatacgatagaagaagtctgtaatgactgtatttaggtacactaaaccagcagtgcatatctgcaaattggtcatgagatgtgagaaagaaaggtaagaaaagtatatctagggaaggtactaggttagttaaattaagttgatttctgtctaatgtaagactttaatggcctggaatctgggttcctttcatgcctccctgaagtgagtgggcaaatggttacaatgccatttcaagcgcacctattaaaaattgtggactacagtaacatcttttaaagtggtctctaggaa

SEQ ID NO: 7966 - DNA, 228 bp, Homo sapiens
taaaaccgtatactaaatttgaaatagaaatataagcgtgaactcatttgttgttcttttaccgtagacacatttcctagttctgccccagtagcagtagacacatcaagcacctagaaagtggtctctaatacatgaaaaccatgaattcatagtggtggtttcaaagccaaaaccaaccaaacaaaaacatgtaattggtcactcttggaggtacctagggcacta

SEQ ID NO: 7967 - DNA, 513 bp, Homo sapiens
actctgaacccagagcggggttccttcgcttgactttgatcctggtccttaaatgcctttccccactcccctcccgtgggttcaggggccaagcggccccctcctcagagcacgggcagcaccgtctcctggacccctgtgtgccagccttctgcagacgcagctggtgggagggagcatggatttggaggtggagaagtcactcctggtcctcggagggggtgggctgtgtgcctagttcagtgtgactcggggattggtgagggcggacaggtttctgaggcctccctagccttctttgtaaattcacacgagatagtccagggctttccagcgcccagcttggatgataatcctcgtctcccccactctaaggcctccttgagatttctttggggtctaccacgtcctctgcctgtctccaggtggtacaggagatgtggttcctctccctctcctggctccctagaaccccccacttcccctccctgtagctttagctcacccccctcc

SEQ ID NO: 7968 - DNA, 497 bp, Homo sapiens
cacctggcggcctcttcagctcagccctccacaaagtgtgagcctgaaggaccaccctgaattgcccttgtaggacccagaacagctaccagcagaatcagattctcatggaccaactggtattcaaagagacaatctggaatgatgcgttctggcagaacccctgggaccaggggggcctggcagtgattatcttattcatcaccgctgtcctgcttctcatcttatttgccatcgtgtttggtttactcacttccacagaaaacactcagtgtgaagcgggtgaagaggagtgacctgacttgctggggactgagatggcagcaggggaggcgagctgacctgcccccattccagtggtgggccccttcgcggttccctctggctcaggggccaagccctggtgtcttcctttcccaccaggaaaaagtctagtaaaatactgtatctggcttagggttggtcagactagtaagatggggaggctggtctgagac

SEQ ID NO: 7969 - DNA, 350 bp, Homo sapiens
ttttctgctgtggcaaggacaaatgcatgcagcagattgacttagggtgtgactggctggccagcgccgtccgcatctcgaactcacctggacacatggacaccaggcgtccgctggcaactctctttattctgggtcctgtgctggtcattgcatttgcaggataaagctgccctctcagaagaggtcctcatgtttagaaagtgtattttagctgtgctggttcattgcatgtgcaggataaaacttctgccctctcagaagaggtccttgtgtttaggaaagcgtatttcagctgcctctgggccctcacaccccgtcatgtatttcactttccttccatgtgacct

SEQ ID NO: 7970 - DNA, 390 bp, Homo sapiens
actttctagcagctacactttctccaaaagggaacaagctactgtggagtggggggtagttcttcctcctctgcttagaggagaatttttggagagctctcagactttacataggtgattggactggctgacttctcaggtcttcccagtatttgaggtctgattctgggctacataccctactcctagaagcatacaatctgatgggagataatgacacaggtacacagatatcaaagcccttgttcagtgttttgaactaaatgtcataagagctgtaaatagtgtattggcacattggaggaaggacagataacattgttttatggggactcagaaagattcattattttatatgtcatatgtccctttggggactttgggaaaccc

SEQ ID NO: 7971 - DNA, 948 bp, Homo sapiens
tcgacggagacacatctgcaccccgagacaggtcgctgacaaagtgaagcggtttttctccaagtactccatgaacagacacaagatgaccacgctcacacccgcgtaccacgccgagaactacagccctgaggacaacaggtttgatctgcgaccatttctgtacaacacaagctggccttggcagtttcggtgcatagaaaatcaggtgctacagctcgagagggcagagccacagtccctggacggcgtggactgaggccggttccttcctggaggcctcctgtcctcggggaccccagcacctcatcatcagcattgctggagccaagggtaggagccctacactaggagcccaggctttattccagcctctttttgaggaatttgactgaaaagttccctccctctcggctgatgcgccgtcccatcctgggctcctagtgtagggctcctacccttggctccagcaatgctgatgatgaggtgctggggtccccgaggacaggaggcctccaggaaggaaccggcctcagtccacgccgtccagggactgtggctctgccctctcgagctgtagcacctgattttctatgcaccgaaactgccaaggccagcttgtgttgtacagaaatggtcgcagatcaaacctgttgtcctcagggctgtagttctcggcgtggtacgcgggtgtgagcgtggtcatcttgtgtctgttcatggagtacttggagaaaaaccgcttcactttgtcagcgacctgtctcggggtgcagatgtgtctccacatgccgaggagtttgcagaacatgctgtagggccccatcttggccaccttcctgagtttcccatagaccgagagctccgcatatgtcatccccatatcttcctcgtcggtctgggacacctgtccatcagccaaggctccagctctgcggtggccggcgc

SEQ ID NO: 7972 - DNA, 247 bp, Homo sapiens
  misc_feature (1)...(247): n = a,t,c or g
tttctccatgtagttgtatatcatttttttctctatgtattttgagtctattttataagttatatccagggtttaaagttgcagtgaataattatcctgggtcgttttaaattgcagtgaatcaaaggcatttaggcattacataatgactattcctggggtgatgctttttctcttgatattgtttttgtcctaatatttaatatttccctttgccattttttcntttggcttaggtaatgtaagg

SEQ ID NO: 7973 - DNA, 311 bp, Homo sapiens
aacttccccagacttcctggcctcaccctctgcctaggcgaaaccccgcaggccaggaacatcccttacgtgagggtgtgcgacagggtagtggctaatccatcctgcttttgtcaaggcactggcaacacagctcaccccagccagaacgaacaccaagtgcacactgggaatatcccccgatctacctaaggagctgtgccccgtggtcagagaccatctacacgtcatcacacacgccaccctgtaccagccgtagtaaatcagccagtttaatcagacgtattattgttaattaagcggccgcaagc

SEQ ID NO: 7974 - DNA, 1918 bp, Homo sapiens
agcagctgctcagggctgagcagggtcctggtggccgtggctacagccctggtgtctgcctcctccccctgcccccaggcctggggccccccaggggtccagtatgggcagccaggcaggtccgtgaagctgtgttgtcctggagtgactgccggggacccagtgtcctggtttcgggatggggagccaaagctgctccagggacctgactctgggctagggcatgaactggtcctggcccaggcagacagcactgatgagggcacctacatctgccagaccctggatggtgcacttgggggcacagtgaccctgcagctgggctaccctccagcccgccctgttgtctcctgccaagcagccgactatgagaacttctcttgcacttggagtcccagccagatcagcggtttacccacccgctacctcacctcctacaggaagaagacagtcctaggagctgatagccagaggaggagtccatccacagggccctggccatgcccacaggatcccctaggggctgcccgctgtgttgtccacggggctgagttctggagccagtaccggattaatgtgactgaggtgaacccactgggtgccagcacacgcctgctggatgtgagcttgcagagcatcttgcgccctgacccaccccagggcctgcgggtagagtcagtaccaggttacccccgacgcctgcgagccagctggacataccctgcctcctggccgtgccagccccacttcctgctcaagttccgtttgcagtaccgtccggcgcagcatccagcctggtccacggtggagccagctggactggaggaggtgatcacagatgctgtggctgggctgccccatgctgtacgagtcagtgcccgggactttctagatgctggcacctggagcacctggagcccggaggcctggggaactccgagcactgggaccataccaaaggagataccagcatggggccagctacacacgcagccagaggtggagcctcaggtggacagccctgctcctccaaggccctccctccaaccacaccctcggctacttgatcacagggactctgtggagcaggtagctgtgctggcgtctttgggaatcctttctttcctgggactggtggctggggccctggcactggggctctggtaagtgactgccattggtccctcagcctctgatcctcacacatgctctgatgcccatagaccacattcatctctacccttcatgactgcccgctgaacctgtctgattctggaactacctccccatacctccatcccccatgccccacttgattttaactgattcctctcctgaccctttactaataaaccctttggcggagattgagataacccacattgttggagagacagctgcctttctatgccccaggctgaggctgagacggggtgggaaggatggatccccaaagcctgggttcttggcctcagtgattccagtggacaggcgtccaggagctccaaacctgtagaggacccaggagggcttcggcagattccacctataattctgtcttgctggtgtggatagaaaccaggcaggacagtagatccctatggttggatctcagctggaagttctgtttggagcccatttctgtgagaccctgtatttcaaatttgcagctgaaaggtgcttgtacctctgatttcaccccagagttggagttctgctcaaggaacgtgtgtaatgtgtacatctgtgtccatgtgtgaccatgtgtctgtgaggcagggaacatgtattctctgcatgcatgtatgtaggtgcctggggagtgtgtgtgggtccttggctcttggcctttccccttgcaggggttgtgcaggtgtgaataaagagaataaggaagttcttggaaaaaaaaaaaaaa

SEQ ID NO: 7975 - DNA, 273 bp, Homo sapiens
aaagctgcgagatagtggagaagatgcattccatggtgtttgctgaaaaccaaaattctgttttacagcatgaggttcctgtggcttcttacctactcagagtcatacaacagtttaggcagagaggtagagtctggtctcagatccggcacctatggataatgctgagctagctccctgcttccttgtgtacatagctgttgacctggtgcagtgaagaaggccttgggcagtcaggcttttgcaaattctgatttctatgtcataccattt

SEQ ID NO: 7976 - DNA, 350 bp, Homo sapiens
actcctgtaattatagtcactacccttctctaaacatcttcctcatgcagtgtgtcttttttgataccactgcaaccctggaaggaaggtgtactggcattggccccacattacagataaggaaaccagggctcagactggtgacctcattcctcaatgtcacaaaggtagtaagaggccaggaagggttagcagttcatctggcaaatgagtggctggctaagtaagccagaggcccaaagtggccactgccctgaagccctccccttacctggagcctgaagccagaagccagtgggcctcctggggccagggctgaatgggggaggctggtccctgggactttggat

SEQ ID NO: 7977 - DNA, 437 bp, Homo sapiens
  misc_feature (1)...(437): n = a,t,c or g
ttcaggaatcctcacgcaacccggaagaagcgcaagggctggaccgctaaacctgagggcgcccggcctgcgcacgggaacctggactggaaccctacttgcaggtccccaacttgcgtctcttctctctgtctctaccccagccaaggacaaagacttctcctccggaaggcctcccccagctgagggaacgttccaggtcttccctcggccctggctgcgcgcccggtgccggctctgacgtggtttcctctcccctcaggactggtcctgcttcgctcctcgtgggcctccctcgcgggcgcctttcggttcctccttcctctaacgggctacaacctgttcggtggttgaattgcccccaccccggaaggacaattttgntgggccaataaatggggttttgaaatttnttgttggatttgntgaatgggctt

SEQ ID NO: 7978 - DNA, 351 bp, Homo sapiens
ataagaagcctgcaaagccagctgcaaaataaggaaagtgaagtgcttgagggggcagaacgtgtaaggcatatctcaagtaaagtggaagaactgtccgtgtcaatgtagtgcagtacccagagctcagtgaccacgagttcatcgaggaaaaggaaaacaggtgaaagaaaacacgtgcactatctcttgtcatgtttcattgttacatttgtgtcttgtgtatatttgtttttccttcaagtttttagcacttaaaaccctaaagagatttaaaagatactttcaagtgaaaatatgcctgtgttttaagttttcatccaacttcacaaacacgtgttgttagcaaaa

SEQ ID NO: 7979 - DNA, 355 bp, Homo sapiens
ataatgaatctactgaactctgttatagaacaagttcattttgcatgaacttctcttattgaagcagaagccacgtcatgagcctgggggctgccctctccccgtctgggagtgggacagaactgttcagtgccttgaaagtcacagatttctgactcctggaaggaactgggcagtcccaccagagcagaaagaaaggaggcaaacttggggagtgagaagccagcctcccagaggcccaggcctcgtgttccccacctccaaccctcccgtgaggagaggggcttggcctgggaccttgtaacttccttgcaagttaagttgagctatcctgttcacaaaagatagaaggaac

SEQ ID NO: 7980 - DNA, 1320 bp, Homo sapiens
gtaatggatttgcattaaacattaaattgatttcaaaattggtgacacagtattcactacagttaagtgctatggaatagcttcaatgttacctgctatatatcaaagcaattttcatcccactgcttttttattggaaaaaataaaaggaaaacatacacgacgctaattagacgaatgcacagccttggacgtggagaaggcagagcgggtttactgtcaaacagtaaatacatgcattgacttcaagacagaattggccttggaagcctttttgaatgaaagctgagccggtgggcagtgcagctttctgagactgtctttgggacagatctcgaagggtgggttttgaggtgccactgaagctctccttacattactatggtggttgtgttttagatttgttctatggaggcctgctaccagaaataaaaaagaaaagaaagaatgaagacaagaaagaaaacagaagcaaacaaaaagagagagagagagagagactccaccaccactatggacaaagatatttctagagacatgatgcaaagtacattaaatgacattcttagaatccctttcccctaaaaaacaaaaaaaattcatagaaaaaaaaggtttttccttatccaggttttgtcagtcctttatgccactgtaactacaggattcaaagcttatggggctaagggcttggaaaaaatcaaagacaaacttttggagatgggtcttgcatattcctgtgggctgactgaacaccgtggctcggggaagtctgggttccttcacactttgactgtcagaaaatgaagatcacaagctctgggaggtgtaccttgtcggcctgcctagagcccacacctggcggcggcagggacgggcctggggagcgggctgaccacacgtaactgtcatgccagggtgtgaagacacagaacatcagttcaaacctcagaggaaagagaaggctctctagcatggagagcgtggcattactgggaggccctctgcgcacgaatgatcagaaaaggggcgttttgctggcagggacaagggccagaagaaaaagtctacagaaaaatgctaagagttagtgttcgtgcctctgacttcagttcccaaagaaaaaacaaacaaacaaacaaacaaaaaacacagaaatttgagggactcatctttgcccaatcttgttaatgccatttgatgggaaagaaaaaattcaaatgtgtctcagagtcaagggctgggcttcaaatgctgatagctctcagtctgtctgtctacacaccccaggtagcaaagtcttcatcaagcatcttcact

SEQ ID NO: 7981 - DNA, 534 bp, Homo sapiens
aagaaactctgtctcgaagtaaataaataaatttttaaaaaccaacctgatgtgaagttgaaacacaagacgcggaaataaaaactcagagtataaatatctatattgttaccattatctgggataattgatgatttataagaagctgaggtttcgtcttcctagaaatggacttttattaggccagcaagaatgaccacttagccatttaaatgatttgtcagcatcttttgctgctctcttctaagaccattggttttcactaaaggataaatacctgctaagcaaattataaaatactataagacatttaatctcctggaagaggacttgctgataattggatcaaagttccagcattattgctcttttcgaatcatatggacttagtgttctcatgaccgaggagtcacatttttagcttgctaaaatattcactggagaacatggtgaaatccacgagtggaaacgttccatggtattttcaaacgccacgtgtcaggaatttggcatgccttcctctgggagaggcac

SEQ ID NO: 7982 - DNA, 173 bp, Homo sapiens
cttcgcaaaatatttttctgtcagttattgctgtatattttgttatttcattttaaaatccaatctctgatctaaatctagagtacaaacgtgaaaaaatacctcactaaaaaagaagttcttttggcgccaaaagctcaggaatgttagcttggtggaagagtttgcctttt

SEQ ID NO: 7983 - DNA, 308 bp, Homo sapiens
aactctgagccatgggcctgtaccttggaaatatgtaatttagagtcataagtaacagttatctagctgagagtcatatgtgggttataccaaatgtactgccatcatgtgattataggttagtagtgtaatttttggaattggcaggtcacagatgagattgccatggcttggtggaaagctctcccaactgtcttctccagacagataggtagaacctggaaccagtgctaggacgtgtgtgtatgtaggaggtagtcattggttatatgaacttaaagttgctatcttaacttctgggccttgaa

SEQ ID NO: 7984 - DNA, 646 bp, Homo sapiens
cttggtgatattgacagagcacgggcaatctatgaattagccatcagtcagccacgtttagacatgccagaggtgctttggaaatcatatattgattttgaaattgagcaggaagaaacagaaagaacacgaaacctttaccggcggttgcttcaacggacgcagcatgtcaaggtatggatcagctttgctcagtttgagttgtcttcaggaaaagaaggaagtttgactaaatgcagacaaatttatgaagaagctaacaaaaccatgcgaaactgtgaagaaaaggaagagagacttatgctgctggaatcttggcgaagttttgaagaagaatttggaacagcttcagataaggagagagtagacaaactcatgccagagaaagtcaagaagagaagaaaggtccagactgatgatgggtctgatgcaggctgggaagaatactttgattacatctttccagaagatgctgccaaccaacctaacctcaaactccctgccatggccaaactgtggaagaaacagcagcaggaaaaggaggatgctgagcaccatccagatgaggacgtcgatgagagtgaatcctgatctttttttcatagacaaatgttttgttatttttataaattaattgtttggaaaa

SEQ ID NO: 7985 - DNA, 260 bp, Homo sapiens
ctctcacctgcctgttttctgtatctaaaagaatctttatgacttcggcttaaactcccactggatgcctgataagctgctatttcacccatgtgatagtatcttctggtagttagcagtgcctccttgcagttgttcagaagattgtagtggttaacagccttaaagttctcaaagaagaaacatctttttccctttagaacatgaatgggcctgacccacaagttcccttaaatcattaaactatcttaagttaacag

SEQ ID NO: 7986 - DNA, 110 bp, Homo sapiens
aagtatcttgtaagtaagaagagactgtctttcacctttatccttcaggagctacttcaggaaccaaggacaaaagccaaatactttttaagaaaatatattcttggtcg

SEQ ID NO: 7987 - DNA, 551 bp, Homo sapiens
taacagggtcaaactttagttcaacaaatttcaacccaatattatcacagtacaatagcttagaatgatcattagaaatggtagaaaatagaataaatcattaaagatcccaaaatgttgagttctgtagcatgaaaactctcttgctcctccatgtttgtagttcaggccagaacaaactaaacagaccaataaatataaaagtgatagtttagggaaaaaaaaaaactttgtataaataaaattgtatgtgtgttcaaataactacctattaaatcatccaaagcttagaatttaaattggtcatagtagcaaatagtgcagatgatggaagaaaaccagtctcaataatggttttttttttccaattgcataaggtcacgtcatcccccaaattgtctattttttcttttctttttttttaagatgggagtctcgctccgtcacccagggtgggaatgcagtgggcgcaatcttgggctcattggcaacctccacctcccgggtgccaagcggtttctcctacctcaggcctcccaagtaggctgggg

SEQ ID NO: 7988 - DNA, 193 bp, Homo sapiens
aactatattcagtgagagcctcagtggtaagagtgaaagcatttccccccagtccaggggcttcatccttccttcagtgccttggccaggccctcagggaatgaggagacctttgctcttccctccaccttgtcctgactcctcaagcctccagccttgaggaggcttctctagatgaaagctcctcagtaat

SEQ ID NO: 7989 - DNA, 481 bp, Homo sapiens
gtttcttggacaggggccgcggggctccaggacggcgcccttagcgacaccatggcccgaaatgcagaaaaggccatgacggccttagcaagatttcgccaggctcagctggaagagggaaaagtgaaggaacgaagaccctttctggcctcagaatgtactgaactgcctaaagctgagaagtggagacgacagatcattggagagatctctaaaaaagtggctcagattcagaatgctggtttaggtgaatttcgaattcgtgacctgaatgatgaaattaacaagctgctaagggagaaaggacactgggaggtccggataaaggagctgggaggtcctgattatggaaaagttggccctaaaatgctggatcatgaaggaaaagaagtcccaggaaaccgaggttacaagtactttggagcagcaaaagatttgcctggtgttagagagctgtttgaaaaagaacctttttcctcct

SEQ ID NO: 7990 - DNA, 355 bp, Homo sapiens
caatatcatatgccacttcctgatgaatgtttagaggttaagttactttaggtaggattgaacccagttgcccaatgccttagttgttattaaaagtttgttgcaggccaggcatgagccactgcgcccggctgtcttttcatctttttaacagggtctttcagagcataaattttacattttgataaatacaaagtcataaacatttcatttaatgaattatgcttttgatgtcaattttaagaatctttgcctagccctaggctctgatgcttctaagaggtctcaagttttaggtattattttagcccatgacccattttgagtttgttgttgttgttgtttgggttacggg

SEQ ID NO: 7991 - DNA, 442 bp, Homo sapiens
attcatgaaaagacacaccctggagagaaaccctataaggaatatggaaaagcattcaacaatttctcttcctttcaaatacatgcaacaatgcacagaggacagaatgcctatgaatgtaaagagtgtgacaaagcattcatatctgccaagatccttcgagtacatgcaagaacacaccctggagagaaacccctatgaatgtaaggaatgcggaaaagcgttcaattatttttcttctttgcgtatacacaaaaggatgcacactggagagaagccatatgaatgtaaggattgtgggaaagcattcagctagcctggttccttttatggacatgaatagactcacactggaaggaagcactatgaatgcaagcaatgtggcaaaactttcacattttccagttcttttcgatatcatgaaaggactcacactggggag

SEQ ID NO: 7992 - DNA, 2232 bp, Homo sapiens
gaattccggctggcaggggagaacatggcgctgctctgggggctcctggtgctcagctggtcctgcctgcaaggcccctgctccgtgttctcccctgtgagcgccatggagcccttgggctggcagctaactagcgggccgaaccaggagcaggtgtccccacttaccctcctcaagttgggcaaccaggagcctggtggccagactgccctgaagagtcccccaggagtctgcagcagagaccccaccccagagcagacccacaggctggcccgggccatgatggccttcactgccgacctgttctccctggtggctcaaacgtccacctgccccaacctcatcctgtcacccctgagtgtggccctggcgctgtctcacctggcactaggtgctcagaaccacacgttgcagaggctgcaacaggtgctgcacgcaggctcagggccctgcctcccccatctgctgagccgcctctgccaggacctgggccccggcgcgttccgactggctgccaggatgtacctgcagaaaggatttcccatcaaagaagatttcctggaacaatccgaacagctatttggggcaaagcccgtgagcctgacgggaaagcaggaagatgacctggcaaacatcaaccaatgggtgaaggaggccacggaggggaagattcaggaattcctctctgggctgccggaagacaccgtgttgcttctcctcaacgccatccacttccagggtttctggaggaacaagtttgacccgagccttacccagagagactccttccacctggacgagcagttcacggtgcccgtggaaatgatgcaggcccgcacgtacccgctgcgctggttcttgctggagcagcctgagatccaggtggctcatttcccctttaagaacaacatgagctttgtggtccttgtacccacccactttgaatggaacgtgtcccaggtactggccaacctgagttgggacaccctgcacccacctctggtgtgggagaggcccaccaaggtccggctgcctaagctgtatctgaaacaccaaatggacctggtggccaccctcagccagctgggcctgcaggagttgttccaggccccagacctgcgtgggatctccgagcagagcctggtggtgtccggcgtgcagcatcagtccaccctggagctcagcgaggtcggcgtggaggcggcggcggccaccagcattgccatgtcccgcatgtccctgtcctccttcagcgtgaaccgccccttcctcttcttcatcttcgaggacaccacaggccttcccctcttcgtgggcagcgtgaggaaccccaaccccagtgcaccgcgggagctcaaggaacagcaggattccccgggcaacaaggacttcctccagagcctgaaaggcttcccccgcggagacaagcttttcggccctgacttaaaacttgtgccccccatggaggaggattacccccagtttggcagccccaagtgaggggccgtggctgtggcatccagactccctgcctggaccagcctctccactcatgtgactctttccaacctgctttgtggcactggggcaggggccgggggcagtctgagagaggccattctttcccaacacctcttggggagtttagggtggggggggggcgcggctgggaggagggcaggcatcggggagccgggagcctgaccctcatctttcttccaaacaggctcagagggtgtcctgcaccggggcctgggcaggagggaggtgcttctagttctgccaggagacaggttagctgctccccacgtcagctgggacaccccgacttttgtttaccagagaaaaagggagggggagagggctgcctttggacttgtcccgggacacctaggctagggtggggagagacgggccctggtggtggctcgggaggcgaagcgttgtcctcagccccgcgtggaactcgtgtctggcacagcctggctgtggcctaacctgccgagagtccatcagcctccatcctaccccctgtgccttgtcacgccagacttcccacggctcctcgagatcccaacactgccagcatttcccttccttcctctcctgtctccctcctctgcccgggagctcaggaaccgaggcagggaaggatcccatgagctccttaaggctcttttgtaaggtttttgtagtgatttttatgccacctgaataaagaatgaatgggca

SEQ ID NO: 7993 - DNA, 396 bp, Homo sapiens
aatatttcattccttcctttctttcttctactcttttttcttatctacctctacttctgttcctccctctctctccttctttctttttttccttccattctttagtaaatattcatcaagtacccactcattcctagagactgtgttaacagtaataatacgacactaaatgggctttgttcatagaactagagtctactgcctagcattttgtcagacttcattagctggtagaaatagactactattcaaatgtctatgtcatagagtctcctcccgatcaaatgcagaaagaaaaatcctttcaattcttttaatgattgttgggtaggcagaaatattgtaggagatgggtgtacagacaaacaactcggaatctgaaagtattacacatat

SEQ ID NO: 7994 - DNA, 369 bp, Homo sapiens
ctgtgtgtgtgtctgaaattgtccatttaaaaaatgaatcagtgttttacagaaatcagaagtacttgttttcacaaatcagtaccctttcttgaaatctcatctcaaaatatcaacttaaattcgaatttaaacttgttttattactaaccaaccacttcagctgagccctgcggtgtatttctgaaactttaatttgtgataagatttgataaagggtgaaaaaatacaaaggtcctttaaggtcttgctctcttacaagtcctttgggggaagatctaactgggtaaggctgtgcttcctttgtgttaatggacaagtgtgtcttcgtttcgtagctggaagctcagctcaaggacactgttgctg

SEQ ID NO: 7995 - DNA, 151 bp, Homo sapiens
  misc_feature (1)...(151): n = a,t,c or g
tttttaaaaacaaaagattaactcttctgtgtggtacatgaaaaactaactaaaaccaaaaacaaaaggnnnnnnnnnnnnnnnnnnnnnnnnnnnnnnnnnnnnnnnnntcttttaaaacttagcctagcatggtggcgtgcatatgtgg

SEQ ID NO: 7996 - DNA, 294 bp, Homo sapiens
tcccggtgccctgccccctgccaacacctacgccagcattgacttcttgtcccaccacttgaaggaggccaccatcgtgaaagagtgaagatctgtctggctttatcaccaggatgtcacatgtcagagaatatcattaaaagaagacgctcagcactgtttcagcccgaagctgcttgcagttttcttttggatctgagcaatgactgtgtttggaaacatctgtggactctgttagatgaggcaccaacaaggcaaggtcacctgcctctttcccttgttcccggatgggca

SEQ ID NO: 7997 - DNA, 716 bp, Homo sapiens
gagaaatagaagagaagagccatcttggcagggttattttatatctgagcaaggagtttaaatgagactagtttagattgtctgctgatgcagccgtccatagcagtacccctaaaatcccaccagaatacgggtccctctaacccagtggctggaagaaccactgtctagagcaacttttcttggaactgtcccagctaccaagtcagacaccaaggtttatgccaccaggtaacacgggaatcacaggtacatgttcgctccggttcagattagttggctttggcccctcgaccctgtggcagggagctagttctcagcttgcagctgggaagttccctcttagctccttagtctaggaggggtctcctggctccatttgaccctggtctttaataaccggtcagcatcttgctaccttctaccacctttccaaatctctggaaatcctgccagggaaagcctccagttccaacattggctttccaagcaaactggctttgccatctctctgccatccttgtcctccagagactgcaccacctgtagcatagaaaaccaccaccacggacctgccagccatcgttcacgaaaccagccagctgtttgctgccaaattccttcctctcccaggtccagaccaaatacaagatcagcaccacaccgtggtgttgtcaggagccaaagcaacaggaaacaattcaatgctgttgggt

SEQ ID NO: 7998 - DNA, 504 bp, Homo sapiens
  misc_feature (1)...(504): n = a,t,c or g
aaatatattggctcagtaacagaaaaaaaaaatagcccttgattaaaggtttgatctatcccacgtaagaaagattaaaagcaaagctagaaaagatcagatttgtttctaaataacttatctgcgtcctaaaacaaaactaaaaaatttttttaaatacagtaatgtattaaaacatactgaaactcaatacatacagagaaacgaagataaggaataaggaagtccaagtgcaggcggcttcattacctgttaattccaaggcacttggggggagggccagggcagggggtcaccttgagccccacggaatttgggggacccggcgtggggcaacacagcaggaaccctgttcttttacaaaaaaaaaataaataattttttcccctttttggtagagacagggttttactgtgtttttttcgggggggaaggaaaaactgatgttcntgggacttggcnggggaccncgaaggngttttatgtggtttacccttgtgtctt

SEQ ID NO: 7999 - DNA, 181 bp, Homo sapiens
tgagaccctgtctctatttaagaaaaaataattaagaaattttattaaaaaagaagaatcaggaaaccaagtccaacccaactaaacctcaaatgaaccagcccctaacacagatgaggggatttgggactgataagctctgtgctgtgtccatggcccgtcatttatcaaggctgcagct

SEQ ID NO: 8000 - DNA, 951 bp, Homo sapiens
ttaatttcctttttctctttggatgggagaagggaggatctgggaaaatcttatggttctaagatttatctccattaacaacgtttagaagtaaagtacaggagttaaggatgtatgactgttcttaacttataactctacttataaaattctatgaaaagaactgtcaaaatatataatactacgcagatataatactatacagacatcatcaaataaacataatactatacaggactattacaaaaaggctaaccaaccaaatattttacttcttggtattcaaaacccagaaggaaaggggcttagattatgggagagaataatgtaagttgaaccatatggaccaggttattcacataaaagacatattaaatgcctactgtgaaacagagcactagatttcgtgaatgcaaagatgagtaagacgttgtccctgtcctcaggaaactcctgtgacaacgcagtaatacagcaaggtataaggagcacacagccggcttgcctagtagctgtgtggcccctctaagcctccttcctcataaagttctgatcaaatgacatgtaatttgcttagaacaagaagcagttgttatttatcaacttctaaatgactagaattaagaagcaatacaacattaccagaagctggagggaagtgactttaagacaaaaaaagtattgaagcacccctaccagagagcacaggaccttagactgctagagagaagaagagtggcaattacctacagaactgaaggctttacaaagtgcttccatatacagactgttctgctcgttcctcacacagtcccatctgaaagatggaaaaactgagtctcaggggatttcatatcgcttggcccctaggtctcctggttggaaatggaatactctttctactccagcgtgagtacttacggaacatctagtgtgactgtctcactttaa

SEQ ID NO: 8001 - DNA, 457 bp, Homo sapiens
taccacccccatgactttcatggcatgcattttagatacaagaaacaggctatggtcaaagatgtttaatgataactagtgctagtactagtataaatgctttccacgtatttactcctgacaagccaacaatcctataaagagataccattattattcccattttatagaaggtgatactgagggacacagaggttaggtcatttaccttactaggtcccacaacctagtaagaggtagagtagggctttgaagccaggcaaactggctccagagtccttgtttagccactctacagtggaagagctgttgggagaatgtaagacacttgacattaatcagtgatgccagccctttttcttacgtgctgtgacccctgccttgggcttaaaaccaagcctgcctctgctcagacagtaccctgcctggtattgatgtctgcagacccagcgcaacc

SEQ ID NO: 8002 - DNA, 1338 bp, Homo sapiens
  misc_feature (1)...(1338): n = a,t,c or g
tgctttctgtatttatttaaaaaaaaaaaaattccagaatgggtaagagaacaatcatcaaggatgtaggtgccagacacagggcagaaggtagctagaaaagtatgccttagggaagttaaaggtctagcctcattcctaccttgttttaatagctgtacctaatataaatagctaagtttcccattgttctagattcctctgccccatctacaaacatgggcacagcccaggcttgacttgcaaggccctcagttgaagggaccccatgtacatacaggccagtacagcagtactaggctaactagaagggntctcatccccatatgtgggtctcatttcaagtctatggatgactaccttcattgctgtgtgcgagatgggtttcaccccttgaaaatatggtcacttcagcataaaatagttaaatctttataatgatcaattcatcctacctccttttacatgcagctgaaaaatgacaggctagggacatagaatattgtgaaactttatactgttagaatcactgtccattaaatgatcactagctaatggtcactaaatttacaaattaaggaaattatatatagaatactgcaaaaacacagtaaaaagactgaagttcgcccatttctgctcaggaagtctcttcactcctaagcttcatatgttgtccttctggcttcaaaatttctgctattattactgtttttcctccttttgatcttccttttggtttcccagtgccagaacttccagagccttctcgctcagatgccatctttttgtatgccatttcgaacagcttcaatgatgcctgctgaagagaggatgctgcctgtctaatattttctcctgtttcgctgtcttttctagccaggagctccctcattttggaaatctcttcttccagcttgttgcactcatcagcaggtaattggtccttgaattcttccatcttggtttctgtgtcgtgaatgattccttcagccatattaactgcttcaactcgttcccttagagaaattagaagtttaaacgaagactttcccaatcaaccaaagtttgctgaatgtctatactcagacaataagctatgtgttacatacagttacagataaaaatagagtaagagggagaaatcagagtggcatgaaagagtctgggatggctttgagagagatttgggctagattttgtaacatcagaattgtgacagggaaaacagaagaaataataaaggcactgcaaacataaggtataaacaacggggaaggaagaatagattatcttaggttttctcttacccacaacctatgacatgtccaaactctt

SEQ ID NO: 8003 - DNA, 1431 bp, Homo sapiens
  misc_feature (1)...(1431): n = a,t,c or g
gttcacgaaaagttcacgttgattgatggcatccgcgtggcaacaggctcctacagttttacatggacggatggcaaattaaacagcagtaacttggtaattctgtctggccaagtggttgaacactttgatctggagttccgaatcctgtatgcccagtccaagcccatcagccccaaactcctgtctcacttccagagcagcaacaagtttgatcacctcaccaaccgaaaaccacagtccaaggagctcaccctgggcaacctgctgcggatgcggctggctaggctgtcaagtactcccaggaaggcggacctggacccagagatgcccgcagagggcaaggcagagcgcaagccccatgactgtgagtcctctactgttagtgaggaagactacttcagcagccacagggacgagctccagagcagaaaggccattgacgctgccactcaaacagagccaggagaggagatgccagggctgagtgtgagtgaggtgggaacacaaaccagcatcaccacagcatgtgctggtacccagactgcagtcatcaccaggatagcaagctctcaaaccacgatttggtccagatcgaccactactcagactgacatggatgagaacattctctttcctcgaggaactcaatctacagaagggtcaccagtctcaaaaatgtctgtatcgagatcttccagtttgaagtcttcctcctctgtgtcttcccaaggctctgtggcaagctccactggttctcccgcttccatcagaaccactgacttccacaatcctggctatcccaagtacctgggcaccccccacctggaactgtacttgagtgactcacttagaaacttgaacaaagagcggcaattccacttcgctggtatcaggtcccggctcaaccacatgctggctatgctgtcaaggagaacactctttactgaaaaccaccttggccttcattctggcaatttcagcagagttaatttgcttgctgttagagatgtagcactttatccttcctatcagtaactgctccgtgttcagactcctggtttcttccaggcttacagtggacatcatcagcttcctgctttaaaaaatatcttatgtccctaattgcctttcttttacctgactttgtcacctttgttgtctttgaattctttaggctgcatattattttacatgctttgttttgtcatgtatataccaggtattggttttatggtttaaacactatggatacaggggtttgttttgcacaattttaatagtcatgcactacataatgatgttttggtcaatgacagaccacgtatatgttggagctcataagattataatactggtattttactanactttctgggttggatacaaatncaatatgntcagtgctacagtatcagtgcagtacatgat

SEQ ID NO: 8004 - DNA, 445 bp, Homo sapiens
  misc_feature (1)...(445): n = a,t,c or g
ggaggtccccatcagcggtgcctttattatcataaacattgggagcaaataaatggtacagaaagggcaacaggcccagttcctcttcaggagaacttcagtgaataagcaagaaatcagggtgaggaagaaaaaggggagccatggcctgagcctggctggctgggcccataagtcaaccacacagcccagctgcagctggcttatccctccaaggcaccactggtccagctctgctaaccaggacacagatggcatcttggtatctctttcttgcctctatatgcttctcacgcctagtacagtgccttgcatgtagtaggtgctcaataaatgaagaaccacgaggatacaagtggggccctccaagaaaccatnaacagatgttactttacaaggaagaaaactcttgttttaaggagggnanttgctcaaggtcnacata

SEQ ID NO: 8005 - DNA, 391 bp, Homo sapiens
ctttttatttaaatgcttatttttgacttcttaccagaattctcaaggaatcactgaaacgagccatatgcctcccaaggcaatgggactccaggggcactatttcttctcctttcccagaagagaaggaccacgactattacaaggacgtgttaaatcaaggcactgttccttctcctattgacacgagtaatccagtatgtaaagttcagacataaaaaggggcagtaaagaatctgtaactgcagaaagtgctgcctgagcactgtaaatacttttcaagcaccagcctctggctttaccattgaaatttaagaactagaacgatttcttaaagtaagtgtgggtcaaggtcctaaggcagctattccacactggatttaatatattc

SEQ ID NO: 8006 - DNA, 417 bp, Homo sapiens
ttcccaaattgccttcctgaaaggttaagtttctatttctaccagcaaaacagtgaaagtgtgtgatttccttgcccttcgttagattctttgatttttcttacgacaagtaattcctgctaatgagcatggtgtttctttctaaaattagattgtggtaatgtttgcacaacttggaatatactaaaagcctttgaattgtacactttaaataggacatgatatgtgaattttatctcaataaagtcagttaaaaaaaaaaacctaattcatgttccttagagaacaattttaaaacagcaaaaagaaataaaaattgctgttgacctcactcctcatagattcctagtaacagtttggtgaatatccttccagatttttcctaggggtgtgtctagtttgaaaaacaaaaaaaaa

SEQ ID NO: 8007 - DNA, 245 bp, Homo sapiens
atgctaacttgtatagctaatgcatcctccctttattctcttattctttgctttttccctttccacaaatatgtattagtcttttaccaaagatcagctactgtgcccagttctgggacagagataaagcaaggcttttccgctcaggagttaattgtccaggtataggaagtaagtcagatccattattaatcataatggggctggacagtgacgggtaccatggagcatcaagaggaagagag

SEQ ID NO: 8008 - DNA, 434 bp, Homo sapiens
  misc_feature (1)...(434): n = a,t,c or g
taaaatgtataatatgaagcagtggaacttccctgatagcacaatttaaatatttcctttttgacaaacgtgcatagttaaataaattaagtgaccaccaggtgtgactgaagagtggccagtgtctattcctagccccgaaggagcacagggatattgactgtgtcccttaaaaaaaacaaaacaaaacgtagggctttctttgtattggtttgaacatttctctttatcttgtgacctggccaactctggctatggctgcctcctgtctctcggtacattttctgtgggcggtcaagaggagttattttaagccaccaatgggaaagtttaaagacataatccttggctgttaattncgggagacgggaggctgagagtcttgtgctgacttgccacctgtttccacgggcagcanggtgattgtgncattt

SEQ ID NO: 8009 - DNA, 427 bp, Homo sapiens
gtaggtgccccaaagtgttcattaggcaaaagccttgggttttgggtgatccatattaactacagacagatgcctggttaataatatttctgaattcctttccttttgttaatgggttaatacacattataccttttcctaaaattctaagacaaggacacttagctttgggtgttacccagggacaccagggaatctgtgaaactcctaaaatcacatatatgattttgtatgtgtgtgtatctgtgcattttttctgggcatagaatgtttacttttcatcacctacataaaggtgttctgtgacccaaaagggttgcaaaccacagctagaggagaggagttctgattccttcttttctctactgtctgcccctaaatgatgctcaggttcctggtcacttcctagctaagcaaaacaaaaaga

SEQ ID NO: 8010 - DNA, 285 bp, Homo sapiens
cttgcgcccatgcgtgcatatcgtgggggggaacctgaaaagatatatagtatttgcgagaagtgtaacactgggctgcaaattcacacatttgcacatttctcttattattaacaatgatacttagacctttgatttactaatggatgagaattgttggaacaaagacttggtgctgatttcctgatggattaactttatcagtctgcctctctcaagcctcacatctatattactcaggaaccctcatgtacagatacacccctcctgggtccctgagttatt

SEQ ID NO: 8011 - DNA, 580 bp, Homo sapiens
  misc_feature (1)...(580): n = a,t,c or g
ccaccccctaccccccgcccaggtaaatccaagtaaatgattttctgaaggtcggtctcctagaaagcgtttaggctctggttttttgttttgtttctattttcgtgttttcccagttagggaaggaagaggagcctgtgcagagttgaactggggtggagaggtgccttgtaaagtatggtttccagagatggtgagacctcgtagctaagcgttgtttcctctgcacgtaactgtgagttgtgaacttgtggctcctgggggagcgggacagggcctggcagtgcgggggagggggcaaggaattcaggaagttggcgagaattcttcgtttttcattcttcgttgtaaattgcttctaaacacttctgaattttaaattgctaccgagaaggtccagaaaccgttctcatccaatttagtcacttttattacgttccactttgcctcccccaatcactgcggcggctcccagtttcagcgtggccgcatttggaaaaggctgaaggtagaaaactctggaatggagagntggcgactgganaggatcagggtttaattttaactgaatcgantgaat

SEQ ID NO: 8012 - DNA, 592 bp, Homo sapiens
gattccacaaagggttaaattagggtgagattgtcaacaggcttcaaaaaggcagagttccagggcccatgcctgaggtctcatgggcctccttcaggtcctcatcaccacagtctgacacttttggcccttctcttctccagctccccaccccattcttcggccagtccttcctttttcctctaaccctgcaaaaaatgagcagcgtgttgttttgttccaactgacaaaacagctaagaaacagcagaacatgactgccctttgcaaaatgggccatgtgatcctcctagctcaattcaacacttacagtaaaaaccgaatagaaagggacctgtttatgaaactctcttgcttgcctttggaatactctcatcctctccccttctcaagcctcctaaatacccaagtggaatttatataatggagctttattttatcaccctgaaattccttcctcagtccaaattgctaaatgtgggcaggttccagctggcccaaattccctaaacaacattggcctgttccataaaaagcatgcaattacaagcacagcagtcctggctctgggttcttagaactataaactggac

SEQ ID NO: 8013 - DNA, 363 bp, Homo sapiens
ctagcaccatgaaccctggtcattctagtaaaaacagccagctccacaccttttccctggctgtaactccctcccctgttttatcccctgcctggccccatacttactccaaacagacacatatatgctacttgtttactgtctgtctctcctctgactaaaatgtaaactccttaaagggcagaaactgactgttccttgctgtaatcctcacgtcatcacaccggagtctgtgtgaatgattaaatggtgtaagaactaggccttagagaactaggctagaactcacatattcagagatggtgctgtgggagtgacatgagagaattataagaaagtgaaaatagaatatgatcaacctaa

SEQ ID NO: 8014 - DNA, 522 bp, Homo sapiens
gggctgcacgtgtggtaaggcctacaagaagcggccttcagctggaccttggctccccgccggacttcgagggtgtaatcgccgcccctgttggggtgaagcgccgcggctgcagcatgcctacacaggaagaaaaagcctttatgagagaagaagaaagctgtgtcttttacacttggtccaccggagccaacgagatcctttagcagcagatgagagtgcaccccagagggttctattgcccacacaaaaaatagacaatgaagaaaggcgagcagaacagaggaagtatggagtgttctttgatgacgactatgactacctgcagcacctgaaggaaccatctgggccttcagagcttattccctcaagtaccttcagtgcacacaacaggagagaggagaaagaagaaacgctagtaattccaagcactggaattaagttgccttcatcagtgtttgcttcagagtttgaggaagatgttggattgttaaataaagcagctccagtttcaggacctcc

SEQ ID NO: 8015 - DNA, 1436 bp, Homo sapiens
gacgcacgcaagcggctccagggtacgtccccgccacgccgcatcgcaggatcggtgcgtggtgacgtttcgccggcgcgggcgccatcccggaagcgcgagcaaggccgccagatgtgcaggcagcggaggaggagaaagagatggacctcccggactcggcctcgagggtcttctgcggccgcatcctgagcatggtgaacacagatgatgtcaacgccatcatcctggcccagaagaacatgctggaccgctttgagaagaccaatgagatgctgctcaacttcaacaacctgtccagtgcccgcctgcagcagatgagcgaacgcttcctgcaccacacgaggaccctagtagagatgaaacgggacctggacagcatcttccgccgtatcaggacgctgaaagggaaactggccaggcagcacccagaggccttcagccatatcccagaggcatccttcctggaggaagaggatgaagaccccatcccacccagcaccacgaccaccattgccacctcagaacagagcacgggctcatgtgacaccagccccgacaccgtctcgccctccctgagccccggctttcgaggacctgtcccatgtccagcctgggctccccagccatcaacgggccgcagccagacagatgacgaggagatgacgggcgaatagccctgctgcccggtgccttgagggggtctcagggcagcagcatacaaggtggcagcgggtaacccctgccttgttctgtcatccagggctcctttgctgccccgttctgtcacccagggctcctagggggacaaggctctctcccgaggggtgtggaattcctgggggggtctttaattctggctccttccttcctcagaacatctctattctgcaagacccctctgccatgccagggcacgcccattccagctggagtcgtggggctgggcaccagggggaatttttccagagctgagcctgacgtctgctctgaagaatgcttagaaggttcccagacaccagagccagatgtcccccaccaccggtcaggacctccttgaggtgcacaagcacggtctcctctgagttcaccccagcccacccccgcacccactaattctgcttttcctgccccttgctccgtaaaagtatcaaatactttctccttggtatctcaaggaggtttctgagataggtagaagtcttgagacggaggctggccatccattcagccctgagcgtgctgagttctgtgtttctctgaatagaggtgtggaacctgaggggccagcaggcctctctgaaggcctccatggagcaaacggagccacctcgggaaagagtttaatggaatatttttgtacccgatgtttacagatgctgttgggaagttatcaataaaaagacaccattactaaaaagggaaaagtacaccta

SEQ ID NO: 8016 - DNA, 338 bp, Homo sapiens
caatttttatgttggatgattgtatgccacagaagcacttaaatttcctggttaattggtaacgttaatcagatctttacctatggctgttctgggtttttgtcattcacagttattattttaatttcttctttggaagcgttcgcaatcagctatagtccaaaattgctaattaagatcaagcaaaacaaaattaattacgtaaaattaatttataaggatgtttttatgacgtaaatgttttattttccagagccaaggaaattttctgtcacaagctatctaccgtttgcaataatttgataaataatcctttgtgaacaaaaaaaaaaaaaaaa

SEQ ID NO: 8017 - DNA, 389 bp, Homo sapiens
aaaaggtatgatcagagaaaccctcctctgaaattgatgaccacctggctgcagttgctagtgaccagatggtgaggagctagtggatagagggtgggccagggcctcaagacagctcttcactctccactctgcactctgattccgctatttcttggctctgggttctgctgtcaaagtcccaggggccactattgtgggctctcaccctgtatccaagccccacttcacctgcccccttgtatagctgccttcctcacatccctccagcttgcccacattttgctcacggatgggggcagactctactgttccctctgcacctgcatctctctccttcaggcctttcatgtacaccggggaccaccaaagggccatgaactcttttg

SEQ ID NO: 8018 - DNA, 372 bp, Homo sapiens
  misc_feature (1)...(372): n = a,t,c or g
caaccacagtttctagtgtgtttaggtacagggacatggacaaaagtctggagtgggcaaggcttacctaaagcttgcctagttctttagcttccgttggaccctctagggggctagcatggaataggaaagaggcagaggacaaacccagggatcagggctcagatgtcttctgcagtctgtgatcctgtagtcacgaagacccttgccactgtggtctccacccagcattccagatatctgccgtcaattgtattgatgcccatttaccatcttggctagtccagtagcacttacatcctaccaatttcctaatagtaaagatactgtatttgctacctgatcagagttagatgttgatgtttttantaa

SEQ ID NO: 8019 - DNA, 160 bp, Homo sapiens
  misc_feature (1)...(160): n = a,t,c or g
cagatgcggagagatccatagtatcaccaagtgaaagctgcggccccatcaatgtgaaaactgaacccatggaagattctggcatttcactgaaagcagaagctntctcagtcaagaaagaatcagaagatcctaattactatcaatataatatgcaagg

SEQ ID NO: 8020 - DNA, 826 bp, Homo sapiens
gatcagatagtttcctgaggctaaaatgccccaacatgtaaaagactgcaacaagggttaatgagccaggaactgcggatggtaacctacatctctataattaccataggatatatatgagtaccataggattcttttgcataactgtagaaagtacagacaacaccctcccgtgtttgctattagagtttttaatgttgattggaaaatgggagattcactgtgtgccattcttggtatacgttgatgaaattacatcactagtacacacagtggctattccacattcacacgccccagctcttacatgaggcccgggagcacaaggtcgcccccttagattgccctggaggcctgagactgggctggagagacaggatggcatagtgaaagaaggggagcaccggccaaggagaaaaggaaccctaggctgcaggcccagccctgcttcttaaccgcccctgcgcctttcagtaaatcacctcacctgtcagagcttcagttttctctttttgatggaaaggaatatgccatattctctctaaattttcttttggctctggaagtctgttactctattattcttctaaatgatgactgtctcaagccccatctcaccacaagtttaggactgcagtgacagcctttgattgcctttattccttactgcttttgtcgcctgtttttaaacaatctcttttaaatattaagcatcatattgttttggcttctgttatgagaaagatgaatattatggctgttttgaagttaagattcatttggtctaggtggcccaatatcagaagtataagttaactggtattaa

SEQ ID NO: 8021 - DNA, 397 bp, Homo sapiens
ttttccctctctgttactccagtttatctcttttatgttggaggccctcctcagatgccttacccaaggctatctgtctatatctgagtgaggccctaaaaggctagccaagaagttctgtgtttggggtggggtggatggtagctaaatggcaagccaggctttttggagggactcccaaatgtctggatctggatggctgttccctagactgttcagtttttctggaaaggacttgtgccatctgctttctggggagctgctggtattctcagggtagggttgggagtggtttggcgctgagtcccttccactgtgcctgaccatggccctgcatctggatcctctcaggactcctgttcaggggcccagggggactggttttgcatagaggttg

SEQ ID NO: 8022 - DNA, 580 bp, Homo sapiens
tagggacccattagcagaggcagcgtctggcctcagacatccactcatcaggtccagaccagaccgtgggccttggctgtatcttctgatccactccgttgctaagttcccctctgtacctaaactctgtctccctttacttcacttggctttttagagatttctcagccttggtgtgtgttgtccccagccctgtgatgtacaagtaattgcctgtatacgtgggattagcccagcttgcctcaggaagtcagtgttgtggttagtgggaaattcagaccggttgagtccaaggaaaccacttttccttagttctgttttctgaaccaaagtccatttgagatgaggggttgtgactagatcttctctggacagttgaatatagagcagggcccccatctgtgtcaccggggctcatgaatcctccttgccaatgactagagtccttgaaggaataagggctgggtcagtgtttcccaacccagaatataactcggagacctcttaagttgtcaggaagccatcccagtgttttgcccgtatcttctaattaataactaccctgccccctcactccgtc

SEQ ID NO: 8023 - DNA, 403 bp, Homo sapiens
gaagaagtattgtgagtgagaaccaaattccttactagtcctaccacctgagcttcaaggattgtggatatccagtggggaggagaactgatggggactggggcgagaaggtcagatctgaagaaactccaggggcatgagcagacccagcatccatggacaacgcagtatccactcacatgagcctgtgcaccaccggtgcatcggggctgcactggttgtcttgtcctttggcatccagtgaggacttcctaggagggctgatggcattttcctcactgaccatttagcaggaataacaactgtctttgcctccaaacctggctatgttgcagttaagaagactgattccatgcggtcaacctaatatgcaatatctcatgggcttgtaagcccccaagaa

SEQ ID NO: 8024 - DNA, 501 bp, Homo sapiens
aggattcagttggagactcactttcaggaaaagaggacttgggcagaaagagaacaactatgcttaagattgcaacagccgcaaaggtagtgaatgctaatcagaatgcctctccaaatgtccctggaaaaagaggaaggccacgaaaattgaaactctgtaaggcaggacgaccacctaagaacacaggaaagtctttaatttctacaaagaatacacctgtaagccctgggagtacctttccagatgtgaagcctgatctggaagatgtggatggtgttctctttgtttcctttgaatcaaaggaagctctagacattcatgcagttgatgggacaacagaagaatcttctagtctccaggcatcaaccacaaatgactcaggttacagagcaagaatttcccagttggaaaaggaattgatagaagatttgaagactttgcggcacaagcaggtgatacatcctggtcttcaagaagtgggcttaaaattgaattcag

SEQ ID NO: 8025 - DNA, 257 bp, Homo sapiens
ttttggagaatgaatgcaagatttattgagtggtggaagtagctctcagcagatggctggggagcaaaaaggggatagcatgggaaggtagtcttcctctggagtctggctgctcagaggagaaatctcctactgtccttggccgaatttcccttggcgtccgaatcgttccaccatcaatggcctgccagcgtctttcgatgtgttcttctgccagtgtgttcctcttgacgtccagccgcttgtgtgtgtgcccg

SEQ ID NO: 8026 - DNA, 189 bp, Homo sapiens
gctaacatccaaaccagataaattcaggataaagagaaatctactttgtcccctgaattgatggtacttggaacagaccatgtactcgccaactcttccctttcctttggactctgaacctgtcctaaggcaatatgtcttccccaaccttccttttttcctaaaccacgccgagccctatgcagtctc

SEQ ID NO: 8027 - DNA, 492 bp, Homo sapiens
tttttttttaaacgcacagaacaaccttttgaaggtgccaaatttaaagatggtaaagtaacagagaagtaaactgtaacctaattgctatggcttcagaataacccagtcaaaagactttcaacatgaaaggaaaggaatttaaattagttgcccttgagttcaatatttaaaggttctgtattttttttcctactttagcaagggaacaaatatagtcctagattggtccaggggtgtatctccccttctcaaagtaatttgcaggttggactacaaaggagatatagcaacccaatgaaaacagtagaagcaagacaggttcttggcatctgcttatgctgccgcctgtatttctgcccatgttgggctcaggccaaacagttgcagcatccagtggacggctgagggacctgtgtcctccacacttcgcttcaccagcagggagtcattattactccctcacattggggtactttggaagcacttgga

SEQ ID NO: 8028 - DNA, 496 bp, Homo sapiens
ttttcaggaggataatgtgcaaaagtttaattcaaagtttccagttcccaatttatatacaaagttcacatggttgattaacgtcttatggcagatcagaagatttaatgatcaaaacattctcatttttgtcaatcaattatgattaggaagccaagtcataattagaagtttgtttgctgagcactgaatcagaagtagaaatggattaaatgcctaatggtatgaaggcaagtagcctaatgtacccattgtgtgtcaagacatttagtcatttaataaataaatatgactactgtgtactaggcacaaagaaataaagcaaaagagattcagtaagcactttcaacagcctgacatctattaggggagacagacaaatgattataatatagcatgatagttactatgatacgaagtacaggctgctataggaaaagagcaggagaaactaatatacaaattttttggtggcggtttcgttgtgaaaaggtaa

SEQ ID NO: 8029 - DNA, 853 bp, Homo sapiens
tgcccttaccttaattatttgtagttttagtaggccttgcctcagtttttcccacagaattccataattttaatgttgaactaacccatctatataggacttctaaaaactacgtcaggaatgtaaggttaaatgagaggtagaacttgtagtgtaataggtataatggtagctttcaaagttttatcttctcaaaacattgtcttagccagtgcatttctgagaactcagactgaagcacagaagtcacagtatgcttcttttatttaagcacacagattcatgacacaagtacttgttgaacaagtgttctcattgcagagagatctacttgaatataaaagggtcatcatactagattattaaaaaagaattggaaatcttgagttgtggaagaaatgtttatgctttggagatctaaaaaagttatggaatgtaggaattagataagtccagtttgttctgttaatataaaatggttagatatattaaactgcaagtagtatcagcttcaccataagcttgggccttcctccatcttgttttatttaagtctctttaaatgaaattttgttgtcattgtttcagcattcatgaactttcttactatcacaggttctactttaattttccttgccatatgtgtttccattttgtgggacattagccaccacaggaacacaagagttgtcagaagactcctgggtgtacagagcaaatcaagctgcatcagtattataggataccaaacagaatcctttctattaggaaataagaaatcagttaagtgttggctgaaacaatgacaacaaaatttcatttaaagagacttaaataaaacaagatggagtcg

SEQ ID NO: 8030 - DNA, 419 bp, Homo sapiens
ggggacaaaagtgaaaacccccgcctcaacaaaaacaaaacaaaacaaaaaaaagaagtaaaggactgtatgtctcacaccttggcacaccctcctggtgtctggtgtgatggaggggattattccctcatctctcctgagttcagtcttctgtaatgtagcatgctggggcctctggagcacttcactgcacactaacgaatgtgaggatggaaaaggaaaatcttatcttagtgaaactgtggaaatagtttagacctcgggctcccctaacaggcccctagacgatgctttgggaaccgtggtggtagaactctctctcccagactcactctgccctgacccctcttattggtgagaaacaggcatgtgtaactcttctttttcctttgaggaataaaagatatttgtacttttta

SEQ ID NO: 8031 - DNA, 396 bp, Homo sapiens
  misc_feature (1)...(396): n = a,t,c or g
tggtgagggcctacttccctattcatagatagtaccttctctctatgtccttacatggtggaagggacaaggtagctctctggggcctcttggataaagtcaacaatcccagtcatgagagctatgccctcatgatctaatcacctctaaatgccaccacctccaaataccattatactggtgattaggtnnnnnnnnnnnnnnnnnnnnnnnnnnnnnnnnnnnnnnnnnnnnnnatatgtatgtgatgtccaagcgtggtgccaggaacatagcaggagctcagtaaatcagtaaacagtagctataagataagtgagggaatggaacagggagttgggaaagtttattctcatatgcttcctggctttttgcagtttagggaaagtgtcataa

SEQ ID NO: 8032 - DNA, 399 bp, Homo sapiens
gcacagaagaaatagcactggctccgaagttgtggtttgtctttttttggaaagtcaggcttgtctgccaaagagctcgaaacacttgaccagctctctcatttatcttaacatgtgtatttattctcccttcacagatggggaagtgaagcttgcctgagggctgatatttagctaagtcttgatcctctgccttgtggtggtcagcttagataaaatggaatcctaaaacttgatttttatcccgtagtgtgaacctcctcccacattaaatctgctagtagggctgctcacaagggtaagaagtgttagtttgagtgtttttcatcatgtgacgtggcggtcttctagttcagggcccctgccttttagagatgaggaagtgccagttcgtcacaa

SEQ ID NO: 8033 - DNA, 186 bp, Homo sapiens
ctgtggcaaaaagacaagcgcagagtgggaatgactcagcttgggccctgatcatactacatccaggtgtgataatgaattaagttaatctgtgagtattttcttaaccatagacttgaaaactcttattcccaagaagttattttgacttttaagcagggaatcctgtaaaaggtagactattat

SEQ ID NO: 8034 - DNA, 354 bp, Homo sapiens
ttagggttatttgtacgtgctgtattccacgttgggtttgccacatctcgcttggttttaactaattgtttaattttggagtgtttgaagggtgtgtgatacatcactgtggccctaggagtcagatacaaaaaggcctactcagtgccaggcctcctcagccctgccttcccgtttccagtcccctttccccagcctggcttatttgtcctgtatttcttttgttttgtgccattttacactcatcagatttgtatgaaaaattattgactctgggcagtaggggacatacttcactccgacctcatccttgtcggccactccttacctgagggagagaggaccacaccactt

SEQ ID NO: 8035 - DNA, 387 bp, Homo sapiens
cctaaatgggaagaaggacatttttgctgcatcaaggaagccgttaaactcctgctaagctaactagctcttttttatgggtccatgcacacgaccgaactcctctttcactgaccagagattatttctgacaacccaggatatcccgaaagcttggaggcatatggctggaaaatgaaacgacccaggacatcgtttctggctgcatcattattttgtgtcgcgtagtaccagatgggcagtcagtgagcggcgcagggatgtgaacggacggttttataatgtgaaaattttcccttggtaaagctaaaacagatttaatttccctctcttttctttcactacttccccctctttattccccctctgtctgcaatatcagtgact

SEQ ID NO: 8036 - DNA, 785 bp, Homo sapiens
  misc_feature (1)...(785): n = a,t,c or g
tttacaaatccaatagagctttaatcccaaagatccagtggccaccagagtacagaagtcagaatcaaatgctcagaatcaaaaggtgtggcactcctgcccagccggcttatcagcagttgtatagacagatcagaaaaaactagcatttattataaaaactgtttttcaaatggggtgatttcctgtccttctccagagatcataattcttcacgtttctgaggaccttctcggcttggttcttttgtcttctctttgtacagtgctcccgtttctttctccttctgaaagcggatctgtagctgtttgatctcttggtcgtagtcctgccactccgggacaatcccgcacagctgcttccagtttcggctctttggtcatcggattattacacaaatcaatggtttttgcccttttcttagaggcgtcatcacaccacgtttcacaccaaagccattcttgagggagggatttaattggcacctgatgaatcatgttattgggcagatcttgatcaagatttgaaaggctgttagggtcctgactcagaccttggtactgtcccctgagtctgtcaccagcagctattttcctaaacttcttcagatccacaacatatagtgcactgatatgatactttcgcccggctaaatgactggcccagtaccctgatttccagaacctgtagccgtccctcgtgccnnnnnnnnnnnnnnnnnnnnnnnnnnnnnnnnnnnnnnnnnnnnnnnnnnnnnnnnnnnnnnnnnnnnngtnntcaaaggt

SEQ ID NO: 8037 - DNA, 354 bp, Homo sapiens
ccaaatggcatcaggacattctgactacgggttgtggcttatggccagcagtccatctggggaccagtccatctggggtccactccatagcataagtcacatgacctgtgtaaagcagctgacagaaaaacaaaaccaagaatgccttgaaacatcttatattttatgaatgaatactaggaagtcctttttgtttttctgttctttggttttaggtatttcaaaatctgttaaacaggtgaggctgactagggaagccaacaaatatagcttgtgattttggacagttgtgtttccaagttgagggcacttttttgatcaacttccaatcatttattaaaggcaaaagatagg

SEQ ID NO: 8038 - DNA, 399 bp, Homo sapiens
  misc_feature (1)...(399): n = a,t,c or g
ttcctacattccaaactacctagtcattacaaatttacagtaacgtgaaaatcaaacaaatcatgaactatgtaatatgaatgtgagtatagtatgagattatctttcaaagatcttaatactcttgagggagatggcaataacagctaatatatggggcagtaatataatgaagcccgtgatgatttgggtgttgtaggctagcccatgtgtgctaaatgagcggggaggggactaaagtgatagaggtttttaggggaaagttgtgggggtggggttcgtgagagggtggcgaactctgttgggtacacacttgttttgggtgttacggggaaagggcaggataacntggaggatgttgccgcagaaggctatggatgatgtaggtgcgtcacactc

SEQ ID NO: 8039 - DNA, 341 bp, Homo sapiens
tttaggaggctgtcaataccccagaacatggtgtatgttttgttttgtttttgctgtggaaacctggatacagttatacctatcataatcataactgcattttatctttttaacctcattaggatgtcatacagatgatggtaaacttttcagtttacaagttaaagtgctgataaaagaataggggccaagttctggatcaaatttttgagtataatctgctacaaaaatgaaagattgcaaatatcataaacgtgcaaaaattagcatctcctccaaatatttcatacttatcaaagagggaaacatagatctttctctccttacttactatcttgagg

SEQ ID NO: 8040 - DNA, 391 bp, Homo sapiens
ccttaactaaccagaagtaaaagagagaggctgcttgttatttaatgtccaaggaaattttatcccagttgtgattacttcagctgattcaaaacagcgtccttagaggcacagggccgtgcagagcctggacccatgtaagacccctctgagccgccagcctgactgctctcagtgcaaagacccagaacccagccttccttcacctgaaacagctgcagcgtgcacacacacttcttgtgcatatatctctggtctatttattttcaaaactaagtataatccaaattgaatgctggaatcagatttttccattctgaatgtgtttaaataacatggccaaggataatttctttctgttttcttgacatttataggtagtataagatat

SEQ ID NO: 8041 - DNA, 243 bp, Homo sapiens
agtgaggtggtttaaatattgttcaaaactctgaaaatgagctctgatggaagtattccaatgattttgtgatccaagggatttgtgcaaagctgtctagcggtacaaaaagaataaatatttagcagcttgtgtttgtcttgcccctgagtaaagtatacaggagcctgtctctgtttacccatttaaaaattttcctggatctgtttaaatgatggtgcccctggcagtggagtgtgtcca

SEQ ID NO: 8042 - DNA, 1420 bp, Homo sapiens
ttttttttttaaaccacatactttatttgatgtcaacatcaaagaaggaatattttaaaaagcacatagaaacccttaagttagtaatattttaaactgcatgaaaaacatattattttacatcttgtcatactgtatatacaactgtacataaacttctgcatttcaaagcacttgtcatttataaagtgaaaagtttgaaagtgctaaataaacatttcctaattattatttttaaaaacagcactcttttggaagttatctcttctttgtgcttatagttgatctgcaaacatttcaagtcaaagtttctggaaacttctttaggaaacatctggaaaaaatcatagtagacaagggctaagtgcagacataagcagctccattttataaacaaaatttcgaccttccattttattccactgaacttctttgaatggcccacgaagatgactccatttgttatcttgtaaaacatcactttttggaaggtctttacattggttacgaggaaactgaaccataatcttgctgccactttcaggtccattacgaactgaaatagcatagtcaccacttggggaggccaccgtgatggcagatgcattaccaatgctctctataggtccaagtcccacatgattactgaagctcagtacttgcccagcccataaccttggcgagttgctgaactgcatgtacctggtgctgtgacatctgagacagaagaaaatcctgtagctcctgctcctgataagacagtgtaattactcttccatctctatgtacaactcgaatctgctcaactccaatattcaattgcagttgaatggacttgcatatttgttcatagccttgtgatgtgattaaaactttcacactagattcataaacatcattgatatttgaccaatgagcctgtatctgaggatcctcaattcggcttgctaagctgtcaatggttgcagcagctctactccttagaaaaatatgctttgcttgtttaattattttttccagaagcccttcactggactgtaatgaattaatttcatttttatcaaaagcttgaggacccgaaagtctcattctcttgtggccaaaaggtgcacttgcctggatgaggcatcatgatggaactcaaggtctgtttatgaaactctctaatcagtagatgcaaattatgctctaggacataaagggttgtctccggacattgcttctcagtagcaaatttttgggatttcttatcatttgaggaatggcacaaagaaatagataactgcaagctcggaaagggctgagagataatctggtttttcaccacaatgtgagggacttgtgatttaatttgaacagcttcccgagagagctgtgcaaaaatttctttacataagagaacattctgtgccgcttctaa

SEQ ID NO: 8043 - DNA, 819 bp, Homo sapiens
tttttagtttgcttttaaattaattttttatataacttctaaatcttcaagaagctaaaggcaacataaatattgtcattcaccatgaaaagacattttttcaataacttaggaaggattcaataaaagtccaactacaattgaggcttatcatgaaacctaaaattcataaactaaactgaagtgaattcagattttcaagacctggaaagcaagcagagggagctcgtgtcagaaggtgactcagaaccgtgttgcctggagcatcactctccctgcaaggctgaagcacggggtggggcgggggagaggacgatcggctctgggagactgtgaagtgttttcatcctctgtaaacgtggtgctggtagtgtcttgttgagtgtgaattctctctcatacaaaagttataaatattctctattcagaagtctggtccacatgacacccagaggcaatgttcttaagcgcggcggccgggagcacccaagggtgcgagggcccagtctgtgggcgctgtgtggcaccattcacagcaagtccatcttgggtctgtagtgcagcaggagcggcgccttcttgaatctccacctagtgacaaccacgaacttgagtgtgtggtccttgcccaggatctcctcgttgcataaaatgtccagctcgttaaaggatgaaaggttgagttttatggcgatgaacttcttcagatgcaagacggtcgcctgggctgagcaccggatccacttccgcttcagcccgcgcagtttgctgattaatcgatgcagaagaactaaatatggaagaaatggtagttctcgc

SEQ ID NO: 8044 - DNA, 658 bp, Homo sapiens
agtcaaaccagaactgattaacatagcctgtcaggctagaataatcatttctgactggactctgtgagtatgtaacatttgaagggatctgtcagttactggtgggacagatcactgatgggtcaagcttgcacgtcatcaaatacagcacatcctgactcacaaaattcccccgacatcatctgggagcacactgccaaggaactgccagggaaaaacagaaaacacatgcccagagcttattacagaaacttcaaagtgaattaccgagtctttgagatcgtaatgttaactaatggggtcagggagctacttctgggatccaatactttttaatgtccatacaattcctatgagcatttgaatttgagcattttcagaggttttgttaatgaatgcacctacatgtccctagacatcataatatatccttatatccaagaaaacagaacatatcactttttcaggtaatgatactgtctagaggccgtgacaggcatccccataagagtatctttctattgttgacttgaattttgataactgtgtatgaacataaggattttctttcttttctagccatggaatgtcttacccaatttcaggtttagtgaagatgtataaagcaaaggattacaatgtggattcacccactgga

SEQ ID NO: 8045 - DNA, 405 bp, Homo sapiens
ggcaaactctatctcttccccctcctgggagcagacaggatggcgctgtggcctgaaagcagctgtccctcctgtgtgcaagctcggactgctgcacccagacagattccatctctgaccttccacttgttcgtctccagctcgccatggccaaacagctgcaggcccgaaggctagacgggatcgactacaacccctggtgagccagctgggctggggaggtgtgtgggtgtcccctcgggcatgggttggccatccctgggtttacagcaactcagtagtactccagatggtggcggtacacagactgccagattccagccatagctcaggagagacagggcccgagggagtaggcttggttcaaatctcagctttcttctgcatgactgtgccactaggaca

SEQ ID NO: 8046 - DNA, 595 bp, Homo sapiens
  misc_feature (1)...(595): n = a,t,c or g
caaactcatcttgtctacacacggacaaacgtgtgcacacatggcacaaaccaagctagaagacactgattctctagatggagggactaagattttcttttttcctttatcaacattttaccagttattccttccaaatgacagggtgctgctctagtagttttaaaaaatgtatacaaggtatagaaattcccagttcaaaccaccagcagatggagcacacaggcttgttcatattccctctcaaactccatctccaaataacacaaagaattaaaaagacaaagaatggagaggcagaaacgacgaaccagccttggaggactgaagcagccggccacgtgaagactgacttggcacagggaaggctgagtttcaggagcccacagaaggggcatcaactagagatgagaattcaggccacagaactccagagaggcctggacactgatttggcggccagtaagggcagggtgggctgagaacttacaggccagggcagtgggacatgtcccttccttatggctcctggggccagggacaccnagcacagccacagggtgaccagacaccatccagaaatagggaacttggt

SEQ ID NO: 8047 - DNA, 890 bp, Homo sapiens
  misc_feature (1)...(890): n = a,t,c or g
ggcacgagctgacggcataaaagggcagaaccatagcagggtgcggctaagttggggaagagtttttggagagggtgaattttgcattggaccggacagaattgtgtatggggaaggggagcggttattctggtctgctcacatctctcatactcaacctaatttctcctaattctgaaatcttgagatcctctatcactaagaaggaaaactactgtccaacagggacactttattgctcaccccatatgtgaaagtttgtcatagctaaggctagggtgcttttggtcagtatcagcagaatatatgccccctttcttttgtcagcattactccgcttacaaagcccttccatgtagatgacctcatctgagcttcctaacaaaggagctggtattagaccccattttacagtgtgcctgggtagggaagagagtgtagtggattgagcagaggccttggcaccagacactgnnnnnnnnnnnnnnnnnnnnnnnnnnnnnnnnnnnnnnnnnnnnnnnnnnnnnnnnnnngaaggagtctgtataagcaagggaagggattggtcatagaagtggtactgtgtttcatttatctagttatggcagactctcaaaaacaaatggttctatacaactaacattgtctgcaattcccctgaatccattcacttgttcagtaaatgtgtattgagcttctacaaggtgtcaagcaccatgatctctgtatcagtgatttaaccatttttgatggttactacagacctctttaagaatgtgatagaaaactgtagctccctccccagaaaacttttctagctttttattttgcnnnnnnnnnnnnnnnnnnnnnnnnnnnnnnnnngggggacagagtaagaccctgtctca

SEQ ID NO: 8048 - DNA, 763 bp, Homo sapiens
  misc_feature (1)...(763): n = a,t,c or g
gggaagttttgcaggaattaaatatgtttcctcagctggatgacgaggccacgaggaaggcttattacaaggagttccgtaaggtggtggaatactctgatgtgattctggaagtcctggatgccagagacccattaggctgccgctgcttccaaatggaggaggctgtcctgcgagcacaaggcaacaagaagctggtcctggtcttgaacaagattgacctggtccccaaggaggttgtggagaaatggctggattaccttcggaatgagttgccaaccgtggctttcaaggccagtacccagcatcaggtcaaaaacctgaatcgttgcagtgtgccagtagatcaggcctctgagtcactgctgaaaagcaaagcctgctttgnagctgaaaacctcatgagggttctggggaactattgccgccttggtgaagtgcgcacccacattcgtgtgggtgttgtgggtcttcccaatgttgggaagagcagcctgatcaatagcctgaagcgcagccgcgcatgcagcgtgggagctgttcctggaattaccaaattcatgcaggaggtctacctggacaagttcatccggctcttggatgctccaggcattgtcccagggcccaactcagaggtgggcaccatcctgcgtaactgcgtccacgtgcagaagctggcagaccctgtgaccccagtggagaccatcctgcagcgctgcaacctggaggagatttccaactattatggccgtctctgggttcc

SEQ ID NO: 8049 - DNA, 410 bp, Homo sapiens
  misc_feature (1)...(410): n = a,t,c or g
cacaagatggagtcctttgtttccatgtttcctgtctcccaaatctgtctgatcccatggagttggtggtatacggcatcgtttgtgttgaacagaacgtttgcaggcatgtctgtctaaaacactcaagctgaaagaaggacagggcctacagcttgtttttatggcccttactctaagaatgatttattatgtttttaagggttgttttaaagaagatgaatattcggcaagaccatatgtagcctgtaaaggctaaaatactatctggctgggtgggtggtggtggtggtgtgannnnnnnnnnnnnnnnnnnnnnnnnnnnnnnnnnnnnnnnnnnnnnnnnnnnnnnnnnnnnnnnnnnnnnnnnnnntcacatgatcctcctgccttagccttccaagaggttg

SEQ ID NO: 8050 - DNA, 226 bp, Homo sapiens
tcacagaaaacataggcaagggaaaatagtcaaaggttttcaaaactgggaaagtggaaacaaagatctcagcccagactgttaagaaagtgtatagagtgcctctcagcataatgttcaaagatagacatcccacttgtcaatgtcttaatcacagagtaaaaatttattttagaaaaataaaacgacaactttactcagatgttatagaaaagatgccaggtgc

SEQ ID NO: 8051 - DNA, 610 bp, Homo sapiens
aggggggcaaatatgttttcaaaaacttagtgtgcaatagagtccattatagaaattaaccactgctatatgttttaagtagttcaatcacctgttgtggttcagtcttgattatcgtttattttgttaggtgataagtaggaagatgcacttgttatcccacactatctcttgttttgttttgttttgtttttaaataatgaacagtgcaatctttgaacttgagtttttaataatgatagcaaagacaatggtgagaacttgaaacagccagcatattttatattgccaaagtacttactgatgactgaccacactgtcttgtgaggaactgggtcccctgcactggatcagagccaaatgcaagccacccatcagttcagaggaagcaggaaaacatcttttgggtggtgcatagaacattgagctcttaaaaacccggagaaaaattaggaatttagaaagtaagtgggaggtagaatattgagtccttttttaaaaaaaagaattgatgtctaaatatgtagtctgaacttaagtgtcctaaaaccttgttttttgtttttttgttttttgaggagtcgtcttgctctatcaccaggtgggagtg

SEQ ID NO: 8052 - DNA, 429 bp, Homo sapiens
attaaatgacttaacacaaattaagtccttggtagatagtatatattcaagaaaagtcaatttcctccttcctttattgatgcttaaaagcccctggtgctgtatttgattgattcaacaaatacttgggcttggcacaaggcactggctatacagttacttccctcttatcatcaccatagaagcctcctgatgtggaaattaggcaggccttggagtcacacttggcttcaaatccccttccatttgcttcccataagctcagcatgtaacttcactgtccttctctaaaaataggggtaatgtataacttacgtggttatctaaaaaattaaatatttgtagagtgcagtgtgctagaatatctggatacagagagatggattagagatggtgtctagagcacaacagaatgaagacctatctcca

SEQ ID NO: 8053 - DNA, 383 bp, Homo sapiens
cagacgatggcagaggagagggctcctgtgacggcggcgaggcttgggaggaaaccgccgcaatgggggtgtcttccctcggggcaggagggtgggcctgaggctttcaagggttttcttccctttcgagtaatttttaaagccttgctctgttgtgtcctgttgccggctctggccttcctgtgactgactgtgaagtggcttctccgtacgattgtctctgaaacatcgtggccgcaggtgccagggtttgatggacagtagcattagaattgtggaaaaggaacacgcaaagggagaagtgtgagaggagaaacaaaatatgagcgtttaaaatacatcgccattcagttcgttaaaaaaaaaaaaaaaaaaaagtcgac

SEQ ID NO: 8054 - DNA, 395 bp, Homo sapiens
attcaagtcaaagcagggcccaaaagaaattctaactactttagagtttttatttctaaactaactctcaaatcccttgctgtttctgggaaatgagaagctaagaccttctcagctgtccagtgcatattctgccttcagatcatggagccggctgtagttcaccagttctttaactctccccatccccatcctgcagaaggaaagagctacactctgagcccaagccccactctctcaaacccatcctacatgaacatggtggtacatagtaactatgaaaacagctgtgggcttgaaattgtccctgcacagaaacaagtgaaagcctagaagccctaaagctttgtgataactcagttttggtaagagtttaaatctccctgtagacaatg

SEQ ID NO: 8055 - DNA, 351 bp, Homo sapiens
cttggcattttcattcaccatgaaccctggctacgcgggccggtctaaccttcctgacaacttgaagaagctgttccggagcttggccatgaccaagcccgaccggcagttaatcgcccaggtcatgctgtactcacagggtttccgcactgctgaagtgcttgccaacaaaatcgtcccgttttttaaactatgcgatgagcagctctcttcccaaagccattatgacttcggtcttcgggctttgaagagtgtgctggtgagtgcaggcaatgtgaagagagagagaatccagaagataaagagggagaaagaggaacgaggggaagcagttgatgaaggagaaattgc

SEQ ID NO: 8056 - DNA, 441 bp, Homo sapiens
aaattcggccacgagcatgatttaaaagttaatattgccattttggtagattttataaacctaccaaatcagatctggaaattgaatttaaaagtttaaggaagaactaggttttaaaaattgcaataggtaaaatatgaattaaaaagaacaaactggtctctgaataatttttctgtgtgcaaaaaattgccattaaatgcataaagtacccacattgacaatttgatgagaattggatgtttttattgagaaattcccatatgacagtatatgtgggtcatttctctagattgtccagtttccaagaacagtccttcaatcccttgcttgtgcaagaataacctgcagcagggctggcttcatgggccagcatcccatgcagtctcacagggccctgctcttagaaggacctcacacttgttctaatctctgctcaaa

SEQ ID NO: 8057 - DNA, 3144 bp, Homo sapiens
  misc_feature (1)...(3144): n = a,t,c or g
tgcgactgagtcggtggcgaagacgggaacgcgacgatggcggagactctgcccgggtcgggcgactcgggccctggcacggcttctctcggcccgggcgttgcggagactgggacgaggcggctcagcgagctgcgggtgatcgatctgcgggcggagctgaagaagcggaacctggacacgggcggcaacaagagcgtcctgatggagcggctcaagaaggcggttaaagaagaggggcaagatcctgatgaaattggcatcgagttagaagccaccagcaagaagtcagccaagagatgtgttaaaggactgaagatggaggaggaaggcacagaagataatggcctggaagacgattccagagacgggcaggaggacatggaagcaagtctggagaacctgcagaatatgggcatgatggacatgagtgtgctagacgaaactgaagtggcgaatagcagtgctccagattttggggaggatggcacggacggccttctcgattccttttgtgatagtaaagaatacgtggctgcacagctgagacagctcccggctcagcccccagagcatgctgtggatggggaaggatttaagaacactttggaaacttcatcgttgaacttcaaagtaactccggacattgaagaatcccttttggagccagaaaatgagaaaatactcgacattttgggggaaacttgtaaatctgagccagtaaaagaagaaagttccgagctggagcagccatttgcacaggacacaagtagcgtggggccagacagaaagcttgcggaggaagaggacctatttgacagcgcccatccggaagagggtgatttagatttggccagcgagtcaacagcacacgctcagtcgagcaaggcagacagcctgttagcggtagtgaaaagggagcccgcggagcagccaggcgatggcgagaggacggactgtgagcctgtagggctagagccggcagttgagcagagtagtgcggcctccgagctcgcggagccttcntagcgaggagctcgcagaagcacccacggaagccccaagcccagaagccagagatagcaaagaagacgggaggaagtttgattttgacgcttgtaatgaagtccctccggctcctaaagagtcctcaaccagtgagggcgctgatcagaaaatgagctcttttaaggaagaaaaagatataaagccaatcattaaagatgaaaaaggtcgggtcggcagcggttctggtcggaacctgtgggtcagcgggctgtcctccacaacacgcgctacggatctcaagaaccttttcagcaagtatgggaaggttgtcggggccaaagtggtaacgaacgcccgcagcccgggggctcgatgctatggattcgtcaccatgtcgacatctgacgaggcgaccaagtgcatcagccatctccacagaactgagctgcatggacgaatgatctccgtagagaaggccaaaaatgagcctgctgggaaaaagctttccgacagaaaagagtgcgaagtgaagaaggaaaaattatcgagtgtcgacagacatcattctgtggagatcaaaattgaaaaaactgtaattaagaaggaagagaagattgagaagaaggaggaaaaaaagcctgaagacattaagaaggaagaaaaagaccaggatgagctgaaacccggacctacaaatcggtctagagtcaccaaatcaggaagcagaggaatggagcggacggtcgtgatggataaatcgaaaggagagcccgtcattagcgtgaaaaccacaagcaggtccaaagagagaagctccaagagtcaggatcgcaagtcagaaagcaaagaaaagagagacatcttgtcgtttgataaaatcaaagaacaaagggagagagagcgccagaggcagcgggaacgggagatccgcgaaacggagaggcggcgggagcgcgagcagcgggagcgggagcaacgcctcgaggccttccatgagcggaaggagaaggcccggctacagcgggaacgcctgcagctcgagtgccagcgccagcggctggagcgggagcgcatggagcgggagcggctggagcgcgagcgcatgcgcgtggagcgtgagcgcaggaaggagcaggagcgcatccaccgcgagcgcgaggagctgcggcgccagcaggagcagctgcgcttacgagcaggagcggcggccgcgggcggaggccctacgacctggaccgacgagatgatgcctattggccagaaggaaagcgtgtggcaatggaggaccgatatcgtgcagactttccccggccagaccaccgctttcacgacttcgatcatcgagaccggggccagtaccaggaccacgccatcgacaggcgggagggttcgaggccaatgatgggagaccaccgggatgggcagcactatggagatgaccgccatggccacggaggacccccagagcgccacggccgggactcccgtgatggctgggggggctacggctccgacaagaggctgagtgaaggccgggggctgccccctccccccaggggtggccgtgactggggagagcacaaccagcggctagaggagcaccaggcacgcgcctggcagggtgccatggacgcaggcgcggctagccgggagcacgccaggtggcaaggtggcgagaggggcctgtctgggccctcggggccggggcacatggcaagccgcggtggagtggcggggcgaggcggctttgcacaaggtggacattcccagggccacgtggtgccaggtggcggactggaaggtggcggagtggccagccaggaccggggcagcagagtccctcacccacaccctcatccccccccgtacccccacttcacccgccgctactaagtcccactcgctgcgagttttcgggtgggcagacgcactgttgaatctggtagccagggttccctcgaacttgggggatctttttaaaagcaaagtaaatcctgccaccatgttgtagctcaatacaatgtgaactcactttttttttttttttaaataaatgtgttcttgttctgccatttttaaatcaaggtttctgttaacgaggcattccattttccattaataaagtttaccattcgc

SEQ ID NO: 8058 - DNA, 431 bp, Homo sapiens
gacttattttgcagacacattttcatgcagccttgactcttgttaggtgcttgaacataaattctgagttgagaggcccgaatttgtagttgtagtctatttaaagttgctgttcaagataggatgttgaagttggtttaatttctcagctccaggactgtgaacttggtgggtgcattcccttaaaagtctttccagccgtgtttaggcttcctctgagcctgcacacattcctgcccttgcccctctccaggaccttggcttctggtggtgatggtgcaacttctgcttcctgctgcaggtgccctggggctgtgagtatctcgtgactgtagcaaactgtggcttctccttaggtgctggtgtttgtccactcccggaaggagactggaaagacagccagggccatccgggacatgtgcctagaaaat

SEQ ID NO: 8059 - DNA, 473 bp, Homo sapiens
tttaaaggtccagttggcttttattatcgatttgtgaatcaggcagcatcttatctataaaatagaaaaggtgctttgaagaaccaagcagatggatgggcagaaaagcctggggatagcaagatcaagaaacatgaagtggcttggtcatttcaaagttactttccttaaagggtttatacacaggggaccttcccctctcatgccttgtgcaaggtggaatggggacccttttgatacaggagcctagaaagaaattaggcagttagtgagggtaaagagagtcctcagcaaggttacccttttaataaaaagcagcccccgaatcatttcttttctaacaaagagtggcctgaaaagttgagctgcaaacatagataagcaaactggaagcttgcatggatgaatgctggcagctatgccaataggaaaaggctacctggggaccaggtatgttcagcatgggaggctcc

SEQ ID NO: 8060 - DNA, 528 bp, Homo sapiens
  misc_feature (1)...(528): n = a,t,c or g
acgcccttgccctaacgcgctttgctgtgagcctggcccctgcccagggcttgggtctggtgagctgagcagcttcctgtggatggtgtggggccggcctctggcctggctcacctggccactgtccagccagccttgtgacagactccggcctgaaggcagaatgaacccacacctggagtgaggaagggggcctggcacggttggccaggctctgcctgattgccagccagcgggcatctgaagccgggtccttcgcccgccggaggctgccgnccgtctctcctgctgcgctcgtgccagctccgtgggtgtcctcccagggagcttctcttctcaacaggccttgcgaggctggggtgagaggtgatagaggcagcactgtgcatgattccgagagggtgtggttgcactgccagccgactgctgacagctttgggaagctgctttgcccaaggacttggtttcaaccttgggcgaggaaagcttggcaagcttggcctgtaaaagtttttttnaagccggaag

SEQ ID NO: 8061 - DNA, 685 bp, Homo sapiens
ctcgaggccaagaattcggcacgagtggatagagtttggcaagaatgcaatatgaacagagcacagaacaagaggaagtattctgcttcatcaggtggtctatgcgaagaagcgacagctgctaaagtggcatcctgggattttgttgaagccacacaaagaacaaattgcagttgtttgaggcacaaaaatctcaagtcaagaaatgctggacaacaaggacaggcaccatctttaggtcagcaacaacaaatacttcctaagcacaagaccaatgagaagcaagaaaagagtgaaaagccacagaaacgccccttgactccttttcaccatcgtgtgtctgttagtgatgatgttggcatggacgcagattcagccagccaaagacttgtgatctctgctccagacagtcaagtgagattttcaaatatccgaactaatgatgtagcaaagactcctcagatgcatggcaccgaaatggcaaattcacctcaaccacccccacttagtcctcacccttgtgatgtggttgatgaaggagtgactaaaacaccttcaactcctcagagtcaacatttttatcaaatgccaacaccagatcccttggttccttctaaaccaatggaagataggatagacagtttgtcccagtctttcccacctcaatatcaggaagctgtagaac

SEQ ID NO: 8062 - DNA, 501 bp, Homo sapiens
accacatatgaggaaatcagacatctctaggttgaatcatgcccaaaaggacaatttcttgtcagataagctgctgtgtactaagtctgataactaacaaaattgctatatggtaattttaactggaaattgtccacttttatcctccggttttctctcttattccattggtaaccaccctgggagttctaataccatgtccatgtacaagtgcttaaatcaaccctcaggttgtgacagtcaagctacagtggctgtgaaataatctgcacagcagagtatgctatgtcattggctcaatcagcataacgcagcataatagaatagaagcacacaattatataatgccataatttgatttctctctaatttctggacacatcacaaaataatcaaggcagtgaaatgaagtgtaaagaataatggctgagtttggagtcacatcactgccacttgctagcctgtgtgaccttaaacaaataaaaaactctttcttgaaaa

SEQ ID NO: 8063 - DNA, 372 bp, Homo sapiens
cagaacactagaacatagggttaagagccagtgtggaggctcactgtaatcatgaaggtgaagaagagagtagaaccatggggatttacttcgtgttccagggaaagtgtggatttgaaggctcccagcatctcccctcctgcttcctccttccttcacttccagtgaaacactccttatgtgccgggctgcttgtcagtagcagagtagcctgcactaggtgctgacccttccctctttttctgttctttggcaatttctaccacataggctttttgctgactctggcaaatttgcattgtatgtcattattgccccgggttttctcgccacaaacccatgctcatcctgccgtcccgattccatctccgg

SEQ ID NO: 8064 - DNA, 277 bp, Homo sapiens
atgactggcgatgctacatatcttctcatatatcccatgtatctgttggctatttgtatatcatctttgcatctttggttaaatgttctttgtccattttgtaatcactttattttgttgttgtgttgtagttgggttttttggccatgatcattcatttatctcacagttcattcttgttacttgggccagggtcatgatcattcattatctctcagttcatcctcattacgttgtcgacgcggccgctaatttagtagtagtagtaggcggccgc

SEQ ID NO: 8065 - DNA, 218 bp, Homo sapiens
tgtgcccagcctcttggaaagatttggattcgcttcatggagccagggagcaggacataggtgaagaacccagcttgtggctcaagttggcctgaatagggttcgaggccctgctcccccggggcctctttgtccatgtgttcaaggaaaaaatgggagagtccaataccaaaatggtggtcagagtatccggatttggggcctgattccaaagaagg

SEQ ID NO: 8066 - DNA, 2684 bp, Homo sapiens
gcaagatggctacggcagggggtggctctggggctgacccgggaagtcggggtctccttcgccttctgtctttctgcgtcctactagcaggtttgtgcaggggaaactcagtggagaggaagatatatatccccttaaataaaacagctccctgtgttcgcctgctcaacgccactcatcagattggctgccagtcttcaattagtggagacacaggggttatccacgtagtagagaaagaggaggacctacagtgggtattgactgatggccccaaccccccttacatggttctgctggagagcaagcattttaccagggatttaatggagaagctgaaagggagaaccagccgaattgctggtcttgcagtgtccttgaccaagcccagtcctgcctcaggcttctctcctagtgtacagtgcccaaatgatgggtttggtgtttactccaattcctatgggccagagtttgctcactgcagagaaatacagtggaattcgctgggcaatggtttggcttatgaagactttagtttccccatctttcttcttgaagatgaaaatgaaaccaaagtcatcaagcagtgctatcaagatcacaacctgagtcagaatggctcagcaccaaccttcccactatgtgccatgcagctcttttcacacatgcatggctgtcatcagcactgccacctgcatggcgggcgcagctccatccaaagcaccttcagcatcaacccagaaatcgtctgtgaccccctgtctgattacaatgtgtggagcatgctaaagcctataaatacaactgggacattaaagcctgacgacagggttgtggttgctgccacccggctggatagtcgttcctttttctggaatgtggcccccaggggctgaaagcgcagtggcttcctttgtcacccagctggctgctgctgaagctttgcaaaaggcacctgatgtgaccaccctgccccgcaatgtcatgtttgtcttctttcaaggggaaacttttgactacattggcagctcgaggatggtctacgatatggagaagggcaagtttcccgtgcagttagagaatgttgactcatttgtggagctgggacaggtggccttaagaacttcattagagctttggatgcacacagatcctgtttctcagaaaaatgagtctgtacggaaccaggtgggaggatctcctggccacattggagaagagtggtgctggtgtccctgctgtcatcctcaggaggccaaatcagtcccagcctctcccaccatcttccctgcagcgatttcttcgagctcgaaacatctctggcgttgttctggctgaccactctggtgccttccataacaaatattaccagagtatttacgacactgctgagaacattaatgtgagctatcccgaatggctgagccctgaagagggacctgaactttgtaacagacactgccaaggccctggcagatgtggccacggtgctgggacgtgctctgtatgagcttgcaggaggaaccaacttcagcgacacagttcaggctgatccccaaacggttacccgcctgctctatgggttcctgattaaagccaacaactcatggttccagtctatcctcaggcagggacctaaggtcctacttgggtgacgggcctcttcaacattacatcgctgtctccagccccaccaacaccacttatgttgtacagtatgccttggcaaatttgactggcacagtggtcaacctcacccgagagcagtgccaggatccaagtaaagtcccaagtgaaaacaaggatctgtatgagtactcatgggtccagggccctttgcattctaatgagacggaccgactcccccggtgtgtgcgttctactgcacgattagccagggccttgtctcctgcctttgaactgagtcagtggagctctactgaatactctacatggactgagagccgctggaaagatatccgtgcccggatatttctcatcgccagcaaagagcttgagttgatcaccctgacagtgggcttcggcatcctcatcttctccctcatcgtcacctactgcatcaatgccaaagctgatgtccttttcattgctccccgggagccaggagctgtgtcatactgaggaggaccccagcttttcttgccagctcagcagttcacttcctagagcatctgtccactgggacacaaccactaatttgtcactggaacctccctgggcctgtctcagattgggattaacataaaagagtggaactatccaaaagagacagggagaaataaataaattgcctcccttcctccgctcccctttcccatcaccccttccccatttcctcttccttctctactcatgccagattttggggattacaaatagaagcttcttgctcctgtttaactccctagttacccaccctaatttgcccttcaggacccttctactttttccttcctgccctgtacctctctctgctcctcacccccacccctgtacccagccaccttcctgactggggaagggacataaaaggttttaatgtacagggtcaaactacattgaggcccctgagggacagggggattctttggggctggaggcttaatgttttcctttcccattgttccttttttccagggccttcaggtgggcacattaggggt

SEQ ID NO: 8067 - DNA, 788 bp, Homo sapiens
tgcggccgctgcccgccttaatcgactgaagaagaaggagtacgtgatggggctggagagtcgagtccggggtctggcagccgagaaccaggagctgcgggccgagaatcgggagctgggcaaacgcgtacaggcactgcaggaggagagtcgctacctacgggcagtcttagccaacgagactggactggctcgcttgctgagccggctgagcggcgtgggactgcggctgaccacctcgctcttcagagactcgcccgccggtgaccacgactacgctctgccagtgggaaagcagaagcaggacctgctggaagaggacgactcggcgggaggagtctgtctccatgtggacaaggataaggtgtcggtggagttctgctcgggcgtgcgcccggaaggcgtcgtcttctcttaaaatgtagggtcaagtaatctgctctttatccgcgtttacccctttcaactcccttacaccatgtcaaacttaccttagtgggacatcttcaccggacacatttcagaggagagaaaaaaagtaatattgaatcttaaagtgtttagctaaaagcatgaatgtgacacagtaaccaactcctaatgataacatgtgactattaaatctctctgacagtttcttttttaggtgatttccttcctgccaggctccgttgtaggggttacagaacagtcgttcccgcctcacaacctgtggatacagctgttggggcagaagagacgggaccagctgctggccacatttcctgctttattttaaaaggtagtat

SEQ ID NO: 8068 - DNA, 93 bp, Homo sapiens
taaaacacccaccagtgctcaaaggaaacaggggcggccatgggatagtcacagaaagagctgagaggagatctcgatgacatgcattgcagt

SEQ ID NO: 8069 - DNA, 596 bp, Homo sapiens
agtctgatattctcatgtcatcaattctgttgtctcaaagtagaaaacaaggtgctaagctaacggaatacaagaaaaatattgtgaggttaaggaacaaggagaaagtacaaaatactctctgagatataggtggaaaaaatagactaagattgtaataagtaattttgtggcataattaaaaatcaccctgagatttgtggtagtttttataaattgaaagtgaggccagggaaatttgttagtttgttttctagccattttcagctgcctgggtataagcagagctggcataaagtgggatttagctagatttttattttcctaagttataggaagtagtcctttaataagtaataaaggcttgatagcctgagattaaaaataaattaggaaatagtcaaggaactgtttacagcattagcaaaaaaaaaaaaagtataaaaattggtctctaacgaatcatttttggtacaattgtgaaatgtttactcttgttcttttaactgaaggcattgacaagactccatcaactgaaacttttaggtcatactttagtcgttgaatttgcaaaagagcaagatcgagttcactcc

SEQ ID NO: 8070 - DNA, 382 bp, Homo sapiens
tctctctctctctctctatatatatatatttttttttttttttttttttctcaaaccttcttttatataatattatttaaagtatcagaagagatactgtagcaaattaaaatcttggttccattggctgctctcttcagaaacacaggccttcagctcacgctggggtcggttggcagcagttgtatggatagaaaagggcattgtgttcagggctgaatcctctgcacagtgccttccacatacataacccgcccccgaatggaactgtccaacgcttccagccaacacagctggactggtcgggggagagggctatttccctatgaaggagccttcagggcacttgttttctgggctgctttaaggagaataagaaccc

SEQ ID NO: 8071 - DNA, 403 bp, Homo sapiens
ggttctgtcagcacctttcgagcaaataaggtgtgacttttcagggtactgctgcttccataagctttatttgtttactgtccagctcacagacatgtctagagacagcagtggcaagtgattaccatacttatcctagctccatctatttttgacgcttttgttttccccatcagtaaaatgggaaatatccccttatcataaagttcttgagccttttagcatgagggtggctgaaacagcataaagacttcttaatctggctgggcacagtgggctcatgcctattaatcctaggcactttggggagggccaagggaagggagggttcactttggaacccagggggtttcaaaaccaggcctgggggaaattattaggcagggacctcgtcttctattaa

SEQ ID NO: 8072 - DNA, 511 bp, Homo sapiens
tcagtcgacgatctcattcccttctttttctacatttgttccattgtctaactaagagactcagggcatcaggcaagtcatgtcagaaaggttggctttagaagccacatcccagaattcctaaacttaatcatggaaggagggggcagactgacaacgcattccctatgtcctctaaagagatttctcccgttgggattgctttatccccagaggtgtgctgtagaaccagcctgtgttcacagtaaatctctgcttccgcaacagcggtgagctctcagccctccctgccctggtcttgtctctagggcctgtgggtctttgtggactgatggtgtgggtgggtttctgagggtctgcatggactcatggtgtggatgggtttctggagggtgttgggtagcagttaacggtttccacatggatggaaacccagatggctggctccccactgtggcatccacccggatttcacccggtgctttgctgggtggatgtctacaaggacata

SEQ ID NO: 8073 - DNA, 144 bp, Homo sapiens
tcgctgagacaccgtcagctcactccgagcccagcacagcggccatcttcgggtaaattctggcagcagcccgcctgttcattgtcctgtgtgcccagaggaaagaactactcattttttgggtgatcaagctaggggaggcag

SEQ ID NO: 8074 - DNA, 483 bp, Homo sapiens
cggcacgagggctgtgactaagtcagcaacacagttcctctgacatgggccttggctgtgcttctttgggggtgaagagattggggaggaagtctccacccctgggaggcagaagccaggcatagcgcgctggctaggactccagtaccgtgaagggaggcagtgagagcagacatctgtgcctcattcctgatctcaaggggaaagcaagaacaagacctgtgaagggaaggagggtggatcggcctgactggccctgggaagcacagaggagcctactgggaccagggaagagactgacaagagaagggaggcctgtccctgcctgcttctgtctcaagaagattgttatcacttcctctggtgaaatcctgccttcctgtccccacggcccctcagctgatgccaccttactctggagaggatgggcagagcctcctatggagggagccctgtgggtcaccaaagctccagtgaccaccc

SEQ ID NO: 8075 - DNA, 649 bp, Homo sapiens
tttttttttaagttgacttttaatgagtaataatataaacccctcacaagtcaagtttactcagtagccaatagcctaaaatgaaattttaattttgcttgttcacataattttgggttttttttccccttctctgttctgacttctctcagtcgagccttggcgacaggaaaagaaaaaaaaaaaggcgtatttctcttcatgcccctctcaccccagtaaaaagtaggagaaaaagaatacacagattaaaacagaattgtattatacattcacttttgagttatcaggtgaacttaattcactccagaacaatcacagagacaaagacaggcaagctgggttttaggctctcacccttgacactccaaattgtgctgggagtggccaaggctttgttagaaatggccctaagggtatatacactgcctcagctgccttgggcttcatgccctgggctcctccaccaggggccagccccaataggtctttagttcgaggtagaggttctgctgttatttcccaggtgagctagaagcaggtgagtagcaagcactctctaagactgctttttattgtgtggtgacaagtttcacaattgtgctgatgatccgggatcctcgaggacacgtacacagatcaatgcttt

SEQ ID NO: 8076 - DNA, 442 bp, Homo sapiens
  misc_feature (1)...(442): n = a,t,c or g
ctattgcatgagcttagttcaaaacaatggcctcccataattttgcttaaaaaattcctccttttnnnnnnnnnnnnnnnnnnnnnnnnnnnnnnnnnnnnnnnnnnnnnnnnnnnnnnnnnnnnnnnnnnnnnnnnnnnnnnnnnnnnnnnnnnnnnnnnnnnnnnnnntcatctctactaaatacnnnnnnnnnnnnnnnnnnnnnnnnnnnnnnnnnnnnnnnnnnnnnnnnnnnnnnnnnnnnnnnnnnnnnnnnnnnnnnnnnnnnnnnnnnnnnnnnnnnnnnnnnnnnnnnnnnnnnnnnnnnnnnnnnnnnnnnnnnnnnnnnnnnnnnnnnnnnnnnnnnnnnnnnnnncctccttttcagtcaagttctcacttagttgagagtgtgaccaaaatgtagggccttagcctcactcttagttaccattgtttt

SEQ ID NO: 8077 - DNA, 359 bp, Homo sapiens
ggacatcctgcaagccttcagctgagcacatgggaaactacccaaggcccagggaagagccacttaaaaagatcagagggaacattcgctggagcttatgcagggctgggagtgatttctgttcccattagccagattggaaaatctcataatttgcaggtaaagtgatacaagatttttgtgtcaaaagtggggcaaaatttcctctaaattcctgtagccttccttgcttaaaaaaaagcaagacccacggcacctcctaattaagtcgcttataatcagtgataaagagaaaaatgttgtaaggttcttacagtgtacatgaagtgatataatacatcctaaatgtgtagacttgg

SEQ ID NO: 8078 - DNA, 496 bp, Homo sapiens
gcagaccctgtccctttggctcatccaccaccgcaagcacgcgggacccatcgtctccgtgtggcaccgcgagctccgcaaagccaaatcaaatagaaagcttacttttctgtatttagcgaatgatgtcatccaaaacagtaaaaggaaaggacctgaattcactagagaatttgaatctgtccttgtggatgctttttctcatgttgccagagaggcagatgaaggctgtaaaaaacctttagaaagattgctgaacatctggcaagaacgaagtgtgtatggcggcgagttcatacagcagctgaagctgtctatggaggactccaagagccctccccccaaagcaacagaagagaagaaatctctgaaacgaacttttcagcagatacaagaggaggaagatgatgactaccctggaagctactctccccaagacccttctgcaggccctctcttgactgaggagttaatcaaagctttgcaggatctggaa

SEQ ID NO: 8079 - DNA, 709 bp, Homo sapiens
  misc_feature (1)...(709): n = a,t,c or g
ctcaatgtcaggtgggctttctccttgtggtgggtgccacagctccaggctgtcatattcatagcttctagtccagtgaaaagaaatcactaagtgtgctgatgagggtcctagaactaattctcattggcttaactttgatcatgtggccatggcactgcataacccagttggattatgcctgaattatgtgctcacttttggagctagggagagagtcagctccatatagactacatagactgggttcacatgggtcacatggctaatgaagaagccaggggtttgagtccaggactgtctgattgccacttgttcttaggccacttcttctacctgccttcagtgttagaaaacaaatgcataccgatcacagaatatttgaaaaatagagagccttgcctttggccagcatgtatgcctaaaatcggaaggatacagagaagattagcatggcccctgtgcaaggatgacatgcaaatttgtgaagtgttccatatttttgaatagataatgnnnnnnnnnnnnnnnnnnnnnnnnnnnnnnnnnnnnnnnnnnnnnnnnnnnnnnnnnnnnnnnnnnnnnnnnnnnnnnnnnnnnnnnnnnnnnnnnnnnnnnnnnnnnnnnnnnnnnnnnnnnnnnnnngaaaaactnaaagaaggatggaggagggactttatcattnaaaaatatcaatgtcatcaaagaa

SEQ ID NO: 8080 - DNA, 321 bp, Homo sapiens
cccctatcctcataggagtgtgtatggggtagcatgaacctaaggtagataaaggcttcacgtggtgtttggcatggcgtaggtgtagattggacctcagttttctgcccatgtttgctcttcacgtacctgtctggtatctgtatgtgctaagctctgagccttacaaaccatagggagagatatgcaaacttgccctcaatgagcatgttgtctagcgaggaagatgaaatgcatagacagacaacttagaggtggggtttgagggagcccaagaaataagcactgacaacactttaaaaaaaaaaaaaaaaaaaaaaa

SEQ ID NO: 8081 - DNA, 520 bp, Homo sapiens
  misc_feature (1)...(520): n = a,t,c or g
cnnnannnngnngnanaannntnnnnnnnnnnnaatncnnnnnnnnnnnannnnntgatannannannagnncntngagnnngnnnccncccctngccccttggaanaccgttagaatganacgaannnnnnnnnnnnnnnnnnnnnnnnnnnnnnnnnnnnnnnnnnnnnnnggcacgagggggaatcccctcctctccaaacctgcccccaaacccttccttcttgaaccagaactctcctctccccggtactccttcctggaccgcgctggaagccctggcgggggcggcccatggggcccttggcgctgcccgcctggctgcagcccaggtataggaagaaagcgtatcttttcatctattacttaatccagttctgaggccactctnnnnnnnnngcaaatangacagtcagattcttttcattnggaaaagattcaatggntgacactttttatgctatnggacttgtgatgcgactttgccaanccgnatctctcctggaactgctgcacatg

SEQ ID NO: 8082 - DNA, 342 bp, Homo sapiens
ggcacgagaactggattcagtagcaggcaggaaatgtggctctgtcaggatagcagcaccacctcagctcctcaaggtttgcagaatgaccaaaaggcctacaaggccagggtgatctcagtcattttagggtattcccagtcacttataacaacaatccttcactgtgtataagatgtttaccaagtgtttccaattatattaacttgtttgatcctcttaatatctcttaagaagacagtactctgaattcaaaaccaaacaaaaagaactgtaaatctccattcattatatttcctttctaattggggatatgtaagcttttatctgtaaaattaaaaa

SEQ ID NO: 8083 - DNA, 347 bp, Homo sapiens
aaatggaggaaatgcttgtaaggcactcagcactttcttaacacattatacatccccagtcactgactatttgttatttattaatgaagcatgtggggagggctgtgaccttggtggctttgccttcggcagtgctggctgaggagagctgaggcttcatctggaactgggaccacatggggcttgcatctgatcagccgggggataggttggggaataggcttcggagagcatggcaggtggctgaggttgctttcaaagctccacagtatcctgcccatcccacaactccaatagccagttgaggttatggtgtctgagactcactgggcagggtaaacagagtg

SEQ ID NO: 8084 - DNA, 105 bp, Homo sapiens
gcacgagaggaggcagtcttccccaggaagacccaccaacctggtctgaggaagaagatggggcctccgagcgagggaatgtggtggtggaaacactccacaggg

SEQ ID NO: 8085 - DNA, 358 bp, Homo sapiens
caaggtgtcgccattttgtcttttacacgcggtttttaatgacgagttttaattaggttccgctgcagtcacggagttccgagtgttagtgtgtgcgtccgcgttccgttacttaatagcaaacgatgttgacgatttgtttttatctttttggccggatagtagaattttcggtagggcgggggccggtgaagaagaggggcggcataacttggcttaaacttcacatttctccttggatttagtagggaatcctaatgaggaaaagaggagtcgttggaagagggcttggtgttaaggtcctgtgtctagcctgtgaccttgggagtcttttaaaaccatcgttaggaagggtgtg

SEQ ID NO: 8086 - DNA, 325 bp, Homo sapiens
ggctgggcttgcaggcgcagtagctccagaggtcgcgctgggctgagagtgcgggccggcagaggctggcggggagcagccggggttatgctgggcaaggattacatgctggccatcattctggtcaactgcgatgatgacttgtggggggaccacagtctggaggtggaggctggcctgcctcctggctggaggaagatccacgatgctgcaggtacttactactggcatgtacccagcggtagcacccagtggcagcgcccaacctgggaactaggagatgcagaggacccaggcacgggaacggaggggatctggggactgc

SEQ ID NO: 8087 - DNA, 859 bp, Homo sapiens
acgagactggtgaaattctaaggaggaacaagtttctggacagacgttggtaatttgtgatcattattaacaacagccctatttcttgtaggcctcgtgaaagcttgtttgattcggtcagtaaactccctgttgttttctctgtcaagagcttccagtcaaagctctcggtgtggtccattaagaggtgtccctttcagctggctaatcaggaaaaatataattaaatctaactgatgagtaaggttgtcatctaacagggcaggggttaggtgagaataacatgaatttccaagatctcactctataaagaggaaatgaggagccagaaacacagtggctggaaatttaaagtatccatggcattttaaagggagccaaataatagtgttgctaaaggaagtgcacagagcagattccagtggaacagagtcaggtaggaaagcttagcactgaagaaaagcactgtccaaactgacttgaagggcgggccagccgttgtgtaagtcaacaccctggagtagggagggactggatgcatgccactggggcccaacttaagaatggtcaaaatcttttgaccattttaaaagagttctttatgtgttctggatctaagtcttttgtgagacatgtatttcaagtattgctctctccatctataacttcccttttaattatttaacagtatcttttgttaaataattttaattcaatgaaatccgatttattgatgttttcctttatggtttatgccttcagtgttctacggaatctgcttaacccaaggttatgaagatgtctttttaggtttatctctagaaattttatagttttagttttgtaaatattttggtca

SEQ ID NO: 8088 - DNA, 609 bp, Homo sapiens
ttgtgcagcgtttgccttctcgtagaccacatggatgcctactaggagatgtttgggagttccatgaggaagttagaagggcaaatggcattaatgggagcttcaacaaggacagggtgtccaaaattgtatagatgttgtataaaataaggacaaaaatgcttgctggatttggtaactggcaggtcaccgacatctcagacaagagcaatctctacatggcgaaagcagaaatcacattgccttgggtcagcgtgcccagtgggtggggtaggaaaagcaggcacattttaaagaacttgggtttaaagctcatgagaaggcacgacatcacttttatgtatgaatgtgagaagaatgaaacactacattaacagagaacaagacaaatcagacggtgagaccggacacagcttttgtccaaagtcggcttgcaggaggcggcaggattcagcgccatggggtggccacagaggacacacaggggtcagcagaggacatgtggggtccgtggccgcgaacgctgctgaggaaaggccccagagcccctggtgtatacagtccccgaaagatgacggacgatgagtgctatgtgctcaggaggccggg

SEQ ID NO: 8089 - DNA, 590 bp, Homo sapiens
taaataaatgtcagtgtagtcactgaatgcagactggatttttgcctgactacggtgctcagccttctagacaatagttatgctaagggattatcttttaacattgtgcagttatctcctttgtttgttttcttttttcattattcacataagccaagggaaatgaaaagcatcttatttcaggcaaaaaggcctgtgaatgattaactctggttccatgcgttgggactttgcatagcaacccccgtggcttgcaaccgacaaaaaagctcaaggcaggaacagcagcccagggacctgagaccaagccgttctcaaatgaaggtgatctgctgttagaggagaattcttctgtcctagctgtgtctctgtgatctgtggatgagggtgggaaagcaccactccagtcaattggggtgtacaaaatgggagtttgagaaaggtctcacatccaggttggttttgaaagccaaagtccaagcattgtatcacttcatctgcaaatatttcaataagtacccaaaagtggttggactgagtcccatgaagccagatcacttctgactgcaaggagcttggaaaagcaagta

SEQ ID NO: 8090 - DNA, 1155 bp, Homo sapiens
gactgctatactctcaccagttgccagcttctcatataaatattgtaaatgctctcgtttaggtaactcagcttctggagttgagggaacttcaaaatcagaagagctctgggaatctgcatttgtgctaagatttagcaaacttttttcctcgggtatatcgtgtctcactgcttagagtagttggttctccagtactaggaactattgtcacatctttatctctgcttttcaaatcagagtaagtatcctttgggcaaattacattttgttccatgagagaggcaggaatattctcttttgattgttggtctgtagtcagctttgtccaaggaagtaatatccccactgtttctcttcttgggaagataacaaaacagtatcagatttgctgtcccagccttgacttccttgttctgttatgtgtgttgactgggaagaattctgggaggagatgtgagttgattctccatcagagtcactgaaaagctttggtgactgagatccccctgccactgtggaggaagggaagttttccaaactctcatctgtgatttcatcatttcttttaaagaatacttcccactggggtacatccccatcagccttttgcaggtgaagtacagagcccagatctccttgcagtgaagctgggattcctacttcttcttcactttcactgttggattcttcacaatctacaaagtttgtgaaacgagagctctgcatacactctgctctgcagcatcctggggtttgtctcagtttttcaggctgcttttctgatactgcagtcattgaaaatacctcagggtgaaaagtttccgggtatggaactttgtgccttaaaggtattggcagaggatcatcaaagagatagtcatcttcctcctctgtgggacaaacaaaacaggtttataggaaacaaggcaaagggagccaatttgtagtatttatctgtacttttaattcttggaattgcaaagaatagggaggccactcttcttcaaagggaaaagatattcttgggatatgctgaacaatttaactgccatccttcaactttttataataaatgccagagtatcagtggagaatatagagcagtcactctgctctatatgtaagcctggctgatcattacgatcatatgca

SEQ ID NO: 8091 - DNA, 743 bp, Homo sapiens
ttttttttttgtagttcagaagccaacccttattttattaaaatgtgtacaagagatggggaaggaaaaggaccagactgtactgtggccatgtacacaaaggcatgcaccacatcccagctctgctgccctgggctgtcccacaggcagctctctagaacttgagagcctcaaaaggggcctcatgaagcccagatcttccctggtcaagctgatggcattcgtataactgaaagttggggaagaccaccaggtcagtggagtggagaggttttgtatatggtcttctttgaagaaacttacttcttgcaagccctggcatcttccaattggctgtcctagtagtggacgtggcatcagcctaccagcaatggaggtctactcacccttcactgagttttgtccctgaagtcagaagccctggcacagccaagttcacaggccaaatcacacttcaggcccacactgcttcacgcaatgacacacgtacagacggatatacagaaacacttctcaaggagtgcatgagcatggttcatttcatatttctttcaatccagtctttaaaaggcagcaccttggtgaaggcagtggagagcctgtggctgcatgttttatcatagctccagctgaccagtcccatcagatgccagcgtggctcaggagatgctcgtcccgggaaggacacagccgcgatgcctcctgtctctgcagtgcagatatcagaaggggcacgtggttcc

SEQ ID NO: 8092 - DNA, 347 bp, Homo sapiens
gcaatctttctagttcccatttagtaagttcagttaatatttgtcaaagggcagatttacctgccttcagttttatagtactagatagggaaaacatcccccagtcacatacagtacccattttcataagacatttaggtaaaaggagtcacaactaccttacataaagtctgtgtaaacatctcagatttcataattctgttaaactgtatggttttatgttctggtcccaggaacttttctacccccaggaccattctaccttttctgggtaaaaaggggtttggggttcccaggcggggaggttgaggccaaggggactcagggcctttttcgtccaatttttt

SEQ ID NO: 8093 - DNA, 476 bp, Homo sapiens
  misc_feature (1)...(476): n = a,t,c or g
gcggcacgagggggggacaaaaatgacaaaaacccctacccttaagaggttcacagtatagcatggggaattagaaataagcatctgtctcttctctggtctttaagcacctcacaggcactggccatgtctgctcatctgtttattcccatcatctaacagagtgctcaacacatttgcttgatgaatacgttttgagcactgggagatgatcacagaagagctaagaagtgatagcagttgtatttagtggagaacagtattcacaccttgttgtctagattgccttgaaatcaggctctgtatgatatcttttttttttctcttagaaaaaactgttaacctatttagagtaattttattaaggagcnnnnnnnnnnnnnnnnnnnnnnnnnnnnnnnnnnnnnnnnnnnnnnnnnnnnnnnnnnnnnnnnnnnnnnnncaaccacagctcacttcagccttgacctcctggg

SEQ ID NO: 8094 - DNA, 347 bp, Homo sapiens
catcttcttgaaatgggctccaagaagcaggtttgtggccagtagagccagctcagaacccaggagtggtacaaaaagcattcagatatcaagattcccctcctggctgcatcttccatgggggaggccatgaaaggggcccctggtgaaccattgagtcatttatagctaatcttagtacactccctgaagtagggaatgacatgggctgcaagaattcttcctaagcaccccagagagaacttcaccgatttaaaatatgagtttctgtaacctgagcaggagcttgcctgggtgcaagggcttatgcagcctgcctgccaggaggccagagggtcgcacttatg

SEQ ID NO: 8095 - DNA, 652 bp, Homo sapiens
aagtctgcactaaataacttacagtagcatggcatagtaagaaagaacgttgtttcaggaactgaagatataggttataatctaagctatgtcattaacgaagtgttattaagtaaataatttaagcatcttggtcatcatttattttcttataaaattaggagtttgtatcagatcatctgtaatttacttcccagttttaaaaacaaatctggtcttctgtcactcttgcaattcaaaaaccgtgtctctgaagcagatcatgtgcgtagcccagcctgtggtaggaaagtcagccctccctcaggatgaaaggtgcttgcagaacctccacccacacaccttccacacaggggtttctgatgcttttgcagaactgaaagaattggaatagagatacactgatttccacagaaattctaagggaatcactgtaaattgtctaaaaccactttaagtactgtgatctaacaaccacattttcaaagtcacgtttttttggactgctttggctgctatctgctatggctgacagaattctgaaacacacactagtgcttttaaagtgtgcacgggaatcaccagctcattactgcttaattctgttgcatcatttcttaaggagttgttactgagataggaaactggaaat

SEQ ID NO: 8096 - DNA, 392 bp, Homo sapiens
taaaaggtgggtcatagtggagctctaagccaggcagagaaatcatacccctcagagtttgaatatgtagaaaacagcttcaaaagctgtgagaagcaacagaaactgaaatctgcttagaaacatacatgattagaattggttatgaaaaactgtgtgacatttgtaaaatgaaaacaaaaggaaactgggtttaagggaattgttttgaaatgtgagttacaagttgtttctggactttgggtggcctagagtggtggctacttcaattttccctcttaggaatagtttttatgggtagaatattccagatccctcttccagtttctgccaggtttgaaaagcactaggggtgggaggccaggggctgtgccaaacaggtattcctgagg

SEQ ID NO: 8097 - DNA, 1391 bp, Homo sapiens
caccttctcactgtgaaacgtcgcgacctgtgacgtctggggggcgcctcaaatcttccactccagcatcggatcccggaaaggcagcgtcggagactggacccaaaactcttcctgttctgcctgcagagttgagccccgtccgggtcctggacccgcggtagtactgaccctggatccctgttcactgcgttctcgctccccgcgctccctgctggaccccgggatgccgggcatctccgcccgaggcctctctcatgaggggaggaagcagctagctgttaacctcacccgtgtcctggcactctaccgttccatcttggatgcctacatcatcgaatttttcacagacaacctatgggacacactcccttgctcatggcaggaagcattggatggactgaaaccaccacagctggccacaatgctgctggggatgcctggggaaggggaggtcgtcaggtacaggtcagtgtggccactcaccctgctggccctgaagtccacgggcttgtgccctggcctttacccggatgcctggctttcagaccccctcagaattcctggagaaccccagccagagctcccgactaacagctccattccggaaacatgtcaggcccaagaagcagcatgagatccggaggctgggagagttggtgaagaagctgagtgatttcacaggctgcacccaggttgtagacgtggggctcaggccagggccatctctcccgcttcatggctcttggcctggggttgatggtgaagagcatcgaaggggatcagagactggtggagagagcccagcgcctggaccaggagcttctgcaggctctggaagaaagaggagaagaggaacccgcagatatgtgcagcgggggctacagcgagtggggctagatccccagctgccactgaatctggctgcccttcaggcccacctggcccaggagaaccgtgtggtggccttcttcagcctggctctactgcttgccccactggtggagacgcttattctactggaccggctgctgtaccttcaggaacaggccctttctcccaggtttccatgctgagctcctgcccatcttcagtcctgaactctctcccagaaacctggttctggtggccaccaagatgcccctgggtcaggctctttctgttctggagactgaagacagctgatgcagcctgaggacacatctcagaccccatcatctgaaagtgcccagagagcacagtggcagagtacatctcatccagagaaacagcatcctgcatcctccagagtcctggttccttcagtttcatcccctttctctccttccatggattatgtaatacattgtaaagttttaattaattaaaaattggatatctgaaaaaaaaaa

SEQ ID NO: 8098 - DNA, 548 bp, Homo sapiens
aagtgagccctctggaggtagttggagccaggagtgtgctgtctggcaagggggccctgccagggaagggggtgctgcagcctgctccctcacgggccctaggcaccctccggcaggaccgagccgaacgacgggagtcgctgcagaagcaagaagccattcgtgaggtggactcctcagaggacgacaccgaggaagggcctgagaacagccagggtgcacaggagctgagcttggcacctcacccagaagtgagccagagtgtggcccctaaaggagcaggagagagtggggaagaggatcctttcccgtccagagaccctaggagcctgggcccaatggtcccaagcctattgacagggatcacactggggcctcccagaatggaaagtcccagtggtccccacaggaggctcgggagcccacaagccattgaggaggctgccagctcctcctcagcaggccccaacctaggtcagtctggagccacagaccccatccctcctgaaggttgctggaaggcccagcacctccacacccaggcacta

SEQ ID NO: 8099 - DNA, 317 bp, Homo sapiens
taaaagaataataacattaaaaccaagtgggttgtgttctaagacaatatgggtggttttaatgtaagaaatgagtatagttcatcatattgatgtttaataagagaaagcccttatggtcatatacatagagaaaaagcacttgcaattatttttaaaaggaacacctacaaaaactgtgaatcaaagggcataataacagagtatttacacacacacggcaagctacattactaatggggaacaattgatagctttccttagaagggtggggagagttaaggataccagccattcactaaatattcttgaggaaa

SEQ ID NO: 8100 - DNA, 539 bp, Homo sapiens
ttttttttttcagaaaatgagaaagaacgaatattcttctaccttagtataattttttacatggtaaaatcatattttaagaaagaagtctttgaaataattttaataaaaacgttcttgaaaattttgtaaagtgccctattaacataggtaatagcaccaataaaaacagtacattataccaaatgtaagtagaaacagtgagatcactaaatgtttattcgttctttctaggatgttgatgtggaatacacactgcccaccccccaccacacacacacagctggcttaaaaggggcagctactataacacaatcttgaacaaatcatcacgccatccccctggggaaaaggacactaaccctctgcatctaaatctcatctggggcagatttttgaatctggaaagcccaacttcaagccaatgtcagtctttagataaaactcaaaactacttttgacacaaaactagtcttttgtgccaattattaattttttaggagaaactatcaaacatttcctctaaaaaaaaaaatggg

SEQ ID NO: 8101 - DNA, 374 bp, Homo sapiens
  misc_feature (1)...(374): n = a,t,c or g
caggacttaaatatcagtgaaatattttgagatctttaataattcctttagaggaattatacaaaattaatatatatgagtcctttgtaatnnnnnnnnnnnnnnnnnnnnnnnnnnnnnntacnnnnnnnnnnnnnnnnnnnnnnnnnnnnnnnnnnnnnnnnnnnnnnnnnnnnnnnnnnnnnnnnnnnnnnnnnnnnnnnnnnnnnnnnnnnnnnnnnngctttaggtnggcactgccacaccgtnnnnnnnnnnnnnnnnnnnnnnnnnnnnnnnnnnnnnnnnnnnnnnnnnnnnnnnnnnnnnnnnnnnnnngcttcagtcagtccccccattttnacccttgcccaagtgcttggaattacagggcg

SEQ ID NO: 8102 - DNA, 190 bp, Homo sapiens
ccaacgttgattaccagttcagagtctgcgcccgaggagatggccgacaggagtggagtccttggagtgtcccccaaataggtcattccacattggtgcctcatgagtggacagctggttttgaggggtacagtctgagcagtcgaagaaatatagcacttcggatcgattctgaatcatcggttgttct

SEQ ID NO: 8103 - DNA, 141 bp, Homo sapiens
  misc_feature (1)...(141): n = a,t,c or g
cgcctgcctcggcttcctaatgtgcaaagatgcttttttgttgtcacattttaagacagccaaaaagaatgagaaagtcattgtttagaagaaaaggaatcctagtgacgagttgtcttgaaagagaagaaaaatnattaa

SEQ ID NO: 8104 - DNA, 555 bp, Homo sapiens
ccgctgtgtggggaggagggacttttgccactagttctgttacaggtttgggattctaggacactggacactaatgtgcctaatctgtaaggcattctagactgcatcttgtgcagttcattcatcttcccgcctcgcaagccagcagagcctgacttggggcctcagctctgcatggagctacctattgggccttcaacagcgagggttttagtcagaaacacagaaatgaatccttagtgcactgggcagtgggtatcgtattttacttagggaggtttttgtctagaagtttggtcatttctctgggatatggtataggatgggtgggaagggtgccacaaggaaaacatgagaatttgtactgtgcacagttttggtgtttccagttgggtcacccacaaccttgactccaaacttcaaaacaaacacacctgtgcattttgccaaggttctattgctgggggttttattgtaccttctggcaacctacatttgggttctcttcctcattgttgctgtttaagggattcttactgacatgtgttgtttttc

SEQ ID NO: 8105 - DNA, 413 bp, Homo sapiens
gagctcttgtatccacagttactccaggaaaaagagaaaaaagcaaatagatgaaggagcagtatggctgattttgtccttttaaaggtttttccagaatctcaaatcagcaatttgtgcttacaactcaaaagccaaaactgagtcatatgatttcccgctttcttgtaagagagtatgaaatgatgagtgtttcgacttctttgcctctgcaaggcagaggaaaattaataatagtccatccccttgggctatccagcatccatgacatcaataaaggtgacatggcatacatacattttaggtggcatgcatttaattctttcccaaaaaggaaccccaccttcaaaggctgtggattggcatctgggttgactcgggttattctcccaaccagggcccttgggttccct

SEQ ID NO: 8106 - DNA, 356 bp, Homo sapiens
cctctgagtgactataaattgcgaaccccatgaggtggcacctgcagccacagatcgcttaggcaccttgcacagggggccacctaatgaactggctgcaggacggcaatcctgccgtgaagccaggcacctcgggaggggcaaggtggcagaaccgagagagcagatgctccttgctgtttctgtaaggccaccagtggctgggtggctgggccctgggtagcaaggtggtaaccttgtgagtggcttgaatcctgcaccacttttcctgagcctccttcctcctggattcctgcaactatattctcactacatggctcaccaccaattcgttctctctgccccaaggaggctgg

SEQ ID NO: 8107 - DNA, 562 bp, Homo sapiens
gacaatgttgagagaatgagaaaacaagctacagactgggagaaaatatttgcaaaggactaataaaagactgttattcagaatatacaaaaaactcttgaaattcaacaagaaaatgaacaacttgattaaaaattgggaaaaagttctcacctcaacaaatacttcaccaaaagagatacactgactgcatgattgcaaataagcatatgaaaagatgctcaacatcatgcatcatgtgtcagtagggaattgcaaattaaaacgagatattgctacatgcctattagaatggccaaaatctaaaacactggcaataccaaatgatggagagaatgcagagcaagaagaactctcattcgctgctattgagaatgcataattggaagacagtttggcagtttcttataaaatgaaacaaactcttaccatacaatccagcaaaaacattctttgatatttacccaaagaggtgaaaacttacacccatacaaaaatgtcaacatcgatgttttagcagttttattcataactgctgaaacttggaaccaaccagtatgtc

SEQ ID NO: 8108 - DNA, 66 bp, Homo sapiens
accttctgtcttttgcccctccttgacctcagagggtcctgccttaagcttctcaccagaatctcc

SEQ ID NO: 8109 - DNA, 542 bp, Homo sapiens
ttacgtttgagtttgttgatgttttattacagctttcattttattctaattttttatcatcttaaaaatgtttggacaagactttccaaggagtgtattttcattttatgtcagaaattatttaaaatgttttatttcacagtttaacttttcccctgcatcatcttaagcttgacagtgtcttaaacacttcaggacaaccaacctgaaacaatagcaagatgtttttctagaataaaatctcttctaccaatggccaatatccatccctcatgaggcctacttgttcttgtcaaaacttgagggtggactaggctgatctttcacatatgccggtgacaagtttttcatggtggtcataaaactcgtttcaagctttgacttttaaagatttggagggtccggttcttcacaaaccccacccttcttcctcctgttttcttcagaagggaacaggcataccacgctcagagaaaacacaagttcaagactttacgagatgatttagagttggatctcctgttaatttagcctaatggtta

SEQ ID NO: 8110 - DNA, 443 bp, Homo sapiens
cacggttacgttctgctttgaggtactccatgtacagtctaatgatgatctttcactgatttatagtcagcttccaaaacacacagtgctaggtgcagttaggaaggattccaggagtagacttagctgatggtgaaaggctgggagtatggagtgatttctgtacttggttatgcagcattccctgcagtgtttgttttttgcatgactccgaatacatgaagtgtattaaatgcagatttttggtagatctgcggttttggctgggtagctgacaggagcctctctacttccatctgcatttgcaacttctataaaattagcaaattaatagactcatgtcagagagtgtctctgtgaatgtgtacacagttgtccatttgtaaggtagatgacactttgctcctaagtagacctgcaaacaaagacaatggggtctttcc

SEQ ID NO: 8111 - DNA, 230 bp, Homo sapiens
  misc_feature (1)...(230): n = a,t,c or g
ggcacgagccggcctctgctttgttttttaaaaaaaaaagaaatgcaagagagggagggaggcagcctcctgaccataaaagctgatttcttgatttttttttcttttttttttnaaanggagtntngntntgtntccaaggntgnagngcaggggnanggnntnanntnantgnancctcngtttcnngggttaaagnnatngncntgcnttggccgntgagnacntag

SEQ ID NO: 8112 - DNA, 476 bp, Homo sapiens
  misc_feature (1)...(476): n = a,t,c or g
gcctacaaggccctgtctgatttggctcccctttctctccctaacccaccacccctgcgtctccctgcaggcagtcaccttcttaggcccgggaaaatgccggtctcctactcttcatggcctttgtacctgacttggccaggaatgatctctgttcctctctttcactaagttagttcttcttcaccctcacttcctctaaagtaactccttatagggaagcctttcttggctggnnnnnnnnnnnnnnnnnnnnnnnnnnnnnnnnnnnnnnnnnngaatcagatcggattgctctttgatagctcttttcataattgtaatcaagcaattaattgggtaatgcgttgttgttgttttctttctctcttgccagaatgtattcatgttgacccataagacattatcatttttataagtccccaaaagttgaatattggaaattttatttccacccaattcaacttaataaattc

SEQ ID NO: 8113 - DNA, 83 bp, Homo sapiens
ctgaaatttttaaaagctgtttccattagaagggatctgttggggatttgaggtgagatgagaaagaccctgcattccagccc

SEQ ID NO: 8114 - DNA, 343 bp, Homo sapiens
gtaccccaccgcggggtggtgctctgactgcgggaaccgttgaagagctgcccccggggagtcagcgaggcgccactggtctcttagacatcttctcaagattatgctaagagaaatgactgcacccttttcctgagctatggcagtcagacctggcagtggtaactactctacagaactcccaaacctgggcaaggatggtgcagattttggcagattatggctttgtccccacccagcacttgatgatattataaaatatgacaccttcaagtataagcaaccaaagaaaactagataaattgggacctcataaagtaaaacaaacaaaaaccttttgctt

SEQ ID NO: 8115 - DNA, 610 bp, Homo sapiens
  misc_feature (1)...(610): n = a,t,c or g
tttgtgagtttggagcaggagtttaataggcaaaaggaaagaacaggtctctgttagagagggatcctgagaagattgccaagttgtagttaagaatgtcagagtttttataaatgggctcttgaggagggggctcttgaggaggggcttgtgaggaggggatgtcttatctttctagggccccagggtttagttgggaccaggtgtgccatctgtacagagcagatttttttatcatctcttaacccactccgtgaccacacaggccaactcttagtctgtgtttctttgtcctgcttatctggtagggaaagtttctgtgtctgttcccatacatcttcttgaagctgcaggcatcttggtgcgcccggacaagcgctcctagctggaggagggtcgcgttcctgccggatgtggaaaggaagtccaggaatccccttcctgtctttctggtttctctctgggcttcctgctcgggtcacaagcgccagaagcgccggcctcgtgccnnnnnnnnnnnnnnnnnnnnnnnnnnnnnnnnnnnnnnnnnnnnnnnnnnnnnnnnnnnnnngaacggtccangnagntccnnnnannanaanacaactcc

SEQ ID NO: 8116 - DNA, 306 bp, Homo sapiens
gacatgaccacagaaagcctgggaagtggaaacagacaggagcctgttggagctcttggagctttgtgtggggcactgggggaaggaggcaggcactccaccctgacctgcccctacctcggatgagggtcttctctgcctgttggatgatgtgctgcccctgctcttggaggaagaggcctcccagccaccccctcctgccagtcgccctgacctgctgacccagacagatctgctatccctacagcatccaggaaggccacagggagggggcccaggtggcatgggtttctgaggcctgggatc

SEQ ID NO: 8117 - DNA, 513 bp, Homo sapiens
  misc_feature (1)...(513): n = a,t,c or g
accgcgccatgaaccacctgaggccgcgtccacggggagccgaccagcgacctcagtgacatttgactgacggcccggcccagcgcggtcttgtccatagtgttgataagctgtacatgtttgtatattgttcaaaacttaacttattctgatttttagttatagctctttaattctttttccccggggaggggggaggttttatttccaagttttctaggaacccatctccgtctgggcgctgtgagtcgggtgggcacgtccgggcagcccagtgcgtctgccncacgtccccaggccgtgctgctggcgtcactttctttgatatgtagctttttcttaaagacttttgaatgtttaataattttgtaaatcatgctctttacacagagtaccacttatttaataagacgggatgtaaatttacaatgacaaatgtgtattttaagaaagaaaatgacattattttgaatggtactttgtggaaagaggggagaataaagttatgctgtg

SEQ ID NO: 8118 - DNA, 170 bp, Homo sapiens
tcgacctaactgaaatcttccagaaagtaaaaaacccaaacaagttatttgaagtgatttagtaacaaaaaacaactcctgctccacacaaattctactcattcaaaatagatatttatgtatttttaaattttaaattattgaattgagttataaatctagataatttt

SEQ ID NO: 8119 - DNA, 400 bp, Homo sapiens
agtcataatttctttctgggtcatttagaggctagcgttctctaaggtcacttctgcttgcacattgtaggatattatttagtatggctttaagaattcaatctttccccctctcctttatggaatgtgtgtttcctctatttgtacacttaaccttttgtcctaagtttttatttttatggatactaatgagtaactttgaggttgacactagacccaaacagatgcaaacagccactttctgtcctcttgtgacacagttgaaacactttatctcttgtctgctgtttggagtgtcctgaaagaaacactgaagtggcagtcaacagagcaagggtaacagggatctttaaataatttaaagttgtctgatcttgacataaaagtggaaccctttctt

SEQ ID NO: 8120 - DNA, 391 bp, Homo sapiens
ggcacgagcagaaaataaaaaacaaaacaaaaacggaaacctcagttctttctagcttctgccatcctcctctcaccagcaaaacaaagccccaagcttgtgtacttctctgttgtctcatgttctgttcacttctccatacactataatgtcttctctcatcattcactaaaactgctcgctccaagatcatctggacttcttgctgctaaaaccatcatcttatagaatgttcaaaagtacttgacacttgtcaaattgctgtcttctgttggcttctatgacagtacgcaaagcctcagctgtttctccttaggctcctttgctgccttctcttcttctgccaaatgggaaatgttccttaacttttttttttttaaatgcatttgcc

SEQ ID NO: 8121 - DNA, 408 bp, Homo sapiens
ggaaacaccagttatttctaaataatacaatgtaacatttctcttcaaaagattactttaaaatatgatatatttatatgtaaggagtctacagtcaattcaaaatgatacatattagcgagtaaataggaacaccttgggaaatattacatctacaattggataatttaataatcaaattttttgccaaatttttgccccaactctttctcatagagtatcgacactggctcttttgatttctcctcttgctatttctatcctcttcctggtacagtcactaaagagtaactgaatgacttaatgccaaaagaggtagccatgagaaggatgaaaagcattatcatgctctctcagagacaccacatcaaaggcagtgagaactctgtggtagccagcacattcacg

SEQ ID NO: 8122 - DNA, 420 bp, Homo sapiens
  misc_feature (1)...(420): n = a,t,c or g
tttctgttaactcagaattattatagcattcattattgttttgtgaaaatactagttaataatctccggttaatgaaataattatcttagataaatttactgaacttaatgtagaatatgttttttgtttcgttttgnnnnnnnnnnnnnnnnnnnnnnnnnnnnnnnnnnnnnnnnnnnnnnnnnnnnnnnnnnnnnnnnnnnnnnnnnnnnnnnnnnnnnnnnnnnnnnnnnnnnnnnnnnnnnnnnnnnnnnnnnnnnactacaggtgtgtgccactacacttgggctaattttcatattttttgtagagacgggggtttcacccatgttgcccaggggtgggtctttggaactcctcctggagttaaagcagtctgctttgtcttctgtctggccagagtgctgggcatttttggg

SEQ ID NO: 8123 - DNA, 779 bp, Homo sapiens
aaaacatttcatagataaggacacttctcttagcgaataccagtcatttatttatagagaagccagtctcagcgttctggggagatcagctccagcgactggctttatttcccaggagtatctccattgtgctggggaggcatgaagagcaatttcactgcttagttcctctttcttctgaggaggattgaaatctctcatgctaattatggattattttctctcagctctgcaggttttgcttcttgtatttgagaatgttataaggtgcatgcactttttagggatttttacatcatatttgtaaatttggaccccctttatctccagtggacattctttgttgtggaagtcaccttggtctgactactctcctttcttctgatttggtgtttgcgtggtgtgtttgccaggtttagcttttttcactttcaaactttgtgtatgtgtaaagtagatttctttcaggtatcatataattaggtcttgcttctttattcaccctggcaacctctgttttttatttggaatctttagactacttgggtttaaatctatcatctctggcgttttcagttacatctttcacttgtcactgcccactctcaaatggtattacactgcctgagctgcggggcagtgctctgactgtagcttcctgcttctgacatgttcttggttggcagtgttgctgtgtcatgtccaagtgaaacatggtataaaccccacaatatgatgtttttgtttttgctttaaataggcaattacattttttcccc

SEQ ID NO: 8124 - DNA, 278 bp, Homo sapiens
gttgaaactacagctacccgagaagaggagatgaataaaaagtatgagtcccagaacattatctctactcagctgaggtccattttcccagtctgtctcctgagaacatgacatgaatagtctgcccacccaggctactttctatactaatgaagggtcccagggcctggctaaatcccgtcagggtgaactgaggtttgtctgctgcagcttcagatttctgcaccaagcccaactctaactcattcaataaatatcatttaggtatctattctaaa

SEQ ID NO: 8125 - DNA, 369 bp, Homo sapiens
gagagagtagggaaacggctggactttcttggagtcactgtgcttcccaccaactttgatgtggagacccccaagcctttccaaggtaatatatctctgggaaatagggctcccttttacaaatgctggctttatccctctactaaggagctgtgatgggctgctttgggggcctgaggagttaggggagagagggcaaagtgagcttccagtgagacgaaattcattgttgatgtggtgctgcttggaggatgtgaggttttcttaagcaactccttattttgtagcccacccaaaacttttgtaacagaagagagctaaagttaaactgcacccaaagagtccattgttggtgtgttgaaatactta

SEQ ID NO: 8126 - DNA, 226 bp, Homo sapiens
aaggggagagctacagagtgattaccccccaaacccccacccaatagggtttagaagcttaaataccacctaaaggttacaaaaagagtgtgggctcggatcagtggcataacatgttcggggagctggagaaggggaagcctggctagcaaaggtggtcttgttatgtaaatgaagccccacaggtggcagccctcaaaagaatagatggtaaatgttttagacc

SEQ ID NO: 8127 - DNA, 871 bp, Homo sapiens
ccggtgtccagaggtcaggagttttctggggagtgaagggaggagggctgcattaacctcattgatctgtacactgaataattccccttgataccagctccccatctcaaatactttctggttctcttcatcaccttaatttttccaccagccttggtctgcaccctgtgttcttttggtgggccgaagtacctagcatgtagtaggcattcagaactatgtattgaatgtgatgaattcaacaggtaccaactgatacctactgaatattaacacttgtgctactatgcccagcaagatggatgggaagagtggaaatatctgatgacgtgactatgtcttagtgagaagacagtgcatggttagacatcaatgtgagctctagacaggaagtgctgaaggaagtcatggtggaggggtccagagtagcctgggatctggctctgcttctatgtctagctgcagtccttgcctgggaagaagacctcccttcagagcccagctcctcgctcatctctgtctcccaaagcctgacccactgtgttcttctctgccctcccctccatatgccatggcccctccaaacacagagataccatctaaactagtctctttttccccctacacttcaatccccccaccagggtttcctatcgctgaagtgttcacgctgaagcccctgggagtttggcaagcccaacactttggtctgttttgtcagtaatctcttcccacccatgctgacagtgaactggcagcatcattccgtccctgtggaaggatttgggcctacttttgtctcagctgtcgatgggacttagcttccagggctttttcttacttaaacttcacaacagaaccttctgaacaa

SEQ ID NO: 8128 - DNA, 864 bp, Homo sapiens
agttggaactattgaagcccgctttcaggttcttttccccattttccctttgaaaggaagacttctggcttctcctaaatctccgttctctgggtaaggggagtccaagcctctgtcatgaggaacggaaatgcgagggcctcgggtgttactctaaaatccgccctcagcttgcacgccggaagctgcgattcctgcagcggaagaggcgtgatctggccttcgactcgctatgtccactaacaatatgtcggacccacggaggccgaacaaagtgcttgaggtacaaggcccccgccgagcgaactgtaacccggccttggacgacccgacgccggactacatgaacctgctgggcatgatcttcagcatgtgcggcctcatgcttaagctgaagtggtgtgcttgggtcgctgtctactgctccttcatcagctttgccaactctcggagctcggaggacacgaagcaaatgatgagtaagcttcatgctgtcccatctctgcccgtggtgatgtcctatctgcagaatcctcagccccatgacggcccccatggtgataccagccctagaagggtcacattttggaccctgtctatccacttaggcctgggctttggctgctaaacctgctgccttcagctgccatcctggacttccctgaatgaggccgtctcggtgcccccagctggatagagggaacctggccctttcctagggaacaccctaggcttacccctcctgcctcccttcccctgcctgctgctgggggagatgctgtccatgtttctaggggtattcatttgctttctcgttgaaacctgttgttaataaagtttttcactctgaaaaaaaaaaaaaaa

SEQ ID NO: 8129 - DNA, 1355 bp, Homo sapiens
gacaattccatgaataatttgaggttttattcatattgctaatgtctacaattgttctaaagagtattttaaagtagtttttttcccccagctaatctttccctatgtatgcccccttttaggagatttctcaccattttgctttaacacaataattattggcctacttaatactccagtgccttgagatagttggacatattttaggaagattttattgtatttggaaaattacgacacattccatgcatggatcttttgtagttacgtgttttgattagtcctgtcactgtttttatttaaaatgcagtgtcagcaaaccgaaatgctcatttcttttttagtaacagagtactcgtatacttatcactgtatgcactcattgggtctaagggagatgtctgaagtccttcacttaaattattttatgatactactgttttctctatttttgaggttaaaattattttaaaaaaatattttgaagagaagtttattagtataagcattcatttaatgcaaaaaaactcagcccttgggacatataaccatgtaattctatatgaacgtttagggtactacatggttgaccaatatctagttctttactaaaagtaaactcacctctttatatatatttcaaaactgaatttgaagcctattagagaccaactgaccttttagttgtaatgaactgtatggtcttgcatggtgacacacctgtgtaggaggccaagacttggcagaggatgtagtctaggtgtcctggtatatataaatggtcactcacttcgtttatatattccacactcagaaaagaagtcagagttttttctgagtaatacaaaaaccatcacttacataatttgtataagaaactttaaacagttttaatcaaaactatgagtaacatcaaaaatgctttaagattctatattttggaatacctgtgaagtagtatgactacatcatgttaaatatttattttcttctatgattttggagcagcaatttttattttaaataaaattccacttttaagaaattcagggaagatttggtcacattgaagatacagtatttttgtagtatttataaactgttctaaatgatagactatagaaaacatttttgtcatatgaaggtaaatcagtccattattttggatcatttaaactgaacattacaccttctgggctttgatttatgaagtggcacagaatctaactttgcactgaatatcttttcattcacatctcctctgccttagtcacaatggcaacagtacagaaaattctatcaaacctcagaatatagtagaaataattaagctgttgaatgagtcttaaaaattt

SEQ ID NO: 8130 - DNA, 431 bp, Homo sapiens
ttgtcacggacactatgtgaaccccttgtggcgtctctctggatgaaactggggaacacgggggccatgagaaggtgtgtgaagctaacagtcgctcttgagactgctgaatgtgaattcccccctcacctggatgtatatatagaagacccacacttgcctccctcactaggactacttccaggagcccgggtccacttcagccagttggagaaaagggtttccagatctcacaatgtttattgttgtttccggtcatccacttatgtgcaggtcctgagttttccccctgagaccaccatcagcgttcccctgccccacatctacctgggctgaacttctgcagggtggtcagtccccattccagggccactgcctcttgccatatcgtctctgtcttcagccttcagctcttctggtgcgtgcttatt

SEQ ID NO: 8131 - DNA, 443 bp, Homo sapiens
ggaacatccaggtcatggtttgcaaataatgcaggtctgaaaagagaaaaagatcagtccaaacaagttgtagttgagtccctgtacattatcagttgctatggcaccttagtggaacacatgatggagccgcgacccctcagcactgcacccaagattagtgacgacacaccactggaaatgatgacatcgcctcgagccagctggactctggttagaacccctcaatggaatgaattgcagccaccgtttaatgcaaaccaccctctgctcctcgctgcagatgcagtacagtattatcagttcctgcttgctggcctggttccccctggaagtcctgggcccattactcgacatgggtcttacgacagtttagcttctgaccatagtggacaggaagatgaaagaatggctttcccaggttgaaattgtaacacacactg

SEQ ID NO: 8132 - DNA, 997 bp, Homo sapiens
  misc_feature (1)...(997): n = a,t,c or g
ttttttttttggacaccaactgcagcgtgatttattggacaagacgtgcacttttcaacagggcctcagtaaccacggtttccttcactgatcagtacaggaccagggtaaaggggcttaaagataagaaagacaaactcttcccaggaacagatggggaagaaaggaggaagaagaggcatgtcctcccttcctccttccctagtactctgggcctccgttcaccccgtgctggagtggggctgaccaagggaagctgggggcagtgtgtgtcacagccagacatgagctgaggctgtgactgtccactcaggggtcaaaatgggccagggtgggacgatcaactctgtccccacttcagggcccccagatctgggtcactgttccaggggttccccccacccgccccaccgtggggtntgggtnaaaaataccaaaagcggatccaatgcaggatgtcatatgcaaacatacacagggaccgagcttctacagtctctcctgggccacagcctccaccgacagtttgggcagagggcaagtgcgctgaggtgcttggagaagggtctcttctcccanccaggtaggatgggcggctgctgtcactaagcttggggaaggtggttgatgaaggaagagcagagactgaagggtaggaccagaagcggggcttctcccctcctccagcaggggagggggctggccagtcagaagcaggttgctggtacctacgggaagccagtcgggaagaggctgaggggctggctctcattggtgggcagcggagatcggtagccatcaaagtttcttggtatgctgccgctggtggagcctgagctgttactcagagtctcgatgcttccctctcgctaaagttctgttccggatcccacaacgtcccggctaggtgactcggccatggcgtcggcaagtcgctcccggaggccctcctccgtgtgctccatggaggacatgtgccgcagcccgntaccctcag

SEQ ID NO: 8133 - DNA, 4978 bp, Homo sapiens
  misc_feature (1)...(4978): n = a,t,c or g
gccgctactgccggtgcagccgccaaaccggtgcctcggtgacgaccgtgtccctgccgtcttcctcgagctccccggggcttgacccccggggccctcggcaggcatcggtgaggagcctgcggagcgaacctgtgctcctattcttgcccttcaggaccccatatcgcgactccgaggaggggaagcgagaggggctgtcgcgactccgcgccgtgtgtcgccgggcggggccgcggggccggggctccttcagcccccgggatgcgcgcgcgagccctcgcctccacttccttgttgctgctgtcacgactggagccgcctctcgccgacagcggggagcgcgagtgcgccagccatccccctcgtccagccgccgggccaagcgcctccgggaatgtgagcggcgcagcttgcacgctcctccggccatggacgcatcatatgatggtactgaggtaactgtcgtgatggaggaaattgaggaagcctattgttacacctctcctgggccacccaagaagaagaaaaagtataaaatacatggagaaaagacaaagaaacccaggtctgcttaccttctgtactattacgacatctacctgaaagtgcagcaggagctcccccacctccctcagtctgagatcaataagaagattagtgagagttggaggcttctcagcgtggccgagaggagttactacttggagaaagccaaactagagaaggaaggtttggatcctaactctaagctctctgcactgactgctgtggttccggacatcccaggtttccgcaagatcctcccacgctcagattatatcatcatccccaagagcagcctgcaggaggaccggagctgccctcagctagagctatgtgtggctcagaaccagatgtccccgaaaggacctcctcttgtgtccaacactgccccggagacagtgcccagccatgcaggcatggcagagcagtgcctggctgtggaggccctggctgaggaggtgggagcccttacccagtcaggtgctgtacaggagattgccacctcagagatcctcagccaggatgtgctcctagaggacgcttccctagaagtaggggagagccaccaaccttaccagacaagcctggtaattgaagagaccttggtgaatggctcaccagacctccccactggaagcctggctgtgccccacccccaggttggggagagtgtatcagtggtaacagtcatgagggattccagtgagagtagctcctctgcaccagccacacagttcatcatgttgcctctgcctgcctactcggttgtggagaaccccacctccatcaaactgaccactacatatacccgccggggccatgggacatgcaccagcccagggtgctcctttacatatgtcaccaggcacaagccacctaagtgccctacctgtggtaacttcctaggagggaagtggatcccaaaggaaaagccagccaaagtaaaagtggaattggcttctggcgtctcttccaaaggctctgtggtgaaaagaaatcagcaacctgtcaccactgagcaaaattcctctaaggaaaatgcctccaaactgactctggagaattcggaagctgtaagccagctcctgaacgtagctcctcccagagaagtaggtgaggagagtgagtgggaggaagtgatcatctccgatgcccatgttttggttaaggaagctcccgggaattgtggtacagcagtcactaagacgccagtcgtcaaaagtggtgtgcagcctgaggtcactctggggacaactgacaatgacagtcctggagcagacgtaccaacaccatccgaggggacaagtacctccagtccactccctgctcctaaaaaacctacaggagttgacctgcttacccctgggtccagagctccagagcttaaaggcagagcacggggcaagccctcattactggctgcagcaagacccatgagagcaattttgccagccccagttaacgtggggcgaggcagcagcatgggactgcccagggccaggcaggccttttccctgagtgataagactccctctgtgaggacttgtggtctgaagccaagcacactgaagcagctgggccagcccattcaacagccatctggccctggtgaggtgaagctaccaagtggcccatccaacaggacttctcaggtgaaagttgtggaggtcaagcccgatatgtttcctccatataagtacagctgcactgtcacattggatttgggcctggctacatcaagaggccggggaaagtgcaagaatccctcttgtagctatgtctacaccaacaggcacaaacctcgaatttgtcccagctgtggtgttaaccttgccaaagaccggactgagaaaaccaccaaggctatcgaggtgagctcaccactcccagatgtactgaatgccacagagcccctgagcacagcccagagggagatccagcgccagtccacactgcagctgctgcgcaaagtcctgcagattcctgagaatgagtcagagctggctgaggtcttcgccttgattcatgaactcaacagctctcgacttatcttgtccaacgtgagtgaggagacagtcaccatcgagcaaacctcttggtcgaattattatgagtctccgtccacgcagtgccttctctgtagcagcccattattcaaagggggacaaaactccctggctgggccccaggagtgctggctgctgacagccagccgtctgcagacagtgactgcccaggtgaagatgtgtctgaacccccattgtctggccctgcacagcttcatagacatctacacaggtctctttaatgtggggaacaagctgctggtaagcctggacttgctttttgcaatcagaaatcagatcaagctcggagaggaccccagagtgtccatcaatgttgttctgaagtcggtgcaggagcagacagagaagactctgacctcggaggagctgagccagctgcaggagctgctgtgcaatggctattgggcctttgagtgcctcactgtccgagactacaatgacatgatctgtggcatctgtggtgtggcccccaaagtggaaatggctcagaggagtgaggagaatgtgctagcactgaagagcgtggagttcacctggcctgaattcctgggctctaatgaggtaaatgtggaggacttttgggccacgatggagacagaggtgattgagcaggtggcatttcctgccagcatccctatcaccaaatttgatgcgtctgttattgcccccttcttcccaccactcatgagaggagctgtggtcgtcaacactgagaaagacaaaaacctggatgtgcagccagtacctggcagtggcagtgccttggtgaggctgctccaggagggcacctgcaagcttgatgagattggctcctacagtgaagagaagctgcagcacctgctaaggcagtgtggaatcccctttggggcagaagactccaaggaccagctctgcttctccttgttggccctctacgaatctgtacagaatggagctagagctatacgggcccccacgtcacttcacaggtggtaaaatctacaaggtgtgcccccatcaggtggtctgcggctccaagtatcttgtgcgaggtgagagtgcccgtgaccatgtggacctgcttgcctcttcccgccactggccgcctgtctatgtggtagatatggccacgtcagtggccctgtgtgctgacctctgctacccagagctgactaaccagatgtgggggaggaaccagggctgtttctctagccccacagagccacctgtgagtgtgtcctgcccagagctcttggaccagcattatactgtggnacatgacagaaactgagcactctatccagcacccagtcaccaagactgccacgcggcgcatcgtccatgcaggcctacagcccaatcctggtgaccccagtgctggggaacaattccttggccctgtgccctgaattggcaccttacgcaaccatcctggcctccatcgtggacagcaaaccaaacggtgtccgccagcggcccattgccttcgacaatgccactcactattacctctacaaccgcctcatggacttcctcaccagccgcgaaattgtcaatcgtcagatccatgacattgtacagagctgccagcctggtgaggtggtcattcgtgacaccctctaccgccttggggttgctcagatcaagacagagacagaggaggagggtgaggaagaggaggtggccgcagtggcagaataagccaggctgttgtacagggactacaccatctctcaagccatagtaaggcccttgcctgaggcagagctatccaggggacctgcagaagtggtctcctgtggggagggcctctgactgctgggactgaccaaagagcttccattccctgagcatggtgggacccagggtcctcagttctcaaccctccaggggtcaggagtggtaccaggaaacctcttctggccccgagagagcacttgggggacacggtatgtttaatggaggggaggctgagggaaaggctcgtagctggtgggttccgtggggcctgcggtgtgggtcagggtggaggtcctgggtgggctaaggcgtgagccccagcactaggtgggaaggctgctgaggtctctcccacccctgaggagccctggtttcagccccctcagtctgatgaattgcttagcctgttgcctttgactaggggcctgggtggcctcattaactctaggggtccctttgggctcttgattctccctgaaggagggatgcatttctctcttgctcttcctgtacccacatttgggggaagctgaggagggaggaacagtcagccacagctctcttccagcactgtcctctccaccccaagctttgaggaagagcatccccttcctcctttccctggc

SEQ ID NO: 8134 - DNA, 836 bp, Homo sapiens
tttaacagaggacgtcattttattggctgtccacgggaagtttcatcacacacggaggtgaagactgtgggggttgtggcacacaatatctcaacacgagacctcatcgagcggccaaacagaaggtgaagtgacacccgacacgacggaaccccagccgccctctgcagccccggtgccacctctccacagacgcctcagcccagtaagctgagtgatgacactgtccattagtctcagttcgttgcactgtcttccaacaaaacagcacttgaaaattcacaaaattaaaaaaagaaaaagaaagcagcacttccttggaaatagcaacaccactgtaacacagacggcagcgtggcatgcagatccacacctggtcggttttttccctttaggattttttttttttttaattaacaaatggaatggcaggtctgtttcaaatattagtagcataacacataagtgcaattgcagtctggccacaagcgtcagaagccttccgtgtgtctgtcacaagggcgggcagacacactccgattccacccctggagggtcaccaaaagaaagcagccacttctctatttccattgttgtcaaagcactcaggttggggaagaaaattcaaatgaaaccaagctctcagcatccggggccagccaccctgtgccatcctaagtggtctctgtaccccagacctggggctgtcatctccaccgtggcattggctgggaaagtcgctgtgggacacacccctccgctcactcctgctgcccatggaggagcctctggtgtcccccggcctggggccatgtgggtcacacggagctgagctt

SEQ ID NO: 8135 - DNA, 693 bp, Homo sapiens
gctcaaggtctttgccctgggcctgcgagggtacctgtcctaccccagcaacgtgtttgacgggctcctcaccgttgtcctgctggaggccggagatggtgggcctgctgtcgctgtgggacatgacccgcatgctgaacatgctcatcgtgttccgcttcctgcgtatcatccccagcatgaagccgatggccgtggtggccagtaccgtcctgggcctggtgcagaacatgcgtgcttttggcgggatcctggtggtggtctactacgtatttgccatcattgggatcaacttgtttagaggcgtcattgtggctcttcctggaaacagcagcctggcccctgccaatggctcggcgccctgtgggagcttcgagcagctggagtactgggccaacaacttcgatgactttgcggctgccctggtcactctgtggaacttgatggtggtgaacaactggcaggtgtttctggatgcatatcggcgctactcaggcccgtggtccaagatctattttgtattgtggtggctggtgtcgtctgtcatctgggtcaacctgtttctggccctgattctggagaacttccttcacaagtgggacccccgcagccacctgcagccccttgctgggaccccagaggccacctaccagatgactgtggagctcctgttcagggatatttctggaggag

SEQ ID NO: 8136 - DNA, 813 bp, Homo sapiens
ttttttttttttggcgttagttctctttatatagactctggttctagaaactcgcctgcagccgctggctggacccagcacacgctgacggggccggactatttacaggcccattgcgggctgtaccttggccacctcccggcacggtgctcagctgtgacgccaaaataagttagggccggccgggcggggcggggcggggacgggggctgtacacacaagtgctgggggctcggggcctcaatactgtcgagggccggggctgtaaacatggccggggcggccctgcccacccctagtggtcggtaaccgaccggaagcagagcagccgggcagggctgggaggctcaggcgtccgacaggcagctctggatccggtccacccactgctgggccgagggcacgtcctgggcacagaagttgtaaacgcgacgcgttgtcttcacgtcaaagaaggccttctcgtccacagtcttaggggcacccatagtgggcgtgccaggtgccacagcctccacctccgccaagtcgatgacacccttgcactctgtgtccacacggtggtcgtagtagcgcagctggtgcttggtcttgtccagcacgaaccagcgggccttccaaggcttcatgaaggcccccttggtgtacagagtgccctcgtaggacctgttctcactctctgctgtctggaactggctgtacagggtgctggtgctgcggcgggcagctgacgggagccggatgtggttgagccactactctggtcgctgggtgtgtacctgcaggaggggccattagagagggtaggtaagc

SEQ ID NO: 8137 - DNA, 1738 bp, Homo sapiens
tttcaatattaaaatattattttattttaaagcccaatctttcagaaagcttcttagtatagctttgagccttcaacgtcaacatgtaagtcaaatatttaagttaaatattaacatcaagttaagcatactagattaaaaggtactctgaacccacccaccaggttatacatactctcactcaatcatgtaaagaattgaattctttatttgtgatatccataaacgttgctattctctatttctatccagaaaggcaattttcacctattatcacttttgttcttctcttataaacaacaacttgaatgctattgcaggaaagggctacaaatatacatttgttaaccaagcagaatacacagatattttgctttacaacttgcacctaaaataccagtatacgtagctggttcattagttgtcatagcaatttagggctattgcccaagctatgcatagcagtttacattttcaaacctcatatagaaagggctattgtgatatgaactggcaactacattcctgtgaagcccatctcagttacaagcaaatgtgttaacttccaattctgcaaagaattttgatggcaaaacttccaaatctgatgcaattgtcttaagcaagtttttaaacaaattgtttcgcagctactctgccattctgccagtagatggtgctacaaagatcgggaaagggatttccatgaggccaacagttcggatataggaaaaaaaaaaaaaaaacgtttaaacctgctctgaaagtacaaaaacgcatttgagggtaaaatataacccttatttttaaccattcattacagacaaaccagtaagagggatgaaactaggccatctgaaaaattttaaacagtttatatgaatgacatgcttaacacaaactatatagaactacacagtacacagtttgaagtaaattgtcatagaaatgaccaaccatgtcaagatgataaacaactcgccttagtacaagagatggatgccacagaaacttaagagtttaaaaagccacatcccaccacttcaaaagttttgcccctgtaaggggatataattcaacacgcaactagcagggccaacaggagaggggaaaaaaaccacaggacctcttaagtttctctaagtacacatcaagaataaagaattaacacgtaaagtcttaaacaaatatcccttaaaaaacggtacggaatggatcctagaaaaaaaatgttagacatgtacggtcaaacacaatgatttattaaaaataaaacgtaaaaatgatttttgtacatatgcttccaaatttcaggcatgggatccaagtagatttcatagaaaacgctgtagccaggttatcaagtccttacaacaaagtaaactaccccccaccccaacccccacccaggttttgctacagaatcagcaagttcactccctccctccccccaaaaaacacaaattaaaacaagacattttgctagtataaaaacgaccaaggtccaagtaataataaaaaaatagagtccatcaatgactgtaacacaaaaatgtgtatgtggggccgagtccatcttcagagggagagacaagagaggtggcaggcaaatagaggaacacccccaagggtaagcagccttagaagtggctcccccaagggcaaaacagggaaggcggtgtgtgtgagggggtggggcttaggagttgaccccacttgggctgttggaaagagctac

SEQ ID NO: 8138 - DNA, 1188 bp, Homo sapiens
ttacaataaacatttattaagctgtaattttcacaatattttaattctgttctgagatctacaaatatctctacataacaccaaagccagtgatttaataaataagaggaatgtatatatcgctttgcaaaaaaatgcctgatacatttatctctatataagatatttgtagaatcagtttcccaaggctcacgaaactaaagtgcacacacacacacacaccatgtacacacacacactattcaaatcaaatggatttatattaagtgccaaattaaatgctatacaaaatttataaccagatacacaaaatatgaagtcaatcatgaatccactgttgataatggataccatacctcacaagtgtgatttccagttaagaagagggagacaattgcttcattgggtatttagtgtgtgctaatcaccatcaccatcacaagttaatcagtttaattacatggtattcagagattaaacacacatgcagatattaaatggacactacaataaaacctttaaatctgcaaaaagacatgagaacacatggtcaataataccactcgctgccacagcttttcagtagacaatgcaaatggcaatcagcgttttaagccaccacaagagaaaaactggtactggtgcacctcctacatatcaaggaaaagcaaaacacagaataatttaatatgctgaataaaatttgtttacaccagatactatacatcacactgatggttgtccagtatgaattttaagggtattatgttagattctgcaaaatatattcctattattcacaagtgaggagtcaaagtccaactattcaaatggccataaacaaaaatgttgcagaaggtatagaccattaaaaataaaaaagtcaggagtggggcagctgaccccttaggagcctcaggaattccttttaatgcaagatagatggcaagagctggctttttggttaagtcagccagttcggaaacccatcagggagaagttatcaggtgtcaacttgtaaggcagatgacattcatcaaaagcatcttaagaagtagcagtgatcacagaaaggaagcaattcaggatttcccactagcaacaaattgcattaaccatgtctaggccatttgacagctgttattcttaacgctcccataagcctgaatcacagggccagatgagcga

SEQ ID NO: 8139 - DNA, 1850 bp, Homo sapiens
tgactctgggctagagacctccccaacagagctgaggccaaggccgactccccctctcaaatggcgtggtctgggcctatgacggcccctgcagtggagtctgtactggctgcgggggaccctgctcatttgaaaatctgacatcagctgggcagtcgcccccctcctcctttcctccctctactctgacacagcacttagcacctgaatcttcgtttctctcccagggaccctccattttccatatccaggaaaatgtgatgcgccacaggtatcagcgtctggttcgccacttcacgttttagccacaagtgactcagtggaagatccagagtcaacagaggctcgtcaggaagatgtctacagaaaaggtagaccaaaaggaggaagctggggaaaaagaggtgtgcggagaccagatcaaaggaccggacaaagaggaggaaccaccagctgctgcatcccatgggccaggggtggcgtccaggtggcagagcagctaggaacgcaaggcctgaacctgggggccagacaccctgctctcccggccatggtcaacgaccctccagtacctgccttactgtgggcccaggaggtgggccaagtcttggcaggccgtgcccgcaggctgctgctgcagtttggggtgctcttctgcaccatcctccttttgctctgggtgtctgtcttcctctatggctccttctactattcctatatgccgacagtcagccacctcagccctgtgcatttctactacaggaccgactgtgattcctccaccacctcactctgctccttccctgttgccaatgtctcgctgactaagggtggacgtgatcgggtgctgatgtatggacagccgtatcgtgttaccttagagcttgagctgccagagtcccctgtgaatcaagatttgggcatgttcttggtcaccatttcctgctacaccagaggtggccgaatcatctccacttcttcgcgttcggtgatgctgcattaccgctcagacctgctccagatgctggacacactggtcttctctagcctcctgctatttggctttgcagagcagaagcagctgctggaggtggaactctacgcagactatagagagaactcgtacgtgccgaccactggagcgatcattgagatccacagcaagcgcatccagctgtatggagcctacctccgcatccacgcgcacttcactgggctcagatacctgctatacaacttcccgatgacctgcgccttcataggtgttgccagcaacttcaccttcctcagcgtcatcgtgctcttcagctacatgcagtgggtgtgggggggcatctggccccgacaccgcttctctttgcaggttaacatccgaaaaagagacaattcccggaaggaagtccaacgaaggatctctgctcatcagccagggcctgaaggccaggaggagtcaactccgcaatcagatgttacagaggatggtgagagccctgaggatccctcagggacagagggtcagctgtccgaggaggagaaaccagatcagcagcccctgagcggagaagaggagctaagaagcctgaggcccagtgatggttcaggctcctgggaagatgcagctttgctgacggaggccaacctgcctgctcctgctcctgcttctgcttctgcccctgtcctagagactctgggcagctctgaacctgctgggggtgctctccgacagcgccccacctgctctagttcctgaagaaaaggggcagactcctcacattccagcactttcccacctgactcctctcccctcgtttttccttcaataaactattttgtgtcagcttcaaaaaaaa

SEQ ID NO: 8140 - DNA, 1041 bp, Homo sapiens
ttttttttttttcttgtaaattttttctttatttaaacttcaataaaaatatagatttgtaactcaatagaaagacagcagtgataataactcacacatgagcagctcgcaaatttcaaagtctttggtcttcaagtcctatgtcacagcttcctcagtctgattccctccttctctgtagaattccgagaactagtttggttcacttaatcatctcaatggagatggccctttcctgccattcactcaaatctagaactcccaatatgtggctcacaaatacttcagtcatctacaaaagcatctggaaattagataattttagccagagtcagggacataaaacttcttttaaagggatgcagtcaatcctggtattcaccacaaagaagatcctcatgtataaaaatgtggaatctgtgctgcttttaataatagaacctttaaggttcaaagaaaaaaaaaaaatgctttcctgaactacatcatttccagacacatcagccacacaaggagctgacaagacctgctgtttctattatagagaacgtgagactttaaaaccacatcaaaagaaaatggtgggagcttttctgctatgcagagaattccgcatagcactcctttgcccagactgggagacaaacatacccctccctcctgaactggatccccaccacctttccaaaggccactggacatgtctcttaaacgctgcatttcagctcttgatcattctgccctggggatcccttctctttaggttctttgttatggtctggggaaacactctgactttctatggtgttgacagcatctgagtccaatcttcttcttttcttcagttggttcaagtgggatttggattttatgtgcgctgcccattcgcgatccccaatgatgattcgatcacagaggtcacacaggtgataacttctcttgttctcagcttcattgtatggcatctttattggagtggctgtaggcttgtggccctggatgaaactttgcacgatttcaagagcaggttcaagaacagac

SEQ ID NO: 8141 - DNA, 1275 bp, Homo sapiens
ggttcccttgggggccctgaatccagcagctctgactggtagtcttggacatggcaaaggaagggaaggtttgggggtctggaaagaaggagtgcgcggtgcttgctcactcactctgcctgtctttgttctagctctgagtccagccctgaaccttgcctcccagtgtttccagctctccagcctctttaccccccagaccatgtgagtctcagggtctagctcattctagcctttgattattctctttcctttggcttcccatttacctcttctttccacaggtaaatcagtggcacagtatactgcctccttgtgcctctggatcctgccacttcacatctactcttccatggccccatttctccattttgtgggaccaagccatcctgagggcatggacattgtctctgaggaaattggggccacccttaagataccaagaaaagctcctgcccatggtcccactggaaatggactctgctgagcaaagccaccagttgaagagaacagaatccacacctgcattgaatacctgtttctccatgtgtatcgtctctgagattaccttcttgccctttccaacaccttagtgattcctcaatttctcccccattggggaaggccatagggcattaactgaaggaactgacctctctccttttcctgtacctttaacctttagtctgtcaaggaaaacccttagggacctctgaatcaagaggactgagtttgtggggtgaaaccttgaaggtgctctttctgctacaagggccctgggagatagcatggacgtgcattgagaagccagcctcagaccttagcttgaagcagcttgaggccagacctactgtagcctcagcatcttgctaggaggcatggaagtgatctatcctgccaggaggcctcagagtgatctgtcctgccaggaggtgtgagagtgatctgtccctgtgaggcatttaggggctttcaggaatttagtaaaaggtggagtatgcctttccagtatcttccatcttcctttgtatacttgtccttcctcccatttcctccctttggcccgaggtaggaggatggagggaggctgctactctaccacttcctgtgtgcctctactgtggcctcaaccctggcaattatagctactcccatcccttacctgggcatgtgtgagcccttctcactggattttatacccttgtgtctgtgtacataaatatatatacatatatatatacataaaaactttgtacaaaaggcaaaaaaaaaaaa

SEQ ID NO: 8142 - DNA, 618 bp, Homo sapiens
  misc_feature (1)...(618): n = a,t,c or g
taggaagccgcggggtggtggcgagagaggacccaggtgtcctggcagtgggcgccgcggggacacnctgggncaaggtgcaggcggccagggtgggagactgttcgccccgccctgagtactcctatcttgtttctccacctgttcgggagttggagatgtgcacctaaaggaggcgcatctggggacggacacatctggcactgaggccctcgccacctgcctcgccacctggcgaccctgaccccaccacactgccttgagagtcgctcaaaagtagggccccagggctcgcagcagcatgggcaccgagaaagaaagcccagagcccgactgccagaaacagttccaggctgcagtgagcgtcatccagaacctgcccaagaacggttcttaccgcccctcctatgaagagatgctgcgattctacagttactacaaggaggcccggaccagttgggaggagtgagcaggccccgggggagggggatgagcgcagtttgctcgctttcctcccctgccggccccctccgcccccacacacactcgggacgtcttcattgaagattcacttacaaaggaatgtttcactaaataaaagaaaaccagaaaaaaaaa

SEQ ID NO: 8143 - DNA, 414 bp, Homo sapiens
ttaacccaatacccaaaatatttcaacacatatataaaaaagttattgacatattttacactccttttcttttgttatcatactaagccttcgaagtctggtttgtgtttacacttgcagtgtatcacagctcgaaccagccacgttgcaagggcctgacagctgcacatggctagcggctacatattggacagcacgggtctagagggcatcatctgaccaagacccgcaaagggaactgagaaaagggctactgcctggaggcatctcaggactgccctaagtttgagaaaacatctcccctctactccaaaactagatctctttggagtactttttaaagtcctttatagaaggcaaagctctttctgcaagtgaaatacaggggacacaatactaaaactgacatgggct

SEQ ID NO: 8144 - DNA, 1785 bp, Homo sapiens
gcctgaaaaagactcatactacaaataatttaattgatggcatataagaatatgcagtttgaaaaagccaaactcttctctccacttagcttttgatccccactgtttgcttatttgtataagtcatactgtgtagaatttctattttctttttccccattaaaagaggaccaaacaattctttatacaaatggagtagcaactagttttgtagcactacatttaatgtaatgagatacctttgttcatttttttaaatttgaaatatactttacctgatccactttgattgtatactatattctttgttaattttaattttgtcctgttcctagactgctaggaatctggcccctggcatcttaaagtgccaacatatgcctgcagggtttataaaaaatggcctggagtgacacattttattatacctaatattcactgcatcagtatcacatctagctcccttacttgtccacagataatgtaaacaaaggagggaaaaacttattaaattctccttcgctgctggcttgtactggtttagtgcctgtgtccctggcagtgtccagtgtgttcacttccagttgaagtatccatgtgtttctgggcagcttttctgctcagtgtgatcctgagatggcttccccgccgccacccagagtgtggtccttggccgcctcctgctcctgctctgcaaggcctgaaactggcttgtctggagccaggagttagtcctggggtgtgtgtgtgcctgcgcacccatgcgcatgcaagtgtgtttgccagctcaggagctgtctcctctctacctggctagtaagaggtgggacagtaatggtcctcctgctggccccagcaaggcccatgagtgactgccctgacgtattcactgtgcctctgggccacttcttcccctgtagatgtgggcttgttgccttcagccggcttccctgagggaggagaacactggattattggaaatgttttaatcactcttgccattacctacatctattagcatagatgatgaaaagctgttactggtgattatagatgagtatttccaggacaacgttctaaaagtacaattatttcttattggggagattacaggtagtttggcaaagcattgaagtacaaaggtacattttcaattaaaaagcacacttctacaaaagatttggtttttaaattatggttacacatttcagtaactcatagctgctgtgcaaattggtagaccttataagaaggcacttgtttgtaagccagagaagaaactttaattgcatcctatcagattgttgaggtgggtgtgatagtcttcaggtgcagtgcgttcattcactaacgctcactgtcagtgcccatgtttgctagctgcctccatgtgactagtgagctgctggtgaaagtcgtgtgaaatcctgtacactgtgtatagaacaatgtaattttatgttaattgttattactttaaaacatatctaccatctgattggctggtaccgagagctgtgggtaaaatttgaaaattgtatttagaataagaaattttacattttaaaccctattgtcctttatgcattttcaatgaaatggaatgaaggctaatatgcttgctttatttacttttgtaatcttggattttgtagcttttaaaactagaaaccattgttctaacaaagcaggcaactttattctataaacacaactttattaagcagaatacactgtagatgcttttccccaacgtatctggctggcagtctttgtcgttgttca

SEQ ID NO: 8145 - DNA, 877 bp, Homo sapiens
ttttaaggtaagaaagtttctgcttttattgaaaatttatatatgactcagtattgtaataaataaacataaccattttcacaaaaaatgacagtgctatgctaaagaagaaaatattaaatgggggatttacttgtagtggcaagacagactttttatcaatacagaataaatattaacagcattcgtgagccaatgttgagacccaacaaaatgtaggaatcaagcatgatgtaagaaataattatccagagaaaaagatggtgtattctcggatgataagactgtctttgtaaactggtgcatatcaattagtcccatcctcacagctcaccttcaaaccacagggcttgtttctggctatgttaaaggaccatcctctgaggaaagcagaggagaggaactccattatccttacagtgaaacgcaaccactgcagaaaaactccactggtaaatagaacacagtttaataagtagattggatatgatctaactataaaatttaggtaacagagtaagtgttacatgtggcaggaccggaaaaaaatcatgacatttttcttatccccttgtacccctcccactgtcattatgctattaccaacaacaacaagaataatgtttcaaattttcctctcatcaaaaaatgagagaaaataacgagggaagtgtttttgttctttttcgaactgtttcttgaacacctccaataccaatcactcacaaggtgtctgtgcaaatctatttcacaggatttcaaggaaattgttaactcacaaaaaaatccttaaatgaagctattttggagttctgtatattatttggaaaggagggaggaaaacgggtggtggtggtaaagtagaggtaaagtagta

SEQ ID NO: 8146 - DNA, 271 bp, Homo sapiens
ggaagaaaaagcacgtcattacttggagaccttcagagccaagctattaagtttgtaaataggtttcatgaagagagaaaaaccaagctcagcctcctcttagacaatgagcgctggaagcaagcagatgtctcctgcagaatttcaggatcttgttgattctctgtcagatgggaagattgctttacctgaaaaaaaaatcaggagccacagaagaaaggaaaccagctgaagttcttattcgtcgaggacaacagtagtcagttgttgg

SEQ ID NO: 8147 - DNA, 1264 bp, Homo sapiens
aaaaaaccaaaagtgaaacactaaaaattccctatagatatattccaggaaatattttaattgggctgattttaattaggctgtatcattgatgattactggaatcgattttatgtcttttgtattttaatcacttgagttaatcaaccactggcaaatcccatttgacaaagattagcattgtaaaaaacagatactgtggtagatttctagaaattcattcacatttaagacttctaaaatggaataatagccttttgtttttcatgagcatattcgcacccctatatgaattacagcatttaaagttcaaaatcagtaacttttaatctaggaaattgaaaaatattaagttggcaaagcaaaaaaaggtattttcttgaaaatactatttaatgtttaactagactatagggtagttccttaaggttgtttgacctgaagtggagttgggtttggaagctgggtgcccaggttggtatggagtgtgtagttttgttatgaaagttctctaccacctacctgtgtgagtgacaccaacatccagatgtcacagctctccagagctagtcagaagagaaatcaaattagtgtttaaacccatttgcatattggacttgtcagtacctttaactcaatttaatataacaaggaaatcgtaaaatacttataacctatcttagagaaatgagtgctggttttgagagttgttttttaactgaaagattatttctagatgggtagtgctttgtgctggtttctgcttccatatatttcccagtcattttaattagagaagatactctatggtagaactaaggcctttcctttcttggccaaagtctttaccctatttaaccctttgtatatttctgactgctcactgttccatattataggggaccagatttgtaatatagaattctccataacatgaatgaaattaattctgtccaagccagcatggtggcttcatattaagtagtaacagaagtctgaacaattgggataaatttgacttccaagacagctaaacttttcaactgcaattttaaaaactacactacactgttatagttaatctgacaaaaatgtcctcaaagagtactttattttatttaaagcatctgtttaattcaacctttaataattttgcaaagaagggtatgtgtgtattttaatatagcctgacctgaatttatatgtttttagctttagtatttaactttttgtaacaaataaaccttttttaaaacaagtttaa

SEQ ID NO: 8148 - DNA, 512 bp, Homo sapiens
agacattagtggatatactcatagtaaccatatttatagttttaaagagctagctcttgcagcattagtcactaccttcagcttgatgcatggtcacttctttactatttaaaatactacacattgtacaaaatatcgaagacactaccatatgctaaaggaagaaatctagctgggatataggatttttgttgtttttgtttttgtttgttttgctatttagcaataacatggtcaaaaaggcaatcagaaattttaaatacagttaatggatacatttggcaacaattttcccccgagggttttccatggtgtactttgcaagaaataagcactctaatttttaaagtaaatctcttattttaggcaaatattatatttcatgacaatgggagttctaggaaaggcaggcatctgttttttgttgcgtgtttccattttaaagtgagttgagttctcaaattgggaaagaaagattccttgagacgtacttttaaaatctaaagtgtgga

SEQ ID NO: 8149 - DNA, 603 bp, Homo sapiens
tttaacccattttcctccagccctggctacccggatgaagaggttggaggtgggcagccagggtagccagtgaggtcaggaagtctgttgccttaacgtccccttccccacgaacacacacccttctccgctcccaggtctggttggtgagacttgggagtcaggaataagggaaaggggattgtttggtttttgggtttttccctaagcccctcccttttctttcagcctttttccttcccccattatgtcatgacctcacttaagtggaacactatatcataacccagagattcgtcccagccccagagtccgacagactgtctggtccctattcctaatgaggggttgtgttggggcccaggtggagggaggggatttgggggttcagactgcggggaagccagggtctccctcgttcaacgccctcctccccctcaacccaccttcccaactgggacattctcaagcttttcacaccgaaaaggaaaaaaaatgttatttttagatacattttatgaataacttttgttatgaatatggctggtaaccattgtgtatgttattaaagatacaaaatgttgggaaaaaaacaaaaaaacc

SEQ ID NO: 8150 - DNA, 1769 bp, Homo sapiens
aaatgaccagctgctgcccaggaagttgaacacagaacccaaagatgtgcctaagcctgtgcatcagcctgtaggttcttcctctacccttccgaagatgccagtattgaggaaagaaaaactgcaggatctgatgactcagattcaaggaacttgtaactttatgcaagagtctgttcttgactttgacaaaccttcaagtgcaattccaacgtcacaaccgccttcagctactccagggtagccccgtaggcatctaaagaacaaaatctgtccagtcaaagtgattttcttcaagagccgttacaggtatttaacgttaatggcacctctgcctccacgaaaagaacaagaaataaaagaatccccttattcacctggctacaatcaaagttttaccacagcaagtacacaaacaccaccccagtgccaactgccatctatacatgtagaacaaactgtccattctcaagagactgcagcaaattatcatcctgatgggaactattcaagtaaggcaatgggtaggccttgccttttacccaggcacagacgaatgtatttcccagacctactcagccatttgtcaatagccggggatctgttagaggatgtactcgtggtgggagattaataaccaattcctatcggtcccctggtggttataaaggttttgatacttatagaggactcccttcaatttccaatggaaattatagccagctgcagttccaagctagagagtattctgggagcaccttattcccaaagggataatttccagcagtgttataagcgaggagggacatctggtggtccacgagcaaattcgagagcagggtggagtgattcttctcaggtgagcagcccagaaagagacaacgaaacctttaacagtggtgactctggacaaggagactcccgtagcatgacccctgtggatgtgccagtgacaaatccagcagccaccatactgccagtacacgtctaccctctgcctcagcagatgccgagttgccttctcagcagccagaacctctaatctggcccctggaactttagaccaacctattgtgtttgatcttcttctgaacaacttaggagaaacttttgatcttcagcttggtagatttaattgcccagtgaatggcacttacgttttcatttttcacatgctaaagctggcagtgaatgtgccactgtatgtcaacctcatgaagaatgaagaggtcttggtatcagcctatgccaatgatggtgctccagaccatgaaactgctagcaatcatgcaattcttcagctcttccagggagaccagatatggttacgtctgcacaggggagcaatttatggaagtagctggaaatattctacgttttcaggctatcttctttatcaagattgaaagtcagtacagtattgacaataaaaggatggtgttctaattagtgggattgaaggaaaagtagtctttgccctcatgactgattggtttaggaaaatgtttttgttcctagagggaggaggtccttacttttttgttttccttcctgaggtgaaaaatcaagctgaatgacaattagcactaatctggcactttataaattgtgatgtagcctcgctagtcaagctgtgaatgtatattgtttgcacttaatccttaactgtattaacgttcagcttactaaactgactgcctcaagtccaggcaagttacaatgccttgttgtgcctcaataaaaaagttacatgcaaaaaaaaaaaaaaa

SEQ ID NO: 8151 - DNA, 178 bp, Homo sapiens
acagggtttatgggtgaagcaatctagtttccaatctttcttcttaaaaatctacaaatgtttaggtgtagatgtgtcaaggaaagattgttaaagcttgggagagatagagttcagtgttcaccggcttatgaatgcacgttaaataaatatctccacccaggaatttcccattact

SEQ ID NO: 8152 - DNA, 2570 bp, Homo sapiens
gggctccggcctcagaggctgtgacaatggactatgactttaaagtgaagctgagcagcgagcgggagcgggtcgaggacctgtttgaatacgagggctgcaaagttggccgaggcacttatggtcacgtctacaaagccaagaggaaagatgggaaggatgataaagactatgctttaaaacaaatagaaggaactgggatctctatgtcggcatgtagagaaatagcattacttcgagagcttaagcatccaaacgtcatttctcttcaaaaggtgtttctgtctcatgctgataggaaggtgtggcttctgtttgactatgctgaacatgacctctggcatataatcaagtttcacagagcttctaaagcaaacaagaagccagttcagttacctcggggaatggtgaagtcactattatatcagatcctagatggtattcactacctgcatgctaactgggtgttgcacagagatttgaaacctgctaatattttagttatgggtgaaggtcctgagcgaggaagagtaaaaattgctgacatgggctttgcccgattatttaattcacctttgaagcctttagcagatttggatccagtggttgttacattctggtaccgagcccctgaactacttcttggagcaaggcattataccaaagctattgatatttgggctatagggtgtatatttgcagaactactaacgtcagaaccaatatttcactgtcgacaagaggacatcaaaactagtaatccttatcaccatgaccagctggacagaatattcaatgtaatgggatctcctgcgagataaagactgggagattataaaaagattgcctgaccattcaccatactgagagatttcagaggaaatacgtttacccactgcagcctgatcagttatatgaaaacacataaagctaaaccagatagtaagcatttccacttgcttcagaagctgcttacccatggacccaataacgcgaattacctcagaacaggctatgcaggacacctatgtcttagacgacccacttcctacatcagacgtttttgccggttgtcaaatcccttacccaaaacgagaatttttaacggaagaagaacctgataacaaaggagacaaaaagaaccagcagcagcagcagggcaataaccacactaatggaactggccacccagggaatcaagacagcagttcacacacaggggacccccgttgaagaaagtgagagttgttcctcctaccactacctcaggtggacttatcatgacctcagactatcagcgttccaatccacatgctgcctatcccaaccctggaccaagcacatcacagccgcagagcagcatgggatactcagctacctcccagcagcctccacagtactcacatcagacacatcggtactgagctgcatcggaatcttgtccatgcactgttgcgaatgctgcagggctgactgtgcagctctctgcgggaacctggtatgggccatgagaatgtactgtacaaccacatcttcaaaatgtccagtagccaagttccaccacttttcacagattggggtagtggcttccaagttgtacctattttggagttagacttgaaaagaaagtgctagcacagtttgtgttgtggatttgctacttccatagtttacttgacatggttcagactgaccaatgcatttttttcagtgacagtctgtagcagttgaagctgtgaaatgtgctaggggcgagcatttgtcctcgtgtgtggtgactttgagtgtaacagcgtgatctgaccaatagtacacacagacgcaaggtttaactggtacttgaaacaccagattatgttaacaaaataaccaagatttaaagattattttggtacacctttctttttagtgtcttatcagtgggttgattcattttctacattaatcagtgttttctgaccaagaatattgcttggatttttttgaaagtacaaaagaaccacatagtttttccagaaaggtttcaaaactcccaaagattaacttccaacttataagtttgtttttattttcaatctatgacttgactggtattaaagctgctatttgatagtaattaaatatgttgtcattgatataaacctgtttggttcagcaaacaaactaaaatgattgtcatagacagtgttttatttttcctgttggtgttgctgatttgtgagcatgctttaagatgaaaaaagcatgaatgataacttccttaaaaaggtgcggcatccaattcaaatattttcgtcctgattttaaagctggttggtgtagtgctattaaaatttcgttcagttaattttccttttgaaaacttgttcgcacgttgtttagggtgcccttacttcagcaaaggagaaggagtaggagagccttagaatttttgaggaaaaaaaaacctataacatacaatgtactgtatcaaactattttacatgaatgacacaagtattctgaataaaaaataattgaacattgttaaaaacaaggtgttatgtaataaatttatttttcataaatcc

SEQ ID NO: 8153 - DNA, 703 bp, Homo sapiens
cgttcatttaagttacagaaacagaaaaaaaaaaactggcttattcccacacttactctactcaaagctttgagaagactaattttggcatcctctggcctaaatacaaaacaacaaaacaaaacaaggcaaactctttccagcaagagctgtgggggaagggactataagggacacacacaactgacaggcaaaagctctgagcacgtgattgctaagtttaattcaactgttacaccccattctgccttgtaaaaataacaaaacgctcctatcaaaatgacattgtgatgtgagtacaggctttttgttttggtacagctctaaaaaatgttggcaccgaatgcacttaagaaaagtgttaaggcttaatacaaatacagagacgagtcatttctcaatgcagcttagagggtgagaacaggatgctaggtttttaaatcttccaaatacaggcagtccccaacgtacagacatacaggacacctcccaaatgtaaacgacagccacacagcagggcttgcatgcgcaggaactcttcttctcccagtgagcagactaagcactctgaatcccaccccactgcctcgcagagggaaagaaggcaggacagatgcaagaagagtaatgtcaggggctccatcacagctgcccaggggcttctgctgtagttcatattttcctcattcccatctctgggttc

SEQ ID NO: 8154 - DNA, 685 bp, Homo sapiens
gcggttcagcgttcaacaacaagcttccaagatgccgcccaaaggaaaaagtggttctggaaaagcggggaaagggggagcagcctctgggagtgacagtgctgacaagaaggctcaaggtcccaaaggtggtggcaatgcagtaaaggtcagacacattctatgtgaaaaacatggcaaaatcatggaagccatggaaaagttaaagtctgggatgagattcaatgaagtggccgcacagtatagtgaagataaagccaggcaagggggtgacttgggttggatgaccagagggtccatggtgggaccatttcaagaagcagcatttgccttgcctgtaagtgggatggataagcctgtgtttacagacccaccggttaagacaaaatttggatatcatattattatggtcgaaggaagaaaataaaatcatatgaaagactgaataagttttatacattttgtttctttaaaaggtattacatattcttttgagctggagctgcaaggaaatacaaaaatttttaaaaagaaaagatattggatgctccttgtattctgtgaaagctctaagtatgggtttgtaggtgtaagagagggtggggctaagtgaatgtcaactgtagtaggtattcagtcagtctttctcaaagagaagtcaagcagactccctttaacctgtatt

SEQ ID NO: 8155 - DNA, 902 bp, Homo sapiens
ttgtgtttgaaacactcgtgtgcatgagaatgtcatttgctaatgaattttaaaagcatatataaaacaaaacaaacaacctgccacaatgtgatatgtgtaatatcatttcataaaaatccctcttcctccaaagcctgggcagaaatgtgctgcaaagagttatatgacttcttgttcatgttttgctaatgctcgtatctccttgattacataatgttagtagcactgagacccccatggtaatgtaacttaattataagctatgtcactaccctcctgtaaaatactattggacagacacagagggacccttggctcctgtgtctggtccacacaccacagaagcttgtattatcagtgaatataaatgtactacatttgcatgccttttgggtttgccttaattcttacctcatttgcatcctatcgatctggaaagagctgttttggatgaatgcagtataaaatgtaaaaaccctgctaaatgacttattgattaagtatatctatctatatatacatatacacaaagatattatttatcgaaagtaaaaaagatggaagtgtattggtttctgtttgaattttcaaaggcttccaatgtggtggcaataaatgtcccaaataaatttataacaattgattttccccctaattcttattttataattttaaaattgcagcagttgctagcaacaacttactaaatctactcttaaatatacaactttggaatttgaagaattaatgacaacgaaaagggaaaaaagcaactttccaacttttcatccaggctcccaaaagagggacaacgaacatggcatgtgaaaagtaaaacagatttgttcattccgaaaaaaaaatgttcattctatgacaataaattttatctcagtgtg

SEQ ID NO: 8156 - DNA, 893 bp, Homo sapiens
gggtgaaatgagttactaaatgtagcatttatttataaggaatgcattgtgaatagtttctcagttttcattatggaaagatgatgatttcagcccacattcagtgtatgtttctaaataacacaatcgacaggactgtctgttcagtacaatggaggacagctttttcagggcaaatgggatttcttgataatgctaaatctgtcttgtcagctgaatttcttgggctttatgtggcagtgtggtaaaaatatatgatcagatttcactgttaagaaaattctttcagcaatacatgtagagtcaagtttcttgcatggataactgaacatgtgggttatgagattttaaaaaatgtctcgtgacaaactttacggaaatgcaacaatctggacatctagttttgtctgagagtggcgtggatatgaagaactgtgctgttggtgctgatgcccacactaagttttggcagtcacactcttggttcttcatatttgaggagatgggatggtgaggaggcctgttggctttattttattaatgccaccatctagaatacagattcttggatatttcatcttcacaaggtgagctgcaaactcagctgtgtgttttgccacatgccccacgatgacaatgaccttccctttgaagttctggagcatagcagtgtaagggccctgggtaagctccccttctgcagtgaaggcagcactgaatggaatgttgatgcttcctgaaatgtgaccacgaataaagtcttcactattccggatgtcaaccaccaggagctttggtttactggactttgttttcttgctgggtgttttgaagtggcctgtcactgtgagctcacacaagtcaatcaggtcctctgctgaaatccgtggtga

SEQ ID NO: 8157 - DNA, 1161 bp, Homo sapiens
  misc_feature (1)...(1161): n = a,t,c or g
gcatctatgcagaggttgagcggcagaaatataaaacccttgaaagtgccttcctggctccagcatcatcctcatcctcctgggcgtcgtcatgttcatggtctccttcattggtgtgctggcgtccctccggtgacaacctgtaccttctccaagcattcatgtacatccttgggatctgcctcatcatggagctcattggtggcgtggtggccttgaccttccggaaccagaccattgacttcctgaaccgacaacattcgaagaggaattgagaactactatgatgatcctggacttcaaaaacatcatgggactttgttcagaaaaagttcaagtgctgtggcggggaaggactaccgagattggagcaagaatcagtaccacgactgcagtgcccctggacccctggcctgtggggtgccctacacctgctgcatcaggaacacgacagaagttgtcaacaccatgtgtggctanaaaactatcgacaaggagcgtttcagtgtgcaggatgtcatctacgtgcggggctgcaccaacgccgtgatcatctggttcatggacaactacaccatcatggcgggcatcctcctgggcatcctgcttccccagttcctgggggtgctgctgacgctgctgtacatcacccgggtggaggacatcatcatggagcactctgtcactgatgggctcctggggcccggtgccaagcccagcgtggaggcggcaggcacgggatgctgcttgtgctaccccaattagggcccagcctgccatggcagctccaacaaggaccgtctgggatagcacctctcagtcaacatcgtggggctggacagggctgcggcccctctgcccacactcagtactgaccaaagccagggctgtgtgtgcctgtgtgtaggtcccacggcctctgcctccccagggagcagagcctgggcctcccctaagaggctttccccgaggcagctctggaatctgtgcccacctggggcctggggaacaatggccctcctttctccaggcctgggctacaggggagggagagcctgaggctctgctcagggcccatttcatctctggcagtgccttggcggtggtattcaaggcagttttgtagcacctgtaattggggagagggagtgtgcccctcgg

SEQ ID NO: 8158 - DNA, 356 bp, Homo sapiens
caaagtcaaatgaatttattcagaaaaggccttgcttggtatcagactaagaaaagcagccctgcccgccgccccccactccagaagggtcaatttacaaagacaggggcgcaggggagagctgggtggggaagacacagccaggccaggaggcttctgcaggccttgggcttccctgagggcctcgcggcttctggtggctgctatagtggccccacaggaggccatgcactgtgggtcatgggtcacgggtcacgaagcagagcctgaggggagcccgcagcagctccggagccccaggccctgcagcagggacaggaggaccaagacgccgacggcactcctttccttaaggc

SEQ ID NO: 8159 - DNA, 825 bp, Homo sapiens
acagaccaaatgatgtccttgaagaatgacaactctcagcacctgtcatgtccctcagtagaactgttgaaaccaagcctgtcaagaatctttgaacacacatccatggcaaacagctttaatacacactttgagatggaggagttataaaaagaaatgtcacagaagaaaaccacaaacttgttttattggacttgtgaatttttgagtacatactatgtgtttcagaaatatgtagaaataaaaatgttgccataaaataacacctaagcatatactattctatgctttaaaatgaggatggaaaagtttcatgtcataagtcaccacctggacaataattgatgcccttaaaatgctgaagacagatgtcatacccactgtgtagcctgtgtatgacttttactgaacacagttatgttttgaggcagcatggtttgattagcatttccgcatccatgcaaacgagtcacatatggtgggactggagccatagtaaaggttgatttacttctaccaactagtatataaagtactaattaaatgctaacataggaagttagaaaatactaataacttttattactcagcgatctattcttctgatgctaaataaattatatatcagaaaactttcaatattggtgactacctaaatgtgatttttgctggttactaaaatattcttaccacttaaaagagcaagctaacacattgtcttaagctgatcagggattttttgtatataagtctgtgttaaatctgtataattcagtcgatttcagttctgataatgttaagaataaccattatgaaaaggaaaat

SEQ ID NO: 8160 - DNA, 4278 bp, Homo sapiens
aagctttgaaacccggtgagacagttagtgagagttttctcccaagtagcatatcatatctcctaaatagcttctttctttatattgatcttattacataagagcctctttgtggtgcttcataatatgctgatttttttctgatggtcttcggaatcccttgttgcagaattcacacctgtgtggatagtcttttgtatgtattgatatcacatgtcgtttaaagccagatgcatctgtagtgctgtattcacaatactcacattggtaactcttccttccagtatgggtcttcatatgtttttttagctcattttgttgtctgaatcctctcgtgcaccctttacacttcaatggctgatctttagtatgaactgaaaggagatggccactaagaataaatggatcggatgttttaaagtcacagtgcctgcacgtatgaatcttcctacccttatggatatcactatgctttttgagctcagaaggacgatgaaaacctttatcacagacctcacatttgtgaggaaaatccttagtatggacagatatgatgtgccgcttaaggtcacttgaattggtgctcttatggtcacaatgaggacactggtgtgtcttatgtccttgaaacaaatccagatggcgttgaagctccctctcatcaccaaatgcttggggacaatgctcacatttatatggcaaattgttaccatgtttagacttaatgtgagttttcagatttgattgatctgcacacctgaaaatacaatactgacactgatatggcttctcaccagtatgggttctcatatgtttcttgagttcagaaggatgtcgaaaacccttcccacactcaacacaaacatgaggaaaattcttgctgtgaacggccaacaaatgcctgtttaacagtccttgttctgcagtttcatagtcacaatatttgcacttgtcagtcttcggctccttgtctcttaaaataagtttattggaactcagtggactagcctctctgtatcttcgtgtgtattctgtaaattcatgggttttgtcgactttgtttatgagcttatggctttctaagtggttatggaaactcactttcttgttagttgtaaagtcacaatctgtacactgatatttttttctcattaaatgatcaggatgattcttcatgtgtctttttaagaatcccttggatttaaacttttttgtgcaaatatggcaagggtacactgtgaggggctgtccatcaggacctattataacagctgtttgccactgcctggtttctccccttctcctctttttggctttttgtttaagtactttatttgtattaatgccgtcacaaatttgaaggtactgtgctgctgtactacttctgctttctaatgctgagtccaaagtatttcctgatgcttgacaatcttcataccttcgggaaactcttctttcatctctgatatcatcttcttcttgagaagaatctttaactgccatgtaaaccatcttctcccgctgcattcggctctggtcaagcactccagctactgaatgtccactggtgtactcactctctggtgacatttctgttccacctatttcaacatcatcttcagcctccgctttaaatatatacacttttataacttcagaaccaaacccatcttctttagcatcttcttgtgaaccatcactgccaatttttaatggtgtattccccatatgctctaatttttctccaacatcatccaaagatatcattaagtagtcttcagaagtgctcttgacatcatcatcatcatcatcttcggtttttatagtaactgtagaaccaggaacacctccagctgcttgaatcacagtttctgtatctgaattagttacaagaacctcctctgataccattgtgggagagtcgactcctgaaacacaatcttggaccacatgttctaagtgtccattaggaccagtaacaaggtcagccacgaaaacctgctctggtaccctaacggtttcagtaattagttcagaagtcaagatgtgatcaccatcatcttcctctaaatcctcttcaatggcaacatcagcttcaagtaccgcttcaggaacaatcacaccttctgttactacatcagtctctgtgatgatatcaggtccatggacaacttcaagctgcaaggccatgatcaagagttatcccatcatctgtagcaacatcagaaactaaacagcttcaggaactgaacaacaatatggtctccatcgatatgtgcagtaccagccattccagccacaaaatcttgcataatcatggtatgggccattctagagtctggcgtgtgcaatccaagacttccaccgcctgactccatacttagcaaagttcattcaccaatattagaggactcagatgtctagtattagtgaatttcatccactggctctcatccatttcttccagacccagatcagccctgcagcggacgtctgcagataaacttgtattcacctctggctcccagggttctacttataatgtaaatgttctatccagttcccggagttctttgaaccagtaaggacttctggcctcactctactacattctcttgtctcagttttgaggactcatgaaacatgactgcttcctttatatgagtgtctcgaagaaaattgtagattttgtgagataaagtaaaatctgcagcaatttctttttatttttccttctgtgctatgttattttctttgggaaaacgctctctttacctgctgctgcagctacagcctggccgccgcctgccgccgccgctgccgccgccgccgccgccgccgcctccgttgccgccagtcgactgtgaccgcgctctggatggccccgtcccctgccccgttcacaatgcagcctgcttctgcaaagtggtacgatcgaagggactaatgtcttcattgaattttgtgttgaagacagtaaggagttaatgtaaattttgaaaaatccaaaacttacattcagttgtctcggaggaagatgataattttaagcatttaaatgaaattgatctttttcactgtattgatccaaatgattccaagcataaaagaacggacagatcaattttatgttgtttacgaaaaggagaatctgggccagtcatggccaaggttaacaaaaagaaagcgcaaagcttaattggccttagtgtcgacttcaataattggaaagactgggaagatgattcagatgaagacatgtctaattttgatcgtctctctgagatgatgaacaacatgggtggtgatgaggatgtagatttaccagaagtagatggagcagatgatgattcacaagacagtgatgatgaaaaaatgccagatctggagtaaggaatattgtcatcacctggattttgagaaagaaaaataacttctctgcaagatttcataattgagagaattcctgagttgatagctctaaaggcagatatgctgtatttgcctactttaacccatttttcaacctgtttgttttttaaaaggcttcactaagggttgatatgtaccattgtatggggcaattttaagtcagctaaggcaataaccttatgcatgaacatttcccagactttcatgaagctgttgaggtcctaggcaattaatgcagcagttgcgataaataaaaacatctcacctaagtctccttttcttcataacatagatactgacatgataggaagctctcagcttagggaaagagaataaattttagattatagaacatggattcaaaagtgactggaacaaattggctgacaccttactggtaacctgctattcttctggtgttatccttcaggattgttccactaaaatttatttttcaaaaaatttacttcacattattctatgtaagtgatgacttgtccagtgttccaggtgtatcttagctaaaactagagaatgccctaacttagatggtttttgaagcctatacaattggtattgtttgacccttaagcttttacatctcttagcatggaggacgaagaaagctgtacattgttgcttgagagtctgtacatttagtccagatttgtatttgcactgtcagtatggcaaatgagtgaaaaatgtttaatacactattggattttttatttcctttttttgattcagcttatacccgggctgaaaacctcaatttatgttcatgacagtggggatttttttaaatgtctacattctttctaataaactgttggaagacttaaa

SEQ ID NO: 8161 - DNA, 1151 bp, Homo sapiens
gtctgtacatagcacagtattataattgatgttcataaataccctgagagattatgttaaaatacattattaatactcccacaaaagcagtaagttaataagtatttccaacaaaaggcagctttgtttcttaaacggataaacaacatataactaggaagattcatcttcaaaataaagtgtcatggaactgaaaatagagtatagtctaacaattattttgatacactattgaatagctaacaagtgtctaaagaattttttatttttatagaataggaagtttctaaaagaaaacaattaagagcaaaattggttttgagtatagaaactgaaggatggcagtcttaactcctaagttttttacagagcacagattggtaaactaggcatgccacctgttttttgtactatctgtgaggctgagactgggttttttacattttttaatggtgaaaaaagtcaaaagaaggaggacattttgtgacacatgaaaacatattaaattaaaatttcagtatccagaaataaagttttattggaacagctgtgcttattgtctttagctgctttcctggtacagtggctgagtttagtagtatagcagagtctgtatggcttccaacagtcaaaatactgcctggccttttaaagagtttgtcaatcccttttatggaggaaggttttgctcatgcatggcatgttagtcaatttagttatttgcttctagctggcagaatgtggtcttgattacttaatttctgttacccctgtgttttccagaatgggcttctcctgattttacttacgtgttttactattgctcaaattacagatactagggaaacactactactttataagtacacttctttttcctacttaaactctcaaactacagttacgtatttgccatggatgttaagggaccttgatggtctgtgaattatcagttgctttctgcactacctcctgtagatagacctgactgatagcacttacaaaaagactgatagatgccaaatcagtcatttattaaccctccaaaaattggtgtcccgatcatttggtaaacgctaagagagcttagttttacattcacaaagtatttgtatttgataagtcttaaaaatgatttaagttgaagccta

SEQ ID NO: 8162 - DNA, 860 bp, Homo sapiens
atttgtataaaatttttaaaaaatctaaaagaaaaagaaaaaaaaacaagggtgggttgggtattccagtgggaagatcattgaagggaaaaatgttactatttactgaggtatttttcacagaatgattgaattaaaaaaaactcaacttgcattttcattgtgggtgcttagagaagttctacaaaattcaaactgtgaaggtttatgcttcattaattatgaccatactttttcattttctgacgatccctgatttccttatggactcaataagaatcttttatatcaagtaaaatgaaagttgatgatagaatatcaaatagtgaatttgatatgaaatctaagagtgtgagtcacttgcatatgtaatgctttgggtttttgcatattttcttaggtcacagtgaccaggtttctgagttgtttcccttttcaagtctctgggaggccagtggcagcagcaggtctgtgtttcaccttcttcccatgtgagcttggaaaactttggcatcttaattagtcttgaatcatacacctgatccccaaacattgcctgctctcaatgaaacatgctttggaaatggaagggactcagaaagtcgaaatcccaagaactccaagccaaaagtgttaggttttagtgaaatttgtgtcaggtataagcatacctgtttgggccagaattattatcacagcctttctgacccaaactttcaaaagcaaataaacagcatataaaacgttaattatctttccattgtaattgtgatgatctactctgtatgggtaccaaaatcaccttctctcttcaagtcaaagttgaatttagaactttgaatacaggtcaaaaaatgtag

SEQ ID NO: 8163 - DNA, 1204 bp, Homo sapiens
  misc_feature (1)...(1204): n = a,t,c or g
cagatatggtactttacacaatttatgtaattaatattttctcacagacaaggttccttgtggatatcactgaataatttttgtgtagtttctatgcccatgaagtgcctggtaggtagtaggaactcacacgttctgctatgctggttgcagcacaggacacaaaagttagaattatttcaaaggacttatactctactaggaaagagagaaacatagaaatatagtgttgtatgtggtatcttccctaagataagtacaaccaaagagctatgggatgttcagaggataggaatgtagtactggggatgatgtcaagggagggcagtgggtactttaagctgctcaaggtaggggaagcagtttacttgctagtttttcctanggtaggctcttcagagtttatctccagtatttgaaatgaatttttttaaacctcagatctgaatatattcaaacacccatatttcatcaagtctagggcatatcatatacctttaatttaaaaaaaaatgctgagcagagttgcttgtgtctgggagggctgaaannnnnnnnnnnnnnnnnnnnnnnnnnnnnnnnnnnnnnnnnnnnnnnnnnnnnnnnnnnnnnnnnnnnnnnnnnnnnnnnnnnnnntgctgccagttgatcattacatttatcccgacatcagatatgtcaaattgtgaaaagcaccttaattttgatgaaatatgataggtaaaaaatagcgcaaagctaagtataagtgacttttaaattatctgctcttttggattatcactactgctactagccgttagaatattggtttggataatggaaagttgactagagctacaaaatctgtttcaaaataaaagatctgctcaaacaagaatgtgatgatcacttgctgtattgtacaacaaagtcaaactgctgttagactcaggtgacagtcaaatgttggaggctgtgttgggatgagttgttacaaagcctctttcattcttcccatgccatgtccaggagttcttctctgttaaacctgaagagatgccagccctcctcagaggaaaggtctaaagcccctcgactagtatagtagttgatagaagcctggttccaaatgacgacaagaaagtgcatgcagttacattgagttgtgatggctatctgtttaaaaacaaacaagcaaatattactttcatttgaaagtata

SEQ ID NO: 8164 - DNA, 383 bp, Homo sapiens
ttccattcgaggtcctgaacctaactttgtattaggaattctgtactaattttgttgaagaagaccagcaaagttgtgtacacttctacccccacaaaatctgcattgtccatgtgagtaaagtaaaataattcctgttatttttttctgttagaaataagtatggaggatatgtttttaaaaatttatgagttaattgaaatatccatatataacaagtgactttctcacaatatatatgatgtgatatatagggagatagtttcactttcatcatattttatacgttgattctgaactatagaaaaataataaatgggattttaattatagctcttagttgggaaagaaatatagaggagatgtgggatttgaatgcccat

SEQ ID NO: 8165 - DNA, 908 bp, Homo sapiens
gaaagtaccaaatgttctgaaagacccgctcttcactccagttttccctagggtgtttctggcagggcgtttttaaaaggcatctacctgagttgacgctaatacttgtcaccacctggaacgtagttatcggtcggcaggctgaacatactccagattccccagaggccacttctgtagccccagcgatgcatctgagcctctctgcgtggtttatgcttgaaaaatagataatgcttttagatggttcactgccaggccatgggccccacacatctcaggccctgtgtgagggagcacactgagatggtgcaggagtgaatgggcatggcttggcctcgctacctcggggacctgttggagttctggcagcagggtgtctgcaggtgggacggcgttctgggcagagtcagaatggtcagaatgaaacagaacagccaactcacccacaggacagcttattttgaggcaaggttttggattttggaggaagcagccagatgaggcggtgagcctccagaaggtcagcctttggagcacgtaagatactgttacagggtccagaaatcgtgttcacatgggggctttgactcttcaaacagcttttgcagatcgtaaattgcatttgcctagtcgtgtgaccctcaaaagaagtcagacatatttaatccagaaatagtttcgtttgagggagggcttgcaggtctgtaaatagcatttgctttcctggttagagattgggatgcagaaggagttttcagtattttttttaaaacactaatgatcattgaagagtatttatgtaaacatacaacgtataatgggtgggggatccgatcatggtgatgtacggggtgaattctcttgccgtgttgcaaatgtgtaaaataaagattatctggcagaaa

SEQ ID NO: 8166 - DNA, 1350 bp, Homo sapiens
ctgtctgcatcttccaagcactttacagataccttggaatgtatatttttgtcttcttactcagaaggtttgcagtttgtaaaataatcaggattctgctctgtcctgtgtgtggggtcagctccctccacagaggggctccagctctgttggtcacagctgatggggttctctgattgataggagacgagctctcgagctctaaaggaacagtgaggtcgccggtgggggagcttggctggggacaccaagcaaatgcatcgtatgtccccttgggagacgtttttatggcagctgtgtatgttactatccagaaggagtcgggggtagactttcccgtgtaagctcagtccataaactggttacttctgatcctggaacgtggacttcacatgataggtctggatctgtttctgttgggatcacaggtaaggaaaatgtccattcaaatggtaaagaagggaggagggtgtttttttttttttttgctgtaggcaccattctgcatcttgaacccagactgaagtgtgcctctcacagatggaaggtgcacacgctcctgtctcctcctcactctgccacgttcacttggctttttcattggtacctaggaatttaagaatatcgaagcgagagcagtaacaaaccatagatgagcagactcccacaccgggttttcttgcccgtctttaaggcactgtttctaaattttgaacttagctctgaatccccaagaacttgagcacagcaagggttgctgagctgctgtcgccgcagccctggcccctggtgctggagctgcagcacctttgggagaggtcctgcgtcgtcctcagctgcgtcgctgtgaactcccgctctccactgtgttcctcagtgtctgcttttcaggaagtctgctgtgacctttgcccaacttctgagctcctcagggactaggaacaatttcagtagctttgccctgaaccaaacgagaaaacaaaagggaactcccgtatgacccacgtcacgtggtgcactcagagtgtgtgcggcatgatcctcggttgctcctcctctcactttagtagagtacgcggtggacagctgatctccttcagtcgtctacccacttccgtcattgtcctccgctagaataacagagtagttggtagtcatggccagaaggggggtgggggcagtgtgaggacttggggtttctgtgctgtgtgacacaaggagataagtgacaatcttgaagtcctaacttccactattctagaaagtatagtggtgatttgtgtgcaaagatttgaagttttaaaaaagtaccaagttcctgaaattcaataaaatatttttattaatttt

SEQ ID NO: 8167 - DNA, 864 bp, Homo sapiens
  misc_feature (1)...(864): n = a,t,c or g
cggacgcgtgggactggttttaagtgtagttgccgacgcaatggcagcctttgcagtggaacctcaggggcccgcgttaggatctgaaccaatgatgctgggttcacccacatctccaaagccaggagttaatgcccagttcttacctggatttttaatgggggatttgccagctccggtgactccacaacctcgatcaattagtggcccttcagtaggagtaatggaaatgagatcacctttacttgcaggtgggtcaccaccacaaccagttgtaccagctcataaagataaaagtggcgctccaccagttagaagtatatatgatgacatttctagcccaggacttggatcaacacctttaacttcaagaagacagccaaacatttcagtaatgcagagtcctcttgttggagttacatctactcctggaacagggcaaagtatgtttagtccagcaagtatcggtcagccacgaaagacgacattatctcctgcccagttggatcctttttatactcaaggagattctttgacttcagaagatcaccctcgatgactcttggggtgactgtatttgggtttcctcaaggcatctgcttcctacatattactacaatttgcacagtatgggaatatcttaaaacatgtgatgtctaatacaggaaattggatgcatattcgttatcaatctaaactgcaggctcggaaagccttaagcaaagatgggaggatttttggagaatccatcatgattggtgtaaaaccatgtattgacaaaagtgttatggganagcagtgacaggatgtgctttatcatctccatctttagcctttacaccaccaatccnaaactctagggta

SEQ ID NO: 8168 - DNA, 1054 bp, Homo sapiens
ttttttttgggaatatttacatattttattaaatctttacaatcagtaattataatcaaatacataattatatacaggattatatacattttgcccagacttttacatcacagtacatagtttcccttagaaatattgtatacatttatcaccaaacaataaaatccaacaacagtagtgttaacggcacctgttagtacaggacatctttttcataaattacatcataagaaaatatacggctgtaaattgggcttttaaaaatgtcttttataaaatctgaacatacaatatttcattcacagaatgttttttttttctatgttctgactgaagccttgtgcataaaacgaccggctggaatatttacctaaatcctaccccccccccaaaaattataagccagtatttgaaattaccttatgcctgagcctttccttcatgatgaatttggcatggggtttggtgagagaacaaatgttggctttactataaaaaggttgtgtgatggtaatttaaattttaaaagcttcttgagagagtaattacattagtgaagttaaaatcagaaagtgtacaatttttcattttactaatactgtaaagaaaaagggagacgtataatgccaagagttaatttgttctgaaacaattatactctttttggaagcctattgcaatttaagaagaaaaaagaaaacttgcctaacaaaatatcccataccaaacatatctagtaaattacaattctttcacacttaaaactttatgggaaaagtattgcaaataagggcatatcatttcaatgaacttttatatgcagaaaaaaactagctattttatttttagtaggtaaacaggttaagttttaaaacttgaaaatacctgaattaaatacttgctctaatatctcttaaaggatttcagctaaaatccttgattccagatttgtaaacattatataaatctttcttaaacaattttatggctgtggtgatcacttcagctatatttctaagcagtcaacatttaactgaggtagaccagatgtttc

SEQ ID NO: 8169 - DNA, 541 bp, Homo sapiens
tggcacgaggcctgaggtcttttctgcctccgttactaccaaccatagctccactgtgaccagcacccaacccactggagctccaactgcaccagagtccccaacagaggagtccagctctgaccacacacccacttcacatgccacagctgagccagtgccccaggagaaaacacccccaacaactgtgtcaggcaaagtgatgtgtgagctcatagacatggagaccaccaccacctttcccagggtgatcatgcaggaagtagaacatgcattaagttcaggcagcatcgccgccattaccgtgacagtcattgccgtggtgctgctggtgtttggagttgcagcctacctaaaaatcaggcattcctcctatggaagacttttggacgaccatgactacgggtcctggggaaactacaacaaccctctgtacgatgactcctaacaatggaatatggcctgggatgaggattaactgttctttatttataagtgcttatccagtagaattaataagtacctgatgcgcattgaaaaa

SEQ ID NO: 8170 - DNA, 794 bp, Homo sapiens
  misc_feature (1)...(794): n = a,t,c or g
atggcggcgctggaggagcgggatctaacccaggagcagacagagaagctgctgcagtttcaggatctcactggcatcgaatctatggatcagtgtcgccataccttggaacagcataactggaacatagaggctgctgtacaggacagattgaatgagcaagagggcgtacctagtgttttcaacccacctccatcacgacccctgcaggttaatacagctgaccacaggatctacagctatgttgtctcaagacctcaaccaagggggctgcttggatggggttattacttgataatgcttccattcccggtttacctattacacgatacttgatatatttaaggtttgctcctcggtttatacggcctgaccctcgcagccggggtcactgaccccgttggggacattgtttcatttatgcactcttttgaagagaaatatgggagggcacaccctgtcttctaccagggaacgtacagccaggcacttaacgatgccaaaagggagcttcgctttcttttggtttatcttcatggagatgatcaccaggactctgatgagttttgtcgcaacacactctgtgcacctgaagttatttcactaataaacactaggatgctcttctgggcatgctctacaaacaaacctgagggatacagggtctcacaggctttacgagagaacacctatccattcctggccatgattatgctgaaggatcgaagggaatgacctgtgggtgggacggctagaaggcctcattgcaanctgggtggaccttcatttaaccc

SEQ ID NO: 8171 - DNA, 651 bp, Homo sapiens
ttttttctttctactaaacactcaataactttatttgcctttggctggctccttggtgtggggcagggtagggtttggcaacagcctgggcttcatgcgccctctggtggacctcagaggcacgaactggaatctgggccaaacctgaggacttaacagtcaatagcctaggagggtcgcagcgctcctcaggtctgcaccccagacaccccagacccaacatcaggggacggggcactctgggaggaagccctgaacctctggctctcatactcgcccgtgttggacaaccgcatgttctgccgagccttcatctgcttcacacggtccttgtccacttcccgcttggtgaggatgaagaggaggataccacaagggaagccgatggcccaggccagtcccacagctttcatggggttcttgcccctctttctgggaatgtattccagctccggggataggggttcaggttcctccttgccctctggggagctgtggctttgcagggcccgggtcctgttatgagaagccttgttagctgtggctcctgcgagaatcccccggaggacgcgggcatttctcgcccgcccggcccttcagcgccgtagcagctaccaccgccgccatgttcagatcccacccccgcttcac

SEQ ID NO: 8172 - DNA, 498 bp, Homo sapiens
tgcgaccgcggcggcctgagagctgactctgcagctgaggtagagagacaacgatcaggaaccctaagaagaggcgccagaggagccgccttctgcctcagaacggcgtgactcggagaattggagcgttattcagtatattaatgtcttattgataatggcagaacatccaccactactggatacaactcagatcttaagtagtgatatttctcttttgtctgcccctattgtaagtgcagatggaacacaacaggttattctggtacaagttaacccaggagaagcatttacaataagaagagaagatggacagtttcagtgcattacaggtcctgctcaggttccaatgatgtccccaaatggttctgtgcctcctatctatgtgcctcctggatatgccccacaggttattgaagacaatggtgttcgaagagttgtcgtggtccctcaggcaccagagtttcaccctggtagtcacacagttctccaccggtt

SEQ ID NO: 8173 - DNA, 360 bp, Homo sapiens
gccaggtgagccgggccagctggtgggccgcatcatccagaaagaccccctgcgccgcttcgatggctacctcaaccagggcgccaacaacaagaagattgccaaggatgtcttcaagaagggggaccaggcctaccttactggtgatgtgctggtgatggacgagctgggctacctgtacttccgagaccgcactggggacacgttccgctggaaaggtgagaacgtgtccaccaccgaggtggaaggcacactcagccgcctgctggacatggctgacgtggccgtgtatggtgtcgaggtgccaggaaccgagggccgggccggaatggctgctgtggccagccccactggcaactg

SEQ ID NO: 8174 - DNA, 851 bp, Homo sapiens
gacccggctattgtgaaagacccgctgttctatctagatgcccagaagggccgcatacgtcccgctggaccaagaggcctacagccgcatccaggcaggcgaggagaagctgtgattccccccatccctctgagggccggcggatgctggatccggagccccaggttccgccccagagcgtacctggacaaggccagaccaaagcaagcagggcctggcacctccatcctgaggtgctgcccctccatccaaaactgccaagtgactcattgccttcccaacccttccagaggctttctgtgaaagtctcatgtccaagttccgtcttctggggctgggcaggccctctggttcccaggctgagactgacgggttttctcaggatgatgtcttgggtgagggtagggagaggacaaggggtcaccgagcccttcccagagagcagggagcttataaatggaaccagagcagaagtccccagactcaggaagtcaacagagtgggcagggacagtggtagcatccatctggtggccaaagagaatcgtagccccagagctgcccaagttcactgggctccacccccacctccaggaggggaggagaggacctgacatctgtaggtggcccctgatgccccatctacagcaggaggtcaggaccacgcccctggcctctccccactcccccatcctcctccctgggtggctgcctgattatccctcaggcagggcctctcagtccttgtgggtctgtgtcacctccatctcagtcttggcctggctatgaggggaggaggaatgggagagggggctcaggggccaataaactctgccttgagtcctcctaaac

SEQ ID NO: 8175 - DNA, 705 bp, Homo sapiens
tttaaggcaggagggaatttagtggagctggggaaggaagaaagtggggttgggagaacctccccaaccccatccctgctggcccggggacgggcatcggctctcagcaagagaagtattcccgggatgctgagcgcttcattctgtctccaggactcaggcaggtaggtcccagctccgccgcgcccccggacctacaggtcagcgtggtccgaagtttcctctgggggcttcgcgggcgcccacacgtactcggggggcacctgcgcgtcgggacgccgccttgcggtagaagccgagctcctgcactagcgcattgatctcttcgcgggtcatttcactgagtgggatgcgctctagttcctcgtagcggcggcccagcagcacgagctcagggtcggccccagggaggtgtttcatcaccaggttgtgatagaatggaatgtcctgcgtgacgaaagccttcacctcctttaggcggttcagctgtcatcccccgcaggtctctacccgggcgcgggttaggccgctcagacggttccagtccggccggtaggcagtggcggctgtggctggggccacaagcgccgcgagaagcagcagcagcgccagcggaggcaacaggaggctcatcgggacccggccgcagatgatgcgcaagctggaggcgaacctccgatgtcgtgcgccacgcctcgttccgaa

SEQ ID NO: 8176 - DNA, 4259 bp, Homo sapiens
  misc_feature (1)...(4259): n = a,t,c or g
tccagtttgcttcttggagaacactggacagctgaataaatgcagtatctaaatataaaagaggactgcaatgccatggctttctgtgctaaaatgaggagctccaagaagactgaggtgaacctggaggcccctgagccaggggtggaagtgatcttctatctgtcggacagggagcccctccggctgggcagtggagagtacacagcagaggaactgtgcatcagggctgcacaggcatgccgtatctctcctctttgtcacaacctctttgccctgtatgacgagaacaccaagctctggtatgctccaaatcgcaccatcaccgttgatgacaagatgtccctccggctccactaccggatgaggttctatttcaccaattggcatggaaccaacgacaatgagcagtcagtgtggcgtcattctccaaagaagcagaaaaatggctacgagaaaaaaaagattccagatgcaacccctctccttgatgccagctcactggagtatctgtttgctcagggacagtatgatttggtgaaatgcctggctcctattcgagaccccaagaccgagcaggatggacatgatattgagaacgagtgtctagggatggctgtcctggccatctcacactatgccatgatgaagaagatgcagttgccagaactgcccaaggacatcagctacaagcgatatattccagaaacattgaataagtccatcagacagaggaaccttctcaccaggatgcggataaataatgttttcaaggatttcctaaaggaatttaacaacaagaccatttgtgacagcagcgtgtccacgcatgacctgaaggtgaaatacttggctaccttggaaactttgacaaaacattacggtgctgaaatatttgagacttccatgttactgatttcatcagaaaatgagatgaattggtttcattcgaatgacggtggaaacgttctctactacgaagtgatggtgactgggaatcttggaatccagtggaggcataaaccaaatgttgtttctgttgaaaaggaaaaaaataaactgaagcggaaaaaactggaaaataaagacaagaaggatgaggagaaaaacaagatccgggaagagtggaacaatttttcattcttccctgaaatcactcacattgtaataaaggagtctgtggtcagcattaacaagcaggacaacaagaaaatggaactgaagctctcttcccacgaggaggccttgtcctttgtgtccctggtagatggctacttccggctcacagcagatgcccatcattacctctgcaccgacgtggcccccccgttgatcgtccacaacatacagaatggctgtcatggtccaatctgtacagaatacgccatcaataaattgcggcaagaaggaagcgaggaggggatgtacgtgctgaggtggagctgcaccgactttgacaacatcctcatgaccgtcacctgctttgagaagtctgagcaggtgcagggtgcccagaagcagttcaagaactttcagatcgaggtgcagaagggccgctacagtctgcacggttcggaccgcagcttccccagcttgggagacctcatgagccacctcaagaagcagatcctgcgcacggataacatcagcttcatgctaaaacgctgctgccagcccaagccccgagaaatctccaacctgctggtggctactaagaaagcccaggagtggcagcccgtctaccccatgagccagctgagtttcgatcggatcctcaagaaggatctggtgcagggcgagcaccttgggagaggcacgagaacacacatctattctgggaccctgatggattacaaggatgacgaaggaacttctgaagagaagaagataaaagtgatcctcaaagtcttagaccccagccacagggatatttccctggccttcttcgaggcagccagcatgatgagacaggtctcccacaaacacatcgtgtacctctatggcgtctgtgtccgcgacgtggagaatatcatggtggaagagtttgtggaagggggtcctctggatctcttcatgcaccggaaaagtgatgtccttaccacaccatggaaattcaaagttgccaaacagctggccagtgccctgagctacttggaggataaagacctggtccatggaaatgtgtgtactaaaaacctcctcctggcccgtgagggaatcgacagtgagtgtggcccattcatcaagctcagtgaccccggcatccccattacggtgctgtctaggcaagaatgcattgaacgaatcccatggattgctcctgagtgtgttgaggactccaagaacctgagtgtggctgctgacaagtggagctttggaaccacgctctgggaaatctgctacaatggcgagatccccttgaaagacaagacgctgattgagaaagagagattctatgaaagccggtgcaggccagtgacaccatcatgtaaggagctggctgacctcatgacccgctgcatgaactatgaccccaatcagaggcctttcttccgagccatcatgagagacattaataagcttgaagagcagaatccagatattgtttccagaaaaaaaaaccagccaactgaagtggaccccacacattttgagaagcgcttcctaaagaggatccgtgacttgggagagggccactttgggaaggttgagctctgcaggtatgaccccgaagacaatacaggggagcaggtggctgttaaatctctgaagcctgagagtggaggtaaccacatagctgatctgaaaaaggaaatcgagatcttaaggaacctctatcatgagaacattgtgaagtacaaaggaatctgcacagaagacggaggaaatggtattaagctcatcatggaatttctgccttcgggaagccttaaggaatatcttccaaagaataagaacaaaataaacctcaaacagcagctaaaatatgccgttcagatttgtaaggggatggactatttgggttctcggcaatacgtttcaccgggacttggcagcaagaaatgtccttgttgagagtgaacaccaagtgaaaattggagacttcggtttaaccaaagcaattgaaaccgataaggagtattacaccgtcaaggatgaccgggacagccctgtgttttggtatgctccagaatgtttaatgcaatctaaattttatattgcctctgacgtctggtcttttggagtcactctgcatgagctgctgacttactgtgattcagattctagtcccatggctttgttcctgaaaatgataggcccaacccatggccagatgacagtcacaagacttgtgaatacgttaaaagaaggaaaacgcctgccgtgcccacctaactgtccagatgaggtttatcagcttatgagaaaatgctgggaattccaaccatccaatcggacaagctttcagaaccttattgaaggatttgaagcacttttaaaataagaagcatgaataacatttaaattccacagattatcaagtccttctcctgcaacaaatgcccaagtcattttttaaaaatttctaatgaaagaagtttgtgttctgtccaaaaagtcactgaactcatacttcagtacatatacatgtataaggcacactgtagtgcttaatatgtgtaaggacttcctctttaaatttggtaccagtaacttagtgacacataatgacaaccaaaatatttgaaaccacttaagcactcctccttgtggaaagaatataccaccatttcatctggctagttcaccatcacaactgcattaccaaaaggggatttttgaaaacgaggagttgaccaaaataatatctgaagatgattgcttttccctgctgccagctgatctgaaatgttttgctggcacattaatcatagataaagaaagattgatggacttagccctcaaatttcagtatctatacagtactagaccatgcattcttaaaatattagataccaggtagtatatattgtttctgtacaaaaatgactgtattctctcaccagtaggacttaaactttgtttctccagtggcttagctcctgttcctttgggtgatcactagcacccatttttgagaaagctggttctacatggggggatagctgtggaatagataatttgctgcatgttaattctcaagaactaagcctgtgccagtgctttcctaagcagnatacctttaatcagaactcatt

SEQ ID NO: 8177 - DNA, 320 bp, Homo sapiens
gacagaatataatgaagagccttccagatgtggtgatgaatggggaccctaagcaccattatcccggctgtatcaacctctcctttgcatatgtggaaggggaaagtctgctgatggcactgaaggacgttgccttatcctcagggagtgcctgcacctctgcatccctggagccctcttatgtgcttagagcaattggcactgatgaggatttagcgcactcttctatcagccctctctgggagatggttcaggatggcattgacctcaagagcatcaagtggacccaacactagaagaatagggccctgactttgtgc

SEQ ID NO: 8178 - DNA, 1172 bp, Homo sapiens
tttttttttttttttttaaataggaaggtgagtttatttctccagtcttgaaattaacaattttcaagaaaacaaattattagaataactggtggagtcacagacatatttctagctccattaggtcaaaggaaaggaaagaggacaagggtagaaaggagacaagccctctaagaaactgtccattcagtctgtctgcagtcaatatgaagagatagcctttggagctacagaaaatattacattgaagtggattatgcttgctgttaaagaagctggtccagccgagcagcagcagaagacgaagactcaaatgtccatgtagagcatcatggtccctgaccaaagagacttcttctggttcctcttgctctcctcaccaagagcacagatgtgcccagcagcaatatgacagcaaatgtctctatggcttcgggatgaaaatgtccacacactttaagacccgagaagaaatggggagtgctccacacccaaggaactgaagctagggaaagacagttttcttgtgtttctgtcatagaggtggactgatgctgaagtcaactggtctataccaatctagagcatccactaggtgtaacaaggtgtctggttgtgcacgggttggtgaggcaggaggggccagaccagcacaaagtcagggccctattcttctagtgttgggtccacttgatgctcttgaggtcaatgccatcctgaaccatctcccagagagggctcatttctcgaagacgcttcacatgctgaatgcatttctccactgtgtagtccacttcctcctctgtagtgaagcggccaattccaaacctgatagaagagtgcgctaaatcctcatcagtgccaattgctctaagcacataagagggctccagggatgcagaggtgcaggcactccctgaggataaggcaacgtccttcagtgccatcagcagactttccccttccacatatgcaaaggagaggttgatacagccgggataatggtgcttagggtccccattcatcaccacatctggaaggctcttcattatattctgtatcagccgctctgacaactttgagattcgcttgtggtcatactccatctcttgctgtgccacctcacacgcagcctccagccccaccactaagggtgtgggcactgtcccaga

SEQ ID NO: 8179 - DNA, 437 bp, Homo sapiens
cattttttaaagcataatatcttttttagttgtttttctgtgaagcttttggttaataaatagggtcaactaattggagacttttctcttccaattagggcttttaatactaacaaggataactttattcattcctcgtattctctactctaacaaatatgaactctgaagttgaaaagtcatttatgttccgctttcaccaaagtgacgtgaggctttaggtcactgtttcacttcaaagtactggatccaaagctttgttgaaaatgctgtttgatgaattcactgaagaatatagaaaggtggtcaggtaaagtctacttttattttgtcaagcttaataatttgtgtcatactttaccccagtatatataggcaaaccaaaaccttatcaaatattaaattagttgtttaaactttgcttataaagtattggc

SEQ ID NO: 8180 - DNA, 1682 bp, Homo sapiens
  misc_feature (1)...(1682): n = a,t,c or g
aaaaaaaaaaagaaaaaattcccaaatcttaatgtctgtttcagaattttagtgattttaaagtgatagtagaaaataccaagcatatgaggtatttcaatatgataggcttcttacattttaatagttactcatctttgttccaggacccttgactgatgctagggaaaggataaagcatagaataccagccagtttggctctgattttgagttatttataataaagtttggggattatcataacatctcatatctttgtgtatgttgtttaatgctcggcagcacaacactgatgataactattaaaaatagaaaataacagccattttactttcaaatctgatgtgatgcaatctgtgaacactaggaggggataaaataagcattgcagggaaacttatttgtaaatagcttcctcacctaaactttgacttggcaatcaatactttctactttgtggaggggattaagaatagaatgggcaggatgagaccatgaaaattataatgattcatgtatatttgtatgatgcttgtaactttgcaaagtcttttttattcattgtctcatttggtcagaacaattttattgaggacatgaatttaacaattagaatttagattttctgactgtagctactaaatgttgtagctactagaccaggtgagctaggtttagagcaaagtatataagccttgtatggactatattagaattttaaaaattgtaattaattccttatcatcattataaaaagcttgatttttttatttgatctaaaaaagcattattccaaagaattttttcaagtagaaatgggagttagttataccagtgttgtttttaactaataaggctattttagaattcagccttgcctgtaaggtctttgagaagggagaggagtaggccaaaaaaaaaaaagtcttgattcctgaatgtgccttatatgctgtgccactcacaccgaggccatcatctcaacattagagttgtgctagattactgcttgactgactagctaggttaggcctaagagtgtttaccgaataatctgcactcactcagtagcccttcttcaggattaaaaacgatgatgacctcatcttagagccctaaagggaaatgcttatgtgggaacaagaaaagtcggtggtactgtcttctgctactactacttagtgctttgctgtgtatagggtgtgttcacatatatctcagttgaatgtcacaagaatccctgaagtgattaaaagtcttgagaggtcaggcaatttttgtaaggctagaaggaaaagtgaggttttagacttcatttcttttaaagttggcaaacaaacattttctgtaatggacaagatagatagatnnnnnnnnnnnnnnnnnnnnnnnnnnnnngatgattgattgatgattgatgattgatagtaaattatttcaggctttgcaggctataaagtgctgcagctccttagctttgctgttgttatagtgtagctggagccatagacagttagttagttagttatgagtgagcacagctgggtgccagtacaattttaatgatcaagactcgtggcaggcagaacaaaccatcatttgttgatcctctgcttgaaagcacgaataagtgagaacagagcagtcatatggtttcagaaagtgttattctgggatttc

SEQ ID NO: 8181 - DNA, 416 bp, Homo sapiens
aagagttatagattccactgtattacctgggatactcattgaaatgtcagaagttcaattaatgaggctattacctatcaaaaaatcaactgccctcaaggtggcactcttttgtacaactttatccggagacacttcgtgacactggagaaggaactgtggtggtcagttatggggtttctcttgaaaatgcagtcttggaccagctgcttaacctaggaaggcagctaatcagtgaccacgtagatcttgtcctgtgccaaaaagttatacatccatctttgaagcagtttctcaatatgcatccgtattattgccatagacagaattggagtgactctgatgggaacccctgactaaaatgaccaggaacacagcctattggatccctaggctcaatatgtcctaatagttat

SEQ ID NO: 8182 - DNA, 2129 bp, Homo sapiens
ggctcttttaaatgaccccaggcgtcgtgtattgaatcctagactcacgtccgtctcgccggcgcccgagccagtccgcgcgcaccgcgtctgcgtccccgaaagccccgcccgcaagggctgccctgcctacctggtctccgacgtgctcgtctggagggcggtgcgaggggccgagccgacgagatgttcttgctgcctcttccggctgcggggcgagtagtcgtccgacgtctggccgtgagacgtttcgggagccggagtctctccaccgcagacatgacgaagggccttgttttaggaatctattccaaagaaaaagaagatgatgtgccacagttcacaagtgcaggagagaattttgataaattgttagctggaaagctgagagagactttgaacatatctggaccacctctgaaggcagggaagactcgaaccttttatggtctgcatcaggacttccccagcgtggtgctagttggcctcggcaaaaaggcagctggaatcgacgaacaggaaaactggcatgaaggcaaagaaaacatcagagctgctgttgcagcggggtgcaggcagattcaagacctggagctctcgtctgtggaggtggatccctgtggagacgctcaggctgctgcggagggagcggtgcttggtctctatgaatacgatgacctaaagcaaaaaaagaagatggctgtgtcggcaaagctctatggaagtggggatcaggaggcctgggcagaaaggagtcctgtttgcttctgggcagaacttggcacgccaattgatggagacgccagccaatgagatgacgccaaccagatttgccgaaattattgagaagaatctcaaaagtgctagtagtaaaaccgaggtccatatcagacccaagtcttggattgaggaacaggcaatgggatcattcctcagtgtggccaaaggatctgacgagcccccagtcttcttggaaattcactacaaaggcagccccaatgcaaacgaaccacccctggtgtttgttgggaaaggaattacctttgacagtggtggtatctccatcaaggcttctgcaaatatggacctcatgagggctgacatgggaggagctgcaactatatgctcagccatcgtgtctgctgcaaagcttaatttgcccattaatattataggtctggcccctctttgtgaaaatatgcccagcggcaaggccaacaagccgggggatgttgttagagccaaaaacgggaagaccatccaggttgataacactgatgctgaggggaggctcatactgggctgatgcgctctgttacgcacacacgtttaacccgaaggtcatcctcaatgccgccaccttaacaggtgccatggatgtagctttgggatcaggtgccactggggtctttaccaattcatcctggctctggaacaaactcttcgaggccagcattgaaacaggggaccgtgtctggaggatgcctctcttcgaacattatacaagacaggttgtagattgccagcttgctgatgttaacaacattggaaaatacagatctgcaggagcatgtacagctgcagcattcctgaaagaattcgtaactcatcctaagtgggcacatttagacatagcaggcgtgatgaccaacaaagatgaagttccctatctacggaaaggcatgactgggaggcccacaaggactctcattgagttcttacttcgtttcagtcaagacaatgcttagttcagatactcaaaaatgtcttcactctgtcttaaattggacagttgaacttaaaaggtttttgaataaatggatgaaaatcttttaacggagacaaaggatggtatttaaaaatgtagaacacaatgaaatttgtatgccttgatttttttttcatttcacacaaagatttataaaggtaaagttaatatcttacttgataaggatttttaagatactctataaatgattaaaatttttagaacttcctaatcacttttcagagtatatgtttttcattgagaagcaaaattgtaactcagatttgtgatgctaggaacatgagcaaactgaaaattactatgcacttgtcagaaacaataaatgcaacttgttgtgctc

SEQ ID NO: 8183 - DNA, 902 bp, Homo sapiens
  misc_feature (1)...(902): n = a,t,c or g
ccaacatggagcctcttgcagcttacccgctaaaatgttccgggcccagagcaaaggtatttgcagttttgctgtctatagttctatgcacagtaacgctatttcttctacaactaaaattcctcaaacctaaaatcaacagcttttatgcctttgaagtgaaggatgcaaaaggaagaactgtttctctggaaaagtataaaggcaaagtttcactagttgtaaacgtggccagtgactgccaactcacagacagaaattacttagggctgaaggaactgcacaaagagtttggaccatcccacttcagcgtgttggcttttccctgcaatcagtttggagaatcggagccccgcccaagcaaggaagtagaatcttttgcaagaaaaaactacggagtaactttccccatcttccacaagattaagattctaggatctgaaggagaacctgcatttagatttcttgttgattcttcaaagaaggaaccaaggtggaatttttggaagtatcttgtcaaccctgagggtcaagttgtgaagttctggaggccagaggagcccattgaagtcatcaggcctgacatagcagctctggttagacaagtgatcataaaaaagaaagaggatctatgagaatgccattgcgtttctaatagaacagagaaatgtctccatgagggtttggtctcnnnnnnnnnnnnnnnnnnnnnnnnnnnnnnnnnnnnnnnnnnnnnnnnnnnnnnnnnnnnnnnnnnnnnnnnnnnnnnnnnnnnnnnnnnnnnttttaaacatgctattaaatgtggcaatgaaggatttttttttaatgttatcttgctattaagtggtaatgaatgttcccaggatgaggatgttacccaaagcaaaaatcaagagtag

SEQ ID NO: 8184 - DNA, 814 bp, Homo sapiens
aaactttaattaagtctttatttaagatacttcaagagctggagttaacatttttctttcagattcgtatttccttaacatgaaaagtcaacaatgaaaacagaataagttactttattacaagaacaaaacagacttgctaattttatgtctcctttcacccatatcacaaatgcaaagtatatattatcataagatggaaattaccaaactccaagatactctgcataaatgaaataaactcaacttgcaaaattagcaagtagaacattcaagtatctacagtcattataaatagtgtaaagtacatgccatatctacagtgtgggaagagtataaacatgggaaaatgagttcttaaggaacaattagaatgtttgtttggacaatttaaaatattaacaagggtactcaaatacagaatcaaccaaaacatttattttttctcttttttcaagaaaaactgtcgagcttctttccccaggccctgcctgaggaaaatctgttagccagctcaagatagtcttgggaaaccaaggcatttccctttgggttggtaaggctggttttccgcttgacctggagtctgtgccaaatcctgaatgaaagtggccagtaaaacacagctcatctcttgctccagaatgatcttgttctgatggttgttgtaacaagcagcgataagtgaagggaacagtactttgatgagccgtgggtcactgaaatactggaagggcaactggcagagcttctgcagcactgtggggtggcggccggactgcacgatcaccctggttatctgggtggttgacag

SEQ ID NO: 8185 - DNA, 650 bp, Homo sapiens
gtggtagtgacctcaccagaggagttggcaattcctaagtgctgcctggaggcctctacagagacataatgttggagaacttttgccacatggcagtgctgggttcacctggtccagaaggggaggcagacccacctgcccaccatgacccggacagaggcaataaatacggagcacctcatgggccagggcctgggaggattcccaccataccctacccagcgccaataacagagggaccctggagttgtgtacgcaagatagcagttcagtgcttgcacacatacttagttgagaagggaaatcagggctaatgaaacagctcaactgtctggcagagccaggctccttctgccatgatacagtttggatgtttgtccctttctaatcttatatggaaatttgatccccagtgttgaaggtggggcctggtgggaaatgttcctgttatcgggatggatccttcatgaatagcctggtgccatctttgtggtaacaagtgagttctcacttgattagtttctgtgagaactgtttgttaaaaagagcctggtggcacctccctcccttcttcctccttctcttgctatgtgatgctgctgccctttgccttccgtcatgagtggaagctccctgaagcccccaccaga

SEQ ID NO: 8186 - DNA, 1440 bp, Homo sapiens
ttttgtctaatacatgtttatttcactgggatggagagcaggccctacttccagggaacaggttgagatctggagtccctgtagggtcagagctagaggacccagaggaggaagtcctggaaggccttcctggaggaggggctgtcagagctgagtccaaactgaagaggcatttgcaatccaggagaaagcgacccctggtagggggagctgcaagaggaaaagctgagagataccaagaaatgcaagggacctgcatccccatgcatccctctgcccatctgcaggggcacttagaagtacacggagccctcgctgtctccttggtcatcgaatttctggatctgagtcttgagatgcctcagtttacccttcaggtagtggcagcgagcctgcttgtccaggaagccaggatccattcgcttcatctcaaactccctccaaacccgggctgcaacttgggcctccttctgcaaggggaggagtagaaagggggtttagggagagttgaattcaagaagggatgaagaaactgaggctcagacagactaaatgcccatctagtggggacttcaagggctgaccttagccatgtgtcacggcgcccagccaaccgagaggagaaagagtcctggaaatctggacccagtgggtgtcccagaggcttgggtcgggccactcagaagggctgcggggcagggctttctccctagtgctgacctggctttggggttgggggcaggagcttcaacagggcctccagctgcctgagctttgcctgtgcacaccccacctcgtgctggagctccaagaactctccgtactggtcctcaaaaccagcgccccccgccctccgtgccagccccagccgggaccccacaaggcaaagaccaagaagattgtgtttgaggatgagttgctctcccaggccctcctgggcgccaagaagcctattggagccatccctaaggggcaataaccctaggccccacccagtgcccgactatgagcttaagtacccgccagtgagcagtgagagggaacggagccgctatgtcgcagtgttccaggaccagtacggagagttcttggagctccagcacgaggtggggtgtgcacaggcaaagctcaggcagctggaggccctgctgagctccctgcccccaccccaaagccagaaggaggcccaagttgcagcccgggtttggagggagtttgagatgaagcgaatgctccccctaccaggggtcgctttctcctggattgcaaatgcctcttcagtttggactcagctctgacagcccctcctccaggaaggccttccaggacttcctcctctgggtcctctagctctgaccctacagggactccagatctcaacctgttccctggaagtagggcctgctctccatcccagtgaaataaacatgtattagacaa

SEQ ID NO: 8187 - DNA, 904 bp, Homo sapiens
  misc_feature (1)...(904): n = a,t,c or g
taaatgctaaatgctaaagaggaataaaacaagtgagtgattaagggatggatattccatgccattgtcctgtgtcttgagaagcaggattccgagtgcaggagacacagacatcatatagaggaggctatgtaaaggccccaggaccctgaatttgtattgggaatatcaatataggctcagaaaatattcttcctttaaatatgtgtgtgcaatgtttgtatttttttaaagctccgtccaaaaatctagaaataatgaccaacgcaatagcaatgagcatcctaaactggatctgaaataccatctctaccagagactctggggaaaaataatggattccaagtgttaaacggaattaagtttgggcctaaaactgcctctgtacatagtgacttataacctcacttaatgtataagcaaactgggacctgacttgagagtacacttctgtaacaagcagcagagtctcaccaatcacatgctgaaggctcccaaaacatgcctatgtgaggtggaggctgacctgcagtcagtctggccatgtacatgtgtctttcccttcctgtggctataaataaatacagcctgcacacaacgcacaggagaacgttctgaaccacttttggtcctgagtgctacccagctgaagaaactattttctgctcaattaaactgctaacttgtctaaagtttttcttttaagacaggtttggagcagaagctctataaattgggcctagagcatcttgacatgccaggctgcagggagctatcaatgactgtgcgtgtggtctgtgcacacatgtatnacacatgtgcacacttatcaaaagaaagcaagagccaagctgaagaggctccctctcactgaccgaataagctagtctgagctaaataaaga

SEQ ID NO: 8188 - DNA, 1905 bp, Homo sapiens
gaaggattaaaaatatataatcaaatttttttttatttttctacagcaaaataaaaacattattttaaaaagcaatattctacattaaatacattaagatattgacaattttataaatacaatcattttaaacagtaaacatgataaatttctgatacaaggttttacatacgttaattgtgaaaatataaaaactttacacacttctcttaaaaagcattcaacgtaatcaattttacaaaattatcaatttaaaaagtgttagatatgcttctattttgttccattattaaggcaatgatagcatatcagatcttaaaaaagaaatggtgaattagggcctaagacatcctatattgcctaaaaacgaacatttcagagactttcttaggcactgagttcaaaaccagtgaaggttgccttctccctagcaccactacccctcatggttgtccgaatcaggagacttcttcctggctacccttagggagagtcttctacacctattatttcctagtttctaggagaaagggtttcagaaagaattttgacatttaaattctatgccagtactgaaactctcccaaagattgaggcattctgcatttgaattttatacagaaagtcatgaatctaattccaaaagaaaagagtgcacttcatttggtcacttaatttcataccacttggcgaggtaggataactttcttctttgacaactgtctcggactatataaatggtgattataccggaaagggttctaatgccttttccacattcttccagttgtgaaaattctctctgtaccattcaattgttttctttattccttctttccaaggcactttaggtctccatcctaagccatgtattttttctgacttcattgggtatctcatgtcattggtgggtctatcattaacataatcaacccaattttccatttcagactctgaattggtctctttgatcagttgtattagttctttggcaagctggacaactgacatttcaaaattggttccgatgttataaatttcacctggtttcccttttttgaggacagtgagaaatgcttctacaacatcagtagcataaaggaagtttcttgtttgaagccctgacccatgaatgcaacatttcctgttgtgctgtagcaaagatataaattttggaataaccttttctggatattgatgtggtccataaacattactgcttcttgtgatgacaactggaaacttatattgttcccagtaagactgtacaaaacatttcagcagctgctttagatgatgcataaggatttgtaggttgtttgggtgaagattcatcaaattccttatcaagactgccaccatatacttcatctgtgctgacataaataaacttctccactctggcttcatgagcagcacttaccaaaacgtgagtgccataaacattaacataggtaaactcaaaggcacgtacgaatgaaagatctacatgtgtttgtgcggcaaaatgtagtactatatctattttctctgtttcaaaaagcagtttcacaaagtgagaatcacatatgtcaccctgtataaatttgtagttctgtttgttagaaatggtttcaagattcttcaagcttgcacagtaatccagcttgtctagatttatgatcatatagtttggataatcttccactaaagagacaatcatatgtgatgcaatgaaaccagcaccgccggtcaccaggacccccttcgcaaagccgccgggaagaccccacggttcctcccaacacgccgccgacatctcccagctcagcagtgcctagtaccgtaaagagtatggtctgaaaagcgcagggaagttccgccgcgaccttttgcgtacgcgcctcgctcgcgggacacgttaac

SEQ ID NO: 8189 - DNA, 990 bp, Homo sapiens
gccgggagagaagcaccgtggctgctattatctgctctccgcgcctgacccctcccaggactcgtgatgccaaggccgctgcgagcgtagcgaagagtcggggttgagccccagctgagccgagggctcgcactcttctggtctcccaggcccaacccacctgaagaaatgagtggtggattggctccaagtaagagcacagtgtatgtatccaacttgcctttttccctgacaaacaatgacttgtaccggatattttccaagtatggcaaagttgtaaaggttaccatcatgaaagataaagataccaggaagagtaaaggggttgcatttattttatttttggataaagactctgcacaaaactgtaccagggcaataaacaacaaacagttatttggtagagtgataaaagcaagcattgctattgacaatggaagagcagctgagttcatccgaaggcgaaactactttgataaatctaagtgttatgaatgtggggaaagtggacacttaagttatgcctgtccgaaaaatatgctcggagaacgtgagcctccaaagaagaaagaaaaaaagaaaaaaaagaaagctcctgaaccagaagaagaaattgaggaagtagaagaaagtgaagatgaaggggaggatcctgctcttgacagcctcagtcaggccatagcattccagcaagccaaaattgaagaagaacaaaaaaaatggaaacccagttcaggagtcccctcaacatcagatgattcaagacgcccaaggataaagaaaagcacatatttcagtgatgaggaagaacttagtgattaaaatcttgccccagcacagtaataaaaatcaagatttgttagtaacaatcttgaagagctaattttaataaaaataagaaaaattaatactatcatgttaatactattattgtcatcccaagaaaaaagatattttaaaaatttatttgaaaagttcattataagggct

SEQ ID NO: 8190 - DNA, 868 bp, Homo sapiens
tttttttttttttgtctgaaaatgtttttatttttacttaagcacaaaaattgagacgtaacatatacatttgtacatagaggggaaaaaataccagaaaggagttcataaaaccccagccgctgccagtatcattcagtggctggggcctgcggtcgtctcgggcccagagccggaggctagttttgtgggaaggcccccgagtccacacacccactcggcagcctcgagggacagggtgctggttttaagggtggactcctacgtgtcccatcacaggtgacacaccccccagggtgtgaaccagactccactgggtattagggggccctccgagagatggcttatcagtccctgctgagggatgcggttctggactggctggccctgcccttcctgaaagtctggatgctgctgatggggagcatgggcggggcaggtggcatctgaggcagagacaaaggcagccgtccctcggttcggggaggggggggggtagtcacagcaaacagggccaaaccaaccacaccaggacaggcagaccccaccctcctagaagacgctggacgctaggcaggacagcttggggtcagtgtccttggtcccttccagtccccaaatcccaaccaacggcattgtacattcagaaagtctgaagagagtaaggctcagcaaggggagggctccagagggctcaaagtgccatcccctgcaggagggtgcagggggataaagggctattaatccgtttctcaggaacacgaggcagggaagagcttaaggcaaccagccttctctggatccgtttatgaggcagagaagagcttgaggcaaccagccttctctggaagcctggagaccactggag

SEQ ID NO: 8191 - DNA, 178 bp, Homo sapiens
gaatgctttttgctattctctttcaaatttaaagatcaattgagtaaaatattaatatatgctgatgtaatgttgactgtaaagtattagctcctgtctcaattgtggtttattagtcatgcttgaattttgtgtttattgattataaatatttacttttattttgtcatagattttg

SEQ ID NO: 8192 - DNA, 382 bp, Homo sapiens
tatagagtgttgactatggccacaatcttgtttctccagttaatgaatttttttatgtgtttgtttaaagatacatattaagcttgtagaccatagggacatacggagagtccattgctaatatctcactcagtattgtgaaattctatctcaccaccgtgaaactcttcagttttctaattgctttatcagcagggggtataaaaggttatgaaagcaatttccacatgctgtggctccaggtctctgggtgtgaagcagagcaagcctggtttgtcctcctcctgtctccacacagacggcttctgcaggtttggtaatctacagtacactccttgcagggaaaaggtgatgagtcatcatggacttatttgaccacttt

SEQ ID NO: 8193 - DNA, 480 bp, Homo sapiens
ttcggcacaggtatgaatggggtttaaaatcagaattaacatttgccaccccccgtggaagtttgaagattttaaaaatagaaatgtacatttttcaagctgtttttcttatgtttttgaaggaccatttttaattagctctttgatacaaagtaactcagaacgtcaaaacctatacccactaaagggaaggctgccgggaaggcaaatggaacaggaatggagcctgtctcaggaaggccagctgcaggtcctccagaaaatcaaagaagggaagaaactctgagtttgaggtacaggggcttcggggtgcagacgtccctccagggcccatggtcagtattgcacctgtgttatgaacccccagatgctgtgcagggcagggggcgggggctgctgttttaattggggaggggagcatcctaaaaatggggtccaggcagacccctcccagacctcacactgccgaggaggcctttt

SEQ ID NO: 8194 - DNA, 523 bp, Homo sapiens
ccattaaggtgaaatcacctatgttttattataaaaaacatgtgacacttataataaacccagtaaggagcacatacaatttgccctgggttcccattttctgagcgatctgtgtttgcttggggtggaggcaccgggaggtgtggccacgtggcttcataaagctcagctgcggttctccgtggccacagtgactctgctccgggtacccagtccccgactccttggcctcccaggggccatcccgggggtctcggaaggcacagcctcggttagctttgacttcttggtgtggctgaaactcagcctgtacaggagagctgccattgctgccgcggggcctgcccaggtgtgagcacacaagctcacccgggcccaccctgtgccctggagggcggctctgggcggctgcacccatgtccaagtgacaggcatcacctccttgtgccccagagtttcctctaagtccggccagccaccgtcccttctgatccggataaccagcgaatactctaattccgtt

SEQ ID NO: 8195 - DNA, 1819 bp, Homo sapiens
tttggcattcaaaatgtgaactttaataacaggtcagagtgggggttccccaggaacgagaatgacggaactggtgctggaggcctcagggtgcccacttccctgctccaagttctggaggcgaggaggcaatggaccctgttgaggcagggcagtgcccagctccatgtaagtccatctgtctgggtccctgagacccaagatgcagcagtgtgtggagcagggggccgccctgcctgacccgggaggtcctgcagggaatgcggcccaggctggtcgggtgagcaggccaaaggctgtggggtcagatccggaagctttcctcccggccatcgatgtggcggagccgcaggtagacgtccgtgccaatgccctgcagggactgcagctgcagagacccaccgaggtactccgcgtaggcccgtgacgtgggcaacccgaagccaaagccgtgcatgggtcctgactgggcgccactatgcatgtccagatggccaaagagggggctgatccgggggtcctgtgtgctggcctcagcagtagtgaagtggtagtccatgacccggtccagatctttgtgagcgattcctccaccacggtctgagatcctgatgatcagatcgacatcattgttggcgatggtgatgacccacatctgggacattgtagggagtgtctaggtgactctccattgtggctctcatggcattcttgagcagctccggcaggatgtagtccagtggcatagggatgaaggggaaccgggcagccacatggccattgatgcggacacggggcgcattgccatacttgtgctcacacaggcgtctggcaaagtccacccacttctcaataatcttctttggtgagagacgagtacagatgatgccgaaaaagtcaggcttgtcctcatgcagcgccaggtgatgcgtggccaacatgcggattccaagcctcgaagtcagcgtcttgtccaagaagtagcggacgagcttttcatcctctatgtgcttccggctctcacgtaggccctctgccaagagggtcaccacatccttgtggtcatccagcagctgtcgcaccagctggcagtactgggcctcgtccgcctggtccttgatcggagggaagtctgtcagcttctggaaggcacggatatatagctcatgcacgtgcagtatggtggggttgcagccaatgatgaaaggaaggcagcggaagcccttgatgcggtgagcaatcctcactggaagttcttgctgcaggtaccgagcacttttcagaaggtggctgccgtcctgagagcggcccaacgtagagcatcatggtgggcgttaggcggactgagggcttctccgctgccgcgtcgatggccgactggttgtaaaaggaggtgacggtcttggagcgctcccgagccatctccacgtggtgtgtgtcggtggccgacgtcgagcgggcccggagcgcgagtgcgggtcccaggaggggccggagcggaagcccgcccccgggaccgctcctcagcaccgacgccaggatcatcgtcttgctcctttcagacccggtggccgctaggactgaggatccgctaggactgaggacccaggcgacccaaaatggggcaagggggtgtgggtgggtaggggcgcttctccgacttcagggaccagggtgcgtcgaggatgctgagcaggctcagcccgcggagagcagctcccatcgcggggccggagccagggcccgggtcccagcggaagggctcgaacagtccaccgccattgtcccagccgcctgcgcccggtagcagtcgacagat

SEQ ID NO: 8196 - DNA, 451 bp, Homo sapiens
ttttttttttgcttataaatataatttattacctgtttaaaaattctttcttacattttgtacatgttggctgacagaataaatgcaggcaatttacaaaccaaggggactgcagggaaaatcaggattggcagccagggagagaaaagaggcacacccggagctggtatccctcacctccaccactcagcaaggcgccggacagatatccggaggcactctgcctctgccggggggtttttttagaaaaggaattgcatagaagatacagcaagagggaactccacaacaacaaaagtgttccatatcggaaaagccaaggttgtcatgttttgtttaaaaaagaaaaacgacaaagcacaaaacctcaatccgacctttctgcagttgaactgttcccaaaggggacagtaggtggatgacactgcctcttcaacacgactgctgggga

SEQ ID NO: 8197 - DNA, 2536 bp, Homo sapiens
gcgctctggagcggcgggtgctcgggctgccgtccgttccgccagaagcaccgagcagccgagccggggcccgccgccctcctcctcccatgaggcccgagtgaggtcgcggcggctatagccgacccgcggcgcctttcccccgcgttcctatcgcgaagcgtcagtccaagctgcccccctggaggaggaggcggaggaggaggagcatgtcggacgggtttcgattcgggggcccagagcaaacgaggcccctgagagctccacctagttcacaggataaaatcccacagcagaactcggagtcagcaatggctaagccccaggtggttgtagctcctgtattaatgtctaagctgtctgtgaatgcccctgaattttacccttcaggttattcttccagttacacagaatcctatgaggatggttgtgaggattatcctactctatcagaatatgttcaggattttttgaatcatcttacagagcagcctggcagttttgaaactgaaattgaacagtttgcagagaccctgaatggttgtgttacaacagatgatgctttgcaagaacttgtggaactcatctatcaacaggccacatctatcccaaatttctcttatatgggagctcgcctgtgtaattacctgtcccatcatctgacaattagcccacagagtggcaacttccgccaattgctacttcaaagatgtcggactgaatatgaagttaaagatcaagctgcaaaaggggatgaagttactcgaaaacgatttcatgcatttgtactctttctgggagaactttatcttaacctggagatcaagggaacaaatggacaggttacaagagcagatattcttcaggttggtcttcgagaattgctggaatgccctgtttttctaatcctatgggtggacaatttaattttgtgccagtaaaatttgttaaagttgacaggatcagttttggaagatgcttggaaggaaaaaggaaagatggatatggaagaaattattcagagaattgaaaacgttgtcctagatgcaaactgcagtagagatgtaaaacagatgctcttgaagcttgtagaactccggtcaagtaacttggggcagagtccatgcaacttcaacatatagagaagcaacaccagaaaatgatcctaactactttatgaatgaaccaacattttatacatctgatggtgttcctttcactgcagctgatccagattaccaagagaaataccaagaattacttgaaagagaggacttttttccagattatgaagaaaatggaacagatttatccggggctggtgatccatacttggatgatattgatgatgagatggacccagagatagaagaagcttatgaaaagttttgtttggaatcagagcgtaagcgaaaacagtaaagttaaatttcagcatatcagttttataaagcagtttaggtatggtgatttagcagaacacaagagagcaagaaaatgtgtcacatctataccaaattgaggatgttgagttatgttactaatgtatgcaactttaattttgtttaacactatctgccaaaataaactttattccctataacttaaaatgtgtatatatatataatagtttattatgtacagttaattctactgttttggctgcaataaaatcgattttgaaataaatgaaatgttgaaaattttgctagttggttagatgcttatcctttaaattctacttttcttgaggggaaaaagtcttcgtctggaaatacatattactgcaaaaatgtagcatccttttttaggtaggagtattatagctttcattttagtttgacatttagtgtcccaatgaattgaatttcaaatatgaatcataatcttgaaaatctttagcactaaagtcttggaatatatcaacaactgatttacatatgcagatgctatttgataccaagggctttttaaatgtcatgggggggaaaaacccaacttggtgaactcccagctaaacaaccaagacttcactgaagatttattccaattctagaattgttcttttttatttttattttttcaactgactaacttcattaccttaaagcctagaacattattctgctttatttatatggctttctcacttttattttgtagcatgggttgcatcgacttttttactagagaattttactagatatttgtcattcaagttttcatctgctttataattgatacaccttgagggtcacttttctaatacttttactataatgtggtaccacctcagccctaataaataatatttttacctaatgtcaaatctttttccagctaactaaaaactgtgtacaaaaggattgcttgtaaatatgcatgtaaatagttctgttaataacccactgttttacatttggtacatctgtgtctgctaatacagttagctttctcacttttctgcttgtttgttcagtctgaattaaaattagactttgaaaataaagcttaaatagttgtttcctctaaaaaa

SEQ ID NO: 8198 - DNA, 499 bp, Homo sapiens
aagaattgatgagttcattgtcaaactgaaggagctaaagcaagtagcctcccctttcactctgatcattgatgatccctcagggaacagttttgtggaaaacccacatgctcctcagaaagatgatgccctggtgatcacacactacaaccggacccgacagcaggaagagatgctggggcttcaagaagaagcaccagcagagaagccagaagaggaagatctcagaaatgaagtgctccagttcagcacaaactgcccagaatgcaatgcccccgctcagaccaacatgaagctagtacaaatccctcactttaaggaggttatcatcatggctaccaactgcgagaactgtgggcatcggaccaatgaggtgaaatctggaggagcagtagaacccttgggcaccaggatcaccctccacatcacagatgcctcagatatgaccagagacctcctcaagtctgagacttgcagtgtggaaatcccagagctagaa

SEQ ID NO: 8199 - DNA, 379 bp, Homo sapiens
cctaaacggcaacccctttatgactagacacatttctcctttttccttttaaaatctaagcgacaggaggtgttgcattaactccaaggaaaagtacagaataaacaatgtagaaatgtcactcctcatttacaccttttagacagacagacacacacacacacacaccccccccaaaataattgattgcttccagtgagtgggtggagatgaatctcagcagcatctgtgagtactacaggttggagcttcctgtctgtaaaatgggactgcaggggagggggtgttgtgaataagttggactggatgacttctaacattctgtgatgcctaattttgcaaaatcacttttcaattcacccaataaatttttttcttc

SEQ ID NO: 8200 - DNA, 1330 bp, Homo sapiens
ttttttttatttttttacaagactttgtttattaataaagtaattcattatgacttttgaaaaaaaaagttttaaaatattctgtgtacatgtcaatgtaggttaggccagccaaaagacaaagcaaagcatcaacattaagtcacaggctaggattatacaaataagaacaaacacaaggcttatgggtacttgttagggtaaacacaaccaaactaaactgtacttcaaatttgtttatataaaagcatattaaagctcactttaaaatagtgtccatcttttcttttaaacgggcatagactcatttgcagtcatgtacaaatatacctaatagctttcttcatcttttaatacaagtacaattccttgcttctttatgcaacctaacaaaataatatagaatgaagtcattagaaaaatatgaacctttctgaatctatattacatttttaatttaaattggaaaatacagtttagatcatatgaaacatatggatttcagacatgtattatctgtttctaacagattattacaggcggtctttattttggctgaaatgcaaaaatatgactttcttaataacagattagttaaaaatactttccattgcatagcagtgctagtccctagaacaaaaggtaagcaaaacttatttgtaagttactgcctattcaatgcccagaatatgtagatcctaaatctaagcccttaatatacatctactttaaagataactgaaagatcctcacatgccctgataatcccttaatttaaaaccgtcctgtaaacatagtcaaaatctgctaatagaaatacaattcaagtaaacattgcatatttgatttaaaccaccttacagttaaattcactcatgacacattggatcataaccactaatatgtaaaaagttttaaaaaaatcatccttacgtatagatgaaaataaactttgtaaacttgttcatttaaaataacgaatgtactgcagctgctctttggtttggcatagtttcaggtactgaatattcaagtaaatttgttcccaggtaaaccaagtctcctaatttgtctgtaatggcaatggcaagacctgaacttcaactttatttttcttaaggtgtcatcaccaagtgtttgaaggaccaaagatagtacttctaaaatttgacagggcttcattttgattttttctccccaaatagttgatagcaataatcaataccagttgagataccaaagaggcagcctttccctgattcccacaccacttgtaggcctttgctagaatggtcattaatacgtatgaatcagttgagctaaatattat

SEQ ID NO: 8201 - DNA, 429 bp, Homo sapiens
tccaagcaccgctggagccatttaatgggtgagggaacttgggtaagaggaagatcacccccttcctgtcccctttctaggccccctcaagtgcaggtgacccttaattggtgagatcttcagcctcagccgccgacctttcccttttgtccagttttggagttcccgttttttccttgtttgctttccgagtgtaaggtctggccggtgagaaagatttcccccaaccttgattaatcagccccctcccccaacttacttcccttaggacgggtagggctgagggacctcctctcctggaaagtgcttactttgcctggggaaggggctagacactgtcccagggaaagtaatagaaggtggaagaaatcaataaaatcagaccaaacaagtcgcctttcgagggcctccaccgatttatggatgaga

SEQ ID NO: 8202 - DNA, 427 bp, Homo sapiens
cgacgacggcgtcctgcgcttccccacgggtggagcccgcgctccgggacatcgtacagttcgtgcccttccgggagctcaagaacgcatcccctgcggcgctggccaagtgcgtgctggccgaggtcccgaagcaggtggtggagtactacagccacagaggcctgcccccgagaagcctgggtgtccctgccggagaggccagcccaggctgcacaccgtgaagatgtggaagggcgtagggtgggggcagtgaggaatgggtccgtacagcctctgtctgcaacattgcttggggtcccttaagctccctccgacctcccagaaagcctccagtccccaccaggccccaatcccagtcctcctgggatcctgctggcttgggcccggctctggggcccccaaggccgaagggtgacaaaataca

SEQ ID NO: 8203 - DNA, 761 bp, Homo sapiens
gccattaggcaccaacttaaagagggttgtaaaaatattaaaagtatatcgttaattctgtatctgttgcttgtcttttgtaagtgattatgtgttatgaccataggtggttacagctgccaaattatttttaaatggtcaaaaagaagagtgctatttaaacatctgtcttaaacaaaaactgtcataacttttcttttttctttttccattaggagaacattctagttggtaaatttcaaaatgtgcttgacacctgccttaaatagcacagacctattgtgcacatctttaaattatttcagctggcagaaaagaattacatttaaaactgaaatcaaggcctcaatacaaagattatcctggctcttttctatctctgtgggcctaattgaaatatgtactcttattttagacacgcctctgttaaaacagaccaggttttcctggtctcagacctatgatgacttgtccctttgatgtcactactgtgaattgaatataattagtaaaaatagacgatgaattaataacactttatagtaagaaaacaatatattttggccatctaaaaatgagaattataattatatgaattataatttaaactgtttaattttgtttaatgtgtatattgaatcttccaaattgaagccattattctcaattaagtactacaactatgacaatgcttgacctacatttctaaaataaaaattcacattttttgataaataaactacagttttaccagaaaaaaa

SEQ ID NO: 8204 - DNA, 1101 bp, Homo sapiens
aaaagtgaaatgtcaggttgtttagtcactgaatagagagctacaagtgcttggtctttcccaagaatcaaacctgagtagaaatacatttaaaagaaaaatctacatggtacctatgaatcctgtaatttgtttagggagatcttgtcactcatccctggttcctgcccatactgtttggtctcgttcttgcagtttgcttggaacagggccagagccccacatgagattgtcagcaggagtgaggagcgccagtccctactcctcagcagggacccagcacagcaatccggttgttctcggttagactgggtcggggccaggggagaagcagtcacccctgtgtagagggttcccgctgtgcttctgagcagttgctttgttcagaagtgttaggagggtcagattgtgccataattgttattaaagagaaaacacgcccaccttcctttctcccctgctggccattgttcattgagttttactgagggcagcctttgtggaagtcagggaggttgccaaaggcctgtagatgcctcctgacaaggtcttgattcctggttttctagcacccatttgcattttggtcttcagcacaaagccttgttccctgtggccggacttctgggcaataagactggggagtgactgttgagcagtctgctgtcaggagagatggctgaaaaggtgatcatcttggtgctaaacaagtaagaggcaactgccctgtttttgtttgttttgaggcacaatgaaactttagccaaactctgcaagagggtcccatctcctgccatggccaggtgtgagagaccaaaccgagaaaacagcatactctatcacttaagccttgggtagaatgggaattctttaccctgggtaaacgttttaacaaaaaaatgggacttaaacttcggtttggactgtggtcgtgctgaggcaggagtgggggttgccctcttgggggtggaatctcccaggcctccacgagggccccctgtggggatgcctgctaatttctaagatgcaaattgcacatttcctagattttgtatctgtggatttggataagggaggggaacacggacaaattgcttgtac

SEQ ID NO: 8205 - DNA, 66 bp, Homo sapiens
caataaaacttctttaagtattgtaattccagtctgccccaacttaaaaaaaaattcttattaata

SEQ ID NO: 8206 - DNA, 413 bp, Homo sapiens
gcctgtaaaaggatcaaaacacatggacctacattcagtgtaatagttacaaagttactgatttgggttccacaccctgtggtccttagtcaaaaataatgatctgtttcagtttgcaagagcaggattttattattttgcttggggtgaggggcgggagagtggaatatgagtaaggttgctgaatgaattctaaactcgcttatctggtcttcaggcttcccaactctctccaagccttcttatttcactgcagttaaataacatcttcttgttcctatagttgtgctgtgagttttctgttcatatttgcgcagtgtattttaatacggcccatgtcattatagttgattttatccctttaaacaattactgtatttgtttttgacgtagaggtttcaattttttcacct

SEQ ID NO: 8207 - DNA, 969 bp, Homo sapiens
ctttctcaaaatttattgtgcagaattttaagactatacccagggttgctcatttattaaagcaaagacttagtaaggtaagtgtgtgggaagaataaatggattaatcatagtctgtttcctatgaaaatgcctcgttgagtaattgcagatagactagtgcctcttttttgttttgttttgtttttaaacattttacagccattatccaacagacagtaaagcagtggaccagttgctgtgtgggtataaagcaaacagtctctgggctcctccaagctgtggatatctctggccattatcaatagctgattctcacttgtcctaatgaagtactcagtgcaggttagcctccttctcccccgccagcttctcttccacttccccacaccgtacatgcctctccctttctctctataactcagctcatctcatagcctttttctttggaaatgcaactctgctgatcacttgtgggctgggatcccagctgccttttgaacagagcagacatcctttacagagacaggtggcctggaggggagaacaggtaggggcacactgagatcccacagcaacctgagagattctgccccgtgacctgctggccccctccagggcacttcctattttcatctttcattaattaggcagctaagaagctgctttccagcttgtagagccaagcaggcagcatcctgtcagaaacaaccagataaatagagattaaaaaggaatctgagaaaaccctgctctctcccatgcagggtgaaatcctcgtagagctcatttcctttcccctcattaatacttaatgtaatttcctaaatagaagtttaagaaataacacaaatgaaatgttcccctgaaagtaacccctaacaaaacaacccaaatcctcctcctcggtccttctcaaagtgggtcctgcagtggggaaagaagccttcaccatggcccacgcgtccg

SEQ ID NO: 8208 - DNA, 543 bp, Homo sapiens
cgcaagggctgtttgttggattctgtgagtcataatctgatactgtttccacgctttggccattgggagctcctggagattgtctcctgtgccctatccttatttaagcacttgtttattttgggatgtcttcagttttccttgtcccagctctgcacccagctgcttctccagggagccctccctcactggagactgggatttagcaaccaagacctgggcactggctgtgcttgttgcttctgggccctcctgggacagagctgggaagtggatctatgacacgtgcttgtgcatttacccgccctgttggtttctgtagctgtctagttcctgctgttcctgtctcacctgcccctttccttatgtgtagtttcttcctgtgacagggagaaacctggctctcagattgacaggacattcgcttaggccatgtcagtgctgtaggtgaactgttcaacctgtgccccagggaggcgcagtcactatggaggcaccttacttccttaatcgtgtactgttgtttttgtgtttgacctgtag

SEQ ID NO: 8209 - DNA, 486 bp, Homo sapiens
  misc_feature (1)...(486): n = a,t,c or g
tggcatcgtgtatcgaggctaagtttttcatgcatttcccagactacttatggagaattgcagtttaagttgctgaaaagtattaacatggtattaagcttaaataatacgtaatgggactagatggcccactaagccactgttattttccttcctctctggcagggcacttgatccattccaaagtcaaaaactggactgaagctaaatttgtacttttcataatatacattctgcttctggcttatcttcttggtacatcaatatattaattgtaaagtttattgtatagtatttaaccgctgaagttcctattttatgttgtgcttatgtgaaccccttgggtgaaggtcccttttccttgggatgtgtagttatatgatctttttaaatgtacagatattttgctataaaatcggtgcagttttttatggggttttacactnctctttaattcccacctaagcctcngggtaatattgtaaa

SEQ ID NO: 8210 - DNA, 949 bp, Homo sapiens
attttttacatttatcacaaacatttggacttaattttacttttgagcattgatatttatgatgtcacttaaaatttaaatttcatagacaagagaagaaagaaaaatggaagcaattttgcaagcttttgccagacttgaaaagagagagaaaagaagagaacaagctttggaaaggatcagcacagccaaaactgaagttaaaactgaatgtaaagatacacagattgtcagtgatgctgaagttattcaggaacaagcaaaagaagaaaatgctagcaagccaacccctgccaaagtaaatagaactaaacagagaaaaagtttttctcggagtaggactcacattggacagcagcgtcggagacacagaactgtcagcatgtgttcagatatccagccatcttctcctgatatagaagttacttcacaacaaaatgatattgaaaatactgtacttacaatagaaccagaaactgaaactgcactagcagaaataattactgaaactgaagttccagcacttaataaatgtcctaccaagtaccccaaaacaaagaagcacttggttaatgaatggttaagtgagaagaatgagaagacaggaaaaccttcagatggcctttcagaaaggcctctacgcataactacagatcctgaagtgttagctacacaactcaattctttaccaggtctcacttacagcccccatgtatactccactcctaagcattatattagatttacttcaccattcctttcagaaaaaaggagaagaaaagaacctactgaaaacatttctggttcatgcaagaagcgatggttgaaacaagctctggaagaagaaaattcagcaattttacatagatttaattcaccctgtcaagaaagatccagaagtcctgcagtcaatggtgaaaataaaagtccactactattaaatgacagc

SEQ ID NO: 8211 - DNA, 738 bp, Homo sapiens
gtgattttaagactcataactagttcacatccaagcatttgggtaacaatggtgagttaagagggttcacatttgatgatttgtcctgaatatgaaccatgtttgtcttgcttttgtcctgaaattccaatacccagttttatgatggaaattttgtaaaattcaacttgaaccgctcagaagagtctaactgatgatactcatttactggggacatagtatgtgcccaagaacttgacatgcaccttctgtcttccatttagtcatcgttacctttagaaaaagctgattccgttaacaagatctttggagggaatcagcttcacaaacgtagcagtgggtgggggtcatgttggttaaccagttcacacatcagctcactaaaggaaaaaatatttctgcaaaaaatcttcacttgtcagaggggggtgcatgaaatttgagagccatgtgttatgcatccagctcttgaactggtctcagcttcagctggctgcagtgccctagggaagttactatgggaaaagtggaaatagttgaggcccagggggactgatcaggccagaggaagtggaagctcaagatcaactgtgcttattttgctgatggctgggcctaaatgccccaaccacctacttgggacaggaaatgacaggaccctctcaaccttggactgggaaaggagggcttcctggcccctgacagaccctggggtcctgaggctaccttagttgggat

SEQ ID NO: 8212 - DNA, 697 bp, Homo sapiens
aaattttaaaggtttgcatgtttatttataattacaatttacattactccaacagaggagcccccttgctatgttctaattcttagccattaagtcctacaaaaataaacccaagcttttacagtaacttaatcaatacagaactaaagcctttatagctattagaggggtttagttaccaaggtgcttattttcgacaaaatgccctgtcactcagaggacgcatgcgtatactaaagttctgacccatcgactcatgcaacaaatgtagaccccaccctccctccacccactgttacaacacaaacacaaaacaacgatgtacaacagaggggaaatatgctcttggtcaactgaccttgcagaaaagactggcttgtttccaagtggatgagaacgccagtgtgtggccagagtccagcaatgactgaccggcccaggtcagaggctggcagggaccacagaagggccaaggcgctgccggggctcatcccaggctccaaccccaacctggaagcttgtggacaccaggctctgtgcagcagctccgtggctagcgtccagggcccctggccactactcccaaatgcttctagtccacccacccctggccagccccaaccttgacatcactgtggatgccatcagggtggtctggttcacttatacaacatgatccatgggaaaaccccttccg

SEQ ID NO: 8213 - DNA, 2507 bp, Homo sapiens
  misc_feature (1)...(2507): n = a,t,c or g
ttggcggccgggctctacgttccctgttctcgcctgcagctccgccatggctcctaaaggcagctccaaacagcagtctgaggaggacctgctcctgcaggatttcagccgcaatctctcggccaagtcctccgcgctcttcttcggaaacgcgttcatcgtgtctgccatccccatctggttatactggcgaatatggcatatggatcttattcagtctgctgttttgtatagtgtgatgaccctagtaagcacatatttggtagcctttgcatacaagaatgtgaaatttgttctcaagcacaaagttgccacagaagagggaggatgctgtttccaaagaagtgactcgaaaactttctgaagctgataatagaaagatgtctcggaaggagaaagatgaaagaatcttgtggaagaagaatgaagttgctgattatgaagctacaacattttccatcttctataacaacactctgttcctggtcgtggtcattgttgcttccttcttcatattgaagaacttcaaccccacagtgaactacatattgtccataagtgcttcatcaggactcatcgccctcctgtctactggctccaaatagaccatgtcagcttcaccccctggctttgtgtctatgggtggcctgtggtatatggaaaagtagcagggtggtcagggtgggagacacaagatgtttttatagtctagagcctttaaaaaacccagcagaatgtaattcagtatttgtttattggctgttttttgacagattgttgaaattaaatgaattgaaagggaaactcagagtactaggacgtttattaaaaggaaaaaaatgtcttgcaatgtgctgtaatcacaagaggagaaaataacttgtttccttgatctgtcagaggtcacagtaacctgggccgagctgttattatttattatataatagtagtaggaagttaataactggttctctgtgttccaagcacaatattacaacttcttttgaaccgtaaatatcagaatgaatcctcttcccaggggattgaacagaagcttaatgtttacaagtgtttgaatttgtgatctgaaataacacaaaattaaaaacatgatttctctaattttccaactagaggaggagaaacttgtggaaaagttctttttttttcttttttttttcttaaagaagggcagccaaggtagtaacctaaaaatagtgcccaggcatatgagagttgtcctacgaggttaaagaacacactgttccactgtatggctttggccctgagtggcagcggaggtcaacttgaccctgccatgttggtttgacttactaagacacaggaatcattgttttccttgaccagggtctcacaccctggaggaatgttaagtaagagaaagaacctctttcctgaatattgacatgtaaaagaccaaagtaatttttctgaacttctgcaattctgagaactctccaaggaatttacagtgattttagtgcttgtcagcatttttccatgaggactttcatacatttgactctttagttcacaggttcccattgattgtgagcaagatatttatctctttagcccttggggatccagctgagagcaatctcttgcatttttttacccgtgtatgtacagatatcatttcttgtgtatgccatgacttgaaaaagtttgggaagctctttagcaatatcagctaaaaggatatgaaatcacaggtgatagcagttgtcattcagtaatttcctacaagcagcaccccaaaggaaatatagtcctaatctttactatccacttctaaatttaatgtgaatttcatacatgttattagttgttttctttataattttataaaaattattcatcgggagtttaacttccacttccatgctatcggatgtgttgggctccatgcaagaacttggaagaaaaacaggcaggaatgcatttgcataatgacccagatcatcattttctgcaactgagaattatatttcatcattgcttctagaagtctgcaattctttacttttctttggtgcattattatctaggtgccatcactggataatgtggagtgactagagaagtcatatatcactgtaaggtacagttagggtaacactttagaggtttattatttttaaaaaacttttcttgaacnnnnnnnnnnnnnnnnnnnnnnnnnnnnnnnnnnnnnnnnnnnnnnnnnnnnnnnnnnngatggtgggtgcctgtaatctcagctacttngggaggctgaagcagggagaactgcctgaacccgggangcagaggtttncagtgagttcgagatcgtgctactactgccggggtggcaagggtgagactccatctcaaaaaagaaacaaaaaaacccaaaaagttttctttactgttggttaaaaaaaaaagccagaccatagtttgactggtggcatggaatttgtgtatcaaataaatgcatttgcttatttgacaaacaaaaa

SEQ ID NO: 8214 - DNA, 1082 bp, Homo sapiens
agcccctagaagaggatggccagccacctggggccaagcggaggtactcggatcccccaacgtactgcctgccccccgcctcgggccagaccaatggctgagagccacagctgacaaagtctgcatgtccgaggacggcccctgcactggagctgggcgccagagctgcagagctagtgttcggccctcagagaaggatccagaatcaaaagctcaagagtgacgtgaggtgggcaccggccccaagtgcagagtcaaggcagggagaggccggctggagccaggccccctcgcacgcagcccccaaatcatggacgcacctgtggggagcaccacatctccacctgcggcctcacatctccccactcccctttttgtacgtttaactgtttctttgtacgtggtttacgtaactttaaactgtaacagccttaatggaagaccaaatggttttttatatgtgtatgtacaaagttttctattaacgctgcccgtctcccttataacctggacgtgagctgtcagaggcagaagccactaggccactgcggcgttctgaggctcagaccctgctgtggttggcttggggtggccaatgggctggggaccctccatgagaagttttggacacttggggtcacctgacccgtgcctctctgacacatgtctccggggggcagccacctggccaatgtgcatttttgcacgtgctggaaccttccatgggggtctgggctattggctggagccaggacatgagtcaggggcaccatggacctcacgtgccagggagacttgaatgtggctgtcactcttccggacgccaagggctgcaggaggctgcttttggcactacccaccccgtgtgacagaataggagccagcgactcaggactgctcacgggtcaggagggcaacgcctgaagtcagacctccctataggtcaacagggacaacctggggatctctggagcagggccctcctctctcaggcttggcccactcccccagacacctggacacgtggccacaaatctgggacaaggggcccccgcacagcatgaaataaaaagtgcctgaga

SEQ ID NO: 8215 - DNA, 519 bp, Homo sapiens
  misc_feature (1)...(519): n = a,t,c or g
cgtcaaggcagcaatgaatcgtgtcttgtgtgccccggcggccaggtgagctcctcaaggtctcggagggccgagggcagacaccggccnggcgggcggacggcttactgctctctctcttccagggccgtccgggcgctgaggctcataggctgggcttcccgaagccttcatccgttgcccggttcccgggaatcgggcccaccctgccgccgaggaagaggacgaccctgaccgccccattgagttttcctccagcaaagccaaccctcaccgctggtcggtgggccataccatgggaaagggacatcagcggccctggtggaaggtgctgcccctcagctgcttcctcgtggcgctgatcatctggtgctacctgagggaggagagcgaggcggaccagtggttgagacaggtgtggggagaggtgccagagcccagtgatcgttctgaggagcctgagactccagctgcctacagagcgagaacttgacggggtgcccgctgtggcttttgcag

SEQ ID NO: 8216 - DNA, 668 bp, Homo sapiens
ggcacgagcgccgagtgggacagcgctggtgcggagactgcttccggactccaggtaccgcgcttggcggcagctggccccagacttctgtcttttcagctgcagtgaaggctcggggctgcagaattgcaaccttgccaatggacctgatcggttttggttatgcagccctcgtgacatttggaagcatttttggatataagcggagaggtggtgttccgtctttgattgctggtctttttgttggatgtttggccggctatggagcttaccgtgtctccaatgacaaacgagatgtaaaagtgtcactgtttacagctttcttcctggctaccataatgggtgtgagatttaagaggtccaagaaaataatgcctgctggtttggttgcaggtttaagcctcatgatgatcctgagacttgtcttgttgctgctctgagcatctggaggaacagaaaactaagttcatgtcatcctgctgtaatgggcagagcatattttttttgtatttaaaagataaacttcaatatggaatgctagaaacacaaatagcactgtcacctctaatatgaacattagtttgaggtagtttttttctaaagcaaaaattttaactgttttctaattgtcaagcactattttcattaaaagtgtctaatgaatcatg

SEQ ID NO: 8217 - DNA, 3506 bp, Homo sapiens
  misc_feature (1)...(3506): n = a,t,c or g
cacagccatggctgtgagaagggactccgtgtggaagtactgctggggtgttttgatggttttatgcagaactgcgatttccaaatcgatagttttagagcctatctattggaattcctcgaactccaaatttctacctggacaaggactggtactatacccacagataggagacaaattggatattatttgccccaaagtggactctaaaactgttggccagtatgaatattataaagtttatatggttgataaagaccaagcagacagatgcactattaagaaggaaaatacccctctcctcaactgtgccaaaccagaccaagatatcaaattcaccatcaagtttcaagaattcagccctaacctctggggtctagaatttcagaagaacaaagattattacattatatctacatcaaatgggtctttggagggcctggataaccagggnggggagggtgtgccagacaagagccatgaagatcctcatgaaagttggacaagatgcaagttctgctggatcaaccaggaataaagatccaacaagacgtccagaactagaagctggtacaaatggaagaagttcgacaacaagtccctttgtaaaaccaaatccaggttctagcacagacgggcaacagcgccggacattcggggaacaacatccttcggttccgaagtggccttatttgcagggattgcttcaggatgcatcatcttcatcgtcatcatcatcacgctggtggtcctcttgctgaagtaccggaggagacacaggaagcactcgccgcagcacacgaccacgctgtcgctcagcacactggccacacccaagcgcagcggcaacaacaacggctcagagcccagtgacattatcatcccgctaaggactgcggacagcgtcttctgccctcactacgagaaggtcagcggggactacgggcacccggtgtacatcgtccaggagatgcccccgcagagccccggcgaacatttactacaaggtctgagagggaccctggtggtacctgtgctttcccagaggacacctaatgtcccgatgcctcccttgagggtttgagagcccgcgtgctggagaattgactgaagcacagcaccgggggagagggacactcctcctcggaagagcccgtcgcgctggacagcttacctagtcttgtagcattcggccttggtgaacacacacgctccctggaagctggaagactgtgcagaagacgcccattcggactgctgtgccgngttcccacgtctcctcctcgaagccatgtgctgcggtcactcaggcctctgcagaagcccaagggaagacagtggtttgtggacgagagggctgtgagcatcctggcaggtgccccaggatgccacgcctggaagggccggccttctgccctggggtgcatttcccccgcagtgccataccggacttgtcacacggacctcgggctagttaaggtgtgcaaagatctctagagtttagtccttactgtctcactcgttctgttacccagggctctgcagcacctcacctgagacctccactccacatctgcatcactcatggaacactcatgtctggagtcccctcctccagccgctggcaacaacagcttcagtccatgggtaatccgttcatagaaattgtgtttgctaacaaggtgccctttagccagatgctaggctgtctgcgaagaaggctaggagttcatagaagggagtggggctggggaaagggctggctgcaattgcagctcactgctgctgcctctgaaacagaaagttggaaaggaaaaaagaaaaaagcaattaggtagcacagcactttggttttgctgagatcgaagaggccagtaggagacacgacagcacacacagtggattccagtgcatggggaggcactcgctgttatcaaatagcgatgtgcaggaagaaaagcccctcttcattccggggaacaaagacgggtattgttgggaaaggaacaggcttggagggaagggagaaagtaggccgctgatgatatattcgggcaggactgttgtggtactggcaataagatacacagctccgagctgtaggagagtcggtctgctttggatgattttttaagcagactcagctgctatacttatcacattttattaaacacagggaaagcatttaggagaatagcagagagccaaatctgacctaaaagttgaaaagccaaaggtcaaacaggctgtaattccatcatcatcgttgttattaaagaatccttatctataaaaggtaggtcagatccccctccccccaggttcctccttcccctcccgattgagccttacgacactttggtttatgcggtgctgtccgggtgccagggctgcagggtcggtactgatggagcctgcagcgcccggtgctctgtgtcaaggtgaagcacatacggcagacctcttagagtccttaagacggaagtaaattatgatgtccagggggagaaggaagataggacgtatttataataggtatatagaacacaagggatataaaatgaaagatttttactaatatatattttaaggtttgcacacagttacacaccagaagatgtgaaattcatttgtggcaattaagtggtcccaatgctcagcgcttaaaaaaacaaattggacagctacttctgggaaaaacaacatcattccaaaaagaacaataatgagagcaaatgcaaaaataaccaagtcctccgaaggcatctcacggaaccgtagactaggaagtacgagccccacagagcaggaagccgatgtgactgcatcatatatttaacaatgacaagatgttccggcgtttatttctgcgttgggttttcccttgccttatgggctgaagtgttctctagaatccagcaggtcacactgggggcttcaggtgacgatttagctgtggctccctcctcctgttctcccccgcaccccctcccttctgggaaacaagaagagtaaacaggaaacctactttttatgtgctatgcaaaatagacatctttaacatagtcctgttactatggtaacactttgctttctgaattggaagggaaaaaaatgtaggcgacagattttttaaggttctcagacctccagtgagtacctgcaaaaatgagttgtcacagaaattatgatcctctatttcctgaacctggaaatgatgttggtccaaagtgcgtgtgtgtatgtgtgagtgggtgcgtggtatacatgtgtacatatatgtataatatatatctacaatatatattatatatatctatatcatatttctgtggagggttgccatgggtaaccagccacagtacatatgtaattctttccatcaccccaacctctcctttctgtgcattcatgcaagagtttcttgtaagccatcagaagttacttttaggatgggggagaggggcgagaaggggaaaaatgggaaatagtctgattttaatgaa

SEQ ID NO: 8218 - DNA, 440 bp, Homo sapiens
gaagaagacagccccaagtgggtgtccggggagagcctggcctgccaccagcttatgtgatcttgggcaagtccctgccctccctggaacgaagggccagggggctggactttcccacacaacttgctgggcaaagcacgatctgcagctttgaagactcaacagaccctggaccatacggagagcaggtggcccaggcctcagggcggcagtcccggctttgaggctcacgcgagggcctggtatgcagggaccactgctcagctgggcctcggaccttggggatattggacgcaacctggcaaatgaagctgggcgcccaagtctctgggtactccctggaggacactgtctcactgtctcgggttggctcccagcctggaggtcccagatggggactgttctgacaaagctggcatcaccaaggggtaaaggccctg

SEQ ID NO: 8219 - DNA, 773 bp, Homo sapiens
aaaccatgattttaatacgcaagctgtttctaaggcgctgccactggggagggtggctgttgccgcctgcccgggcatcctgctctggcaagcacagcctgagccattcctgcaggggtcccagggtgcagagacctccccacccccggttctgggctgggaccctggctccagggccatgtccagggctctggtgtttgcctgggttggtgcaggttgatgtgctggctgcaggcaggtgtgaccatctctcgtgcctgccacctctttgcccccatggcttttttgctgtgagggagccaccagggggtgatttaaataggtttatttcttcatttacaagaggaatatatttggcttctctcttaagactctgagattcacaatcagcagctctaaaaaataaaggagcagtttggcttccggaaggaagaggaggcaacactcggacctggttcttgtacaacaagaaaacatcgctgggcgccccgctgaggctggagtgggggtggaggctggtctttggaggatgccacccccaccccatcctcttgtcaggccctcggggtaccccagagcttggtggggtgagtattccacctgcttacacaccactgaagccacagccagccagtaactaaggggcaagaagagcattgtccaagctggctcttggggggtcccccattggccacaaaggcctcaccccccaccccacccccgcaccagaaccaccttgattgcagcagaagtgcagggagtgggtgacgcag

SEQ ID NO: 8220 - DNA, 1935 bp, Homo sapiens
agagctggcagtgcctgaccggcgcgtctgacgcggagttgggtggggtagagagtagggggcggtagtcgggggtggtgggagaaggaggaggcggcgaatcacttataaatggcgccgaagcaggacccgaagcctaaattccaggagggtgagcgagtgctgtgctttcatgggcctcttctttatgaagcaaagtgtgtaaaggttgccataaaggacaaacaagtgaaatacttcatacattacagtcgttggaataaaaattgggatgaatgggttccggagagcagagtactcaaatacgtcgacaccaatttgcagaaacagcgagaacttcaaaaagccaatcaggagcagtatgcagaggggaagatgagaggggctgccccagggaaagacgacatctggtctgcaacagaaaaatgttgacgtgaaaacggaaaagacaacagaaacacctggaatggagatggtggcagtacagtcagaccctcagcctcctcggagaaagggcctggtagatctactgtgaaatgaggaacattcatgaacagagttgaagttaaagttaagattcctgaagagctaaaaccgtggcttgttgatgactgggacttaattaccaggcaaaaacagctcttttatcttcctgccaagaagaatgtggattccattcttgaggattatgcaaattacaagaaatctcgtggaaacacagataataaggagtatgcggttaatgaagttgtggcagggataaaagaatacttcaacgtaatgttgggtacccagctactctataaatttgagagaccacagtatgctgaaattcttgcagatcatcccgatgcacccatgtcccaggtgtatggagcgccacatctcctgagattatttgtacgaattggagcaatgttggcttatacacctctggatgagaagagccttgctttattactcaattatcttcacgatttcctaaagtacctggcaaagaattctgcaactttgttcagtgccagcgattatgaagtggctcctcctgagtaccatcggaaagctgtgtgagaggcactctcactcacttatgtttggatctccgtaaacacatttttgttcttagtctatctcttgtacaaacgatgtgctttgaagatgttagtgtataacaattgatgtttgttttctgtttgattttaaacagagaaaaaataaaagggggtaatagctccttttttcttctttctttttttttttcatttcaaaattgctgccagtgttttcaatgatggacaacagagggatatgctgtaggagtgttttattgcctagttgacaaagctgcttttggaatgctggtggttctattcctttgacactacgcacttttataatacatgttaatgctatatgacaaaatgctctgattcctagtgccaaaggttcaattcagtgtatataactgaacacactcatccatttgtgcttttgtttttttttatggtgcttaaagtaaagagcccatcctttgcaagtcatccatgttgttacttaggcattttatcttggctcaaattgttgaagaatggtggcttgtttcatggtttttgtatttgtgtctaatgcacgttttaacatgatagacgcaatgcattgtgtagctagttttctggaaaagtcaatcttttaggaattgtttttcagatcttcaataaattttttctttaaatttcaaagaaaaaaaaaagaaaaccagaaaacaacaacaacaacatgaaaaaaaaagaccccacaaaaacctcattcagaggtcagcaacctcaaagactgaagatagatagcccccaaagatgagaaagaatcaatacaaaagcactgaaaactcaaaaagtcagagttcctcttctctaaatggactgcaacacccctcca

SEQ ID NO: 8221 - DNA, 391 bp, Homo sapiens
aatagattaggtgctaattttcttaatatactaataactcaataagagaaattttgtatctagaagaaaatgaacatgggaaataggcaattcacagataatggcattcatctggcgaataaaaaaatgtgtgacattcagaataaaataaaaatgaaatactggttttcagccatcacttgagcaaaactgcaaagatacaatgagactcaggcattcccatatactgtggatgggagggcaaagaccttcaacctctaattttatttctatttttaaacatgtatgttaaaattttaaatgctaatgtcctcttgacccaataatcttatgtctaagatttgaatctggagataaacttgaacaaatgcatctagatttatgtataagt

SEQ ID NO: 8222 - DNA, 293 bp, Homo sapiens
tgtttcttctgtgagagaacagaacttacttaaaactgacctgtcacttgctcttagccagggaagtctttcccactgggttccgggctgggtggcaggctgagcgtgcagcaactccaggcatctctaccctcagccccctgcacggccaggtgggcctttgtttacagccgtaggcagctctcaagactgtgtttcaggtttacagccactgggcctggggcacacacattgaagagtggggccagggtcctgtctgggggcctgtacctgctctatttcagagcttgtgg

SEQ ID NO: 8223 - DNA, 619 bp, Homo sapiens
ggaacatagccagaagcagatgagccagggtagagggctggcccctcctctcatcttcccttcagtcttaaattgtctccagcgatgggaagaggccagggactgtaacccttgtgctgtgtattctctgagcctctgctcactctcagggccaagcagctcccaagccggggccctctcttggccaaaatctgaggagcagtctaggttacaggctttttggtaggtaggttctggctgcctgttaatgcagttaggccccctgattaggtacagtgagaaacaagctagaacaaccctggcccagaagactgtccactccagcaagatccagggatgatagccttgcagggccactgggagtttgtgcccaagcttctccctcttctctccccagggggcactgggactggtccctgccctcatccttagcctgggccttccccagaggtattaaagagaagtatgattcctctgtcttcagttcttttcaggggcatcctgcccatagtacccagttcccaaggggcccccagtcacgtggtgaagcctagcactcatgcagctcttagggaaccaaaaaccagcactgaaataaagctgaatgactgactgaaaa

SEQ ID NO: 8224 - DNA, 1282 bp, Homo sapiens
ttctcgggggaagaaagagaaactagtgctggttttaagaatgtagctggcttttcatcagaacccttatgctaacctgaccacacttgctctcggggaagttcaagcctgtgatgtgcataaactccaacaagcctggctttggtgttcagcatgcacattccataaatatctcttgcaggcataccccacagctagactgcaggattaaaataacttccaaaaggtgctggattggagtttgttcaaatttctcattaaccactaatgttaattcataccaaatgcaaagtattctaaaccaggctgatgctgttcagtgttcaagttttaaggtggactttcaaacacaatggaagtgtttcaatgggagccagatctcatgagtaaaaatccattttataatagctctgtgatatatcagtgggagatgattcataggggagagatttgaacaagcagaattaagtgttagcaaaaatgctgcattgctttgattcatgtttaaagacctaaatttctatgcacaaggaataaagggcctacttaccaagtgtaaatcacaacataggctaccaaaatatttcttatttgctaggagaacaaagctgtcacggtgcatgatagttggacagagatggctaaaaaagaggcaaattcagatttggaaacagggtggcctcttcattatttattgccaagatctgaaaatcttcaacatcttataagacaacaatgaagtagcccctgaacagcatggagttgctgtgagtttgttcgttgcagacctttgtgttgggtcctgggaatctgagctttgttccctgtgcatggtggataattgaaaccaagaggacatgggatagaccttgtgacagaccaattctgtgacccctgtcttctgggtcacattattcattgttgatttaaatacaggactaccaaacagtacaaatctatcatgagtctggtagaaaagtaaaagtaaaagctgcacacgttacatactgtttattgttctaatgtacaactaactatttgcatataatgtgatttaatttattgctgttttgtgtagaaaaggagaactaatgactgtggatataacccatgttttgtataatatattttatttcttgtgcgaactggtcatttaaaatatctacttcatttgatgtttggatataaatgtgtatgtgtccttgtaaatgtttctatcaagcaagaatgccacgtactcagagtataacaatgtgttctcattaaaaaatacatcccacgg

SEQ ID NO: 8225 - DNA, 699 bp, Homo sapiens
gatttttttcaattacagaatagttacaaattttaccatgttcatctattccacagagcatgttaaaaacaacaacaacaaaaacctaacagcaattacaaccttggtgttgcgtttattctaatcagagtgaatgattataatcacactttgctattttaacataaattggtgctttagagcattaaagaggaagcagcaggccctgtactcagtatttattatttcttgcctcagaatgcaaaacaactttaaagtgtctatattcatatatatgtgcatttcttaagatttaaatacaaactgttgttactccttaagcttcaggctttctgcgaaagctctaagaatatcttcattactatgcttggtcaactggaagatggtattaataaggtcagaattaggaattggattgctctgtgggtcctccggtattgtgcagaggaaagaaaaatgtctttcacaccacaaactgtgtgtctgaaccccagccaaacaaatgtgttccattggtccaatatataagcattaacaacaacaacaaaaaatttaaaacaagtaaattaatgcattcacatgatcacttcttgaaaatggttcaaagcatgttttcctgatggtgggattgtttaaatgacatgttttaaagtttttaatactttattagttatgaagtgcttcttttatatgttaagt

SEQ ID NO: 8226 - DNA, 425 bp, Homo sapiens
ggagagacgtactagagatgaatttttgagcactttattcagactataaaacaggaaatctctaattttcctcaagtgggggcttttgaattccctcaaggcaagtccctttgcaggtgaaattaattggtggattttcagaatggccgccctggagccgagcttcagccacgcctgacgccctggcctctgaatctccactgtctctgaggtgcgctggggccacaccgcaggggtttcacctgcttgggggggtccacactagggcttgggggttcacacagcattgtccctgggctgagcccttgggtgggctagagctgcagtcctcagacatggctgcaattccagcgaggccaagaccaccagccacccagtggacttcgggtctctggggtgttctcctcatgcagccggggcagagg

SEQ ID NO: 8227 - DNA, 1470 bp, Homo sapiens
  misc_feature (1)...(1470): n = a,t,c or g
cagccgaggcgaggaggtgggcgagctaagccggggcaagctctattccttgggcaatgggcgctggatgctgaccctggccaagaacatggaggtcagggccatcttcacggggtactacgggaaaggcaaacctgtgcccacgcaaggtagccggaaggggggcgccttgcagtcctgcaccatcatatgagtgttctcaccaccacttatgcccctagaagggaaggggagagggaaacgtgccctctgtttgatccttgttttgtgacatttttttttttttttttttttactcaaagttaacctacctgtaactttttaaaaacttgtaaaataactgaccctcccttcctgtccgccctcttcccctctaatgctcacgctcccaacacaaggtgggcagggaggcaccattcaggaacctggaccaaagctgacgaggctggggccaagccaggggatggggccacagccagaaccccgagccctacttccaggttctgggttagctcagccccagcccagcccagttgattctgcccagagctggggtgagtgggggagacacctcagagccccgcaaaacccacttgaccggagggcaaaagggcagtgggggcttgggggtagtttttccatggggtcacagagaactagttgggttggctctgagaaggggaggacctctgggctttgattccatctccttgtcttttttctttgtttttagagacagggtcctgttatttcccaagctggaatgcagtnnnnnnnnnnnnnnnnnnnnnnnnnnnnnnnnnnnnnnnnnnnnnnnnnnnnnnngtgatcccatttcttaatcagtgtagccccaagaaggctggggctatttaccagggtagaaaaaggagcttacctcccacctttggtcctaagtccctgccccctccccttcacaccataactaggtaacagtttgataactagggaagaaagcagaacagttaagcagccgccacatccccgctggctgggggcctcactccaggaaggggctggactggctgtcctttccagtggcctggctccgctgtgtggatggggagatcggggccagaggcagaaccctggtgaggaagctccagtcctgctctctacccagcccatcttgcctccatggtgcctctggaggcctctgggcctcctctaacaggggctggtgggcaccaagagccaatggagtagacccctggctggtaagggccaagtcccaccggttgcttctgggaaggggtttctaacactagtctgtgtgctgtggttcctggggtgccctccactgccctctgttcagtaacagggccttgctaatcgggttgtcactcaacaaaagtgctttggatttaagttactatcctggctttgcccaacctcagcaacctgtaagactgataatgaaataaatcatgttaatcctaaaaaaaaaaa

SEQ ID NO: 8228 - DNA, 1589 bp, Homo sapiens
ttttttccctctcatcagcatgttatggaatacaagggcactggagtcacatgaaataacggcatgggtagtttacatgaagtttccagatttcacattgagagaaaccatacatcccaatgaaagacagttcacaaagcaaggttctagttacggtaacacaatgaatatgtcacaactttttttttctaaccagactagaaaaaaatttcatcaaaaagtaccttcaaccttctctattttaatctgaggggaaattaagagaatctcaaaagttactacagagtttgggtaggctagatacatttattaatagtaaaagcaaccatggcaaaagcaaccatactcattcttgataatgaaaggatcttctatatacaaacctagcaaattaaaaaaaaatactaaaacaaagtgtctgaagataatgaaaggcagttcaattcatgtaatgtcaagtaactttcaattgtaatagaatcatttatattcttatagtgccttacagcatattttatcgttaatgagaaaatgaaccaaaactatagtgctaaccctgaaaccttaaaccgaaccttacaaagttaaagattaagtgttggtcagaaggaaaaggatgcaaccatgcatcttccacagggaaaatgaaaatagcaagcatggcagaaatgctgaactcatgggtacaaacacacttttctttataaaaacaaaacaacacacacacatacacacagaaattattacaatgcaaatcatcatgtgtctctattttctaccagctggtgaacctgttattaaaatttaaaagaaaaaatcaattaaactttttctattttaatccatagaaatattcagtaacataaatacaacatttgttgcatattaatgaatgtgtggcttcttgtgctttccatccaaattagaggtaaaaatccccaatgactttattttcaatgagatatagttgtaaagttatattaaacatctacacaaaaatcaatctttccttcaaccgaattctatatgaaagtactaacagtgaagattcatgatgttgtgtgaaaatggtgactcataacaatgtagactcagctacagattttaattcacaaatatatatatgcgccttgtgtatgacaactgtatgaaaatagtctcaaaaataaagacaatacttgagacacaaagcaacccattttccctgattttgcattctattacagggaaaataagtctctgatgcttcataaatactttaaaaagttcgggatggccttaaccatgcatagtctccaccaatcctttgaagcttccagcatctcaggctaaccatttcagctgtgaagaactgtaccctgtaatcagttatgctcatttatgtcctgtcttttctagatctgggagttttctgaccagggcctggtggttcattctgatgctagcaaggagtcccccttcaatgccgtctgaaccagtgtaactgatttcttcaccactcagggtagtcatatgcccccctagggcttttaagatggcattaccagcacatatatcccactttttgatgtatgtcacatggatgtata

SEQ ID NO: 8229 - DNA, 915 bp, Homo sapiens
caccaaagtcatcgacacaaccgcactgccggtgtatcccaagaagatcagacctcttgagaagcagggacccatggagtccaggaacctctggcgggaggtgacccgatacctgcggctgggggacattgacgcagccaccgagcagaagcgtcacctggaggagaagcaacgggtggaggaacggaagcgcgagaacctccgcacaccatggaagcccaaatattttatccaggagggcgatggctgggtatacttcaatcccctctggaaagcacactgatggggtggaggtgcagagctttccagtatagccctgtttttgtaggaatattaaagtagtagagtatcagggttttgttggcattcactgagaccttgtattagcatccaagaaatgatgagagagagagaaattatatactatgaaaagtgcacccccacactctgctagaggaatgaatttattcaagagccattcggggcacgtgtgtgtacacacccgtatacgttcacacacatgcactatgtaaacatctgagtatgattacacatttaaatactgcactcaccaaggttaaagtgggtaatcataagctcctttttatcaatgaagtttgaagtttttctatttttcactttgccaaaaatgttttacactcacaaagatattctcacttagtcaactcctgtcaaaatgaaggtgaactggcatggcccgatcactgtccataagggagaaagtggctcattcctggtagaagtatgggtggttatcatttcaaaattattgtgattctcacctccctccccacctcagtgttttgtctgtccgcgcccaagaaagataagcaagtatttcctgctggatgggggttggcaggaagctgttaaagatttatgccagagccttgc

SEQ ID NO: 8230 - DNA, 1611 bp, Homo sapiens
cgccaagcttggcacgagggcttcgatgaggtgttctggtttggagacttcaacttccgcctgagtggcgggcgcacagtcgtggacgccctcctgtgccagggcctggtggtggacgtgccggcgctgctgcagcacgaccagctcatccgggagatgcggaaagggtccatcttcaagggcttccaggagccggacatccacttcctcccatcatacaagtttgacatcgggaaggacacgtacgacagcacctccaagcagaggacgccctcatacacggaccgcgtcttgtacagaagccgccacaagggtgacatctgtcctgtgagctactcttcctgccccgggatcaagacgtccgaccaccgccctgtgtatggcctcttccgggtgaaagtgaggccgggtcgagacaacattccgttggcagctggcaaatttgatagagaactgtacttactaggaattaaaagacggatttcgaaggagattcagaggcagcaagcactacagagtcagaactccagcaccatctgctccgtttcttgaagtttgctgaacgaggactcacagctgcaacgtggggtgattgtattgatcaaaacccactgggaaggacaaagagtttgccgcctttcggggatccaagggactgtggcgaccgtgcctgctgtgccagcgtcccaggaaggaagccaaccctgagcgagcctgtcctctgtggcaggtccacacggtgtgggtgggcagggcttggacccccgtctccatggcaggtccatacagcatgggtggcagggtttggacccgcccagcagcaccacggaccccagccactctcgggggcagacgtcagaatccgttcctgagcagctcccgtgccctgggggcagtcacagagccccccaacacccccgtgctctgcaccagcctctccctccacacccgaagcaggcgtccatctgtgtcctcctggcagcccctcaaacacacaccaccccatgtcacacgggtatccagagcaaggctggatctgggctaggtgacccctggggccttcagacctctgagtgggccccagagcccagctgaggaagccacacagcctccaggacgtggcacggttcccctccacttggctgcaagtcgcctgccatggggcgaggaggcctgcaccccagtataagggcctccccagctgagtaagaagctgcttcccctcctcttgataggcccaagccctattgtgtgaaaacccatctcatggtcttggtgacgtagaccatttttgaaaccgtctcatggtcttggtgacgtagaccgtttgcttctttaactccagccgcggaatgacattagtggaaccgggctggggaactgctggaagttcaggatgccaccaccttgaacacctaggccagggatccccaccatgtcccgggtttctttcttcgagagtatagaaccgttcattcttgcttcgtgtcccattccatctcttgaaaaaatgtagtctttgaatgtgtgaaaatctagggacattcaatctagtcttttaaattatttttccatatttatatttttaaataaatgcatatattgagtctt

SEQ ID NO: 8231 - DNA, 760 bp, Homo sapiens
ttttgttggtctgagaatgatggacatttagacactggcgccaggtttgcgctggaccggcgccacgcaggggtgggcggagcaaagacacacaggtgggctacaggtgtcacacggcaccagccagggcccggggtggctggggtgaggatgggtgtttggccagtgaccaggagtcaggtcaagtccaggtggtcagtgccaggggctccaggaggggagggcagtgccataaccctcctggtgtccagcgtcaccaggcggtcgtcacagaaagcaacctcggcccggggcccggggtcctgcagcaggtgggcagggtcagcttttcttccatggcgggtggcatttgtctgggccggatactggctctcgacccctgggcatgcaaaggctaaggggtggtgctgtcagtcacaccgttgccaccaaggtccccttgggtcggctgaggcttgggatccaggcagcggtggaaggtcgggctgctcaaggccggtatctaagcttctgccctgggacccagtggtgatggccgccatctgccccattcccacagggacctagtcagaggtcgcacacacaaaaggggtacctggccctggagaaccaccagctgcccggggtctgagaacactcaccctggccgctgggccaggcctgccaggctcccggctggtccaacaccctaaacggtacagagcgctgcaggccctcacctcatgcttctgcagcgcttgagggtgaaggtgtctccaag

SEQ ID NO: 8232 - DNA, 603 bp, Homo sapiens
  misc_feature (1)...(603): n = a,t,c or g
ttttcacagaagcaacaggagaactttgacatttattaaaaccatcagcaacatatatgagaaaagacatatttgagtttagttaccaagaacatgtgtcacccgacaattaaaatatggatacccacagtctgctagattttgtaaataacaaaaaaacatgctccttgcctgagtttgtccttaaaaaggagtggcaacatgaaggaacccccctggaagatgggttactttaaaggttgtgttattaacaagtgatgtggtcccacacagctgtgggtcacaataactcattatagtacccacccagagagaccactggctcctttaacaccaagtcctaaaaagctatggcaaaacatttttaaaatgtttacaacattcacaataaagaacagtagcaataaagcacagtagaaataaactgggggtactctcaaaagaaaagatattcctcactccagtcccattttcgngggcaccaattcccttccaccccaacatgcttggatagcatcaacacttgagatatttcttaattcctacctggactgagattaggaaaactgacactactgggcttaaattgggcgaactgttatt

SEQ ID NO: 8233 - DNA, 1155 bp, Homo sapiens
aaggtgtagggccatgaggcctggacctatgctgcaggcaagggtttccatccccgctgccctaggactctcttcccaaggccaggttgggcacctggggaggtcagttcagaaatatctagcagagacctcttaaacccccatcccagcaccccatcctgttgttcccagagctggtctcccatgagtgtgctagagccagatagccgtggccccccacccatctcactcacacacacaggcatccatacaccccagaagacttcccaaatgaggccagactcagggtcacggggaatgtgcttctgcccctgtaaggcttttgggggaagggggcaacatagtagaggctggaaagagcccccaaacctgtacccatgcccctccagccctgcgtttccattctgccttctcagagtgcccttgctgcacccagaccaccggccaggagagaccttctctcccactccagcccctctcactgcccttcaactagagctttcacctttttacatttcccttctgaaggacacaaatctgcttttctgcccatacactggcccaagggctcacctaacttgggagggaaggggctgttggtacaaggatgattttctgttagactgccattttgcacggtctcccccttcccatctgatgtgtcctgcccctcagctctttgccttatctgtgtcactgtcactttagcaaaaatacagcggccatttgtatcagcctctggtggttgcttgtgaggtgggactcttgcgggaacaggtggactttgggaggagtgggcagggagggagtggtagtggcagttctcgagctatctgattaagccattccgctagttcagttgtgccctggagggcaggggacagggtcagtatctctggggctgcaggcttctttgccttggccctcctgggcatggggtaaccaccagctcagctctcctcctccagctttcctctctctagcacaccccagccagggcaaggatgcccacgggcatagctacagcaacccctgcgggatttggtgtccacacccgagaggccagggcagatggggaaagggattagcgcctcttccctcacactctgccagggttgccgggagcttgggccaggtcttaaggtaatgaggtgc

SEQ ID NO: 8234 - DNA, 514 bp, Homo sapiens
tcttgtgtcttctttactgtgactgggtcgtttttaagaaaggttatcagctttgtgtttggtttcccacagttgataaaaatctatcaaaaacattataatttgcaaggaaaaaggtttttcaatggctgcaggaaccagaaagaaatagcatttcttatctgtataaacacaaacatttaaagctagtcacaccgcagtaaaatccaatacagtatgcaaaagttctataaaaatgaacaagagatacacgtttactttcattgctccaacagtcaaatgtaaatctgcatgagagttgcgctgcagcagtttgctggtccaatttaagagttcaaggtcctttttgtacatctggcccactgatgtccacatcccagataaattttcaaaagacggaaatcagggcaaagactccatataacaaagcgcaaggatatgctactaaaagttgctgtccttccatggctaatgcagaaataaatattttggaagcagaaaaactacaccatcc

SEQ ID NO: 8235 - DNA, 846 bp, Homo sapiens
ggatggcaggacgggcaagtacctggcttccctacgcggccacgtggctgccgtgtaccagattgcgtggtcagctgacagtcggctcctggtcagcggcaagttgacagcacactgaaggtgtgggatgtgaaggcccagaagctggccatggacctgcccggccacgcggatgaggtatatgctgttgactggagtccagatggccagagagtggcaagtggtgggaaggacaaatgcctccggatatggaggagatgagacggcccgaagttctctctgacccccacctcgactcggcctctgccagctgccttccctgccagagaacaaaggctgagatggcagtgcacacaccctccccaccagtggggacctgagaatgcgtgtggcctgctgtcctcgatagaccggaatggggttttcccacagatccccgcctgtggcacaccccagagccagaaatcgaaggtcacaggaagttgtcactgaacttggcccgtgtctgctactctgtaccttgctggtacagacaggggtggtgggcagccaggctctatgagtgggcccctagtgtcagctctgtacagggtcagatcccaggttctatgaccaaataagtaacttaagttttgtgtgttgggttctaattccttgtcctagaatccccatgactcaatcaaggactgtgctaaatgagattgtccagcccccgcccttgcactggactacgccaaaaccacactgaccaggcacttgccttccctctcttcccccgtgttggtaagagagaggccagttgtgatagtgggccaaggagaatctagggctgtattgttgtccact

SEQ ID NO: 8236 - DNA, 1089 bp, Homo sapiens
  misc_feature (1)...(1089): n = a,t,c or g
gagggttgagggggcctccccagcgcggcgaaccgtctagcctccggaggccaggccgtgagtgcgggaggtatacgccaaggcggaagaattttgccactcactacctgtgtgacctcgggtaaattagccttggaacgtcagtttcttcgtctctataattgaaataataatagtacctctctcaggattgttgtgagccgtcagtgaaacacttagagcagtttctggcacatggtagaattgggctatttgctgaagcttcttggtggcccttgctagcccaggaagaaacttacattttgatttttttgtaccatggctttggttcacaaattgctgcatggtacttattttctcagaaaattctctaagccaacttctgccttgtatccatttttgggtattctctttgcagagtattccagtagtcttcagaaaccagtggcttctcctgggcaaagcctcctcacagagggaagactgaaggggatttgcaaggagatcaccagaaagaagttgctttggatataacttcttctgaggagaagcctgatgttagtttcgataaagcaattagagatgaagcaatataccattttaggcttttgaaggatgaaattgtggatcattggagaggaccggaaggccaccctctgcatgaggtcttgctggaacaagccaaggttgtctggcaattccgggggaaagaagatttggataagtggacagtgacttctgataagacgattggaggcagaagtgaagtgttttngaaaatgggcaagaataaccaaagtgcactgctatatggaactctgagctctgaggcgcctcaggacggcgagtcttcccgaagtgggtactgtgcaatgatatccaggattccaaggggtgcttttaagaggaagatgtcttacgattggncccagttcaatactctgtatctccgtgtacgtggggatggtcggccttggatggtgaatatcaaggaggacacagttttctccagagggacgatcagatgttttgttacttcatgttcacccccggggggacccctacttgaaagnngtcaagattcccttt

SEQ ID NO: 8237 - DNA, 1582 bp, Homo sapiens
  misc_feature (1)...(1582): n = a,t,c or g
ttttttttttttagaatacctggtttattgggaaaacttcataatgaaaactacaattagctttttccacaacttacaaaataataatctgatatttaaaatgaattggttttcattatgtaagtcgaaatggtaaaaaatcataatgacctatccgatgcatcatatatatgctattcagagaaactcaaatccccgaattctcctgtggcatgttttatatcagacatttaaaatctgtttaccaagaaagaccaggattttaactatatgtaggtttctgcttacagttgcaaactatcagaagcctgtctatatgatagagcccagataaacctgagatttagaaaagcaagtcatttattctcctgaggctgttttagtggcacttttgtgacaagaatgaccctcctaatgctttactacacaacttaaccagatctatcagtcatgataaattagacccagtccatctttcaatccagtctactctggttctgaacatataaacacaaaacactaacaggatttattaaatatagcattttccccacaccctaaccctataaagaactttaaaagagaaaatttcatctaaatatttcacacttaaaggaaagccttaccaactatggcaacaggtttggaccatgaaatagtactttcctagatgacatatcgagtcaacatgaagccttagctaaaatgaatgattcaggatattaatgagaaattctcacaaatgatatgcatttaggaaatgattttgctttccttaaatagttcgaaggcttgaaaataaactttttttttgcatttcttttagaatgtttggtcattaacaacttttaaccttatcttcctcttctccttagcccttaacagaccgagtccattctatttggaaataacaagaacttgatcagattattaaatcttggaaacctcatttttaccttataaagtgttaagtttcacgtgcatattctcttacaaatgtagtataaatgttatggatagatataaggaaatattggcatagtataggtaattagtgaaaagacacaacttcacaaaacataataaaagataaacatgaaactataacactacttaaaaaatattttctcccaaattattttagcatttttgactagtttaataatatgaacactgccaaaaaatgggttcaaagtcgcctggagaaacagtttcttcttctggagtccatctcagcagcagcgattttctcccacattcattcccaagttaggcagatgtgtagaagtacctgggcttggcattgcccagaaggtcatcttcgtagttggggaggcagcagaagaagaaggcacagccaatcaggataatcgtggctgcccaccccaaaaccgtaggcccagttatagatgtaagtgacagcacggttggcatgaagggtgaaggtctgggtgtacttcacggggtaaattacccagggagatgatctggaacacagcagccaaggcaaggagacctccaatcactctcaggangncaagcatctggggtccacagagggcgaagaaggagaggatgaaac

SEQ ID NO: 8238 - DNA, 1579 bp, Homo sapiens
ttttttttttttttacaagtccacacttggccagtttattaaaggcagggagcttcggcagggtccaaaagggagaagttgggagatgccccctcctcagctccctccttccccaacaactcttctacagcccagcccccagggcccagaggcagggctggcgtcaggcagactgtactgcataaatacgtggaggccacagcccgaatcagcagcgtcagggggcagggaaactgggtttgggatgagaagtgggtggctctgggggcacgtcccccagtgcttgtccagagcccagggacccacagagccagagaggggaccagtgggccagcttggggtctggctacggccagccctgcccagcgaggctggcaggtggctctggttttgggggagaagtggggtggggtgtggccatgccacggcccacggggacagggtggggtcaggtgctgttgccctgctcctgttcaaagagtagcatggccagctgggttcgggagccgaggccctcaagcacgctctggaggcagcggtggtacaggtcctcactgagcctcgcgctgcacgtctgggcccggtagcgctgcagcagcgccggctccaccgcccgcagcacatgcagactggagaagtggaggaacagctcgtacacatccaggctctccagcagctcctcttcttgttctggagctgccgccaggcgcccacggcttgccacgtagtcggagttgtagaagcaggcctcgctggctgcctggcgatcaaagcggccagtgtcacggcccagctctgggggcccaggcccttgtggtggggcaacagctgggtggaaggcttggaaatgcatgggaaagaaggcctgcccagccggagatggcatgcatgcggcagcggttcaggaagtcaggcgtgagcaccgtgtctggcccggccagcaggaacagtgtgtccagcgggtgcttcttggagagtagatccatgaggcgcagtggtgagggtgcggctgtctgcacactgagccatggcacccgggcaccggggaaacgccgctccagctctgccacatgggccttgacaggtgcgaagacatctgcatgggccacgcgctgggccctggcgcggctcatacagtagcagcagggtcaggcgtgccgcagcatcaccaggctccagtgctgcagtggcaaaggcctccaagaagccaggggccaggtcacgctcagccgcagctagaggcagcagcacagtgagacgtgaggcctcagtgacatagggcacaggcaagatctccacgcggctcagcggccggagcagctgcactcggcgagtgaggggccggcggcctcccctggggggtcagtgcctccagctgcaagtccagcgtgtattccataccccgggccggatcaaagcgtcggtagccattcaccagctgctgcttctggagccgcaaggccgggtggtagcggcggttcagctcctctagagctgtccccagaacatcggccacatcagcccggtcagccccacgcagtgggcagcggggtgagccatcggcgcaggagaaagcgtg

SEQ ID NO: 8239 - DNA, 845 bp, Homo sapiens
  misc_feature (1)...(845): n = a,t,c or g
tttaactttccaaatactgtttacttcactaaaacctggagcgaggcagggaaaaggtacatcaatgtctgagacaccaagcctaggagtgcacattgacaacggcgacatacagggccaaagtgctgagggccagcagccccgttaccactgctcgggccagtagagctgcccaactgcccagcgagcagaggtggacgaaggtctccataacaaaggccttgtagacactgaggaacatcagcaggaggacagctggccggaaggtgtggtacagatcatagcgtgttatcatccagacctgagcagacgcgacgatgtaatggaccagactgatgttggagtctatgctcatctggatgtacttccagtcaaactcaatgccccgggctccgacccataggggaatgcagcgggacataataagctcagcagtggcccagcccagggcagcaaccatgatcttgtactctcccttgccggcattccgggacatgacaaggtttagacctatcaggtctgccacatccacgctggccttcatgaactccccaatgaagtcatagatgccgcctttcccaggtgggaaagaaagtggccaagaacagcatcttgcagagttggacaaagaggtaggtgactccagcctggacgcatttccagaaggcgttgtactcggacaggccgctgcacttgtaggtgatgaagtaggggaagtaggcaagagcgaagcagttcccgaagtgaaacagggtcatgatgccggccgcccggtacgcccgcgcggggatcgcgaggcggcgtctccgggagcgggntnctntccgccggctcttnngccnacg

SEQ ID NO: 8240 - DNA, 663 bp, Homo sapiens
agggtgaatggtcttgggatggagacccagacgcagaggcggggctggcccctggggagctgcagcagctggcccaggggccggaggacgagctggaggatctgcagctctcagaggacgactgaggcagcccatctggggggcctgtaggggctgccgggctggtggccagtgtttccacctccctggcagtcaggcctagaggctggcgtctgtgcagttgggggaggcagtagacacgggacaggctttattatttatttttcagcatgaaagaccaaacgtatcgagagctgggctgggctgggctggtgtggctgctgaagccccacagctgtgggctgctgaagtcagctccgcgggggagctgaccctgacgtcagcagaccgagaccagtcccagttccagggggaggcctgcaggcccctgggcgccttccaccacctctgccctccgtctgcagacctcgtccatctgcaccaggctctgccttcactcccccaagtctttggaaatttgttcttttcctttgaagtcacattttcttttaaaattttttgttttgcatccgaaaccgaaagaaataaagcggtgggaggcagggccattgtgttgagtggtgggaaggttgccgtcctggctgcaggacgcctctcggaaag

SEQ ID NO: 8241 - DNA, 659 bp, Homo sapiens
gcggccgctccgcaggcagagaagccgggagcgtttgaggcggcggcggcacgagcgatggcaggaatagagttggagcggtgccagcagcaggcgaacgaggtgacggaaattatgcgtaacaacttcggcaaggtcctggagcgtggtgtgaagctggccgaactgcagcagcgttcagaccaactcctggatatggtagctcaaccttcaacaagactacacagaacctggcccagaagaagtgctgggagaacatccgttaccggatctgcgtggggctggtggtggttggtgtcctgctcatcatcctgattgtgctgctggtcgtctttctccctcagagcagtgacagcagtagtgccccacggacccaggatgcaggcattgcctcagggcctgggaactgacccagctggtcctgaaggagaagccaaatggctgcactggccgattctggtctccagaggaccttggtgtttgctctcccttgacccaccccagtgagtgccaaagggcagccccaacatgtgcacccctgcatttcctgtcatgccacagactggcccttgagggcagcctgctgtactggccatgctgggccagccccacctggagctcagtaaaaactgctgtttgattaaaaaaaaaaaaaaaaa

SEQ ID NO: 8242 - DNA, 1808 bp, Homo sapiens
ctcacccctgatattggttcctgatgcccccccaacaaaaataaataaataaattatggctgctttatttaaatataaggtagctagtttttacacctgagataaataataagcttagagtgtatttttcccttgcttttgggggttcagaggagtatgtacaattcttctgggaagccagccttctgaactttttggtactaaatccttattggaaccaagacaaaggaagcaaaattggtctctttagagaccaatttgcctgaattttaaaatcttcctacacacatctagactttcaagtttgcaaatcagtttttagcaagaaaacatttttgctatacaaacattttgctaagtctgcccaaagcccccccaatgcattccttcaacaaaatacaatctctgtactttaaagttattttagtcatgaaattttatatgcagagagaaaaagttaccgagacagaaaacaaatctaagggaaaggaatattatgggattaaggctgaggcaaggcaattctggtggaaagtcaaacctgtcagtgctccacaccagggctgtggtcctcccagacatgcataggaatggccacaggtttacactgccttcccagcaattataagcacaccagattcagggagacctgaccaccaagggatagtgtaaaggacattttctcagttgggtcatcagcagtttttcttcctgcatttattgttgaaactattgtttcatttcttcttttataggccttattactgcttaatccaaatgtgtaccattggtgagacacatacaatgctctgaatacactacaaatttgtattaaacacatcagaatatttccaaatacaacatagtatagtcctgaatatgtacttttaacacaagagagactattcaataaaaactcactgggtctttcatgtctttaagctaagtaagtgttcagaaggttcttttttatattgtcctccacctccatcattttcaataaaagatagggcttttgctcccttgttcttggagggaccattattacatctctgaactacctttgtatccaacatgttttaaatccttaaatgaattgctttctcccaaaaaaagcacaatataaagaaacacaagatttaattatttttctacttggggggaaaaaaagtcctcatgtagaagcacccacttttgcaatgttgttctaagctatctatctatctctcagccccatgataaagttccttaagctggtgattcctaatcaaggacaagccaccctagtgtctcatgtttgtatttggtcccagttgggtacattttaaaatcctgattttggagacttaaaaccaggttaatggctaagaatgggtaacatgactcttgttggattgttattttttgtttgcaatggggaatttataagaagcatcaagtctctttcttaccaaagtcttgttaggtggtttatagttcttttggctaacaaatcattttggaaataaagattttttactacaaaaatgaaatttgtttggacttccacttgagacagtaaagagagtattagacacccagtaaaaactgccatataaagaagttgtaattgtttgttgtgtatgtatttttttcaatgccaaaccagctgtgatccaatttacatccacattttaggtccaacagcaagaagttcagagagagatttcccaaccagacattgggtcactcactggtcaccttgccagtgcattttattagaagggaatctgttgtagcaaatgggaataaacctgggtttctataga

SEQ ID NO: 8243 - DNA, 376 bp, Homo sapiens
cattttcaagatatataaaccacccatttagataagaatgttttgagcagaaaataaatgttttaatatatgaaatatgaatgctttaaaacagtatttgcccatctaagagtgtggagaagaaaagctcaatgattaaaactctaaatagacatagaatcacagaacctcaggatagctagtcaaatcttcacaatgtatttggctttgataatgaggcttatagcaaggctaagcatgatccatgagtttgtctagagcagcactttccaaaagaactttctgcaatggtggaaatgttctatatgtttattgtgattgctgagcccttgaaatgtggctagtacagctgaataaatttttaattttatttaaa

SEQ ID NO: 8244 - DNA, 2215 bp, Homo sapiens
gttcaaggcagcgcccacacccgggggctctccgcaacccgaccgcctgtccgctcccccacttcccgccctccctcccacctactcattcacccacccacccacccagagccgggacggcagcccaggcgcccgggccccgccgtctcctcgccgcgatcctggacttcctcttgctgcaggacccggcttccacgtgtgtcccggagccggcgtctcagcacacgctccgctccgggcctgggtgcctacagcagccagagcagcagggagtccgggacccgggcggcatctgggccaagttaggcgccgccgaggccagcgctgaacgtctccagggccggaggagccgcggggcgtccgggtctgagcctcagcaaatgggctccgacgtgcgggacctgaacgcgctgctgcccgccgtcccctccctgggtggcggcggcggctgtgccctgcctgtgagcggcgcggcgcagtgggcgccggtgctggactttgcgcccccgggcgcttcggcttacgggtcgttgggcggccccgcgccgccaccggctccgccgccacccccgccgccgccgcctcactccttcatcaaacaggagccgagctggggcggcgcggagccgcacgaggagcagtgcctgagcgccttcactgtccacttttccggccagttcactggcacagccggagcctgtcgctacgggcccttcggtcctcctccgcccagccaggcgtcatccggccaggccaggatgtttcctaacgcgccctacctgcccagctgcctcgagagccagcccgctattcgcaatcagggttacagcacggtcaccttcgacgggacgcccagctacggtcacacgccctcgcaccatgcggcgcagttccccaaccactcattcaagcatgaggatcccatgggccagcagggctcgctgggtgagcagcagtactcggtgccgcccccggtctatggctgccacacccccaccgacagctgcaccggcagccaggctttgctgctgaggacgccctacagcagtgacaatttataccaaatgacatcccagcttgaatgcatgacctggaatcagatgaacttaggagccaccttaaagggagttgctgctgggagctccagctcagtgaaatggacagaagggcagagcaaccacagcacagggtacgagagcgataaccacacaacgcccatcctctgcggagcccaatacagaatacacacgcacggtgtcttcagaggcattcaggatgtgcgacgtgtgcctggagtagccccgactcttgtacggtcggcatctgagaccagtgagaaacgccccttcatgtgtgcttacccaggctgcaataagagatattttaagctgtcccacttacagatgcacagcaggaagcacactggtgagaaaccataccagtgtgacttcaaggactgtgaacgaaggttttctcgttcagaccagctcaaaagacaccaaaggagacatacaggtgtgaaaccattccagtgtaaaacttgtcagcgaaagttctcccggtccgaccacctgaagacccacaccaggactcatacaggtaaaacaagtgaaaagcccttcagctgtcggtggccaagttgtcagaaaaagtttgcccggtcagatgaattagtccgccatcacaacatgcatcagagaaacatgaccaaactccagctggcgctttgaggggtctccctcggggaccgttcagtgtcccaggcagcacagtgtgtgaactgctttcaagtctgactctccactcctcctcactaaaaaggaaacttcagttgatcttcttcatccaacttccaagacaagataccggtgcttctggaaactaccaggtgtgcctggaagagttggtctctgccctgcctacttttagttgactcacaggccctggagaagcagctaacaatgtctggttagttaaaagcccattgccatttggtctggattttctactgtaagaagagccatagctgatcatgtccccctgacccttcccttctttttttatgctcgttttcgctggggatggaattattgtaccattttctatcatggaatatttataggccagggcatgtgtatgtgtctgctaatgtaaactttgtcatggtttccatttactaacagcaacagcaagaaataaatcagagagcaaggca

SEQ ID NO: 8245 - DNA, 574 bp, Homo sapiens
  misc_feature (1)...(574): n = a,t,c or g
ctactctcggaagtcagaagctgaaattgatatggaactatttcatcagaatcatcttattgtgaaggttcctccctatcatgaccaacatataacttggcctgtgtcagtgggaatatatgtagtgaaaaatgntggaagatctcatgatgtccacccantcacttacactccagacccagcagcagntggtgcttggantgtaaatgtgaagaaggaaatatctagtccagcaagaccnggctcttnggaggaggccatgaaagcaatgaaaactactggatgtaatttagataaggtaaatattatccctaatgccctgatgactccactcatnccaagcagtntgattaagagtgaggatggttactccaatggangtancgggagaaaaagatcttccactattttnaagatacaaggctttggggctcaactcaggaaacattaggaacatctcaaacatggagggattggtnttttcancaccacaaanttcccncnnncttcttnaanttnaanaggggtccctggtnccgttntgcnnnnnnnnnnnnnnnnncccnnnnnntcc

SEQ ID NO: 8246 - DNA, 1329 bp, Homo sapiens
ttgaaagggtcaaaaattttattagcaggactttttgtgtttttgaatatacaggtttcctgctgtccagggtaaaggggaagtggtgtcttgtggcccgaggtttggggcgcttgccttgggactccatccccatctctttcccgctagcgcagctggggggaaggtgcctgcttgccggccccacggattcttcggctgtggcataaggcactgtgtgttctgcaggaaggcgctcatggctggctggtagatgagaggcggccttctcaggggctgcaaagctgaaggctgttgaggggttgagttgaactttggggcccctagtgaggaaggccccaaggcgatgggagcacgggccctggtgagtctggtgccgctgcctccccactggccctgcaccaggtctcaggatgggatcatgcctttgctcctcttgcggtcggccatggttctccggttgtggttggctcttgtcgccttgttggcttccttcttcctgcgttcctgggttgtctcgcggctctgcccatggcctcgggggctgccggccactgctgttgagctgtcatgccggtaccctttcttggcgagaaaggccatgcgcctggcttctgccttctctctcagcactgcagggtcctgaacaaaatggtcgggcttgggagcctcctcgtcagcatcgtcttcctcatcgtcgtcatcctcctcctgcccttctctaggcactttggttctcagcacctgagggatggtgagttgcctgcggctgatgagctcgtcatcagagtctgcatcattggcgcccacctggttgccatcgtatgtgtcatcgtactcatcctcgtagtagacactgtggtagggcaggctctcgcctggctgcagtggcacctcctccaccaccacgctgtactgctcgtagcgctgccgctgtgccgccactgcacgcttgtcgttcagcaaactccgcgtgttttcctccttcctggtgctcttgcccttgtgcacccggctcaggtctactgagtccctgctgaacacatcaaactcgtcattctggaagacgttgtggcgagacgtcagcaggggtgtagggtctggtttcatttctctgtctaggttgcggtccagctggctgagggtgggggccagccgctcctccaggatattgttgatcacctgctctgggtcgtagtggtagtactccaggcaggccaggatgaagccctcaccaaggtctggcagcaggtccttcacttgggagatgagagagtccagttccaccccacacatggcagggcccacagccgcggctgctcccatgca

SEQ ID NO: 8247 - DNA, 390 bp, Homo sapiens
aataagcaatcatattcttacgattattcacatgtaagtacttaacagtaagggatatggcgtaccattaatacaattaaaaaataatgcgtggagggtaactaagcagcatagttgtatcactggaatacctgtaaccgctattaaacagcagcagatgcagggggctgggagggtctttttccccttggagacgcggaataaactgtgttgtgtgcctgcattttgactgtggtctgtcacatgaggtcaaggtgggaattttttacttgtgggtatttaaaaatgtttgggattttgggagcatttctgattttggattgtttgatgagggacgctcaacctatacttttatattgcattcttaaaaggttgttttgcctaataccc

SEQ ID NO: 8248 - DNA, 1185 bp, Homo sapiens
tcctttttttaaattaaaaaacaatttattgaaaaagagtaatgctttatacaaattcccattataaaaccccaaaatgtctattggtctgtttccaggtgtggtagaagaatataaaaagatcaaaattggataaattctattcgtaacaatttccgttcggtcattttgggccataaaatttttttgtaatgtttggtaactgatatccacatcggaattacactcacacatcatgaagatctatgtatgtggcaaaagccatgttaaattttaacttccaaaagcatatattctcaggtttggaaggcacactaaaatttattaggtccaattcctcataagacacggtggctgactttccttgtgtagtttattatgaagtaccatttccaaactaactatccttagcagcgtccagctgccagctaacagcaagagctctgagggcatcactgaacagatagcaccttatgagttattatgattcaaaaatctcccttgctgttggatttaccaacacgtaggcttttatttcttcccattacatctgtttagccacagaaagcattgggccatactcactgcagaagataagacttcctcagaatcttattcgtttagtgcactcaattttacttcactgtctcatcacttgagagactggttaaggcaagaaacccatttcttaacattttttttattttcaaacatttgaaaagcaacaccaaaacgtatgcagttaattcctcaattctttcccttagtatagcactttttaaattacaaaaccacacttacatgtattctatctcactggatccccacaacatcactgtgaggtgggaagatcaggaattacaaaccaccgcttacagatgaagcaataagcttacagcagccaaatgccttgctcaaacacagacggtgattgatagcaccaagactcaaatccaggtctccagacaccagtgccaacaccctttccattacatcatcttgctcaagtgaaatagcattctgtacagactggaaaagtaagagcagttgttaaaatggaacagagcacaaacatgtcagacacagctgaaagaatggaaatagactggtagagagaggaaggcactgagccacatgaaggtatgtgcgtaggttttgttcagtggaaatagactggtagagaga

SEQ ID NO: 8249 - DNA, 543 bp, Homo sapiens
tttttttttttgaagccacgagttttttttaggcctggctgttgggaagttccaggggaaggggcttcctggagggctccctggaggaggtggggctcagggggggctggactcggaaatcagagagcaggcgggcggtttgcgacgcccgggcggtcgcagggcggctcctggcgcagtgcggagcccgggctgcttgcgggaggaagcggctgaagcccaggccggggtcagaggggagggcgcgtgcggggcggggtcgccgagagaaaaagaggcccccctcagccctgccaaacgcagtcctggcccggagcctgtccgtccaggccgacggcgtaggcgatactccagtcccgctcaaagagctgccgcagctgctcctgcaccgtggcccccgcggcttgcgcgccagggctctgggtgaccaccaagcccactcccgccgtgctgctgaagtaatcctcccgacagttggaggtgcctatgtagggtgccttctccgtgaccatgaacttgctgtggttcaccctgctgaatggg

SEQ ID NO: 8250 - DNA, 686 bp, Homo sapiens
  misc_feature (1)...(686): n = a,t,c or g
tcgctgaatactttttaaaaaaattattcttcacttttttgcctcctattacttgttagggagacccaatggtagttttattccttggggatacatagtaaatacttcattaaagtcgagtacagaatttgatgaaaagtgtggatgtgtgggatgtactgccgccttcagaagtccacacactgcctggagggagagaactgctgtttattcactgattaagcatttgctgtgtaccaactacttttcatgtcttatcttaattctcataacagtcatttgatattttaaaaaaccccagaaatctgagaaagagataaagtggtttgctcaaggttatagaacagactaccatgtgttgtatttcagattttaattcatgattgtctgattttaagttttgttcgcttgccagggtaccccacaaaaatgccaggcagggcattttcatgatgcacttgagatacctgaaatgacagggtagcatcacacctgagagggggtaaaggatgggaacctaccttccatggccgctgcttggcagttctcttggctgcatgctagncaggagccactgttatatgtggccgaggctctggaggaatttaactggctttaaaggaactggccttctgggaggggagnaagaggcacaaggattcacaatttaaccatattacacattc

SEQ ID NO: 8251 - DNA, 164 bp, Homo sapiens
  misc_feature (1)...(164): n = a,t,c or g
ggcacgagatcctgaagagattagctgggagtccaataccttttaaagatttaataggagaaacagttgccatctattgcctctgaagatgaccacttaactctnnnnnnnnnnnnnnnnnnnnnnnnnnnnnnnnnnnnnnnnnnnnnnnnnnnnnnnntttg

SEQ ID NO: 8252 - DNA, 1050 bp, Homo sapiens
gcggccgcagtactgggaggcttccggcggtggcgccagggccagaagcaacaaggccgtcagagtgcatcgtccaggccccatctggggggcgtggatagcgggacttccaaacacagcgcctctgcgttagggtcctgggtcccaagctggccgtgcaagattcctcagctgaagttgtggccaggacccagtcttgtttccccttttcgtcacatgtgtgggtggagggaaatgccaaaccacagcaaaagcaagttgatgccgaagtgaaacacgcagctttattaagacaggggcggtagaagaaggtctccatgctgaacagattacattatggagcccgggagcctgcgcctgggtccccgcccatagagctgcctctggaggttctgggaaatgggccgcagatgcatgaagttgcagaagccacctcgggtacattcccgtgcacagcctgcccgttgaaccagcggttactgagttcagccacggcccgctctccatcctcctcctcacagaacttgacatagacgttgcccacgaggtggtccccaaggttgtcgcacacattcatctcttcaatctccccatacttctcctgcagttctgtgaacacctcagtgtgatccgtctgcagtttgggctgtgttctgtggattccggtacaggttgagcagcactatggtctgcacacgatttaaaaggggcggggcctgagctcagagggcagggctgcatgaacagagagtgaggcatgaaggttgggggtggaaccttacaccccagcctaagcatcatgagtgcatcggcgatcctttgcccctaagaaaccagaaaagggatggaggggactggcaaggatgaacagcgggatggaagggactggcaaagatgaacagccgccgtgtgtagcctgtacgcatgggggcgcgaccaagttcccgggaaaacggcacgaagaccggtgggaggagcctgcagaaaggtccaatgagaaaaaaacgccgggcggtggggagggactcatggaaccctggaatatggcgc

SEQ ID NO: 8253 - DNA, 242 bp, Homo sapiens
ttttctttaaaacagaaacactcataacacaagattatgtattgatctgtggacaaaaatgtaaccagaggctcacaggaacctaaccttgtatttcccctaagaacaatggttcagtgttcgctaattctatcttcatagcaatgctatagacataacaaccatgaataacaagaatcaactgtatagatttcacagtagaatgtgagggttaggtttgtagtgacacagaggcttgaaaa

SEQ ID NO: 8254 - DNA, 99 bp, Homo sapiens
gaagactttgggggatatggggatggaatgaatgtcttttgcatttgaatttggaaaggacatgagttttgaggggccagggatggaatgttatagact

SEQ ID NO: 8255 - DNA, 1036 bp, Homo sapiens
  misc_feature (1)...(1036): n = a,t,c or g
gggggcaagaaggaaacgacatctaagtgagtcacccaaaaattcttacaaaagtcccaggctggctgcagccccaggaaccgagtcgccactgacattaaaaactaatataaaattttacaaaaatctgcttgtcgcagcattcaggtacttgtacaaaaggaggggtctccctacagggctcctgacttgtaacagggacccaggcacctcacctggcatggatgtcctagaagccagaaagggaagaccagacacaaaaatacagtaaaggaaattctctactggtcagccccatagcgctccgagccttcaggttttctccctgcttgcaactcaatccgaaaccccagtcccaagaccctgtgtctatttttaaaaatgctctagcccttttagactctccccttggcttctccagtccctgccttggagcactgcccttggaagagaaagatacgggcaggaagaggcaccagctccccaaacaggcctgagaccttcggcacaagccttcccaaaccccccttcagaattgcagcttgagtctgcagtcctcctgcagcccacactgagccagcagagccacaggagcctgccttatatagcaggcaaagaggaaagggaaaggcccttctcagaagctctagcaccagggacctggaggggtgggtacaactaggcaagtctccaagtagcttgcagaagaggcagatttagggagggaggccccttacctcctccacccactacaaggtcaggggctccctcagagctgcagggagggaaagaaagggtacattcaccaagcatcctgtgccagaagctgtgctggacagggtccaaggtcagcttggcttgatcttctttaagggtcctctctcaccagccagcagcccaagaaacctctgggaggcaccaatgcccataggaaaggaggcctggtgagaaatgtgtgctcgtgccnnnnnnnnnnnnnnnnnnnnnnnnnnnnnnnnnnnnnnnnnnnnnnnnnnnnnnnnnnnnnnnnnacggt

SEQ ID NO: 8256 - DNA, 3490 bp, Homo sapiens
ctgctgctcctggggttcctgctggtgagcttggagtcaacactttcgattccaccttgggaagcccccaaggagcataagtacaaagctgaagagcacacagtcgttctcactgtcaccggggagccctgccacttccccttccagtaccaccggcagctgtaccacaaatgtacccacaagggccggccaggccctcagccctggtgtgctaccacccccaactttgatcaggaccagcgatggggatactgtttggagcccaagaaagtgaaagaccactgcagcaaacacagcccctgccagaaaggagggacctgtgtgaacatgccaagcggcccccactgtctctgtccacaacacctcactggaaaccactgccagaaagagaagtgctttgagcctcagcttctccggtttttccacaagaatgagatatggtatagaactgagcaagcagctgtggccagatgccagtgcaagggtcctgatgcccactgccagcggctggccagccaggcctgccgcaccaacccgtgcctccatgggggtcgctgcctagaggtggagggccaccgcctgtgccactgcccggtgggctacaccggacccttctgcgacgtgggtgagtgagggtctggggcaagcagaaggccagcccccaggtgggacgggcttgccaggaaggaggagggagagtgcggaaagcagatgagagggaggcaggagagcccagccttggctgcccagggagccccctttctcctcagacaccaaggcaagctgctatgatggccgcgggctcagctaccgcggcctggccaggaccacgctctcgggtgcgccctgtcagccgtgggcctcggaggccacctaccggaacgtgacttgccgagcaagcgcggaactggggactgggcggccacgccttctgccggtgcgccgcgtggggctgggtgacccctccgccccagggctccgggctcccggcgctctaacggcgccccgtcgtgtggctacaggaacccggacaacgacatccgcccgtggtgcttcgtgctgaaccgcgaccggctgagctgggagtactgcgacctggcacagtgccagaccccaacccaggcggcgcctccgaccccggtgtcccctaggcttcatgtcccactcatgcccgcgcagccggcaccgccgaagcctcagcccacgacccggaccccgcctcagtcccagaccccgggaggttaggaagtggggggggaaggaggagccgagagggcgccgggcgagctagattccggccagccggccgcgggctccccgtcctcagcccctgctcctccacagccttgccggcgaagcgggagcagccgccttccctgaccaggaacggcccactgagctgcgggcagcggctccgcaagagtctgtcttcgatgacccgcgtcgttggcgggctggtggcgctacgcggggcgcacccctacatcgccgcgctgtactggggccacagtttctgcgccggcagcctcatcgccccctgctgggtgctgacggccgctcactgcctgcaggaccggcgagtacccgcccgcccagagccgccccaggggccgcggctcctccgtctcccagcgcagcttccacgctgcacccgaacccgtgccctaccttctcccgccccacccttctttccacgcccctccggagctcccggggaggaagctggaacacgggattggggttcgggagcagggggcttccccagaacgcttgtggccaggtctgagagcgctgcctctcccctaccctccccgcaggcccgcacccgaggatctgacggtggtgctcggccaggaacgccgtaaccacagctgtgagccgtgccagacgttggccgtgcgctcctaccgcttgcacgaggccttctcgcccgtcagctaccagcacgacctgggtgcgtgggggcgccccgcggggacgggaagagagcttgggcacggcgtccccgcctcacgctcctctccgcccgggttagctctgttgcgccttcaggaggatgcggacggcagctgcgcgctcctgtcgccttacgttcagccggtgtgcctgccaagcggcgccgcgcgaccctccgagaccacgctctgccaggtggccggctggggccaccagttcgagggtaggcacaactgctaggggcaggggtaggggaggagacctttgatcactgggttaggcggaagaagcccgcgactttggtatcgttccgggtgcctacagaatgggtggcgctgacctgatgggttgtgagaatgtgtaggtgaatcccaggtagaatcccagggcctgggattcactgctgggatccccaaatctcctggggatacagggagaatcgaacttgctcttggttccctctgggcgccgggctgcaaaggccaactaggacgctggccccgcgctccgggctagtgtgggagccaggttctgcgactctggatgggtggtgggggaggggtttctgtttccgctccgcccattcaaatcctggcttttctctggacctcagcctccttgcctatgaaattgaattaatggcacctcctccccttcgggcttgctgcgagagaggaagggcatgagtgggtttacaagcgcctggagcagctttgtccatcgtccgggcggcaagcgttgtcagatggggtgtgaagaaggcgctctgtgttcgcaggggcggaggaatatgccagcttcctgcaggaggcgcaggtaccgttcctctccctggagcgctgctcagccccggacgtgcacggatcctccatcctccccggcatgctctgcgcagggttcctcgagggcggcaccgatgcgtgccaggtgagctcttagcccggttggcgcccttccccgaggccgtcaggcacaaatctcaggtccacagcgctgagctgcgtgtttccgacccagggtgattccggaggcccgctggtgtgtgaggaccaagctgcagagcgccggctcaccctgcaaggcatcatcagctggggatcgggctgtggtgaccgcaacaagccaggcgtctacaccgatgtggcctactacctggcctggatccgggagcacaccgtttcctgattgctcagggactcatctttccctccttggtgattccgcagtgagagagtggctggggcatggaaggcaagattgtgtcccattcccccagtgcggccagctccgcgccaggatggcgcaggaactcaataaagtgctttgaaaatgctgagaaggaaagctcttttcttcatgggtccgccgggaaatgccaagacagaaaagcgattcacagcttctccacagctctcagagaacaaggtctatgagatcttaacgtgcaaaatctagatgccagcccagctaatgtttactgagcctaggatactgtataccaagccctgtgcaaggagaagctgcatgttattcc

SEQ ID NO: 8257 - DNA, 2923 bp, Homo sapiens
tgtggagcgaagccttgttcccgcgttgagccgccgccgccgccgccgcctcctcagcttcagcctccgcgccaggcccggccccgccgcgccatgtcggactacagcacgggaggacccccgcccgggccgccgccgcccgccggcgggggcgggggagccggaggcgccgggggaggccctccgccgggcccgccaggcgcgggggaccggggcggcggcggtccctgcggcggcggcccgggcggggggtcggccgggggcccctctcagccacccggcggaggcggcccgggaatccgcaaggacgctttcgccgacgccgtgcagcgggcccgccagattgcagccaaaattggaggcgatgctgccacgacagtgaataacagcactcctgattttggttttgggggccaaaagagacagttggaagatggagatcaaccggagagcaagaagctggcttcccagggagactcaatcagttctcaacttggacccatccatcctcccccaaggacttcaatgacagaagagtacagggtcccagacggcatggtgggcctgatcattggcagaggaggtgaacaaattaacaaaatccaacaggattcaggctgcaaagtacagatttctccagacagcggtggcctacccgagcgcagtgtgtccttgacaggagccccagaatctgtccagaaagccaagatgatgctggatgacattgtgtctcggggtcgtgggggccccccaggacagttccacgacaacgccaacgggggccagaacggcaccgtgcaggagatcatgatccccgcgggcaaggccggcctggtcattggcaagggcggggagaccattaagcagctgcaggaacgcgctggagtgaagatgatcttaattcaggacggatctcagaatacgaatgtggacaaacctctccgcatcattggggatccttacaaagtgcagcaagcctgtgagatggtgatggacatcctccgggaacgtgaccaaggcggctttggggaccggaatgagtacggatctcggattggcggaggcatcgatgtgccagtgcccaggcattctgttggcgtggtcattggccggagtggagagatgatcaagaagatccagaatgatgctggcgtgcggatacagttcaagcaagatgacgggacagggcccgagaagattgctcatataatggggcccccagacaggtgcgagcacgcagcccggatcatcaacgacctcctccagagcctcaggagtggtcccccaggtcctccagggggtccaggcatgcccccggggggccgaggccgaggaagaggccaaggcaattggggtccccctgggcggggagatgaccttctccatccccactcacaagtgtgggctggtcatcggccgaggtggcgagaatgtgaaagccataaaccagcagacgggagccttcgtagagatctcccggcagctgccacccaacggggaccccaacttcaagttgttcatcatccggggtttcaccccagcagattgaccacgccaagcagcttatcgaggaaaagatcgagggtcctctctgcccagttggaccaggcccaggtggcccaggccctggctggcccaatggggcccttcaatcctgggcccttcaaccaggggccacccggggctcccccacatgccggggggccccctcctcaccagtacccaccccagggctggggcaatacctacccccagtggcagccgcctgctcctcatgacccaagcaaagcagctgcagcggccgcggaccccaacgccgcgtgggccgcctactactcacactactaccagcagcccccgggccccgtccccggccccgcaccggcccctgcggccccaccggctcagggtgagccccctcagcccccacccaccggccagtcggactacactaaggcctgggaagagtattacaaaaagatcggccagcagccccagcagcccggagcgcccccacagcaggactacacgaaggcttgggaggagtactacaagaagcaagcgcaagtggccaccggagggggtccaggagctcccccaggctcccagccagactacagtgccgcctgggcggaatattacagacagcaggccgcttactacggacagaccccaggtcctggcgggcccccagccgccgcccacgcagcagggacagcagcagggctcaatgaatcgaatgaatgtgaacttcttcatctgtgaaaaatcttttttttttccattttgttctgtttgggggcttctgttttgtttggcgagagagcgatggctgccgtggggagtactggggagccctcgcggcaagcagggtgggggggacttgggggcatgccgggccctcactctctcgcctgttctgtgtctcacatgctttttctttcaaaattgggatccttccatgttgagccagccagagaagatagcgagatctaaatctctgccaaaaaaaaaaaaaaacttaaaaattaaaaacacaaagagcaaagcagaacttataaaattatatatatatatattaaaaagtctctattcttcaccccccagccttcctgaacctgcctctctgaggataaagcaattcattttctcccaccctcggccctcttgtttttaaaataaacttttaaaaaggaaaaaaaaaagtcactcttgctatttcttttttttagttagaggtggaacattccttggaccaggtgttgtattgcaggaccccttcccccagcagccaaggccccctgttctttccctcccgccctgggttcagctcccgcgggccccgcccgttcccccctcccgggactggtctgttgtctttttcaactgtttcaagagggggtttgaaactgaaaacaaaatg

SEQ ID NO: 8258 - DNA, 51 bp, Homo sapiens
aagtcctttggcgtcatgcaaatctgctacaggtgtggccacgtagcaatg

SEQ ID NO: 8259 - DNA, 943 bp, Homo sapiens
gaactgattctcgttgtcctacacagagacctgaggggcggaacgatgcgaaagtggcgcacaagagcatcgaggcagtggtggctcggctagagaagcagaacggcctgagcctgggccatagcacgtgtccggaagaggtcttcgtggaggcctcgccaggcacagaggacatggacagtctagaagatgctgtggtgccccgggctctgtatgaggagctgctgcgcaactaccagcagcaacaggaagagatgcgccacctccagcaggagctggagcggactcggaggcagctggtacaacaggccaagaagctcaaggagtacggggcacttgtgtctgaaatgaaggagctccgtgaccttaaccggaggctccaggacgtgctgctcctgaggcttggcagcggtcccgccattgatctggaaaaagtaaagtcagaatgtctcgagcccgagccggagttacggagcactttcagtgaggaagcaaatacgtcgtcctattaccccgctcctgcgcctgtcatggacaagtatatcctagacaatggcaaggtccatctgggaagcgggatttgggttgatgaggagaaatggcaccagctacaagtaacccaaggagattccaagtacacgaagaacttggcagttatgatttggggaacagatgttctgaaaaacagaagcgtcacatgcgtcgccacaaaaaaaaagaaagatgcagtccctaaaccacccctctcgcctcacaaactaagcatcgtcagagagtgtttgtatgacagaatagcacaagaaactgtggatgaaactgaaattgcacagagactctccaaagtcaacaagtacatctgtgaaaaaatcatggatatcaataaatcctgtaaaaatgaagaacgaagggaagcaaaatacaatttgcaataaactttggattt

SEQ ID NO: 8260 - DNA, 538 bp, Homo sapiens
ctcatatttgacagcttacagaataacatgagagtgttataaacacacattcccccctccccacctttatccttcctgaattgctttacaagccgtttaagaacaatttaatattcctgtgtgcagcagttcagttttcttgttttgctttctctcatttttctctttaaggctcaattgtctgtttattttcatttgtatttattattgttgttaagtgacaaatggtcattgaaacataataccttacagtaagtaacctcttttttgttcaagtacaattctatagtttttgtgagataaggaactgattctgcttactatttctgtcacattggtagaaaatgtatagcccctatttgcaacaacacgtgaatcatattgagaggaggccagtctgaattatattttttatggaaaaatactttgaaataacttaggcacgaattttaagtacatttcttctgcagttgttttagtgaatgtaatgtatttaaattttaaataaaggacatttattaacctgcaaaaaaaaaaa

SEQ ID NO: 8261 - DNA, 442 bp, Homo sapiens
  misc_feature (1)...(442): n = a,t,c or g
atttcttccttggtttcttttttagctagtttgttactgatatatagaaacactactgatttttgtatgttgattttgtatcttgcaactatactgaatttgtttatgagttctaatcgttttttgatggagtctaggttttnccaaatataagatcatgtcatctgcaaacaaggataatttgacttcttcttttccagtttggatgccctttatttctttctcttgtctgattgctgtagctgggacttcancgttgagntttagacattttcatcaccctaagattacccatcctgcttgantgcagttaatccctgtgcccacccccagccctaggcaatcacagatatgctttgtttctctgtggatttgcttgttttttgacattttatataagngaaatcaaacaatatttggggcntttgcatccggcttcttt

SEQ ID NO: 8262 - DNA, 324 bp, Homo sapiens
  misc_feature (1)...(324): n = a,t,c or g
aaggtaacaggaaaataaccaaacacttggaaattaaataacacacctctatataacccatgaatcaaagaggaactctcaagagaaattttaaaatgcattatactaaatgaaaatgaaaatgtagcatatcaaaatttgtaggacacagctaatgcagtgataatacatacattagaaaagaccaaaagtctcaaatcaataatcaaagctttcaccttgaggaacccaaagtaaaataaatacaataaaagaaaaggcaaaattaaacacaaaggcaaacaaagggntggaaataattaaagaggcttaaatggaattgga

SEQ ID NO: 8263 - DNA, 387 bp, Homo sapiens
gtcgactggccaagccggtgctgtgcctcggaactctctgcacagccttcctgacaggcctcaaccgggtctctgagtatcggaaccactgctcggacgtgattgctggtttcatcctgggcactgcagtggccctgtttctgggaatgtgtgtggttcataactttaaaggaacgcaaggatctccttccaaacccaagcctgaggatccccgtggagtacccctaatggctttcccaaggatagaaagccctctggaaaccttaagtgcacagaatcactctgcgtccatgaccgaagttacctgagacgactgatgtgtcacaagctgttttttaaaatcatcttccaattctatacttcaaaacacacagttggctcaatgtc

SEQ ID NO: 8264 - DNA, 1608 bp, Homo sapiens
  misc_feature (1)...(1608): n = a,t,c or g
gccgccgctgaagccaccgccgggtgcccagcgccgccgccgcccccgagctcccccgcgcccctgcccgcgggcggccggtgggcagcgggcgccatggccgcgccggagccgctgcggccgcgcctgtgccgcttggtgcgcggagagcagggctacggcttccacctgcacggcgagaagggccgccgcgggcagttcatccggcgcgtggaacccggttcccccgccgaggccgccgcgctggctggggaccgcctggtcgaggtcaacggcgtcaacgtggagggcgagacgcaccaccaggtggtgcaaaggatcaaggctgtggaggggcagactcggctgctggtggtggaccaggagacagatgaggagctccgccggcggcagctgacctgtaccgaggagatggcccagcgagggctcccacccgcccacgacccctgggagccgaagccagactgggcacacaccggcagccacagctccgaagctggcaagaaggatgtcagtgggcccctgagggagctgcgcccctcggctctgccacctgcgaaagggacctcagggctatgggttcaacctgcatagtgacaagtcccggcccggccagtacatccgctctgtggacccgggctcacctgccgcccgctctggcctccgcgcccaggaccggctcattgaggtgaacgggcagaatgtggagggactgcgccatgctgaggtggtggccagcatcaaggcacgggaggacgaggcccggctgctggtcgtggaccccgagacagatgaacacttcaagcggcttcgggtcacacccaccgaggagcacgtggaaggtcctctgccgtcacccgtcaccaatggaaccagccctgcccagctcaatggtggctctgcgtgctcatcccgaagtgacctgcctggttccgacaaggacactgaggatggcagtgcctggaagcaagatcccttccaggagagcggcctccacctgagccccacggcggccgaggccaagtgagaaggctcgagccatgcgagtcaacaagcgcgcgccacagatggactggaacaggaagcgtgaaatcttcagcaacttctgagccccttcctgcctgtctcgggaccctgggacccctcccgcacggaccttgggcctcagcctgccccgagctcccccagcctcagtggactggagggtggtcctgccattgcccagaaatcagccccagccccggtgagcccccatcctgcccctgcccaccaggtactgggggcctgtggcagcaagatagggggagagagacccagagatgtgagagagagtcagagacatgagacagagagagagagagagagacacagagangagacagagagagaagcgaagcgacgcgcgcggcagccgcggggcgagggcctttgctgctctgctggggcctgctgactgaaaggaatttgtgtttttgctttttttccaaaaagatctccagctccacacatgtttccacttaataccagagaccccccccttcaaagcccccctccccggccccttgggacgcgctctaaataattgcaataaaacaaacctttctctgc

SEQ ID NO: 8265 - DNA, 1041 bp, Homo sapiens
ttttttttttttttttttaaacttcaaaacaagttttatttgggaagtttctcattttgttaaagctgcaagcaagtttctttcacaattacacttccagagatctagtagttttacggatctcagtgttcaaaagtgtatttcaaaatgaacaaaaccaaacccacaccaaaaggaaatagcgtttagattggtttggaatgtatagccattgatttcaggtgttctcagaaacaggttaccatttccttggaaaacaggtgggatacagtcaatgcccacagaaggaaatgtcttttaaataagttagttactcggacaatattattcactccttagaaaatatagtaggataacaagtcacagctggcagggtatgcagtacagcaccgatttcacagggggcttatgcaatcctggagtcagcggttgttggcttatggtacacaaaataagagcagtcactggaagtggggagaaaatggtgaaaggcaggcagtctcccgcagtcctacccagccttttaacttgctaaaaggagaggctgtgtttttagcatctttgggagaacatttgagacagttcaaaaacaaaaacaaaacccccagtattattcccagaaagtccttgacagaaaagagggacctggtcagggttcccatgggggactgcgcctcccatccacttctgtctccacgtgatacaagacgtcagccagggtgtgctctaccacggcgccccagcccatgtcactcatagggcggtaagtgagatccttcggaggatacttgaagcatggtccaaagttaatggaaaccgtgcagctcttgtacagtgagatggctgggaagtaaaccccctcaaaaatatctttgtaagccacaccttgattgacaccatttttataaaatattatctcactatggggagtctgcttcaggctcttctctgctttatccacaaagtctttttcctcaaaatacaaataactcttgaattttatcaaagccttatctttgtatgtgtctggcaatgacttgg

SEQ ID NO: 8266 - DNA, 211 bp, Homo sapiens
ggaagctgaagcttagcaaagtgaactaagtaaccagagattacccacacagaaggcagtgaagctgaataagagcccgggccatgtggctccagagcccctattcttcacctaccgtatctcagttgccttcaccattttcaacctttttctggctcaaaggtctattaatctgggtcattgtgaatttatatttaaaagtaggcagctg

SEQ ID NO: 8267 - DNA, 448 bp, Homo sapiens
gcgaaacttcatctcaaaaaaaaaagggtagcataaatgctattttaccttagctcatgtacacctgataatttctttctgtgctgttcacacttgagtagggcgtagccttcttggggcactaactgttccactcccaattttgtaaatactactccactgactcttgcttagtatttaggattatggagaagtctgaggccattctcagactctttctcattctctttttgttccgttatcattaatgtgttttctctgcctagttgtcattaattgtatacctaggaacatagtaataggctttccatctcaggaactgggttatttattttaggatccaaggaatattttattgtatttatgtgtctggattactgtttctgatccatttatcgtaagttttttgagaactctttattatatatatattttttatttttcccta

SEQ ID NO: 8268 - DNA, 1900 bp, Homo sapiens
gagagggagcagcgtcacgggcgcccggcccgttaaaacgctgctggctggagccaccatccctccctgcagcccgcaacgggaaatggagtaaagggagacccgtcgacctggccacggggatcagcgatggaattaaagcaatctttgtccacccatctggaagccgagaagcctctgaggcgctatggggcggtggaggagacggcttggaaaacggagagactggggagaaatcagctggacatcatctccatggcggagacaaccatgatgccagaggagattgagctggagatggcaaaaattcagcgtctccgggaagtcttggtccgccgggagtctgagctcaggttcatgatggatgacatccagctctgcaaggacatcatggacttgaagcaggagctgcagaacttggtcgccatcccagaaaaagaaaaaaccaaactgcagaagcagagagaggatgagctaatccagaagatccacaaactggtgcagaagagagacttcctggtggacgatgcggaggtcgagcggttaagggagcaagaagaagacaaggaaatggctgatttcctgagaatcaagttaaaacctctagacaaagtaaccaaatctccagccagctcccgggcagagaagaaagcagagcccccgccttagcaagcccacggtggccaagacggggctggcactgatcaaggattgttgcggggccacccagtgcaacatcatgtagcccccacgtggggtgccctgggccatggggacccccccccaccctcttgtctttatagcccccatttcaccggggcccaagagctctccaaggcagaaggggttgaaggcaagcccgtgactgtcaccagaggccatgggcacggcaggcgggcctggccaccctgtacagagtgtagcagtagggagtctctcaccgtcgcatggtcctccccagagcatgccgaacccaggagtctgtctcactgtttatccaaacaccaggaaaggtcctccctcaaaaaagcatatctccacttctctctagctgtatctaacccaccgtgtgaatgaactgggagaggggcatgctccccagctgtgtgtagtcgtgacttctcaacaatctagcaccatgtcggacacgttccccatccaccctcctaggctctgctctcagagctagggcacatgggcacagggtcccctcccgtctgtcctctcccaggcaactgtgccctggagggctccacatgggcccccgtgtctctcgggcaccacccatatagcagtcccagagggcccatctgtaaagatcgagcttgtgtgtggtgtcgtggtcacatctcccgcttccccccatcctgtgtctgggcacaagttcacatcaaggacaagcgtccattgtgctctcagtctgcctcaggtgtgtgcctggagggggcctggactggcatggatccagtgtgcagaagagccagcagggaacccggaagctctgatgtcaaggccagagcagttgagaatgggacccagagtagatgctgacctgggcactccaccattccggggccacccacagagatgcccagcaggatgccactttgcccagcccgacacacggacctttgtaaagaacagcaacaggcaggagaggcagcgtgtgaccagattgtgtcccgtcattgggtggcatatgttaactagctgccaaacaacttcaacccgtgtaattcatgtacatttggcaacagccagcccggtacagcctgtgtgacttctctgtatgtgtgtgtgtgtcgtgaccagcctaagtagttagcataactcaagatgctgatgtgcaggtcacccatcagagaaaataaaaatggaaaccacgtttcacagcaaaaaa

SEQ ID NO: 8269 - DNA, 1683 bp, Homo sapiens
gcacgaggaaacagttctatttgttttataattttgaatattggtttttacctatgaaattcccttttattaaaataacatatgaagaaatccctttacctatcagaaacaaaacactctctggtttataaaacaccttaattctactgctcttttttctccaatcaccagcatctgtttttcagggggtgattttacttttgtgaattccttagcctttcttccttggtgcataaagttaaaatgcacatcagcagaattgctgcatattaacatctcaggactcttctcttgtaaagaagctgaaattcgtactatattggccaaagtgagcgagttaggtgatcttggttccaatttccgagcctttgttaatatggagaattatggttcatatcagttatgtaggacctttggacccagggtcctacagatagatatggtgtgcccagattttaaaaataccttcaaaaataaaaaatacattcagtgacattttcatggtgggagctcttctttcctgatatggcagttacactttttcacttaagtgctttagtttagactaactttacaacttctataacttttggaaccaagtttagtatagtctgattacattccattcacctaactttagacattcgtttagacaccataactggagtgattgtgcttctagatgtggcaaatccagtggttaacacatatttctggctgagattttggaactagctagtaactggcttgtgttctttaagcatactaacatcactaaatcttaggatttaggattgctgtaaagatgtaagttgtgtatgtttggcaggtcacattgaatggcagtgataatgattaatcaaagaacaaatgtcatccttgatcttgcctaatgtagtttatgtgccaaactttccagggttttgtagtcacctagattttaagctgatagcatagtgcttcagcggttcttctaaccggggtatgcaggaacatggctgcagacacgtttgggtaaacaggcaccttctgacttcttcattgtttcctgtagttctccctcttcccacaaagctgtcagcgcagtggaagaggttgcacttctccgagagaggacaggtttctgttaagatcaccaagtagctgtgctttaattagagccagacaagctttcaaggtcctttaagtatttgatgatcaactgaacacgtttctattcaaggagaaaacaccattcagtaagaagatggagtagatatcagataaaacaattcacgtttaatatgtaaatgtaccaattatgtgattcagtttcaactttcaagtacttcctgagaggttagtacattattattgagctctcacagaaagcttaatcatagatataattaacctgatccaaatgagtaaagtggaccttagaaaggctaagtgatctttctctggctatccagctagtagtaatgaagtcaggtcttgaaccccggttctgctgactgaattggatgcactatagtacaggcttttagcaccgaagtgtgggtcctcagaccagtggctgccaaccagatggttactggtctgtgaaggaaataagtacagatactgacaggaagcttttataaacaatttattggagtgtttttgtttctgttgggtctaattaaaaaaattggagcttgt

SEQ ID NO: 8270 - DNA, 443 bp, Homo sapiens
gatctacagaaaagttgcagagatagtgtagagaattccctcatcctcctccccagtttcccctattgtaccatctcatattactgtgtttcatttgtcacaactaggaaaccaccgttggtacattctgttaactgagctctggacttagtcggatttcactagtttttcatgtaacgtcctatttctgttccagggtcctatccaggacaccacaggacagttgtcatgccccctcagtcttctctgggctgtgacagtttctgtctttccttgttttccatgaccttgacagtttggagagaagtgctaggcaagtattttgtagactgtgctcagttgaggtttggctcatgtttttctcaggggcctagcaccagtgaaggaaacgaagaaatttccagtaaaacaatggggaaaaaatggacccttttccttttggg

SEQ ID NO: 8271 - DNA, 331 bp, Homo sapiens
gacagggggccccattgtgcaacctcttatatagcaaattagagtttaccaggaagtttctgcccttcaggccctctgctctcacagaaactctatgaaggagaggtcatcttgtctatgtttgtaagaagtcacattgagagaaatgacatcttagctcctcttatgtgccaagtagtttgtctgcgttatcttcttaggattgggctccatctctcaggtgagggaaacaggacttgggaaagggtgaagtgactttgcccacctagttaggaaggcacatcatcttctgattcctgtctcatttcatttcaccgcttgtttgccctct

SEQ ID NO: 8272 - DNA, 607 bp, Homo sapiens
tctaactctaaagcacatgttttttcaactatatgcagaaattgcctagccatggacacaagaaagctgggaggaagagttctacttgtggatgtttttaattttttttaaatatcaggagcaatccagggccatacagctatgaagcacttagtgaaaagaacacaagaagatttactaactgaagttagtattagtgattagaaaacaaaactgccagtttgtgcttcattaaggtgaactcatctctccaagcaggaagggaaaatttgctttccctagcagttgctgcatatgtgtgtacagactgcacaattcttaggaatttttgcaaaatggcatacctgtctttctcccagatacaccgccccctgccccccccaaaaaaggtcaggattaaaggtggtgagaagtgaacatttattaaacagaagttaaaccaatagagagaaaggaggtttgttggagtctaagaggattttgaccatgtagaaattccttgaaacagaccttaaaaggtattgaaaaattgaatcacaaagaaagtttacctttaaatacttgttaatggctcctagatcatggttataatttttctcaatgggaa

SEQ ID NO: 8273 - DNA, 498 bp, Homo sapiens
  misc_feature (1)...(498): n = a,t,c or g
acatttcaacatgagggacccactgacagattgtccgtataataaagtatacaagaacctaaaggagttttctcaaaatggagagaatttctgcaaacaggtcacatctgttcttcagcaaagggcaaacctggaaattagctatgccaaaggacttcagaaactggcaagcaagctgagcaaagcattacagaacacgagaaaaagttgtgttagcagtgcctgggcctgggcctcagagggaatgaaatccacagcggacctgcatcaaaaacttggcaaagcaattgaattggaagcaataaaaccgacttatcaagtcctaaatgtacaagagaagaagagaaaatcacttgacaatgaagttgaaaagacagcaaatcttgtcattagcaactggaatcagcaaattnaggccaagaagaaattaatggttagtacccaggaaacatgaagcacttttcccagcttgtaggaaagctcccaaggcaatctatg

SEQ ID NO: 8274 - DNA, 423 bp, Homo sapiens
cttgcccatttccccacctttcccttctcccaccagaagcttgcctgagctgtttggacaaaaatccaaaccccacttggctactctggcctggcttcagcttggaacccaatacctaggcttacaggccattcctgagccaggggcctctggaaattctcttcctgatggtcctttaggtttgggcacaaaccggaattccggggcggggccctcgtccgccgccgcccggccctgcaccacgggagaggcttgggtagtgtgtggacacctagaccacagggaggcctgggaactgcctgagcacctgcaccacgggagaggcttgggtgacacttgggcacctgcacccaacacaggtagcagtgatcacagtgaaaacattttgttagcagtcgtctgctcatgccaggacaggaagca

SEQ ID NO: 8275 - DNA, 207 bp, Homo sapiens
cctttgtattttaagatggtccttttgatggtagaccattaaccatttgtgaccatgcaagaaaaaaaaaattcaaattgctggatcatgttacagaaagaaaccagatacactgagacaaatactacatgaccttacacatatgtggaatcttaataaaaacagacagtgaagccttcatgcaactggtcttagcaaatcagtttt

SEQ ID NO: 8276 - DNA, 454 bp, Homo sapiens
  misc_feature (1)...(454): n = a,t,c or g
caaatgacagacctaactattcctgtgtaaaaacaacaaaaacaaaaaaaaacaagaaaaccacaactaaaactggaaatgtatattttgtatatttgagaaaacagggaatacattgtattaataccaaagtgtttggtcattttaagaatctggaatgcttgctgtaatgtatatggctttactcaagcagatctcatctcatgacaggcagccacgtctcaacatgggtaaggggtgggggtggaggggagtgtgtgcagcgtttttacctaggcaccatcattaantgtgacagtgtccagtangcanatcngntggcaggcaccataagangantggattgcatgtnangantttacttggcattgaggannncttctcantagtanggaattccttnanagatctgtatncctggcaattnacanannnccnntgaacanatgtgtgg

SEQ ID NO: 8277 - DNA, 445 bp, Homo sapiens
aaaggtgagaatgcacaaagacagctctgggttgggtaccacagttttgcttggtagaaagaaaccagtgtaggaaaggagacgccaccagacatcttcaacagacaagattctttctgcctttttcaaaagatgctctctgcagcagtaagactatagatagagttgattggaatatcatgtgacccagtatgctactgctaggcataattatcaaaaattcatttttctcattaaatattgttaattgctcgccacataaagagaagctagagctcacccagtctttggtgggtgttcctaggaccttcctctaaagcagtcttgggaagctggatcatcagatctttagcctagacagagtgtcgctggtaaataaaggagacacaggtaacccagagtggacagtgatttgcgtggggagacacagtggatctggggcctc

SEQ ID NO: 8278 - DNA, 517 bp, Homo sapiens
tcgtcctctctgcatctagctcttcttcctctggctggccaccccaggttctgtgctgtggactcataaaaagtgagctttccttagacctctctgtgcatcccccactttgtaggttcactttggtgtatatgagcctggcttctgagttccttgcatacaaactctgactggtccttctgctccagggcttcagaaggagtgattgtgtccccaccaggatcagtaccaccgccttcacttccccagcccctcacacactggcaaagtctaattgctgtaagcattcctcctgtcacgtcactggtaatggttctgcatccctgactggtacagcatccagcctcagttagaaaaaataaccacctaaaaacccctcagaaaatggaaggatataatgaaacaagaactggaattaagtggaaaaaacttttttacattagacaggatcaagaaagccaaaagtttgttctttgaaaagatgaatagagttgacaaacctctgccaagattgatc

SEQ ID NO: 8279 - DNA, 1124 bp, Homo sapiens
tttttttttttagttttttttgaatatatttacaatataaatactaatttgtttccaaagtacatattcttttaacaatttgagaaaattatctagcatacgacagtaatttaatgtaaagactctatagtagtgattaaggaaaaatagaactgttttggggataaggaatcctggctatgaatgggcatgatgatctgaacttgcaaagggaaagtgaagcagcttagtccacattgcactgctaatacaatatgttaaaggactactatgtgagatagcaacctggatatggtgttataaaaactaaacatgagagatataaaaagtacacatgcttgcatagtgtgttacttttaaagaagctcaacattttattctcattttcaataacttaaatgaacagcacttaacacattacacaaaattaaagacttgtgcatatatttgatttcaacattaatgtcaaaaatacatagtatgattttacataggatttgtgctacattagaacactagagacaaacatcacttgagtattaaggaaaacattaaatattaaataactgagaaaatgtgtaaacactaatctaactgggggttttgctattgcaacatgtccaatgaagtggtttcaacagtacaaaaaggattaggacatgagtttttccagtctacatggaatatatggatttcatttcaggaatcctttcataaaaactggtccaggataacaggagagaatccactctcctgattgttaatttggtacactccattctatgctaatttttacttgcaaacttgggtactgagtaaatactttaaatcatcactccttatcaacatcttggtgaaaactgagggtttgttggtgattcagtgtaagatttgagttcatatgcagcaccgctatcaacctccattgactttctagagaacaggagccgtacgtctctatggaggtagatctttccagatttagaactctggaacctcagatgtatgaggtagcgtaataaccgttcttctgtgtgtcggatgttctctttattaacacttctcttcacttcttgtttaacaggtacagaaaaagttctttgtcgtaggaatgtctgatgatt

SEQ ID NO: 8280 - DNA, 422 bp, Homo sapiens
ccctcagtgagggccgccaccttgatggtttttaatggataatggggttgacctgtttgttccttccacatgtttttatgtttgaccatttgctcagctgagcttgtcttaataattggatttgtggttaacgagccccacatgggcgagagagcggccttcattctgaacccatttaggcagcacgggcagccctcctcgccgtgggcggcattagagcccaccctgcccagtcttggggttgctccttgatgctgtctgggaggcttgctcatggtgacatccttatctctccgtgcacgttaccgcattcagagcttgggtcacgtggacactgaactcaggcgaattttctctgagatcccgggagaaggaggacagttctttggaaggttttccagggctgatcacggaaaggatga

SEQ ID NO: 8281 - DNA, 402 bp, Homo sapiens
aagaggatatcagtcattaaaagtgtattttcgagtcgatctcttctctatgtgggtaatagacaagctagtataattgaatacctgccaacccttcgaaacatctgtaagactgagaagctaaaagaacaaggaaaaagtaaaagaagattcctgcactattttgaaggaattcatcttgacattccaaaagagactgtgaatactttggcagctgacttcccttaatgttccatactaacaatgttttgtatagattatcatgtggtccttaagatacatttttatattatgtggatcttcatggaaaagtatatttctcgatgtacattttaaacaaacaatttgtatatttttttattggcgggtaaatatttaaaatatttgagttacaaattttaa

SEQ ID NO: 8282 - DNA, 193 bp, Homo sapiens
gacagaagctgctggactcactggcagagacctgggacttcttcttcagtgacgtgctgcccatgctgcaggccatcttctacccggtgcagggcaaggagccatcggtgcgccagctggccctgctgcacttccggaatgccatcacccttcagtgtgaagctagaggatgcgctggcccgggcccatgccc

SEQ ID NO: 8283 - DNA, 909 bp, Homo sapiens
ggaaagggggatccccaaggtctgaggtggactaggaaggctttctgaagaacctgggtctgttagggcatcagccaatcaaggtacaagtaaatagaggcaaaatgagggtttgaactgtgagcagttggtcctggaaaagaaagaaaccaagagattatggggactcaatgggcttcttaagagagaataagttgaaatcaatgaccagaagaccctgatggaagtggaggagaatcatctcaggcaaactttttgtgtgccagtaacagaaaccctctttgtgtgatcacatgcaaagtataggatatttgcaatatagccatggggaggagtgcagggcccaagggtagattttagccaggcctcccaggaacagaactcggatccgaaaagcccagagaagctagagctgcccctccaacactctcggatccacatggtctgtgttctctagacccccctgcatgttagcggtgttctctctctgtggactgactgtccttctcagtgaacatgtccacccgacagctcctgagtttatatcatctcaaccctcacaacccacagaggctgtgtctcctagtcacagctttaaattactggaaaaataaatgactggccaaacttggagcaggtgtccatcccagccctgtgtagttagagcaggaatcaagatctcaacacaaatgtggctgccaagcactcagccccggggcgaggggtcaagttcttctcagagaaagaggaataagttggttctcagaagacatcacaagatacgtgtgtacccaacaatctctgatctctgctgatcttttgcttagacgttaacttgatgcatcattggaaaggtgtttctctcatctctgtcctaaggcttgataaagtcattaaaattgtgttctt

SEQ ID NO: 8284 - DNA, 6379 bp, Homo sapiens
tttttttttttccatttgtataaataaaacattttttaattaaaaaaaaaactctacagtacacgtgggggacggcagcgccacgcaggccgtggggacgcagtgtccttctctgacagcagcatcagggctcaggcaggccgggaggatgcatcacagctggcggccttggacggggcagtggctcccccggcctgaggagtgccgccccttgtggccacgctgcccagcaggccggctccttccctctcgggcgccagcagcagctcctactccttctcacgagtccacttgatcatggtctccggtgagcggtagaggaagatgagcttggcgtacaactcctcctccagctccagctcccgagtctcccgcaccaggaagatgtcctggcagagcttgaggatgcggtccacgcacggcagctcctcgaacataatggagtgcgagatctcgctgaagaatccgcgcacgaacttgccgatgaccagcacgatggacacgtacagccccatgatgccgtagccagccaggaagccgaggctcggtgggctgaccttgtcactgaaaatgaccatgggcagcaggttgcagtcggtccggcactcctgcagctcgatgacccaccattcgaggaagccggtggcccccgcaccctgctccctccgcagctggatacgcacgccgaggtagtcggcctcctcattgggctgcagctgcttcacagggttggcttcgggcccgttgggggcacggatgtacttggggaagagattggggatgaccacagactggtccgaggtgccctcgagcaggctggccagctgccgccgtgcagtgctgttgggggccagggccagcatgtgcttctcgttggcatactccacagtgcctcccttcgccaggtccctctggaagttccaggtgaagcgcagggtgatgtcggccgtgccgttgtagagctcccgcttcatctgggcacggctggggggactgatgcgccacagcgccccggagctgccctcaatctgcgccgtgacgatgtcctcagggctgtactggctgatgaactgcatggccagcggctgggggtcaaactgccgggacagctcctcataggcctgggccgtgaaggggatgatggacggctgctgggcgctcatggtgaacagcggctcatagccgcccagcttgagggtgacggtgacatcgatgggctggttgacaaccccaaccacggagcgcaccagcgacatgaagagcagcgggaaccagatgatggcgatgaggaagaggatgatgaggccacccatgccgtacttgacgatcttcttcttcttctgccctttgggctgcgggtatttcttctctgtctctcggctgcatttgatgatgaagatgttggcatagatgtcctccacacacatccagctggacagggacagcgtggtgtccgtccacacccagtccatcactgcccgcagctccaccaggaacggcaccagccggaacccctggaagaggaagaggttgagatgattgtacttcttggtgaggaagttgccgaggatgcgggtggggtagccgcagcggatctggtaggcggacagggcgaagtagatgcacttcacgaagtaccagagctgggccaccacattctggttgaacatcctctcagtgacggcgggcaggatgaagaacatccataggtggatggccagcaccagcgccacctggaaggccagcttgcccagcacggtcttgcgcaggtagagggcgcggtcaaccaccatggtactgaactggatcagcagcatgaccaggaaagcctcgggtacctggtcgtctgatagggaggacgtgatgtctgtggccgccgagtgcttcccaaaggcccagaagccaaaaatgatgatgatgaagtcgacaacatcagccaggaacatgagggcatagacgtcggtggctgcgcggtacttggtgtgcaggatgtcgtggaagaagcgccgtagcggccgatatgtgccctgggccagggacaggcagaagccctgcagccgccgcccggccgcccttactcttcctccagagcggcttggcctcttctctctccccgtgggggcctctttctcttcctccccctcttcttcctccctgtcctcagcttcgatggctgccgctcctttccgtgctgggccctccttcttccttcttctaaaacgtagactgatgcgcctcgtatcacggggcctgagctccacttggggttctggggtcccgtccgtgggtccgaccctcgcttccacctgaatgtggtcttcggtggtggccgcaggcacccctggcccctcctcggctccctgctcctcctcgccgctcttgtcatgctccttggatggtgagtcctcctcatggtcccagaggccatagcacagcagctgggagcggtggaagaaaagggccatgagctgcaccaggtcgtacttgatgtagccgtcagtcttctccaggcccaggatgcggggcgggaagtagggcttgttctcgtagcgccgcagcaccacgtggctgttccaggggaagaacccaaactggaacaggtacttgacgaccaccgcgatctcggtgaagacgatggccgtcatccagaagcgcttgctgggcctcgggatcgacagcatggcccacaggaagacgagcacgggcagcaccagggagccggcggaggccgtgaccatgtggttgaggatgatgatgaagtagcagagcagctccgagtgggcggccacacactggtacacggcccgcagcagccgcagcgcccggccctgcccctccgcaaacagctctgcctcctccagctctgggatgcgcaggcgcctgtccaggagcagctcgctggccgtccgcatcagtccctggtacagagaggcaccagcctcacgctccccggggtcggtgactgcctcctcactgccactgcgcgtgtggtagccggtgctcagggggctgcccatgtcgtctgtcatgctgctgagtggctcctccgcgcccagcccactggacacggtgcttggggcattgggggcctcggtggggcctggcagcgtggcctcggcctggcttgtgtacagctgatccagcacgcccctgtgcacttcgccgccctgcaggagctcctgtgtgaggaggtagcgctctgcccgcagcacgtcgctcatggtgccgtggtgccgggtgaactcctgcagccagcgtgtcagctcatccactagcgcctgccccagcatccacaggaactgcgccgtgctcagcaccctctgcaccacatggctccggcctgccgctgcctcctcggggccctctgctggctccacctcctggctgggaccacctcctgtgggtagctgtcctgcctgttcctgccttgcctgctcctgctcctgctgccgccgcctcagcaccgcctgggcgttggtcacccatgcctggtacgccagctggaaggcactctgtgccgacggcctcgggtcttcaggaacagcctcctcctcttcctcactgtcggactcaaacaggaagtagtccccggagtggatgactgtggcgtggtccagccagggccgccaccactgcctccgtggcggggaggagccccctggactgtcgggccctggctccaggccggggtccttggggcccagggtgtcctgggggcgactgcggtccacccggccctgcctgtgcttctcctgcttggcacggatacgctccatctgtcttttcagctgggccagggacttctcctctatcctgcggtggaagtcaatgctcttgaggttggcagcgttgtagagggcgaagcccctggaggctagcagggcggtggcctggaggtcggccctgacgtgcaggtagtaatggctaaggaagacgcggcgctgcagcagcaggaagaagaagcagacgctgtcccagatgatgccagcctcctccacaggcagcaggcagtcctggtctctgtccatcatctccttggggtcatagtagcccttgacggtgcatacaaggctgaagagctggatgacccagcagaagccggtctgcatctgctccacgaagacgcaggccaggagcgacagcatgttcttggagatgatgacggtgacgttgtacagaatgaggcagtcccacagcacgaggcgggcccgtgtgtccctctgcagcagggccgtgccgaagagcagcaggtagaagcaggccagcaggtagcccagcccgaagatgctgatgcgggtggcccccgtgacaaacaccaccaccagcaccagccagaacaggtatcggaagacggccaccttcagcatgtcaaggtaggacctgcagtggataaagttgggcacggggttgggctccccccgcagcggctccaggcggtcggtgttgacgccagccatgcgctgccactcctctgtgcgctcagctgagaacacctgccactgctgggaggcgcacagcagcaggagaaagtcgctgatgaggttggtggagttgggggcccggaagaaatcaggcaggtacagccacttgatgagtgcggagttcatggggacggcccggctccagcgccagggataatcaatgcacagggccgggggcatccccaggcacagcaggtactggtacagcaggaacagcgccaggaagaggcagtagttgggccagaggcgggcaatggcctggcggtgcctgcgggtgaggatggccaccagccagcaaccgtgcagggtcaccagaaagttcatgcgctgcccgatcacgttcacggccatcaggaagcagatctccagcccgaatttgtagaagaagaagttgatgaagtacttgaggcagccgagcagatcctggtccagctgctggcgggtgccgctggcaaacacggcctgggcaggcagcggggccagctggtgctgccggcggtagtgctcctggcgccggtacacgatggcctcgaataccagcagcagcagcacttgcaggtggttctggatgtagcccaggttggggaaccctttccgcaccccaaaccagttggcagggtccacgggcccccggtacagcagggactggctgatctccgtgggcagcaagttggtgctgttggggaagggctcggtgcagttgctggaatactcctgggggttgacaaccttgagctggtacagcatcttacacacgatgatgacgcaggtccacacggtggacaggcaggaggccatgggccggaagcgtgggtagggcagggcgaaggcccacagcaccaccagcagcaggttcatcaccgacacctccttcagggccacccagacggtgtacagggccaccagcttgaaaacgtgaagctccagcagccgccgcaggaacacctgcacgcgtgagaggacgtccgagaagccggctgccagctccagcaggcgctcagccaccaggccccacttggctgccccttcaggcacctgcgtggcctggtggggagtggccacgcccagcccctcgtccctggagtcctcctcctcctcctcctcctgctgctgctgctgatgctcctgctgctcctcccgcagcagtggggtcccactcactgcatcctgcctgtgagcccagcgcgggaggcgcgtgccaggcagggacacgtgctccatgtcggtgagctgcatgaagggcctgtggaagtagtgcagctgcaggatgcaggccaggaggaagaagccgggcaccaggatgctggagaagagctcggatacgctgaactgctccaggcccaggtcccccagctgctcgtcggtgaagccagtgaggttgcgccagtaggcagggaagtcctggaactggaaggtgtagacggcgatgaggaccagcatggtgtaggccaccacgagccaccagaaggccttgagcagcttccgccacaggctgtagtagacctggaagagggtgaggcagagcaggaagaggaacatgtagacaatcttgtagaccacgaggcggccggcgaagctgaccacgatgaacatgccagcacacacatagatccagtacttggcgtacacgcccttcaccagctcccccaggctctgcaacagcgtctgcgtccgcgtaggctctgtgtctgccacggtgacctccgtcagcgcagctggagactctgcccacttcagcagcttctctttcacaaactggcgcagcaggagccagaaggtcagggtgtagagcaacatggcaccaaggtccagacaggggtagcgggtgtgctccagccccagctggcgcaggctgacggggcccagggtggtgggcagctcagggcgcaggtccatgg

SEQ ID NO: 8285 - DNA, 792 bp, Homo sapiens
  misc_feature (1)...(792): n = a,t,c or g
gggacaatgacaagttctcctttgatgattttctgggctccctgcagctcgatctcaaccgcatgcccaagccagccaagacagccaagaagtgctccttggaccagctggatgatgctttccacccagaatggtttgtgtccctttttgagcagaaaacagtgaagggctggtggcctgttgtagcagaagagggtgagaagaaaatactggcgggcaagctggaaatgaccttggagattgtagcagagagtgagcatgaggagcggcctgctggccaggggcctgggatgagcccaacatgaaccctaagcttgaggacccaaggcgccccgacacctccttcctgtggtttacctccccatacaagaccatgaaagttcatcctgtggcggcgtttccggtgggccatcatcctcttcatcatcctcttcatcctgctgctgttcctggccatcttcatctacgccttcccgaactatgctgccatgaagctggtgaagcccttcagctgaggactctcctgccctgtagaaggggccgtggggtcccctccagcatgggactggcctgcctcctccgcccagctcggcgagctcctccagacctcctaggcctgattgtcctgccagggtgggcagacagacagatggaccggcccacactcccagagttgctaacatggagctctgagatcaccccacttccatcatttccttctcccccaacccaacgcttttttggatcagctcagacatatttcagtataaaaanagttggaaccacaaaaaa

SEQ ID NO: 8286 - DNA, 2739 bp, Homo sapiens
tgactattcagctcactttaacagttgaacttcaagcgacaatctttgaacaccccttctcatgtgatttaaaatgaaaccatttggaaaagtttcttctagccagtaatagattttttttttaattgctctgccttgtgccgagagatgttcttttaagatgaatcttttgatgtctgataccaccaaatataggtggtagggagagttggaggctggccctttgagcaggccattagcttacttgctgggcatttccgatagcttattgcctacctttttgctggaaacaaactgatttgagaaaacaaaatctatgaagactgcagctaaggattttatcggtagacttaagagcttttgtccttgtggatattttagtggaaccacatcagtctcaatactgtcattttacactgactcagagcagctgacttcaggtccttgccatgatatatatttaagggcaggcattggtaacagacataaagacaacttatctgtttcagcaggaaggattcagtttatgaactctcagaccagatcatgttgaacaaggagactttgatgtgtgtcatgagaaaactcattctttacttcccagtcaatttaaaggccagctatcctgagctactcgaatgaatgcactggttaaacattggaaatagtttgtttatatccttgtctctctctaggccaattgtgattacatgactcgactctacatctcgtcaaacaaggcctaaggtctggttgctgtagactgctcgccctcaacaaataaaatctggttgactagcctccttgtatatacaactattatttgttaagaagaaattatcgtcaattttctactaccttccaatttgtcagctctttttttcctctctggtttttcctatactttacagaaaaagacattgatctatactgccattccctctaatcctgccatactcagtcaaaaggaatgacttaagatgaagatgatcatctgctcgagtctaaaatatacattgtatataagaattggtgattagaaaagcaaaaaacctaaaacttaaatctaggagtctgtatactgtctccatgtctccatgcctcagatctcatctaaatctttgaacagcaccattcaaccaatctgaggccttgacttgcttgtaagatgattctcagagatcggctgagttaaaaaagatgacgacttgattaccaaagaaagtagggccaactttgacaaatctggctctgctgaccctgtcactcccagatgtagcatagactcctaaacagaacctcaagtctgattgaggataaggccttctcctgagctgaaagttctttggcagatgagcaagaaactgaaagctgatgtacctgactggctctgtaagatcagaaaactgtatccagaataagccctatggattaacccctgagtacccagagtaaaaactaatttacagaacttccttattgatctgctggttcttccagatcatattctggctattggtatggctggcctttctgaaggtaccctgcttgtctattttcctgactcagctcttgcctgcctttttcacatgttgctgcaattagactcaccgtgaggacttacagtcaatttcagtctatcttgtgcccaatacaacaaggatttttaatagtaacaacccacacctcacccactaggactcaatgttcacaacaggaaggaccattgctgcatactccttgaccagcaacttttttgaagatatttttaagtgcagagtaggcctctattcctgtatgtaattgttcattttcagcacctggaacctcatctatcgggtctggaaggaatacagcagttcgaaagccgcgtccatttctctccttcagtagtgcagaaatgagtccgattcaccagtacacacagaactgtaccagttcaacctagcaaaagaagaaaagtttccactgtacttaaaatttacagctgactcaaattgcctcacagaattatttgatgtagaaggctagttgtcttacttcagatcagcaggacagttgggctctcagactcatgaccactgagtttgcttgtgttgaaactgtggtttcatccaacatatgctattggacatgattattattccattcaaatggattacagacttcttgaggacaggacaaacttatctctcatggtgtttttttagaatacttttataaccaaggaagaaaccatgccagctgttaccattcaacttcttaagcagagattaagctttttcatatctgttcttatcctggacatcagtagtttttaattgccccagcatccgttccatcttgtaacaactccctggatgtttcttaaaaccacctcttcctattttcagtctgtggtttggacagtctgacccaaccttgagctttgtgggtgaacatgtaattcagacctcatcaatcagcaaatccatctgaactgtggaggagaagctctctttactgagggtgctttagctttgtaggatgaaaacctcaaactaacagggcctaccatgtagagaatgaagccagtgcaggggaaagcagagccaaaatatggagagacttgaatcctgatgacagcgtttgtgcccctggatccaaccgtgcctgaagctagaatatcccctggacttttcagttatgtgaaccaataaatacccttttttgcttaagttaaaaaaaaaaaaaaaaaaa

SEQ ID NO: 8287 - DNA, 309 bp, Homo sapiens
agaaactctcaactgtgacagtaaacatctgagtgatttttagaaccattttaatatctctgctctagaatcgagaatgccctgttagttctgatttttaatatacaaatttgaagccactagttaggcagtaaaatatgtattagaacataactatagatttttacccaatagatcaattagtatgaaatttaggatgatatataagtacaacagaatttattcctttgaggtatgtattttcaaagtgtaatttgtgtaattaagtatgtttattcttagaaagttcatgagcctattaacattggt

SEQ ID NO: 8288 - DNA, 381 bp, Homo sapiens
atacttacatttcaggatttttattaataaagatctattgagtaagattgtattaatttttagttaacagcaacaacaacaacaacaaacacaattacaaaaaaactacttcagtggcttaaacaagtgagaggtgtctttttcttctgtaacaagatgggtgaaggcaggcaacccagggctgaagtagctgcacaaaggatgttcaggaatcaggctgaatatcttcctgctctgccatctgtggtgtgtggcttttgtccaaggtgatcacaggcatgggctgctgtgcattcgggaaagaagaaagggggaagagactcaggttttcttttacccaggctttattcagaaagggacagcctgcatagggccttgtgc

SEQ ID NO: 8289 - DNA, 415 bp, Homo sapiens
cgccaaattacactgctccgacaatgtagatttagaagaggctggaaaagagggtggaaaaagcagggaggttatgaggcttaataaagaagatatgcacttatttggccattacccagcacatgacgacttctatctcgtagtgtgcagtgcctgtaaccaggtcgtcaagccacaggttttccagtcgcactgcgccgggcctgcaactgttccaccttctggatcctccttcagcttctctgactcctgggccaggtgtgtgcatttagctccatgctgaagagctgcagcttctgcaggacatttgtaccatcgaggtcaaaggcaacaagaagtgacatgagtttcagtccatcttcatgaggttccagttaaggcctgtgaattcgcaattgttcttcccgactgcctg

SEQ ID NO: 8290 - DNA, 1897 bp, Homo sapiens
ttttttttttttttttttttttttacgagatttaaatattttattccaacctgtgtaataggggtctcctcctccttgaactgtcccgattggctggggtcacgtggtgagggtcctgggtgaccaggcctagccttggccacatgagtccacacagtggaaaaggcttggctcctgtggtcggcacacacgagactctggttgcgcctgctgggtgtggaacaggcgcaccatcgccatgcctgcagctcacaaagctcctgctggcctgggatgcactgggagcagctgccatgggtccgtcagctgaagtgaaggaagtcctggccctcctgcaagtgcagtgacctcaggttgtcctcaaaggcgccccctgtgaggtcctgtcaggagcagcagattcagctcagtccggtctcctggctctaggaggccactgtggagcctcctccagggccaggggttgggggtggcctgtgtccacctgtcaagtgttctgctcctctgctaatagcggagaggctggaaggagacaaaggccagagagggcagcagccggcactgcttgtaccacaggccctgttggtcaccagaggggaggccccccctgccttctggccttgcctctctacataaggtggctgactctccctgggggcactcggaatggaatgagactaacaggcaatgcctctgctgtttgaccagggcagacccaccttccctccacacacccacccctctgcacaggccaggagtgggaggaggcccctcagacagaaactgcatctcagaaccatcaacagctgcccctgtctgatctcctctggcctctgtcatccccacccctgcaatggagtgagggctgtgaccccgggtccctggatgcttaatcttgtcctgtgtgctggccttggccaggtcacctactctcctgtatgaggccacagcaggtgtccagaaatgcctttcagacgtgccctgcaccccagcacctcctgaacaagttcctgaagacagcccggcagagtggtggacacaagtctctggcctctggcaggacagaggagggactatgcattcctgtcacagtccttggtccttgggcccagcaggaggaatcggagcttggctgcgccccttacccccaccacatcagaatccattacaccacctaccactgctgtcactcaaatgatgctgtcactcaaagccatccttcctggaaaacatttccacacactctgccgctatctgtccttcctcccttgtctctctgctctagagtttgcaaaggaaacacacctgagttcagggaccaggccagcccagtgcgtgttgacaccgtcttaaacaagactctgttaaaactagatgcttctgtaaagcaacatgttccattaggagaatgaaaaggcaaaccacaaaatggaggaagacatttgcaaaaacatttaaaccaacaaagtcgagcagccagaggtgtaggggactcctacaggtcaggagagacgcagcgtgcagtaggccggtggggaaccctgatgagaaacaccgccagagaggaaggaactccagtgtccagcgggcacggggggttgttggtcagactcacacctgaaaccaccatgagaacacactccccaaacggctggcgaccaagtgcccagcccagtgtgagggagccgagcagctgggccctctggctctgggcatgttcctgggcatcatccagagaagctgaggatgcagccacacccacgacctgccttccactcccaggattagacccgaggcagggatgctcacgcaggaggacacagcgtcccttgcaagggcaaaccgggaaccactgccacaggcctgggtcctggcgtggcctctgggtgggggtggg

SEQ ID NO: 8291 - DNA, 419 bp, Homo sapiens
cttgatgataggcattggttgattcagagagatatcacatttggtcatagccttctggaagtccagagggagagaagaaaaggtggggtcatgggcttaatgaatccaatgcaagagagcccagcctgtgtgctggacaattcttatctgactgaatgctgtgggaatccattagaagggagatgagtaagggtagggttacttggaggaggaggaacttgaactaggaggaggaagaagggcaaagaagaagtaatttgagagttgttcttctaaggcatgcttaactatccagcacctcaccttcattccccagctccttcatcaagcgacaactcttgatccgaggaaaacgggatccaccagaaatttgtataagaagggaaattaagtgtttaccttagtctagcccctcatag

SEQ ID NO: 8292 - DNA, 756 bp, Homo sapiens
atcctcaagcgccttggagcccccaaaggctcagcctgccacccctgggctaggcagcaggatccgggccatccaggagtctgttgggaagcagaagcactgcctgctggagctgggtgctcggggtgtgcgggagctggtgcagaacgagatctaccccatcgtcatccacgtggaggtgactgagaagaatgtccgggaagtcaggggtctgctgggccggccgggctggcgggactcagagctgctgcggcagtgccgtggctcagagcaggtgctctgggggctgccctgctcctgggtgcaggtgcccgcccatgagtggggacacgcagaggagctggccaaggtggtgcgcggccgcatcctgcaggagcaggcccgcctcgtgtgggtggagtgcggcagcagcagaggctgccccagcagcagtgaggcctgaggtcatctgatacctgcaccttctccccaagccagcgtggaccctggtgtctatggtgaagctgggccctcccaccctgagccttcctagacccttggactctcagatgcagggcccttggctctggcctctcacccccaaggctgtctctggccctgccgagcctatgggagtcccgggacagagtgcccactcccctctacttgctgctctgggcctccccacctttcctgggggtctccacattcccactagtgggtcttatgtgtgtctgtgtcttctccttaaacactcgccctgggagtcttgttctt

SEQ ID NO: 8293 - DNA, 544 bp, Homo sapiens
gctaacttagtcttctcctttcctctgtctacccttagcaatatataggtaaacatatccagcttgtctaacacatcacagattattagttaacaaggtgtagattaatgagcttttatattgtattgctggatcttttgagttaataacaatggtaacttgtccagaaggcctatcatcattcctagtaggtgggcacagagtaacagatattaagaagcttgctgatgagtcgtcatctagcaaaggccctgtgtagggctatattataggagttacattgacttctggggcattcgaaggtctccccccttatccatgtctctgtcattttgcttctccagccacgacaacacactttcctctccaactgctccctccccaccaaaaaagaaaaccctctaaaaggccaaggaataaatattcttagaagtaaagtatcttcatcccatgctgcctttttcaaagaggtgttaggatatttatcctatttctgtatttcacagtagcttttcaggctgtcctgcttatgtataagctgatt

SEQ ID NO: 8294 - DNA, 334 bp, Homo sapiens
tgcagggctgaaattaaatggatttaaactagactttaaaaaatcaaccaaccaatgagcacattcaacgtgattatgagataacaggagtttcaacataagagctgaagaggaagaaggatgaggatgctgcttaagaagtaaaggggcaggtggaacagaaatgagtgggcagaagaggtacaaataagcagcactgggaatggggaggtaatagggctttgggtaaaagtttctccttggtccccctaccctccttccaggccttcctctaagctggaactaggataagaattaacgagcccagccaggcgcggtggctcatgcctgtaat

SEQ ID NO: 8295 - DNA, 290 bp, Homo sapiens
ctgctttgtgtcacagagtgggacatcacaggctgctgcccacgtggctggcattgcagccatgatgctgtctgccgagccggagctcaccctggccgagttgaggcagagactgatccacttctctgccaaagatgtcatcaatgaggcctggttccctgaggaccagcgggtactgacccccaacctggtggccgccctgccccccagcacccatgggcaaggttggcagctgttttgcaggactgtgtggtcagcacactcggggcctacacggatggccacagcat

SEQ ID NO: 8296 - DNA, 95 bp, Homo sapiens
gaacgtcaagccaagccagaccccgcagccgaaggacaagtgaagcagccccctgagcctcacaaggacctcctggctggtgaggagggggccgc

SEQ ID NO: 8297 - DNA, 376 bp, Homo sapiens
  misc_feature (1)...(376): n = a,t,c or g
agagatgaagcaattgcacgagccaagcatatggaaatgtctctaaaagtgctagaaaatattaaccctgangaaaatgacatgacattacaggaattactgaacagaataaacantgcagacacagggatngctattcngaagaatggagcgtataattgtgnagtngantctacnngaccaaggnatgtaaaatgagnntnacntgcagaagangntggntncactantngaagaacgggatgctgccttgtctaagtgcaancggnttagagcaggagcttcatcatgtgaaagagcagaaccagactttcagcanncaacatgagacatctgactgctgaaaacaatcaagaacgtgctctgaaggcaaagt

SEQ ID NO: 8298 - DNA, 1307 bp, Homo sapiens
  misc_feature (1)...(1307): n = a,t,c or g
ttttttttgagatttaaaaccagatttaaaaccatcagctcccaggagtgtggcctcctccacctgctccccaacttttctggttccaaaggttcaagccaggctcaactcccactcctctagtctccaaataagcgtagcacggagagtctgagtgacaatccactttaataatccagcttccagctcagctgagaacttcccctctcaggtgcaaagggatggcagagaagtctttccaagagggctcaatccactaagagattatggcttagagaagggaacagctcaaagaagcccttgaagagggtgagggtctggaggactcctgtggtgcaggccatctcccggatagagtgcatggcccaattgggggctgcctaaatccagcacccgcagccccagcccgagaagccaagataggtccaatggtggttccaagggggtgtcattccggaccatgagatcctgcaggaggaccttgactttgttggccacctctcggatcaaggcctctgacaccgcgtttgaagcatagcgttgcttgctgttcaccttgatcacggggggcccttgtggaataaaggccggtgggttctcctcatgcttgtccaggtagttgggatgcacagcatgggccatgtctgcgctgatcatgaaggacttgggtatggcttcctcgaaggctgtcgggtgctggcacgaggctgagatccgccgcagcaccagctctgtcagcagtgactgtgctccctgtgcactctcagaccccacctcttcgttgtcatagagtgtgaccatgcgcacgtgaggctctgtggccagggagccagggcctgcacaggaatctatcaaggcctgcagggcacagaagcagctgtgcagattgtccagccgaggagcaaagatgaactcatcataggcaccacccaagaccgcaggctgggtgtctgcaaggcagagctccatctccactatgtacncttggctcagccccagatgggcacagagcagggacatgaggaccgaatggtgccgctcatccacagcattgagaggccctggctcaggagtccccttctccagctcctcctggatggctgtggcaagaatggggactagatgcatctctgtgttgggcccaaagttctcgttgatatttcgctgcagatggatggccaggtgtgggatgcgaagaatgggccgctccacgtgcaccagctgctgctccagccgacctgaggtagggcacttgacaatgacgcgtccagccagagtcaaggtcaccggtcaaaccacggtgctcc

SEQ ID NO: 8299 - DNA, 464 bp, Homo sapiens
  misc_feature (1)...(464): n = a,t,c or g
cccaactccagaaatgtttctttttaaagtacagactctgcactgaattgtaaatcttctttccatagtataatgcacactgtacagaggcttttgggacacaggtttttaaaaccaccaaggagagtcagcgaatataaatgacaattatgtacttaagtaacagaaacttgattatatatatatatttactatttattatatacattaaataacctgggtttctgaagtatacacattgaataaaggaatataatggaaaaatattgacccaggagttaggaaacctgagttctcatgcacaaactcattgtgcaaccttgggtaaattagttaacctttatggactttcacactgtcctctgcaaaatgaggctattggagctgataattttatacttgttttactatttcctcgtgccnnnnnnnnnnnnnnnnnnnnnnnnnnnnnnnnnngagtcgta

SEQ ID NO: 8300 - DNA, 329 bp, Homo sapiens
cttcctaatctcagaaatcgattaatgtagtggttttcccaagcctttctcattatttctcttgggtgtcactggcattgacttccactaaaaaaagatcccatggtcaaatgactttggcatacatacaactggataaaaacaatataaaacagtttttcctgcagaactcttctgagtctgtaatatgctgacacttgtttttaatcttcaagataaggatacagaacttttcatcatgggatagttttttcaaggaacacatcatagaacgtatggtctacggatcaccattaaagttatccatggtttgcctaaacagcttcctg

SEQ ID NO: 8301 - DNA, 456 bp, Homo sapiens
  misc_feature (1)...(456): n = a,t,c or g
tgaagcttgaagcctcttcgggatgtcttccagcgtaatcagcaggatgggcaattggaggactcaccaggcttgtggccaggggcaggtaccatccgcctagagcaggatgtgttttcagccctggcagggcagggccagatatacgtgcatctcactgatggtatctggagtcagatcaagtccgcaggttcagccctctacgcctcccgcctctacctgagccgataccaggacactcacccagaacggctggccaagcacaccccagggggcccatggatccgagggaatgtgtacatccacccgaccgccaaggtggccccctcggctgtgctgggccccaacgtcttccatcgggaagggggtgaccgtgngtgagggtgtgcggctccgggagagcattgtccttcatggagccacttttgaaggagcacacgtgtggtctggatagcg

SEQ ID NO: 8302 - DNA, 2451 bp, Homo sapiens
gctgaagggcagtggaccttgaaatcccaagatctgccattcccagttccgcaacccggagaagcaagggaagctgaaagaatggagcctcatactgtatggcacagcagagcacccgtaccacaccttcagtgcccatcagtcccgctcgcggatgctggagctctcagccccagagctggagccacccaaggctgccctgtcaccctcccaggtggaagttcctgaagatgaggaagattacacagctcaatccaccccaggctctgctaatattttacagaccagtgtgtgccatccggagtgtggtgacaaaggctgtgatggccccaatgcagaccagtgcttgaactgcgtccacttcagcctggggagtgtcaagaccagcaggaagtgcgtgagtgtgtgccccttgggctactttggggacacagcagcaagacgctgtcgccggtgccacaaggggtgtgagacctgctccagcagagctgcgacgcagtgcctgtcttgccgccgcgggttctatcaccaccaggagatgaacacctgtgtgaccctctgtcctgcaggattttatgctgatgaaagtcagaaaaattgccttaaatgccacccaagctgtaaaaagtgcgtggatgaacctgagaaatgtactgtctgtaaagaaggattcagccttgcacggggcagctgcattcctgactgtgagccaggcacctactttgactcagagctgatcagatgtggggaatgccatcacacctgcggaacctgcgtggggccaggcagagaagagtgcattcactgtgcgaaaaacttccacttccacgactggaagtgtgtgccagcctgtggtgagggcttctacccagaagagatgccgggcttgccccacaaagtgtgtcgaaggtgtgacgagaactgcttgagctgtgcaggctccagcaggaactgtagcaggtgtaagacgggcttcacacagctggggacctcctgcatcaccaaccacacgtgcagcaacgctgacgagacattctgcgagatggtgaagtccaaccggctgtgcgaacggaagctcttcattcagttctgctgccgcacgtgcctcctggccgggtaagggtgcctagctgcccacagagggcaggcactcccatccatccatccgtccaccttcctccagactgtcggccagagtctgtttcaggagcggcgccctgcacctgacagctttatctccccaggagcagcatctctgagcacccaagccaggtgggtggtggctcttaaggaggtgttcctaaaatggtgatatcctctcaaatgctgcttgttggctccagtcttccgacaaactaacaggaacaaaatgaattctgggaatccacagctctggctttggagcagcttctgggaccataagtttactgaatcttcaagaccaaagcagaaaagaaaggcgcttggcatcacacatcactcttctccccgtgcttttctgcggctgtgtagtaaatctccccggcccagctggcgaaccctgggccatcctcacatgtgacaaagggccagcagtctacctgctcgttgcctgccactgagcagtctggggacggtttggtcagactataaataagataggtttgagggcataaaatgtatgaccactggggccggagtatctatttctacatagtcagctacttctgaaactgcagcagtggcttagaaagtccaattccaaagccagaccagaagattctatcccccgcaggcgttctcctttgagcaagccgaggttttccttgttaccgtgttctgtctgtgtcttcaggagtctcatggcctgaacgaccacctcgacctgatggcaggagccttctgaggagaggcaacaggaggcattctgtggccagccaaaaggtaccccgatggccaagcaattcctctgaacaaaatgtaaagccagccatggcattgttaatcatccatcacttcccattttatgggaattgcttttaaaatacatttgggcctctgcccttcagaagactcgtttttaaggtggaaactcctgtgtctgtgtatattacaagcctacatgacacagttggatttattctgccaaacctgtgtaggcattttataagctacatgttctaatttttaccgatgttaattattttgacaaatatttcatatattttcattgaaatgcacagatctgcttgatcaattcccttgaatagggaagtaacatttgccttaaattttttcgacctcgtctttctccatattgtcctgctcccctgtttgacgacagtgcatttgccttgtcacctgtgagctggagagaacccagatgttgtttattgaatctacaactctgaaagagaaatcaatgaagcaagtacaatgttaaccctaaattaataaaagagttaacatccc

SEQ ID NO: 8303 - DNA, 228 bp, Homo sapiens
ctgtgaggtaggttgttgttggagccacttcacggtttaggaaattgaggctttgagaggtgaaatcgcttgccttagagtcctgggccaggaagtgatgagattctaactgatcatgggaaggctggccctggagagcacccagaggactgaggaataggtaatgaggccaaggtgaggtggaaacaggcaaaaggatgagctcctcaccccccgtgggcctgctta

SEQ ID NO: 8304 - DNA, 401 bp, Homo sapiens
ggtaaagaaattatttgtgcttgaacttgcagaaaactgccttttcccttcttctcttgcatcttaacctggagcttcccttttcttgagcctcagtgtgcttcccaactcaatttataattgacttcctgcagtttctccttaggacagggctttgttttgggggtggttaatttgtagggttcataggaaacagaccactcacagcactgctttttgccaccctcactctcagctatgagttgaggcccaggaagccttctgccagcctcagctgctgttctcagattaatctgctgagttctttttgcctggtaagaatctctgaatttagggaacatagatgttagcgcttgtatatctagggttttccagttcccaggggccatttaaacattttt

SEQ ID NO: 8305 - DNA, 512 bp, Homo sapiens
tcaaagggaagagtagcatgtttgtacctaggatggaccaagagatgtttgcccagaggagggggttgagcaaagcgacaggttaatagtaaaacaattaagatgacaaggaaaattactgggcttaagatttctaactacatttacttccttgacgaacgcttcggccgtgcgtagactggtcagcttccggggtgactagagcagggctgtggtcactttcactggcatctgggtcctgtcgtaggatcagccggtttggatggtctgggtcttgctggctggtccacttgtcctgggctgctggtttcagccgacgtggtcgccgcggaacttcaagggtccttcctacccgcgttgctgagagtctgggtttacgcgtcacctcgggcgggacccgatcctccgctcctgaggcccccacaatgaagcagtcggacgcgtctccccaagaaaggtaaccgccagcctctcttgtacggaagggggctgcctgcgtgggatgcaatctc

SEQ ID NO: 8306 - DNA, 69 bp, Homo sapiens
ctctgctgatatttagttgtgtgactctggataaggcatttcataacatcaaaatcaaatggagcggct

SEQ ID NO: 8307 - DNA, 208 bp, Homo sapiens
atctgcttgctactaggatcttattcttcactccagtccaggcattgggcggaagggtgaatgcagagtggcacacagcagcagatgggaattagctggctcctcagccttccagggtgggtttttttttgttgtttttgattggagagtccaggtgggtggttgctgtttttccccctttctgtgacacaatttaaggtaaagtaat

SEQ ID NO: 8308 - DNA, 294 bp, Homo sapiens
tgccttaactgtttgcttgcctagtcctgattggtattaaaatattggtggcctatgtttgggagtgtgaaggcttgcctggctgccgtgctgcaggtgtgggtgcatgttatggtgttggtgggaatgctaataagccttggagttgggcctcttcccaaatcccgcctctcacagcctcagtgttgtgtggcctttggtcaagtcattggccttctgagcttcagtttagtaatttacaaaaagtgagcctgttactgcctcttttgctggggtcttttgacgatgaaagtg

SEQ ID NO: 8309 - DNA, 300 bp, Homo sapiens
  misc_feature (1)...(300): n = a,t,c or g
gtaacctcgcaaaactctgtccctacaaaaataaaaattaggtggcatggtctctacaaacatgaaaattaggtggtgcacctatggnnnnnnnnnnnnnnnnnnnnnnnnnnnnnnnnnnnnnnnnnnnnnnnaattttcttttttgttgtatgatttcaactcagcacttcttccctagactccattgtgatgaatgccatttttttccttttgaatgtatccacaatagctgatgttccgtaaaatggcgaggcttaagtgaatttccagagaatttctcagccactggagacgtcg

SEQ ID NO: 8310 - DNA, 2788 bp, Homo sapiens
  misc_feature (1)...(2788): n = a,t,c or g
ggaggggagaccttggcggacggcggagccccagcggaggtgaaagtattggcggaaaggaaaatacagcggaaaaatgcagagctggagtcgtgtgtactgctccttggccaagagaggccatttcaatcgaatatctcatggcctacagggactttctgcagtgcctctgagaacttacgcagatcagccgattgatgctgatgtaacagttataggttctggtcctggaggatatgttgctgctattaaagctgcccagttaggcttcaagacagtctgcattgagaaaaatgaaacacttggtggaacatgcttgaatgttggttgtattccttctaaggctttattgaacaactctcattattaccatatggcccatggaacagattttgcatctagaggaattgaaatgtccgaagttcgcttgaatttagacaagatgatggagcagaagagtactgcagtaaaagctttaacaggtggaattgcccacttattcaaacagaataaggttgttcatgtcaatggatatggaaagataactggcaaaaatcaagtcactgctacgaaagctgatggcggcactcaggttattgatacaaagaacattcttatagccacgggttcagaagttactccttttcctggaatcacgatagatgaagatacaatagtgtcatctacaggtgctttatctttaaaaaaagttccagaaaagatggttgttattggtgcaggagtaataggtgtagaattgggttcagtttggcaaagacttggtgcagatgtgacagcagttgaatttttaggtcatgtaggtggagttggaattgatatggagatatctaaaaactttcaacgcatccttcaaaaacaggggtttaaatttaaattgaatacaaaggttactggtgctaccaagaagtcagatggaaaaattgatgtttctattgaagctgcttctggtggtaaagctgaagttatcacttgtgatgtactcttggtttgcattggccgacgaccctttactaagaatttgggactagaagagctgggaattgaactagatcctagaggtagaattccagtcaataccagatttcaaactaaaattccaaatatctatgccattggtgatgtagttgctggtccaatgctggctcacaaagcagaggatgaaggcattatctgtgttgaaggaatggctggtgggtgctgtgcacattgactacaattgtgtgccatcagtgatttacacacaccctgaagttgcttgggttggcaaatcagaagagcagttgaaagaagagggtattgagtacaaagttggggaaattccccatttgctgctaacagcagagctaagacaaatgctgacacagatggcatggtgaagatccttgggcagaaatcgacagaccagagtactgggagcacatattcttggaccaggtgctgggagaaatggtaaatgaagctgctcttgccttnggaatatggagcatcctgtgaagatatagctagagtctgtcatgcacatccgaccttatcagaagcttttagagaagcaaatcttgctgcgtcatttggcaaatcaatcaacttttgaattagaagattatatatttttttttctgaaatttcctgggagcttttgtagaagtcacattccctgaacaggatattctcacagctccaagaatttctaggactgaattatgaaacttttggaaggtatttaataggtttggacaaaatggaatactcttatatctatattttacataaatttagtattttgtttcagtgcactaatatgtaagacaaaaaggactacttattgtagtcatcctggaatatctccgtcaactcatattttcatgctgttcatgaaagattcaatgcccctgaatttaaatagctcttttctctgatacagaaaagttgaattttacatgggcgggagcctagaatttgatatgtgaacagttgtgtttgaagcacagtgatcaagttatttttaatttggttttcacattggaaacaagtcagtcattcagatatgattcaaatgtctataaaccaaactgatgtaagtaaatggtctctcacttgttttatttaacctctaaattctttcattttaggggtagcatttgtgttgaagaggttttaaagcttccattgttgtctgcaactctgaagggtaattatatagttacccaaattaagagagtctatttacggaactcaaatacgtgggcattcaaatgtattacagtggggaatgaagatactgaaataaacgtcttaaatattcatttactggttatcatgagtacgtgttgagatggtcatagttttttttatgactacttctagtgtatattctaatttcttttctaggcctgaatgtatctttattttcatgttatagggacaatattaagggcatttttaaaggtcatcatcctttcatctattttagatacacctactaaatgtttaatatatacttttggagaagtacaacataagggacgtctttaatctgtgttttccttggctgggttaatgactgtttatttaaagaagtgctgtaaaattggatgtgtggtgtttaaaatggccatgtcctgaggaaacttaaagtaacaaagtactaaatgctaaagtaggcttttgcatattgtaactaaatttaagaataattcagattaagtagttctgaaatttggtatagatagcatagattgtctcatgctcatgagtgacataatgaccg

SEQ ID NO: 8311 - DNA, 233 bp, Homo sapiens
tccgcctacttctccattgaagtgctctagttttggtaaaatcttctccttgacttcaggaccctctccacatttatccccagtctataactcgcatatttcgtgttttcaaacagaaaaccgtaattcaggagtgaacagcatcctctgtaaggtgtcacaggagcagcctgaaatccattaggcagtcattctgaagctgtggtgagatcgaagggaagctaatgttgcag

SEQ ID NO: 8312 - DNA, 554 bp, Homo sapiens
ctcccggagtccaggtcagccagagcagcctccccatgctgtcctcgccgtcaccgggccagcaggtgcagaccccgcagtcgatgccccctcccccccagccgtccccgcagcccggccagcccagctcacagcccaactccaacgtcagctctggccctgccccatctcccagtagcttcctgcccagcccctcaccgcagccctcccagagcccagtgacggcgcggaccccacagaacttcagtgtcccctcacctggacctttaaacacacctgtgaaccccagctctgtcatgagcccagctggctccagccaggctgaggagcagcagtacctggacaagctgaagcagctgtcgaagtacatcgagcccctgcgccgcatgatcaacaagatcgacaagaacgaagacagaaaaaaggacctgagtaagatgaagagccttctggacattctgacagacccctcgaagcggtgtcccctgaagaccttgcaaaagtgtgagatcgccctggagaaactcaagaatgacatggcggtgccactcccc

SEQ ID NO: 8313 - DNA, 664 bp, Homo sapiens
  misc_feature (1)...(664): n = a,t,c or g
tcaggatatgggttgggaatcaatgctgaaggccagccctgcctgctcagtcccagatatcatttgtatgtgacgagccctgcagaggtcctcaccagctgggagtcactggctggtcagattcacgttggcagcacctgacaggatgtggctacaaatgaccagagcgggttctgtcgtcaaacttgggacccgtactttggagcataacggggaagaaagtgcttaaaggattgctcattgcaggatctcaagtttcccagcaggaactcgccatgcgggngtcatgggggcgcagggacggagggaagggccttaccgtctgtcggccgtaggcacggggtaggagttctccttctgggccatccttagagagaaagggggaggagagctgggcggagaagggaaacagccgtgagaagcagagaaaaagagagagagagggaggggttggaccgatcgagccggaagcgctagcccgagctggtaaaagggagcaggtcagcacactagccccaatctgggcgctggtctcaccgcccccgccctgctatcgtccctacctccttccagccctgcgacgtgcgcgcaggccagcccaacggaccctctgatctacctgatcatctgcccactcgccggcgcaaggcctgcgacaggaggc

SEQ ID NO: 8314 - DNA, 1546 bp, Homo sapiens
  misc_feature (1)...(1546): n = a,t,c or g
gcagcgggatcgtgcctagctgtgctcaccgagaaggacttggaactggagcaactgcgttctgtggccttgcatcatgggctgccaggacgcagaagtcctgtgggtggtggcggtcctggggaccagctgacacatcatcctctgatagcctgacccaagcattacaacttgcagcggccaatgagcccactttctttctgtacgctgagcaactggcccgcaagacggtggagatcacatcactgaggaagcagaagcacaggctggaggtcgaggtgcatcagctgcaggatcggctgctggaggagggcgaacggcatcgtgaggaggttgcagccctgcagagccacatcgaaaagaacatcagggaccagagcagggagggagccaatctggagtacctcaaaaacatcatctaccgcttcctgaccttacctgactccctgggccgccagcagactctcacagccatactgactatcttgcacttcagtccagaggagaaacaagtgataatgcgactcccaaccagtgccagctggtggccttctggcaagagatgatgccattttcatgaattcctggaatttctgtgcctcttttatgtgggaaagggcaggctctggtttctgctgcctcttctcttacattgtcatttatttcttcactgtgttgagctgggaggagtcttcaatgtgggaagggattttctgccaaatgccattaatgctgctttatccttaggccctagagatactgaaagtcctggggggcagtatcttctgatggtgtgcatgtgaggagaagatgaggttaggactgagaagtgcagaagttggaacagtggtaaggctgttttaaaataagatgttttgttttaataatatgctcctggcacaaagctaggagtaaatgtgactccaaagggagttcagttaatctctgaaatgcacaaaacctagctattttctccctctcatcacagtctgagtctggtccattgctaccccaattctctggggacataaaaccaggctggaaagggaccaggaagtttgaaatagtgacatatcatccactagtcccaagggctaaggaatagtgagtttattctggaaggaactgggaagcttagtctaattagtgcctggggatgacctatgcaatcacaccgcttatgaccatcctagagagggccctgagcaccagcttgatcttagggatttccaaagtaacctgctttttgcctggatagggttaaaatagacctttcttgcctatccttgccttaacctatctgcctgaggttggcctgagattgtgagtcaacgactttgctatcttttcctcagtgttgaactttcattaaggaaataaagtcctagcttcttacagagaggggtccaaatggtgaatgctcatcctggcctggatncagggaatngctcagagattggccctagcttttctgctttgtagggcanaaaaggggaaanttgctgcagaaattcaaaggttntgtantctacaggaagtggaaaga

SEQ ID NO: 8315 - DNA, 154 bp, Homo sapiens
atgtggctaaccttagtctccagccccactggaggccaagctgatccatgtgactcaaagcccccaccataagccacattattagactgtgctgtggcctaaagcccccagatgaacaaggacactttcccccacgccgaccctatgcagtctc

SEQ ID NO: 8316 - DNA, 409 bp, Homo sapiens
  misc_feature (1)...(409): n = a,t,c or g
actgcataggggtgattttttatttcctttttcctcctctaatttcctaatttttataacgagagtgttttactaattttttaaagcatcttttttgtgtatgaaattaaggatggttacaataactaaggtggaaataaatgaagtttataactcagataatttagtcaaaatcaaattagtttgtagccataaacaatgactatcaaaggcccttatgcaaaaaaaaaaagtaagcttctgcagtccttaaattaagagggtttctcaagcctgtaatcccaatactttggggagggctggaaacaggagggattncttgaaggctaggaagttccaggaccagcctagggtgacagtgtgcaaccccagttctaaaatttaaaaattatttttaaaaattaccctt

SEQ ID NO: 8317 - DNA, 337 bp, Homo sapiens
gttagttggtcatgttcggagtttgacctgaatgagattcgcctgatagtttaccaggactgtgacaggagaggcagacaagtcttgtttgactctaaagctgttcaaaagattgaggaggtgacagctcaggtatgaaatgctgatttgctttctccttttcttttgtgcttttaaccacccttctgatcaatcatttattaatctatcatcttctctttgagttatattatacagtgccattaatggttcagaagaaacataagcaagcattgaatcctttaatcaaagccctacccccaacaggcatgagtatgctcattgctaaacacaagtg

SEQ ID NO: 8318 - DNA, 1194 bp, Homo sapiens
  misc_feature (1)...(1194): n = a,t,c or g
tttttttttttctattcaagccatttatttgaaatgccaactatatgtaggataaagtcagtgttacatgcttatcagtaacagtagaaaaatagaagcagtgaaaacctctgtacaactgtaatggtactcaaaagagaaatgtatcgttttacaatgcttcacacagacgaattcaagtttggaggtacctaaataaaaatactatatatttctttaaaaatcactatgtacaattgaagcgtaaacaagttttacaaagtactggttatgcaggttgtagaaaacacttgcataggacatgaaatcagtttaagaaaaatttctgagcctttagcattgaaggcacttgactttataccagtaacagcacaaccacaagaaacgcagtgttgtagatgattttccacctctctgaagtacagatgtggtgcatacacagcaaggagagttcaggaacctttatctctcagccaccccatcgaagagcaggacttggtaccgcctgcccatgtaacccagatacagttacatgtaggtacagatgatgaagcttccagagcttatctgatctcttagacagaactcacataaacacacaaatacaagaggttattttcaagacacacacttgcaagtaatctttctatagaaatggccacagcattataatattcaaaatatggaagattgacagtctgaggattttctagaggaaaaaaaaatcaaaggacttgccaaaaggataactacataacagatatgacaatctacaggacaaaaagacaacatgtcaccaaatattgttcatacaacagcgttaatggaaaacagtaaaacaccttttagcagtgtgcatgttaagtcttttagtaagattatctgtaatgaggtttgaaagtaaatcacttagtagacaaagtaaaccaccacagaaccaggaatagcacccatcactgctgctttgtcactccagaaagctgaaagtcaaccgaacaatgaaaanaagtcaaagaagcatttccctttgaattcagtcctaaaaatatgaatgccttataagtaatttcaaaataagtatcttacaagtggttcatgaaacattgttttcctaaaaggcagaattcaacantatgaaaatntatatttngccgggtagtnactgagaantgtcaatcggtcctcgntngcaat

SEQ ID NO: 8319 - DNA, 1004 bp, Homo sapiens
atggcaaagctatgggagcagatacagcaaacccatattgtcatcacacatttcttctcttgtatcaggagaacctggttgcttctaatgacaggtctctctttttttgcaggatagaatccaattgggtaggagaataagagaagggaaaaggatcctttcgagatcatgctcccacatctattaaaagatacataagctttgccaaacttaaaaccaggagcatatcatcattgcacaaaacacatccctaataagggctggatcactcttttttttttcttttttttttttttctctcctgtcttgtctgaaatggcttccccacaggacatttttaaatgattcttaattgcagggtagccaagtggagtaggtctgttgctggcacgtgaatactggctgaacctgtgcaatgtagtaattgctaaagttggcatctgctacatagggggctggctggtaatagcaagtgacattagccacattaggaatgacattttggtcagctaacacccggatagccagcatggtgataaggtttaaagtctgtcttctttcatgtcccatcaggcacactgtgctctcatttaccactccatgaagggtcatgagatactcatacttgcggtcttccaatcccacaaagtggttctgcaaataggactccagttttctctgctgctctccaatgtctgagaagtcgatgaaaaacctggaacacatatacctttgaagggtcttgatttcatcagaggcggcctaaagcccctcaccaagaggttgcagtacttaagcaggcctccccctcggatttcctctgggttcctggtggcaatgatcttgttacaaaggtgatcaaaggcttcctggaaatcgccatagacgctctccccgattattgtggggtgaaatgtctcagtcattgggttctctgaacattcataaaagagcagaagagagtctaatttgatttgaaaagaatctacactgaattcaaactg

SEQ ID NO: 8320 - DNA, 266 bp, Homo sapiens
tttttttggcatgtgaatgtctttcaattttgttcttcttcaatgttgtatttgctattcttggtcttttgccattccataataaactttagagtaattttgtcaccatccacaaaataatttactggcttgagattgcactgaatctatagatgaagtggacatcaatatagaataaaactgacatcagtagtgagtcttcctatccatgaatacaggatgtctttatgtcttttaaaatttcctttcagcaacattttatagct

SEQ ID NO: 8321 - DNA, 1733 bp, Homo sapiens
gaattctagggagtggagtggaaaggaaaagtggtgggatgggcagagagaccggaaggctgagcactggaaacataagaaggaagaatctggccgggaaaggaagaagaactggggaggtcaggaggacagggagccagcaggaaggtggaaggagggcaggccaagggtggaggagtcggggagcaagaaggagggcaagcgacagggcccgaaggaacccccaaggaaaagtggtagcttccactcctctggagaaaagcagaagcaacctcggtggagggaagggactaaggacagccatgaccccctgccatcctgggcagagctgttgaggcccaagtaccgggcaccccagggctgtcaggtgtggacgagtgtgcccggcaggagggcttgactttctttggcacagagctagccccagtgcggcaacaggagctggcctctctgctaagaacatacttggcacggctgccctgggctgggccagtgaccaagagctacccctctcacctgcttctttggtgaggatggcatcttccgtcatgaccgcctccgcttccgggattttgtggatgccctggaggacagcttggaggaggtggctgtgcaacagacaggtgtcgtcgtcgaagtagatgactttgaggacttcatcttcagccacttctttggagacaaagcactgaagaagaggtcagggaagaaggacaagcactcacagagcccaagagctgcggggcccagggaggggcacagccatagccaccaccaccaccaccggggctgacaccctgccccacagggaatggccttggcctggcccagcccaagatcccagcgttatctaactcctggagggtggactctgtcctggcttgtttggtgtcctcagatatctttcacacagtagagcaaaatcaccagccctgcactgatgtcactttatgtagaaaaaggccttagctggacctgcgttgccgtctatgcaaatgcatgcaaatactccaggccctgggatgtgggcttgtgttttgtcactgtgaagggggagatgggagaggagcctgttttggggtggggtctggggaaggcaatctgattctgaagctaaagagctttcatcctcttgagtgtatgtccccatagtgggccccttgacccacatgctgaccggtgccttgggatttgactagagttgctggctcgaggcccagcacgaggacttaccctggggttttgttaggtttggaagcagctgtccctagggggtgaagtcccccccctttttttttttacccctgcttctcccacggcttcacctccctatgtgaactgtagactcagatcccaataaagtgctgttgcagctatgatgctaggtggtttctaagcacaggggacaccccacaccccctgcctgaatggatgggtccatcccaggcactggtacttgcccccttgttctgtatccccctttgcccttgccttgcccttccaacaaaccctaggcccttgagaagctgatacttctccttttgctcacagctgccttggccccacccctgggagatgtagcaaattgagtgtgggttttggagtctgagcctcaggctcaaatccaggccaagtgatcttgggcaagttaatctctgggaactttgggtttcttatcctcaaaaaaggcgatggaagggctggggaagtgattaaataaaagcaacgcaaga

SEQ ID NO: 8322 - DNA, 2187 bp, Homo sapiens
cctcgtgactgggagcatgtttgctcagaattttctaagaggactctcccttcaaaaatccaatttgcttccagaatgttgtttagcctctgagaatctcactctttcatttccatctgtgaatggacatagatgtgttgctcagggatcagaaacatcagagtccagggcccagtggcatggtgttgcattagtagttagaaaagtaattggtcagctctactgtaaaagaaataagtatgtagtacagttttgtaaatgtcaggtctgttctgttgttttgtgatctgaagactgtcaaactggttgataatcaaagaaaaggttggtggttagaataagtaaaatttcagttaggaaagatatagcttaccagttttccatgtgcttaagggaagtcaaggatattttcagggtgtttgaggaactgttgttaaatgggatttgaagctagtgtcctctcaccttcttaggtgtatcagagagaggaagtggaaggccagtagtagcatcttcatacttacttttgccagcccagcctccatttcaaagactttgtcttccatcctatccaatgacatggtcagggatgggctctgaggaggcagtgaggccccaccttggtttgctccactgtggtgtgtagtctccaaacagcttaagggtttttaagttttctcacgattacctccactccactcatctactatcagcatcagaaaggttaacatccctggggaccattctacttataaaagagatgaactagtgtgctttctccccttttccaggtgtgccatccatatacaatctcctcttgggccaagttcaacaaatgtttccaggggaaccccgtgggttggagggcaaagtagccaaggatgtattgagttaagtttttctaggagggacaaaagtattttcttgtcccttttccctcatgctcatatgttttagctgaggcgtaaatggccaagttgagtaatatctgtggaactgagacagagagccagggacccatgtacccagggaccagtcccctgggggaatcacacagtggctcagactagactgctctatcccaccaagaactctgctgcctgttcatttccatcaggaccacccaggaaagcaaataagttagccttctcatcattaggtcacctaatctcttgggttgcaggatgagagcatatatagatctcctgtttagagagtgtgttcataattgtagaaagggatagaaaatggaataaccaagaggctgtgtcattttttaagaggatggcaaggatgacctcaaatgaggttcaacaaaactgggaatccaaggaatggtgcttgtagggaaagagaggtcagttgtggtccttaaacctcttggcaccttgtgcgggttataaaacaaggagctggagtaaaattgcccttacccccaatccaaatgctgtccaggatttaggagctacccaacctgtggttatatggtgttggtttccattttttgtttgtttgcttgtttccaaaatagccttgcttggtactgcatggaaagttcaagcttttcttcttgcccgctcagggctggcctcttccccgtgtcttcacagcgtccctaaggaagatttttgcagcactctctggagctgaggggagtgaaatttggtccagagaaggcggaaggaaatagttttcctgtttccttttctcgaggtggatgtcctcaggcttccttcacacctccttctcatgggtgcggctggcagtacagtcaggctgtggaggagggctgagaagaaaggggcactggtccagccccaggtttggtctgagacaggtacacagcagataccatcccaccttcctctctaaagaacaggccagccacacatataaccctttccctactttactaatgtatcccttatgtggtaccagcaatggaggacaggcagacttaccccctgccatctagagagaatgttgttattacccgtaaaacttgaccacccccatatcccactcctttttgtaaaaacaaatgcttaaacctgtgagcctgccgttcctttctatgtgttaatcagtttccttccatttgagctgtgtgggagggaagggcattgaaattgtaggttgtaatcttgtgccaaccaataaaaaccagtatttcacacacataaaaaa

SEQ ID NO: 8323 - DNA, 504 bp, Homo sapiens
  misc_feature (1)...(504): n = a,t,c or g
ccagtttatactaggaagtgggattctcttctgcatatggccattccctatacatgcagtcttaaccccagtgaggcagaattcacagtcctcctctgaatgcactcttcagtttccttcacttgaatgttttctccattcccattaggactagccaaagtcacatctctttttgagtcatgccagccccatgtcttgtccatgtcattcatttgcagatagtcatattcccctttggggccaggaaaccatattttagttatctcaatgcttagggaaaaccttgtatgtagtggatactcagaatattttcttgcgtgaattaagtatggctttggcatttgtatctaactctgagtaactctgagtcctccaccctccagaagctcacagctttagattatcacctttcttcttgaaatcattgtgaactcctagagattggtctgtgtcttatttttcctgtancctttcagtaccccatatagttttctcagtcaaggg

SEQ ID NO: 8324 - DNA, 671 bp, Homo sapiens
attcggcacaggttttcattctgtaaagataaaacatgtaagtgaaaacgtttaacaaacattaagaaccttcttcgaccaggcactctccttcgctacaaatttccacattacctatttttttattagccatttttgaactctcttccatttctaagtttctccctgcagctttcctgaacatgaagcatttccttttcttttcatttctagctttcctttctctgtacctcatgtacacttggaagcttcagggacttagcactggtcatgccagcctctacagatcacatctctgtctataattgggtctccatggtaatgagaagcagaaagtgctgaagtagcgcactatgtaaggactggcaagagaaaatactgtcgcggcctctacaggcatagcattgaatccccatggtgcccaagaagcccgagagaagcacgctgtggtgtagagcaggagactgaggacacggacttggcagatttattagcagcaatattctaagatgaaccaaattttaagagtttgtaagtgctcttttcaattggaaaagacctttgaaatttttttttcttttcttttaggaggccagatgctccagtgcctgatggcgaaagtgagaaaacctgtagaagaaagttccgaatagcgaatcttccttttagtg

SEQ ID NO: 8325 - DNA, 618 bp, Homo sapiens
gtctaagatctgttggtagttttttttttttttatcattaactctagaatcatccttcaggaatgacaaatcattccacacttgaacaactggttttcacataacagcctaagaaaagagcacctggaggaaacagcgtgacaagaagactgacagtgaggtcagtggcaaaagagtaatgcaaaggtgtaatgtggctacaacgagaacgtgagctgtgggtgttttgccagaacatggagtgcgctgaaaggaatgacaccaacacaggggcagtaaagatgggcacagtttgacctcaggagacaaaaattttcccttgacattacttttcatgtttttgctctgcccctcctctctgcaaggtatcaaactccaaagggcaactgagcctcccaaagctgaacaggcattgaaggttattatgatttaacgcttcatgtttatagaacatttggtttactcgatcgttttatgagtaacatcaaagtaactactcatttgttttctaacatggtctagagggggacgcagctgaggaggcagaatgctgggacttaatttgcagctcggccggccgttgcttctgagaacttaaggaaaatgcttttctctgtg

SEQ ID NO: 8326 - DNA, 234 bp, Homo sapiens
cctctgtctggccgccagcctgggctttctccagctgatttgtagataaaatctctgacagtggatcttttacccaagaattgcttaagatgttcttcagatcctcaatttcagcagaatggctgacaccaactggcatgggtgagcccagagagaggctgggaattaaaaaaaagtttacttagagaacaagcagttgccagtgaaacgtttggtgcactgtagacttcagac

SEQ ID NO: 8327 - DNA, 1844 bp, Homo sapiens
gcttgattgatattattttatctcttttgggccaaagataacagccccttgcttctgtgtttaataataattctgtgttgcttctgagattaataattgattaattcatagtcaggaatctttgtaaaaaggaaaccaattacttttggctaccacttttacatggtcacctacaggagagaggaggtgctgcaagactctctggtagaaaaatgaagagggtcctggtactactgcttgctgtggcatttggacatgctttagagagaggccgggattatgaaaagaataaagtctgcaaggaattctcccatctgggaaaggaggacttcacatctctgtcactagtcctgtacagtagaaaatttcccagtggcacgtttgaacaggtcagccaacttgtgaaggaagttgtctccttgaccgaagcctgctgtgcggaaggggctgaccctgactgctatgacaccaggacctcagcactgtctgccaagtcctgtgaaagtaattctccattccccgttcacccaggcactgctgagtgctgcaccaaagagggcctggaacgaaagctctgcatggctgctctgaaacaccagccacaggaattccctacctacgtggaacccacaaatgatgaaatctgtgaggcgttcaggaaagatccaaaggaatatgctaatcaatttatgtgggaatattccactaattacggacaagctcctctgtcacttttagtcagttacaccaagagttatctttctatggtagggtcctgctgtacctctgcaagcccaactgtatgctttttgaaagagagactccagcttaaacatttatcacttctcaccactctgtcaaatagagtctgctcacaatatgctgcttatggggagaagaaatcaaggctcagcaatctcataaagttagcccaaaaagtgcctactgctgatctggaggatgttttgccactagctgaagatattactaacatcctctccaaatgctgtgagtctgcctctgaagattgcatggccaaagagctgcctgaacacacagtaaaactctgtgacaatttatccacaaagaattctaagtttgaagactgttgtcaagaaaaaacagccatggacgtttttgtgtgcacttacttcatgccagctgcccaactccccgagcttccagatgtagagttgcccacaaacaaagatgtgtgtgatccaggaaacaccaaagtcatggataagtatacatttgaactaagcagaaggactcatcttccggaagtattcctcagtaaggtacttgagccaaccctaaaaagccttggtgaatgctgtgatgttgaagactcaactacctgttttaatgctaagggccctctactaaagaaggaactatcttctttcattgacaagggacaagaactatgtgcagattattcagaaaatacatttactgagtacaagaaaaaactggcagagcgactaaaagcaaaattgcctgatgccacacccaaggaactggcaaagctggttaacaagcgctcagactttgcctccaactgctgttccataaactcacctcctctttactgtgattcagagattgatgctgaattgaagaatatcctgtagtcctgaagcatgtttattaactttgaccagagttggagccacccaggggaatgatctctgatgacctaacctaagcaaaaccactgagcttctgggaagacaactaggatactttctactttttctagctacaatatcttcatacaatgacaagtatgatgatttgctatcaaaataaattgaaatataatgcaaaccataaaaaaa

SEQ ID NO: 8328 - DNA, 871 bp, Homo sapiens
ccgtgacaagcccaaccggacggctggagagggcgagaagggcagacgggacatgcagcctcttccgcctgagccccggaaggtgtatgtggctgcggcatcgccggcctcgctatgtctgccattttcaattttcagagtctattgactgtaatcttgctgcttatatgtacctgtgcttatattcgatccttggcacccagcctcctggacagaaataaaactggattgttgggtatattttggaagtgtgccagaattggtgaacggaagagtccttatgttgcagtatgctgtatagtaatggccttcagcatcctcttcatacagtagctggggaaaatgccagaatgtagttgccatcagatttgattgtgaacaaggactgactgcagaaaataatggaaaggatgtttaactcttttatctccgaacattgaatgagataaatttccagatgctgttctctattttaatgttattggaccaatgttctgtataaacaattaagatgtaaccatttaatagtctgtaacaatcaacctcagtactgtcactacaatattacattctgcaaatgttattctgttgtatcagatacaaaattttagtgaggtatctctaaggcacatagtagaaaacaaaattggttaattactcaagttcctttcactgtgatttggaaatgatttaatctttatagaatgagaaccttttttggactagcttttttattaaaatggctcaatttgtgttgataaggattgcattaatatttaatagtgcttgcttttcctctgggcacaccattttgatcattaaccagagtacctctactcttagcaaactctagtttatgacaagtatttaa

SEQ ID NO: 8329 - DNA, 714 bp, Homo sapiens
gctgcaggaaatggacattccagtggcccctggggttccagcctgtagcagcttcatctgtgctttgtgcacttggttctcagtcatctctgcaagggaccctgacgcctgggagatcagagccactgaccctttatggcactgctaacagaccccttccctcaggtaattctggatccagaactcattatgggatgtaatccaggtcaacactaataccacttggaaggttccgctctgtctcactctgcttgagtatcccactgatcagtctctcagtgcctgcctactgggcagctcatctgtccacttattcgtattaaatttgctttttatttaggtctctgggagatggttgcgtggggggaagagcccatgactttcctatatgatcccttgaacatactctccaagtcagtagattacctctcaggcagccttcataaaagtgtttcactgtactggggtttgtgttcatctcactcacatagacagtctctgggtaggcaggtggggggtgatacaagttcacactctgtgtttctcctcctgttagccattcccaccctgctgatgtttaaggaaagccagggatgatgacccacttaagctttccttggccttgttaagtccaatcatctggggcaggaagaagagaaatgctcattgcaatctttgacccccactaactgctgtggtgactttgacccaagc

SEQ ID NO: 8330 - DNA, 401 bp, Homo sapiens
gtctcgtgaaggttttctcaggagacagaccttaaaacctgtctctgggcccacagtaaagaacttggggaaagagaatcatggttcagagtatacactgaggtgggagggaccccagaaaaggcttgtagttgaaatgtagacctagaaaagagaagttcgtagtatcaccaccccctgattctctaagatggattgggaagctgcggagtgtgaagctctgggactttagttttgtgggcgatatgagcaactacccatattgaggcatttctctaatgcacaaacattgtttcatgagtcattttaggcccagataggtcatgggtgttcagtgggcaaatgctgcaggtgggcagatgcctgttcatgaatcacagtggccagtgcagacgttgccc

SEQ ID NO: 8331 - DNA, 327 bp, Homo sapiens
gatgacttcagcaccaaagactatctaaaagataatttggataaatacatgtcccagtttccaaaagttcggattcttcgcctcaaagagagacatggcttaataagggccaggctggcaggagcacagaatgcaacaggtgatgtgttgacatttttagattctcatgtggaatgtaacgttggttggttggaacctcttctggaaagagtttatttaagtagaaagaaagtggcctgtccagtaatcgaagtcatcaatgataaggatatgagttacatgacagtggataactttcaaagaggcatcttttgtgtggcccatgaa

SEQ ID NO: 8332 - DNA, 328 bp, Homo sapiens
aaccgctccatgcgagccctggccaaaaccaagggcatgagtctgtcagaacatgccctcagcactgctgtggtccggaacacccatggctgcaaggtggggcctggccgagtgctgcccactcccactgagaaggatgtcttcaggctcttaggcctcccctaccgagaacctgctgagcgggactggtgacccatggctgggggtgctgaggagagccgagttggactggctacccctcctggccacccagtactccctccagcctcagctggctgaacctcgccgctccaaccaccagcttcctcagcgagcagggcccaggggt

SEQ ID NO: 8333 - DNA, 615 bp, Homo sapiens
ttttttgcaagagggatgacaaagccaggtttattgttctgggttaaacctgtggaggcaggacctgggaaggggcacggggacagatgaagttagtgactgtatcttcctggtcattgctgggttctcagcacccttggcccccactgaagttctaggtgaagcccagtgctgggggacagggtcctcttcctgacagtgcagcctgtgggatgacttgcaaggtcccatatggaggtagggggtgggatgttggcctgcactggggccagcgtcctcaggaaggtgtcttggaggaggtggcggcagctgcccctttcttcttggctggggccttcagcagtgccagcttcttgggcaggctgctgctggctttcatcaccacgtcatgttcgatcttcttccggattccgacttctaggttcttcttgagcttttgctgctgcacgacgcgcgccttcctgggagcgataacacgaccgccttttcttgggccccgattcttttcagaggctgccgctgccgtcttactctttgcgggtttgtgcgcctgaaacttgcgctgcccctgcgccatggtccggtcgacggccgcagaatttagtagtagtagta

SEQ ID NO: 8334 - DNA, 348 bp, Homo sapiens
agatcaacgtgctgatctgcttcttcctgctggtcatcctgtggttctcccgagaccccggcttcatgcccggctggctgactgttgcctgggtggagggtgagacaaagtatgtctccgatgccactgtggccatctttgtggccaccctgctattcattgtgccttcacagaagcccaagtttaacttccgcagccagactgaggaagaaaggaaaactccattttatccccctcccctgctggattgggaaggtaacccagggagaaagtgccctgggggattcgtgctgctactagggggcggatttgctctggctaaaggatccgaggcctcggggctgtccg

SEQ ID NO: 8335 - DNA, 343 bp, Homo sapiens
acccctactttaaggagttctagatatgtgagatactaccttaccctttcagacagttccatgtgagtatgttaaccatacttcttagtcaaaaataaagagaagcctccgggtctttgtgggaacaaagttacaaattaattgaaatccatactcttcctaagcagcttggacctactactgtcccacatgtaagtatgcaaaactacattttgccaagaattaactcatgagaaccattgaacttgtattgaaagtcaccttaacagtggtattgtgctctgtaaaactggaatcttttcccacaagatgcatgtaaataagagatctcaaaaatagaaag

SEQ ID NO: 8336 - DNA, 149 bp, Homo sapiens
ttctgcatggattacttttataagcagagaaaaaaacgttcagagtgtgaatttagctgaaatctgaatacatttaagaaacatgaaaaacgaatgccgtctgtggtcaggtcatggggctgagtacagaaaagacaaagttaaataag

SEQ ID NO: 8337 - DNA, 405 bp, Homo sapiens
  misc_feature (1)...(405): n = a,t,c or g
ctcaaatgaaggtttgcagtctgtctaatcaaaggatggggcgtagcctgctaaaatcaaaagatttgttaaaacaaaggtacttatttgcaaaagctggctatcctctaagaaggtctcagtctttaccaaccaccttattgagcccagtaagggttgtgtcctctgtcaatgttcgattatctccaggaaaagagaccagatgcagcccaccttccttcacctataagtacacacctgaagaggagcaggaattggaaaagcgggtgatggaacatgatggtcagtctttagttaaatcgaccattttcatctctccatcatctgtgaagaaagaagaagccccccagagtgaggcgccgcgggntggaggaatgccatcatggaaggactcctacctgttca

SEQ ID NO: 8338 - DNA, 124 bp, Homo sapiens
ggcacgagatgtaaatctttggcaaatgagactaataatttgggttttaaaaagctatgtcttttcttcagtttctttttattattatactttaaaggttttaggggtacatgtgcacaacgtg

SEQ ID NO: 8339 - DNA, 1820 bp, Homo sapiens
  misc_feature (1)...(1820): n = a,t,c or g
ctgccaaaacaaactttattgcaccaaaaaggaaaacaaaaaaaacaaaaaaacttcatttatatacagtcagatataaagacatctctttgactcctgtgcatatatttcctcaactcaagattagggcataaaagtcaggctgctatgccagacatgctctgccctatggcagggcccaaggagaggattgtcacttgaaagtgggaacacttaaatggatgacagacaacactggacccacagaccaagagcattcttctaagccctggagtagctcgaggaatggaagagggaaattggaagcaggggtcccttttcggtcttcatgtgaagagacccagcctcttcaagggtatccaagataaacttccggttccccaagcccaccaatccctgtccagttcctttgcttcctgccctcccaaataggacattctcctttggtgcccagcccccctttgcacagatccctccaaggggagtccccatgatccacaaggcagagaccttcatagcagagggcagggcaggtacacactatcctctcccttatgcatggctggacactgactgaggccctgcatcacaagaatcgccaatacccactgggagccataacaataaatctggaagtacggggagaacatatcaaaaaggggaaggatggattccccttgatgcccaggattacagggcaccctaaagcacatttttttttttctgagccaaccagctaaaggatcactgcagctaaatacagatagagaagcaacaaagccaggcaaatacccatcagagacagtgacaagagcagctgggggcacgggggaggcagaaggaagagaaagaaggggaggagcctccagagtcccagccccaaccccctctgccattggctacccttgctccccacaaatccctggggttgaagtgaggaggactacaggctggggtgaaaatacacaaggacagcccaacaaaatacaacaaggactagcatcagtctcccccttactccacccccaagaaaaatacccttattgtgactagtatttatgaaaatctgtaagagactattctatgtagtggctctaatcccatatacacagcagctgcctgtgttgggaacttttcaaatcagtgattgcgggaacaaacagtattttcagcttcttacggtgccatgcaggctttaccaagaccttggttaagtccccagtcacatttactttctgtcttacatctagaaaagggtgaggaaagaggggaggggagaaaggtgctcaggtgctaggtaaagcttactgatcagcagcctagactccaccactgttccttctctttggtctgtctagaacagtgactataaattaggaaaaacaaaattatgctggcctgtgggaaataatgggggaaggaaggcagggaggaaaagggcattgggaagccctgcttcaagactgaagacagacaaatagacaaccacccagactgcttaagtgtcacagacagcccccaccccaagctccccttccaggtatccccataaatcatttgggcacactccctcttggaattgcaatttccatcttccacttatccctaaggagctggccctgtggagaggtgtgttggttgttttgtttttgccaaaggccctcgctctaggtgctcctgtaaaggtaccttggcccctgatacgggatgaatggatgaacgaagccccagactcgtgccnnnnnnnnnnnnnnnnnnnnnnnnnnnnnnnnnnnnnnnnngtattaaattcgtaatcatgtcaaacggtctcaaagggc

SEQ ID NO: 8340 - DNA, 1518 bp, Homo sapiens
tttttttttttttttttcagctagaagagattttttattgaagggcgagtctccggcatctgatggcagctacaactggatctcacggaacgcccgcttctccaccagcttcaccttgtacttgcgtttgaacttggctctctctcgaggctcgatcatattcctcctctggaagctcttgaaccggtctcgaaggatgttgccctcgggcttcagggtcctgagcgagtctgtcagctccgagctcagctgcacgtcgatgtcaggtgcctggtacttgagccgtcccagccttcggggcttgtcagcctcagcctcccgccgcgcctgccgccggcctccgccgccgcgccactaccgccagcctcagggccacctgggccttgatcccgcgcagccggagacagctcctggtgccggagccgggcggcccgcaacgggccttgctgtacccgcagcctgtgcacagccttctcccgccgccgctgctgctccgtcttcttctctgtggtggccaggcgggcgggcgtgggacagacctcggcatccccagcctccggcccctcgccctggcctggctccccctcaccatccgactcctccagcagcccctcgcacagctcctggaatgtggactcctgggtggcggcctgctccgtggcggggcagggcccagctgccgctccagcttctccgcctccttctgccgctgcaactccacctcgtgggccgctgagagcagggtctggtggtcttcaaaggatggattgtaggaagctccggcaggcgccacctccacggcgggcgcctgggacaggcttggtgtgcaggcgtgctggccgcttcactcctttcttcttggtctgctccaggaaaaactcatcctggccaaccaacggcctgtccagggggttgtctgaggcccagaggtcgtagaagggccgctctacggtgtcctggggcccgggcttggcccttgttgcagaagggttgaggagccgggcctgggccctgcgcacctcccggggcagctcgccctgcttggccagcttctcccatagctgctccttccgcctgagcttcttggcgttggggacctggtgggcgaggacgtctttgggggcagggactttggatgtgttctcgaggatgaggtcaacccgaaggggtttcttgagaagcagtgacttcttctggactttggttctcttctttgtcagccctttttccttggagccagtgtccacgaagaagagtttttcatttggggcctctgacaacaagccaccgctcgtgcgctcctgtagccgcacgtcttccaggaactggtcaacctccagccccagcggctcctgagcaagccgccgccagccccggcttcttatttcttgggcctcgccgccgccgcctcagcgctgggtccaccgaagtgggccgcagccccaggaaaccagaatcggcatcgcttttcgacgtgcgcttcccaccaacgccactgcctcctgccgccatcttgtc

SEQ ID NO: 8341 - DNA, 493 bp, Homo sapiens
aattggctgccccggctgttgcaagttcccaatcacttgtttattccttcctctgtgtaggagttggtgtcctgcctgcgctcaggatgagggggaatctggccctggtgggcgttctaatcagcctggccttcctgtcactgctgccatctggacatcctcagccggctggcgatgacgcctgctctgtgcagatcctcgtccctggcctcaaaggggatgcgggagagaagggagacaaaggcgcccccggacggcctggaagagtcggccccacgggagaaaaaggtgagaaaggagattccggtgacataggaccccctggtcctaatggagaaccaggcctcccatgtgagtgcagccagctgcgcaaggccatcggggagatggacaaccaggtctctcagctgaccagcgagctcaagttcatcaagaatgctgtcgccggtgtgcgcgagacggagagcaagatctacctgctggtgaaggagga

SEQ ID NO: 8342 - DNA, 747 bp, Homo sapiens
ttttttttttgttaatggaatgcacaaaaagtgctattttaatagagagacacaaaatattacatattcatgggacttagggacaaaactatgccttggaaattttctggaaaatcacataagctccaaagaagttgatacaaaggcagctaaagatcttggtttgatagtggcaattctaccaatacaaatacaaaggaatcaacaaatggacaactctttagattacagttatgacacaagcaatccacaggcattccagtgaaaactgcacagagctctctctgttgttacttgcaaaaggctagcatggaaatatcttgtgttcatgtgaagagttggcccatatttccttgcgtgttatcacaagcaggctaaggggcctccagtccttatgacataattagaggagagctgggaggaatttccagacaacagccaccttcaccagccagcccttttgtctgatggtccacacaaaactcattgtatgagtcagcaggatctagaaggttcacttcctccacagtggccgacagtttagatgaatccttctattatgtttctgaacccagacccagccaggacttgtctctattcattttctgggctgtgtctaacaggagataataggctagagagagatgctgggaaggctttattcgacctgttccacagggcagtgaggcaccttcagctctgaatcaccgaaagagaatctgatttttttttaattgcttttccacc

SEQ ID NO: 8343 - DNA, 487 bp, Homo sapiens
tgcggccgcccaggggctggagcagggccgcgcagatccacggctgcgctccgcgttgccgcagacgcagcccgacgggtccgcgcagtcctcggggcccacgctcaggcgcccggcccgtggaagcgtaggcgacccgagcgggaccgaggaaaacagccaggtcctcgtcgcgcgtgaacgtccggcccagagcgagtatgctgcggacacgcacggggctagcgccagggccgagccccacgcggaaggaggcactaggcggaaagaagacgtcgtcgtggcggcagggcacgcgctcggcgtccacgaagaagaggccaggtgcctcgtccccagagcgccacaggtgcgggtcatgccaggagaagcggtcagagtcgcggaagacggcaggttcgcccgcgccacagtccaggtgcgagcccacgtctgagacgccgaatccggctcctgaagccaggacgagttccccatccagcggcag

SEQ ID NO: 8344 - DNA, 362 bp, Homo sapiens
gaaccctggggccaaccctcagctgcgaagcctcctcctcaacccaccaccgccgcagcactggtgcccccaccccaggcctccctccaccacctccagccaccaggggctcctgcgctgctgctccgccgcaccagggcctggggcagccccagttggggcccccactcctgcatccaccacctgcccagtcctggcccgcacaacttccccctcgggctccactgccaggtcagatgctgctgagcgggggatccccgggcccggtcccccgagccgcctgcagcccagcgtcatggaggacgacatcctcatggatctcatctgaatccccaacacccaataaagttcctttttaacac

SEQ ID NO: 8345 - DNA, 730 bp, Homo sapiens
atgacttcatcagcacagataattcagagatctttctcttctccagaaaattttcagagacaagcagtgatgaacagtgctttgagacaaatgtcatatggtggaaaatttggttcttcacctctggatcaatcaggattttcaccatcagttcaatcacacagtcatagtttcaatcagtcttcaagctcccagtggcgccaaggtacaccatcatcacagcgtaaagtcagaatgaattcttatccctacctagcagatagacattatagccgggaacagcgttacactgatcatgggtctgaccatcattacagaggaaagagagatgatttcttctatgaagacaggaatcatgatgactggagccatgactatgataacagaagagacagtagtagagatggaaaatggcgctcatctcgacactaacacatgttaaaaggacattgtttttatagggtcattttaggccctttgactaagttgatatggaaatattttgttgaaaaactgtacagagcagctttacaagttgtcacatttctttataaatttttttaaagctacagtttaatacaaaatgaattgcggttttattacattaataacctttcacctcagggttttatgaagaggaaagggttttatgcaaaagaaagtgctacaattcctaatcattttagacactttaggagggggtgaagttgtatgataaagcagatatttt

SEQ ID NO: 8346 - DNA, 670 bp, Homo sapiens
ttttttttttctttttaacacacacccttccttttatattttcagtatattaaaaaggaacagtacaaatgctgtggtattaaaaaggatccttatttttcaacaaatgaacttttataaacaattctgtaatgaaatgaaaacagtatcttaatacaagcttttgttaaacaagattttaaaattttaaaattagaaaacgttaagattaaactctttcaaaggttcaaacaaaaaaacaacctgtacaatctccattacatgtgtctttgtacacagtctgggcactttgaaaatgttaaagtttttaacgtttgactgacagaagcagcacttaaaggcttcatgaatctattttccaaaaaagtatgctttcagtaaaacattttaccattttatctaactatgcactgacatttttgttcttcctgaaaaggggatttatgctaacactgtatttttaatgtaaaaatatacgtgtagagatattttaacttcctgagtgacttatacctcaaatgggatttaatgaacaatttctaaattttagaatgaaacagtatgtgtaaatctacacatgtatgttcaactagggtaaagctcaagagcatgtcacagaatttatacctaaattatataagaagttaagcaatgcctttatccccaaact

SEQ ID NO: 8347 - DNA, 381 bp, Homo sapiens
ttttttgttccttctcccaaattatatatgtaacgtgggaaaaagcaagttgaaagatgagtgtgctgctattaggggaaagacaggttaaataagggaaattattctaaggttgacttgtccatctctcaaaatctgattgtgtcttctcccgaattttatcttcgatactgagccactcttttccctgtgccttcccaaactctgtagctattccttttattttcaattgctccctaatgcatcttttaaacaaccattaaagctgtggtacattacttataataagtactcaatacatgtttcttcacgttttcagtgccttacattaattttaaaatttgaacttttagatgcactttcacttaggatgtttggacc

SEQ ID NO: 8348 - DNA, 620 bp, Homo sapiens
  misc_feature (1)...(620): n = a,t,c or g
ttttttttttttgctcttctggactaagtgttgattcatcaacatcaaccaatagtttatcaaagtattgaatatcatcaggttttaaaaatggaagatttccagatggctggtcattaacacttttcatagttcgatcttcagtttgcatgtggaaaccagtcataccacccaaaggtgttggagtagctgtcagctttcgagctggagttcgaataggaacataaccagctggaggaggaagtaccttatatccttctgggaacatagcatctaattcctcatcagaaagtgggcgatttctctcatcaatttctctttcccaccgccaagcctgaagctgttcaggagtcatactcattatgtgacctggagtaggggtagccatgttcatggctggtgtgccaattggtgtctttccaggggtcagaactggagtgcttccacccatctgactagctggtgtttcatcccaccgtgattttcttttactggctccaggagtcggtgtttcaccaatagaatctccacctcgatctgttcgaggagtctcagcccatccacttccatgcccaggagtatctctctctgttttgggggtttcatctcgtnaagaattc

SEQ ID NO: 8349 - DNA, 1460 bp, Homo sapiens
acatggcggggtccaggtggaggtcttgaggctatcagatcggtatggcattggcgtccgggcccgcaagcgcataagcatggctccgggcagctcggccttgggggcttcggggcccgagacgcggggcgtatgagtggggcgtgcgctccacgcggaagtcggagcctcctcccctggatagggtgtacgagatccctggactggagcccatcacctttgcggggaagatgcacttcgtgccctggctggcgcggccgatctttccgccctgggaccgcggctacaaggacccaaggttctaccgctcgccccctcttcacgaagcatccgctgtacaaagaccaggcctgctatatctttcaccaccgttgccgccttctcgagggtgtaaagcaggccctctgggttcaccaagaccaagttaatagaaggccttcccgagaaagtgcttagccttgttgatgatccaagggaaccacatagagaaccaagacggagtgcgttctgaatgtgatctctcacgcccgtctctggcagaccactgaggaaatccccaagagagagacctacttgcccggtcatcgtggacaacctaatacagctgtgtaaatctcagattctcaagcatccttctctggccaggaggatctgtgtccaaaactccacgttttctgctacctgggaaccgagaggtctcttctccttcaagtccgtggttctggtgggagcccgacttgagcactaaggatcctctgcccaccatcgcctccagagagggagattgaagctactaaggaatcatgttctagagaccttctaccccatatcacccatcatcgatcttcatgaatgcaatatttatgatgtgaaaaatgacacaggattccagggaaggctatccttacccctatccccataccctgtacttactggacaaagccaatttacgaccacaccgccttcaaccagatcagctgcgggccaagatgatcctgtttgcttttggcagtgccctggctcaggcccggctcctctatgggaatgatgccaaggtcttggagcagcccgtggtggtgcagagcgtgggcacggatggacgtgtcttccatttcctagtgtttcaactgaataccacagacctggactctaacgagggtgtcaagaatttggcctgggtggactcagaccagctcctctatcagcatttttggtgtctcccagtgatcaaaaagagagtggttgtggaacctgttggcccagttggtttcaagccagagacattcagaaagtttttagctctatatttgcatggtgctgcgtgagcggaggacccctctgaatcctgaaacccctcttgcctctcttccacggaagagggcctgggccccgtggagcctcagtgcccgtttggcctgctcgtctcgctgacaataaagagcccttgcgttgcactgaaa

SEQ ID NO: 8350 - DNA, 431 bp, Homo sapiens
ctggctggcttcacttcctttgcacactcggaagcaggctgtccattaatgtctcggcattcttccagtcttctctgccaacccaattcacatgacttagaacattcgccccactcttcaatgacccatgctgaaaaagtggggatagcattgaaagattccttcttcttctttacgaagtaggtgtatttaattttaggtcgaagggcattgcccacagtaagaacctggatggtcaagggctctttgagagggctaaagctgcgaattctttccaatgccgcagaggagccgctgtacctcaagacaacacctttgtacataatgtcttgctctaaggtggacaaagtgtagtcaccattaagaatatatgtgccatcagcagctttgatggcaagaaagctgccattgttcctggatccctctgttcc

SEQ ID NO: 8351 - DNA, 216 bp, Homo sapiens
ttcagaccctggtgacagtatcctccacatctggaagggaaacgaatcacttgagaagcttcaaaaagaatgatgatgcccattgttgacatggaagtgaggaaatggtcaccctcacacagctgccagagagcataaggtggtaaaatctttcttgaggacaagttagccatataaatatatgtgtgtctgtacacacacatatatacatatatg

SEQ ID NO: 8352 - DNA, 666 bp, Homo sapiens
ttttttttttccagaggaaatgtttcgttttatttttgctcataacctcccaaaaaaatcagtaccccgccatccctcacccagacacagcccctctccaacaccttcacgaaacactgattttttttcttagagctaaaatgaacacccagtcaccaactacagccctgccctgcccctcctcccactggcctgctcatcttcccgcactgcaaacctggccgcctttagcctccctcccttaggcgtagtgtcccaaggtcacctagcctgctttttgcctgtaggatatgggtccccttctcaaagcccgccctgacttacttcctcatttgcatagtccttcagctctatcctgtcgccactccacccaccccagacaaccacctgtaagaaaccaggtttgaaattcaagagaccaggtttccaagctcccagctgcttccctgtgggcctcggtgcctcggctgttatgtgacgggcatagacattgactaaggccaaacatttcatgatttggacgagaaaggagggaaggagatccagaaatacgcaagagaggtgataagcagagacagaggataaaaggataagagtagagaggagttgggtggtttggtggggaagaagggttgattttttttttttaatagagacagggtctta

SEQ ID NO: 8353 - DNA, 338 bp, Homo sapiens
  misc_feature (1)...(338): n = a,t,c or g
actattggaaagactcatgttttgttgtacagtcaagaacaagacaagatcaaatgtaattttcatttctaatctgggaaataagtccaagaagacataaatttaacagtgatgacttttataactaatacttgggcacacattttttattcttagaattgtgtaacagaagtttagttttattactcggagtatatatgatatactcttctctgtaagcatttcctcacatttaacatataattcatgaggggaaatcaagtccttaaaatgtaccccggtgttcctcataggtggggagttggaaccaatgnggaacacatgggncacagaggggg

SEQ ID NO: 8354 - DNA, 67 bp, Homo sapiens
ctacttgctgcattactactgatgaagtaagttgagtgattttttttttaaaaagaggtctgcttgc

SEQ ID NO: 8355 - DNA, 991 bp, Homo sapiens
acatgggggatactggacagcaccctctacctgccttcagcaaccactgagaacacccggggcacacacggggcaggggtggcacccagggtcacctgtctccctaaggaggcccactcctcccccagaaagccaggggggaaaagctgctcatcacccagggtggcagaaacgtctcccccagcagttgggctgcccagcagggccaccaggcctctgtcccagctgccttaagaggctctttcaatgggccagcttcagaaccatccagtgtaccgcagcggcctggcctgggaaaggatttctcagcctgactttccagagaccgaggatgagaaagttaggcggcaacagaacaaaacccccgccgcgagatgggtctgctgctgcctcatctgagtaggtgtaagaggggatgcgaggggaggggcagttcacatcgcagctctctccgaactccaccatttgggacgtctttattatggatccgtccactcttccaggagcagtagcccttctaggaaaggggtgggaagaaaaccagcctacccttcaagctgacttaggatgcaatggtacagacaccagccttgggggagggttctccatccacactcctaccccaaacgggctttgtgctgctcaatggggattcggggccatcagaagcgatgccgcggctgggggccaaagtgcatgggcaggttgtgctcccaggggccatgtggatgggaccgaagtccatagttgacccgcacgttgggccagagggggcacgtacggggctgggataggccccatgttgagtgggaagttgttgaacacaggccgcacgggaggcagggggaagggtgggtgcgcgaaggcatagggtggcatctgtggctgtggcaggttctgcggaacgggcctcgggagggcctccaccctctgcaccttctccacaggctttctccagcgggggtccaatgcgtttgaaggtgttctctcc

SEQ ID NO: 8356 - DNA, 761 bp, Homo sapiens
aaaccgtctggatgaagttctctacacccaaggaagaaaagcaatttttagagctcctgaactgcctgatgagtcccgtgaaaccccaagggattccagtggctgctcttcttgagccagacgaggtgctgaaggaatttgtcctgcctttcttgaggttagatgttgaagaggtagacctcagtctgaggatcttcatccagactctagaggcaaacgcgtgccgagaggaatactggctccagacctgctccccgtttccactcctcttcagcttgtgccagctcttggaccgcttcagcaaatactggcagcttcccaaggagaagcggtgcctctctttggataggaaggatctagcgatccatatcctggagctcctgtgtgagactgtatcagccaatgctgagaccttctccccggatgtctggatcaagtccctgtcctggctccaccgcaagttagaacagctagactggactgtgggcctgaggctgaagagcttcttcgaggggcacttcaagtgtgaagtgccagccacactttttgagatctgtaagctttcagaagacgagtggacctcccagggcccacccagggtacggggcttggcacggggctcctggcctggatggagtgctgctgcgtctccagcggcatctcggagaggatgctgtctctcttggtggtggacgtgggcaatcctgaggaggtcagactgttcagcaaaggctttctggtggccctggtgcaagtcatgc

SEQ ID NO: 8357 - DNA, 632 bp, Homo sapiens
  misc_feature (1)...(632): n = a,t,c or g
ctctgaacaaaactaaaggactgattttctgaaagcacctgctaacaccttgagctttttactttcctgggagtgtacagggttaggaactgagaaagtgcacttcctcaggcaacagatgatctggtcaggcaacccacccctggggcccactttctgcagcaagatgggagcaattccaaggcaagtgggtatgggaatagcaactaaaaaggggtgaacttgtctcagcccccttttatggtagggcacttcaactttaatggggtgggcggctanagggaggagaatcaacaaagcaagagaacttgactatgtacgtccaacttcttacagaaggagctttgcnaccagaacaagttcactgtgtcaatgaagttcatgacacctcatgcacctttacagatatctgggaaagcctgagaaattcattgagttttatgtattgaagggaaccaggtgattactcttttcaataagagggattctgctcaggtgattagactttgactctatttccccagggacagtgatgggtgggccccagagctagttgctgtctggtgtttgctgggtgaaaacatgagcagtagttatgtgggggctgagagtccaaaggggaaagccttaat

SEQ ID NO: 8358 - DNA, 1042 bp, Homo sapiens
  misc_feature (1)...(1042): n = a,t,c or g
tctcggctgacttatttattggagacctggatgcagagacaacgaggcggggagtgggctggggcgaccagcagtgagtgcaataaaggacaccactctcccggccttgtgactttgaccatgtgtccagccagccacacctggagctccctatgggccagtgccatcctgggttcccctgcaaatcccggccccagcaagcagccactgcaatgtcccagttaggctgtccattccccaactttattcacaaatctggtgtctgtagaaagctgggggtccagccagnctgggggcggctgtccagactcccctggccccatgccctcagggagggagcggcagatcacggagatgcgccggccccggggaatctggcgttccccaaagaaggactcttcatcccgaaggatctcatgggagaagtcataacgggctgagcccctaaggatgtagagggagcccggctccagcaagagttccagccactcccccggctcctggggtgttgcaccagccgcataacgctgggagacaggagagacaggcccggcgatggtggccccgcagaacttgatgctgtccacgtggggcttgatgtagccgcgggttccaggtccagcacgtgcacggaggagagcagggtctggccggggccaaaggcggccgcctgcacgcgctgcaggatggcccggctggcttctgaccagcgcgacttctctgtctctcggaagccgtggatggccgcgtcccagtgatcgtattcgtagcggcggcggcgcagctcgggctccagttctcggctcagcgtctcctcctctgccgtgctcaggaagccaggccgcaccacggccgcgtcctgcaggcggctcagcacggaagggcccgagcctcgcacccagctgggccctggcagcgtccgcagcgccagcagcccagtcccggccataatcccggagcggggtcatgagagagggcagggttggggaacgcccccgccaaaagccattgggggtacctgcggcacggattgacttccctc

SEQ ID NO: 8359 - DNA, 778 bp, Homo sapiens
  misc_feature (1)...(778): n = a,t,c or g
ttttttttttgtcttcatgtaaaagcactgcctaaaaaatgaaatagactggtttacaaaatcgaaaggaagagcatctgaaacagccttaaaaccgaaaccatatccaaggagagctgaaataaggcatgtgggtggcagaattttgcaagttaactgaaaagcaagaccatgggcaggagttctgaaacaaggccccgccatccggtgcccagtaagcctcaccacgcaccacacccgcgcaggacagacaggagtgctgcaggtcagccagaggaaggagggcccacactgccagcacagcgcaaggacatggtgcagagctgagagcactcagggagcagctcctgagtgaacagatgacagacacgcctccttctccgtttgagctaggtttacctgaacaaataaaccagttggtttcaatgggacaggtgagggcgatccaaacatacaatctgatttagacattcctaaaaaagaaattagcactttttgttcctactttaaattgaaagcagtagccctgttttcaaactttcacagagagactgtctgttggtgtgacagaagctccactcagtatattgtgtggacaaaggagcaatatatctgaagaaacaagagagagcagcgtaattttgagagaggaagaagcagctgattatttttgaactgccaccaaaggaaattcccctcgtgccnnnnnnnnnnnnnnnnnnnnnnnnnnnnnnnnnnnnnnnnnnnnnnnnnnnnnnnnnngtcanagggtttcaaa

SEQ ID NO: 8360 - DNA, 386 bp, Homo sapiens
gcggccgcgctgctcctgctgctgctggcgctgtacaccgcgcgtgtggacgggtccaaatgcaagtgctcccggaagggacccaagatccgctacagcgacgtgaagaagctggaaatgaagccaaagtacccgcactgcgaggagaagatggttatcatcaccaccaagagcgtgtccaggtaccgaggtcaggagcactgcctgcaccccaagctgcagagcaccaagcgcttcatcaagtggtacaacgcctggaacgagaagcgcagggtctacgaagaagcgcagggtctacgaagaagaatagggtgaaaaacctcagaagggaaaactccaaaccagttgggagacttgtgcaaaggactttgcagattaaaaaaaaa

SEQ ID NO: 8361 - DNA, 472 bp, Homo sapiens
  misc_feature (1)...(472): n = a,t,c or g
gaaactctaccattgtatgcatctgatcattttcacattaaagaagaaagtgcttttcagtcannnnnnnnnnnnnnnnnnnnnnnnnnnnnnnnnnnnnnnnnnnnnnnnnnnnnnnnnnnnnnnnnnnnnnnnnnnnnnnnnnnnnnnnnnnnnnnnnnnnnnnnnnnnnnnnnnnnnnnnnnnnnnnnnnnnnnnnnnnnnnnnnnnnnnnnnnnnnnnnnnnnnnnnnnnnnnnnnnnnnnnnnnnnnnnnnnnnnnnnnnnnnnnnnnnnnnnnnnnnnnnnnnnnnnnnnnnnnnnnnnnnnnnnnnnnnnnnnnnnnnnnnnnnnnnnnnnnnnnnnnnnnnnnnnnnnnngtgctttttagtcatctgcctcatggtttgaaaagtggactgtgggactatgcagtggcagaggcccaggaagaggctaccagagagctggagtgcagggaggggctgagtggg

SEQ ID NO: 8362 - DNA, 1147 bp, Homo sapiens
agaaaaatctctgaaagactttactgaccaatcagccggagccccaggagcccaaggggtgtgggggagtctggaggcctcattatgtctctggcttgctccccacgctgaaaccctgcagccttaagagagaggggccccggcctgctctccctccctccccccatctcctcctccgctgtgcccgtctctccggagccctcctgcctcattgctcctgtaattttggcctttcgagtgccttgggaggtttccctgacctcccgtgaagatacagagactgtctccttttttttttaactttgacaactgacttctgtttccttttctaagttttatttttcaaaccaccccggacagcccccagctctgattccttcaaggcccggcctgtccgggccaccattccacaccttgcggtttgaaacagctgtttttcccacatttgctgcaggcatggctgtctcctgcccctgcctgcccatctggcctataccccagccgtggggcccggggtccctgccgcagccccctccccttctgatgccttaaaagctgggccccaggcctgctaggccagagccacagatgccaagctctgggagcttgactatggaccaaacagctctggcctagggattgggccaccctacccaggatctccaccctggggacagtagaaggggaaagccttcatcttggcgaaccggccccaccaccccctcctacccgggcctccgtgcagagatgggctttctctgccagtcccctgctgtctgtctgtgggagtcggacattgtgcccatctcccggagcctctgctgtcactcgcttgttgaagatgaattcttgaattctgcctgcccacccccggccagatccctggagctggcctccttccagcccagtgccagaaaccagcactccatgaagataaactctgggcccgcccaccagcaggacctgtcgacctgaggtgaccctgggccttgcccccagccaactgggccaccagcttccctcccttgactctgggggtccacatccactccaaggggactattcccccgaccccaccccagtctccccacacggacctttgctgaattaaagtttgtaagtaaatggttttaaagaaaaaaaaaaa

SEQ ID NO: 8363 - DNA, 1292 bp, Homo sapiens
ccaacacctactcacttaagcacttgtataaagcctccagggttgggaatgggagtaaagggcaagagggcggacacatgaagtttagtttctaacccatcatcaccctaactcaaccttttctgagccaaatggcttgaattgaagccagttgtcatggaaatagtaagaggttagggtttaagagctggggatgcgggggtgggagagagaaccctcaacatccaggatctatataatgagagctactttaaaccctcaggtccaccctcatgatgctgagttatttagccagagggtgcagcctgcttatgcccaaattccctcagccaagagagagaccaaagagcctctggaatggccctgctcccagcctctatcttcaggtcaattagagagagtatagagaccccagagtcccctgggtctggaaagcgttaggagaggtcaagaaaggagcagtaaggaggctgaaggttacagggcatttgaatccaaatcactgctctgggctagggaatagagccagcagaccaaggtgggaaggattctggaagggggacattttaagtctcctaaccccaaagctcagggtggaagaggggagaacaaggaagcagagtgtataattattttttccttttatttttggaatctaacagtacctggcagcagggaggggaaagtacagtggggaaaagcatctgacaaggccagttagaacagaggatgggaaggatggagactcccgggcttggaaggctaggaagcaggcagagactggttgccatttcaagtcactagctaggcccattcattcctcccacaaccctgacccattctcctctggactcactgtgcctcagtttcttcccctcaatggaatgagaaatgacagcacccgccacagccaagagatgaattctgagcacttaccacgggcactttatggacataaaatacctctcgctgtgggacagataaccagggcaccagagtagtggtgaagagatgtgaggcttaagaggagtcacaggcttcagagtacaagttcccctctgcctcccagctggacagtgcctagaagccaaggagttgagaatctcctgatccacaccctatccttacttcaccaccaggcctcttggctccaggcaagagcttagaggatgtcaggagaggtgggggtaagaatcttcagcaaaactgtcactctaagtagagccagcagttacgggtctgataaaaacagtactgaactaaagtaaagcccaagctggtgagcaaaaaaa

SEQ ID NO: 8364 - DNA, 289 bp, Homo sapiens
gttttcagttttattgatagtcttttcagtattattgataatcttgttatttttagtatgattctgtaaaaatgaattaatactaatttttcagatgtatcatctcttaaaatactgtaattgcaatttaataattgtattgaatgccatcaagtttttttaaaaagcttatgcagcattagaggaatttattttaatgcacatttatattcaacatagacattaattcagatttttacttgggataaaacaaattctagttttccctttgttttgaaattacttttaa

SEQ ID NO: 8365 - DNA, 579 bp, Homo sapiens
tttcacaacaaagaccacgccatttatttacaaaggccagtgtgggagctgggggaggcagggagggaaagccacacagacatcttctctggactgcttgggaccctttcccacttggagcaaactctgttcctcttgccgtcatattctcagccatggggtcggtcctccaagcagctgggccaagtaggagagggaagaggtgatatgagcctcctctgtgctctgacagagaaatgtccaattccagatcaaaggcatcattgccaccctctcctctccttcctcaaagaaaactttctggcctggagggaaatagttaagaactgaaaggccagggggtctggaggaaaaaaaccctctactattcccacaaggcagtgaggggtgataagggtgctagtcacagccctgacagcttcagaaagggtacccacattacctctgggttacccagcatccagagccccaagggacctagctctcccggatatatattcctgcaatggactgacctttttacccacttgtctctggtggtgggagagcactctgaaccagaaaccaacaaggaatcca

SEQ ID NO: 8366 - DNA, 141 bp, Homo sapiens
tcagctgcagcggcgactttcagtttcatttccacggaccctcctgcctgggccgcagccgccgccgcgatgcccagtaagttcagctgccggcagctccgggaggcggccagtgtttcgagagtttcctggtcgttcggg

SEQ ID NO: 8367 - DNA, 694 bp, Homo sapiens
tgttttaaactccggacgggcttttttctcctcctcttgggggggaccagaggagcggcgccccctcccccctccggcgcggaccccggtgcgccttgctcgcccgcagccccgagaccgcagcgtcacaatgtagcagggaccccaggcgtcgtgctcagaaaatggaaaaagagccagggccggaaggagggtgcagaagcgagtccgcgtgcggagccaggaggcagcgtcgcgtgggagtgctggcctgaagcctccatgccccggcagagggacggacacgtggacgtctagcgggagaagccaaagatgttgaccaggaagatcaagcttgtgggacatcaacgcccacatcacctgccgcctgtgcagcgggtacctcatcgacgccaccacggtgaccgagtgtctgcacacctgtacgtgccctgcccgcgccacccagggaggcgcgcccttcccagctctgtgctcttcagaaccttggcttttgtgttaccacacgcttttagctcaagcccgacaaaagcaggacccaggaccaggggcagagacgatcttgaagataagtcagaaaagtcatttcacgctaaaggtcctgtgggtggtgtcagagcagatgaggcctcgcttaggagagcgaaacacaggagagaccccacattcctcccacggagcagcaaggccatgc

SEQ ID NO: 8368 - DNA, 414 bp, Homo sapiens
  misc_feature (1)...(414): n = a,t,c or g
cagggggtagtcaagatgttgctttaggaaaaccacggaagctgaaggtcttggtgttggtgcggaagtcgttaccttttgtcgtctttttacactaggtttttgttttaagttagtttgagaaataagagcagtcaccatagttagttagctttgcggcccaagccaatgaccgaggccatcacctgtgctctggggtttgtccctggggaaatgtcttttcatccttacctgccaccgtgtgcattgcaaagagggacaaaaggggctctctgggaagggctctaagttgtcggtgatgaggctaccgtgttgtttttgagactccgtctccaaaaaaaaaaaaaggtgtcataaacctctgaggactgtaggcctgcttctttaggtttntcatttgaggattcccaggag

SEQ ID NO: 8369 - DNA, 404 bp, Homo sapiens
accggctggtggagcttgggcagagctcaggcaagaaggcaggtgactggtatgggccatcgctagtggcacacatcctcaggaaagccgtggagagctgctccgacgtcacccgcctggtggtgtacgtttctcaggactgcacagtgtacaaggcggatgtggcacgcctggtggccaggccagaccccacagccgagtggaagtctgtggtcatcctggtgcctgtgcgactgggtggcgagactctcaaccccgtgtatgtgccctgcgtgaaggaactcctgcgttgcgagctgtgcctgggcatcatgggtgggaaaccgcgacactcactgtacttcattggctaccaagatgacttcctgctgtacctggaccctcactactgccagcccactgtg

SEQ ID NO: 8370 - DNA, 1457 bp, Homo sapiens
cgggaacaccctgacgtaaacaagaagattgacgcagcccgcagagacccgggcagagaagaagcgcatggccatggcaatgaggcagaaggcctgggcaccctgggcatgacgacaaatgaaaagggccaggtcgtgaccaagacagcactcctgaagcagatggaagagctgatcgaggagcctggcctcacgtgctgcatctgcagggagggatacaagttccagcccacaaaggtcctgggcatttataccttcacgaagcgggtagccttggaggagatggagaataagccccggaaacagcagggctacagcaccgtgtcccacttcaacatttgtgcactacgactgcccatctggcttgccgtcagtttggctcgaggccgggaagagtgggagagtgccgccctgcagaatgccaacaccaagtgcaacgggctccttccggtctggggacctcatgtccctgaatcagcttttgccacttgcttggcaagacacaacacttacctccaggaatgtacaggccagcgggagcccacgtatcagctcaacatccacgacatcaaactgctcttcctgcgcttcgccatggagcagtcgttcagcgcagacactggcgggggcggccgggagagcaacatccacctgatcccgtacatcattcacactgtgctttacgtcctgaacacaacccgagcaacttcccgagaagagaagaacctccaaggctttctggaacagcccaaggagaagtgggtggagagtgcctttgaagtggacgggccctactatttcacagtcttggcccttcacatcctgccccctgagcagtggagagccacacgtgtggaaatcttgcggaggctgttggtgacctcgcaggctcgggcagtggctccaggtggagccaccaggctgacagataaggcagtgaaggactattccgcttaccgttcttcccttctcttttgggccctcgtcgatctcatttacaacatgtttaagaaggtgcctaccagtaacacagagggaggctggtcctgctctctcgctgagtacatccgccacaacgacatgcccatctacgaagctgccgacaaagccctgaaaaccttccaggaggagttcatgccagtggagaccttctcagagttcctcgatgtggccggtcttttatcagaaatcaccgatccagagagcttcctgaaggacctgttgaactcagtcccctgaccaccacacagcagctgcggcggcgaagacgaagctggcttgcctttccaccctctgttctccctccttgtgcattaagttccctccgcgggatgctgcattgttaccccgcgctcccctctctcatttttcttggtgtggcttggggtttttaggcttcctgttttatctcgtgtgtgtggtgcaccagctatgaggttgtctgtaacccaagccat

SEQ ID NO: 8371 - DNA, 895 bp, Homo sapiens
ttttttttttttttttccttttaaaaactttatttaaatggagactcttagtcaaatgattggaaaaccaataacgaaaaatagttcttcaggttcttctcctggaaaggcggaggacacaccaaactgcactggccctgtcaggggacacggcaccctcgtgggaccaggctcagccctcggggtggcacgaggtcctgcaggctgcaggaccctcacactccagccccgtctggtgacccaacccgggcccgtggtgcatgctggggaaggccactggccggctccctgggcttcggctcctgaggaggcatggccccacaccctgcccggccataaatatatacagattcctgggcatccagggcaccaggaccgacgcagagctggggtcctgtccctaagcctgttggcacagcgactcttgacatgggagccagggagctgggaccgccgcacccctcccctgcctccctcctggggtcaccaccctcaggcggctgccagctggcctaggacgcggcggaactgctgggtgctgtggcccagctccttgaccctctccaccatgtcctgggccgcggaaggcgatgggtactgcaaggcagcggccttggtggtggccacgatgccgcgcaggaggtcgcacagcaggttgctgtagtgggtcacctggctgcgcacgtcagcagccttggcctgccgtgacagtgtgtccccgatgaacaccagcttgtgggcgctgaggatgacgaacttgctgtgcgccacaaagatcttgggcggctggttggtggccacggcggtaaagaaggcgtccacggcgttggtcagtgtggtcaggttggcctcacactgctccaggtagaagagcagcagctgccggtccgagggc

SEQ ID NO: 8372 - DNA, 336 bp, Homo sapiens
tgccctgttttcccaaactgggttcattctcaggctgggtcctccagagactggcaagacagccctatgagctctgggtccccatcttgctaccttcagaactagggagagaagagtttctctttctcagcagttctcataaatcctcttctactgagttttgctggttccagatgcccatccctgaattacctgctgggttgggaggccgatgttctgactggccaggcctgggccatgtgctctctcctggagcctgtggccaggcctaaccctgcttctagccacatttcatggactgagtgtggcagagggatgggtaccgcaaaaaactat

SEQ ID NO: 8373 - DNA, 446 bp, Homo sapiens
ataatcagaaggttgtcctttgtctcagcaatttttaagctaatagtagcagaaattgcagtggaaatagactgctttgccacagcattcagaaaatcatttatctttttattgcagttcttgtcaccaaacaatacattttagtacttctcaaattgcagaactctcatagggctgggaaaatgcctgtagacacatacatactatgaatgtgctaatgttttttgtattttcatagcccatcaaagctcctgagtcagtttccactataatcactgcagaatcaatcttctacaagggagtatattaccaaattggtgatgttgtttctgtgattgatgaacaagatggaaagccctactatgctcaaatcagaggttttatccaggaccagtattgcgagaagagtgcagcactgacgtggctcattcctaccctctctagcc

SEQ ID NO: 8374 - DNA, 731 bp, Homo sapiens
cacggggctgggccccaggcaccgaaggttaagccgtgggtgtcctgggttgttggaggaaggcaggagcccccacctggaggctaggcactcacacactgagaggcagcatacccggcgctgacgatggacgcgaggagcccagaccaggaggaggaggagcggggtcaaagccgtttactgcccctttgtcgaagaaagatgtatgccctgatcgagagaactttgtgccattgccattcagcaccccacagttaacattccctgaaatataggattttcgtgatgcttggtcctttgcaaaattcctgcaagctgctaatttggattctaaagcccctactttccgtaagagatcccccacgatgtttagtgctgatatcctagcagagggagttagtggactggtaccaaaaccatttggtatagctttcggtgaaggaaaagtgttctccgttcctttgccaacaggggtagctggcaaagaaagtgatgcttggacggcggagtccatcttttcacagtctagagttggagagctaggagccgactttctagttacttcctgttgtctttcccgaactgctagttcttgccttaaatctcttgcttcatcctttaacctctgtacagagaccaacaaagattccttttcatcaagttcactttctaaaaatgcatttcgttcaatggcctggtttagcctttgttcaaagtcttccagtgaaact

SEQ ID NO: 8375 - DNA, 382 bp, Homo sapiens
aaaaggagaagggcataagacagtttgaggaaggcattggaagaggaagaggggcaatgtctcctttgtgatcattgttggtatataaacttaaaatctcagttctttttatggcacttgtggagccacttcctctcctcaccaaaagatgcccagtaccctgaatccgatcaaattactctcctaaagtataaggcttagtttctgtgtgctgcttcgcgagacagttcccacaaatcgagagtgttaatcagacttttgtgttttcttttttggattgctgttgtttgttttcatttatcatttgtctttgcctaagccaggctcatcaggaattaacagccatcaggtcccgatgtgctgacagcagacccacttagag

SEQ ID NO: 8376 - DNA, 342 bp, Homo sapiens
  misc_feature (1)...(342): n = a,t,c or g
ggcacgagnnnnnnnnnnnnnnnnnnnnnnnnnnnnnnnnnnnnnnnnnnnnnnnnnnnnnnnnnnnnnnnnnnnnnnnnnnnnnnnnnnnnnnnnnnnnnnnnnnnnnnnnngttgatatttttgtttagcaggcaattgacctggttaggttgaggctgtgtgttccaacacacctctgtagggtatggttccaatgtcagttcagttctaaagccttttgatatgttatgttctcttctgtttttttttttaaatctctttaggtctgtcatgactgngngccactctggttagngngcggcatgancggtagtttgttcgtgagtttaaatctgaaag

SEQ ID NO: 8377 - DNA, 299 bp, Homo sapiens
aaggtttcccattgctccttccccagaaggattccagtgcaaccgatttcaagcttgcaaaggcttttaactgctcgagataatttttagagctaactatgacattaactacaaaattcctgtcctctagatggcagagaccaagagtaagtactgccacatagttacaagatcaagctcccacggacataaaacaagatgagagggaaacctcatccagtataggtttcaggaacacacagcaaagtttgtaaccgaccagcccaagaggctggcttaaaaagtaggcttataggaat

SEQ ID NO: 8378 - DNA, 225 bp, Homo sapiens
tggacttccagctaagaatttaagttaaaaaaaacatacatatatacgtgtattaatgtagacaaacaaacctgaaactgtctttaaaaactttgttttgctattatgtgaaatttaaaattgctgtctaaaatatttattcacaggtatataatagtaaatataacctctatataggcagttatgtataattaaaaacagctttttattcttattcttgacaca

SEQ ID NO: 8379 - DNA, 661 bp, Homo sapiens
atccgggccctctacaccaagatggttccagcagctgtttcccattcagatttctggcatcggtatttctataaagtccatcagttagagcaggagcaggcccggaggacgccctgaagcagcgggcggaacagagcatctctgaagagcccggctgggaggaggaggaagaggagctcatgggcatttcacccatatctccaaaagaggcaaaggttcctgtggccaaaatttctacattccctgaaggagaaccctggcccccagagcccctgtgaagagaatctggtgacttcagttgagcccccagcagaggtgactccatcagagagcagtgagagcatctccctcgtgacacagatcgccaacccggccactgcacctgaggcacgagtgctacccaaggacctgtcccaaaagctgctagaggcatccttggaggaacagggcctggctgtggatgtgggtgagactggaccctcaccccctattcactccaagcccctaacgcctgctggccacaccggcggcccagagcccaggcctccagccagagtagagactctgagggaggagggggccacagattagggtgtttgggctgactcggttagtggaagtttcaccctccaacaatggaagaaaggtcaagaaggcatca

SEQ ID NO: 8380 - DNA, 857 bp, Homo sapiens
ttttttttttttggggggaaaaaaggtaaacctttatttggaaaaagagtttaaataacaatttaaaaccccatttcactttcaaaacagaaacaagaaagcaaggaaaagataatctatcaagcatctgccctctgctgtggttagccattttaaagctgcatttcccagcagaagagaacagtgatgggccctagtcctaggaacccacagggcactgtcttgagacccttttagggcagtgtccagggaacagacagacagaatgaatggtggggtgtagacagacctggggctcagacagggcacatgcccagtacccaggaaacaaagtttgaaaatatatacacatagaaaaataaattccctagaacctaggcatggaaagcttctaaccatgaatggcagcagcacaatgcaaactgggtctttggctttcaaaaaaaggaaagaaccttaacccctggcttactgtcccgaactcaagtctcttgaccactgtcttcagtcccactttggaggtcgagtgaggcaagagcaagtcaaatctaccagggccagcagccactctgacttagggagatgtgtggaggggctggccccaggatctcccaaggccacaccccagcaatgaaagattaaggcatgcaggtgacacagtgtggactaaggagtcccctgaataagccagggtacccttctgttaggggagggaaagcagacgcaacaagcagctgaggccttgctggacagagccaatccgcaagtactgccacttcaaattcttggaccagttttgtccaaggccacctttctgctgaggcagtttggcctgagctaaataccaggttttctag

SEQ ID NO: 8381 - DNA, 261 bp, Homo sapiens
ctgccctagtagagaagtgcaacacgtcataagtggtcaaaacatttttattggaagtaatgcatctgtgtgattttctgtttagtccctatttcagagctctttgttttttcttaaaatgtaaaatactctcaactttagcttgagaatacctgaagtgtttagttggacatttattatgagccagtaacatatttgcacaggagctctggaggagagcagtatcacttgtggaactctgagcgagttgtatagcccccc

SEQ ID NO: 8382 - DNA, 383 bp, Homo sapiens
tttttttttttaacgctgttcctgttgccttctacctttaaatgcttgaacatgctatgccttagtttctgaaagaaatcactgaccttttcaagggctgtgatctgaatggttggcattcccgcgtaaagttcctttgttgtgtgcacagcttttataaatatatctagactcttcggatcctcatttaaaagggaaactgaaaattcattatactttcccagagtgagatgcagaaccatggcctcatctttcagcacagctgtgggctccttctggatcttttctagcagttgttcagccataggacatagctgagaaagcaccatctaaagatccaaagacttagtagtaaatagttatgtatactgatatgtttttgc

SEQ ID NO: 8383 - DNA, 388 bp, Homo sapiens
ggagtgcacaggctccatgccagacgcttccagaatcggcagagctggcctctggggaagaggagccaggggttcctcctgcaaaattaaaaaggttccaaaagtctttgtaattagaaaggacaaccatgaggacactggaggtcttcctgcccagtgtgggctgagccagccccggcagtgagcctcagagccccaggcctcctctgtccggcttccagggccccacacaggttgtcattggggagagactgttctgctgagagcccctcacccaggtttttgcctggtagccccagcccttcccctactctctgtgggctctgggaccccagttctccgtccctggttctcatcctcactccctcgcctacccagttaggacccc

SEQ ID NO: 8384 - DNA, 226 bp, Homo sapiens
aaactcaagcattagcaccaacaagctctgagcatcatcagtctctgggaagccttctgaattagacaagggctgcctaccagcacagctacaaaacactttaaacctgaccagctaaatggataaacctagcctgcatagctttttaactggggtctcatacagcacaggaggcctacttgcttcaaggaactgaaaatccagaggatgaattgcgttatctggg

SEQ ID NO: 8385 - DNA, 365 bp, Homo sapiens
  misc_feature (1)...(365): n = a,t,c or g
caaactgaacatgttcaacattttcaacattacattaaaaagatcattcatcatgaccaagtgtgacttatcccagggatgcatggatggtttaacaatatgcaaatcaatcaatgtgatatcatataacaaaatgaataaaaatcacacaatcattccaatgcatgctgaaaaagtatttaacaaaattcaacatccctttatgataaaaactctcaacaaactggatatagaaggaacatacctcataataataaaggncatatatgacagacccatagctaacattgtactgaacagggaaaaatggnaaacttttcctgcaagatcaggaagaagacaaagatgcctatttacatcacttt

SEQ ID NO: 8386 - DNA, 614 bp, Homo sapiens
ttttttttttttttcggtattctgcacacagttacgtttctggcttggttagtgaccctaccttggctgtgggcactgaggtgggaagagtgccatgcggctctacagacagaagccacccctgaatgctgggctccagcctgctgtctgcctgagtgcatgactcgggagccctgtcacggcacacacgccatcctggcagcctgaggtggggacacaagtctttgaccccagcatcgtgcatctcaggcactagcacagcagccacctctgtttctagttccagggccaggctacatctcactgcctcttagggggaatgccctggtgtgtgagatcaaaaagaaaatgatttctgctgcctggcagtcttctcaatggccttgggttaagcctctctcaaagttaaagagtcaataatgagggtagtatgggttatcgggaaaagtgtctttatacattcactccttttaacctcacatggaacctgtgtggaaggtcctatttctccattttgtaggcaggaaattcagactcagagaagtttgggaattaccccggtttaacctctgggttgaacccggtaattattactccgggaagagagccctcct

SEQ ID NO: 8387 - DNA, 479 bp, Homo sapiens
  misc_feature (1)...(479): n = a,t,c or g
aggctgcagtgaatcgtgatcacaccactgcatatnnnnnnnnnnnnnnnnnnnnnnnnnnnnnnnnnnnnnnnnnnnnnnnnnnnatttttnnnnnnnnnnnnnnnnnnnnnnnnnnnnnnnnnnnnnnnnnnnnnnnnnnnnnnnnnnnnnnnnnnnnnnnnnnnnnnnnnnnnnnnnnnnnnnnnnnnnnnnnnnnnnnnnnnnnnnnnnnnnnnnnnnnnnnnnataataaccagatgtggtggcacacactgatagtcccagctacttggggctgaagcaggaggatggcttnagcccagggaggtcgaggttgcagtgagctccgattgtgctgctgcacttccagcctgggccaacagaggaagacccttatctcaannnnnnnnnnnnnnnnnnnnnnnnnnnnnnnnccctgatgtatgggtattctttttattaattntttgggttttcagccgggntggtngttggtt

SEQ ID NO: 8388 - DNA, 902 bp, Homo sapiens
  misc_feature (1)...(902): n = a,t,c or g
taacaaaaaaaatatattaataaaaaagttcaaaaaaggggggggattgtcatctcctttggggtgcgatggcttcaaatccaaactgaggctctccgggtggtaaggatgtgcgaggaggcctcttgaagaactccaggcctatcatgctgtctctccgctaaagccaggaagcgctggggggcagaggagcggagttgaggcagaagccaggtgaggctggagtcctggggtaggcaggctgtcgctgccgctgccgctgtcgctgccgctgccgctgcctgtgggaccccgggctcttaggggtcttgacacaggacgggcctgggccgaaagcccaggcacgcccgaccaagagagtgtttcttccactcccggactctgccagtcaggatggtggtgcctttcntgaagcttcaggacctcatcgaagagattcgcggggccaagacntcaggcccaggagcgggaggtgatcnaaaaggagtgtnccacatccgggcctccttccgcgacggggacccagtgcacaggcaccggcagctggccaaactgctctacgtccacatgttggctaccccgcccactttggacaggtactggccaggaatacctccctcctgagcttgatgaaggctagtggggcagagtcccagactctctcacctgtttatgccctggttttttaaattctacaatttcagagtcttcacagcctgcactgcaaacctctttccccattgctacccctactggtcatcagctggcctgaacccttcattctctggccagcctcctttagggcaggcatctcctcctctccgctcccatcctcctcaactcctagttcctcctacccactaacgcctgaatttcctaagcttctcctcttgttgaaggga

SEQ ID NO: 8389 - DNA, 406 bp, Homo sapiens
gcagtgggagaacaggtaatattagcaccatgaaaacaggtaatattttactatgattttgatttgtattttcccagttattagtgatattgagcatattttcatatacctgttggtataagaaataaattctttgctcattttaaaatggagttatcagttccaatatgcttctaaagattagttggggctttgctgtaacatctagacatgtatatctgatttggaacaaatccacttcctctctgtgtagtgcctggcactactgggcacctttgtcattcaaataggcacactctcctgctcccaggataggaaactgtcttgtccattcagtaccatttatccatttccatggttggccttgttctctgctcagcccaatccagtgatcagatgggccttt

SEQ ID NO: 8390 - DNA, 270 bp, Homo sapiens
  misc_feature (1)...(270): n = a,t,c or g
tggggtgcgggaggccctggccctttccccttcccctcccctccttgtctagtttcccacattccaaaagggggcctgggatgctagccccagagatgccagcccttcaggaagcaggtgtcctttcccctctctgcccctgatcactcccagcactccccttgccttcccctgtcttcacctgccannnnnnnnnnnnnnnnnnnnnnnnnnnnnnnnnnnnnnnnnnnnnataacttcttnnnggnngacagacantngcgggggggg

SEQ ID NO: 8391 - DNA, 929 bp, Homo sapiens
  misc_feature (1)...(929): n = a,t,c or g
catgtgtggtggcagttgaagacaggggaaggcaagggnagtgctggnagtgatagcggctgagaagtcagcttagcgggatgggcaagttccttacaatgtgtcacttgcaaataacaaagggactttgagggacatttcattaaatataattactgatactttagaggttactcatttacggtgcaattgcttctgtttgctaatgctgctttgcaaataaaacttgctgccgaccacccacgggcataaaatcaagtgcatttcagcattgcctaaagagctctgacaccacttttcatgttaagatcttcatttagctcctttactgggatttattggatgctgtaaaaaaataaatttacactggatatgtgaagggtttggatctcagataaatgcattttgtggaattgattttctgaaccgaccctgctgtctgcaaaccttcctccatagccatatctagagtgatctctcgctgtgctaagagcaagcctacttcgcatttcttcctcggccatcagcgggtaacagtgctgactgctgccaaggtgcactgtagtaagtaagtggcatagagaacgaggaaaaagacccccccacccctccctgtgctgactcctgagtcggggtgggacggccctgcaatgtggcaggctcggtgtggattgactactccctcccctctgactctggcatcttggtaaggagggaggggcaccacccatctgggtggagacagctggggtttgctccagtgtgtgtagactggcagagcatgtgagggagagggctgggaagagacggccctgggcccgtgaggtgcagaactctccctgcaggtagtctgtctgctctgtgatgtgctgataggaaagagcccccactggccctctggttcacttctattatgaataaatttgcac

SEQ ID NO: 8392 - DNA, 101 bp, Homo sapiens
ggtgaaaaaacctgttcaaatggtcactcacaacttttgtggccttactttttgtctccgaaaggacaaacatatcagaactaacatccacccagaagaag

SEQ ID NO: 8393 - DNA, 1038 bp, Homo sapiens
ggttggagagataattaaggtggacgttattttttctgagcgtaagtcgtggctggaaatctggagagcctgaaagagtatccccctacccaaacctgttttttccttttccctcaagcctcatttggccacaggccagatgtcaacaccagggggcgccacagaccatgaaggcaccgtgcagctgggattgtttgtggtcggctactgggtccctgacttaaccaggggagccaagaccctgtagccaagtggcctggattcaacctgcagctcaggtcttactgacacttctccccctggtgcctcagtttcttaatctgtgaaatggtgaggacattacagcatttacctctggggcgggtttctcaacagtcagcacttatttaacaatttgggacagagaatcttgtggagtggtctgtcctgtgcattgtgggaggtttgccagcaacaccccactcaccccctcccaccaatccccatgtgacaaccgaaaatgtcccaggatttttaggtctcccttgggtctagaagctgcacttaggcattttcccacctgacacttgagttcatctctgctttggtccacataaggccactttaaaaaaatgttgtttctttaaagattctaaccatcttttaaacaaatccattttcttcctctatttctgcattcagttaatccttccaaaccctttgtttagtatatcttgaaatgtatcaattcctgttctagtaattaacatatgtgacttgcatgatatctgctatgacccctagtagagctctgattcctttagcacagggaatgtgttctcgattctgctctggatgatgtaaatcaatttattttactttacttgtctgggatgttgctcctcatctgtaagatgtaaatgtggatatggcttggattactaagtggttttatttcttaattcacctgacatttgttgtgtgcctgctgcaagtcaaatacatggcatggtattgtttccttgttcacaccacagcaaatgagaaaatgagacatta

SEQ ID NO: 8394 - DNA, 345 bp, Homo sapiens
aggtcattagggtgtatttcccaggtttccaattgagaatctaaaccaagagaagtgagacaaaccatctaatatctgtatcatgctattaataggctgtgatgttgagtttctcacttactctttctgaggtccagggtccttatatgaagagattcatatatatgaagagattcgtctagagcagtggttgtcaaagtgtggtctgggggggcctcaagagcctttcaagggtattctaggtcaaagctgtttttataacactaagacatcatttcactatttatagctttccttttttttatttgagaggagtctttctcttttcccacattggagtgcagt

SEQ ID NO: 8395 - DNA, 360 bp, Homo sapiens
aggtaccgaacaaccctcctgctcacatgtcccccagggtttggggctcctctgtcccccgtcccgtgactaacacccttgcacgctgtctcacgtcctggcatttaacaacttgctctgcgaaggtggtctgttctttcagacccaggacctcggggtcctgtcagtcagctgctccgtcttttccctctgagagagagaccaagggcaaggagggcagtgacctgtccacagaggtagtgcaggggggggccaacatggagtcccagctttggactcactacgtgtgaacagtgggcaagttagggggacctctccaagcctctgtttttccccccacaaagtgaggtctgtttaacc

SEQ ID NO: 8396 - DNA, 1831 bp, Homo sapiens
ctcgagtttttttttttttttttttttcagctgggtacaggtttattgtggcactggaggtgaaagggggctggtgtggccagcaccggtgtgctgtggtggtggagggagtggggtgggaggataaggtgggtggggccagggcccaggggaccccaggctcgggccaggagccagggttaaggcaaccattgccagccctacccagaaatgcagggccacgactccaggcccctcaggctaggggccaccgcggcagctgtgggcagaaggggctcacacatgagagaaggcatgggctcttgcagagaggcctgtccttcttggagtagaaggtctttccttccaggttgatctgacatatcgcacagacgaagcaggtgtcatgcccagttgaagcccaggggcctccaggaagcggtccccagcgtcgatcttgaagtcacagccatggcatttcgtgccaaacatcttctcatagtctcgctcggcaatagggcacgccctcctccatgtagaaggccctgttccggatgggcgtcttgcaggcagcacaggtaaagcagtgcacgtgccaggtcatcttcagggcgtgcatgatctcgcctgtaatcttcttcttgcacttggcacagctgggtgcatagcgcacgtcatagcatggtgggcagaagatggcgcccttctcctcaaagaagccaccctcttccaggaccttcccacactggctacacacaaactcctccgggtggtacgcgtggcccagcgccaccaggtagcggccccggatgaccttgtggcaactggtgacacaccgggagtcttgccgttgttgctgccccctcctgggcacccctccggcagctgcctgcacaatggaggtgcggctctgcagcgggcgtggggcgtggctggctggctgtgccgggtcagcactgtgctcgttttgtccggggcatagcgctcggcaaacgcagggttccacagcccagggcgggcggctggtagggctgggggcggtagggccaggccagggctcctggggtgtagatgaggctggggctggggcttctgtctggcacctggcttgatttcttcaggtgctcctcatccggggtcttgcatgaactcggtgcctgtgaggtgggcaaggatgcggaaggaacgcgactggcctgtcccggccgcggccgccagtcctctgtgttctccatcagccgctgcttgctggcatctgggaccagcggtcggagcggctgtccattctgctgcggggcgctgtcagcgggcgggggcgccccaaagggcccgggccgtcttgttgagggagacgctgggtgcaaaggtgtaccgcggagggtccgcggcgggggcggaggccttctgcggtttgctctgaaccggctgggccctgctgaggcccaggctgaggcgctccccgcaggcccggatcttgttctgagcttcgatgtgtgtgaggctacccgcattctcgccatcgatgctcagcacccagtcacccacggccactccggcctgcgccgctttgcccccaggagtgagccgggaaatggagaggggcacattgaagtccttgcccccttgcagccggaagccccaaggtgctggcccctccagcactactttgaaggaatccatgatgccggctcctgcttggcccggccagggcgctgctctgcgtcgggctccagggagcctcgttgggatcggccgccagtgttctccctctttgccctgtggtactgctgtctgccaggtctgtgctgccttgggcatggaataaacattctcagccctgcttaaaaaaaag

SEQ ID NO: 8397 - DNA, 642 bp, Homo sapiens
  misc_feature (1)...(642): n = a,t,c or g
gattcggaacgagggcactctactccctcctgccacacaaggagctacgcttcatcatctatgccttccccatgctcaacatcacggctgccagaggctgctcctacctgctgaataactataaaaagtcttggctgtacaaagcggggtctctgcttgtgatcggacacctcgtggtgaatgccgcctactcagccacggccctgtatgtgtcccatttcaactacccaggtggcgtcgcaatgcagaggctgcaccagctggtgcccccccagacagacgtccttctgcacattgacgtgggcagccgcccagacaggtgtgtctcggtttctccaagtcaacagcgcctggaggtaggatccacacacagcacggccctcccagaggccatgtgagggccccttgggngngngngacagggcgatgtgggggccctgggcaggaccaccagctctcatcccacaggtacgacaagagggaggatgtgcagccggggacaggcattgctggcatnacacacacatcctcatgggaggtcggcccctggntttcctgggccttcttacaggggacacacaccgggtcctgggccagcttcgtnggggaccacaggtttttnagttttnaactttnacccaa

SEQ ID NO: 8398 - DNA, 1674 bp, Homo sapiens
  misc_feature (1)...(1674): n = a,t,c or g
tttttcaggtaaaaccacactgcctttatttggctaaagaacaaaatccaaaataactcagaacaaactaagaacagacaggaaaattacagactgaaccccacttgaggaagacttccccacggactcacactggtgatggggcgaacgttcaagacgaagccagcagtcctttccaagactcttttgtcttttagggatcctcaatacaaaacaacccaactaatccaggatatgtgttcaaaacagtcagttttccccctcaaaagggcgggaaggcccacttcaaacctccaggaacacaacccaagtcatcccagtgttaaacctggtgcttccgttttctgcctcaatccgagcgctaacataaaatcttggcagacaacaatctttcttcttcagaaaattaacatttaatggtataatcccaagaacatgttctacttatttacttggaaaaatagaagctagggaccactctttatccgatggcagtctattctatgagagaaaacaagaacaatcattgttatgactttgaaaaatagaacctttaaaaatacttatattggtaagcttaaaaaaatatcatcagttaaaaacattaagggggctttctttttctacctgtattggttcaacttctggtgagaatgtgtgctgatanaaaatctagaagctatggcttttagggaattaaanaaaagcagcnaaatataattgatttggaaagattttggataagtgatctggaacaggattaaaaaggcaaagagctcttgaaaataagctacccatagtcaaaataatccaggaagggggaatgacgccctatgaaccactgtggaaagaacatctagagatggtctgaccagctgtgcagcctccaaaaaaaaatcactatcgctcaggtgcagccccccaaaaaccaccatcactcaggtacagcctccaaaaacaccaccatcactcaggtgcagcctaaggagtcatcagtgatcagaaagtggctaagtttccttagcctccctcatattttttctcttcttcaggattttcaacctcctcacatccctaactttcttacccaagcctcagcaatataatggtctttggctctagctatcagcaatagctgcaagagcacaaatgatcccttcctagtcctctaaagtgtcaacctccattcttcagtgcttctgaatctagcataagaccaagctttccgtccggcccaccggaaggcaagtgtgcgccggcacctccccggctctggccttctaatgtctcacacacagaggctctgctctaaggccaacacttctggctctctcatcttggccacatttggcccacccatgttgactgctttctcgtgtgtgattcagggaaacagctccatagcctcaaacgttaatatctgaagatttagatcccaggcattgtggtggtgtgcacacctctaacctcatttaattaggcacagatgaccacattatgcaacttcccaacagctttctccatctacccgtgctagtccagcacctcagaccacatttaccccaaagtatctaacaggccacactataaaagattttagctttcagtcagacaaatagctttcagtccaaacgattagactgaggtggtagaagctcaccaaaaggggaaaga

SEQ ID NO: 8399 - DNA, 364 bp, Homo sapiens
taattcgatgattgcttagtcctcccccacccctagaacaccccagcacatctgaagatgagcgcctctccctggggtacctgcaagtgatcaccttggcctgcttgcataccttggctgataggaagcgcgccatccccaaggcagctcctgctgtggttggacagtgctgactgttagacagttcttccctatattgagccaaaatctgtcctgccacttgctggatcttggttgcagaccttcccattcacccagttatatatctttgctttcaaaatagtcaccttgagagaccagacatttttctgaaaacatcattactcagaattcagattcccctctgggatctgtcttcagaatc

SEQ ID NO: 8400 - DNA, 446 bp, Homo sapiens
  misc_feature (1)...(446): n = a,t,c or g
aactgggggccctgagagcttgggcaactttaatgagaaggaaaggaaaatacacagtgaccctgacccagaccccgaccctttacgtcaaaagcaaaagacgataattaacaaaatgcaatgtgcccggacgtggagtgagaggccagctgagctctgtcaatttgataatccctggtcgtgacccgcagcccaaagtgtgcaacaggagaagacgcactgtttacacaggccgcgcacnggtgggcttcgcgggaccggcgcagctgcaggagcagcagcaggagtgggattcttcctggccagtggtttgcatgcagccagctccgctcaggccaatgcaaccacatgcaggtcactgacacattggagcccaggccctgaaggtgctgggggatgtttcacggtgggggaaacggtgtgggaagtgtccctcattcttttgt

SEQ ID NO: 8401 - DNA, 1160 bp, Homo sapiens
ggctaacgagtgcagattattcaataacagctcttgaacagttaatttgcacagttgcaattgtccagagtcctgtccattagaaagggactctgtatcctatttgcacgctacaatgtgggctgatcacccaaggactcttcttgtgcattgatgttcataattgtatttgtccacgatcttgtggcactaacccttccactccctttgtattccaggcagggggacccttacttactcaaggacctctgtactaggacagtttatgtgcacaatcctaattgattagaactgagtcttttatatcaaggtccctgcatcatctttgctttacatcaagagggtgctggttacctaatgcccctcctccagaaattattgatgtgcaaaatgcaatttccctatctgctgttagtctggggtctcatcccctcatattccttttgtcttacagcagggggtacttgggactgttaatgcgcataattgcaattatggtcttttccattaaattaagatcccaactgctcacaccctcttagcattacagtagagggtgctaatcacaaggacatttcttttgtactgttaatgtgctacttgcatttgtccctcttcctgtgcactaaagaccccactcacttccctagtgttcagcagtgggatgacctctagtcaaggacctttgcactagggatagttaatgtggaaccatgggcaactgatcacaacaatgtctttcagatcagatccattttatcctccttgttttacagcaagggatattaattacctatgttacctttccctgggactatgaatgtgcaaaattccaatgttcatggtctctccctttaaacctatattctaccccttttacattatagaaagggatgctggaaacccagagtccttctcttggggactcttaatgtgtatttctaattatccatgactcttaatgtgcatattttcaattgcctaattgatttcaattgtctaagacatttcaaatgtctaattgattagaactgagtcttttatatcaagctaatatctagcttttatatcaagctaatatcttgacttctcagcatcatagaagggggtactgatttcctaaagtctttcttgaatttctattatgcaaaattgccctg

SEQ ID NO: 8402 - DNA, 206 bp, Homo sapiens
tgcccgttttattccttcccatcttaataataagtcctgcagagtgacatctctgtgttacagtgaagatggtcaagagattctcgttagttactcttcagattacatatatctttttgacccgaaagatgatacagcacgagaacttaaaactccttctgcggaaggagagaagagaagaggtaggtttactcaaaaccatgtcc

SEQ ID NO: 8403 - DNA, 371 bp, Homo sapiens
ctgtggctcctgtgtgtggcgttggcggtcttggcatggggcttcctctgggtttgggactcctcagaacgaatgaagagtcgggagcagggaggacggctgggagccgaaagccggaccctgctggtcatagcgcaccctgacgatgaagccatgttttttgctcccacagtgctaggcttggcccgcctaaggcactgggtgtacctgctttgcttctctgcaggaaattactacaatcaaggagagactcgtaagaaagaacttttgcagagctgtgatgttttggggattccactctccagtgtaatgattattgacaacaggtaatatatcttttaacaatgtagaaatttattggcaataaatat

SEQ ID NO: 8404 - DNA, 83 bp, Homo sapiens
cccagcaccactgtgagctccatcctgcggaaccccatctacactgtgcgcagtcacagggtcggcccctgcagctctccacc

SEQ ID NO: 8405 - DNA, 152 bp, Homo sapiens
tttggcctgtctagtataataaatatgtttttgtcagaatttgacccatttatgatgtaagcaaaaatgatatgtcttaatccatttgtctcacacactaattttataatttaaaagagcaatagtagtttcattcagaaagacaggtttaa

SEQ ID NO: 8406 - DNA, 288 bp, Homo sapiens
aaattaaaagaacaaatttttgaggcatcaaaagcccagttaaatctggtaccagaaactgaggcaatcatgaaagctgttgatagcctcacaaatcttaaccctgccacttgggttgaaaacattggaagttccaccattgaaatttttgtattaatccttgtatgtccgttctctctgttgttagtctacaggtgtatccagcagctctggagagacagtgaccagtgagaatggaccatgatgaccatggcagttttgtcaaaaagaaaagggggatatgtaggg

SEQ ID NO: 8407 - DNA, 263 bp, Homo sapiens
cctatactgaaattgtttagatatacaatttgaatgaactccatggtctaagtcaaattacctgtgataacccatcagttatccatgctatgtgcccaatttggagaaacagctggcacccaagaggacataagtccgatgttaagcatggactcatggagaaccaagatggctgccttgtccttcgtgagtccttaaagcttttgttattaaaagttatgcattccatgactcatcctggaaaagataaaatgatccaaatt

SEQ ID NO: 8408 - DNA, 560 bp, Homo sapiens
tcatattcactgataacatttactactgttattgactgctttaaaagtgttgggcattgtgctagaaaccattatatgcattatctccttgaattctcacaaccgcctactgaggtattctcagactctaagaaatgagatttaagagaagttatctgcccaaggtcactcggctggaacctggctgtaaaaatgggctgaagcaggtgatgaggagctgatgccgtttggacgtgtctcagagaaatcatggagggcgctgcggttcctaccggttccttggatgccttctacagagacaaccatagcccccaaattatagggatcacatatcagtgggtgagacatccttgcttgggatgaggaggggatgagctgtgtgaagcaaggcgcctctgtgatgggttccagtgatgtgtctgccactgtcttaataactgtgcaattctaagcagaacctttcctgtctctgggcctgagagttcccctctgaaagatgaggacttgacctagcaaggtcctactcacatcctgtagagaacaggcaggggaagttagaa

SEQ ID NO: 8409 - DNA, 1587 bp, Homo sapiens
  misc_feature (1)...(1587): n = a,t,c or g
tcggatataccttctcagaagctgcacaggaggaaagcagtgacaaagaaagaagttgtcattctttgcacgaaactggatggcttctacagggagccaggcctctgatatagacgagatttttggattcttcaacgatggcgaacctcccaccaaaaagcccaggaagctgcttccaagcttaaaaactaagaagcctcgagaacttgtgctagtgattggaacaggcattagtgctgcagttgcgccccaagttccagccctcaaatcctggaaggggttaattcaggccttactggatgctgccattgattttgatcttttagaagatgaggagagcaaaaagtttcagaaatgtctccatgaagacaagaacctgggtccatgttgcccatgaccttatccagaaactctctcctcgtaccagtaatgttcgatccacatttttcaaggactgtttatatgaagtatttgatgacttggagtcaaagatggaagattctggaaaacagctacttcagtcagttctccacctgatggaaaatggagccctcgtattaactacaaattttgataatctcttggaactgtatgcagcagatcaggggaaacagcttgaatcccttgaccttactgatgagaaaaaggtcctcgagtgggctcaggagaagcgtaagctgaggngcgttgcatattcacggagtctacaccaaccctagtgggcattgtccttcatccggctggatatcagaacgtgctcaggaacactgaagtcatgaggagaaattcagaaactctacgaaaacaagtcatttcttttcctgggctgtggctggactgtggatgacaccactttccaggcccttttcttggaggctgtcaagcataaatctgacctagaacatttcatgctggttcggagaggagacgtagatgagttcaaaaagcttcgagaaaacatgctggacaaggggattaaagtcatctcctatggagatgactatgccgatcttccagaatatttcaagcgactgacatgtgagatctccacaaggggtacatcagggatggtgagagaaggtcagctaaatggctcatctgcagcacacagtgaaataagaggctgtagtacatgagcgagctagagaaatcaccaccgtttagaccaagctgtaaggccctactacagacagtgtttaacaagtaaactttacaagaacccaacacaattccccagaaagtaacaatagccagaggttgaagggcggggtagaagaggggggaatgttgcagcgtaatccttcataccacctggttcttgatattctgccgcctgttcaagttcaagaataaaagcgacagcaggacccaaatgcagctcccaacccactccccaggctagacatgcttgtgtccacacagcacaccaatgtgatacttccactgaccggctgcagctctgcatgaaggactcggggtctggatgccatggaatcactgtggctcttgttgcagttttgtactctatacttggtttttcaattaagcttaatggcttttttaaaacatgacttgaagctctaaaaa

SEQ ID NO: 8410 - DNA, 268 bp, Homo sapiens
gacgcatgtgtttccttaacagtgagggagatcggtgccaaatagtgcagaggtggtatggcagacagcacatgtgatcccaggaaaacgctgtgccctcaacccctctagctctgggatgtttggaaaaccgcttgtgaagcttagctgacacttgtggcgtgttccctcaatgtgtttgatttttggagtccaaatggttaaaattgcccagataataagtcgccaaaaatcagctgtgcaaaagtagccttccaaaaggtcgacg

SEQ ID NO: 8411 - DNA, 659 bp, Homo sapiens
tttttttttttagattgaataagagaaactttattacatgtaggagatctttcaaaatatgaaaaataaggggcaaaaaattttaaaaactggttttacagatacacatgctaacaatgttctacagttacatttgtataaaatacattatacaaaagatttatagattttgcatacataaaaattaaagcattcagatatttctatgatctaacagtgcaatatgcacatacgtggaagaaaatactgattacctgagcaacatttttgtaatgcaaattaaaaatgaatccatcagtgcaccatttaaatacagactttaaaaaactccacctttaccctgtaacactgactagatccttgcttcatgatatttctaaaactaagcatatccttcatattttcaactaggtaattttagaagtagatactttaaaaaagaactaattactaagtagtggttcatttaaataactcttcaggacactgaaccaagcaggtagagtccaggaaaagaaaagctgtaaataaaaagtcctttggaggagataatttaacatgagtcttctaatttttaatgtggccagcagagtgtgtaaccatttttaacatatcttttgaaaatatgaactccataacttcctaggagtcgagatagc

SEQ ID NO: 8412 - DNA, 418 bp, Homo sapiens
  misc_feature (1)...(418): n = a,t,c or g
tttggccctcgaggccaagaattcggcacgagaaagcaaacaaaaagaaaaaaaaaattaaaagggaaactagaagagatgccaaaggttctggctgaagaccccagagtctggtgctacttctctaccacctgagggctttgggctgtcccttgggactgtctagaccagactggagggggagtgggaggggagaggcagcaagcacacagggcctgggactagcatgctgacctccctcctgccccaggttggatgattgactctgaatgtcggccaagattccgggagttggtgtctgaattctcccgcatggccagggacccccagcgctttgtggtcatccagaatgaggacttgggcccagccagtcccttggacagcaccttntaccgntcactgctggaggacgatgact

SEQ ID NO: 8413 - DNA, 61 bp, Homo sapiens
tatccctttctatgtagaaaacccaaaataataaacaaaaaaaaactttcaaaaaaaaaaa

SEQ ID NO: 8414 - DNA, 194 bp, Homo sapiens
ggtcgacgtgaggggggcgagacagcaaaggacacgggaaaatgagaagcatggatgggaagtgttgcattgagcataatttggaggtaaaatctccaacaccgtaactgagtggcctggggacctgatagaaagccttgctcaggactaaggcagagttcccagttatatcgcagatacaaagagaccaggaa

SEQ ID NO: 8415 - DNA, 331 bp, Homo sapiens
cctgaatcccccatctgtccgtgaaatgctgtggggctcttcaacccaactggccagtgacggtagcccaaagggctcttcacccgaatcttacattcatggaattgccgaatctcagttacgctacatacaacagggaattttctcagtgacgaatccacatcctgaaatttttctagttgccagaattgaaaaggtactacagggaaacattacacactgtgcagaaccctatatcaaaaattctgatccagtaaagacggcccagaaggtgcacaggacagctaaacaagtgtgtagccgccttggacaatacagaatgcccttcgct

SEQ ID NO: 8416 - DNA, 264 bp, Homo sapiens
ttgtatgatgtcttctgtcttgtccagctggtgccaactatgtttttgtcttcagttaggaagtagaagacagcataaaaatttataattgtgatactccactagtacatcttttttttttaaatgtgagagcttaagtttctctatgcaatatacatctatacaggcacatctcattttattgtgcttcactttattgcactttgcagacactctatgtttaacaaattcagtttgtggcgagcctgtgtcacattttggtaa

SEQ ID NO: 8417 - DNA, 384 bp, Homo sapiens
caagtgcagcctaagcgacatggtgaaaccccatcactaaaaaaaataaaaaatttttctaatcaactccacaaccttttacatattaaacatacaatgctcaaaaaagattcttcaagtttgtttagatgtctaacttaaaattttctagtaaatgtaagggctagtactgttcctgtacccctaaaggtaatttacctacattcccacaggaaccactgaaagaaccccaacttgggagtactgcaacccaaatgttccaagaacatccataatttaatcttcccaagacacatataccttaaacaccttctcatggaatgtcatgaaattcttgaacccacgtaagaagttgcagctcagtgcacataaagttgagacaga

SEQ ID NO: 8418 - DNA, 331 bp, Homo sapiens
ttccagatgataaaatatgacatgattttttttttacaaatagatacaaatacaacgtcgaccagatatgctacattaactatgtacaccttatttctctagaggcaggaatattccttatttttagacaatttatcatttacactgagaccctgaggaggaccatcagcctcctgctccccaatgctgccttcctcccttagaagcttatcctgtgctttcaactcatcactgagcaagaatcctgggaggaaaaaaccaagcccttctgaagatcttgggacttttctacccctgttctagaaacaatcaagattatttactgtgatac

SEQ ID NO: 8419 - DNA, 2137 bp, Homo sapiens
cacccaacaatgaattactgtgaaataagaaaattactgtgataaaatgggagagacgttggagaacctctgttcctacctccccatattttataatgaggaaaccaaatccccagtcaagaaacaggtgacaccagtttgtgtagacaaattcctaatctgtttctgttagggcagggcaaattctagacttctaaatttgaattagtaaaccaagtgtgaagggtttcagagatatgaattggagccccctccccccaccaaaaaaaatcctcataaatccccaaaggcaagttggaaatgtgtaatagtttactgttgtaattcgtttataccatgtgttggacaactcagctaatatgttaattgatttatacaattcctttcaattttatctaaaaataagcagaccaaaattaaataagaaagttacataagattccatttgagcatacataaggccatgatactttaatgtgaaccaccatttcttggaagaaagaagacatccaaatgtccgattcagagagaaagttcctggccagtcatccagtagactctctccactcttcaatgggaaggtgatgcttatatttttaaaaatctctacaaagctcacatacaacaagacagtacatcctagatttgtgactgatatgagcatttaaggctgtcattttcaagtataaaagtttagtgttcccattacccaatctgtgcagtagacatagctataagctcaagtcatgtgaattaacagaagcccaccaaagacatttaaaaaattataatttgggcaacagcaagtttaaatgtaggaaaggctagaaaaaatgtgatgagattgtttctctaaaatgcattaggttgttcacaatgaagctttgtctaacaccattatctgatgcatccattatctgatgcatggcatatgcaataaggcagatccacagcagaccaaacaaggaagctgaattaggtaatagaactagtaattaagatggttcacctctaacacagttctgtggcctgttccccccagagaaagattagaaatggctccagtgtaccaaataagcttcacagaagaacatgaaaattttcctccaacttttttttcttttttttttcaagcagagcctttcacttagggaccaactgcttgtagatgaaataaatcaacattaattacttctagcctgatgtaatatggctggagaaaaggggtctctggaagccggtattttgtttaacttacattctaggtgtgtatataagttgtcgctctataacttctgctgtggttccaacatctatatctgaaaggtggaagcagctgctctgttacaattttcatgtaacacgcttggattctaggtctttcctctttaacacaacttaaagaaagtttcttgtggtttggtcagcatacacacttctcatttcatttgatgtacacagccaaagtgggaattaaaaaaaaaaaattaccaactagttcagagagctaaattgagtctatcattatggcaaagtctgacccaaaattttaatttgtaattttagcatgtgtctcatgcactttggggagcgtcaaactaaatctacaattgccagaagccttgttacagtttaatgcacattaactaaaatgtgtacatttttagtgttcatgataaatgcagttatgaccttattacacttttggcattctttaagaaagcacattaagctttaatatagaaatatttaggttacacttggtgctccaagtaataataaaacatttgtcctttttttgatccccatacattctctcctcaggtatggcccatctcctgtacgcttggagcgacctttggctacgtggctggccttgttatttcaccactctggatatactggaatagaaagcaacttacatacaagaacaattaactggagcaaagggagatatttctttgtgcagattctgtaagggctgggcagaaatgtgtatggtcaaagccaagcagttccatttacagctctgtctttttacgtagttacaacatgatgtgattgtagctttttaaactatgaaacccctgagagattgtaccttctagttgaaataaagtatttataataaaaaaaa

SEQ ID NO: 8420 - DNA, 350 bp, Homo sapiens
ataaagaaagattcaaacactttatgtttaatgcaaatagacctaaggacaattagaataattttctagtcaacctgcattgaggtttttgtgcttatttttacttggccagcacatcgagacgtgagccaagccttttcaatatgagtttttttggtagaaattttgactgaatgtttatttcaagtaaagaagcattagtctgtcctagcagcaggccaacccactcaggaacccaaagtaaatctgttccagaaggagttgcagagaagaactttgatcagcttgtatagccttctgtgttagtaacttggttgacctcagtattacatgtgtctgttaaaacacaa

SEQ ID NO: 8421 - DNA, 429 bp, Homo sapiens
cttgttacagtgtgaggacatcttgtggtcagaatgctatataggaaattaattgcaaatataagaccatcactcactttacccccagttcagcctggtagttcttaattttaggtatctctagccttccttgatatcaatctaggttcctcttctaatactagagctaaatctttcagttctcttatttattaaagaaggaatagagctctttacttgcgaggaaataggctcttttcacaatcatctgacacctaactttgtaagtctcagcattctaagtaacagcgatctttctgcacttgtctttctttcctggcatacatccccagacaaatgttcaagggatgcttttccctcctttcttactcagtgtcttcttttcttcaagatgcctttctgaagttgcttaggtttccccaaaataat

SEQ ID NO: 8422 - DNA, 491 bp, Homo sapiens
gggccacctgcgagtgtgcgcacggactctggacacccgcggcggcgagctgagggagcagtctccacgaggacccaggcggaccctctggcgccatgcggccctccccggcctgctggaggccagggcgcgtacgcccggctgctcctcctccagtgccttctcgctgccgcgcgcccaagctcggcggacggcagtgccccagattcgccttttacaagtccacctctcagagaagaaataatggcaaataacttttccttggagagtcataacatatcactgactggaaggaaagcaaactgcagaagcacagcaaactgcagaagcacctgcaaagtattataggaaacagtgagacaacgattagggcttggaggatggcctaccattaagaaaaactgtgttgcactttaagttatgtaaaactatgtttagttgaaaatgtgtatttttaaaatattttgattgcactgttcattttatcatcg

SEQ ID NO: 8423 - DNA, 1129 bp, Homo sapiens
ttttttttttcagctttacaaaaataaatttttattaaaagcagtagagtctgagcaggaagacagtacaaagaatgtaaacaatgtaaacatcactacattcagctcagcctgattgaatgctgaaagacaactctaaatgctctacgtgcccttactagcaagatacattaattctattttacacagacaacaaacacactctaattttgattaggcaaaagtattttatcgaagtcgatcccagcgccaaatactggcatcatcacaaacagctataagaatgctgctatccctgctaaaactggtttgtcgaatagcagcaccacatttatgatgagtcagtgttgtacatttggctttatgaggatcttctacttctaaatcccaaacataaagtttgccaacttgattgcccaatgcaaggcatcttttgccagaaatccatagaaaacctcatgtaccaaatgtcacactggctgtaatcaaatcgcccaagaatagtcacattagattcactgggtttaattttatctatatcatctaccatcttgccaggtttccagcacacaatggcattttccacagacttagaaagtatcaaatcgcctaaccatcgcacaccatcaacataatttcctagtaatgtcccggtagaaaaatcaggaaaatggattttctgagaaataaatggcctgttagttttatttggattataatcataagattccttaattgcattcatcattctctttgaattgatcctccaaagtttaagagaatgatccataccacaggacattattttttcacccaaaagatcataatcagcacttagaacttcatctctgtgcccttctacgcctccaaatattgccaccagagtgtccgtctggatattccataatcgtaaagcatgatctttacttactgacaggagaagatttggatctcttggatggaatttcagctcattgatagcatttccatggccaacatagtgctttatacactgcattgttataggatttattatcctaattatgcctctagatccagctacagccaggcagaggatggctcgtattgctatcataggtccatgcactagtgtaaaagttttcatcag

SEQ ID NO: 8424 - DNA, 338 bp, Homo sapiens
ctttttattacagttctgtgatgtgagtacagatatgaagacttaacatttaaaaccttttgtcgcaatttgacagagtaattttatgttcccaacatatgtctttttaattttgttttgattgtattttttaaaaatggtaagtctgtgatggattgggaggggaagatactggtcttttaccacaggtagtttgagagccactgacctggaacacatatctaagataatgtagtttatctaagcacaatctgtttgcagcccaattgctcatttacaggggaagaaagagataggtattgtggttgtcaacccttattacctcatttgctcctagg

SEQ ID NO: 8425 - DNA, 432 bp, Homo sapiens
ttaaggatctctacatcatatagtgatctgaaacatgtgaaaccatttatgttgtatgcaaaaatttggaacacactgtcttcaaaatctgaaatggaacataaaaataacaacatacatttattggatacttcactgtgcatcagtttccaagctaagcacttgatacatgccatctcatttaatcctcacaagaatcctacaaggaagcgaaatgtggtgattttaaagctgttatagtggaagtatcaggacaagcccattacacgggtacagcaagctttatagtagaagatgacgacccattgagggatggatttcttctcaagtgacttcttccatgattttaagggctttctttttaaagtaatcattatccttaaggactgttttctctaaattatatgaaaacaaataaattatacatataaa

SEQ ID NO: 8426 - DNA, 494 bp, Homo sapiens
ttttttagacaaaatcacttcctctttaattgctgttgaagaagattcacaccactgcctccaaggagatgggggggcatttcccccttgcccccacctctctcccctccccaattacctggtcctttgcaaactattttagccagaaaaaaaaaaaaaaaaaaaagaccggaaaccactgacacagacagcccaagggctgggttggctgagggaggcagggctgggccaggtaagtccgccctatcacccagtttgtggggaaggggcagggggcctggaaaccctcccagccacctcgaatcctctcagccctggctgggagaggtcacgggggtgaggaatggctctggagctgctccagtgggagggaggggctggacagaaagaataatgggggaggggtcccactgtagggggtgcccctaccccagattaccacgggcgctgcacagtcacaggtacgcattcacggtcacagaccctcctgcgcg

SEQ ID NO: 8427 - DNA, 1319 bp, Homo sapiens
gctgaccgcagaatttggtagtgtacacttagcatttgtgagtgtgtgtgtgtgtttaaacccaaaaactaacagtgttgcaacattgttgaaagggctcgtgtttttcagtggtcatcaactgcactccatcaaactcacctccatttcaccaaggagctctaaagtaaggagagtgggctttatttaaatgaacagcattttaaccagatactttgtcctaatgtatgttccttttcttcatctgttttttcatactaaatgtatttgatagtggacatgttggatattatacaaaaaaatcattaattcatttctgttccaaaacctttgatcagaacgatctgtggaagagtaactccatttctatatgagtgagtgtctccttgctttagatttctggtgaaccctgtggttatgaatacttgtgtgtgatttaaaaaaaaaaagatacattttacatttcatcgaattgctgttcacactggagtattatatataaatatatatatttgaggcccaaggctggaaaaatattagtatacaacttggtatcttagtcttactatgtactttttgaaagtattcctcgcaggaggaaagaatttaaaatacccattttattcatgcctttctttttaaagaattctctatccagttatactgtagtctttttagtgctgattttttaattcctgaatttttgctgctcatgaccagttttaataccactgtgttttccttctattaaaccagaagaagtaaacagcataattggcaactcttgagcttttcttgtggcagggcaccttttacccttgggtgctccaaatcccccatctaggaaagaaaattttttcaagtcaaataacattgatcacatattccttgaaatcatttaccaacactgtatggagcattaggatttaaatatgaatttgtcttaaaggcaattcctttttgcttctgtattatctggaaaagcatgagagaggtgacacctcaacaaactgatcagagaaaataagcagttactaccctgataggcaccttcccaatcctgttgcttttgaccattgtctgtccaacggaactacctcaaacaaacaaaactaccaaatagatgacagatcagaataaaggtgagaggtctggtccccattgaaggctgctacagtcttcaaagaggtgaaggagttcataagagaacaacagtaggaaagttgagagccaagggtaggagagttgcccaaaagacttcccctactactttagggtactgaaaactcaaaggatcagctacagctttatctaagttg

SEQ ID NO: 8428 - DNA, 389 bp, Homo sapiens
  misc_feature (1)...(389): n = a,t,c or g
gaaaatttacagaaacactcaacaccccatgctgcattccagccaaattcccagattggtgaggaaatgagccagaacagtttcataaaacagtatctggaaaagcagcaggagctacttaggcagcgtctggaacgtgaagctcgagaagctgcagaacttgaagaagcttcagctgagtcggaggacgagatgatccatcctgagggagtggcttccctgctgcctcctgactttcagagcagcctggagagaccagagctggagctcagcagacattcgcccagaaaaagctcctcaatttctgaagagaaaggngactctgatgatgagaaaccnaggaaaggagaaagacgatcatctagggtcagacaggcaagagcagctaa

SEQ ID NO: 8429 - DNA, 726 bp, Homo sapiens
agcagaaaccccccgcagcctcaggaggcagcatcagatttatttattcctactcaacatgacccgggaacacaggagcaactctgtacacttctagaaactcacagctagctccaaaacaatagaaattttaaactacaaaagatgagttgtattcagcaaatataaagggtaattttagactgtgtgaacgtttatcagactatttacagcacccgggagacgggttcagatctcgccggcctccttctcttctgacctccgtgaagccatcttcccgttggagctctcaagcctccagtccgggggccctcgctcgctccgcccgctctcccaggactcctctctggatgcccgctctctggagaacttgtatttcgcacttcggtcccgggaagcccgacgatgtccccggctgtggctccgggaacggctgcggtggcgccgatgtctatctcgggaccgggaccgggacaatttccgtcgctctcgggaggtagatcttgaccgcctccgacgccgatcccgggagcgtgacctcctgcgatctctggttcttgatcccgacctcctgctcagacgctcctcccgttccctctcctctctccgcctcaagcgatcctgatttctcttctcctgcttttcagcgacagttttcctcaactgatcaagcttctctcggatctgaatgaaccccaagtgtaacttgccaccgaagtggtctgc

SEQ ID NO: 8430 - DNA, 886 bp, Homo sapiens
gaggatttcccttggctatctgcaaattgactgattaaattatggtaaatgcaggaacactgttttttctgttcataccagaccctgagaaggcactggggaaatttgataagaacaaagccaataggagtgttgccactattgttttatgttcagtaaacatcaggaattttaaatacatacagtaaatttatactgcaccaagggcacctgaaacagacatgccaaaaccacacactgtaacatctgttctaaactacagaaatgctaaatatcctatttcaaatactctaatttgtaaattaatacctgtgatgtcacaatgacactttttcataacaatcaaggaaagtaccattttcttgccaattttatggactaatttccttaactaaccctacaattatataacatttacctgtcttttttttttttcttttaccatgctatacacaattacgagatacagaactaggcttaatcacactataataagaaaactcacttttgaattgtgatgtttctgttaacggaaggacaatacgttactataatacttttagtgtaataacttttgtttgaattatgaaaaaatttgaatcatttccctctagaccatttcatttcaaacttatactttgtttagtctagccagttgaccaaaaagaaagaaaataaaaggaaaaagatactcggccagatgagatagagagagaatgctaacacaaggttcaatgtatgcagttctcggttgctctgttccatatgcccacacagtgtcatgacatattggtgtacccctaaacagaacgccagatcagtccattcttactaggctgaagaaaattctctatcagagcatcaatgagtttcttcagttcttccg

SEQ ID NO: 8431 - DNA, 639 bp, Homo sapiens
gaacgcctaagtgtttcaggcaaaggcaagtgtgtgtgcaaaggaacttgagaaaacagattttcctaatacctaaagcataaggtaagaagatagtaacagaaagtgaaagggaaaacaattaagcagaaaccagattacaaagggtcacatacatgatggtatcgttttgcacaaactcatccaattgtctaaactcatcaaactgtacacattaaaggtgcaattctttatcaatcatacctcgacaaagctgttacaaaaagaaaatgatgtggtcttccagacactatctgggagccacccacccacacgctaacttattggagtctttagggatccacttggtaatcaaacagcacagtgaatagaggaactctttggcataagaggatcataggttcaagtcccagctctaccactttctggcagtgtaaccactggtgagttattctaccttcttgagtattttaccttactcataaaacatgctagtccccacatctcaaagcagccaggaagatgaaatagatcaagtggtcaacaaatgttgttaggcatataattccttctatttaataaaacaactttagggaatgagatttacagaataatcaaagtgagtaagctctctttttc

SEQ ID NO: 8432 - DNA, 1621 bp, Homo sapiens
cggcgagccggaagtggggttagccaggttatccccaggggtggagaagcggaggcccaggaggagggggaataaagaaggtggaggatcctggctaccactctgaatccgataccgcttctcttagacctcagcgacagaaaaagggaagggtgtctcatcccccttcctcctctcctccctgtcctgagccttagccatggccgaggcaggggctgggctgagcgagaccgtcactgagacaacggttaccgtgacaaccgagcccgagaaccggagccttaccatcaaacttcggaaacggaagccagagaaaaaggtagaatggacaagtgacactgtggacaatgaacacatgggccgccgctcatccaaatgctgctgtatttatgagaaacctcgggcctttggcgagagctccacggaaagtgatgaggaggaagaagagggctgtggtcatacacactgtgtacgtggccaccgcaaaggacggcgtcgtgcaaccctaggaccgacccccaccacccctccccagcctcctgacccttcccagccccctccagggccaatgcagcactaaatccctctctcctccagcattcctgtgtctgtctggccctaaatgtatccatgtggctacttctccagccccctccttccctctcttctgcctgatagagggaagaggaagaggaggacgaacagagatcctgaaattctgacttgctgctattccagaacccagcctcctgggtttccccagtcctcatttttcctcccaatacccacccttctctctcgagggatctaggcaccttggtcccagtgtcttccttttgttctcactgccaaactgcctgtcctgggatctagttatcttggccctgcactctcaacatgagtagcgaacacttaaattgggttttcaacagtcccagctttcactgccagggtcccagtcagattccaggaatttgcgccctaactttgcttgctaatcctggtttagagctatcccactaaaatatttaatcctaattcttagtccttgcctgtgagatatgaggtcttacaggagacctcagagctcccagcccttctcctcctgctaacccttctcacaccctcaagaggagttagaaaagaggtccttgtcattctcacctcttatggaaaatggaataagaaataatcatatcctttcttcccacccttctcctgttatttaggatttctgacaaaagctggcttgagattggtcacttagagccgactgtctcctctgccttttgtttttcagcttcagagacagatccaatatagtcccagggacctgggtctctgggagaggaaggaagagggagggagcaaagagattggggtatgtcccctgtagtacactcttacctcttacttcctagactttgatttctccggcagcccagatgttcagttctcttggcccctctctaccccttactgggatctggttttcattttccggtccttttgccatacacagttacagagatcagtcaaatccataccaccactgagatctcatttattgccacagatgcacaaaataaataacccaaaatcacaaaaaaaaaaaaaaaaa

SEQ ID NO: 8433 - DNA, 7546 bp, Homo sapiens
tgtcgattgtgtatggctgatgggattctaggaccaagcaagaggttttttttttttcccccacatacttaacgtttctatatttctatttgaattcgactggacagttccatttgaattatttctctctctctctctctctctctgacacattttatcttgccaggttctaaacctttaggaaaaatggagcaatttccaaaggaaaccgttgtggagagcagtgggccaaaggttttggaaacagcagaagagatccaggagaggcgtcaggaagtgttgactcggtatcaaagtttcaaggagcgggttgctgagaggggtcagaagcttgaggattcctatcacttacaagttttcaagcgagatgcagatgatctggggaagtggatcatggagaaagtcaatatcttaaccgataagagctatgaagacccaactaatatacaggggaaatatcagaagcatcaatcccttgaagcagaggtgcaaacgaaatcaagactcatgtctgaactggaaaaaacaagggaagaacgatttaccatgggtcattctgcccacgaagaaacgaaggcccatatagaggagctacgccacctgtgggacctgctgttagagctgaccctggagaagggtgaccagttgctgcgggccctgaagttccagcagtatgtacaggagtgtgctgacatcttagagtggattggagacaaggaggctatagcgacatcagtggagctaggtgaagactgggagcgcaccgaagttctgcataagaaatttgaagacttccaagtggagctggtagctaaagaagggagagttgttgaagtgaaccaatatgccaatgagtgtgccgaggaaaaccatcctgacctacccttaattcagtctaagcaaaatgaggtgaatgctgcctgggagcgccttcgtggtttggctctccagagacagaaagctctgtccaatgctgcaaacttacaacgattcaaaagggatgtgactgaagccatccagtggatcaaggagaaggaacctgtactcacctctgaggactatggcaaagaccttgttgcctctgaaggactgtttcacagccacaagggacttgagagaaatcttgcagtcatgagtgacaaggtgaaggagttatgtgctaaagcagagaagctgacactttcccatccttcagatgcacctcagatccaggagatgaaagaagatctggtctccagctgggagcatattcgtgccctggccaccagcagatatgaaaaactgcaggctacttattggtaccatcgattttcatctgactttgatgaactctcaggctggatgaacgagaagactgctgcgatcaatgctgatgagctgccaacagatgtggctggtggagaagttctgctggacaggcatcagcagcataagcatgagattgactcttacgatgaccgatttcaatctgctgatgagactggtcaagacctcgtgaatgccaatcatgaagcctctgatgaagttcgggaaaagatggaaatacttgacaacaactggactgccctgctggaactgtgggacgagcgtcatcgtcagtatgagcagtgcttggactttcatctcttctacagagacagtgagcaagtggacagttggatgagtagacaagaggccttcctggaaaacgaggatctgggaaactcactgggcagtgcagaagcccttcttcagaagcatgaagactttgaggaagcctttactgcccaggaagagaagatcataactgtagacaagactgcaaccaaattgattggtgatgaccattatgattcagagaacatcaaggctatccgtgacggcctgttagcccggcgggatgccctacgtgaaaaggctgccactagacgtagattgctgaaggagtcattgcttctgcaaaaactgtatgaggactcagatgacctaaagaactggatcaacaagaagaaaaagttggcagatgatgaagattacaaggacatacagaacttgaagagcagggttcaaaagcagcaagtctttgaaaaggagttggcagttaataagacccagctggaaaacatacagaaaactggccaagagatgattgagggtggtcactatgcctctgacaatgtgaccactcgtctgagtgaagttgccagcctctgggaggagttgctggaggctacaaaacagaaagggacccagttgcatgaggccaaccagcagctgcaatttgaaaataatgcagaagatttgcagcgctggctggaggatgttgagtggcaagtcacctctgaggattatgggaaaggcctggccgaggtacagaatcgactcaggaaacacggcctcctggagtcggctgtggctgctcgtcaggatcaggtggatatccttacagacctggctgcatattttgaagaaataggccatcctgattctaaggatataagggcaaggcaagagtccttggtatgccgatttgaagctctgaaagagccactggccacccgaaagaagaagctcttagaccttctccatctgcagctgatttgtagagacacagaggatgaggaggcctggatccaagagactgaaccctcagctacttccacctaccttggaaaggacctgattgcttccaaaaagcttctgaataggcatagagtcatcctggagaacattgccagccatgaaccacgcattcaagagataacagaaaggggaaacaaaatggtagaggaaggacactttgctgcagaagatgtggcctctagggtcaagagtttgaaccagaatatggagtctctccgtgctcgagctgctaggcgacaaaatgatcttgaagccaatgtccagttccagcagtacctggctgacctgcatgaagcagaaacatggatcagagagaaggaacctattgtagataatactaactatggtgctgatgaagaagcagctggggctcttctaaagaagcatgaggcctttctattagatctcaattcatttggagacagtatgaaagctctgcggaatcaggcaaacgcctgccagcaacaacaggctgcaccagtggagggagttgctggagaacaaagggtcatggctttatatgacttccaggcccgcagcccccgagaagtcaccatgaagaaaggtgatgtcttaacgctgctcagttccatcaataaggactggtggaaggtggaagctgctgatcatcagggcattgtcccagctgtctatgtcagaagactggcccacgatgagttcccgatgctcccacagcggcgacgagaagagccaggaaacatcacccagcgccaggagcagattgagaaccaataccgctccctcttggatcgggcagaagaacgcagacgtcgtctattgcaacgttataatgaatttttattggcctatgaggcaggagacatgctggaatggattcaagagaaaaaggcagaaaacactggagtggaactagatgatgtttgggagctgcagaaaaagtttgatgagttccaaaaggatttgaataccaatgagcctcggctaagggatatcaacaaggtagctgatgatctactatttgaaggacttctaacaccagaaggagctcaaatccggcaggaattgaatgcccgctggggttctttgcagaggcttgcagatgaacagcggcagctgctgggcagtgcccatgctgttgaagtgtttcacagagaagcagatgacacgaaggagcagattgagaagaaatgccaggccctcagtgctgcagaccctggctcagatctgttcagtgttcaggctcttcagcgacggcatgagggctttgaaagggacctcgtacccctgggagataaggtgaccatactgggggagacagcagagcggctcagtgagtcccatccagatgccactgaggacctgcagagacagaaaatggagctgaatgaggcctgggaagacctgcaggggcgtacaaaggatcgtaaggagagcctaaatgaggcccagaaattctacctgttcctcagcaaggccagggatctgcagaactggatcagtagcattggtggcatggtatcatcacaggagctggccgaagacttaactggcatagagatcttgctggagagacatcaggagcaccgtgctgacatggaggcagaggctcccaccttccaggccttagaggacttcagtgcagaacttatcgacagtgggcaccatgctagccctgaaattgaaaaaaagcttcaagctgtcaagctagagagagatgatttggagaaggcttgggaaaaacgcaagaagatcctagaccagtgcctggagttgcagatgttccaggggaactgtgatcaagttgagagccggatggtggcacgtgagaattccctgaggtcagatgacaaaagttccttagacagtctggaggctttgatgaagaaacgggacgatttggacaaagcaatcactgcccaggaagggaagatcactgacctagaacattttgctgagagcctcattgctgatgaacactatgccaaagaagagattgctacgcggctccaacgtgtactagacaggtggaaggctctcaaagcacaactgattgatgagcggacaaagcttggagactatgccaacctaaaacaattctaccgagaccttgaggagctggaagaatggatcagtgaggatgcttgccccacagcctgtgatggaatcctacaaagacgccactaacattcagaggaaatacctgaaacaccagacctttgcacatgaagtcgatggccgatctgagcaggtgcatggcgtcatcaacctggggaactccctgattgagcgtagttgtgatggcaatgaagaggccatgaaggagcaactggaacagctgaaggaacattgggatcatctgcttgagagaacaaatgacaaagggaagaagctcaatgaggccagtcgtcaacagaggttcaacacaagcatccgggactttgagttctggctctcagaggcagagacattgctggccatgaaagatcaggccagggacttggcttcagcaggaaacctactcaagaagcatcagctattggagagagagatgttggctcgagaggatgcactcaaggacctgaatacattggctgaagatttgctctccagcgggactttcaacgttgatcagattgtgaagaaaaaagataatgtcaacaagcgtttcctgaatgtccaagaattggcagctgcacaccacgaaaaattgaaagaggcctatgccttgttccagttcttccaggatctagatgatgaggaatcctggatagaggagaagttgatacgagtgagctcccaggactatgggagagatcttcagggggttcagaacttgctgaagaagcacaaacgcctagagggggagctggtggcccatgagcctgccatccagaatgtgctggatatggcagagaagctgaaagacaaggctgctgtggggcaagaggagatccagttgcggctggctcagtttgttgaacactgggagaagctcaaagagttggccaaggcccgaggacttaagttggaagaatccctagaatacttgcaattcatgcagaatgctgaggaagaggaagcttggatcaatgaaaagaatgctttggctgtccgaggagattgtggagatacattagctgctactcagagcttgctaatgaagcatgaagctttggaaaatgactttgctgtccatgagacccgagtacaaaatgtgtgtgcacaaggagaagacatcctaaataaggtgttgcatgaggaaagtcagaacaaagagatttcttccaagatagaggctctgaatgaaaagaccccttctctggctaaggcaatagctgcttggaagttgcaattggaagacgattatgcctttcaggaattcaactggaaggctgatgtggtagaggcttggatagctgataaggaaacaagcctaaagaccaatggcaatggtgcagaccttggtgacttcctcactcttctggcaaaacaggacactctggatgccagtctgcagagtttccagcaagagagacttcccgagatcactgacctgaaggacaaactgatttctgctcaacacaaccagtctaaagccattgaagagcgttatgccgctctgctgaagcgctgggaacagttgctggaagcctcggcagtccacagacagaaattgctggagaaacagctgcctctacagaaggctgaggacctgttcgtggaatttgcacataaggcttcagctttgaacaactggtgtgaaaagatggaagaaaacttgtcagagcctgtgcactgtgtctccctgaatgaaattcggcagctgcagaaagaccatgaggacttcttggcctccctggctagggctcaagcagactttaaatgtttgctggagctagaccagcagattaaggccttaggtgtgccttccagcccttatacctggttaacagtggaggtgctggaaaggacctggaagcacctatctgacatcattgaggaacgggagcaggagctgcaaaaggaagaggcaagacaggtcaagaactttgagatgtgtcaggagtttgaacagaatgccagtaccttccttcaatggatcctggaaaccagggcttactttctggatggatcattgctcaaagaaacaggaactctggaatctcagctggaagcaaataaaagaaaacagaaggagatccaggcgatgaagcgtcaactaaccaagattgtggacctgggggacaacttggaagacgctctgatccttgatatcaaatacagcaccattggattggctcagcagtgggaccagctctaccagcttgggttgcggatgcaacacaacctggagcaacagatccaggccaaggacatcaaaggtgtgagtgaagagactctaaaggaatttagcacaatctataaacactttgatgagaatttgacagggcgcctgactcacaaagagttccggtcctgcctgagaggactcaattactacttgcccatggtggaggaggatgaacatgagcccaagtttgagaagttcctggatgctgtggatccagggaggaagggctatgtctcactggaggactatactgctttcctgattgacaaggagtcagaaaacatcaagtccagtgatgaaatagagaatgccttccaagccctggcagagggcaagtcatatattaccaaagaagacatgaagcaggcccttaccccagagcaagtgtcattctgtgccacacatatgcagcaatatatgggacccacggggtcggaaggccatctctctgggctatgactacgttggcttcaccaattcctactttggcaactaataagcagctcctcgtggatcgtagaaaatcttagtgtcgtgggaaatttactgggggggcaaagagttacaggcaaatgtgggaagattaaagat

SEQ ID NO: 8434 - DNA, 444 bp, Homo sapiens
cagattcgagtgtccggagagtaaccggaagtgctgtccccaaggcctagagggcaggcccgcggctgccagggagaggcaagaattgagtgttgtgaatagttctgaactagagaccttttgaaaccaaaaggaagatggtcttgagtctttcttgttacgaatgctatcttctttgagaagtcaaattgtcaggatcaggaatgtatgttttcttccatctggattctagggttggaaataccaagtaaggaattaacatatatgatgctggaaacttgtagaggctcatgattgaaaggcctgaaacagatgtatcttccaagttcttatcaagaaaatgactgtgagggcaacgatgggtcaagaagaccagcggaaaactccctaggagagagccatagaaaatgtacacttcagaagagaaatgtaatcagagaactc

SEQ ID NO: 8435 - DNA, 776 bp, Homo sapiens
gctgaagccagcccagatgcacaagttccagtcttcctagccctctgcaaattgggcgtcgtctatttcttgcagtacatacgggaaacaaacattcgagatatgttcacccaacttgatatggaccagcttttgggacctgagtgggacctttacctcatgaccatcattgcgctgctgtttgggaacagtcatagcttacaggcaaaggcagcaccaagacatgcctgcacccaggcctccagggcacggccagctccaccccagcaggaggggccaccagagcagcagccaccacagtaataggcactgggtccagccttgatcagtgacagcgaaggaagttatctgctgggaacacttgcatttgatttaggaccttggatcagtggtcacctcccagaagaggcacggcacaaggaagcattgaattcctaaagctgcttagaatctgatgcctttattttcagggataagtaactcttacctaaactgagctgaatgtttgtttcagtgccatatggaataacaactttcagtggcttttttttttcttttctggaaacatatgtgagacactcagagtaatgtctactgtatccagctatctttcttggatccttttggtcattatttcagtgtgcataagttcttaatgtcaaccatctttaaggtattgtgcatcgacactaaaaactgatcagtgtaaaaaggaaaacccagttgcaagtttaaacgtgttcgaaagtctgaaaatagaacttgccttttaagtt

SEQ ID NO: 8436 - DNA, 2691 bp, Homo sapiens
ggctggggcctgaggcctggggctcacccacgcccccgccgacgcctgccgcgccgccgccacccccgccacccggagccccgggtggctcgcaggacacctgtacgtcgtgcggcggcttccggcggccagaggagctcggccgagtggacggcgacttcctggaggcggtgaagcggcacatcttgagccgcctgcagatgcggggccggcccaacatcacgcacgccgtgcctaaggccgccatggtcacggccctgcgcaagctgcacgcgggcaaggtgcgcgaggacggccgcgtggagatcccgcacctcgacggccacgccagcccgggcgccgacggccaggagcgcgtttccgaaatcatcagcttcgccgagacagatggcctcgcctcctcccgggtccgcctatacttcttcatctccaacgaaggcaaccagaacctgtttgtggtccaggccagcctgtggctttacctgaaactcctgccctacgtcctggagaagggcagccggcggaaggtgcgggtcaaagtgtacttccaggagcagggccacggtgacaggtggaacatggtggagaagagggtggacctcaagcgcagcggctggcataccttcccactcacggaggccatccaggccttgtttgagcggggcgagcggcgactcaacctagacgtgcagtgtgacagctgccaggagctggccgtggtgccggtgttcgtggacccaggcgaagagtcgcaccgaccctttgtggtggtgcaggctcggctgggcgacagcaggcaccgcattcgcaagcgaggcctggagtgcgatggccggaccaacctctgttgcaggcaacagttcttcattgacttccgcctcatcggctggaacgactggatcatagcacccaccggctactacggcaactactgtgagggcagctgcccagcctacctggcaggggtccccggctctgcctcctccttccacacggctgtggtgaaccagtaccgcatgcggggtctgaaccccggcacggtgaactcctgctgcattcccaccaagctgagcaccatgtccatgctgtacttcgatgatgagtacaacatcgtcaagcgggacgtgcccaacatgattgtggaggagtgcggctgcgcctgacagtgcaaggcaggggcacggtggtggggcacggagggcagtcccgggtgggcttcttccagccccccgcgggaacggggtacacggtgggctgagtacagtcattctgttgggctgtggagatagtgccagggtgcggcctgagatatttttctacagcttcatagagcaaccagtcaaaaccagagcgagaaccctcaactgacatgaaatactttaaaatgcacacgtagccacgcacagccagacgcatcctgccacccacacagcagcctccaggataccagcaaatggatgcggtgacaaatggcagcttagctacaaatgcctgtcagtcggagagaatggggtgagcagccaccattccaccagctggcccggccacgtctcgaagttgcgccttcccgagcacacataaaagcacaaagacagagacgcagagagagagagagagccacggagaggaaaagcagatgcaggggtggggagcgcagctcggcggaggctgcgtgtgccccgtggcttttaccaggcctgctctgcctggctcgatgtctgcttcttcccagcctgggatccttcgtgcttcaaggcctggggagcctgtccttccatgcccttgtcgagggaaagagacccagaaaggacacaacccgtcagagacctgggagcaggggcaatgaccgtttgactgtttgtggcttgggcctctgacatgacttatgtgtgtgtgtgtttttggggtggggagggagggagagaagagggggctaaatttgatgctttaactgatctccaacagttgacaggtcatccttgccagttgtataactgaaaaaggacttttctaccaggtatgaccttttaagtgaaaatctgaattgttctaaatggaaagaaaaaaagttgcaatctgtgcccttcattggggacattcctctaggactggtttggggacgggtgggaatgacccctaggcaaggggatgagaccgcaggaggaaatggcggggaggaggcattcttgaactgctgaggatggggggtgtcccctcagcggaggccaagggaggggagcagcctagttggtcttggagagatggggaaggctttcagctgatttgcagaagttgcccatgtgggccccagccatcagggctggccgtggacgtggcccctgcccactcacctgcccgcctgcccgcccgcccgcatagcacttgcagacctgcctgaacgcacatgacatagcacttgccgatctgcgtgtgtccagaagttgcccgttggccgagcgccgaactcgctcgccctctagatgtccaagtgccacgtgaactatgcaatttaaagggttgacccacactagacgaaactggactcgtacgactctttttatattttttatacttgaaatgaaatcctttgcttcttttttaagcgaatgattgcttttaatgtttgcactgatttagttgcatgattagtcagaaactgccatttgaaaaaaagttatttttatagcagca

SEQ ID NO: 8437 - DNA, 342 bp, Homo sapiens
acagggttgggataggtggttggcatccacgaagggatgagtgacttccttaagtgaagtaggccttgaacttcacagaatttatgaaaagtgaattctaaaggtggaagggagggggaatgattaaagccttaaagttctcaaggaaaaggtcaatttttttttaattgctgataaaaggacctggtatatacttattgattgagaaaagtaggcctatagtagtttggaagatggtcttgagtaagtacagttaattgaattggggtgtagttagaaggctttggtttagaatattagatgatccgctttgttgttgaaattaagagaggaattgacata

SEQ ID NO: 8438 - DNA, 603 bp, Homo sapiens
taaaataatcttatatgtaattcttaaatagaaagtaattgattttacatagttcttcctgaactttttggaactgaaattctgccaaacattatcaaaataagcttccttagcttaccaagtattcacaaggaaattctcttgtacctctttttggttggctaggggaagcatgctgtgaagcagctattcctacttatagttgtctttggcttggctttgacttctgccatggtttggacaggatgccatggtaggtgtgggaagtatcagggcctcccatcttcccatactcaccttccagagctgttgatggaaatgagctcttgggggagcctagagattcttttttcagtggtcctgtaagcattcaaggttgagcttcagaaagatgagggaggagtcatagctacagtaaagaaaagaatagattttattctgttgcctgtatacagtctcatagaattcttattttttcataattgtgcattttaattgatagtcatatggtatttttgttaataacagcaaaggcattaaatcagtaccattgttccttctgcctgatgacttcttgtttgtaacacaatctgtattatcaga

SEQ ID NO: 8439 - DNA, 398 bp, Homo sapiens
aaactattaatacctgcagcaaagccccaagccaacaacaaaaatagtttatacccggggataatagctgctatttagaattgccatctttcctgcttttaggtggagtgttttttcagttgagtgttcataagataagcattaccaaagagaaagacagcagaaagaactttccttggtatccctcttcacagctatgaagaaaaaagaatacattttttagaaataagtgactgatagctccaatctattacacacttcaaatatcaaagcatatgctgagagagaggcgcagaagatgttttgatggaggttaacgccttttttggaataagccaatataggctactaagaagataattccttggcaagataaaactatcatctcttctgaaatg

SEQ ID NO: 8440 - DNA, 89 bp, Homo sapiens
ccatttgtgttatatgtggattccacaggactgactttgaaaacttgagtatgcgtggattttggtatacacagaaatgggagagctgg

SEQ ID NO: 8441 - DNA, 408 bp, Homo sapiens
tttttttttttttagggtatacttcaaacacaatttatttttaatttatcaaacaaaaatcaacaatttaagtcactgattggcaagctacagcctgcaggccaaacccagccctccacctgcttttgtaaataaagttgtagtaaaatgcagccacactcattcactcgcatatcatctattgctgcttttgcatgtcaaagccagagctaagtacctgcgacaaagacctgtggcctgcaaagcctaaaatatttactatctggccctttacagaaaaagtttgctgacccctgatttaagtgatcatgatttaaggacagggtgatatctgacaaaagtatcagtaagaatggggacagtgacccatcaaatagtaagatccccgcaaacagaagggagatcaga

SEQ ID NO: 8442 - DNA, 1619 bp, Homo sapiens
caggccttgaggttttggcagctctggaggatgagagagaacatggccaggggcccttgcaacgcgccgagatgggtgtccctgatggtgctcgtcgccataggcaccgccgtgacagcggccgtcaaccctggcgtcgtggtcaggatctcccagaagggcctggactacgccagccagcaggggacggccgctctgcagaaggagctgaagaggatcaagattcctgactactcagacagctttaagatcaagcatcttgggaaggggcattatagcttctacagcatggacatccgtgaattccagcttcccagttcccagataagcatggtgcccaatgtgggccttaagttctccatcagcaacgccaatatcaagatcagcgggaaatggaaggcacaaaagagattcttaaaaatgagcggcaattttgacctgagcatagaaggcatgtccatttcggctgatctgaagctgggcagtaaccccacgtcaggcaagcccaccatcacctgctccagctgcagcagccacatcaacagtgtccacgtgcacatctcaaagagcaaagtcgggtggctgatccaactcttccacaaaaaaattgagtctgcgcttcgaaacaagatgaacagccaggtctgcgagaaagtgaccaattctgtatcctccaagctgcaaccttatttccagactctgccagtaatgaccaaaatagattctgtggctggaatcaactatggtctggtggcacctccagcaaccacggctgagaccctggatgtacagatgaagggggagttttacagtgagaaccaccacaatccacctccctttgctccaccagtgatggagtttcccgctgcccatgaccgcatggtatacctgggcctctcagactacttcttcaacacagccgggcttgtataccaagaggctggggtcttgaagatgacccttagagatgacatgattccaaaggagtccaaatttcgactgacaaccaagttctttggaaccttcctacctgaggtggccaagaagtttcccaacatgaagatacagatccatgtctcagcctccaccccgccacacctgtctgtgcagcccaccggccttaccttctaccctgccgtggatgtccaggcctttgccgtcctccccaactcctccctggcttccctcttcctgattggcatggtaagcagttcctgggttggacagatgaggagccccagacagtcccaacagcactgtctttggagtcaggagaccatgtgaatcctgtctggattcaaacctggactgtgtcactccggagcctgaggcttgagtcactgtactcaatggtgccgactcctggaggtattcattcacccagccattcactagtgcgtttgtttacttattcattcaattattcattcagtcaatttctcattcattcaattattcattccatgttggcttgaaatatgtgtactgttccaattcatccatttatatctttagtcattcaattatgcatttgtgtatttgttcattcattcaattattaattcattcagttatttattagattgttgacttgaaatatgttatacattttctgattc

SEQ ID NO: 8443 - DNA, 2027 bp, Homo sapiens
  misc_feature (1)...(2027): n = a,t,c or g
tctgttcccaggagtccttcggcggctgttgtgtcagtggcctgatcgcgatggggacaaaggcgcaagctcgagaggaaactgttgtgcctcttcatattggcgatcctgttgtgctccctggcattgggcagtgttacagttgcactcttctgaacctgaagtcagaattcctgagaataatcctgtgaagttgtcctgtgcctactcgggcttttcttctccccgtgtggagtggaagtttgaccaaggagacaccaccagactcgtttgctataataacaagatcacagcttcctatgaggaccgggtgaccttcttgccaactgggtatcaccttcaagtccgtgacacgggaaagacactgggacatacacttgtatggtctctgaggaaggcggcaacagctatggggaggtcaaggtcaagctcatcgtgcttgtgcctccatccaagcctacagttaacatcccctcctctgccaccattgggaaccgggcagtgctgacatgctcagaacaagatggttccccaccttctgaatacacctggttcaaagatgggatagtgatgcctacgaatcccaaaagcacccgtgccttcagcaactcttcctatgtcctgaatcccacaacaggagagctggtctttgatcccctgtcagcctctgatactggagaatacagctgtgaggcacggaatgggtatgggacacccatgacttcaaatgctgtgcgcatggaagctgtggagcggaatgtgggggtcatcgtggcagccgtccttgtaaccctgattctcctgggaatcttggtttttggcatctggtttgcctatagccgaggccactttgacagaacaaagaaagggacttcgagtaagaaggtgatttacagccagcctagtgcccgaagtgaaggagaattcaaacagacctcgtcattcctggtgtgagcctggtcggctcaccgcctatcatctgcatttgccttactcaggtgctactggactctggcccctgatgtctgtagtttcacaggatgccttatttgtcttctacaccccacagggccccctacttcttcggatgtgtttttaataatgtcagctatgtgccccatcctccttcatgccctccctccctttcctaccactgctgagtggcctggaacttgtttaaagtgtttattccccatttctttgagggatcaggaaggaatcctgggtatgccattgacttcccttctaagtagacagcaaaaatggcgggggtcgcaggaatctgcactcaactgcccacctggctggcagggatctttgaataggtatcttgagcttggttctgggctctttccttgtgtactgacgaccagggccagctgttctagagcgggaattagaggctagagcggctgaaatggttgtttggtgatgacactggggtccttccatctctggggcccactctcttctgtcttcccatgggaagtgccactgggatccctctgccctgtcctcctgaatacaagctgactgacattgactgtgtctgtggaaaatgggagctcttgttgtggagagcatagtaaattttcagagaacttgaagccaaaaggatttaaaaccgctgctctaaagaaaagaaaactggaggctgggcgcagtcgtcannnnnnnnnnnnnnnnnnnnnnnnnnnnnnnnnnnnnnnnnnnnnnnnnnnnnnnnnnnnngatgagatttttaaagtatgtttcagttctgtgtcatggttggaagacagagtaggaaggatatggaaaaggtcatggggaagcagaggtgattcatggctctgtgaatttgaggtgaatggttccttattgtctaggccacttgtgaagaatatgagtcagttattgccagccttggaatttacttctctagcttacaatggaccttttgaactggaaaacaccttgtctgcattcactttaaaatgtcaaaactaatttttataataaatgtttattttcacattgaaaaaaaa

SEQ ID NO: 8444 - DNA, 350 bp, Homo sapiens
gtttttttatgttcatgtcctgaaaacctgcctgaacacaagtctctttcttaagttcattgtgttgaaatactttctgtttctttttatctgctctatatttttcttgtatgatttttgtagcccactgaagcttttggtagaaacaatactgcctatacattctgtaggtgctttgtattacgatagaagctttgtgtttttcccttaaaagttgtcttgctttcattcctttatatgcagcctgaataaccacagcagaatgccattgtctgatataattttctctttgcaattttgcagctctatatgttcgataatgttgctgaattagaattgaagcatgtttc

SEQ ID NO: 8445 - DNA, 349 bp, Homo sapiens
tttaacttgtgggaagctgttgtcccaagttatcctggggaactgcatctggttcttgcaaaataccaagtagacaggctctcttttacctccccttgagggcattaacattcagtagtcacttccattcagttaaccctttatttttatggtttttcttgagccatagttgtaaagcagaaaaatcatttataaaggtttgttgaacaaaattcaaaatactgttgctaaagtattaagattttttaggattataccttacttataggcctgtcattcatttggcatgaaattttgagttttattcactttcactttcctttttttccaaagcaattaaaaaaactgc

SEQ ID NO: 8446 - DNA, 298 bp, Homo sapiens
ttccctctaaaccaggttatacaagagtatacatttcattgccacttttctaaagcaactcatctgttttcatagcgaattctactattcaattggattcatgaaagttgataagaatacaatttgtaagattaaccctctaacaaacaacctgtaacagttcctactccctaatcatctcgtcaaatggtaccaataagggaggctgaaggaagagggggagatatatatggtttgatggagaggcagtaatataaaatgcgagaaaaaaaccatttctcacagggtacacctttcc

SEQ ID NO: 8447 - DNA, 542 bp, Homo sapiens
ctcgaatcatgctgagtgaagccaccaacgatgcccatgttgttgctgcgggaggcatggacctgcatgagcaccttgagcctgtccaggggggccgtgcaggttctggatacggcccctgccccacctcctgccaccaggtgtctccaccacatccccgtctgcctctcctccactgtgaactcatccgggaccgttagattctcacccacatcaaagatcgtggaatgcttccagtagaggatgatctcggggatgttttccacggggtggaggaggtggtagtctctccactcgttccagtcgatggtcatcgtgccgtttttatccatgctcttgagaattttttctgcctgctgttcagatatcttgactcccaaagtcccgcagggactgcatgatctcctgcgcgtcaatgcgtccatcattctttttgtccaaactcttaaacaccagcctcagcttcttctcatgatcttggagataatggacaaattcttcaaagtctagctgcccatcaaggtccttatctccagcttgta

SEQ ID NO: 8448 - DNA, 390 bp, Homo sapiens
tttttgttgaacattaatttttatttacgtaataaaagagtagccaaagttaagtttactgttctctccattattttatccacaagctaagcatatggcagtggccagaattcccaaatagcatctcctgtcccccacaacaaatggcacagagaacactcactccattcatatctgaataaatagtaataatggccatcaaaaccataattccacaatcataagattaaaagggattaaaaacttttttcataccattatatataattaagaagggttacttgaatagcatacattcaaaacatcaatccatctaaacaaaatattggtctataaagtactaactctccaatccttacttttggggcaaatttcacaagaaataagcat

SEQ ID NO: 8449 - DNA, 413 bp, Homo sapiens
caatttacctattctttttttaaccttttcttacattttattagcttacagattctgtcagtatgtctcatgtatatattatataatatttatatatcagtacaatgcctctctctaggggactcgcataggcttaagaatggagtcctggtgaattttccattctggcttagagtccttaaatggtggtcaggtgttttcccaactgtccagtggaccttaggccctttggcccaagtgcaagccttctgccctctgctgcatgggcagcgtggctcagctagggaaaccaaggcagaaagggtgacagtgaggctttggcattgtaggtaggcgatgtggtgtgcaggcagcaggcccaggagctctgctgaggtcagagggtgcctgcaaaagccagaccctaaaacact

SEQ ID NO: 8450 - DNA, 700 bp, Homo sapiens
gagatcctgtgccttcaaaccctacgagtccatactttaaaacaaaatgaagaaagtaaggcttaaggaactagagagtcgcctgcaacaagtggatggatttgaaaagcccaagctacttctggaacagtatcctaccaggccgcacattgcagcatgtatgctctatacaatccataacacttatgatgacattgaaaataaagtcgttgcagatctaggatgtggttgtggagtacttagcatcggaactgcaatgttaggagcagggttgtgtgttggatttgacatagatgaagacgcattggaaatatttaataggaatgcagaagagtttgagttaacaaatattgacatggttcaatgtgatgtgtgcttattatctaacagaatgtccaagtcattcgatacagtaattatgaatcctccctttgggaccaaaaataataaagggacagatatggcttttctaaagactgctttggaaatggcaagaacagcagtatattccttacacaaatcctcaactagagaaaacttcgatatgacctgccagcatcatacaagtttcacaaaaagaaatcagtggacattgaagtggacctaattcggttttccttttaaaagccccgcaaacaaaagtcgtttaaaacctatttaaaatgaataaaaaattggtttactaaaaaaaaaaaaaaaa

SEQ ID NO: 8451 - DNA, 571 bp, Homo sapiens
aggccctgtggcatgtgagacttactgctgggcttggagtcaaggtgtcccaggtcagcttaatttcgggaaaaacttgtaagacgcttggttcaaatcacttgaaaagaaaatcacttgcatagttcacctgaagaatggatctctataatggaattaaagcacaatgctggacaaaaagtaagaaaaagcaacaaactgaaaggaaaaattgagtaaaaagaataaagaactagaactggcaacctcagccaagccagggaattacatacatcttggaattccaaagcaatgcttccttatgagggcataggaagaaataaatctaataacaaggctgggattaattcacgtggttttctcacattttggtctcaagaactttttactctaaaactaattattgaggaccccaaagagctttttatgtgggttatagttatcagtatttactttattggaaattaaaacctgtaggatgtttcagtggtcttttctagtttgaagggtttaataatttttggcttttaaagagcccataatcaattaaaatattttattttcctttaaa

SEQ ID NO: 8452 - DNA, 1348 bp, Homo sapiens
  misc_feature (1)...(1348): n = a,t,c or g
cgcggccgcgtcgactttttttttttgattccatttgttttatccagaagaaaaacattcaaagtaaaatgtgaacatttaattacctttaaatcatatatgaaataatttacatgctatacacttccaaacacactgaacataaattcaactttataagacatatacacagtctgcttttgccaacatataccctgtaggtcacttaagatgtaactgatttctcagtccacctgtgagcatataaacacacaaatgtatgtctgaagttgaagattaagataataaaccagagttgaatacaagaagtcagccacagaagattctaaaaccacaatcagtgactggaacaccaaggcacaaaaacttccctttgtagtcacagagattaagtttccattcccagtgcttaaatatggaagcaggattggttaatcacatactatattttatagtgcatttctgttgctgtttaaaaaggaatattttttaaattacataatgtattacagaaaagcattggaaaaataaacaggataagataagctctcatacaataaagttttttttggtctgaaaaagatgtttatattcaaaactaatataatagaggtgtaacagaaagtagcatgaggaacactatgcaaattgcctaatactcgaattgtacttcatgccaccatgttatttaaattttcaattttaaagccagttgggtgatattgctaattccaagtgatagttttggggtttttatgttttgtttcttgttttttggtaatttaaagatatgtactagtacacagaataaacagtaaatataacatggcaaaatgaaatctttcccagagtttatgttgcttttgttaaacagtaactttgtactagaatctctttttttttctatatttaacaagaagaaaaataatgctccacatagaaatgacttcaaaattcatgcaaccatgcacaacctaaactatctgtacttcccttttttatttacccaaaagtttttgagtaaactgaaagttagatactccaggaacagcaactcattgagcaataaggcagtttaaaaatatacatatacatgtactattcattgtttctcagaacagttttagagctttantctttaaacttacacagttgtgaaagaaataaagccaaccacaaaataagaatcaatggaatgcagtaatccatatataaaagacagtcaaatgtgcttatacgtattcaagaaatcaatattctaagctggtaaataataaatttatccaatggtagccactaaaccaaatttatgatccagaataaacccttccggtttcattaattttgg

SEQ ID NO: 8453 - DNA, 470 bp, Homo sapiens
tcagtctttcacatttaatccacaaatatttaccgagaatttgacgtgccaccaggcgcgtgggctaggttcacaagatacagtagtgagttaggcacgattcctactaccagaagcttagagcatagggaagactaaaagtaagccaccgtctacaatagtaggataagtggagagtttctaggtccgtggagtttgttgttgaatatctgctccaggccttagaagccggcagcaattcactaaaagatcccggacttgtttctgctctgtatcccagccaaggagctccgtccccaaggtgttttgttagagtcagagacctctccttgggtgattccattcgtcagccccacaagtccccgtctctggcctttttcagggtctccggcagctctctgacagttccccttctgtctcaggtcgacacttattccaaggaccagggattactcacaactatccgccag

SEQ ID NO: 8454 - DNA, 520 bp, Homo sapiens
  misc_feature (1)...(520): n = a,t,c or g
tttaaaacttccacatattcccnggaatccaaacggccacatgtacatgcagggtgagcaaatagagaagacttgagaaagccttaaactctcacctccngctaaccacgnggcttgctcaaataggaagtgaaaactacggtgaatttgttgcttagctgaangtngaaggtgtgccccaacacttacacagagcctacnggtaaagacagagtgttttctttncgtcncggtttcnggnatttacggaaancngtttctctcnccggancactagctgcaaattaagctaacagaacaggagctcagctggtcacacacagcaacgaatacagactttataaagttcagaaaagttaccaaacagtggtaaccataacaagtaccaacaatgaactatggggagggaggagaatctgatttccagagttaccacattataatactattcaaaatgtcacatttttagcaacgattacatgacaaggaaaaaccagaaaagtatggcccatacacaggt

SEQ ID NO: 8455 - DNA, 630 bp, Homo sapiens
ccattaattctatcaatttatcttttgtggggaaaaaaaagaaaaacaaacaaacaaaaaaacaaacctcttatccagataaaatcagccaattctaaaagatgcttctaacaacagagtctaagacttcagtggtaaatatgtacttaaaaatatatatgctaaaaaaaagtctaaaaattgagagatgtcttcttgtgcctaaaaataacctttttagcaaagtagtaataaagcatttactctctggcggaagaagaatatatttaatagaatgttttctatctgaatgatgaagaaacttatttatttctacataaaagtaggttcaactcaaatgagtttatttattaggaacttttgaaacactgaggttgaacagagaatgggaactagacagatcatttcagcatagatggttactttccctcttgccacagactctgcaggaaatgtcaattactgctttctttctccattatgttcaatcctttccaaggcagtcagagagctctctcccttccccattaagagaggatcttctccggtagcctttgaactgggaagtggctttagtatttgcaagtgtagatatacaaaagctcttcctcctcttaccaggttcatcgg

SEQ ID NO: 8456 - DNA, 328 bp, Homo sapiens
ctacaaccttcctgtgaaactaaggaaaaaaacaaagtgttaaggtattaagcctcaataagtaacttggacaattcctctcaaatcattagtggacaataataaaagcaaaaatggatgatgcttttccagaaaaattaactgaaaggcctcaaaattcttctaaacaaaattaaaaaaatattgtaacaaaatgcaacacagcttaattggttttacaccattgcatattacaagtcagtattaacatctttcttaaagtgccttcatacccatgcacaaaactactggctaccaccttcaggtaatgctaaggtgggaggacaag

SEQ ID NO: 8457 - DNA, 751 bp, Homo sapiens
  misc_feature (1)...(751): n = a,t,c or g
aaaaggtttgggttttttttttttcctcagaataagatgagagtaactagaattactatagtaaggggaccagaagaatggaagacctgggccaggaaaacttattttttttctttttgcttatataattttggtatatatccaatagtatcattaccggagaataagtgagccagagctagcaatcaataggatcttgatttttccatgtccccacagtcatacgaaatctgctattgttttttaaatcatagtattaaattgacatattttaaactcataacattcataaagcttttgtcaagaaataaagcttcaagttaatgttatttctggagttatgagtatatactcaagatctttttaaattcattattcacatagtcttattaacatgtcttgtatgcctagtttcctccaaaacaaaacctaacattactaaacagcacactaagattaaattcccccaaagcagccgggcgcggtcgtnnnnnnnnnnnnnnnnnnnnnnnnnnnnnnnnnnnnnnnnnnnnnnnnnnnnnnnnnnnnnnnnnnnnnnnngctggtctcgaattcctggtnnnnnnnnnnnnnnnnnnnnnnnnnnnnnnnnnnnnnnnnnnnnnnnnnnnnnnnnnnnnnntcacagtttttcctttttgtttctggtttttacattaagttcgatgctaatatttaaatgaaacgattttacataaagtctcaaattgcagcttctcttgctttactg

SEQ ID NO: 8458 - DNA, 2202 bp, Homo sapiens
gaattccggcgaacatggctgaaggaagccgaggtggccctacgtgtagcggggtgggtggcaggcaggacccagtctccggcagtggcggctgcaactttccagagtatgagcttcccgagctaaatacgcgcgctttccatgtgggcgcctttggggagctgtggcggggccgtctgcgcggggccggggacttgtcgctgagggagccgccggcatccgctctgcctgggagccaggcagctgactccgaccgggaggatgccgcggtggccagggatctggactgcagcctggaggcggcggctgagctgagggcggtgtgcggccttgataaactgaaatgccttgaggacggtgaggatccagaagtcattccggagaatactgacctggtgactttgggggttagaaaaaggttcttggaacatcgggaagaaaccattacaatagatcgagcctgcagacaagaaacattcgtttatgagatggagtcacatgccataggaaaaaagcctgaaaattcagcagacatgattgaagaaggggagcttatcctatctgtgaatatcttgtaccctgttatatttcataagcacaaagaacacaaaccataccaaacaatgctggtgttgggcagtcaaaaactcacacaactgagggattcaattcgatgtgtcagtgacctccagattggtggtgaattcagcaacactcctgaccaagcccctgagcacatcagcaaagacctatacaaatcagccttcttttattttgaaggaacattttataatgataaaagatacccagaatgcagagatttgagcagaactatcattgagtggtcagagtcccatgatagaggctatggaaagtttcagactgctagaatggaagatttcaccttcaatgacttgtgtattaaactgggttttccttacttatactgtcatcagggagactgtgaacatgtcattgtcattactgacataaggcttgtgcatcatgatgactgcttggataggacattgtatcccctccttatcaagaagcattggctatggaccagaaaatgttttgtttgtaaaatgtatacagccagatgggtgacgaacaatgacagttttgcaccagaggacccatgcttcttttgtgatgtttgcttccgaatgctgcactatgattcagaaggcaacaaactgggggaattccttgcttatccttatgttgatcctggaacctttaattaagaatagctacactcacaaaaataccccctcatgaaataactgttctcttggatggttaccttatttctaagaaacgccactgaggaacaggatccactttgaacagtccgctaaagctatcaaaaaaaagtccaaatgacagattttcttataatgatagtatttaaatgtttataacatagtttaattttatatttattccagatagtatttaatttagtgctttttacccattttgagttgagttgtagtactttatatattctgactttaaatcctttgtcagacacacatattctttctcccaatccatgccttccctattcattctctgtccagagttttttgctaaagatagaattattaatgatacatcaagtagtggaagtgttttgaaaattctttgaagaatgtgagagctacaccttctaccatgaggcttccaaggttgtatttaaatttgactgaatatctggatggctaagaacagacatttatcttacacatggaaaactgacgaaacctataagcctatgtgtttgacagtgaagtatgttttatggacttaaatgccacaaacagttaagtccattggcttggagatgacaagcacgagtttctggtatgtctagtgttctcattcactgattcagtcagtacacagataatcactatagagaacttaagaggctggcttatgttatacctaaatttttactttcttgtatacaacaatgctaaaattgagcagattgataactgcccagcaaaccatagatttaagataaatgaatgatttacccaaccctaaaattccatgggtaaaaattttgattcctttattttcaatactgcgttccttataggtcttacatgcatatgcaaggatattttatcttattcattcatttcatactctcaaaacaccaaacttcaaaaagttaaaaaaaaa

SEQ ID NO: 8459 - DNA, 530 bp, Homo sapiens
tactcaaaattcacatgataaaataattgatcctgaaaaacgtgttcctactcaaggaatgtttgataaaaatgggataaagggaggtttgaaaagtgtttctttattcacatcaaagttagcaaagccatccactatgtttgtgtcatctacagaggagttaaaccaaaagtctttttctggaccatctaatttgggtaaattcaccaaatgcacattattaggaaggacttcatattcttcgatcaatactccaaaatcacagttgaatggattttatggaaaccgatcagctggtagcatgcaaaaggcctagagcgaactcctgtgccaccagaagcagttctggagaaagcttagctcaatccccagacagtagtaaatctattaattgtgaaaaaatggtaaggtcacaaagtttttcacattccattcagaattcattcttccaccttcatctataaccagtcacattcctttatagagctgtggatcttacaaggcttatcaggaccacagctatccattag

SEQ ID NO: 8460 - DNA, 503 bp, Homo sapiens
  misc_feature (1)...(503): n = a,t,c or g
tttttcactgcaaccagtacttatgtttattactgtacctaataaacagcccagcgtggtgattcctattcacttagtagcctccccatctagaatatactccgtgatctttcttgatggccagactgtgtaaaattcatacagtgtttactacagggatccccaaatattgttagttgaatgaacaaacacacatttcaaggagggcactacagtgagtagatgaacagttttctgataggagattgtacaagtaatgttttcaccagtgtattttaggacagcagattcagattaatgcgctgggactgaatgcaaatagtaaaattacaaatataaagtaaaaatttggaacctttgccaaagaaaggaataataaattgatttaataatttgaaagaactgtaaggtttaggttttgttcttatttttagtggcgactgagattggagtctgtttgtagacatatcnggaaaaaagtgaagggggagatggaagatggt

SEQ ID NO: 8461 - DNA, 1311 bp, Homo sapiens
  misc_feature (1)...(1311): n = a,t,c or g
ggtctgtgtgcccatcagcaggttcccatggctgtcactgcccactcatttccacagttagatacggatgtgttgatgtatttcgtctagtttatttggctcagtccacagctgcgttggagtggtgactttggtagcccttgagctctaattaagagagatccaaaccactcaggtacccactgggcagtgggaaggcctaccgacttactttatcattgagggcttactgatacaatgaaatgagtttcatgactttttttttttttaaacactttttgaaatagagtgtgctgtgtttaaaaccaaaaatatggcatgttgtctctggaaaagtagggccattgaaacagacttttttgtaggtcagtgttaataaaacggatcctgtttgggccttcattgttaaggtggnacttcatggccactggaaggtctgttttggtgttacctgagtgtgacacaggccctgggggtgtgcgtgtttctctaactgtctacacgtgcacataggcagactttctcataggaatgttcttgaaaggtgattggcaaagtcatgcaggcccgccttaaagcgctgattagaacagtccaacacagtccgacctcactcaatacccacaaccatcgaaaatggattcttagtaccagacaatcccagtaatgaaggtttagtttccttgaaggaaactacagaaaaggaaagaagcagaatgagaaaggaatggtacttaggtgtttggtatgctgctcacgtgaagtcagcccacaccagccaaaccctcgtggaagatctgctgcaaccattatctttgttcttgagttcatcatgcatttaaaatgagatgcaagagcatttagcataccatgtaaatatggaccttttaaaattaaaatactattggaagtgctttcaactcagccacatcttagctattagttctttgtgttgtcttatcaaagtttaatggatacagttccacagttgttgatgtgtttgtgtgtatattcgatttttataaagatggtagtaagtcaatacatttatcctgatctgtgtattatttgttcacaaattcaagaagcttaaaggtcgtaaatatcagtatctcataaggtaaaccaatagctgattatgtggagccaagttacttcttttctttttgcattatcttgttttggttttgtgctgtaatagaagttcacttagctactttagataaccttgcattaccactggtctggccacgtttgttaaatccttatactgatattcttctaaagagtaaatctcatcatttttccaaa

SEQ ID NO: 8462 - DNA, 691 bp, Homo sapiens
  misc_feature (1)...(691): n = a,t,c or g
tttttttgtaaaatgaaacatttttattcattcattttaagatttacagcaatggcaattaacaatatagaccaaaagcttcgaatttagctgcatacttttaaaaaatggtaagaagtaaaagatgctttaaaagctatccatctcagttcttaaatggcatctaaaccttagaagtcaaatgttacagcaaatatttgtaaaagcaactgtaaataaaaccgaacgcaaccacagcataatataaccatgtagccatagatatatgataaaatataaaccaacagcttaatattaggaccattagtcacagtggcaaaagttcttagattattgaaaagaagatgtgttaggtcaactgcttaagatggtccacagtgatccctgcctccctgatattcacaatctatcatcaagatagcaggccatccccaggacagcaagtcaagggaaaatagttgatgaccaactgaagcaatcagagctcaccatcntggtcttcagctgttttccctggactgaggtggtcactcccatggagctggtgggacctgtggtttacttctaacaaatagaatatggccaaagtgatgagatatcacttttttgattcgattacaaaagattgtgacttcatcttgctagcaacctctcttttttgctagctctgatgaagcaagctgccattgtg

SEQ ID NO: 8463 - DNA, 138 bp, Homo sapiens
tattttacaattgttgtaccagtttatttcagagttatttacctaaaacatagctattttttccttaataaaacagaggatttttacttattggaaagaaaattattctatagctttttattagccctgactcacatc

SEQ ID NO: 8464 - DNA, 336 bp, Homo sapiens
ctctgatgtcagtcatgctgaagtttgttttcttttgtcctggttaaggggtggtgaaccaaactattgcattttatttttccattcttaaagtctctgtatgtgaggaccccatggttgccccaagacaatattctttgacagaacaaataaatgcatcagtggcatttacatttgagcaagaggtgagatactggatttgatggtagaatattaacatatgtggctttttgagataggatcgagctttgtaaagaattggtaagtcatgatgatgggtgtggtagacttaaatgtttaaaaatgagttaatttttctaattcttagagaattgt

SEQ ID NO: 8465 - DNA, 223 bp, Homo sapiens
ttattttctccattgtgttacacacttgtgcagctgcaaccaccatatcccagggcccaatggtaggaggtagagaagaaaagcaaaagggattggcctcatcctcttacaacgatagttccattgaatagagagaaaggttttcctgcctcagagtgttggctgcactaggcttttgttactgtagtctggccctgttaccatgggattgcttgcatgtggg

SEQ ID NO: 8466 - DNA, 301 bp, Homo sapiens
cccgacccagataatttaaaatattcttcatccagagatagaggtggttcttcctcttatggactgcaaccttcaaattcagctgtggtgtctcggcaaaggcacgatgataccagagtccacgctgacatacagaatgacgaaaagggtggctacggtgtcaatgggggatctggggaaaatacttatggtcggaagtcattggggcaagagctgagggttaacaatgtgaccagccctgagttcaccagtgttcagcatggcagttgtgctttagccaccaaagacatgaggaaatcac

SEQ ID NO: 8467 - DNA, 335 bp, Homo sapiens
cgtggctcacctgtaatcaatgtttcattcctttttcacaggacaatctttttgctctgtactgaggagtccacacatacagggaagtgtgtgcagtgcagggagtgtgcaggggtccctctggggccttccatgtaaccatcacctggatgaagatggggacacctacactctgtccagattcctgggtgcccccttcccatgagggacttactgctccagagtggttaagacggagccctgggggaacttgaggcagggaaggtgctggggcaggacagagaagctgagaagaggtggtggctggcggaaggtgggggctctttcgtttagga

SEQ ID NO: 8468 - DNA, 451 bp, Homo sapiens
acgaatgctacttgatgctggtgtcgaagttaatgctacagattgttatggctgtaccgcattacattatgcctgtggaaatgaaaaaccagtctcttatccctctgctcttggaagcccgtgcagaccccacaataaagaataagcatggtgagagctcactggatattgcacggagattaaaattttcccagattgaattaatgctaaggaaagcattgtaatccttgtgaccacaccgatggagatacagaaaaagttaacgactggattctatcttcattttagacttttggtctgtgggccatttaacctggatgccaccattttatggggataatgatgcttaccatggttaatgttttggaagagctttttatttatagcattgtttactcagtcaagttcaccatggccgtaatccttctaagggaaacactaaagttgttgg

SEQ ID NO: 8469 - DNA, 325 bp, Homo sapiens
ctaagaggcagtgtgacgggcacagtgttcgcagtgagtggctaaagcagatcctgttttatcaaatgggagagggttgagtgagaaagacaagggacatgcacagggcacactgaagcctgacctttgtcctggcagcttcgaggagccagtgaaggcttctgaaggagagactgtcatgtcagtgtgtgtaatactgtgttggctgtagtgtggagaaagggttagaagtaggctacagtgagtaggaagagagaaggaagagaagcaagtgttgggaaacggtgtgtgggtgcccaaggccagggagtttgaaaaccagtac

SEQ ID NO: 8470 - DNA, 534 bp, Homo sapiens
  misc_feature (1)...(534): n = a,t,c or g
accagtttagaataggaatctgaattttattaaaaacaaaaataaatctaaaaagcttccttcagttacaaatatgcacaagaatttctgcattacatcatttgacataaaatgttctgaatgacagaagtagaagtagaacttactaccatttgaagacaggagttgagcgctgaaaaccacacacatttatagaaagaaaccaaagtttcacagggaagacctgtgatctctggctacaggagctgaaattaggaacatgaaagaaacttgaagagagaagacattcaatactctaaaatacttcagcaaaaatagtcaaacatccgtaaacaacttgtaacaaatctttatatgttgtgttgctatgcggtaaatattcttaactgattattattcaactcaaaaaagtgatttttattgctcacgaatacttccctctagattagataaaagcttgctttctttccctggagtcaagagtnaaatgtaattaatgtaattagggcttactcagtgattgtttttgaattt

SEQ ID NO: 8471 - DNA, 312 bp, Homo sapiens
cagaattttatgtatagagttccaggtaccctgctcactacagactgaaattctgtgcagtctaacaaatgaatcagagcctttccatcttgtctgggtagtccctagattccctttttagagggttttgtttttagagtgattataaattcgtccaacagtgcactttcagtgccttctacctccctctaccaagtatgaactgcatgcatggctgatttatgatttcggctattatcgcttcatgtgcgttgttcactattttgtaactgttattaaagtaaaatactgacttggaacatgaattttaaa

SEQ ID NO: 8472 - DNA, 936 bp, Homo sapiens
cttcattctgggctaatctgtcaatactgaagtccagtctttcccccttttcttaccagctcaaccttgattcctgtgacccattctttctgatctttcgtagttcatagtcaccaggcatgagtaccttggatagccctctgaagtctgttaccacccagatttccaactcgggttaattggtactaattctattagctggtataaataatccaaaatctgtgcagactctgggagcaaaatgttctactcagtttggaatactgtgccttaaaatatatttcattgtaacagcaccttgtatatatagttggccaaggacagagttgttacaagttacgtggaactttcatagcaaatcttgacagtaaataccttgttcttgtattaggtctatatcctgaattgacctttagcaagaatctttagatctgctggagggctggcatggcttttggacttcagtgaaaaagaatttctgctactcattgttgataacgcttcagtactgtataaatgtttatccttttccacgtaatttgttttctatgatatgagaacttttattataatttgcctcagtcttgatagaatcttaacaaaaataaaatctgtggtcgtctgaggtattctccatgctataacccagtttagctgatgcatttgggagcttggggtgctgaaattaaatattaacctatttggagttaaggatttattaactagtggctccagtgggtcacagggaacattaaaaagggaacaacgatagaaatacgtgatctaggaaagaaggcaactgaaaaactgaaagaaaaaaaaatgaaagattaaaagtatacgatattctattttgatttagcaattacttgttttctagtgttctgtcaatttttggtgacttttataattacattaaaactaagatgctgaatt

SEQ ID NO: 8473 - DNA, 103 bp, Homo sapiens
tgggaattaaagcaaatttgttgtgtcaacatcttgactcagatgttcaagtacctttgtgtcttgatttgccttagcatgtagaaaagggacttgtaacatt

SEQ ID NO: 8474 - DNA, 605 bp, Homo sapiens
ttttttttttttcacagtggcagattttctttaatagatatatttcaaacagatacaacaaattaaaaaatctaattcacggcaggtaaacatgggtgctcaaaaagttccacatagacatttacacttgggccatcagtatttccctcacattcccttttgttaagtcccatcttcgcagtggcagtacaggagaaatctccaccgtcaccgcacaatccaccaggcgcattaccacctgaagtgaaggtctcatctcgaaggtgcgctcagccataaaaagaaaacatattacagaaaggaaaaataagtgtgctcttcccacccgcaaagcggtctcaccttcagttctagctttctttactccaaagtcttctgagtcttccaagcatctctttcgatttgttcccacactaatatgattaggaaatacattctgatgacccccatttaagatgccattgttatagaaatggttcagatgacaattctggaggttcaagagaaactgggcacactcttggaaaccctgggtttgtgcaatgtctgctgctgtcaggccactggcatttctcaggctgtacaacacaaaaacactgaattac

SEQ ID NO: 8475 - DNA, 526 bp, Homo sapiens
tttttttttgacatagatacttatttatttgcatatttaaagtttacacacatgctatgactccaatgttttaaaaaaataagcccttaacagctctgagacacatggcctcttctgtatcccaagcaaatccctaaatggaggtagagcacgtgttcctatttttcacactctcatatgggagataagtggttaaggaggactagaaacccaatcaggcctaccggggtgccggacagacacacaggcattcctaaaggaatgccaccagagaaaaaatacaagtctgtacatatatctttattttcatacttaaaaagaatcacatactcattccaacagctttaccaggcttggccaacccaataagttacacactcactcaggtactaggaaggttattgcacagctccttaactgatcggggtcagggcagagtggtcactttccccacagccaggctctggatttgcctcctgtgaagacaccatgcctagcacaggctgacggggcggctgcagtcgaa

SEQ ID NO: 8476 - DNA, 361 bp, Homo sapiens
aaaaaagttccagtggctgaaaaagccaaaaataattatagtggttagtgaagtgatatttgtaattcgtagtttaatacacagaagccacctttactaagtagtaaatagtatttggtagctacagctcttattttatgcaaaaatagtgtacaatataaaagtttaaaaatttcctgctgttttgatagggagaaaatttaggatgaagataaaatataaagacaaacgtgataatgtgataaaaactaacccaaatatatattttgctcagatacacctgtaaaatgtctagattctccattctttccttatttaaaatagagtagtttgtttaagaagtggattcagttagagatct

SEQ ID NO: 8477 - DNA, 51 bp, Homo sapiens
ccttcttttaggagcttcagtggttctgaaaacttttatttgtttggttgg

SEQ ID NO: 8478 - DNA, 356 bp, Homo sapiens
actcttatattgccctgcaaagagaacgttattgtcccctagaagggagacaaactttaccttaggaaagctgattacatctgttaagtggcagagctggtatttgaacccagtccatggattcaaagcctgtttattttccataatgtctaactcattataggccttcattaggaatgtgtgataagtttttttttttaaaaaatgacattatactctgtatagtttataatttttttactttatgaatatgctgtcattaacatttttcatgggcattgaatattcttctatataacttctaatgggttacacaggtttcttatatataatgaaaaactgtatattgggatggg

SEQ ID NO: 8479 - DNA, 330 bp, Homo sapiens
gtttttggtagtatatggcattattctgaggaggggtcaaagactctcccgtatgttagaacggtcctgcacagaacaggctaacccccacccacgtcccccagtgtttgaaatgcatagtgtttgctgtggtttattggtcagggcaggagtttctcatttaaattggcctgtaactttttttttggtctgatttccttctgtttgtgctgatattctcacctcaataggaatcaggagcttcttttgctgttcttctgttttggatgcattggaaggtaagtttccttgtgaaccatattttggactcattttgtaggctttgccaaa

SEQ ID NO: 8480 - DNA, 544 bp, Homo sapiens
cctctgaatcccaaagttttgaattgcccccagtaatctcttctgtctgaagaacttggtttaacatttttttaaagcagattctttggttatgaatttcctcagcttgccttcatttgagaatgtctttattttatttcattcttttattccagtaaaatagaaatttttactggatatagaattcttgggtgacagttatttcaaaactaaaaatgttccacttctttctggcctctatagtttctggtgaagatccagtctttcaaagaattgttcacctgaatgaaatgtatcgtttttctctggctgatcttatttttcttggtctttagttttcagaagtttctttatgatgtgtctaagcttggacttttgttgttaatttatccagttgtgtggttcactgagcttcttggtttgtaagtttatatctttttccaaactatcatctaatttatggactccatgctttgtcatttccattctgtttaagaatattcaccaatactttctgaaggctggttataaatagctgctttga

SEQ ID NO: 8481 - DNA, 844 bp, Homo sapiens
ttttttttttaatctgtcccattaatgatgctgttcttcagggtttggtcttaatcactaatcttttctagggatcacaaactagcctgacaaagttcagggatagctttcttttccagggctaacagtgttggaaataactgatgtgaatgtctttaagtaagacagacagacactttactactccctgttgtctgccatttatattacctaccaggctcctaaaataagttcatgaccccaactttacactccctgattttgtgtcatgtgctgggtttatagtagagaacaaaaataaacatgttctttgaactaactaagctttcagacaaatgggggaaacacagttgaagacatttttaaaataatgttacgcttagggcacagtgatagtttaacaacaatactgcttaaagctcaaacaaatcttttaccattcaacccagtgctcatttcattaatctctatgctaattactcccctgtgatttttcaattttacattgagtataagtcaaccttcaaaattttaaatcctcagagtttctaatatgtataaagtttctcatagatgataataacaactacatatatttgtagaacatgcgctatggctggctaaatgctttacacaagtcaatttcgaatactggaataatctccattatacagagaagaaaacttgaattaaaattaatttgcctcatgtaatacatagtaaacgaggattgaaactcaggtctgtctgatgctgcagttagctcttttaatgctctagctataatttctctaaaggatataattacgaagcattttccaatatatttaatgacagaatccta

SEQ ID NO: 8482 - DNA, 522 bp, Homo sapiens
  misc_feature (1)...(522): n = a,t,c or g
ctaggcctctgaggaggcgaatccggcgggtatcagagccatcagaaccgccaccatgacggtgggcaagagcagcaagatgctgcagcatattgattacaggatgaggtgcatcctgcaggacggccggatcttcattggcaccttcaaggcttttgacaagcacatgaatttgatcctctgtgactgtgatgagttcagaaagatcaagtgtgtnaggggggagagcttgagtttctggcctcattgcctatttgtaaagctgtagcctaaagggctctcccaatgcagcctggtctgaaactgctttaagaagcctctgaccctcttcagggccaaagaactccaaacaagcagaaagggaagagaagccgagtcctcggtctggtgctgctgcgaggggagaatctggtctcaatgacagtagagggacctcctcccaaagatactggtattgctcgagttccacttgctggagctgccggggggcccagggatcggcagggctgctgggcagaggaa

SEQ ID NO: 8483 - DNA, 588 bp, Homo sapiens
ataattaaaaggactcctatcagacatttcttatccacccaataatgcccaaccttctgtataccagcagcaggctgggccccaaatcagaagattcatgttgcttgctttctctatagggaaaagtgaagctttcgggtaagtatcatgtggctattcctggttctactttcccttgtggaaatgtaatacctggtttacactgctcttttgtgagtacgtatatggtgataggaataaaggagaaagtctggaaagcaccaagcacaaagcaggcctgaggctccagcaacagtcattcagaaacaactgcccactttatacgtaaaagtatgaaaggaatgccaatgtgagcccatgtcattaggagaggtaaggataatctacaccttgcttaaccatcacttaacctttttattgcacataatgaaatttaagccctaacctaggtctgtacttgtgtaataattatgcactctaaattagcatctgcatttagatagattgcaagcttagaaatcagtcctgcatttgacctcttttgtcagtgcctactatatcaaattttaacagatttttttttttttt

SEQ ID NO: 8484 - DNA, 438 bp, Homo sapiens
  misc_feature (1)...(438): n = a,t,c or g
ggaggccaacagagtccctacaggtggtgctcacggtaatgcaccgacaatgagtggctgttttccagtttctggcctccgctgcctatctagggacggcaggatggccgcgcaggggccgncgctttcctcctgaccttcgacttcgacgagactatcgtggacgaaaacagcgacgattcgatcgtgcgcgccgccggggnccagcggttcccggagagcctgcgaagccaccttaccgcgagggctttttacaacgagttacatgcagcgcgtttttcaagttacctgggggcgagcagggcttgcggccgcggggaccttgaaggcgccattttaacggaagccattcctttttgttcgncagggattgaagcgacntgtttgcattttttttggcaaaacaggggcgctttttttcgaggtgntttttnattt

SEQ ID NO: 8485 - DNA, 373 bp, Homo sapiens
acacaatttctgctctaatccacaaatacttggacattctagctcttctcattgtcccaaccttttaaaacaacttcagtaatagcacctttcttaacctctggggtgataaaatggtgctacttccaatgactgtttgaggccttatctatagggtaacacacagccatcaaagtatagatcaaaagctcaaaaggtttaagttcatcagtagaaaaaccagggagtttttttctcctgttctagagaaaaaagctcacagattgcaggactgtagttaactagtatttatacttgtcctgggttgaagcaattgtaatagtatgggttgacagtagggttttataataatacacttttgtagttttgtatg

SEQ ID NO: 8486 - DNA, 472 bp, Homo sapiens
tttttttttcaaacaattaacgtccaccaactgtactgatgaaactctctcaaatgacattataaaaaatagttttttttgtttgtgattacatatctttgaagtaatattatacaaaagtctgctcagccacatgttcctccccaaataaaatgtattttaaaagatgcactatcccttttttatgagattgaaaaaagactttgaagaaaatgaatatttatgagatggaaaaaatatacaattttatcttaggcatgccatatttttaatgcaaaacaactgacaaaaagtcattttaatatgaaggaatatactaaccaaaatatgttggtgatagggagtgttcctattatagctatttgtcaaattatcagaaggactttcattatatggaaaacttttaaactttctaacttctagttatgttaatttaatttgaatggagactttttaaaaaaggataatgtat

SEQ ID NO: 8487 - DNA, 417 bp, Homo sapiens
ccgacgtgttcttccggtggcggagcggcggattagccttcgcggggcaaaatggagctcgaggccatgagcagatataccagcccagtgaacccagctgtcttcccccatctgaccgtggtgcttttggccattggcatgttcttcaccgcctggttcttcgtttacgaggtcacctctaccaagtacactcgtgatatctataaagagctcctcatctccttagtggcctcactcttcatgggctttggagtcctcttcctgctgctctgggttggcatctacgtgtgagcacccaagggtaacaaccagatggcttcactgaaacctgcttttgtaaattacttttttttactgttgctggaagtgtcccacctgctgctcataataaatgcagatgtatagcaaaaaaaaaaa

SEQ ID NO: 8488 - DNA, 556 bp, Homo sapiens
tgggggaggtggggtggtcacaatgactagcatcagtgggtaagggccagaaaggctaaatgaatcctgcaatgggatgacaggtttttatcctaaagaactgtctcactcaaaaggccaatagtgactgtccatggagggacactcagctgttgtcacctggtacagtaacaaagacagaagcttcactttactcatgtaattttttctactagacaggaagataatttttgcattttattaaatatatttatatgccacaaaaattattttagtgacaactaccaggaaagtacaaaatcacttaataactggttttctacaccttgatttgtcaagaaactcataagcaaatggaaagtagtaagtactgattgcagttacttacagcaaacagttttgagaagaagaagaaaacctgtaacactgaaaattgctttatatcccattcatagatctcttcaaaaggtctactttaaaaataaatcacataaagaattgttcagacttgtttggtgatgcctcaacttcagaacatttgcaaggaaatcacatg

SEQ ID NO: 8489 - DNA, 532 bp, Homo sapiens
  misc_feature (1)...(532): n = a,t,c or g
aactcaattgaacataaagtattaagaaatttgactttttttctcaaatgtctaaaatgtaccaagaaatatgtctagagtcatcaaaaagcagcctgtttgtcagatttactgtttaatccatgtaaacagctttcatataattcatgatagaatattactatgtgctttggaagacactgaggaaagacaaaaggtcattgggcagaaccaccctagattgactgttaaggccatcttctagtttgcaggacttgtggtagacagacagaataatatcctggacctcttgggtgtatacaggacaaactgaaataaactctcatttttagatcataatgtcatcatgaaacatatcaattcggtctatttctgaagaaaacaagcacaatgataaannnnnnnnnnnnnnnnnnnnnnnnnnnnnnnnnnnnnnnnnnnnnnnnnnnntgggaggtggggcgcactngggaggtgtttttggttacgggggcagntcccccanggatgggnttggggntgtcttcatggg

SEQ ID NO: 8490 - DNA, 366 bp, Homo sapiens
ctaaaagggcaatcacatgaaatagcagttgtttatccagttaattccatataacatactgaacactcacatatgaataggtttctgacataattggaagttcctgtgaaccactcgttaaattttgtagagagactttgttcaggtgatcatcttaattagtgtaagggaaactctgttggtttacctttattgtaaacccattaagtttctttttctctgcctcagatcatttcaaatttgggacccattgtattactcctatctagtaggcttttattttgagagttctaggttgaaatattccagtttcttgtgagttctcttccttgtcaggttgttactaatgccacataagcctcttgg

SEQ ID NO: 8491 - DNA, 825 bp, Homo sapiens
caacgggcaaagagccagttttttgaaaaggtgcatgaagaagttgtgctcaaaactcaagaggctgctaaagaaaaagagttccaaagtgtacctgctggaccagctggagcagttgagagttgtgaaatctgtcaagaacaatttgaacaatgggatgaagaagaggaggaatggcatttgaaaaatgctattagagtagatggaaagatttatcatccatcatgttatgaagattatcaaaatacatcttcatttgattgtacaccatctcccagcaagacaccagttgaaaaccccttgaatattatgttgaacattgtcaaaaacgaattgcaggaaccctgtgacagtcccaaagttaaggaagaacgaattgatacaccaccagcttgtacagaggaaagcatagcaacaccctctgaaattaaaacagaaaatgacacagtcgagtcagtttaaataaaatgagaaaggtatgtttttcttttttaaaaaagctgctgttggatctagaaggtgaagaatttttttatgtatatatagacatatctatataaattgtctgggctgaggcagggccttcagctatcatttggttaattaaatacattttagtatttgcctttcctactgcctgcagagtttcagggtgcttgttgtgtgaaagttctgtagatgtgtgcaaatttaacgaaatgaaattgtatgtgtaaaaatgtacgatttttcactgtgcaactgtaaattataaataaaaaatatttttgctattcatggagtgtaatatttatgcacaccatcaaatagtttctgtactttttt

SEQ ID NO: 8492 - DNA, 489 bp, Homo sapiens
gcagatattaaatcaatatgtgctgaagctgctttatgtgctttacgacgacgctacccacagatctataccactagtgagaaactgcagttggatctctcttcaattaatatctcagctaaggatttcgaggtagctatgcaaaagatgataccagcctcccaaagagctgtgacatcacctgggcaggcactgtccaccggttgtgaaaccactcctgcaaaacactgttgacaagattttagaagccctgcagagagtatttccacatgcagaattcagaacaaataaaacattagactcagatatttcttgtcctctgctagaaagtgacttggcttacagtgatgatgatgttccatcagtttatgaaaatggactttctcagaaatcttctcataaggcaaaagacaattttaattttcttcatttgaatagaaatgcttgttaccaacctatgtcttttcgaccaagaatattgatagtagg

SEQ ID NO: 8493 - DNA, 478 bp, Homo sapiens
  misc_feature (1)...(478): n = a,t,c or g
aaatattagtcatgttaattaataaactgtattattttgtatagctttttatttgcttacctgacattttatgagagcttcatagttggtcggtatgtagtgcttcttgggactgaagaaattctaattgttgtttaagttccaaggtgtgctacaatataggaggcacagtcatcagtttgtgacatacattatttactgcctatttcattctgattctatatttttagctttatgctgaactgttcaatgatgctgggattctctctttgcatgtcatatgtgaatgtgtggttcaagctgtaactgttgaaattattttagaatttatgacgatttctcaggcagggcctatgtttatatatatatatatatttattctttagtttttgtgatatgcctatatttttaaggaagtaagttatagccatacttttttaaaagtaggaaccacaatctttatatggagcagcntgtt

SEQ ID NO: 8494 - DNA, 259 bp, Homo sapiens
  misc_feature (1)...(259): n = a,t,c or g
ttttttttttttaaaggatgttaaaaatgtttaattcacacataatattcatacatgtttatgcagtacagagtgagattttaaaaaacttttatttagcctcagggttacatgcgcagatttgttatataggtaaactcgtgtcatgannnnnnnnnnnnnnnnnnnnnnnnnnnnnnnnnnnnnnnnnctgggtgatgacaactgcaggctggcattctctaactctcaacatttggcttatacctgcttcttcatc

SEQ ID NO: 8495 - DNA, 1035 bp, Homo sapiens
cgacgagccatggttgctgggagcgacgcggggcgggccctgggggtcctcagcgtggtctgcctgctgcactgctttggtttcatcagctgtttttcccaacaaatatatggtgttgtgtatgggaatgtaactttccatgtaccaagcaatgtgcctttaaaagaggtcctatggaaaaaacaaaaggataaagttgcagaactggaaaattctgaattcagagctttctcatcttttaaaaatagggtttatttagacactgtgtcaggtagcctcactatctacaacttaacatcatcagatgaagatgagtatgaaatggaatcgccaaatattactgataccatgaagttctttctttatgtgcttgagtctcttccatctcccacactaacttgtgcattgactaatggaagcattgaagtccaatgcatgataccagagcattacaacagccatcgaggacttataatgtactcatgggattgtcctatggagcaatgtaaacgtaactcaaccagtatatattttaagatggaaaatgatcttccacaaaaaatacagtgtactcttagcaatccattatttaatacaacatcatcaatcattttgacaacctgtatcccaagcagcggtcattcaagacacagatatgcacttatacccataccattagcagtaattacaacatgtattgtgctgtatatgaatggtattctgaaatgtgacagaaaaccagacagaaccaactccaattgattggtaacagaagatgaagacaacagcataactaaattattttaaaaactaaaaagccatctgatttctcatttgagtattacaatttttgaacaactgttggaaatgtaacttgaagcagctgctttaagaagaaatacccactaacaaagaacaagcattagttttggctgtcatcaacttattatatgactaggtgcttgctttttttgtcagtaaattgtttttactgatgatgtagatacttttgtaaataaatgtaaatatgtacac

SEQ ID NO: 8496 - DNA, 312 bp, Homo sapiens
cttcacaatgacatgcctcacgtttttcaaccacttctttgatacactcttgctttacaagactgtcttctgaagtagactttaatgtattcctaagagtgaaatctggtgagaataacatgatcgcattatctgagaatccaggggtgagggctgatttctcacattcccgggtagccttttggctttcggcttccattattttacttcctcttaccatatgttcaggaatgcactcttcctttagagaatcacatttaaacacgtcgacgcggccgcgaattccagatctatgaatcgtagatactgaaa

SEQ ID NO: 8497 - DNA, 1125 bp, Homo sapiens
tttttttttccagaaatggtgttccatttattcactgaaaaagagagagattaggccttcttcattcattttctccattcttgccaaactccctcccctcattttttccaaaataacaacacactgagaaacatgtttgtacaaaaaccacatattattcccccccctcacaaaatcaggtggctgaattacaggaataaaaccagatcaaagacatgaaaagaaaaagccaccacttatactgaaatataacagtgttaagaattcaggtattttgtagaattattactatagtaaaaatatttccacctggatcttttaaatttgaaagtgatcacattaaagacctgaggttacaagggaccacagtatgaaccagaattccattttccttctcggactccaggggaaaaaagaagtatttggaatgagtttcctttgggaaagactggcaggaagtaggtaaaaccctggccattgtcaaaaggcactggggtctttctggagccaaatgcattggaactaagctccagtaggaataaactcattctcatttccactcccaagagtccagaacaaaaacaaaaggaccaaggtctcctcggttcccgtattccagtactctgatggtgacccagggacaccctggttagaggcaaacctgagggtttgaaaggcaaatctcaattgtggttttatttttttgctttctgatattaaggaaaaaagttctcaagtgttttataaacacctccctataccctctcatatgtaaagctttagaaaatatatagaaaaagatatccaaaagatgtccaccttgcattctaaataatgaaactgccacttgagaatgtgaagtgagaaagccaggcgctttggaaaccaagctctaccaaaaacaccctttccccacacatggaaggacagaagggagggaaggacaagaggtaaaaaccgggaactctcaagtcacttatcagcaggggtaaatacgagctcaaattaaggcatttttgtggcttgtcctctggaatggcattctaccctcccagcctgagcaccccaaacctcaaagcatgatgctctgactgccaagtgagttccttgttaccctcagcatct

SEQ ID NO: 8498 - DNA, 722 bp, Homo sapiens
aaaacaccagtgatttagatttatttttattgacaaggtttataagaacaaatatttaaaatcgaaggccaattattaggtctcatttagttgcttattttgttcacttgtatttacctttccctagtgtctgagtaactatcaagaaacaaacctgtgaaaatacctgttaacattcaacatatatttttatatatttctgttctatgatgcaaagatatttttcaacacttaattggtgcaacaaatgtgtcattgtgtcataaacagcatgttttaaaattcagatttaataaactgatttaagacagtaaatttgaaagacaaaattaagtctcattcaggagtggtccattatgttgatcatctagaatcaacactgattaaccaaactctgaaagccaagagccccaactccagagaaacattaaatttctttaatgtaaaagtatattatttttgagacacactttgtcagagacatccacgattgcctgcacattatattctggcattataatctggtactttagtcataatcgtgaagctggctaggtttccagtaaatatcagcattttaatatgggcaaaagcagttaataaaaatccgttcatttactgtaagcccaaatgtgcttgtacttaatcccaccctttcccaaagtttttgaagctttgataggttgatttttggtctgtccttatataatataaaacgtacc

SEQ ID NO: 8499 - DNA, 211 bp, Homo sapiens
taaaatataaaagcaagtttttctattttaaggtgcatatttgtaacattacaggggatgaagtaaaatgtaattaattagcacaagacttagggagtacagaaaatacacagaagtaaatttcaaatccatttgattgttttcatagtgaccccttagtcattttatattcttgtctgcctttctagaaaatggtgtcttaaggtggaag

SEQ ID NO: 8500 - DNA, 414 bp, Homo sapiens
  misc_feature (1)...(414): n = a,t,c or g
caaaaggttacatagtatgcccttaagacttaattttaaccaaaggcctagcaccaccttaggggctgcaataacacttacgcgcgtcacgcgcgcgcnnnnnnnnnnnnnnnnnnnnnnnnnnnnnnnnnnnngtcagagtttaaggctttcgagtcatgacattctagcttttgaattgcgtgcacacacacacgcacgcacacactctggtcagagtttattaaggctttcgagtcatgacattatagcttttgagttggtgtgtgtgacaccaccctcctaagtggtgtgtgcttgtaattttttttttcagtgaaaatggattgaaaacctgttgttaatgcttagtgatattatgctcaaaacaaggaaattcccttgaaccgtgtcaattaaactggtttatatgac

SEQ ID NO: 8501 - DNA, 173 bp, Homo sapiens
acctgctctgagccattccatttgatccgtttcaaaaaacagttctgagtaagattccccccctttttttttccttaagcataattgtcttaggtttgcctagtttcattttaagaaaaggctccactggtattacaaaaacacaaaggaaaaacaagaaaaaaaagtagtag

SEQ ID NO: 8502 - DNA, 691 bp, Homo sapiens
  misc_feature (1)...(691): n = a,t,c or g
caaggtcctccagcgttcctagagcgcagaagaaagcgctccgaagagctagagctgacactcggcgatgagctaagacgctgtttcagagcgtttgggtcctctgaggccccttgaccaggagtgtctctgaagatacagtccaaagaaagttctccaaaacaaggagagcagtctgaagctggggatggcaacagcattggacccagaccagccaaagaaacaaaaaatacttgtggaggagatggcccctctgaaaggagtacaggaacagcaggttcggcatgagtgtgaagttacaaagcctgagaaagagaagggtgaggagacaaggattgagaatgggaagcttattgtagtaacagactcttgtggaagagtagagtcatctgggaaaatatctgaacccatgggaggctcataatgagggctctaacttggaaaggcatcaggccaagcccaaagagaagattgagtataaatgctcagaacgtgagcagagattcatccagcacttggacctgattgaacatgcgagttacacacacgggaaagaaactctgcgagtctgatgtgtgtcagagttccagtcttacagggacataaggaagtcctctcttaggagagaaaggtcatccagtgttcatggagttttggggaaagccttttcaagnggggntttancaacctt

SEQ ID NO: 8503 - DNA, 2256 bp, Homo sapiens
tttcagtgtggaaaaaaatctttatttcaaagtaaaatgcacaaagtctcatacagcagataaaatcagtgttactgctctcagatgttaaggttagcaacctttctggcatatgctaattcatcatgaactcccaatagctgaactgaatggcttttaagtacagctataaggtctcatggtataattccttttgttgatgccagtgacaggattttaaaagctacattccattaaaaattaaaaatacagcagcttttccaggggaactagatcccaaaattgtacccagaactcttgtctaagatattaagttaaatatcttgcatgtatatatcattatagtaaatcagtattcttgacaaccacagtgtaagaaattaaactttggctaattgttttccccatcatgaaatcagtcttttgctgtcttcataaataaattatgaccaaacattacaaatactttatacatgtttactgatttacagagaatatttaataatcagaactcaccagtttcaatagtattgtacattaaattataagcaatataaccactgctacaaaagttatctaagttaatccaagataaaaactgtgtctagagtttaaatacattgaaatagaaaaaaaaatagaaattagaaaatagtcttcaagttctgaaaatctagaagaattctccaacatctgctctcttatctcgacatttgcttctagctttggttcgagctttgaaggctgcagagttatataaatgcctttcgaaacgagaaatcttcatcgttttaaggcgttgcagcatcaaggcatcactgggggtccaagttcaaatacatttcgaaggaattcatttgactgcaagtggtactgcatccctgatccaagaacctccttaaaggtgtcataggtgtgtttttttacccagcaatcaatatacatgcgttcaggaccaaatttaatggtttctgttggaaaatctcgttcctccactgccctcaggacatctctgaaaactgaccgctgctttctcttgtccactttgggcccggtgtttatttccatctggtggccaaggccctaagcatctgcgtacaggactccatgtcttcataaaacaagtcactctctattcctctggccaattcaaagagaagtgccaaagattcaccagcagctattctcatgtttacatcatcacaagagaggaggcttggaagcttatggaaatgcatctcaagctttttcttcacttcattgattgggcatatggtcagcagtagtgtccatgcaagaagagagctgatatgaagcactgtattaggagtgctgcaaataacagtagtgtctttctctttgagataggatttagtgaagatattttccaaacattccagagttgagtatagttcagtaatgtcatctgtggcaataaaacagcaaacaccaaagcaagttgcacaagtttgcctagcctgcatactagctgacccatcacaaatgattttctttaggattggtccaagagttttcaaaatctcttcactttcaattccagggccccagctgaatacaaagaacagatgctaacgctgcagctgcacgttgctcatcactcttaccttttttcaggcagcgttcaatgctatcagttaaagtcattctcctttccagaataaattcatacagcatttttgaagccagtgcatttttaataccttcaagagctgcttgccttgtcttcgcactcttatccagggttaggtcaattaatcccttcaacttgtactctaggtcttcttgagttccttcctcatcaaggacttctggtccatcttcagcaaaactggaaggatcgctataaccactgcaatggcctcattgtttcaaattgatgcatcttcatcactaaaaggctgaacatttcgatgctggccacctgctgtcgccgccgtcgctgcggctgctcctgacccgccgccgcccagcactgctaccgcggtggggagtgttccgcttcttgttcttcggcatcgtgggacgcccggtgccgcccagagtcggagcttagcgaggatcagccgatggagctgcactttttactcgtgcgtctgtgcggcgggcggctgagaggcgagtcttcggctaacaacagagtcgagaagcggcgggggtaagagtgggcggtggcggcagcagaaatccccgtgaagagctgtgatcgaaaacgatacatgtttctctggcacgagg

SEQ ID NO: 8504 - DNA, 86 bp, Homo sapiens
ccaacattttcatgaaacatcttgttctaagtcattgctttcttttttattttctaccagcactaaaataggcaggactaagttgt

SEQ ID NO: 8505 - DNA, 392 bp, Homo sapiens
ccgagacacgccgccgccatgtcccgctacctgcgtccccccaacacgtctctgttcgtcaggaacgtggccgacgacaccaggtctgaagacttgcggcgtgaatttggtcgttatggtcctatagttgatgtgtatgttccacttgatttctacactcgccgtccaagaggatttgcttatgttcaatttgaggatgttcgtgatgctgaagacgctttacataatttggacagaaagtggatttgtggacggcagattgaaatacagtttgcccagggggatcgaaagacaccaaatcagatggaagaccacggcgtagcagaagccattccgacaatgatagaccaaactgcagctggaatacccagtacagttctgcttactacact

SEQ ID NO: 8506 - DNA, 456 bp, Homo sapiens
gatctgcatgacctataatctttgaaccactttcgtacctcatgtttttatccagcactcttattgtaatatgtactagtctgtgaacaatgtcaaataaaagagaacgaacaggtagtttggtggagctgagctagtgtacaatacactagttgtaaaaaaaaaaaaaaaaaagtgagccatcttttgttcatttaaaatggtgttttgaatttcgtatgcagaaaacgttttgttacattgcagattttaatgtatttaataaatgcaacatgcagattaagtgcagtgtatactgagtatttaaattaaaatgtacatttcataaatacagtttcaaaagaaagcatcattttgtgtatactaacacattaagtgtatgtcagaaattgatgtataaatatatattttaacattttctgaaattaaactgcagttttgttgaaaaaaaaaaaa

SEQ ID NO: 8507 - DNA, 402 bp, Homo sapiens
gacgccagaaggtcccaacagcagctgcccaaacagttttcgccaacaatgtcacccaccttgtcttccatcactcagggcgtccccctgggataccagtaaactgtccactgaccagcggttacccccatacccatacagctccccaagtctggttctgcctacccagccccacaccccaaagtctctacagcagccagggctgccctctcagtcttgttcagtgcagtcctcaggtgggcagcccccaggcaggcagtctcattatgggacaccgtacccacctgggcccagtgggcatgggcaacagtcttaccaccggccaatgagtgacttcaacctggggaatctggagcagttcagcatggagagcccatcagccagcctggtgctggatccccc

SEQ ID NO: 8508 - DNA, 809 bp, Homo sapiens
cgccggatcccagtggccccggcgtgctcggctcccacaggcctgcagccagcatcgcaccgaaccttcggggggccgcggctggagcgctcggccggcgtgggagcgcagaggccgcagatgcaatcttcttaccgcgaagaagccaggggaataggtagccacatcttgtttgcagataagaaaggaagctaacgcagtattctgcaaagccaggagtctgactcagtacttttctcactcatgcatacaaagcagctaaaaatgacacagcttatttaccatgcccctgacactgcactgatcactttatgagcttgaactctgttaatcctcacgaccaccttcatgagactctccagaaagagcaacagtaatggagtacatgagcactggaagtgacaataaagaagagattgatttattaattaaacatttaaatgtgtctgatgtaatagacattatggaaaatctttatgcaagtgaagagccagcagtttatgaacccagtctaatgaccatgtgtcaagacagtaatcaaaacgatgagcgttctaagtctctgctgcttagtggccaagaggtaccatggttgtcatcagtcagatatggaactgtggaggatttgcttgcttttgcaaaccatatatccaacactgcaaagcatttttatggacaacgaccacaggaatctggaattttattaaacatggtacgtttctttcccgatccagttgggtgcctatgtgctccagctttcctgctgcagcttccatttaatgccagagtggtgtttgaatttgggctta

SEQ ID NO: 8509 - DNA, 842 bp, Homo sapiens
tttaggcatttcatggtgtggggaggattagatacatttattaaaaacccaggctgaaaaacaaatgtcttgtccatctggagatcttatatttatttgaaaaccaagttctgtgaaagagcacactcaacagtcatatatcttctcttcaaccaaagacttggagacagggttcttcaggtcagtgcagaggcaacgatacatgcattgaatagcaggtctcggcatgaatttcctcataagcattcccaatatgagcctggacaatcttcttcagataagcaagtgagatcctctggcccttaatcatcaatatactcaaatggttctgggggttctggctcttgttcctcctcctcgatttttgggccatgtgctgccacaggttccaccagctcctcaatgtcttcactggtatccttcagaatgatgatgcctccaatagagagtggtttgaaaggctggtatctacaggtctccggcatggttaggaccttaagctgggcaggcataactcgggctggggttatccaataactggaagtttggctcaggttcttttttcttctctttttcctcctttttctctgcctcatccacttccattttctcctcctcctcgttttccttttctttttccttctttttagccttggcagttatagataatacagcagtagaaaccttttccttttctttttcttttggtacctccagaggggcaggatatgcaaatgtggatggtttacagttcgatttatactgaactttcggcatctttaagtccttgttaaggccaatgacacaggtaggggtataagccactgacaggaagtgtgaaa

SEQ ID NO: 8510 - DNA, 491 bp, Homo sapiens
  misc_feature (1)...(491): n = a,t,c or g
gactggagggcaggagaaacagggagtgatttttaatggatatagaatgtcttttggaattatgaaaatattctaaaatnnnnnnnnnnnnnnnnnnnnnnnnnnnnnnnnnnnnnnnnnnnnnnnnnnnnnnnnnnnnnnnnnnnnnnnnnnnnnnnnnnnnnnnnnnnnnnnnnnnnnnnngttaaaatgtttaaaatgtagggattctcagattaggtttgaagaatacaagatctgactctatgttgtctacttgagacagtcaaaatagaaagacacataaatattgaagataaaggactagaaatatataccaggcaaatatgaacctaaaaagctaggatagcaatcctaatatctgacaaaatataatttaaaccaaaaatatagaggatagagaaagatgttatataggggtaagagaaacaatagaacaagaatgaaaatgcaccaggatgtatgcagtttcaaaatacatcaagaaagaa

SEQ ID NO: 8511 - DNA, 377 bp, Homo sapiens
  misc_feature (1)...(377): n = a,t,c or g
atgaacatatccaaggttctattttaaggccaagggatggggagtggtgagtgggcctatgttaggaggtcacacagatatataccagcttttnatttacatgatcaacgggacttcattttttnctccagtccctcctgtgtttgacattaagacagcttaatgtgaattttaagtgcaataatgtgttgtttacccttaatgataacttttagggaatatttatacccctttaaaaaagttttgggcccacaatagctagattatttcgtgttttacagttatattttttacttaacagaaaatcacaactaacaataaacttttatggtggatatagtttgtaatcttagtgggactgttaggaatttgtttat

SEQ ID NO: 8512 - DNA, 1711 bp, Homo sapiens
actggaagttactttagttcatttaattttaattttatattttgtgaatattttaagaactgtagagctgctttcaatatctagaaatttttaattgagtgtaaacacacctaactttaagaaaaagaaccgcttgtatgattttcaaaagaacatttagaattctatagagtcaaaactatagcgtaatgctgtgtttattaagccagggattgtgggacttcccccaggcaactaaacctgcaggatgaaaatgctatattttctttcatgcactgtcgatattactcagatttggggaaatgacatttttatactaaaacaaacaccaaaatattttagaataaattcttagaaagttttgagaggaatttttagagaggacatttcctccttcctgatttggatattccctcaaatccctcctcttactccatgctgaaggagaagtactctcagatgcattatgttaatggagagaaaaagcacagtattgtagagacaccaatattagctaatgtattttgggagtgttttccattttacagtttatattccagcactcaaaactcagggtcaagttttaacaaaagaggtatgtagtcacagtaaatactaagatggcatttctatctcagagggccaaagtgaatcacaccagtttctgaaggtcctaaaaatagctcagatgtcctaatgaacatgcacctacatttaataggagtacaataaaactgttgtcagcttttgttttacagagaacgctagatattaagaattttgaaatggatcatttctacttgctgtgcattttaaccaataatctgatgaatatagaaaaaaatgatccaaaatatggatatgattggatgtatgtaacacatacatggagtatggaggaaattttctgaaaaatacatttagattagtttagtttgaaggagaggtgggctgatggctgagttgtatgttactaacttggccctgactggttgtgcaaccattgcttcatttctttgcaaaatgtagttaagatatactttattctaatgaaggccttttaaatttgtccactgcattcttggtatttcactacttcaagtcagtcagaacttcgtagaccgacctgaagtttctttttgaatacttgtttctttagcactttgaagatagaaaaaccactttttaagtactaagtcatcatttgccttgaaagtttcctctgcattgggtttgaagtagtttagttatgtctttttctctgtatgtaagtagtataatttgttactttcaaatacccgtactttgaatgtaggtttttttgttgttgttatctataaaaattgagggaaatggttatgcaaaaaaatattttgctttggaccatatttcttaagcataaaaaaaatgctcagttttgcttgcattccttgagaatgtatttatctgaagatcaaaacaaacaatccagatgtataagtactaggcagaagccaattttaaaatttccttgaataatccatgaaaggaataattcaaatacagataaacagagttggcagtatattatagtgataattttgtattttcacaaaaaaaaagttaaactcttcttttctttttattataatgaccagcttttggtatttcattgttaccaagttctatttttagaataaaattgttctccttctaaaagtaaaaaaaaaaa

SEQ ID NO: 8513 - DNA, 1238 bp, Homo sapiens
  misc_feature (1)...(1238): n = a,t,c or g
ttttttttttttttttttcaataatggtaaacatttattgagttctttgtaaagcctggtactatgttaaacattctatatacatggtctcatatagtccttacgagtcaatgtggtaggtaatcctatattcctattttagagatgaacaaaaaaaaaggctttgagaatttatcaaggacccataataatccacagaacctaaattcaaatccttttgtccaactccgaagacttatctcttaaccacttcataagattaaaacgctgaaggggcacatactgttatgaattttaatggctcctacacatgcatcctttatatatacccttcatgatttttcaaaccatgtcagattctcatttttcaattctcaagatacagcatcttcttatagcatcttcaccacctttcccgtttactgtcttaaatgtgcccaatctcggaaatatcaataacaaaacaagcttgttgacattttgtgaaacatttaaggagacttccaaggaatgtaacatatgtagactttgtgacacatatattggcatgtggtcacagctctgttctgagatgagatgttactattttggctttgagacatgaaggatatgacatttaagtctaaacatgcaccagccaatcgtgaaaagtcagcatactcataatccaaaaagcttcaatagaaatttagatagttatagaaggtgcattactcagagtcaagaaacctgggncatactggagagaacagtgactacctctaaagaaaattatgttcatatacaagctacaacaaatatcaaatgttatataaaacaaacaatgcaggggaatccacaaggatgtggaatgtttgagcaaaaaaaaggaagaggcttattcaatggcttgtactaaaagataagccccagattctaaaagaaggtaggcaaactgctcccaactcaccctggtctcaaaaggtgaagaaggtagaacatcacagaaggaataatggagtacagtgaaaggaggccaaggcaggttgataaaaattaaaaaaggattagcacatgctttcttgttttaattggggtaagaacagtggacaaagagttggagataggttgttctgaggagacaaagggctattgtttcatcttggctgggatcagccatgtttaccttccatcgaaggtggacaaataaaaacccttacagaggtattttttatcatatgttttgcaggcatgttgct

SEQ ID NO: 8514 - DNA, 614 bp, Homo sapiens
gcgtccgctgcagttctggagccccatagtgcggggccgcggcagggccactaggaagagctcgaggcccgggccgcaccggctgagttgtgcgggcccgcgcggcgtcggagccgcgccgcccatcgagcccctccggcgtcgggtcggcccgccatggggtccctgttccggagcgagaccatgtgcctggcgcagctcttcctgcagtcgtgcacggcctacgagtgcctcagcgccctgggcgagaaaggcctggtccagttccgagacctcaaccagaacgtaagttctttccaaagaaaatttgttggtgaggtgaagaggtgtgaagagctagagcgaatattggtgtatttggtacaggaaattaatagagctgatattccccttcctgaaggagaggccagccctcctgcgccacccctgaaacaggttctagaaatgcaggagcagttgcagaagctcgaggttgaactgagagaagtcactaagaacaaggagaaactgaggaaaaacttgctggaactgatagagtacactcacatgctgagagtgacaaagacctttgtgaaacgcaatgttgagtttgaacccacttcagattggtaaca

SEQ ID NO: 8515 - DNA, 229 bp, Homo sapiens
gcatttgtcaccttttgaaggtaaaatatactctggcccttcttgactcagttacaggtcattttaggtccagtaataagagtcaggtgtttggttattgctttcagagtcagacattgtttaggtttatttaaaaactattagcaggttttcactgacaatgcttttttaaaaataaaaaatgtaaatccacttttttaaggcagattgttcattatgcatatacagc

SEQ ID NO: 8516 - DNA, 1157 bp, Homo sapiens
ggacggtttgctgagcccgttagtgcgcccggccgagacacgccgccgccatgtcccgctacctgcgtccccccaacacgtctctgttcgtcaggaacgtggccgacgacaccaggtctgaagacttgcggcgtgaatttggtcgttatggtcctatagttgatgtgtatgttccacttgatttctacactcgccgtccaagaggatttgcttatgttcaatttgaggatgttcgtgatgctgaagacgctttacataatttggacagaaagtggatttgtggacggcagattgaaatacagtttgcccagggggatcgaaagacaccaaatcagatgaaagccaaggaagggaggaatgtgtacagttcttcacgctatgatgattatgacagatacagacgttctagaagccgaagttatgaaaggaggagatcaagaagtcggtcttttgattacaactatagaagatcgtatagtcctagaaacagtagaccgactggaagaccacggcgtagcagaagccattccgacaatgatagaccaaactgcagctggaatacccagtacagttctgcttactacacttcaagaaagatctgaaagcggaaaaagaaccaaagaagggcagttcaagcgaccaaagggtgggtggaaggtgctgcagtatgaatactgtacgaatattttgactctggtctgaaaagataaaagaatgttatcgaaaactacatggaataattgaagtcccttcaagtttgaaagtaagcattttaggacaaataaaaggaaattcaactttgtacttgtgggaaactaatccctaaatatggaataggtttatattgattcatgggtaacaggtccataataaattattggaaactaggatgtctgaatatcaaggaagacagccatagtctcttacagtgcctctgttggtctgtctcaaactgaattgggtgggaaaaggtatggtccaatataaaagttccatttttgccattattggcaaatcttgcctttgtttattttggtgccagtgttttctgcttaatcatttgctttgttggcatctgtgtttatttacttgtacaccacatgcagtttacatctgtcttaactactccttcccaggtaaaattccaattatatttg

SEQ ID NO: 8517 - DNA, 357 bp, Homo sapiens
  misc_feature (1)...(357): n = a,t,c or g
ggaactcactggaaatagttactcaacttacctggcgctaatccagcagtagcagggcttcccatggatgggtgagagaaaacttgagagaaggcagacatatttgactgggacacgttactcagcctggaggttgatcctcctttaggaataaactcgcttgcagtaggatttggtgtctatttaaaaatcaaatatagtaagttaacacactttaagccgaaaaaagacattgaatctactaggcatattccacagtgctttatttactaagtaaaatatattattgaaaggattaacaagtgttttcggttccatattttggtgtgncataattatatttcttaaaggaaatcg

SEQ ID NO: 8518 - DNA, 762 bp, Homo sapiens
ccctatggggaaaatcttttttttttacacagtctttttttttttccggcacgaggctttttattctaacagcactggggggcccagcctacctgccagacagttcccagcattgaggctgtcctttcctggcagataggacacagttttgttgggtgaatgagcgcttcttcccttggtccaggaagacctccccctgcattgggtgatgaaattctgtctttctgaaggccgggcagtgcaacagcggcccttcctctctgggaatgcccaggctcacacagtccacttcagacacctggtctcctggtgggtccccagacagcgcacagtgcagtaccggggcaccgcagctgacacaggtgtagggggatgggaagccacagacagcacagaaggggcgctggggcccgcgatgggggtcccgcacaggcccgtcaggtagttagggccctcggccacactcaagttctgctcctccaacagggcctgaaagttttttcggaagcgaagtttaaaatgatcacctcgggttttcttctttttctttccagtgtccgcatcgtcatcaaactgaggcagtctcttgccgagctgagggagtcccgcgtgggggtcatcctggaagttgtcattctccagggcctccagctgccggttgatgcgacgctgccgggcagcccggtccagcacccgccgctgcccggggtcctgggagcgaactgggcaacatagcgagagcccgtcaccacataacaaatt

SEQ ID NO: 8519 - DNA, 2882 bp, Homo sapiens
ccgtttcctcccctcccctccactcggccgtccctccttcctcctccctcctccctcctcctcccgctcctgaagagcgcgccgcgtgggggacggcccggttacttcctccagagactgacgagtgcggtgtcgctccagctcagagctcccggagccgcccggccagcgtccggcctccctgatcgtctctggccggcgccctcgccctcgcccggcgcgcaccgagcagccgcgggcgccgagcagccaccgtcccgaccaagcgccggccctgcccgcagcggcaggatgaatgatttcggaatcaagaatatggaccaggtagcccctgtggctaacagttacagagggacactcaagcgccagccagcctttgacacctttgatgggtccctgtttgctgtttttccttctctaaatgaagagcaaacactgcaagaagtgccaacaggcttggattccatttctcatgactccgccaactgtgaattgcctttgttaaccccgtgcagcaaggctgtgatgagtcaagccttaaaagctaccttcagtggcttcaaaaaggaacagcggcgcctgggcattccaaagaacccctggctgtggagtgagcaacaggtatgccagtggcttctctgggccaccaatgagttcagtctggtgaacgtgaatctgcagaggttcggcatgaatggccagatgctgtgtaaccttggcaaggaacgctttctggagctggcacctgactttgtgggtgacattctctgggaacatctggagcaaatgatcaaagaaaaccaagaaaagacagaagatcaatatgaagaaaattcacacctcacctccgttcctcattggattaacagcaatacattaggttttggcacagagcaggcgccctatggaatgcagacacagaattaccccaaaggcggcctcctggacagcatgtgtccggcctccacacccagcgtactcagctctgagcaggagtttcagatgttccccaagtctcggctcagctccgtcagcgtcacctactgctctgtcagtcaggacttcccaggcagcaacttgaatttgctcaccaacaattctgggactcccaaagaccacgactcccctgagaacggtgcggacagcttcgagagctcagactccctcctccagtcctggaacagccagtcgtccttgctggatgtgcaacgggttccttccttcgagagcttcgaagatgactgcagccagtctctctgcctcaataagccaaccatgtctttcaaggattacatccaagagaggagtgacccagtggagcaaggcaaaccagttatacctgcagctgtgctggccgggtttcacaggaagtggacctattcagctgtggcagtttctcctggagctgctatcagacaaatcctgccagtcattcatcagctggactggagacggatgggagtttaagctcgccgaccccgatgaggtggcccgccggtggggaaagaggaaaaataagcccaagatgaactacgagaagctgagccggggcttacgctactattacgacaagaacatcatccacaagacgtcggggaagcgctacgtgtaccgcttcgtgtgcgacctccagaacttgctggggttcacgcccgaggaactgcacgccatcctgggcgtccagcccgacacggaggactgaggtccgccgggaccaccctgagccggccccaggctcgtggactgagtgggaagcccatcctgaccagctgcctccgaggacccaggaaaggcaggattgaaaatgtccaggaaagtggccaagaagcagtggccttattgcatcccaaaccacgcctcttgaccaggctgcctcccttgtggcagcaacggcacagctaattctactcacagtgcttttaagtgaaaatggtcgagacaagaggcaccgggaagcccgtcctggcgccccggccagtccgtgggaccggggatggttctggctgtttgagattctcaaaggagcgagcatgtcgtggacacacacagactatttttagattttcttttgccttttgcaaccaggaacagcaaatgcaaaaactctttgagagggtaggagggtgggaaggaaacaaccatgtcatttcagaagttagtttgtatatattattataatcttataattgttctcagaatcccttaacagttgtatttaacagaaattgtatattgtaatttaaaataattatataactgtatttgaaataagaattcagacatctgaggttttatttcatttttcaatagcacatatggaattttgcaaagatttaatctgccaagggccgactaagagaagttgtaaagtatgtattatttacatttaatagacttacagggataaggcctgtggggggtaatccctgctttttgtgctttttctgtttgtttgtttgtttgtttttggggggttttcttgccttggttgtctggcaaggactttgtacatttgggagtttttatgagaaacttaaatgttattatctgggcttatatctggcctctgctttctcctttaattgtaaagtaaaagctataaagcagtatttttcttgacaaatggcatatgttttccacttctttgcatgcgtttaagtcagtttatacacaaaatggattttattttttagtttaactgtgtttctccgacagctcacctctccctgaccagccagccatttccttcctgtgctccacgttcttctgtgtgattaaaataagaatattatttttggaaatatgcaactccttttcagagatcaggagggatttatgtagcagctatttttactgcaaaagtaattcactggaaaaaaaaa

SEQ ID NO: 8520 - DNA, 277 bp, Homo sapiens
gtttcacgcagctggtccagctctgtggctttgctgccttttcctgtggccagtcccaggaagtgctaacaccacctctctccccactcttccctctggattctggggtcccccacaccgtatttcctccactccagctgccacttttggaagggtattgagtcaggagctgagggaaggggtgaggaaggtggacatcccatcccaactgtaatgcctttttttttgggccatttgagtcatgtatggtaccaatcaataaagagacttttcggtt

SEQ ID NO: 8521 - DNA, 357 bp, Homo sapiens
ggaaagttattcagtaactctttcttaatcgttagcaaagacatctggaatccattccaactctgccactgtcttgctgtagggttcagagccagccactggagtctcttaggtcttcaacattttctgatgtggaaaaatatataatgcttgttttctttcaccttatgaaaattaatatggtgaccttcttaattcattccaggctatgcttgggcctgggagtcacacctgaatctgagtactgacttttctacttaacattttgtccttgggaaaatcactaattttaacataatatgccttcaataaatgatgctgttagttcacatttgaatttttaagaggatagtactg

SEQ ID NO: 8522 - DNA, 711 bp, Homo sapiens
gaaaggctttgttcatttctatctttgggataatattttttcacttaatatatgtatcaacctatatttatttgagtactttctcatttacatctttaatccttatggaatttattttgtgtgtggtatgagtgttgcatttgcaattaaagaatgctatactgatggcctactggtatatttcattttaataacctggttgcctagctctgaagaagatttaaaagtcctctaacttttcatgccaaagaatgaattaattttctcaaaatgtttccactttcttttcattgtgcccaaattactctattggaccatctgcttttctaagattaaaactgctttctggagattgggttggcacagcaacataaatgtacttaataatactgagtcatacacttagaaatggttaagatggtaaatcttgttatgtgtattttataatttttcctttgtcttaataattctatttttaaggaagctattctaaggaaataatctaataggaaaaaacccccagggaatggtatctcaattaaaaaaaataacaaaataacttatttgcttggaattgtgactgtaattttatatacagatgataaagaaacctaaacatccaacaacatgggatgaatagtgactaaaatagttatgaagactatatgacatggaaacataatgttaaggcttcagataaataacctagcg

SEQ ID NO: 8523 - DNA, 351 bp, Homo sapiens
accgtcctcccgggtttcttcaggtttgtgactggttatatcctctagttcctgatagatctccggttctgaaatgtactgcgggagcctacatgtttcctgatacaatgctacaagcagcaggatgctttgtgggggtcgtcctgtcctctgagttaccagaggatgatagagagctctttgaggatctgttaaggcaaatgtctgaccttcggctccaggccaactggaacagagcagaagaagaaaatgaattccaaatccctggaagaactagaccctcctctgaccaacttaaaagaagcctctggcacttgattgtgaaacagtttgggaccaaggcaattaagg

SEQ ID NO: 8524 - DNA, 318 bp, Homo sapiens
cggcacgagggttgtgagccaccacacctggcctgtctccaaattaacaaaaaaattattaacataatttatttgagtcatacaatacatagagtatttcaagtgaattaaaatactataacaatgtaagagaatgtttataaaaatggaagaaagaaatagaaaaaccacccatactactaccatcgcaatgtaaatttctttttcatattccttcacagtaatttttccaattatgtaatttgtattaacactctgggacataacgtatccataagtgggttatgttgttgtttttggggactccattttttttct

SEQ ID NO: 8525 - DNA, 351 bp, Homo sapiens
ggtaggtggcgatgaactttaataatgtgtcataaagagtcacactcatgaacacagaagggaagttaagtgatctgggatttttgaacacatttctgaatactggtctggaatcactatggaggaccgtttaacgtgatccagcagaaagactcatttggagacagagccggactcccggagcccctccaggtggaactcactccacgcagagctcagactcggtcccacactcctgatccctgatccatcacagcccacctcttgggccactcctgtgccattgggactttcatggggataactacagttaagggcttccttacaagtgttcctggtaacagttaatac

SEQ ID NO: 8526 - DNA, 217 bp, Homo sapiens
cggtaacatctgagacttgggattgactaaatttagttatcacttggaaatgaattacataagatacagtaatcagagaaaatatctttatgcagcatgtatgttaacatctagaactgtccctcatctgcagtgcagtagaggaatcagacattttaagaaatgtattcaaatatttttatcttatatgtttagcagcatttacatgttttcagat

SEQ ID NO: 8527 - DNA, 655 bp, Homo sapiens
  misc_feature (1)...(655): n = a,t,c or g
gtcaccggtgctgcgaatgtggccaaaggggccgtccagggcggcctggacactacaaagtctgtcctgactggcactaaagatgctgtgtccactgggctcacaggggctgtgaacgtggccaaagggaccgtccagaccggcgtagacaccaccaagactgtcctaaccggcaccaaggacaccgtctgcagtggggtgaccagtgctgtgaacgtggccaaaggggccgtccaggggggcctggacaccaccaagtctgtggtcataggtacaaaagacacgatgtccactgggctcacgggggcagcgaatgtggccctgtgtgagaagactttgtgtgagtgtgctggggggctggagtgcgcctgccctgccctcctggagtacgcccggacctgtgcccaggagggaatggtgctgtacggctggaccgaccacagcgcgtgcagcccagtgtgccctgctggtatggagtataggcagtgtgtgtccccttgcgccaggacctgccagagcctgcacatcaatgaaatgtgtcaggagcgatgctnggatggctgcagctgccctggagggacagctcctgggatgaaggccttctgcgttgagagcaccgagtgttcctgcgtgcatttccggaaagcgtnaccct

SEQ ID NO: 8528 - DNA, 466 bp, Homo sapiens
cttcaaccacctgacctcatggttagaggatgcccggcagcactctagttccaacatggttatcatgctcattgggaataagagtgacctagagtcccgcagatgctgaagagagaagaaggagaggcctttgctagggagcatggacttatattcatggaaacttcagccaaaacagcctgcaatgttgaagaggccttcattaacacagccaaagaaatatataggaagatccagcagggtttatttgatgtccacaatgaggcaaatggcatcaagattgggccccaacagtcaatttcaacatcagtgggacccagtgcctcccagcggaactctcgtgacatagggtccaactctggctgctgctgaacatctggcttgaacttttttggtccttcctggaatagcttcagatcaataggcttaatgaaagaggtctttcttgctttgggctgagagcagc

SEQ ID NO: 8529 - DNA, 2484 bp, Homo sapiens
ggccccgcagaggacttgcctccaccgccacctgcaagtccgcccagctggacttctgcgcaggctccaggagttgtttgctgtctctatgtcaacccagtagctggagtctgaagatggagaccaacgagtctacggagggatcgcggtcgcggtcgcgatctttagacatacagcccagctccgaaggactggggcccacttcggaaccgtttccttcttcagatgacagtcccaggtcggccctggcagctgcaacctcagcagctgcagcggctgcatcagctgctgcagctactgcagccttcaccactgccaaagcagctgcattatctacaaagaccccagcgccctgttctgagttcatggagccgtcctctgaccccagccttcttggggagccctgtgcgggacccggctttacccacaatatagcccatgggagtcttggctttgagcccgtctatgtttcctgtattgctcaggacacttgcactacaactgaccatagttctaatcctggccctgttccaggctctagctctgggcctgttcttggttccagctcaggtgctggccatggctctggctctggctctggtcctggctgtggctctgtccctggctctggctctggtcctggtcctggctctggtcctggctctggtcctggtcatggctctggctctcatcctggtcctgcctctgggcctggtccagacactggccctgactctgagctcagcccctgtattcctccagggttcagaaacctggtggcagatcgggtccctaactatacctcctggagtcagcactgcccctgggagccccagaaacaaccaccttgggaatttttgcaagtcttagaaccgggtgcccgaggactatggaaacccccagacattaaagggaagcttcaggtttgctatgaaactttgccgcggggccagtgcctcctctacaactgggaggaagagagagccaccaaccacctggatcaagtcccaagcatgcaggatggctctgagagttttttcttccgacacggacaccggggactgctgactatgcaactaaagtcacccatgccctccagcaccacccagaaagactcgtaccagccaccaggaaacgtctattggccacttcgagggaagcgtgaagccatgctggagatgctcctgcagcatcagatctgtaaagaggtgcaggcagaacaggaacccacaaggaagctcttcgaggttgagtctgtgacacaccatgactaccgaatggagctggcacaagcagggactcctgccccaacaaagcctcacgactaaccgccaggagcaacctgagaccttctggatacagagggcaccacagctgccggtgtgtgagggtgacttggtgttgggggcagagcggggcaggaaaggtagggcagagttgttttgttctggcttggggagagtgggatccatcctcatgctggcactcctccagggtgtcagtaacatcaggacattggacacaccattccggaagaactgcagcttctcaacaccagtacccttgtctctggggaaacttttgccctatgaacctgagccttacccctaccaattgggagaaatatcttcccttccctgtcccggaggaaggctgggtggtggcggggggagaatgactcctttctgaggggtgaggagggaagtggggtatggaatatggaatctatttctgtctgcactagagaggtcgggaggaagttaattctcactgtacttgaagaggctttacataaagggttctctttcatccccaagactgctaatttagtgattctgtgagtcactgtgtgcataccccataacctttccttgggattgcccctatcccacactatgacatcagaactttttttattattgttttatatttgaccaaaatattcaggtttagatacagatatttacagaaagtagggaggaaggggaccaagccagacagggacaggtatatgtacagggctgagctgcagagggctacaacctccatataaggtagctttttttgtggctcttttccattgcatatgaaaatgtccatttctggtgtgtgcagacatggtggccattgcccacccaggtaccagcagcagaagactatctgacttggaaagaatgggggtttacaggagtccaggaggtcctttccgctctcctaagagccacacctggtgaatactcagtaaacatttgcggaatgaatgaacaccctgtctgcagcaggacatggacaaataggctctgccatcaggaaatgggaagcaagaaaacggtaactcaagaggacagaggctggtgaggaggtaaagcaggcccagtgaaatggacctgacagcccaaactgtcagagaggaggaaagcaggcatttgattttggtaattgtgccaaagctatgtaagagaataaatgccattgttttaagga

SEQ ID NO: 8530 - DNA, 504 bp, Homo sapiens
tttttttttcctatcagttttgcctaacccattctcaacttttccattttctttatttttggcttccatttctttccgtttctgtttctctgctctcttcttatcattttcttccttcaacacagcaagccgttccttccacaactctgcagacatctgctgtctggtctccatgtggtcttgcactgagtatgtcatgaggatccggtggcacagtgctgtcaagatctgtagcttctcctctgacgtcagctcaaaaaattcagaggtctccagcttttctaggaactcatcttgtacctcattatcctcaaatgcagctgaatctttattgtcatctgtgtctgagccctcgctttcctcctgaacatcagatctgcgcaagcagagtccgcaccagctctgaaacagaatgcagagtcaaggggatttccgacagcttcattcccaattcaccatagtcttctgctatctcatcttgtaggagggtctgtagaggatgac

SEQ ID NO: 8531 - DNA, 329 bp, Homo sapiens
tttagagccatctgaatagatgagtagctaatttatagttggaaattagggatcaggagttgggatagtgggtagacacattttccccagtatcctcagattttagccttgttagaataaaagcctattatttatgcctaagcaccctaacacttagatttatagagactgctaggaaaagcaaagtaagtgtgagaaggttaatgagacagtacttgtcgcatcttgtgtgccttcaaaaattaccttgataatcctacctgacaaaacatcttaaggtaggcctagggggacatgaattttcacctgaaatatctgcattctcatta

SEQ ID NO: 8532 - DNA, 729 bp, Homo sapiens
  misc_feature (1)...(729): n = a,t,c or g
ctcgcctggatgtgagtttcagccagacctgtggatatctgggctttgggctgtatgatcattgagatggccactggaaatccctatcttcctagtagttctgatttggatttactccataaaattgttttgaaagtgggcaatttgtcacctcacttgcagaatatcttttccaagagccccatttttgctggggtagttcttcctcaagttcaacaccccaaaaatgcaagaaaaaaatatccaaagcttaatggattgttggcagatatagttcatgaaatagaaaaagagaaaaagcccaaggagatcaaagtcagagttattaaagtcaaaggaggaagaggagatatctcagaaccaaaaaagaaagagtatgaaggtggacttggtcaacaggatgcaaatgaaaatgttcatcctatgtctccagatacaaaacttgtaaccattgaaccaccaaaccctatcaatcccagcactaactgtaatggcttgaaagaaaatccacattgcggaggttctgtgacaatgccacccatcaatctaactaacagtaatttgatggctgcaaatctcagttcaaatctcttttcaccccagtgtggaggtttaactggaaaggaggcaaaaaaggaggacggcacttcttccacaatcttattggggacaagttatggcntaatagcngggcaagagggttccnggttcctatttcaaagccaattt

SEQ ID NO: 8533 - DNA, 186 bp, Homo sapiens
attgcactcctacgtaaatatccaagagatatcaaggaatatgtccagacaaaaccttgctcaagtatgttcactgtaacattattcccaatacccaaaggtggaaacaaccaaaatatctataaactgatgactggatcaacagacagtatgttcatgtcacagaatagttagtgctcagcaata

SEQ ID NO: 8534 - DNA, 445 bp, Homo sapiens
gtttccatgtcctataaaaaactgtcaaaaccacagtagtcacgtcagtagttttaggcttgtaataaggggtgggaaaaataatttgtcaaaatgatattctacttgttttgttcctatgctaaagttctagatcttaagagacaatattgtgttaacatcaagattactcaactcagaagctctgagttccagtgtgtatcatttcaggcaagtcatttaacctgagtgactcaatttcctcatctgaaaatggagatgacattaattacaagattaccgagaggatccaatgaaataatgtatggcaaaacacctaattcactgcccaggatactggaggcactttccagtcatggtctcatggctctactcattaccctacactacacaaaacgttctgcaccttgatacaactgtcggcagcactgcttttcaaagtgtg

SEQ ID NO: 8535 - DNA, 467 bp, Homo sapiens
  misc_feature (1)...(467): n = a,t,c or g
tttttttttaaaagaaatggatgcttttattcaacctgagttaaaaccacaatgaatcatatcanagttcatgggaatcataataaatgactagtaaaccactcacaaaatcaaagctatcaacatactaggatcacacacattaattagtgctatagttcaaaacataccctttaacttatttagcacgcaaaataatcataaaagtaatgtctataagctctaaccaaaaattttaaaaattaaaaatagcacaattctacaattctgattttaccaagaaaataaaccttttttggcacatattatcctatgaaaatggaaagctgactcaggctgctctgcttttcacagcacaaataagcattcatgctatcagacttgggaaattaactcggtgacaaaaattcactggaaaatagaatccttggaaaaatggggtcaggtgccatccactgtgaggcaat

SEQ ID NO: 8536 - DNA, 552 bp, Homo sapiens
atatgattagggtgtttttctgagtgtctgtcaaattatgctggctaatttcaatgagaaaagattttagagtcacagtgaacccatccataaaaggactaaaagctctctctggtccctgagatccacaacccctgagagaagccagaactacaaatgcatcgtctagactttgaagaagcagggtatgattcttaatatagctcacccatcgctaagtcaagcctagactctaatatttttctataacaggagaagcctccctgactggagactagagtctcacatcttctgccaccacatgaatagactaaaaagaaaggagagtcccacatcaggccaagtggtgacctgtggctatttcagctcagaatgtcagcctctgaagcatcaggtttgaatgactttggtgtcatgggattctgtccattgtccgtttgagtctgctgacatgcttcctctggaaagtgcagtttggcatggatgagtcagtggttttttattttggggtgttttttaaaaaataaaaatgaattgctttgagaaaaaaaa

SEQ ID NO: 8537 - DNA, 274 bp, Homo sapiens
tttttttcatgtttgcagatgacacaactttattcctagaataaagttattccaatcaaagcaaaagctacaagaaacaattagaaaaaagaataggtggctgaattcaaaattaattttttaaattaatgagttttcaactagaagtcccctagcagagcaggtattttcatagacaaattaaagattaaataagatatcatggcataagtgaaaatatttagcaaataaattatacttcatccaattttgtaaaaaatacatacatatacat

SEQ ID NO: 8538 - DNA, 141 bp, Homo sapiens
cacaccagctcctacccaaggataaggcaaggtcagtctgttgtcacaaataccaccggagtcactgccatgaactggacctcaagggcccctatgaaaataaacacacactacctagagagaggtgatgttggaagggct

SEQ ID NO: 8539 - DNA, 594 bp, Homo sapiens
ttttttttttttttttaaacaaaaaaattttttttaattttttctttgggtttgtacaagaaatttacagtgtgaaaaatatacaagtgaaaacgaggccataaacctgggtgaagggagaggctgcttggtcacaaacacaaataaacaagacatttctgagttcttcctttggtctgacttcagccccctcactccaggagagaggctgcagagctcaaacctgggaaccgagcccaggcccggccctgtcccccaatgtgggcaggcacatccggagcagctggtgccatctggctttctctggctttggggtcggggggaatgtgaagaggagggagccccttcttcttccctgctcccctggctggagtgggctggaagcgcctgtgaacagggttggcagtggcactggcagcggtggggaatgaagtgggtagtaacaagagcctctgggtaacagtgaacacggggacctttgagcggtctgatcttgctcctccaagtcatagggccaccctgagttcttggcagaagcccagaggcctggaatcctagagacaagtggctttggggccctcagtctttggggcc

SEQ ID NO: 8540 - DNA, 622 bp, Homo sapiens
tttcgaagtgaaagtcagccctttagctattatttattgctttattagagcagagggaagtgacactcattgccttcacagagctctgcagaaatatatgcacagagtggtcaatgaccaacatctgagtaagtcttccaaattatcacattaaaataacctttcaaatttgagtgcctctcctttgcaaacaactgcaacctcataatgaataattttatatattatcaaaaagaaccagaagcccaggtgcttttttccccaaaatccacttactaaggacttgagtgaaaatccactctaagcagatcactgttactatttccctttcaaaacagttggaaatcctaaggtacgggtactaagaagatagcaatatccttcttaagctggtaagaatctagccccacagggacaatttggcaatcctgtttctggaagccaggactccagagatttgtcttagtgatggacagatactcctctaaccttaaggcatgagggctgtcaaaacaaggctctgaatagtgccttcctgctcatcaatgtcatcacaatgaaggagagaacaggttttcgtattcctgaagagtggtcagtaggagtgcagtggtttgcatag

SEQ ID NO: 8541 - DNA, 454 bp, Homo sapiens
gaggcatttcctggtatactaggcagtgcattagaaaagagattatattgcatttaggctacaataattatcttttaaccatctatgcataattaacaaccattcaaaaagaaagtgcaaaagtgcaaaagagagagaacaaaacagtttctacacatgtaatgcatattataggatataaatctagacaactaaaaacaatcgccaacaatatccttctgagcattaaatgacaccaccaattttgttttatatgtattctttcttctcaagtattcaaagaatgcaatagacattatcttgttaatttgcaaatttttcaggagattaggatattattttttcaccaaaccagaaaacaagatactaccattaccctttggtataatttttccaataatagagcccaaaataacaaccaattctagctaatctcacctggggatcctaggta

SEQ ID NO: 8542 - DNA, 330 bp, Homo sapiens
ctggtgttatgatccacataataaactcttctacgatcatcaactcttctttcccaacctggaggtaaaggttgtggtctctcccatgtggtagttcgagtattatgatccacataataggttctaccatgaggatcttttctttgttcccaccctgatggcaaggtttctgtgttggcattcccagactgctgccgtacaggatccatacacccatctggctgtcttgatttggctgcttcaaaagcagaactacttctagaattagaggtgtcaggctctaatatacttctagcttcagattccaattctgcactggtagaaggaata

SEQ ID NO: 8543 - DNA, 443 bp, Homo sapiens
tgtgtgcgcacctagtgtgtggacaaggaggtgggggcagctgagttagagtcccaactcttggactccatttgctattctcttctttctcccccacacctatctggtggtggtagtgggcgtttatatttgcgttccttttcattcatttctaaatctcttaaaaattttgggttgggggtattggggaaggcaggaaagggaaaaggagagtagtagctgaagagcaagaggaggacatggagatgaagaagaagattaacctggagttaaggaacagatccccggaggaggtgacagagttagtccttgataattgcctgtgtgtcaatggggaaattgaaggcctgaatgatactttcaaagaactagaatttctgagtatggctaatgtggaactaagttcgctggcccggcttcccagcttaaataaacttcgaaaa

SEQ ID NO: 8544 - DNA, 1896 bp, Homo sapiens
tagccggtctttgggggtaggcggtagtggcggaagaggttcggcggctgatggcggatcaggatcggaagcctgcgtaactttctcccttgatccgggagtctttccactggattcacaatgacatcctttcaagaagtcccattgcagacttccaactttgcccatgtcatctttcaaaatgtggccaagagttaccttcctaatgcacacctggaatgtcattacaccttaactccatatattcatccacatccaaaagattgggttggtatattcaaggttggatggagtactgctcgtgattattacacgtttttatggtcccctatgcctgaacattatgtggaaggatcaacagtcaattgtgtactagcattccaaggatattaccttccaaatgatgatggagaattttatcagttctgttacgttacccataagggtgaaattcgtggagcaagtacacctttccagtttcgagcttcttctccagttgaagagctgcttactatggaagatgaaggaaattctgacatgttagtggtgaccacaaaagcaggccttcttgagttgaaaattgagaaaaccatgaaagaaaaagaagaactgttaaagttaattgccgttctggaaaaaagaaacagcacaacttcgagaaccagttgggagaatggaaagaggaacttaaccatgagaaagaaagatgtgaccaactgcaagcagaacaaaagggtcttactgaagtaacacaaagcttaaaaatggaaaatgaagagtttaagaagaggttcagtgatgctacatccaaagcccatcagcttgaggaagatattgtgtcagtaacacataaagcaattgaaaaagaaaccgaattagacagtttaaaggacaaactcaagaaggcacaacatgaaagagaacaacttgaatgtcagttgaagacagagaaggatgaaaaggaactttataaggtacatttgaagaatacagaaatagaaaataccaagcttatgtcagaggtccagactttaaaaaatttagatgggaacaaagaaagcgtgattactcatttcaaagaagagattggcaggctgcagttatgtttggctgaaaaggaaaatctgcaaagaactttcctgcttacaacctcaagtaaagaagatacttgttttttaaaggagcaacttcgtaaagcagaggaacaggttcaggcaactcggcaagaagttgtctttctggctaaagaactcagtgatgctgtcaacgtacgagacagaacgatggcagacctgcatactgcacgcttggaaaacgagaaagtgaaaaagcagttagctgatgcagtggcagaacttaaactaaatgctatgaaaaaagatcaggacaagactgatacactggaacacgaactaagaagagaagttgaagatctgaaactccgtcttcagatggctgcagaccattataaagaaaaatttaaggaatgccaaaggctccaaaaacaaataaacaaactttcagatcaatcagctaataataataatgtcttcacaaagaaaacggggaatcagcagaaagtgaatgatgcttcagtaaacacagacccagccacttctgcctctactgtagatgtaaagccatcaccttctgcagcagaggcagattttgacatagtaacaaaggggcaagtctgtgaaatgaccaaagaaattgctgacaaaacagaaaagtataataaatgtaaacaactcttgcaggatgagaaagcaaaatgcaataaatatgctgatgaacttgcaaaaatggagctgaaatggaaagaacaagtgaaaattgctgaaaatgtaaaacttgaactagctgaagtacaggacaattataaagaagatgaga

SEQ ID NO: 8545 - DNA, 447 bp, Homo sapiens
ttgtgcaaagcagctttatttgtaatgatgaacgactagaaataactcgtgtccatcaacagatgaactgtggtatatccatacaccactactcagcaacacaaaggaatgaaccattcatacatgtgacaacacagatgaatgtcaaagtaattgatctgagtgaaagaagccagcccgtccaaccaataaaagagcacatactgtaggattccatttatataacattttagaaaatgcaaacttatagtgacagagagatcaatggctgcctgggatggtgtgagggagggtcaggaggaaacaggacacttcggcgggtggtggatatgttatcatgattgtggtggtgaaacgtggcaatatttatcatattgtacactttatgtacagtttgttcaaaatcaagtacacttttttgaaatggagtgttgctctcgtcaccca

SEQ ID NO: 8546 - DNA, 201 bp, Homo sapiens
cagctgcagcctggcacccacccctcccatctccaccccacatggaagacttgtcttcaacttggccactgtctttgcagagctgggcacatgtgcccagggggcagaaaaaatggcttctcagttgttaaaagtataccctggaccacccatctgaccatctccttaaggtttcacccaaagcccccagtgtcagagact

SEQ ID NO: 8547 - DNA, 316 bp, Homo sapiens
  misc_feature (1)...(316): n = a,t,c or g
cttggtcaattatcagttacacaggcagacctgtagtggccaggctgggcgtggtgccttacgnnnnnnnnnnnnnnnnnnnnnnnnnnnnnnnnnnnnnnnnnnnnnnnnnnnnnnnnnnnnnnnnnnnnnnnnnnnnnnnnnnnnnnnnnnnnnnnnnnnnnnnnnnnnnnnnnnnnnnnnnnnnnnnnnnnnnnnnnnnnnnnnnnnnnnnnnnnnnnnnnnnnnnnnnnnnnnnnnnnnnnnnnnnnnnnnnnnnnnnnnnnnnagatcacactgttgtactccagcctgagcaacagagcgagactgtctt

SEQ ID NO: 8548 - DNA, 199 bp, Homo sapiens
ggcgtgtgagatctgggtaagaatgaggaccattctccaattccgagccaaggcgtggctcgagaggctgtagggggcaaagcgcttctcaggccctgcgggtaatcccggacttgagagccgggtgcggggacccggcccagccgccagcagccccagccaggaggtcgacgcggccgcgaattccagatctatgaat

SEQ ID NO: 8549 - DNA, 391 bp, Homo sapiens
attgataatcttttgttatatttgatgcaaatatttttttccagtttataggttgccttttaattttgtgtttcaggtagataaaagttaaacgattttcttaggttagtttatcactgtggtttctgaacttgttatgtgtagatcttttccaccccaagagtacataaatattaatccatactttcttatggaacttgtatggtttcgttttttacatttaaaccttcttccccgtggtgtgtgttgtggaatctgtgtttgtgtgaggaggggcatggtgctctcagaacccacctcctgtggccagagagccctgtcctgtgagggtggtatcacagtggcagggttcaattcagaagaccttgagggcaggctgatgtttcctgaa

SEQ ID NO: 8550 - DNA, 388 bp, Homo sapiens
gtgtcttttaattactatggtgtagtcactggcccttctgcttcaaaaatatgcaatgacttgaggtcatccagggcacgactccttgaactgttcactgatttgagctgtaatccagaaatgatgaagaatgcagcagattcatatttctcacttttacaaggtttcataaattctttggatgaatctacccaagaaagcaagttacgatatattcaaaatttcaagtggactgatacattgcaaggacaggttccaaggtaagcaacactaaagtaatactaaattggagccagtttttgtaactatgtagccagtggttaactcatagcctttgtatttggagaagaaaaatgtcgacgcggccgcgaattccagatctatgaat

SEQ ID NO: 8551 - DNA, 406 bp, Homo sapiens
tgtagaaaccaaatgctttattcaaccaattttgaatgtgcacaaatatggggtatatttttcacgagcctttctgaataaactagaagacaagctccagccaaccaagagatggggaaatttttggtaaaaggaccagagataaacaattattaataacatacttaactggagatataagccagtaacaaagctgcggatatgagttgtaaagtgttatatgttctgacagtgtagaaacaatataaccaacaaaaactgggaaaggaatgaggaggaaaagggagaaaagtagaacaagcttgttgactgtctcagtagctggcagtcaaagataatacttacagctgacatatcaagtagtagatgtatattcaatagaacaaaggtaaacattaaaaaaagc

SEQ ID NO: 8552 - DNA, 2795 bp, Homo sapiens
cagggcagactggtagcaaagcccccacgcccagccaggagcaccgccgcggactccagcacaccgagggacatgctgggcctgcgccccccactgctcgccctggtggggctgctctccctcgggtgcgtcctctctcaggagtgcacgaagttcaaggtcagcagctgccgggaatgcatcgagtcggggcccggctgcacctggtgccagaagctgaacttcacagggccgggggatcctgactccattcgctgcgacacccggccacagctgctcatgaggggctgtgcggctgacgacatcatggaccccacaagcctcgctgaaacccaggaagaccacaatgggggccagaagcagctgtccccacaaaaagtgacgctttacctgcgaccaggccaggcagcagcgttcaacgtgaccttccggcgggccaagggctaccccatcgacctgtactatctgatggacctctcctactccatgcttgatgacctcaggaatgtcaagaagctaggtggcgacctgctccgggccctcaacgagatcaccgagtccggccgcattggcttcgggtccttcgtggacaagaccgtgctgccgttcgtgaacacgcaccctgataagctgcgaaacccatgccccaacaaggagaaagagtgccagcccccgtttgccttcaggcacgtgctgaagctgaccaacaactccaaccagtttcagaccgaggtcgggaagcagctgatttccggaaacctggatgcacccgagggtgggctggacgccatgatgcaggtcgccgcctgcccggaggaaatcggctggcgcaacgtcacgcggctgctggtgtttgccactgatgacggcttccatttcgcgggcgacggaaagctgggcgccatcctgacccccaacgacggccgctgtcacctggaggacaacttgtacaagaggagcaacgaattcgactacccatcggtgggccagctggcgcacaagctggctgaaaacaacatccagcccatcttcgcggtgaccagtaggatggtgaagacctacgagaaactcaccgagatcatccccaagtcagccgtgggggagctgtctgaggactccagcaatgtggtccatctcattaagaatgcttacaataaactctcctccagggtcttcctggatcacaacgccctccccgacaccctgaaagtcacctacgactccttctgcagcaatggagtgacgcacaggaaccagcccagaggtgactgtgatggcgtgcagatcaatgtcccgatcaccttccaggtgaaggtcacggccacagagtgcatccaggagcagtcgtttgtcatccgggcgctgggcttcacggacatagtgaccgtgcaggttcttccccagtgtgagtgccggtgccgggaccagagcagagaccgcagcctctgccatggcaagggcttcttggagtgcggcatctgcaggtgtgacactggctacattgggaaaaactgtgagtgccagacacagggccggagcagccaggagctggaaggaagctgccggaaggacaacaactccatcatctgctcagggctgggggactgtgtctgcgggcagtgcctgtgccacaccagcgacgtccccggcaagctgatatacgggcagtactgcgagtgtgacaccatcaactgtgagcgctacaacggccaggtctgcggcggcccggggagggggctctgcttctgcgggaagtgccgctgccacccgggctttgagggctcagcgtgccagtgcgagaggaccactgagggctgcctgaacccgcggcgtgttgagtgtagtggtcgtggccggtgccgctgcaacgtatgcgagtgccattcaggctaccagctgcctctgtgccaggagtgccccggctgcccctcaccctgtggcaagtacatctcctgcgccgagtgcctgaagttcgaaaagggcccctttgggaagaactgcagcgcggcgtgtccgggcctgcagctgtcgaacaaccccgtgaagggcaggacctgcaaggagagggactcagagggctgctgggtggcctacacgctggagcagcaggacgggatggaccgctacctcatctatgtggatgagagccgagagtgtgtggcaggccccaacatcgccgccatcgtcgggggcaccgtggcaggcatcgtgctgatcggcattctcctgctggtcatctggaaggctctgatccacctgagcgacctccgggagtacaggcgctttgagaaggagaagctcaagtcccagtggaacaatgataatccccttttcaagagcgccaccacgacggtcatgaaccccaagtttgctgagagttaggagcacttggtgaagacaaggccgtcaggacccaccatgtctgccccatcacgcggccgagacatggcttgccacagctcttgaggatgtcaccaattaaccagaaatccagttattttccgccctcaaaatgacagccatggccggccgggtgcttctgggggctcgtcggggggacagctccactctgactggcacagtctttgcatggagacttgaggagggagggcttgaggttggtgaggttaggtgcgtgtttcctgtgcaagtcaggacatcagtctgattaaaggtggtgccaatttatttacatttaaacttgtcagggtataaaatgacatcccattaattatattgttaatcaatcacgtgtatagaaaaaaaataaaacttcaatacaggctgtccatgga

SEQ ID NO: 8553 - DNA, 355 bp, Homo sapiens
tttttcaattcctaaccttttttaaagtttcctggtctccactggacacagagctttggagacggaggatcccagagggcagtctcagttgcaatcagtgtgtgcccagcctgggcagacaggaaattcctcggatacattattttttctttctttcatagctgtgtctcagaaaggacccatttgtggctctttttcacctcaaaataagatcgatggtatcttgtaaaaggagggtagtgccacttcttagtatttttgaaagctgttttagattttttttttttttccttttctagccatctaaattgactcttccaatataggtctcaggaaatccaatagttgggagtac

SEQ ID NO: 8554 - DNA, 853 bp, Homo sapiens
  misc_feature (1)...(853): n = a,t,c or g
gtttttcatttatggctcatatatactttatgcacatagcctgaaggtaattttatgatatttgaaatcattttctatataaaacagtttgtgtacattgaaccataagaaagcaaatgtgtttgttaggtgtggaattttccactcatggtgtcatagcgttcaggaaggtttggattttggggcatttgggggttttaactgttcagattagggatgctcaacctgtatctgaatgggaaataaagactatattggaacgagcgccttctatttcttcttcaagtggctgaaggtatcatcctaagtctaacatattctcctgggatattgctttaaatatagaaacgcttggggcaaaaggggaatttccctccataattcaactgttaagattctttctttgaacagtaagagactgagttcttgcacttgggtgaagaggccagactgagaggctctaatcctagcaacatcatgccctggtctctgatttcatattcatacagagggatgcagtaaaaaatccctttctctccattcttaaaatcagtggctttcacaatacatcaggtatttggcttaatctctgcatttcagatagaataccagtcatcttagaggctgaaatagggatcaccatgtcctactgaatgctctcaaaagacacctgcagcgtgctgagatccagcagaatctcatcaccattcaagcagactgagacccactcgcctcatatagaagatccctgacctcccggaaggttgaatggtggggcgcctgtgacagtaggagtgggctgctatgcccgtgtgtctacctgtgctctgataagaggcagggacaggngcaa

SEQ ID NO: 8555 - DNA, 179 bp, Homo sapiens
gaagcggacgccagttccagactccctaggcctagaaatggagcacaggttcattgatcaagtattgtccacctgtcggaacgtggagcaagccaggtttgccagtgcatacaggaaatggctggttactttgagtcaatgaaagaggtgaattagtcctacaaggttccccttttagt

SEQ ID NO: 8556 - DNA, 337 bp, Homo sapiens
aaagtgcttctccagatgatgaataagaacgttttttattccaatgagtacctctttacttcacttgtaaaggtgtctgggatagtgtttgcttggtaaactaatataaacttgtaaacataggctttgacatcatacacattttcaaatccttgtctagtttcttaataactaaattgcaaggcaaattcttttctgagctttggctttcctacatgtcaaatagaaatcacaccaggtatctttgtcatgatagaattgttagcatatcacatcatatgacacttaataaatattatttcctttctaattcttacctcctcttttgattataatg

SEQ ID NO: 8557 - DNA, 1123 bp, Homo sapiens
tactctgggtgctgttcctataatcagatgttcaagaggaacagcagcagaaatggtagcagtgaaactagacaagaaacttcgagaaaatctaagagatgcaagaaacagtctttttacaggtgatacacttggagctggccaattcagcttccagaggcccttattagtccttgttgacagaaacatagatttggcaactcctttacatcatacttggacatatcaagcattggtgcacgatgtactggatttccatttaaacagggttaatttggaagaatcttcaggagtggaaaactctccagctggtgctagaccaaagagaaaaaacaagaagtcttatgatttaactccggttgataaattttggcaaaaacataaaggaagtccattcccagaagttgcagaatcagttcagcaagaactagaatcttacagagcacaggaagatgaggtcaaacgacttaaaagcattatgggactagaaggggaagatgaaggagccataagtatgctttctgacaataccgctaagctaacatcagctgttagttctttgccagaactccttgagaaaaaaagacttattgatctccatacaaatgttgccactgctgttttagaacatataaaggcaagaaaattggatgtatattttgaatatgaagaaaaaataatgagcaaaactactctggataaatctcttctagatataatatcagaccctgatgcaggaactccagaagataacatgaggttgtttcttatctattatataagcacacagcaagcaccttctgaggctgatttggagcaatataaaaaagctttaactgatgcaggatgaaccttaatcctttacaatatatcaaacagtggaaggcttttaccaagatggcctcagctccggccagctatggcagcactaccactaaaccaatgggtcttttatcacgagtcatgaatacaggatcacagtttgtgatggaaggagtgaagaacctggttttgaaacagcaaaatctacctgttactcgtattttggacaatcttatggagatgaagtcaaacccgaaactgatgctatagatattttgatccaaaatgtgcggggcaatga

SEQ ID NO: 8558 - DNA, 2048 bp, Homo sapiens
aaattcatactatatattaagatcttaaataatctcaaatctattacttatgccactcaatatcttaatattaaactcataaacctatgcagcagaatgttttcaggtacagaatactgggttacatagggcagcgacagatacattttgtatatgaattgctaaaataaaacagatcaaggaattgaactgtcagactctgcatatttgctgcatttaaaaaccaaaagaatattaattattactgtaaattttagaaatgtttattttagaaacacacaaagctaaaatgcatatttcagtccaacaacctagagagaagaaatagggagctacatgtttttgtttagtcttgttttttcctcaaaatccatccctaagagtcaggagctacaagtttataggtacgcatttgtatgaatatgcttgccatgattctaagacctagaacatctagaatacaggacattacatttttatttgaaaaaatatttaaattaattttacatgtacaatataatatcactttcagaacaaaaaaacattaatgaaagtagaatatactaaaacaaaattatttttacttttgagtcaaattctacaccctggaaaaagtcagaagcccatactagagttttgtagaagtttttttaaaaatgcttttaaaatttagcaaggctgcaaagtctgtcaataaataaatcaaattactatctgtcagtaagctatgaagtccacagtaagtaccaatgcaaactgaacagatttagaaagtcaatccatactttctagcatcatcatgaaaactccatgactgaccgacacatcatttccaatgttatcatcaaggcctcagtgtgtaccccaggacacactttcaaattctcaggcagttccttaagaatgtgtgggagtttctgcaatgtctttatatttccagcataaagatccagtaaccagtcagtatgaacactggtggtttctttatgacttttacaagccataagcagttcatttagatgagttaaccctttggaagctaaaatgaactctgaagataaatcaaaaattgaacaaaaatttagcaacatcctactaagtaaaaaggagccaaattcaagttgctggtaatgaaaatgtttctctgcttgtgcatgaaagttctccactgtatcttctatttttgtaatagcaaacagttcttctttgatttgaggtgaaaccacataatccaagggcaattctcccttagcattcctctgttgtaaaagcactgggcccccatgctgtagtagcagcttgccaatttctacatgtccgtttgacagtgcatcatgcaaaggagtcaccccgtccacttgagtgagcagatctacctctggacaacgttgcaaaatttcctggacacacactgtgttgccatagttacaggcttcatgcaaaggcgtccagccagcattgtctttaacattgatgtctattcctggcaaagagagaagaagaatcaatttctccacttggttatttatgcaagctctatgcagggctgtttctccttttagattagtcttgtgaaaattcatctttttaactacagaggggcaattctccttggaacatgacaattctccttctgacttctttttcaatttttttaatgatgaggaacatttagcaaggttcaggtctagtaactctggcagccccttcgacttgtttttgtttagtaccattcagcattagtaaggttctctgagagtcaaaacaaggccgctgtcctattttctttgacacctgaatctttccagacccaagcacaccagttttccccaaggctggtaaataggaatataccattttctgaagagagagtggctcagaagaaacactgccagagctctgtagacacaactttttaaagactgcctctgcaacaaacatttgaagccaggaggaggaaaaggagcaaatgaaaatctctaattcctgtgaagaaaagtcatcacacgaaagagaaacataacttcctaagtcatcagacatgtgtc

SEQ ID NO: 8559 - DNA, 251 bp, Homo sapiens
agctgccgtgcctggtctgggaatggtcaaatgggcaacttcactccatcgtgcctgtgtcgaaaactccactgtcctggatgagagaaacggactcatggagcagtgaggaattcagtgggcctggctccagcaggacggtggctgtgggattcacctggctctgcagagcgctcctctgtttattttttataatctgcttttctgcaattctgggtcagagagagtgcagggttcacaaggaggtgggg

SEQ ID NO: 8560 - DNA, 161 bp, Homo sapiens
ttttttggattgagaaagcttacccaatacctgtaccatcattgtaccttgaaagaaaagaaatcccttttgaattcagggactcataggcagaagagaatgtagccttgtctcagatgagactttgaagtttttacatttggaatgagttaagacttttg

SEQ ID NO: 8561 - DNA, 253 bp, Homo sapiens
ttaaacaatagggagaaaagtacaatttaaaatttctagctaggtctttccataaattgtaacttgacaaaataatctatggcaacagaaatcaaaatagtggttattgaagacataggttactgaccagcaatgggcatgaggattaggtgggctgggaataagtggtggtgtatatacacatgtaatatacaaatgtatagacatgtataaacattcaaagaattgcacatttctgttttgtgtatttttt

SEQ ID NO: 8562 - DNA, 538 bp, Homo sapiens
tttttttttccaggttgtcatttttcattgtgcatatttcctgtctgagtatagcaatatctgtcttcaaaatgcaattttcatccatcagatctttcacttcttcatgattatgaaaatcctgatttggagtatttcttgcagtctttggtttcatctctagtgattgaacagttggttcaagttgttttgcttcaacttctttcttatattgtttctctttcctttctaattcttctcgattttttttgtgcagcatattaacatttgttttttcttcattttcttgttttaaggtgcatctatcatgctcttccttcagtttcttgggaaattgctgaggatatgttttcccaatctttctttgttgggttaatctgtcagcagcagcagaaaatgtactatgacatatattttctgatagttgtattttttcacttttgtatgtattatttccttctatgacctgtggttgcttcttttcacttctttcactgtgtttacttatatagcagcagccagtctagactgataagat

SEQ ID NO: 8563 - DNA, 1287 bp, Homo sapiens
taaatttatacaaaaataaaattacctccaaaacattgctacctttcctaaacattcagtcttgccacagtttaataaaaggaaagaacattaaaaaggataagacactgtaatgattagatgctttttataagcctaaaggcattgtgattatttagacagaagagaagaaagtgaagtgaaaacctgatagttatgtagtctcatggtttgctgttgagaggctgaacaccagctgctttccttttctaggaagataataaagtgggctttggctacaacataaagatgttgggttagacagtttcactacagtaagaacaacgggatgagttgcccaggaaattgtgaaatactttctaatgatctttaaagatataatgaacactaattcatctggatttgtttaggtgtggtcctggttaaaggcaaagggaaggatcagataacttcatgttttttccatttaacatacccaatagattcttgattaggggaagggaaaatgagcaagatacagtccagtattctaaaaacaatcagccttaggggatcatttcaaaagcatctgttttggacttaagtctttgatacttaaccaaattgactacacagtgaaaaattctagtgcctgggttttatagggtagaagaaagacatgcagtcaagtggccaatacttcatgtgaagataagcaatgagatccttcttgctgtctttcttttgactgttctgggcaatatcaaattagtttcagtggcttgattctaggccaagattctggcaacagattgtagtcttaccttgttttcttcaatctcactggatctctctctctttttaccccccttaggctgagggtaaaaagctgggattggtaggctgggtccagaacactgaccggggcacagtgcaaggacaattgcaaggtcccatctcccaaggtgcgtcatatgcaggaatggcttgaaacaagaggaagtcctaaatcacacatcgacaaagcaaacttcaacaatgaaaaagtcatcttgaagttggattactcagacttccaaattgtaaaataatggcctgaatttaagttttctaagataaactcagtggtttggtttttattattaatagagatagaactattgtgtgttaatattagcattagtcaataagttattttaatgtcagatttttgaatgttattatatattacctgtatgatggaaggattaccactgtacacaaatctaatcaataaaaacgttagaaccttctgcttagagtactttt

SEQ ID NO: 8564 - DNA, 1375 bp, Homo sapiens
  misc_feature (1)...(1375): n = a,t,c or g
ttttttttcattttgtttcacatgagtgaaaaaattaacagctgccctcatttctgaaaacaaaaaactataaacaatcactgttgctcccaatgggaccgttggacataagccctgaggctttggggtcaacgggctagactctagaagcccaggaccccgccaaggtcaagtctgcatacttggggcagggcgagctgttgaaccatcgcatttctctgctgcttctttacatgggaaccaacacaagaacaacacaatccctaaattggctgctgcgggatcctacaagtaagtgaaaaagcgagaggacacagccaaggagtgcttgcctacccagcccccttcttctaagccataatcccaaggggtgagtatgatccagcagtacttgaaaagaagcccggcctctgagcagtcactcattcctggtaaagcccctcgaagtctgcagacttcatggctggcagaaagtcacaactggtgttttgctgtgtcagtggcctgggagaaaaccagcagctgatgaggctggagaccactacataagatgctatcatcatccccgacatggcgagtgatacgaagcccaaaccacagaggatgcagagcagtgagaagccacccacagagatgaccaatccttccaatattatgacccccagcagagcagccagggtggtaagcaccacgatgagcaggaagaatccaacaggaacggccgacatgacaatgaacaccagcaaggtgaaggccagaaacggatggctgtccaagtactgacccactggagacttcataaaggccaccacctttgagttattctggaaggagtctatcagcagagacagcttcttctgcagttcctgcaagtcccttgagatactctggggctcctcttttgccattctgaagctcacttcaatctctttagggatgaattatcctaccagtaaattctccagtgcagcccgcggtccaatctctcatgtcgctctgtctcttgctgctcctgaccgccgagcagccccccaccgcgtttgcaggcgaaagcgaagagaggcaggaggaggaacaagaggaagaaggaaagagcgtcccgagagggagccagagccgcctgcctccgccccctggcccgggcaccgcccctcggctcttctcctctgggctcgccccgcccgtggccggaaggatccggcaaaggcggccaaggcccgnccccaaggctttgcaaagcgcgcttgctcccactggctttcggagccactagaacaagccctgagaggttgacagctgaggaaactgaggctcagagagtgtcccttcccacacgactggcttggagtgagaaagctcagaccaccttcaagac

SEQ ID NO: 8565 - DNA, 2000 bp, Homo sapiens
tttttttttttttttggctgagatttaacattgtacattttattaaatactggactttattacaacaaattaatttacttccgatagaagtttcattttaaaaaatgtggttgtgttcaaattcttaattgacacttgttttggggtaaacatcctatttttactggtggtatcatcaatcattatgagcagaaagattaattttgtataacagaacaaaggaatttctcaagtggtacaatactcaatatatataaagggaatatactcccaaagagtgggcatgaccacagcagagtatatgatcagagaacatattgcttttatggtatatatatatatatatatatctctacatataacatcaagtcatgcacattaagtctttactacctactgaaggcttctaccttacacatgaaaattgttcatgtcccagggtttggcatccagccaaaatttaaacaatgatgaagaatggctgtcaaactggcttttcagaccacccctgaaaagctgtcagctgtaatatccatcctggaatcgtggcggaaagttcctgggagttgccttttcctgtgttttgatcaagtctataatagctgacagtactgcacagtctctggatttagtgtcattccagtctacaggatgaggactttcaatcttctcttgcagaagaatatctagttcctttcttaattccttaacaagatgggcaattcttgctggagactgaaatacaatccactcatctacagcaatagtttcctgatcgttatccttctggatggaaatgtcacctccaaaaaacaagagacagtatggggaaacctctgtgcagtcatacaagtatatactgcttgttctcatctttaggtgatagataagccagttgtagtgaaagtctgtttgctccacattaacagatttaggatgaacagcaaccaggccatcggtttttgtgtaaacttttaccatttttctttttttacccaaatttagtcgaattttagcaactttgggatataaaccagcacagatgacagctttaattatcttctcattatctgaatttatattagattctggatctttaggatttctactgcttacaaatccagctccaagaagatgctcagcaaactgtcctttcatgttatgcagcatctgcagtgtgtttgaagacagaaaatattcccagcaatagtccttttcgtatctgaaaccacgtcgcctagcctcttcccagccctcaaacgcattcacaactgttaagtgatcacttctagtatcctttgccaattcctttcttcttgcatctgcaatcttttcttttcccagtggaatgacaaatggatctttgaaactgagactagcagcaatagtgagtactgggtctaagcagcagaacagtgctccaaaaagaatcatttttccaatatgtggctcaacgggtaatcgtgccaagtggactccaagaggtgtcaattcttcttgtttatccaaagcgttcaagctccatcaggtgccttatggagagtaacactgcctcatttgatggtgggtccattaatctactcagaaaataagcaattccacctagccttaaaacctttatttgtaaacaaagttcttccaaaggagttctcaaaatttctggcagttgatagtcatctagaagacttgctctaagaccattatacagatgatagcaatgaccaggttgaactcttccagctcgaccttttctctgtttggcattagctttactaacccactcagcggacattgtactgatattgttctgagtatcaaaatgcgtctcttttatttttcctccatctatcacataaacgacatcatctatggtaatgctagtctccgcaatgttggtagcaattactattttccgaacaccaggaggggttcttttaaacacctgtgtctggttaactgtaggcatcagtgaatgtaaaggtataattaaaaatttatct

SEQ ID NO: 8566 - DNA, 525 bp, Homo sapiens
aacaacaaacagccattgttttgagtccaagtgcttcaaaagggctcctgcttaaggactgtgctgtggtagacatggcggttccttctagcccacatgtggcctagaactctgtcagctctgtcaggcactagtccccggggagatggcccagcgtccatggggtgcgctccagctgctcggttcccaggaacgttgttatttttggccctggtgttattaagattgtgcccagattccctgcaaatcggccactaagcagcatggggccctagtgaaagcacgcggagaacagagggggcagcgcgcttcgggagactccccggccttggagagctccagcctccccggggggcggaggggccggccagaaggactcctgcgccccacacccgcagcgccgacaaggcgtgcgcctggtctacagcgctccccgactgctcccaacccaggggcacccagggccgaagcttcctctacagagcctccccctccttaggaaacaaaacaaaacaaaacaaaaac

SEQ ID NO: 8567 - DNA, 400 bp, Homo sapiens
catttgaacagggaaagtttaatgttaagaattattaactactaagtgttataacaaaaagtgaaactcaaaagaatacagcaataacagatatagagtgtctctagggctgaggcagaacatcaaaggtaagaacaaatttgcaggagggtgccacaacttcccctttcctgccaggtcttagatccaggccttgttggagagggcacagccacagcccactggatggagatgccactgcagtgctgagctgggcagaactcactgaggagccacactctggggtgctagaagctccccatggggagctgacctggtacagaacttgctgggaagctacccatagggataggggcctttggaactcattgggatgtgcactgctgggtgtcccatgtgc

SEQ ID NO: 8568 - DNA, 726 bp, Homo sapiens
ggcacgagaggcagcaactcaccctcactcagaggtcttctggttctggaaacaactctagctcagccttctccaccatgagcctcagacttgataccaccccttcctgtaacagtgcgagaccacttcatgccttgcaggtgctgctgcttctgtcattgctgctgactgctctggcttcctccaccaaaggacaaactaagagaaacttgggcgaaaggcaaagaggaaagtctaggacagtgacttgtatggctggaactccgctggcatgtgtattaaaggacaacctctggggatttcatccccaaaaacatcccaagttttgggaagtgatccggggaaagggaacccccatggcaaccaagtcgaagttgatagccacattgaagggttggggagggaaattttgccccgggaccccagatggttcccaggattcaaggaaattgttacaggaaaaatttgggcaggttgatggatctgctgattaatttgttctgtttctgccaaacttctttaactcccaggaagggtagaattttgaaaccttgattttctagagttctcatttattcaggatacctattcttactgtattaaaatttggatatgtgtttcattctgtctcaaaaatcacattttattctgagaaggttggttaaaagatggcagaaagaagatgaaaataaataagcctggtttcaaccctctaattcttgccta

SEQ ID NO: 8569 - DNA, 586 bp, Homo sapiens
cttggtgaaacaatttattagccatggttcagaataatacaaaaataaaggtgtggctttatttacacacactcttgaagctcttggcattcagcggacagcaaacaccatactcagagtgatggaattaatagcatttagggtaagcaaggaccagtgtgagactgggcccaggaaatggggagggaatgtgaggagaaacagggaatgacattaaagaagaaacagacaccttggagaatttatgactcctttctctatgtcatgtccagaagaggcaagtctacagagatcaaagtagcctaggggtgcctagggatggggaggttggggtggtgactaaggggggctggatttcttttgggggtagtaaactctaagactgactgtgctgatggctgctgaactgtgactatactaaaccggcatcaaattgtgcagggtcaattgtggattgtatggtaaggtgaactgtactcccaataaagcttttaggaggaacaaaggcagcttcccctggagattagtaggcaatgccccatcaggacatttactggcatgggctcaaaggcccagcagagctaga

SEQ ID NO: 8570 - DNA, 517 bp, Homo sapiens
gccttttatcactgacccaaagcgaaaacaccaggtttaactctgttccccctgtgctaggtccccacaggttttgttatcctgtatccttccttactcctagcagctactctgatcgattttctctcaccctcagagcagacttgtggccttgtttggggaagcactggaattttgaacccccagccatttgggtcaattgtttggcaagagtgtccgcttcatgatgctggtgatggcatgcacctcgtcacatgtgcacggctaggcttgtgcaggtggcctctattacccaaacactgaaggagcccctctgtgtccttggagagatgccaggtgcttagtttacatttttgcctgcttggagagctaacagcttgaagtaaaccaatccatcagggactcctgaggttttcaccagccaacaccacccaatcgtgcgtgaagactttctgactccctggacattgccatggactcaactgtcacttcaggacctgtttttgaactaacaaac

SEQ ID NO: 8571 - DNA, 2278 bp, Homo sapiens
  misc_feature (1)...(2278): n = a,t,c or g
ggcggcattcggtggtcagaggcctgtgcggctgcaggtagagtgtcttaggtgaggaggtacttttaagcaccgcgcgaaatgggggcgaagagaatttttttacttttgagggtgggactatcctgcaaggtgtgactgcggtcgggttttccgtagccagtttcgcaccagggatccttgggaagcgctgggatggttcaactgggtggggtcagaagctgctcccctgcccttctttcctaggaacctaggaaataactcggaacctgtaacgtcccactggtttggacatattcctctcctgatctggcctcatctgttccagggaggtgggattgagcctagtgcaggctacagtcaaacctcnttctggacttctgcgacagctntttatttggtttcttgccgctccttgacctctaacattctcgtctctgcactgcagctaacatgatcgtcaaacacaaatcagaacatatgcagtaatgtcacctcaaaagagagttaagaacgtccaggcacaaaacaggacttcacaaggtagtagtagttttcagaccacgctttcagcctggaaagtaaaacaggatccaagcaactcgaagaacatctcaaaacatggacaaaacaatccagtgggagattatgaacatgctgatgatcaagctgaagaagatgctttgcaaatggcagtgggatattttgagaaaggtcccattaaagcttcacagaataaagataaaaccttggaaaaacacttgaaaactgtggaaaatgtggcttggaagaatgggttagcttcagaagaaattgatattctattaaatattgcactcagtggcaaatttggaaatgctgtaaacacacggatattgaagtgcatgatcccagcaacagtaatatcagaagattctgtggttaaggcagtctcctggctttgtgttggcaagtgttctggtagcaccaaggtacttttttatcgttggctggttgcnatgtttgacttcattgatcgnaaggagcaaattaacttgctctatggcttcttttttgcttcattgcaagatgatgcactgtgcccttatgtttgccatttgttatatttacttacgaaaaaagagaatgtcaaaccatttcgtgtgagaaaactgcttgatcttcaggccaaaatgggaatgcagcctcatctccaggctttgttgtcactgtataagttctttgctcctgctctgatttcagtatctttgcctgtaaggaagaagatatatcttcagaattcagagaatctatggaagacggctctgcttgccgtgaagcaaagaaaccggggaccttctccagaacctctgaagttgatgttaggtccagctaatgttcgtcctctaaaaagaaagtggaattctctctcagttataccagtgctcaattccagtagctacactaaagaatgtggaaaaaaagagatgagtctttctgattgtctgaatagaagtggatcatttccactagaacaacttcaaagcttcccccaacttttacagaacatccattgcttagagctgccttctcagatgggctcagtgctaaacaactctctgctgcttcactacattaactgtgtcagagatgagccagtcttgctgaggtttcattactggttgagtcaaacattacaagaagaatgtatttggtacaaggtgaataattatgaacatggaaaagaatttaccaacttcctggataccatcatcagggcagagtgcttcttacaagaggggtattattcctgtgaagcattcctgtataagagccttcctctctgggatggccttagttgtcggtcacagttccttcagcttgtgagctggattccttttagtagcttctctgaggtgaaaccacttctttttgaccatctagcgcagctcttctttacatcaaccatttatttcaagtgtagtgtgcttcagagtctgaaagagctattgcagaattggctgttgtggctttctatggacattcacatgaaacctgttacaaacagtcctctagagacaactttgggtggatccatgaactctgtgtctaaactgatccactatgtagggtggctatccactactgcaatgcgcttggagagcaacaatactttcttgctgcactttattttggatttctatgagaaggtgtgtgacatatatataaattatgaccttccattagtgggtattgtttcctcctggggatccttctattctgcactcctcagcctggg

SEQ ID NO: 8572 - DNA, 76 bp, Homo sapiens
gatcacttgatttttaagaaattaaaaattgcactaggtagaaatagtgtaccaggcaatagtccagctttagttt

SEQ ID NO: 8573 - DNA, 1416 bp, Homo sapiens
agaataacattcctattgccccagcaccacctcccatgctcgcagctcctcagcttatccagaggcccgtcatgctgaccaagttcacccccacaacccttcccacatcccagaattccatccaccccgtccgtgtcgtcaatgggcagactgcaaccatagccaaaacgttccccatggcccagctcaccagcattgtgatagctactccagggaccagactcgctggacctcaaactgtacagcttagcaagccaagtcttgaaaaacagacagttaaatctcacacagaaacagatgagaaacaaacagagagccgcaccatcaccccacctgctgcacccaaaccaaaacgggaggagaaccctcagaaacttgccttcatggtgtctctagggttggtaacacatgaccatctagaagaaatccaaagcaagaggcaagagcgaaaaagaagaacaacagcaaatccggtctacagtggagcagtctttgagccagagcgtaagaagagtgcagtgacatacctaaacagcacaatgcaccctgggacccggaagagagccaatgaggaacactggccaaagggtgatattcatgaggatttttgcagcgtttgcagaaaaagtggccagttactgatgtgcgacacatgttcccgtgtatatcatttggactgcttagacccccctctgaaaacaattcccaagggcatgtggatctgtcccagatgtcaggaccagatgctgaagaaggaagaagcaattccatggcctggaactttagcaattgttcattcctatattgcctacaaagcagcaaaagaagaagagaaacagaagttacttaaatggagttcagatttaaaacaagaacgagaacaactagagcaaaaggtgaaacagctcagcaattccataagtaaatgcatggaaatgaagaacaccatcctggcccggcagaaggagatgcacagctccctggagaaggtaaaacagctgattcgcctcatccacggcatcgacctctccaaacctgtagactctgaggccactgtgggggccatctccaatggcccggactgcaccccccctgccaatgccgccacctccacgccggccccttccccctcctcccagagctgcacagcgaactgtaaccagggggaagagactaaataacagagcccctctaggagaagccacgggatcccggcggcaaggagaacagaacactgaagactctagaaaagcaaagccggatttctggaaagtgcagaattcttttggttctttggttccagagagagagaagatgcttgtgccaggtggcaccagagtttgccaattgatccttcttattctgtgtgtacatgcaaagattggaccatgttacatgaaatagtgcactggaggt

SEQ ID NO: 8574 - DNA, 407 bp, Homo sapiens
tcgtctcttggtggctcttctgactttttggagaatacccatcttgttggaggcagacttaagttgttatgctgtgccacacaatttactgagacaatcatatcttcctaagcatttaaggaaagttgaaaaaaatagaattagctataaaatatgtatggcacatcttgtttaattttgcatgtaacttctcttttgtacattgatgaggttttagtgacattgtcatccaacactttacctttattgttcagggaatgccttcgtgattttttgtactggttttattattcagactatggcctggatttgagtatattgttattaccacctggttttttaattattcatcccagtaaacttatattttgtgaagcatttgtttctcagattaagacactgttaga

SEQ ID NO: 8575 - DNA, 350 bp, Homo sapiens
tccatatacaattctggtcaccgtattttccaaagctaaaatctgaggcgtgggctgatggtttttgaaatcaggattaccccaggaagaaccaggtcctattactaattttcctgattctgaggctctgaaggcttgtctgagacacattccggagacctttgtaccagaacttggatgcatagtccaccttactactgatacacgcctgagcaccctttagggcgaggcgccgcctccctgcctggctgtcctgtccctcagcatcagaagagttgaattcagcaggagacgggagcccggtgtccatgagggaagaggggtcgcgcttggtttctactgacccccat

SEQ ID NO: 8576 - DNA, 780 bp, Homo sapiens
gaaaccctgggtaaacctccccctttaaccctttgggttttggttgaggctctgaacaccactgttggcaattctttcttcaaataatttagccagctctccaaattctcctttggtaccagatctgatttatttaatataagtaccagctttttctgtccactctggacaatggcctcttctacctgaggacatctgcaaccaagaggatctctggcatccaacacctctaggacaacatcggaggcttcaatcacctttttaagttcttggcagtacagcttctttgaattctgtttgcccgacttggctttgttctcagttttgcaaagcccaaactccttttccataggttccacatttgatggcttaatatcaggattagtttcaagttttcttttcttttctagttccttctgcctgtcaagtttctgctgctgttttagttcttcaagcctctgtttccttagctcagcttccctaagaagagcctccttaaagggagcactgtttggaactcctgggtctttcctaggcttcttgtgaccccgctttttagcctcctttcttaattttcgatgatgttctcgaacctttttttggattttataccgcttatggcaggtcatgcgtttacttgctttctttaacttaggccttttcatattggctgtagaaggaagcacaaacacagcaacctgcctccgggcgccacctgtgaactgaagccactgacgagcgtcacgcacttacgtgccgccgtaaagtggtcaccgcctc

SEQ ID NO: 8577 - DNA, 2245 bp, Homo sapiens
cttccccttctctgccctgctccaggcaccaggctctttccccttcagtgtctcagaggaggggacggcagcaccatggacccccgcttgtccactgtccgccagacctgctgctgcttcaatgtccgcatcgcaaccaccgccctggccatctaccatgtgatcatgagcgtcttgttgttcatcgagcactcagtagaggtggcccatggcaaggcgtcctgcaagctctcccagatgggctacctcaggatcgctgacctgatctccagcttcctgctcatcaccatgctcttcatcatcagcctgagcctactgatcggcgtagtcaagaaccgggagaagtacctgctgcccttcctgtccctgcaaatcatggactatctcctgtgcctgctcaccctgctgggctcctacattgagctgcccgcctacctcaagttggcctcccggagccgtgctagctcctccaagttccccctgatgacgctgcagctgctggacttctgcctgagcatcctgaccctctgcagctcctacatggaagtgcccacctatctcaacttcaagtccatgaaccacatgaattacctccccagccaggaggatatgcctcataaccagttcatcaagatgatgatcatcttttccatcgccttcatcactgtccttatcttcaaggtctacatgttcaagtgcgtgtggcggtgctacagattgatcaagtgcatgaactcggtggaggagaagagaaactccaagatgctccagaaggtggtcctgccgtcctacggaggaagccctgtctttgccatcgaagaccccagaggggggcccagcaccacccccatactcagagggtgtgaccctcgccaggggcccagccccagtgctgggaggggtggagctgcctcataatctgcttttttgctttggtggcccctgtggcctgggtgggccctcccgcccctccctggcaggacaatctgcttgtgtctccctcgctggcctgctcctcctgcagggcctgtgagctgctcacaactgggtcaacgctttaggctgagtcactcctcgggtctctccataattcagcccaacaatgcttggtttatttcaatcagctctgacacttgtttagacgattggccattctaaagttggtgagtttgtcaagcaactatcgacttgatcagttcagccaagcaactgacaaatcaaaaacccacttgtcagttcagtaaaataatttggtcaaacaacagtctattgcattgatttataaatagttgtcagttcacatagcaatttaatcaagtaatcattaattagttaccccctatatataaatatatgtaatcaatttcttcaaatagcttgcttacatgataatcaattagccaaccatgagtcatttagaatagtgataaatagaatacacagaatagtgatgaaattcaatttaaaaaatcacgttagcctccaaaccatttaattcaaatgaacccatcaactggatgccaactctggcgaatgtaggacctctgagtggctgtataattgttaattcaaatgaaattcatttaaacagttgacaaactgtcattcaacaattagctccaggaaataacagttatttcatcataaaacagtcccttcaaacacacaattgttctgctgaagagttgtcatcaacaatccaatgctcacctattcagttgctctgtggtcagtgtggctgcataacagtggattccatgaaaggagtcattttagtgatgagctgccagtccattcccaggccagggctgtcgctggccatccattcagtcgattcagtcataggcgaatctgttctgcccgaggcttgtggtcaagcaaaaattcagccctgaaatcaggcacatctgttcgttggactaaacccacaggttagttcagtcaaagcaggcaacccccttgtgggcactgaccctgccactggggtcatggcggttgtggcagctggggaggtttggccccaacagccctcctgtgcctgcttccctgtgtgtcggggtcctccagggagctgacccagaggtggaggccacggaggcagggtctctggggactgtcggggggtacagagggagaaggctctgcaagagctccctggcaatacccccttgtgtaattgctttgtgtgcgacagggaggaagtttcaataaagcagcaacaagcttcaaaaaaaaaaaaaaaaaa

SEQ ID NO: 8578 - DNA, 164 bp, Homo sapiens
tttaaatgcttaccatatttttaatgctacatctgattgtgaaggtgggctactcaaagctttttgggaatttacaggctcactaaaaatgatcacgatagtgtaatttaaattgagaaaggcatttgaaaattctgttcattcccatgaaccaaccaaagggt

SEQ ID NO: 8579 - DNA, 194 bp, Homo sapiens
ccgccttcctgggattattactgttgaggtctttctcatcttacacgaattgaaagggatgttgtcagggttaaataaaataataaatgggaatgtactctgtaagttataaagtagtactatacaaagagtatcatacaaatactattacatctttggcaaagtaagcatgaagttagcttaatatgacttgt

SEQ ID NO: 8580 - DNA, 594 bp, Homo sapiens
ggcacgagtggcggcagaggcagtgcggatccggcgttctccactgatcttttccaaggctgtacagacatggcggcggcttttcggaaggcggctaagtcccggcagcgggaacacagagagcgacgcaggcctggctttcgaaaacatctgggcctgctggagaaaaagaaagattacaaacttcgtgcagatgactaccgtaaaaaacaagaatacctcaaagctcttcggaagaaggctcttgaaaaaaatccagatgaattctactacaaaatgactcgggttaaactccaggatggagtacatattattaaggagactaaggaagaagtaaccccagaacaactaaagctgatgagaactcaggacgtcaaatatatagaaatgaagagggttgcagaagctaagaaaatcgaaagactaaaatcagagctccatctgctggatttccaggggaagcaacagaacaagcatgtgttcttttttgacaccaaaaaggaagttgaacagtttgatgtcgcaactcacctgcaaacagccccggagctagtcgacagagtctttaataggcccaggatagagaccttgcaa

SEQ ID NO: 8581 - DNA, 829 bp, Homo sapiens
gaatcatttttcccccaagttaaaatgtatcataatagagaggctctaatgaatcaatttccaatactcatttctttcttattttgaattcaagttacaatgactttacactgtagattttaatcttgtctgatgtgtgctggtgtgtatgacacaaactcataagtctggatcatgcttgggtacagtcaatgaatcaaccgagtcactttgaggaatttgtttttgtccaatttgctctgtgctcaatcccatgaattattaaatttacaatgtttgtccccaaatgaaaaccaatataaatgaatgatgttttaatctgtactttatgggaagttgcctatttgtcagtagatgtggttaagtgagtcctctggtgcagtgacatccttttaagccatctcatagggatttaaagaaggccaataggaatatagatattggtttttctttctctgacttgaactaagtaggagaaaccaaaccataaacctattacaaactacccaggcagaggcatttacttaattcatcaactagtgcaattaaaaccctgaaaacacatgatccttgttgactctgcttggttgaagcaggaaagaatggtcttgatggtcagaaagttttaaaattaatgggcagggcctttctggaccctgttttccaaacacgttagatattccgtcttgaggggattggagtaggctacagtgagggggtaatttttggatgtatctggacttttaaaaaatgtgcctatatttatagcaccatgaatattatgtaaaatttatatatgaattaaataaatattcacctctgatttcca

SEQ ID NO: 8582 - DNA, 452 bp, Homo sapiens
ttttttttttttatgaagtaggttgtaggggactgagtcctcataaccctaaaagaagaactccattaagtcaacatttcttatatgccaaatgacaagaacgtgaccccatacctcccacccttccagtgtagttccaggttatggtggggataggacgatgttgctagatactttttaatggactaatgatgacttggggttatgagtttaactgggaagatttcaccaattgttcatgtgtcttattttatatattttaacatttaagaaatgctaaacccaagcctaccttttagtctctacttttatcataatacaaagctgttgttccacttacttggttcatcacagcaggaacatatgttgattgtttacattttgttattgttcttagtaggtcttcagtggaaccttggaatatacatgtttaataattccctcaagtgatt

SEQ ID NO: 8583 - DNA, 612 bp, Homo sapiens
cagacatgatgggtctcctgaagaccttcttcagttgccacaaagaattccagacagttccattctacattttctcagagtcctatggaggaaaaatggcagctggcattggtctagagctttataaggccattcagcgagggaccatcaagtgcaaactttgcggtggttgccttgggtgattcctggatctcccctgttgattcggtgctctccctgggacccttacctgtacagcatgtctcttctcgaagacaaaggtctggcagaggtgtctaaggttgcagagcaagtactgaatgccgtaaataaggggctctacagagaggcccacagagctgtgggggaaagcagaaatgatcattgaacaggtaaaaaggggaaacactcagaggcgagcctgcttggctttttctggtgggtacagggcccatggttggtgttgtcaaacttggagtctacactgaggctccccacatatctgcaaatgattgcatgctggataataaatctcttgggtctaagcagtgatgtagtggctccttacagagtcagaaagccacccaggcctgcaagacttgcttgtccttcactaaatgtaaaaattctatt

SEQ ID NO: 8584 - DNA, 723 bp, Homo sapiens
  misc_feature (1)...(723): n = a,t,c or g
tttttttcagttgtctagtacattactttattaaaatatttgttttgctccaatattgctcttttcttttgaaaataggtacaaactcacactcacacaaaaacagtccataactttcttgcacttaacatttatttttagagtaatatatgggtatagttaactctatgtaaaccaatactaaaattctgttatgtttgcaggcagagagacatgttcaaagaaaaatacataacaaaatttttaaaatgtttaagcaggactcagaattttaagactcaggattttatttatacttgtatataatttttattatacccatgaaaatgaccctatagtcaatagcaatttacttgtacattttaaagtaactaaaagtgtagaatcggtttgtaatacaaatgataaatgcctggagttgatggatatttcatttgccctgatgtgattaatacctattcatatgcctgtatcaaaatatgccatatatggnnnnnnnnnnnnnnnnnnnnnnnnnnnnnnnnnnnnnngaaaaatatgtttaaataagaaaaagaataaaaatttaacctatgggaacaatgttctttaattaagttctttagtttaaagtcactggcaagagaaattattagagatgttagtccactctgttattaaatagtacattgttactatcttttaccaacacccttgagtaaggtgggataggttgaagttagt

SEQ ID NO: 8585 - DNA, 691 bp, Homo sapiens
tttttttttttaagattaccaaaagactttaatgaaatctgaacagttattgagtacaagacatgttcaacctcactagaaatcaaataaaataaactcaaatacctttatatctttatgcacacacaacagcaatgagtgcctaagtctactaagacatgcacaagaatgttcccgttagtaaaaaactgaaaacccaaaggcttatctacaataaataataaaggatatactttatacattcacacaatggagtattatacgacgatgaaaaaaacaactacacccaacatgagtaaataatacagacataatcttcactgaaagaaaacagatacaaaaaagtatacgtatataacgttcaagaacaggcaaatttatggagaaggcagtcagtaaggtgtttatctttgggggttgtaatactgaatgcgagtgagcacatggaagaaactagggttctggaaatgaactgtatattaatttggacagtggttagttttacctttcatatctaaattcataaatacttaagtgaaggtattcataatagatacccaaattaagaaagttcaaagttcattttcttgcttaggtttaaaatttccaatatttatcacaaaataaataagcatgtaggatcaagtttttagagtagaattttgcaggtaatttgaaatctcaagccctc

SEQ ID NO: 8586 - DNA, 647 bp, Homo sapiens
ggggcgggatgtaaccggctgctgagctggcagttctgtgtcgctaggcttctgccggccgccgccgcacataagccacgaggaggagctttacgacttcccggtcttcggcgccgggcggcaagggccagactctgcgctagagcgctgcgcgaaccggccggcacctgtcgcagaaggtgaaccggtcgcactgtcgcgcagaagctcctcaatggccagcgccacgcagccccggccgcccactcgcctcatctgagcctgggcaatctggattgggaaagtcgacattaatcaactcattattcctcacagatttgtattctccagagtatccaggtccttctcagagaattaaaaagcctgtacaggtggaacaatccaaagttttaatcaaagaaggtggtgttcagttgctgctcacaatagttgataccccaggatttggagatgcagtggataatagtaattgctggcagcctgctatcaattatattgatagtaaatttgaggactacctaaatgcagaatcgcgagtgaacagatgtcagatgcctggtaacagggtgcagtgttgtttatacttcattgctccttcaggacatggactcccaccttcaggcaggattgggtagtacatgtttgta

SEQ ID NO: 8587 - DNA, 1176 bp, Homo sapiens
  misc_feature (1)...(1176): n = a,t,c or g
ttttttttttttttacattttaaagacatttttattgagctaattttaacaacattgctttagctggtgacagctgccccaaaccaaaacaaagccatcatgaatgctattcaacatcctcaatgtaatccagtatgtttttgtacttggaatatagttaaacttttgacattacataatcaagcaaatagcagtgcatactatattattcaaaaagactttatctatttcatttaaaaaatcaagttgcaagtggcctcagctttatcaacaatcgtagtgacacattccacacttcatgctctcaaaataaaaagtgccctaaaactaactctaagttttttagtcactgacattaatactaaccaggttacaggaattgaagtttaacattgtacaatataagcggcaataagttactgatatctgctgacaaattccactcaaactaaatatatccttgatacattcaaaaagacattttgtaaattttaataagctagttagtgtatatgctgcagtgcaaaaaaagtgacaccctagtttcctgagctttaggaaattaacaattttctgactactactttcaacttaaaataggctctttattatatgaagccatgacaaaactatacaattaaattgggcttttggagaactgaaagactggtcagagtcagggtgatttaggacaatgaaaaagttttcaaagcaaaagtatttacaacactacaaaggatactatggatctgcatgtagtgtaaagattaaagataacctactgatttcacaattgtccctcctctttcaaaaatattncactnnnnnnnnnnnnnnnnnnnnnnnnnnnnnnnnnnnnnnnnnnnnnnnnnnnnnnnnnnnnnnnnnnnnnnnnnnnnnnnnnnnnnnnnnnnnnnnnnnnnnnnnnnnnnnnnnnnnnnnnnnnnnnnnnnnnnnnnnnnnnnnnnnnnnnnnnnnnnnnnnnnnnnnnnnnnnnnnnnnnnnnnnnnnnnnnnnnnnnnnnnnnnnnnnnnnnnnnnnnnnnnnnnnnnnnnnnnnnnnnnnnnnnnnnnnnnnnnnnnnnnnnnnnnnnnnnnnnnnnnnnnnnnnnnnnntacactgaaagactttatggtaagtatttaaaactaaatataccaacctgtggtatattac

SEQ ID NO: 8588 - DNA, 1134 bp, Homo sapiens
  misc_feature (1)...(1134): n = a,t,c or g
gacagagggcttcaggcacgcggctgctgctgccactgctgctctgagacaaggtggatgagtctgctgccggatcaagaaaaagaactgtatttcagaaaaaagaaactacagttttagcatgcagaaaggaaaagggagaacaagccggatcagaagacgaaaactctgcggaagttctgaatcaagaggagtgaatgagagccacaagtctgaatttatagagctgaggaagtggctgaaagctaggaagtttcaagattcaaacttagcgcctgcttgttttccaggtacaggaagagggctgatgagtcaaacatccctgcaggagggacagatgattatttcgttgcctgagagttgcctgctcaccacgggacacagtgattcgaagctacttaggggcatacattactaagtggaagcctcctccatctcctctgctggcgctgtgcacctttttagtttcagaaaagcatgctgggcaccgatctcttttggaagccttacctggagattttacccaaggcgtatacctgccctgtttgtttggagccggaagtggtgaaccttcttcccaaatctttaaaagcaaaggctgaagagcagagagcccacgtgcaggagttctttgcttcctccagagactttttctcttctctgcaagcctctgtttgcggaggctgttgacagcatcttcagcttacagtgccctgctgtgggcttggtgcaccggtcaacaccagagccggtgtacctgaggcccaggcagcgggaatgcctttctgcagagccggacacctgtgcactnggctccgtacctggacctgctgaatcatagcccacatgtccaggtaaaagcagcggtttaatgaagaaactcattcttacgaaattagaacggacttcacgttggagaaagcatgaagaggtattcatctgttacggccctcacgataatcaacggctgttcctggaatacggatttgtttctgtccataatcctcatgcttgtgtttatgtctcaagaggttggaatcaactttgttcttaacattaacactatataatttttttccccatttggagatgtgtattttcagttttaataaaaatatcaaaaccttcctgtgc

SEQ ID NO: 8589 - DNA, 576 bp, Homo sapiens
ttactttcctcttcactaagacgaagtagaaggaaaaaaagggggtggagggggacacagatcactgaatttctattcagcaaaagaaacttctgaatttctcttgctttccccaaaatctgcaaatttggtcatctactcgatggaagaaaagctagcattctcacaaatgattgaaattagggtatgatcttagacacctagctcaaaaataaaaagctgaaagagaaagaagacaggagaaaagagaaaaaagagaaacaaaatgtcatttactctaaaaatccaggtttgtgtttatgttccacatgaggtccaaattgtatctgggcttgaaatccaccaaactcacaagctttctcgaaggagacagggtgagagccattcaggatgtcatcccgtgcctgaacataaagcaagttcagctgcacggggtctctcgaatctacattctgatcagagtaagagaacttccgtctaagcagacacgtttcggtttcatctactccttgttctctgatggtcggctgtgatccagccatttaggtcatcatctgtgtgcagctgggccttcaa

SEQ ID NO: 8590 - DNA, 2035 bp, Homo sapiens
caaaagatgaagcagtgatgttggtgaatcatcaggcaacaggagatgtgtgcacactgatgatgtgcctccaggacaaaggactggttgttgctcagatgatgtggttgatggatcatatttttaagtacacaaactttggaattgtttctctagttcatggagacttctttataagacagggaagatcttatcgtgaccaacagctgctgcttctcaagaagcacttagaaaataattacaggagcagagatcgaaaatggattgttttgtttccagaagggggcttcctcaggaagaggcgagaaacaagtcaggcatttgccaagaaaaataacttgccatttcttacaaatgttactctgccaaggtctggggcaacaaaaattattttgaatgcacttgtagcacaacagaaaaatggaagtccagcaggaggagatgctaaagaattagacagcaaatcaaaaggcctccagtggataatagatacaacgatagcttatcccaaagctgaacctatagatattcaaacctggatccttggatacaggaaaccaacagtcacacatgtacattacaggatctttccaattaaagatgtacccctggagactgatgaccttaccacttggctctatcagcggtttgttgaaaaagaagacctcttatcacatttttatgaaacaggagcttttccaccttccaagggccataaggaagctgtttccagggagatgaccctcagcaacttgtggatatttctcatacagtcttttgcatttttgtcaggctatatgtggtacaacatcattcagtatttttaccattgcctgttttaggaattgacgtggacttgtcaaggtcaccgtaggagttcagactttctttcataagtgtgcattattttacatgtgcaaatcagaatatatttaaaaaaaagcaaaagaaattcaatggatggattaatatttatccccctttgggatattttaaaatctactaaaatgaggattagtaatataatgacctgctaatatattttaagaacatgttttaaaaagatacactctatcacatatttaagcaaacatcacatttggagaagaggaaatcataaaatcatcctagaagactatctgagagaaattctgttgccaccagttatacttgacaatttagttgaagctcagaaagttatattcatccctcttagctgtagtctatattagggcagttctctagaacgcccacatttccaccaactcagtaaacttgaggggagctggttggcacctcgtgaagaactctttccctgtcgtttgcagtaacaaactccagtctgttgcagtaacaaactccagtctgttgcagtaacaaactctagaatattgacattctctgtgggggaaaagcagtgtccactggaccccttctggtactggatgtgttctttacaaaggctagctcagtccaacattgtgtttacatacactcgtgcttttccttatctgacttctcattttgtatcagaggcatatcataaattgataattttgcaaaatgcacttttttgagatgcagatatagcaaaggattagtaatatagcctgaaaacaaatgggagcatagcagtgtgtgaggttctcgagaactgtcttgtctctgtgtgtttatttgcctgccagtgctctccagcgccatcctgccctggacaccaccctgacgtgatgcctctattgcagctcagaggctttattttttccattttgacattggcactaaatgcatttggggatggttaaaacaaattactatagaacatttaaatgatcagtttaaggggaaataggctagtttatagaaaaataagagctagtggcttataatggtgacaggttctcatgtggcacccctaggacctgtgcagacagtagtctgttgaatcattacatcaaggagctgcccctgtcagggtgagtgtaattaggaacgataccagcacataaggctccccccaatctcttccagttgc

SEQ ID NO: 8591 - DNA, 836 bp, Homo sapiens
tttttttttagcatttaattctgattttaatttccataaaattaactctacaaagatttctcaaagaaatctgaccgccttcaaactacatgtttgttttgtattacatgtaatagatttccacatatgaaaaaatcataaaatgaaggctacgttttccaaccgctatttaagtactgtttagaaactatcgttgaatgaatgaacctgattttgcctcatcgtgtttatctaaaagagtctttgaaagatatttattttccattttctttacacggtccctctttttcaatctgtaaataaaaattaatgagcaatttaggacacaatatcacaacacaattattctgtaattgatctgataaccaaagacacataagaataggatgatctataggatagatgtttccacacagcatttgtctgaaatcagattattttaaatgatgccttgacttttgaattcaattctagaaccaattatcctaaactaaatcagagtattacaaatgaagatattccaacacaaagacttgtaggattttgtttagattgtcaatggttgattcatccaaattttcttcattgtcatccatggtgtgccagacttcagggaaaggagacggtatcagatgcagaactggaacacctcttcttaaaaatggaatatggtcatcctgaatcacacctccataactgtaattctggaaataccgcccctccaaagagtgatccttgagcaaacccaattcatgaagttcatgttcaattgcttgaagtctttcgaaccacctggctgagtttggaaaaaaattgggaaacgttgggtttggagc

SEQ ID NO: 8592 - DNA, 563 bp, Homo sapiens
cttctccttctctggtttctcaagcttttcatgctttttagactcctttgcttttttaaggggaacattccccacctgcagctcgtcctccagctgagaggcagtaggccggcctgaggtcatacttctcctcatactcattactaagaattttgtcctgggccttctttttgggaggtttctcctttgctggcttgggaggacctggcaccacatttgggtctcggtggccatgttcccgcctgtccatgcggttgtcccggaaacggcctgggccagcagcccttgtgctgggttctgagatggtggtgggaggggcatttgtgaagctctccaagctggtggccttgctgggcctcctggttgtctgtggcctctccctgtgctgatccttccgggatggagggtaaagattctctgaaactgagggtctcctggcagtgatcacctcagtggttgtagggggcctgtgggagggtgagggggtccagggcctctgcgtggtgggaaaggcagtggtggtcataggtcttgcagcaactgttaccgcccgggacgtggac

SEQ ID NO: 8593 - DNA, 2447 bp, Homo sapiens
gccgggcgcccgctcttccttccgcttgcgctgtgagctgaggcggtgtatgtgcggcaataacatgtcaaccccgctgcccgccatcgtgcccgccgcccggaaggccaccgctgcggtgattttcctgcatggattgggagatactgggcacggatgggcagaagcctttgcaggtatcagaagttcacatatcaaatatatctgcccgcatgcgcctgttaggcctgttacattaaatatgaacgtggctatgccttcatggtttgatattattgggctttcaccagattcacaggaggatgaatctgggattaaacaggcagcagaaaatataaaagctttgattgatcaagaagtgaagaatggcattccttctaacagaattattttgggagggttttctcagggaggagctttatctttatatactgcccttaccacacagcagaaactggcaggtgtcactgcactcagttgctggcttccacttcgggcttcctttccacagggtcctatcggtggtgctaatagagatatttctattctccagtgccacggggattgtgaccctttggttcccctgatgtttggttctcttacggtggaaaaactaaaaacattggtgaatccagccaatgtgacctttaaaacctatgaaggtatgatgcacagttcgtgtcaacaggaaatgatggatgtcaagcaattcattgataaactcctacctccaattgattgacgtcactaagaggccttgtgtagaagtacaccagcatcattgtagtagagtgtaaaccttttcccatgcccagtcttcaaatttctaatgttttgcagtgttaaaatgttttgcaaatacatgccgataacacagatcaaataatatctcctcatgagaaatttatgatcttttaagtttctatacatgtattcttataagacgacccaggatctactatattagaatagatgaagcaggtagcttcttttttctcaaatgtaattcagcaaaataatacagtactgccaccagattttttattacatcatttgaaaattagcagtatgcttaatgaaaatttgttcaggtataaatgagcagttaagatataaacaatttatgcatgctgtgacttagtctatggatttattccaaaattgcttagtcaccatgcagtgtctgtatttttatatatgtgttcatatatacataatgattataatacataataagaatgaggtggtattacattattcctaataatagggataatgctgtttattgtcaagaaaaagtaaaatcgttctcttcaattaatggcccttttattttgggaccaggcttttattttccctgatattatttctatttaatactcttttctctcaagaaaaaaaaaaaagtttgttttttctttattgtccttcatagcaggccaagtattgcctctctgcaatagacagctactgtccaatacatgctgtaatttgacattctgggtcacagatataaggtatttaaaatctatttatgctttatagagaaaccagacattaaaacttcatgcactacttatttcgaattactgtaccttatccaaatttacacctagctattaggatcttcaacccaggtaacaggaataattctgtggtttcatttttctgtaaacaactgaaagaataattagatcatattctagtatgttctgaaatatctttaagactgatcttaaaaactaacttctaagatgatttcatcttctcatagtatagagtttactttgtacacgtttgaaaccaactactgtagaagatgaggaatctattgtaattttttgctttattttcatctgccagtggacttatttgaaattttcactttagtcaaattattttttgtattagtttttgatgcagacataaaaatagcaatcattttaaattgtcaaaatttccagattactggtaaaaattatttgaaaacaaacttatgggtaataaaggctagtcagaaccctataccataaagtgtagttaccatacagattaatatgtagcaaaaatgtatgcttgatatttctcaactgtgttaatttttctgctgtattccagctgaccaaaacaatattaagaatgcatctttataaatgggtgctaattgataatggaaataatttagtaatggactatacaggatgttaataatgaagccatatgtttatgtctggatttaaaaattttaaacaatcatttactatgtcatttttctttaccttgaagaacataaactgttatttcacttctacaaatcagcaagatattatttatggcaagaaatattccattgaaatattgtgctgtaacatgggaaagtgtaaatgtttttcatggtttctatcaatgtgaaataaaatttaattctgaaaaaaaaaaaaaaaaaa

SEQ ID NO: 8594 - DNA, 1957 bp, Homo sapiens
agctatggaagttttctttattgattacttaatgtgtaacaataattggcatctttttcacacattacaaaaaattatacttggctcagtatgcaaccttttaagcatagcccatattatttaacaaaagaggggaaaacctattctacccaacacagcatttacaaatgcacaaaacatgccactttggcttgtatattgtctagattaaaaaaaatcttttaacataaataagttagtataatttttcagtgtttttacagagttatgtacacaggtacacttcaaatgggtttttccatacacagggcaatggaaatactgtttaaaggatgtaggtatcccattttcactttatccctaccaggtgtggctttttctcctaccatggaaccttcctttaaaaataacactttcctgtggataaatggacagagtaagctttaaattaaaaaaatatttcattttttaatgtgaagttacttacagatctttaaaaatatcgagggatttagaattattttgactgtgtttacacagcccgaagtgaaaagaaaatgagaaaattttgtcaacaaatttaataaaagcagatggtcaattcttaacattcaaaactcccaagcacctcggatttttgccccaaactacctggagtgatcaccattctgctgagtaattaactggtaaattccaactttaagagagactggggagggcagtgaggataggtttctgttgcttttttaaaaaagccacatgcagctatctaacaaactttagatagcttgggagatcaccagatctcccaaatgagaataaacttcttgtaaaaataaatagcaattatctttagccagtgttcaaatttttgtgatttttttaaatgaagtatcagctgtctctgaaagggacattacatctttaaagaaaacaattcaaacccttccccaaaattgcttctcttcatgcaagtcaaatatttatctacttgctgtaaatcaaagcaagctcttcataccccgctccacgtcagttcctcagccccaccctgccctcccttccccaaagtttatgtgctacataaaaggtaaaaactatatacacaggtagtacaatgaagcaaataaggaaaaacctaattgcataatgctacatccaacgcttttagaggcagatcatttaagagtgcctaaaattttagtgttattgtgttgttgtttttcagtgcttatacaggatgtccattccatgaagtcagcgatatgtatttttaaaattttcatgtatatcttccttgcttcatcaagcagtgatgtatctgataaacaaggaaacatattcttaattcgagctgtttacgtttgacgtcttctgaggccagggcttcttgggcgtctgctccacagaaccggcatttggggaaccgtctgaaacattttcttctgttctgttggctcttttgttttgagtagaagaatcgtcggttgcaggtcgcttccttattcctgcgcattgctccgctaaccccgtctggctgtccgacggatcagtctttgggtccaccaaatgcgtgtcctcagagttagccggagccccaattaaaggcgccgccgggcggctcccgctgacatcctggctctcctgcgccggcaccttgcaggcacctttggggggccgcgggggtctgtagtagaactcgggcaagctgccccttctccacctcttgccactcgtacttgccctctaggggtttgtgattctgaaaatcgaaattccacttgcgctggctcgcctcttccatgtctctgcagtgcttctccaagtcccgggttaactcttcgtggtccaccgggccgaagaggttcctgcaggccgagggcttggggtgctccgcctgcctggcgtccatccgctccaggctagggctcccgttagacactcgcacgtttgacat

SEQ ID NO: 8595 - DNA, 152 bp, Homo sapiens
cgcattagctctttctgcctcccacgcagccttattttttttattgttgttttcttgttgctgttgttgttgttctcggagacggagtcttgctcttgctctgtcgtcgcccacgatagagtacagtgggcaacagagaaagactccatctc

SEQ ID NO: 8596 - DNA, 759 bp, Homo sapiens
aatcgattctgatgtttggccacttgctccattatcattcttctcatctttaccttctattttcttagtatccttgctttcttttttttcagatttctcagacgatcttttctcttcttttttgacagaggcttgtgtcttgctacttctatcactcgtattttttttatctccagaacttcttgaactactcttttcatcattttctttcttcatttctttcttagagggatcaccttttactttttcaacagaaatcagctgtccatgcagctcagtgcgatgaagatgtgcaatacacctggacacctctgtgcttgaagacatagttacaatgccatagcattttgccccaggacttcgagcatttgtaactacttttgcactcagaacctttccatatttgccaaagaggttcttcaaatcagcagctttggtattagatgaaagtccactaacccagatatttttagttgagcttccactgctaccactagtactacttgtacttcctttgtcatctttagatgatgtcttgctgtctttaggattcctttgaagagctctttgcttgaccagaggccccagtagacgagggccctttcttcaaagtaatccttttctttggtctccagattctgctttcttagaactttctctggcttccttctcgacagggtcacccttcacgcagtcttccttcttaccatctttaccttctattttcttagtatccttgctttcttttttttcagattt

SEQ ID NO: 8597 - DNA, 297 bp, Homo sapiens
ctgcggtccaccgcttttcctttttcggaacacctctctttcataaaagagagagctgctctcctctctcatttcttctgcctattaaactttccactccttaacccacttcatgtatgtgtgtctgtgtcgttaattttctcagctcgagacgacgaaccctgggtattcaccgcagacaatgatgctgcttcaaaattacaatgagatatcttcaaactgcttaagtaaaaagagctatcaacttaaaattctatatacagctaaaatataactcaaaagtaagagctgaaataa

SEQ ID NO: 8598 - DNA, 502 bp, Homo sapiens
actataatatatatgacgttgaaatgacattggttctgagtctattaatttaaattttgggatcattacattcagaatgaaatgaaattgaccttgatactaactttgagagccaaaaaaatgaatgggtaaacaaagcctaagggtcatgttaattaatttaacaaaacacactattttcagtcctttgggcttgtacattttatagacaaaattagtatttattgatttgggaagtgttcaattgagagtaaatgactctgtgttttgaaactaatacctttgcatttaaaatactgaagtattattttgttagttgaagtagatcttttcctgtgtagcatgatttaatgcagagcagttattcacttatacttctgaaaagccataatattgaaatttaaaatgaatagtcttactttaaggtcacttttactttacattttactttaaaggtcgtttttagactttatgcactagtggtattgaaactaacctttag

SEQ ID NO: 8599 - DNA, 872 bp, Homo sapiens
tttttttttttttttttggtcatactacatttcactttattattattaacatttatcatacatggttactattccaatctttcatgcagacaaaaataaacaatataaaatacataatgcactttgataattttaaccatacataaaatatggagtaatggaagctatgttacatggatattttacaaaggaaaaaaagatgacttttataataacacatccagatgaaatttatcattaaattttggatttcatatgatgttaagtatggatatattcaaaacaattactatttatagaaccaatttgatattttgtcatttaaaataatgaatactatgtaaatgagtacttataaaaatatttttaggcaaaaagctctgttctactcatttacttgccagttacaaaaatatatattcatctgaaactctaataaatttgcttgaggcattagatattcaaattcaaatgcatattttctaaagcgtcttaccaatttagtgttcttggctacatacagtatatttgtatatatgatattaggtttgtgttacaaataatgccattttaagcaaaagacacagatgatcaataacacacagagacaccacgaaggttttcaaatcaaacatgtccacacatataccagccccaacatgctgtgccttgcacaaagtgaattctcaaaaacatttttcggatgaatgcttgatcagatagcatttatcctgttattcgcacctaaaattaactctccaaagctatttctagtagaaatgcaattttaaaatttaacaattttgttctaaattagttatttctcaactgcagagccaggtcagttgattccagattgaacagcaaagtag

SEQ ID NO: 8600 - DNA, 297 bp, Homo sapiens
ctggactctcatttagttttttacactgacatcagcctcctcaagattggtcgtcttttaagcactagtttgtttcattatttgtaccatcaaaatatgtgagaaaaggaaaaaaaaaggaaaaattatcttaatattttagaacactgaattcagatttcaagtgtcaaatgtttgcaaaaaagtcccaatattctctgaaaacattggatttctcttatgtaaaataccatttagacagaatgaaaaaagagaactgtatttggagtgctgagaccttgaaattggaatcttcgg

SEQ ID NO: 8601 - DNA, 292 bp, Homo sapiens
cattaagttaatgtgttaaacccactttagaaattgtgaaatttcagcatttggcttataaagacataatctaccccaattatttgtattggaatctcagctttactccctaactgttacctttggcaaataacctctctggatatcaggcaggtctggaaaataggaaagataactatctcattaatttgtttagaaagtagttatgttaattatgtttacttaagtacttaatagttcctaacatagtagatgctctaaatattaggaactattaagtacttaagtaaac

SEQ ID NO: 8602 - DNA, 380 bp, Homo sapiens
agtgaaagcaagtcagagcaaaggactaaaagacaacctaagccaacttacaaaaagaagcaaaatgatttgcaaaagagaaaaggtgaaatagaagaagatttgaaacccaatggagttctcagcaggagtgccaaagaaagaagtaaactgaagttgcaaagcaacagtaatactggcattcctcgttcagtattgaaagattggcgtaaagtcaagaagctgaagcaaactggggaatcctttttacaggatgactcctgctgtgagatagggcctaatttacaaaagtgtcgagaatgtagacttattcgcagtaaaaaaggagaagaaccagctcactcaccagtattttgtagattttactactttagacggtt

SEQ ID NO: 8603 - DNA, 305 bp, Homo sapiens
gaagacataacagtcagcagagcccccaaatacctgaaaacataaacttgataggattgatggaaattaatcagttatagttagagatttcaatatcccactctcaataattggtagaacatctagacaaaattggcaaggtatggaggacttgaagaacattattaactcacttagcctgacatctgtagaatacctggtgaatgcagaatacatcctcccaattgtaggtgaacgttctctgttgatcatacattggaccataaaacaaggctccagtatagctgttaaaaaaaaaaaaaaag

SEQ ID NO: 8604 - DNA, 645 bp, Homo sapiens
cccacctccttattctaagtcttaaaaatcaggtgtgaactttgcacttgcagcaggttttggtttggacgagccaaatcccaagtgctccagagccctggtggccagtggctccaccctggtcagagagaccccagaagcctcagcactccctgaggaccaaggaggggggaggcaggagggagagcagagtgtgacttgcacattaggcgtgcctgtctgtttatacttgagattagttggctgcttttaaataccagacagtttcacataaaaatttgaatgacctggttttcttgaaaaattagaaggtctcagaactctgcacccaggttctcacagaactacgctcttgtcccttttacagagtcccagctctcagggtccccactgccacacccgtttgcatgagatgcctgggccactgatacctgatctgtgccctagaatgctgggctgcctggcatgctctgagacactttctgacatgtccccacatgctctgacatgttcctgatggctctgggacactgacatgttcctgatggctctgggacactgacatgttcctgacatcctctgggccgaggagcccccctgttgtgtgctaggggctttacccatgctatctcacttaatcctcac

SEQ ID NO: 8605 - DNA, 484 bp, Homo sapiens
tcacccagtttgtggtaataattgttgcagcagcccttagaaacttatactagtaatccaacattattcttttgaatgttgctatcggaagatgatttccccagtgaatggtcttggcatccttgttgaaaattagctggctaaagacccatgggtttatttctggatcctcaattcaattccactgatttatatgtctatcattatgccagtaccatactgttttgattattgtttcacgtaagttttgaaacttggaagtatgagtcggccaattttctttttcaagattgttctggctattcagggtctcttgaaattccatataaattttagaaaatcaacttgtcaatttccacaaagaagccaactggaattctgaaaaggactgtgttgaatctgtagatatatttggagagtattgccatcttaacaatattattttgatttatgaacactggatgtttatttatttagatagttt

SEQ ID NO: 8606 - DNA, 465 bp, Homo sapiens
tttttttttttgttttttttagttgtagaaaataaaggaattttaattgattcataacaaaagcattaagcaaacaaaatgttaattaaaaattttaaataaaatatttaaaagaaataagtgcagaaaatagcattaaaatgtttgcataattacatacattttaatacttccacattcttttggggacccaggcttttaaattttggaaacatgttaacttacaggcaaataaaatgaatgcagatgaatagtttctacatataattacaatctggaaaacgacttgcctagagtcttattgccagttagcagttgaatgatttttcagaatcaaaacaatttgaacaatgttttgctttttaaagtatccaagaattacactagaaaaatgtgtgaacatttaagtgtatttacacagttccatggtctctcatccaccagcctatgtatatttactaacct

SEQ ID NO: 8607 - DNA, 1522 bp, Homo sapiens
atcatgtaccaggattatcccgggaactttgacacctcgtcccggggcagcagcggctctcctgcgcacgccgagtcctactccagcggcggcggcggccagcagaaattccgggtagatatgcctggctcaggcagtgcattcatccccaccatcaacgccatcacgaccagccaggacctgcagtggatggtgcagcccacagtgatcacctccatgtccaacccataccctcgctcgcacccctacagccccctgccgggcctggcctctgtccctggacacatggccctcccaagacctggcgtgatcaagaccattggcaccaccgtgggccgcaggaggagagatgagcagctgtctcctgaagaggaggagaagcgtcgcatccggcgggagaggaacaagcttggctgcagccaagtgccggaaccgacgccgggagctgacagagaagctgcaggcggagacagaggagctggaggaggagaagtcaggcctgcagaaggagattgctgagctgcagaaggagaaggagaagctggagttcatgttggtggctcacggcccagtgtgcaagattagccccgaggagcgccgatcgcccccagccgcctgggctgcagcccatgcgcagtgggggtggctcggtgggcgctgtagtggtgaaacaggagcccctggaagaggacagcccctcgtcctcgtcggcggggctggacaaggcccagcgctctgtcatcaagcccatcagcattgctgggggcttctacggtgaggagcccctgcacacccccatcgtggtgacctccacacctgctgtcactccgggcacctcgaacctcgtcttcacctatcctagcgtcctggagcaggagtcacccgcatctccctccgaatcctgctccaaggctcaccgcagaagcagtagcagcggggaccaatcatcagactccttgaactcccccactctgctggctctgtaacccagtgcacctccctccccagctccggagggggtcctcctcgctcctccttcccagggaccagcaccttcaagcgctccagggcccgtgagggcaagagggggacctgccaccagggagcttcctggctctgggggacccaggtgggacttagcagtgagtattggaagacttgggttgatctcttagaagccatgggacctcctccctcattcatcttgcaagcaaatcccatttcttgaaaagccttggagaactcggtttggtagacttggacatctctctggcttctgaagagcctgaagctggcctggaccattcctgtccctttgttaccatactgtctctggagtgatggtgtccttccctgccccaccacgcatgctcagtgccttttggtttcaccttccctcgacttgacccttccctcccccagcgtcagtttcactccctcttggtttttatcaaatttgccatgacatttcatctgggtggtctgaatattaaagctcttcatttctggaaaaaaaaaaaaa

SEQ ID NO: 8608 - DNA, 542 bp, Homo sapiens
ggatatctttgccgcttggtccaccattgctttgattaaaatctggatctttttctccatctggtttagcttcttccttgtcctcctctgtttcagaactactcacattcagttccggagccgaatccttcatcacctttttattatccacaactttatggacatagatggtggcttgagtgtattcacgcaggtccctctgctgctgacacaataagccttctctgcattctggacagagtttgggctcagaaatatactgtgtttctgaagggtttacatctcccacttcaattctcgtgattttaattacatgatccacaacaaagagcttttgtatcatttgccactcactgggccatatgagagctataagtttagaatcttctttggtcatggaagcaaatgtaaacatgaggccccgtggggacacaaaagagcactgttcccaactgatgacacagggctgcatcttgtaggctttctaacaaatttccgccactcttctacaaagaactgagacacgatgtagaggacatccg

SEQ ID NO: 8609 - DNA, 347 bp, Homo sapiens
gtcttgctttggctatttgggctcttttttggttccatatgtacccatccatgagcatgggatgcgtttccctttgtttgtgttgtagatggcttttattactctaaggtatgtcccctttatgccgattttgctgagggttttaatcataaagggatgctagattttgtcaaatgcttttttctgcatctattgagatgatcatgtgatttttgttttaaatctgtgtatgtgctctatcacatttattacttgtgtatattaaatcatccctgcattaatggcatgaaacccacttgatcatggtggattttctttttgatatgttgttgaatttggttcattag

SEQ ID NO: 8610 - DNA, 289 bp, Homo sapiens
aatttatggggtctatctttgaccacgtgataccacttacctgattctatgtactgattaatgtatctaacagttttatagtgaaagtactttttaaaaaagtatttgaatggtcatttctatttttccccctttgctgtacaagttaatttttactcatcttttgctgtacaaattaactttcatcaatacaaataagaggctagttttaagtcaatttatttgtcatgagcccaggaacaattaaattctataaagtaatgtattaaaatagtacactttaaaaaaa

SEQ ID NO: 8611 - DNA, 693 bp, Homo sapiens
  misc_feature (1)...(693): n = a,t,c or g
tttttttttagcattttacattgtttatttctgtttcagttcctgaggaagttgctgaaactaacataagtagtttaaaggcatttcgtttaaatacatgcataattttaaaattttccagtgcaacatgttaatgtatttctaaatctgcactgtctgttacagtagccattagacacatgcagctatttaaactaaatttcaaatcaatttcatcagtcacaccagttatttttatttttgatgnnnnnnnnnnnnnnnnnnnnnnnnnnnnnnnggacattctcagtggtcagaagttttgtttttttttaattgaactctaatcctctgggaaacagtatgccaatctataacaactcctagctattcaggacatttaatttcccatttcctacaggtatacctgaaacctgcctgctcctcccacactctgctgacatgcatctcttgaatagaaaaaaaatttctaagaaaccacccctgctcaaaatatggataaatggaattaaccttacattgtttaattttagaattcctatctgtacgcttacagctagttaagcatgaggcatttctaactatgaaagatccacactataagtgagaaaaaaaataaagatggttgcatgaatgttgcatagaaaaaccagaacccagagttatacaaaatagcttggagcaaaaagaagc

SEQ ID NO: 8612 - DNA, 185 bp, Homo sapiens
catgggattcttaaacgtgatcacaaaatcaagatgtttttatgagtgactaccagctccaagcgttatccttccaaacttgaaaactgaatttctgataaactgagttacccaggttctgaggcatctgtttaaaaaaaaaaatgaaaaatgaaaaacccactcagagattcagcttttttttt

SEQ ID NO: 8613 - DNA, 396 bp, Homo sapiens
aaacaggaaagctgtatccatttgccataatagatgaatcagaattgttttctattaaatatttcatcacgaaatatgatggaggccagaagctatttttaggcttactataacactattatgcatttttataaataagaagaaggctgtagaaagtacttgaaaaatatctaattctctttctgtctaaggaaaactctttctacttggtgcaataatctgaaaatttagaaggtcaaaatatgtcacaggaaatgatcatagacctaaaaatagtttttaaggaaaccagctacacggggcaaccaaccatcttgctgttgaagaaaacagttccaaaaggctaaatcattggcataaaggaaacaaaacccaaagtatgcgttgtaattcttg

SEQ ID NO: 8614 - DNA, 452 bp, Homo sapiens
attctctagtaaaactacaataaagattttttttaatcacatgcatggataacaatagaaagctccacgtggaagggtgataatctatcaatttttaacacatatttttcccctggaataagctttttggcaattttgttttgcttatttacaaaatcaggagacaaaaaaacaagactagtattcttgcattttatgttaggaaagatgcctgttaaaaacatacagtacaaccagtatgtaattgcccagctgtggatttctttttctgcacaggacatgaaatatcataaattactctagaagaaatagttccagaatgtttataaaattacactgcaacacaatactgcaagtcataagctagttctgctcccactggacagccttgagtaaagaaagaaagagctgaggaaagccacatattcctcctaaagtatgtccatctttag

SEQ ID NO: 8615 - DNA, 321 bp, Homo sapiens
ggtctctgaagacttcctgctactttctgggtccatgcccctcctctccgtcctccacttcccaccgggctcttcaggctccagccctagataacacccaggttaaattttgatctcccggggactgggtgtcgggagggaaaggcggggggagtgtcagagaggggatgggatttctcccaccacacttggggaggcctccggatggatatgtccttccagctgatggacctcaggattgggagaaagatcggggacaagagacgggcacaacagtcacctggtttctttttcttcctttattttttgagactgagtctc

SEQ ID NO: 8616 - DNA, 398 bp, Homo sapiens
cgcgcccctgccgcggcccctagctctctcctcagctccctcccctttccgggcaggcccgtcccgtcagcaaggcagtgagcaccgcggccagcagagggcggtccggacccaagtctgcagcggcgccattggcgtgtggaaaatgccaccagatggcgggttaggattgcagctccgttgaaggcgcggcccccgctcccgaacccccggcgaccaccccgtaacaacccccccacatcgggaataacacaccggagacttttggggggaaactaggtcgatggtcggcggcgcccggatgggcagctgaggattgcctttgaggttattttaaaagttttgagttgtacagcacttgattattttgctgcattgtgaaaggacctcttcagcaa

SEQ ID NO: 8617 - DNA, 373 bp, Homo sapiens
cctgatctaaaaagaacactcttttttagatttattcagctgaatctctcttgaataatagtgccagatgattactcaatatgagggaatagagaaggagagggggtgtcagctgctgggggagagttatataccgttaggaccaaagaattatagttggtgttcataaataattataatacagaactgttaagtagaagctagatcatgaaaatgatttttatcagcactggcttccagctctgatataactaaaacctatagttttagtggcacagcttcctgtacagaaagacctcagttcttttttctcatttatggcttgcatgttacagctcaataagggggaaagagctctgtttaggtcatccat

SEQ ID NO: 8618 - DNA, 1487 bp, Homo sapiens
cttcgagaatgcgagattcataatgtttgctgtctatatgcatggctgagtacgtgcctcccgcgtacgtgcgtggtgtgcatacatgcgtgattgcgcgcccacgtacgttcttcgtgaaagggatgacgggagctgtatgaaagcggaagagttatggaccgctaacacctgtcactggccactggtttcccggagttagcggcaacgaccttgcagcctggacactagccaggcgctccctcttctcacagcggcccacgtctccttgcttgggagcccatcgtcctggctccggtggcctcgctgggtctcggggaagcagaggactgttcattcctgtggcgaaaagccggagtcggccctagacacccacgactcgcagggtccatggttccggaggccgtgagaccggccgcggctgaaaggtaaagaaaccaagtggaagagtgtttcctcctctggccgtaaagcaggtactctctgcagcaccagctgtccccgccctactccggaccgccccaaagactccatgggatggacctgagtcagccgaatcccagccccttcccttgggcctgctgtggtgctggacatcagtgacagacggaagcaggagaccatcaaggctacgggaggcccggggcgcttgcgaagatgaagtttggctgcctctccttccggcagccttatgctggctttgtcttaaatggaatcaagactgtggagacgcgctggcgtcctctgctgagcagccagcggaactgtaccatcgccgttccacattgctcacagggactgggaagggcgatgcctgtcgggagctgctggtggagagactcgggatgactcctgctcagattcaggccttgctcaggaaaggggaaaagtttggtcgaggagtgatagcgggactcgttgacattggggaaactttgcaatgccccgaagacttaactcccgatgaggttgtggaactagaaaatcaagctgcactgaccaacctgaagcagaagtacctgactgtgatttcaaaccccaggtggttactggagcccatacctaggaaaggaggcaaggatgtattccaggtagacatcccagagcacctgatccctttggggcatgaagtgtgacaagtgtgggctcctgaaaggaatgttccagagaaaccagctaaatcatggcaccttcaatttgccatcatgacgcagacctgtatacattaggttaaatctgaatttccactgctttggagagtcccacccactaagcactgtgcatgtaaacaggttcctttgctcagatgaaggaagtagggggtggggctttccttgtgtgatgcctccttaggcacacaggcaatgtctcaagtactttgaccttagggtagaaggcaaagctgccagtaaatgtctcagcattgctgctaattttggtcctgctagtttctggattgtacaaataaatgtgttgtagatgacaaa

SEQ ID NO: 8619 - DNA, 524 bp, Homo sapiens
tagatcccttttcacttaaaagatcttgaaggttagtcctttgttacataagccacctttcttctctttaatttactgtataataaagttctattatatggaagttccatctttaggagtagaaatctttagctaatggtatctactgtgtcctcattatgtcacctaatagtttaaatatgccagtatttatttattggttttagtgttttatttaacaaaaccaggattgagttttatatactccactaagttctccttctttcatactttctcacattgctttattgagctgtaactcacatacaatacacttctcctttctgtagtatacaaatgcagggttagtgctcttccctttcaccgagctcttcagaaataaagtggatttttatatgaacattgaaaatgacacaatctatggcaataaatgaaaaattatcaatgttttcctcaagtctgaagctttgtgattggctagtcactgacatttataataataaactttatatgcattaaaaaaa

SEQ ID NO: 8620 - DNA, 121 bp, Homo sapiens
tggtgatactgaggctgctgttcctcaaatcatacttgggaacttattagaaatagtctcagcctcaccactattcccacttaattgtaatctgatattaacaagatttcccaatgtgggt

SEQ ID NO: 8621 - DNA, 380 bp, Homo sapiens
ggcacatcataatcaaaccaataaaaaccaaagacaaagattcctgaaaatactcagagaaaaataacatgtttcatacaggggaaatattactttaatggctgcacatttctcatcagaaaccatggaggctgaaagaactgtcaacacagtagtttatatccagcaaaaatatctttcatgaattaaggcaaaataaagacattctcagatgaagaaaaaataagagaattaaatgtcaacagacctgcactaaaagaaattttccagatgaaaaggactgatacctatgtaaacttggaacatcaagaattaaggaagattaataccaatgataaatattgtggtaaatgtgacagactgttttcctcttgggttct

SEQ ID NO: 8622 - DNA, 421 bp, Homo sapiens
tttttttttacgtaagtggcagacactttattgcacatgaaatttgtaatttttttctatttaagtacacatttggaaattatcctctgacttttggatttttaactaaatatgttggacgtgttcctttatatatttaagttcagcacagaaactttcctacctttttgtggaagataaaatattaaaactgctttcaaaactacaaattgacttaaactgctatagtaattttcaattaaatttcattatacctggagtttgaacgttaaggtttttatcatatactgtaattcaaaaatttacctaaaaatctcaatgtaaaattctttagggctcttattactatgaaatggatggaataaggagggggaacacaactagcaagaacaaaacattgggttggcaattgatatcacat

SEQ ID NO: 8623 - DNA, 639 bp, Homo sapiens
  misc_feature (1)...(639): n = a,t,c or g
gtataaaaaagataatagggtttattcctggaaagtaaggttgttttaacattagtcaaccagtgtaatcactcacgaacagaataaaggagaaaatccacatctcgatgactgcagaaccaatcatctcaattattaccgaaaaagtgtttgacaaaattcagcaccccctcatactacaaaaacctttcggcaaagtaggaatataaattcctcaatctgataaaaggcatctgtgagaaaaatctatacctaacatcatatataatgggtgaaatattaaagcaaggatgtctgctctcaccatttctgttcaacattgttctagaagacatagtcatacaatcagtcaagataaaagaaggcataaacattgaaacacaaggagttaagatagtcattagttgnnnnnnnnnnnnnnnnnnnnnnnnnnnnnnnnnnnnnnnnnnnnnnnnnnnnnnnnnnnnnnnnnnnnnnnnnnnnnnnagcttgttgtaaacattaagagaaatgaaatgtcttgtacagcatcggcacataggagccttctaatgaggagcctatccctgaaaaagtgaaagatatatcatttttctaatccttcgaataggataaactaagtttttgatctctctgagg

SEQ ID NO: 8624 - DNA, 468 bp, Homo sapiens
ggaccctacaacccacaagttactgcaaagctggggcttctaccagaagtgagtgatttgaaattgaaaacagatttcggatctcacctgagtagctcgagtgtaagggagggactgggagagccacagagaacatttgtcaatccagaaccaaccattcatggtgttgcttgactggagggcagggaaggaaaggactagaagcaaggcgaaagcagatctttctgtagatacacacatataagtcttggatttgcattttagggtgaattgtaattagcttgagatgaccaggggcccaccaatcaagcaactctgggaaaaacacttgtctacatcttaagtttctttgtctataaaatgtcaagattgaactaacactacatgattctctcgggaactcaccagttctaaaatttccactccttcttttcacagggcagtgtaactttaactccctgtttcaac

SEQ ID NO: 8625 - DNA, 383 bp, Homo sapiens
  misc_feature (1)...(383): n = a,t,c or g
cttgcctcactccaatccttaggttgttgctgtttcacactgaaaacagctttcttgttttttttttctgattatgtaaatactataaggtcaatataaaaatgaaaagaatcataaaaataagagggagaaagaaatgatcacctgaaatcccaccgccctgagataccctcattcttccactttttggtgattatcctttcatgcactttttatgttgatcagtcatatgagaaaagggtctgaactttgatcttcattgggattcaaatatcaaagagtggccctgaaggaggaacaattttaattagggacaaagaaggcctaaaaagagggtntgtataatcgtaaacaagngtcataatctaattgctggggtttga

SEQ ID NO: 8626 - DNA, 254 bp, Homo sapiens
  misc_feature (1)...(254): n = a,t,c or g
tttttttttaaatctccaaaatgcaacttacaaaggtgataaattgattacagtagataacagaacttcatttatctagattaattccaaactagtgatatatttgattttcagttttggttttctgcctatttcaaggagtgaagaaaacagggngtttttgtttttgtagttctgattactcatttatgcattggtttgtttaagtaaattctgcctacaagtgaaaaggtcggtgcgctcttctgtgcacc

SEQ ID NO: 8627 - DNA, 368 bp, Homo sapiens
  misc_feature (1)...(368): n = a,t,c or g
ctcttcatcctctgtctccagggccgcctgctcctgtagccgcagggattccagggcctcaagcttctcggtgaggtccttgtcgacctgatccttctccagattctgcttctgtagacgcttcactgccaggcccagctctgtcactcttctgcagtgacgcctgcctcatgcagcacccaccagggaccctcctggcactgaggtcagccttgtccaggtcgctttgcatctgctgctgggacaggtccttctcgtggagcaccttgtcccgcagctgctcctccagctgggcctgcttctccagggctggctcgacccggctctctgccanccgcaggcctgtgctcattcccaggccggctcct

SEQ ID NO: 8628 - DNA, 81 bp, Homo sapiens
cttggttctttcattcatctttttcgggtctttaaaaaagtaaaataaaactttggaatatctcaagggcttattaaagtt

SEQ ID NO: 8629 - DNA, 1212 bp, Homo sapiens
gcttggctttagtggaagaggtagaggaccgaggcactgtggttgcccagggaggcggcagggcgctgatcccgctggccctggaaggcacggacgtggggcagacaaaggcagcccaggcccttgccaagctcaccatcacctccaacccggagatgaccttccctggcgagcggatctatgaggtggtccggcccctcgtctccctgttgcacctcaactgctcaggcctgcagaacttcgaggcgctcatggccctaacaaacctggctgggatcagcgagaggctccggcagaagatcctgaaggagaaggctgtgcccatgatagaaggctacatgtttgaggagcatgagatgatccgccgggcagccacggagtgcatgtgtaacttggccatgagcaaggaggtgcaggacctcttcgaagcccagggcaatgaccgactgaagctgctggtgctgtacagtggagaggatgatgagctgctacagcgggcagctgccgggggcttggccatgcttacctccatgcggcccacgctctgcagccgcattccccaagtgaccacacactggctggagatcctgcaggccctgcttctgagctccaaccaggagctgcagcaccggggtgctgtggtggtgctgaacatggtggaggcctcgagggagattgccagcaccctgatggagagtgagatgatggagatcttgtcagtgctagctaagggtgaccacagccctgtcacaagggctgctgcagcctgcctggacaaagcagtggaatatgggcttatccaacccaaccaagatggagagtgagggggttgtccctgggcccaaggctcatgcacacgctacctattgtggcacggagagtaaggacggaagcagctttggctggtggtggctggcatgcccaatactcttgcccatcctcgcttgctgccctaggatgtcctctgttctgagtcagcggccacgttcagtcacacagccctgcttggccagcactgcctgcagcctcactcagaggggccctttttctgtactactgtagtcagctgggaatggggaaggtgcatcccaacacagcctgtggatcctggggcatttggaagggcgcacacatcagcagcctcaccagctgtgagcctgctatcaggcctgcccctccaataaaagtgtgtagaactccaaaaaaaaaaaa

SEQ ID NO: 8630 - DNA, 208 bp, Homo sapiens
ctcacgtcctatcttccaacttccaccccattatcacctaaatcaccaattttctgattaacaaaaatcacttttcatatctcagggtcttcactttcagttatttttaaagccttaaaaagttagttttctttttttctatttatacgcacaatttttttcccttctttgacccaacactgaagaactcaacaagacactcgctcta

SEQ ID NO: 8631 - DNA, 1225 bp, Homo sapiens
gacctttttgcagtgtatatccccttgctgtagtatctggtgtacttatgttcaaatcagcgcatcaactttgggggtgatttttaaaaatctttttgtctatctatctttttaaccctagccttctaaacaacctcatacagcccagttacataatgttggctgtcacgggcattgtacttttatctgatattgtttcctctaaattcagctttccagtgatgtttaaaatcttgtgaaaatgtttagatttttaacacagaccctgtcataaaatctgtacattagggtcaaaaggtaaaagtaacaaattctgccatattgtaaatttccagtgcaggctttaatttttttttttcattagtagcactgaaaaaatattactgcatgggtatgttctagttcagtttataaagttttaaaggcttatttgaggcatacctcactgttacgcacactggtaatttaaccatgcccctaagtattccttttctcctgcatttgatgcagcccaacaaagcttttgttttgaaataaatttgactaccctgtccatagctacagtatattatttgtggtttaaggctcctggtgtctcaggttccaaaggaaaagcttacatatttttcccttaatttgaatatatgattggttgggttaaaagataatgatctgtgtagtatttagataagctttatgctgcatcctgaaaaactcatggtgaacacagtcctttttccccatcactatggaccagcatttactctcactttgctcccttgggacaagagtttactgttaaatgttttcatttcacagagtctcaaggtgcaaataatttaaaagactgaattctaaactaattatggtactagagggccagttttatctttcattaagaattgcttgctgaattttaaagtttttttcatacaatttatcatagcatttaagtatctttctataacatagatactaacagttttgggagaatgccactggtaactggaaaggggagaaacagatctccccagggatgataaaaattagcactttacagacctttcaagtagacctaaacttttaaacaaaagtactcaaggcttttaaggaagcagctctgtgattaagctactgaccaagaccctcctatcactggtgtctaatccctatgttacagatgaagacacaggtttagtactttgcccatatagttaaattagtg

SEQ ID NO: 8632 - DNA, 189 bp, Homo sapiens
cctggattgatgagagaggagcagaattcaaacatttatctgcaatcctaatggttaaaattttaccaggaacagacctgccactctcttgaaatactgtctctgagattaacatacgaacagcatcatctctgttggaaggctacattcccttatgatgctgatttgtgtgtgtgtgtgtgtgtgtat

SEQ ID NO: 8633 - DNA, 396 bp, Homo sapiens
tctgcccttcatagcaaatcacccatttagcagctgaaacagcaccattttattatctcacaggatctgtgagtcaggagccagggtaccacagcctcaagggctctcaggaggttgtaactgagggttgttttttggggtccatcatcttggggtcttcttctgagcccactggttattgacagagctcagtgccttacctttgcagggccagggtccccgttctggccagtgttggctagggacacttgcagttcccagacgctgccagctcgggactctgttccaccgtggtggtctgcccctacagtgctgcaggctgagctgacatttgtccatattcagttattcgggccagtgggagaatcatctttcagaaagggtttggggcccggt

SEQ ID NO: 8634 - DNA, 312 bp, Homo sapiens
agaatacccaggtgagggtcatgtctgagaagaagcagagaaaaaaggtggaatcagaaagcaagcaagaaaaggctaatcgtataatatcagaggccatagcaaaagcaaaggagcgtggggaacgcaatattccacgagtaatgagccctgaaaactttcctactgcttcagttgaaggaaaagaggaaaagaaaggtagaaggatgaaatccaagccaaaggacaaagacagcaaaaaaacaaaaacatgttctaagttaaaagagaagacaaaaattggcaaactcattattacattgggtaagaaac

SEQ ID NO: 8635 - DNA, 295 bp, Homo sapiens
caaaaataatatatatttttactatcagctttcacctagttggaacctatgatctttaaaggtgggggtcttgttcagtgctgtatccccagtgcttaaaacatgcctgaacacaggagttgctatctgttgcatgcataaatgaactcagaacaagaatgcctgattttccaatgtccataccaggttttacacatctttataatctttgccaatccagtatgtgggaaacagtattcatttcaatttgtatttcttgagtataagtgaggtcgagtatcctatgatgtttttt

SEQ ID NO: 8636 - DNA, 435 bp, Homo sapiens
ggacggcagccatgcatccatcgctgaagggctgtggacatgaatgtgtatttcccatggtctccgctgcccacaccaacagtgtggcatctcataagttaactgctaccctaaggtaatctaagattaaaatgtaaacatttatttttgttatgtaagtttataagatgttttatgttcaatgcctaatttctcaaaagtgccagaaaaaaatgtatattagctattttgattttatgtacaatgatttatactctccttttgaaaagataccataaagcacataagctagatcactacaaggagctgttatcttttttctaatcaagtgtttaaaacactgatggtttttaaagactcacctttttaaatggtacttggagctcctgattcaaattacctagaccccctagagaaataaatggaatatacata

SEQ ID NO: 8637 - DNA, 1628 bp, Homo sapiens
tttggtattttgcatcgtgtatgcttgtttgaaaatctttgctcctgaagtaaatatttggcaaccacagtgattagcagttaaagcaatttcaacaaaataataagtcatcgaaaatggactatttgtctgaaagagcagtacctatattataaagattgaacttcatggctcattacaaccattttcaaaatttaactgcaactatcttcttataaattaagagaattccatttgtgttccatagtgcgatgacaaaaaaaaagtaaaaataaaacaaaaaaaaaccctcatgcctaaatttagaatattgtattgtgtagcaatccaaaacattcaaaacaaattaaatagtttaacttatgtgacaggcagataagcatttcaaaagcataatgaagtccaattatgtagtgcataatgtagacaggagaagaatctaacattatgcagacattttctaaataaaagctccctgtaggacagctatatataaacatgggtaaggtaagcgcagactagttctgtggaaccttttgaaatcaagagtctaaaacacaatacatttttcaggtaggcaccaagttatcctaaaaaattttcatgtcggttattctgacattgttttttcatcagatactcacatcaacaacacatgtgatttgccaggaaaaaaaaaaaattccccccaaaccaaaacaccattccagatccagtacacttaaatatatcactctcactggaagtgctattagcatagtctttgcaactagcccaaagcgtatatttaagaagtttttataaattgttttgtgatgttcatatgtttaattcttatgccaactgttttctgatgaagacagcattgtgctttatgcgagaatgaaaacctcaaaataatcaccataaagcttctaagacttatgggagaataaactaggatggtccacagatataagatgaaatccacaatgttggaattataaatgtttagagcggcccagactagaagacaagcccaaaccaccattagaagaatgaaatacgatatggtccaagatgtatccttaaagttttgtctcaaccctcagtctgaattgtgaggattgatcttcagttcagtccagccagcagaaattgactgtgcaattttctgttgtatttattgtacagactatgtacattctagaaggttcctttagtgctacactgttgtactttttgtcccagcaatttgagggcgtgcaaattccacaaagtcatcaataagaacaggccatgctccttcttcatcataattagacatgtcatctgcaatcatcgtactgaagtctaaaagaagattccaagtgtcttttggtattgatccgtttatgatgttccaacaaaaatttattccataagtctaagaatttaaatcttccattaagcactaagttccagtaggcaatggccatttctagatctaatcctttttgtcctggattctttgcaaaattaaaagtaaactggtaaaaatccttaaatcgtcctggttctttcaattcttgttccatcttgggtatctgggcctttagtttttctatgctgtcacatcctaattctgtcatggccatcatgaactcctg

SEQ ID NO: 8638 - DNA, 515 bp, Homo sapiens
taatagtaataacctttatttaaaatagatttaatttaggaaagctcattttatatgagtttccaactaattattagagtcagaaacaaagaaaataaaatcagagaaaatcctctgtagaaaaaatacacaaagaacatttctacatgtgaaaaaacagtaaacagtgttaacatccaagttattagtctcaattccacgtctcctagtgaacaccactatcaaccttgagatctgatttgttcttgtcattcttcactgagtagatgaaatatgttaaggtgtctttttcattcactggaatagacctaaagtggcaaccaactatctcaacaagttgtgctttattaagtcctggtctggttggtagcttgaagtgtcttttgtatctcctaagtgtatttacttgtaattggtataaatcaacctctggggtatcaatatcttgaacaggtgaatcacctccatcatcatcactcccttttctctttcttcccagagcgttggccaatgga

SEQ ID NO: 8639 - DNA, 474 bp, Homo sapiens
ttttttttttttttttaaaaattaagactggggtgatttattaatcttgttaagaactctgatacaaagcacagtaaaaggccacaaaccagtaaataaacaacgtggcttttggctactttacaactgctgctacagcactatcagcaaaacactctatcactttgaacgaaggcatccaaatggcaaataaaagctttactcacttatctgattaaaatgtttaataaagctttaagtatttgctggtttaaatattaccaatctaaaaaatatatttaaaaaaaatttcagttaacacgagatttatagagaaagttactaggtcttgaaggcaaggcagttggttcctatgccatagaattttttttgaatttatgaattagtaaagtagcagattgtattataggcctcaagtcacttaaatttatataggttattagcagtatctttaaatatacaatataaacaaaa

SEQ ID NO: 8640 - DNA, 424 bp, Homo sapiens
  misc_feature (1)...(424): n = a,t,c or g
gtgcccacattgccctggagacgttagagggccaccagagggccatcatggcccacatgactgtggaggagatctataaggacaggcagaaattctcagaacaggttttcaaagtggcctcctcagacctggtcaacatgggcatcagtgtggttagctacactctgaaggacattcacgatgaccaggactatttgcactctttggggaaggcagcccnaaaagatgcncggattgnagaagcanangncnntatagatncttggnatccatnnnnnctantgccaantattganaangtgtnttggtcntntcctgctttnagaactntnntngnnntcnnttcnnagntncttnttnctnnantnaangnatgcttttatttnnaaagtnctttnntttnnantttcaatntggtantgct

SEQ ID NO: 8641 - DNA, 742 bp, Homo sapiens
  misc_feature (1)...(742): n = a,t,c or g
ctcaaatcaataaggagctttttattgagaacaacttcattaagacatttgcagggcaaatatgccatcataaattttattctgaattacaataaagtgctgaatgataattacctgaatcttttttagtacttttcacttatcttaagttaaaagagccctttctgtggcattagcaaatctgtnnnnnnnnnnnnnnnnnnnnnnnnnnnnnnnnnnnnnnnnnnnnnnnnnnnnnnnnnnnnnnnnnnnnnnnnnnnnnnaaagaaaaagctaacttccagtaagggaacaggaagcactgcaacctttcatgtttaactggggtgacaaataattgagaccaaagtaatcaaagtaattcatgcaagttatctttaaaggtatacataagcttgaagaaagaaagaacactgttactgacctttgatattatggcagtaaattgcatacgtaaaataccttaattatcctagatgcctagatctggcttggcaagcatcatgccactgacatgctttagctctttttgtaactaaaagtgatttgcagttcaattactgagtatttcaatgtgactcattaagctgtgtgatgaactttgaagttaaatttaagcaaattctctacacctaatcacaccatcagcacaagcaggacaatctggagcagcatgaaaggtgggtcactttaaaaagattcttccttttactgcatgatatattaagatgacagacctaaa

SEQ ID NO: 8642 - DNA, 346 bp, Homo sapiens
  misc_feature (1)...(346): n = a,t,c or g
atccaccatgttttaacagatagttggaagtgggtgtgctgggtattgagaaccgtggtttcctcagctcaggctctgctggtggtggtgatagagggtagtgactgcaaataggtacacttttatgttaaagacaatgttattacccatgtgccnaggagatgaggatcctgattatgtggcaagcagagttacaaatatgtcagagagggctgcattatggtgtcattctggggtcagtgtagggactggaccttccaaatagagctagtccagagtcgtnccagaccntcctgaagcctctggactgtttcccctgtatgtttccctgaaacgcttgagagga

SEQ ID NO: 8643 - DNA, 573 bp, Homo sapiens
gccagcctcaagttggggttggataaggctgtgcttcaatccatgagtggtcgggatggcaacattactggaatccaacagttctctaagaaggagattgaagatcttttaagaaaaggagcatatgcagccatcatggaggaagatgatgaaggctccaagttttgtgaagaggacattgaccagatcttgttaagacgaactacaaccatcaccattgaatctgaaggaaaaggttccacctttgctaaggcaagctttgttgcttctgaaaacaggacagatatttctttggatgaccccaacttttggcaaaagtgggccaaaaaggctgacctagacatggatctgctcaacagcaagaataatttggtaattgacacacctagagtacgaaaacaaacgcgccactttagcactctgaaagatgatgacctggtggaattctctgatttggaaagtgaggatgatgagcggccacgctcccgcagacatgaccgtcatcatgcctatgggcgcactgactgctttcgggtggaaaagcatctcctggtatatggttggggacgatgg

SEQ ID NO: 8644 - DNA, 377 bp, Homo sapiens
  misc_feature (1)...(377): n = a,t,c or g
tttcaatccccttttctcaaataataaattatttaaatcagtttctgagttatgccactggctgatgaagagttgagaggtctctttgcagaatgatctttttgtttcgttttgtttcttcttctgcatttaaaaattaaaagattggtttgaggatgtgatgaaattgagactttttgtgggtttctctcaataataagtgaaccaatttcaaatgggatcacaaagtttggaaagcttttattcacagaggttgggtagtgttgggaggggagtttaattactcagatcggcctgnaatttgattncctcctttgggaaaagaattatgtagataccacatggagacagggaaacaattgtggtaaaactgtgga

SEQ ID NO: 8645 - DNA, 327 bp, Homo sapiens
tcgggatccggcgcggggagatcctggaggtgatcgagttcaccagcaatgaggagatgctgtgccgggaccccaaaggcaaatatggctacgtgcccagaacagcgctcctgcccctggagacggaggtgtacgatgatgtcgacttctgcgatcccctggaaaaccaaccactccccctgggacggtaagaccggtaggcgtggggccaggacagccagccagcccagcgcccgctcacccaggagccctggatcccggcgcgggaaagtcacagagctgcctgggcttgtacctggccacataaagccccagtttaaagcaaaa

SEQ ID NO: 8646 - DNA, 773 bp, Homo sapiens
aattgtattcattaaaaatatttacatttcccagtacttacttgacaaaacccccttgcaatataattctactctaaacttttatttataaaatgaggctcacttatgacatttccatggactgcgatacctgcaaaattacttacattctgtaaaatatcttacgaactttcatatcaaagggtaggtttatattgggattatctggaaacccaataggaggcccacaggatgaggcttcctatagttcttttcattaatgcttggaaagcatgtgaacatggaaaagtgctgttaagtgcctatcatctcccttaaattttcacttatactgtgtgcacattgtgaaataaacacatatgcagcatgtccatgttttgatatgtattttttatttccctgcagttttcacttatcaagaacaagtaacagggaaagttgtctgaactagtgcataaacaaacattctgaaacaccactacacgtatctaatttacaagaaccgtataaaaaaagtcactaaaacactacactatgaaggtgtccaacgcttacagtcagactttttccaacccgttacttgccttgtagccacaggaaaactctccaaaattgaaaagacaatcttgccacaaccctccccccgcccaacacctgggatggctcgatatctagacttccaataattattgcaatgatataatgcaatacatacctggtaaagtatcttttatgtgatgtgttacagttttaaagccagttaaaatatgcag

SEQ ID NO: 8647 - DNA, 449 bp, Homo sapiens
ttttttatttttttgaaaaaaagggattaatttattttacaattttacaaatgataaaacaataatacccggttgctatacacaaacaataagaaaacagtgttgaacagaatgaacttgaacttgacagaataaacctcatctttcagttccacaaattctataagaaatactcagtagcaattattctgtgcagcaatgctatctctgtaaactctttttttttcctgctatttacatttgaaacacttgtgcttttgcctacacaaagaaacggtttttattaaaaggtgctacttaaatgagaaacacaaggcctggagccacaatctgaaaactgtaattcgaatacattgctagcttgaagcctttacttttcttctttattattaagatttggacatactagacccttactgtaactctacgtatgaacgacatagaattca

SEQ ID NO: 8648 - DNA, 620 bp, Homo sapiens
tctctgagtctgtcttattgagtagttagcagtattttttcctaaaattcagaagtcatctttgttacacaacacaggggttcaggtagcaataggacacaaaattgctttattctacaactgccagctccaggcagaaataggaaggcaaagagataagagaaggaaaaatgagagaatgaagtctgtatagggtagagcaatagaaagtaagcttcgggtgcctccaacgttcatggctgcctgtctcattggtaaacctcacatttagttacttgtggctactgcccacacatacacttctgtaattgagaactcttaggagaggactagggaatcactggggatagtgggctggagagaaccccaggctttatatgtatactttgacctcagtgttaattttaaatgcttatgaatcacacacattgctttagtaagattaagtgcttatatactagaaatttgatgctcattggaacacatctgcctagcatttctgtaaaagtcttaagtgatattaaggatgattccttaccatttcagatggtccgcaatttgaattaccaagtggtaatggttcctttactgttttaggatggtgcctgtgagataccatt

SEQ ID NO: 8649 - DNA, 405 bp, Homo sapiens
aaaatactaaataagagtgaaattatatttttgaagcctcttaaattattgctgctgagaaaacgaggtttagtgattttcaaattacatgtataaaactaatgaatgcctctgactgacagaggtttggctgtaaaaaacaaatcagttttatgtgacaccaataactattactgtttcagtgttttaaaacttgccccaaattgtttctgtagctgtgtaaactactgtattttgaaatgggcattaaataatcttttaaaaaatgaattattacagtgcactactagacttcaagtgtgaacatgactcatgcactttacaaacattgaagaagaataaataaattatgggatagttgacagtcttcatttcaaacactgtttttaaaggaaaggataaaac

SEQ ID NO: 8650 - DNA, 736 bp, Homo sapiens
gtttggaatcatggtgatggtgtttggcgtcataagtgggatgtcatctggcgaccggcgcagcgtgagggtgtagtctggcgggcaggtgagcctcagtgtgtcgtgtgcctgcagcgactcacactcgtgatcgtgttccagctgcttcatctgcagagacatgatctcttcgttctggatgtgagcgatatcatttgtggtgtttctctggggactggggcgcctgtgagtctcatggcgcctcttgtcctttttgtagtaccagcgccgcaaaggctaagatgttgaggaagaggagcgacgccccgacggcaatggtgacacttaattcggtggaataatctcgtttggtttcaatgaggacagttgtgtcctcgggccctgttttgtgagggtccttagagtgtttgggattgttggcaggagtgattgctgggcgtttggtggttggccatatcttggcgggagatcgccgggtgccatagggaaatgatgtcatgtctggtggaggaacctttgtggttgttgaaacatactggaatatctcgttcaagttgtgcaaatgaggaaccaattccaaccagaaatgccactttcgttgcccggtagtgatctctcactctgggtttcaagccaatatgcagatagagctggtctttgggattatacttggaccaggccacttcttcaaagcgattgggttttgtatgaatgaacttggtatcctgaggaa

SEQ ID NO: 8651 - DNA, 487 bp, Homo sapiens
  misc_feature (1)...(487): n = a,t,c or g
gctcgacgaaaaagctgatggtcctgtccaaaggctattaggcaggaagaattctcttagggcagagttagctcttttgttctattcaggccttcaactgattcagcannnnnnnnnnnnnnnnnnnnnnnnnnnnnnnnnnnnnnnnnnnnnnnnnnnnnnnnnnnnnnnnnnnnnnnnnnnnnnnnnnnnnnnnnnnnnnnntaatgtttgaccaaatagctgggcatcttgtgacccagttaagtggatacataagattaactatcacagtgactcannnnnnnnnnnnnnnnnnnnnnnnnnnnnnnnnnnnnnnnnnnnnnnnnnnnnnnnnnnnnnnnnnnnnnnnnnnnnnnnnntgctgaatcagttgaaggcctgaatagaacaaaagagctaactctgccctaagagaattcttcctgcctaatagcctttggacaggaccatcagctttttccttgccttcggacttgaattaaac

SEQ ID NO: 8652 - DNA, 202 bp, Homo sapiens
gacctttaacatctacattggtgaaccatccagggctttagactcctacctacttctatgtctacctcatctttagtcctttacttcagctccaccatatccagattacattctggatctagtcaccagaaattctatgcactctgaactcttgatttctagcgtcccactttgtaaccactgctacctcccgcttattgtg

SEQ ID NO: 8653 - DNA, 292 bp, Homo sapiens
catggagtcagggacatgtttaattcatttgtgaatcccctggtactggcacatagaaagcgtcccatattatctgcaaaatgaatgaatgaataaatgagcaagtaggtgaatgaatgattctgaggtctcctccagctttgatggcctatgaccgtgtgactcctgcatatgcatgaacacacagacacagacactacacacatgcacagacacacatacacacttggagcaaagagggatgaagcctgccacactgcaggtggtcctagctgcctgacctcccttcctt

SEQ ID NO: 8654 - DNA, 1620 bp, Homo sapiens
gtgagaccttatctcaaaaaaagaaaaaatttgaaggaaaaaattattcaaaatttatcacctagagagaaccaactattaacattcttttaaactctcagtcttttgttctgcataaattttaggttttaagaatgatttttctttctctcccagtcatggcacagattgaaaaacaagagagatttgaacagtatactacctgtaagagctgctgtcctgaaaaggataactggcctctatttcttaataaattcttccaagaaataaagaacaatagtttcatcataatacattatgtttacctccatcatagttgcttttttcatagttcttgttttcatgttttatttttaaaaagacatataaagattgcatattttattatgacatttcctaataaacccctttgatttaaaaatgtatttttaaaaatgtttacattgatgatgagtaatattgcatgtgttttcaggtgatcagataaaatatattttgggaaattaactgaacaaataaaaagtttttgatataacttcaattaattgtaccacatgctaatcctgaagagatgtgtagaattttggaaagggtctaattcatacatgcttaaagtataacctacgttagatagtttgttgtcaaagtctgttctagtaaagtgaagattcaagtcagttgttcagttacttgaagcaaaacgaaatctttcatttcagtcaaatcactgcagtcatgaaatactgaacaattgccttaagtctttggcttgactcactgggatagactggaggctttgggtgtgtctgtattagcatttcattagtacttcacatgcttttgatgtactcttgagattgctttaaattttgtattgaaacaacaatacattttgcactgtagtaatgggagcactaactcttacaacagttagtgaatcgttttaaagaatcagttcagtgtagacattttgaaaagattgtttcctgtgctttacgatagcttagtgcaatgtgcacttctgttttacttgccattttcctgctctgttttctctgtgacatgaagcaacagaaactgagatcaaagttaagattatatcctgtttgtagtatcagatatttttctgtgtacaattataggattgtaatctaaactggaatttttaggcagtaagtcaccacaaaatgttttagataagacacaataaaattattataaataaaagcttaatgtttgtaaaaaatctcttttttagtatttcttttttcacatgaaagaagtggtggctgctaaaaaaaaagctacagtgtttattaagggtctttttgatttatgtaaatatttgtaaattggtcagtgcctgtaaatttaaatataaaaagtaaccttgaaaacagttttaactttttcaaaagaactatgtccaacattttttagacctgctgtagtacagttttgtacctctaacgtatttttttttttgcagaccaaatgctaaaacttttgcttttctttgacttgtaaaaggtgcacattttcattttcttccttaagttcaaatttttgtatgatgtcaaatgcaataaaatttatatatggaaaaaaaaaaaaaaaaaa

SEQ ID NO: 8655 - DNA, 402 bp, Homo sapiens
ctgaacttccatactattaactagacacagaactgcgcagcaggatgccctgctgtgtgcattccagatatagtacatagctcagctctcaaatcagcaacaaagaagataagcacaccaggtccacatagcagagaacttcacattatcaagtttctatccaaagcttcaaagaagcaaataatattttgaaagactatgtgataaaaggatcaatttttagaaagtttcatgatctgtcatgggatcaatagtttaataaaaggacactggaaacttgggatgttgaaggcaaatgtcaaaattgccccccaagtttcctaaatgcttactcttcatttctggtacttaatgtggacttggatcaaatagggcatgaaccagcattggtccgtggactgc

SEQ ID NO: 8656 - DNA, 528 bp, Homo sapiens
ccagcctaggaaggacgctaccttgtgctgctaaccaccaagactgctgctcgtacagcaaaaaaggatggactcatcacacccgagtcaagaaagcaccacctcctccagagtcgtgggccatagtcccaggggaaaaccctactaaactaaagctaaaaaaaatttaactcttttcatctattctattactcgttcttcttttcgcgctctattgctgaccatctagttattaacataaccaagtcaattttgcctcaaactactgcatttaatgcttgccttgttataccctgtggggacttgccaagtcaaagacagctctctacttcagaaaagtacccctgtccctcctgactctcctcagactgggcattagtaaattaggacaatttaatccgggaaaattttgataaagactccagtgtcaaccaggagtcttgccactcaatgtagagcttttatgccatagttggtccaacgttctgtggaccactaaagagcaaggatagactgccccaaacagtt

SEQ ID NO: 8657 - DNA, 486 bp, Homo sapiens
tttttggggtgcatttctagtggactttattgtcctgctccaacaccacagtagaaagggacctgcaagctccaagcctgtaccatgtgtcaccacagcaaaaacatgacccacttgaacacactcctgtcccacccaccggataaatatgttacaatttaaaaaaaagaatacaacagaataaattaataacttaagtgattaggcaccaacagtgatttgaaaattaaatgtcaattttaaatggtaacaagacaagaactcaagactgggcttccactagcccattttctcttcctgacaaacagtgacaattctgcgtgaaataattctagatttcaagacacaagtagccaacaaatacacaacacatgccaccataaatcacatgacagcctggatctcttggggaccccctcggcaggtaccccattgtgggtcccaggtcctaaacagcagggctagtcccagaaagacgacccccca

SEQ ID NO: 8658 - DNA, 306 bp, Homo sapiens
tgaaagatcatttcatacatccccaaacttaagtgaatcaaaaccattcaaaactcatgataatctctcacagaatgtgattaattatctccaggagagggagatggaacatgtttcctagaaaactcattctaatattccatgaccttcactctcagataatttttctaattaagtactttgcatttgaatttgaacccatgttttcatttttgagttggagaccaaaatctgaataacagccatttctattgttgatcacaattgtttatttatccctcagcatcttcttccaactggaaacag

SEQ ID NO: 8659 - DNA, 578 bp, Homo sapiens
ttttttttttttttatttttaaaaaagactttattctctagacaagacaatgaaaccatcttccttgtatagagggcaaggaagttgcataaacgcagaatgtttcagcagctttgggttcactcatgctcattttcttcttagcaatcagcatgtgaaactggaggacacaaaagcattaacaactcccgcagtgccagaaaggatgagttaccgacatcaaaggaagatgaaggagaagtacttcttgacccatgccatgctgccacagtcccctaaaggcagaagtataaaagcccgagtgcatgatgttattctgagacaaccatattccagccaaatgcacattaggctggaagtgatctcaggaaaggaatcaggtaacagctttccatgtgatcaatatgaaagtcaattgccatttatctcaaaagcatgaatggaatccgttagaagcattaccttctaacaatgggatttatggcataaatgacatataagaaagcagcacatgccttgcttcattctgagccaatggaagaagtataggtagaaaaggattaccaatagcatcctcg

SEQ ID NO: 8660 - DNA, 1328 bp, Homo sapiens
agcgctgtgtgccagcttgcaccaccgagctctggacgctgaggaggaggcctgtctgcacagctgtgctggggaagctgatccattccaaccaccgcctcatggccgcttacgtgcagctcatgcctggccctggtacagcgccgcatcgcagactacgaggctgcctcgggctgtgccaggcggttgctgctgaacagcctggggtctctccatcaggcagctagccatacccaaccccaggaaggaaggccttggatggaccctcagattgaaggacccggtggacctttggggttggtgaatcctaaacagagagaattcgaggttgcctgaaagctgggtgtccttgctccttttcctggagccaatatacccagtttttactcagtttgatttatattctgggcaaggaagctttgcctactttattggcacaatccgttgttctgtcgtttagtgcatatctgctggcttcagcctcggcagctgagaaattgttttctatatgtagaaggaaaacctgagcatttgcaggcatctggttaaagcagggtctgtgtgtacaattttaaaacgggtaatatgtcatgctcttagttcatcttcacaacaaaactatgagtaagcggtattagcctcacttaacagatgaggaagcaagattccagaaagtaccagaaggtcattttatacaacaggagattggttcctgcccagatgacagaaaatgggagctctgtctagttgtccttaagtctgactgacttcagtggctcataaccgtgagccaagtatttgttggttcataactgttgttttgtgaactatgtcttacatgtctagagttctgctggatctagggaaaggaggagctatcgaagtacaacggatcaaaaaaccacagggcttttgggcactgcctccttgggaagttagtggccacagaagagagatgaaacctgtaagaagtctggagtcttttggaacttcagccatttccccaggttgttactttcttagtatgtacagtcttctcaggatgagcagtaaaacctttgaacaaaggtctgtgtggttgtcttcacgggcaatcaggaagggagagagctggggaccatattctgcaatgcagccaaatccgaggaagagaaactgaagggagaagtagatggcaatggttatgataaaaagggataaaactaaatcttcgggacttctttaatgctacgttaatgtttcactgctcgtctagaaactcctaaatccagctttctatcatctgccccacattggtccccttgagtacattctgtgatttctaattc

SEQ ID NO: 8661 - DNA, 439 bp, Homo sapiens
gttgttcagtatgtttgaagttacagggatttctgtgttttccttttgaaatagttctgttttaaattatgtaaaatccttgaaacaataagttgtttcaaaaaaaatacactaaaacaagatacactcaaaaattcagtttccatcctttccactctacatttttccttcctctccatttttattttttgattatcctttgttgttcttttttaaacggtatgcgtatcagtgtatctgaaaactgccaccttctaacatttaaggtagtagacagtatatatagatttgaaccttgctttttcacataatagacagttgacgtcattccatagcagtacacagaaactcatctttggtcttacaactgcataggtactctagtcctctattgacaaacgttgggttgtttcagtcttctgctatcacaaataatgct

SEQ ID NO: 8662 - DNA, 501 bp, Homo sapiens
tgcttccaaataggtgaagcatgctaaaagagtctctgatctgccgccttgggggaaaaaaaagagaagtcctttatttctttattgatcttatcttatatctggtggtcctatccattattgaaagtgggctattgaaatctcctactattactgtgttgatatgtatttatcccttcaattctgtcaatgtttgcttcacatatttaagagctctgatatttagtgcataaatatttataattactatatcatcctggtgaattgaccctttaatcattatatagtatccttcttagtctcttgtgacagtttttgacttaaagtctattctgcctcatattagtatagatatccctgctgtcttttggttattgtctgcatagcatatcttttttcatccttcaagttcagcctttatgtggtgttagatctaaagtgcttctatgcagcatatcactggatcctatttttattttttttatccatttagccaatatg

SEQ ID NO: 8663 - DNA, 507 bp, Homo sapiens
cctcggttccgttgcgtaggttgtccctcagtgggacactgcagggtgcggggacaactacgaagatggcggttgcgcgcttggcagctgtggcggcctgggtaccttgtcggagctggggctgggcagccgtccccttcggtccccaccgtggcctcagcgtgctgcttgcacggatacctcagcgggcgccacggtggctcccagcttgtagacaaaagacgtcactctcattccttaatcgaccagaccttccaaacctggcttataagaagctaaaaggcaaaagtccaggaattatcttcatccctggctatctttcttatatgaatggtacaaaagcgttggcgattgaggagttttgcaaatctctaggtcacgcctgcataaggtttgattacttcaggagttggaagttcagatggtaactcagaggaaagcacactgggggaaatgggagaaaaagatgtttcttttctattatttgatgacttagctgatggggcc

SEQ ID NO: 8664 - DNA, 701 bp, Homo sapiens
tttttttttttacagttctgctcacggccatgatttattacagtgaaaggatacaaaacaaaatcagcaaaggaaaaaagacacatggggtgaagtcaggggaaactaagtgcaagcttccaagaatcctccgccagtggaatcacagaggatgagcttaattctcccagcaaccagttgtaacagcacttgtgaaacactgtcaaccagaaaagcttgttagagactgagtgcctggggtttttactgggagctggtcacaaaggtagtctctgcctggcacataccaaaattccagactcccagaaggaaagcaggtgttcaggagaaactatattgttttacagtttagatatagtaagctactttgatcagttctgggaatggtggaagccccctgaactccaagttcccagatgccaatcaagggccaaccttgtaaagcaggtctctaaggttaagtagtcaggtcggcttcattaacacttttttctgcacagcaattttatctcaacattttttcttcaatgcccataaatactcagtttcttgaattgtactttgaaccaggtttactatctgctggtttcctcattaatgagtcgaataagtcttcgacactgctccatctcatacacatgtatatatatgagtcatgttgtcaacttaaaaggtttgacagataataacctaatcaagct

SEQ ID NO: 8665 - DNA, 744 bp, Homo sapiens
  misc_feature (1)...(744): n = a,t,c or g
gcggtggagatggcgctggaggacgtgaatagccgcaggacatcctgccggactatgagctcaagctcatccaccacgacagcaagtgtgatccaggccaagccaccaagtacctatatgagctgctctacaacgaccctatcaagatcatccttatgcctggctgcagctctgtctccacgctggtggctgaggctgctaggatgtggaacctcatttgtgctttcctatggctccagctcaccagccctgtcaaaccggcagcgtttccccactttcttccgaacgcacccatcagccacactccacaaccctacccgcgtgaaactctttgaaaagtggggctggaagaagattgctaccatccagcagaccactgaggtcttcacttcgactctggacgacctggaggaacgagtgaaggaggctggaattgagattactttccgccagagtttcttctcagatccagctgtgcccgtcaaaaacctgaagcgccaggatgcccgaatcatcgtgggactttcctatgagactgaagcccggaagttttttgtgaggtgtacaaggagcgtctctttgggaagtagtacgtctggttcctcattgggtggtatgctgacaattggttcaagatctacgacccttctatcaactgcacagtggatgagatgactgaggcggtggagggccacattacaactgagattgtcatgctgaatcctgccaatacccgcancattt

SEQ ID NO: 8666 - DNA, 357 bp, Homo sapiens
  misc_feature (1)...(357): n = a,t,c or g
ctgtatagtatgggaattattttctatgttaaatagaaactgaatgtactgggtgaatggtgtcctctccaaaattcatgtacttcctggagnnnnnnnnnnnnnnnnnnnnnnnnnnnnnnnnnnnnnnnnnnnnnnnnnnnnnnnnnnnnnnnnnnnnnnnnnnnnnnnnnnnnnnnnnnnnnnnnnnnnnnnnntccttataagagaagatagggcggnnnnnnnnnnnnnnnnnnnnnnnnnnnnnnnnnnnnnnnnnnnnnnncaannnnnnnnnnnnnnnnnnnnnnnnnnnnnnnnnnnnnnnnnnnnnnnnnnnnnnnnnnnnnnnnnnnnnnnnnnnnccatgcgtgg

SEQ ID NO: 8667 - DNA, 884 bp, Homo sapiens
tacttaccagtgtttttcagagaacaaaaattttaatttgatgaagtccaattaattaaatttttaaaatagagtgtgatttttttgtcatgtctaagaaactattgtctagtcctaggtcctaattctcctttgtttacttctaaatgttttattattttacatgttaacgtttagatttatgatctattttaagttttttttaagtatgaggtttatgttttttgtttgtgtttaggagcatatggatggatgtctagttgttccagcaccatttgttggaaagactatcctttctctgctgaatttcttttatatctttgtcaggaattagccatattggtatgggtctatttctagactttttattttctcccattgatctgtacatctctccttttgccaataccacataagtcaagatgactatagctttgtaataagtattaaaatctggtaatataattcttccaattttatttttcttttaaaattattttgactattgtatcagtgttacctttccatttaaattttaggattagcttagctacaaaagtcctgctgggattttgattagaattgcattaaatctatagataagtttggggagaattaacatatttatgatcgccttttaatccgtgaacatgacgtgtctctccatttatttgcatgtttagtttctttcttcagcattttatagttttagcatacagatcttgtacatattttcttagatttgtaactattttcttggagctgttgtaaatggtattgtttttctgatttttggtttctacttgttcattgctggtgtatagaaatacagttggcttttgtgtcggctttgtatcccgtgatgcaagtaaagcagtactgag

SEQ ID NO: 8668 - DNA, 263 bp, Homo sapiens
gaaaactgattactatgattattgttattttgatgacaaataatattgtgaaattttggatacatgagcaccagcctttctgtacatctgtatatgtaaacttggctagctcttttagtcaaaaaatgagccacacagcctaagacaattactgcacagaattatggtagaattacaactcagtgggctcataacttggtgcataataggttggcctcatttgttattgggggaaattcagccagatattgggcaaaattcac

SEQ ID NO: 8669 - DNA, 294 bp, Homo sapiens
gcagaacccccagtcgccccctcaggactccagtgtcacttcgaagcgaaatattaaaaagggagccgttccccgctctatccccaatctagcggaggtaaagaagaaaggcaaaatgaagaagctcggccaagcaatggaagaagacctaatcgtgggactgcaagggatggatctgaaccttgaggctgaagcactggctggcactggcttggtgttggatgagcagttaaatgaattccattgctctgggatgacagttcccggaagggcctgagcgggtccatgccatca

SEQ ID NO: 8670 - DNA, 1291 bp, Homo sapiens
tttttttttttttttttttcatcttttaactgtttattgtataatataaaactacaaaagtaagactgctcatttccatgtacatttaatctgtccaattgtttagattacagcccaaacctacatgtgaatacagccatctgggttccgatgtaacgtctgtaatattgcatagaaaaggcacagctctcaggtctgtgggggaaaggttatacctcctttttgacaaaagccctcctcaaaaaccatggcaccaaacatgtcactatggtacatcttttttcaaaatctcgggtcatgcgcacatatggcctgcatttctcttcccaaaacttggttatcccccaaaagaagtccaactttttattggctttgtctgcaatagcatttgatcctggctaattttcaagaaccattcagactcattcttagaaacactgaaaacaattgtacataagcaggatgcacacaactccatgcctccaggtgcgggggcagttacaggaaggtaaccatttacagccagaaaaggttaaatatactcttttcattgttttcagaaaatgtataaaggtccaatttgtaacagcaaggttttcaaattaagacaattcgtatagagtagcaattgctgcacgaagtagagtcttttttttttttttttttacatttgtcatttaagaaggctgccctgcggtattcataattcattgtttaccacaaaggtggttcataaatttaagctttaaaaacgatctgtaagttgatactttggctctttggagcttatttcattaagaaattttccttgattgacctcagggcagctggggcactccaaggggctatggcgataaaaagctcaattggtaaagacactcgagaggtgcagaggaggctctggccactgctcaccctttggtatgaacaagggtgcccatgtggttgccccttctgtcatccagagaaagtgctactaaaaaaactttaaaaaatatcaaccctttgatgcttttcttaaaaatttgggaggtattaaaacattcctcataccttttgcatatttcaaatagacccatattagagaagagtaaaaatgaatgcggactgtgcatacaatgagaagacctggggggcctggcttggacccccttttaatacagagttacattcctacaagagaatacattcctaccatacattctgcacatgttacgatccagatgttagcgctccacagtaaaataaatatatttacacagaaaaaaggaataaataacttatgggggga

SEQ ID NO: 8671 - DNA, 670 bp, Homo sapiens
ataaatttagaattataccgcaggtcttcctggttctattgaggaattatacctagaaaataaccaaattgaagaaataactgaaatttgtttcaatcataccagaaagatcaatgtcattgtactacgttataacaaaattgaagaaaataggattgctcctttagcctggataaatcaagaaaatctagaatccattgatctctcctacaacaagctctatcacgtcccgtcctatctacccaagtccttgctgcacctagtactccttgggaaccagattgaacggatccctggctatgtgtttggccacatggaaccaggcctggaatacttgtacctgtcatttaacaaacttgctgatgatggcatggaccgtgtctccttctatggggcatatcattctctgagagaattatttctggatcacaatgacttaaaatctataccacctggggataccaagaaatgaaagcactacattttctgaggctgaacaacaacaagatacgggaacattcttccagaagaaatttgcaatgctgaagaggatgatgactcaaatctgggaacatcttcatcttgaaaacaatttatattaaaattaggggaaataccatcttacacattttccatgcataagatcatactccaagtatcgggtccttaa

SEQ ID NO: 8672 - DNA, 307 bp, Homo sapiens
cttacccctttattcatgtagttcctcctatcaggaatatcctgcccactctctgcttaactatgacaagaggtcatctgtccaaagagaaagaagagagtttgtggatttaggagaaaagaaaagactccaaatactgctatgggcatttatttaaaaagagaaatgaccaaagaggttaacaagtatttagatgaagctgggcagttgtagtctgtggtgctcttggtctgcacaaatcttcctcttcctccagcagtgctgtatggatgttgttgaatgttgaggtctgtctgcattttctcat

SEQ ID NO: 8673 - DNA, 1103 bp, Homo sapiens
  misc_feature (1)...(1103): n = a,t,c or g
gtagccaaagtaaaaagatttatgagaagaataaggactctgctatagatctggatgttggtttcactttcaaacacaaaaatagtttctttttaaaaaagtacagtagaatatcctccattcataattgtaattaatttagcataagcaaagaaatgaccttaggaacatacccaggttttaagatagatttctaggtaatgggcctgaaaggcattttgatctgaatttattttccaacgatttcaaatataatttgtcatctgtgtgtagacatatacgggcatgaacacacattcacccacacatacgaaaacacttagctttctatcagatcagggtaatttttttattgcaggtctcttttaatattggctagcagaaaacctatccccaacctaacagatnnnnnnnnnnnnnnnnnnnnnnnnnnnnnnnagctatttttccacacttcctcacagtgaaaagctctctaacaagataccagaaggtcgaagagagacaatgcttttatggctgggccttgaggacaattctggttgcatttaaatctcagtgccaaatgcactaggttccctgccgttataatttttggatcagtctcttctgaaatcaggtcacagagaaaacaggatgatttctcccaatctctcctataaaacactgtggtaagacaagatttctttttgttctgggctatcattcccatgatcatgtgcttccctttcccttaggaaccacccaagaacatacaaggaaaagttaagggaaaacatcataagaaccactgtcttgccactagcacatgctttggaggagttctgcagaatggaaacctgaaacagattcactggctgatgctccttattgacaatggaaaagaacctagtggggatgttcaaaagaagtgtatttcctttcagaatataaactcagaagcccacacatcaaaacttagagctaccttggaagacagcagtaccaaagtccaaatactccactaactcctgaacctgactacgagtcatttcctcttttgagcacatgattttcctagtgaaagccccctacctattatttgaaaatttgacagtttatac

SEQ ID NO: 8674 - DNA, 75 bp, Homo sapiens
caatcaagtatggaataaggtatatgccaacaaatactaaaatttaatcagaaccctctataagtcgacgcggcc

SEQ ID NO: 8675 - DNA, 507 bp, Homo sapiens
gacagcccttattacagaactgaagtactctccttagcttcagctctgtgcccacgtgccttggctttggatacaaggtactacagcactttgtccactctccaggcttacctgtgtcattccacatgcacatcttagaaaatgccagccttagagaattctccctagccccaaaatgtctttgcccagtgcaattccttcttcctgtattacccctttccctccttcacactatctgcctggctaattcttatttatccttagttcaagtatggccttttctgggaaggtgaccctccttggccaccccttgcatatactttgatgccctagggcacaccccctttatttccctcatagaaacagccttctgtaaattgttccatgacaacctgtatttcaatttgtaagaaatttgcatgtactgtgagctccccaacgtcaggagactgacccttttgatatcattgctaagcctcattaaatgaatgaatgaaaatgttaaaa

SEQ ID NO: 8676 - DNA, 181 bp, Homo sapiens
agaggaggcaaaggtggccctgcacccttttctatcacaatacaaagcagtgctatgaagcgctccacataaaaccaagcactgaatgttattagccaactcagctttgttgaggttggttttatttataccctcctaatgtgcacccagacagaaatcaattctaagtttatgcagcttg

SEQ ID NO: 8677 - DNA, 669 bp, Homo sapiens
  misc_feature (1)...(669): n = a,t,c or g
taatttttaatacaaatacaaaatttatttccatagaaagcaaaatttataagttaaatataaagattaaaatagtgtttgaaaagctcactatagtgctaacaaactaaatgaaaataaggctattttgcatttaaaactgaaatacctcttaaaataatttgatccccagtgtttgctctttttgaagtaaccaacttactcttaaaaaggatggctgccaagatggaaagtcttactgggttttcatgttaacctattctttggacataactatgaattttgtatacaatgcacttcatgaaaagttgtggctcccccagattgcccacaagtgtgatcttgaagtcctaaacatttgtccatgtaagcttcaaaacagcgttaactgagttattcaagtagcagtacttaaagatacaattcttgaagcagtttcaatggtttctgatccaaataatcagtttctgaacattactacttcacataatagagtccatcttcagtttcttctcactttctctttcccttttgggtttccttnttnttgcctgaggccaccagttctttgggtactatcaagatacttccatcatgggtacactggagagcatagtggttgggattgactggcctaccttggtcatctcttaatctactaaaaatatc

SEQ ID NO: 8678 - DNA, 806 bp, Homo sapiens
aaacttcagaatacttcaagaatagcagaggagcaggatcagcggcaaactgaagccatccagttgctacaggcacagctgaccaacatgacacagcttgtttcaaatttatcagcaacagtagcagaattgaaacgggaggtttcagatcgacaaagctatcttgtcatatctttggttctttgtgttgtcttgggactgatgctttgtatgcagcgttgtcgaaatacttctcaatttgatggagattatatttcaaaacttcctaaaagtaatcagtatccaagccctaaaaggtgtttctcttcctatgatgatatgaatttgaaaagaagaacttcattcccactcatgagatccaagtctctacagttaactggcaaagaaggtagatttctgtggatatataatatgtatatataaacatgaaactagcttctggcataaatataatgtcagtgttgtgttcatgaccatctgcaacaaaaaatggatacaagtagcctttgtctttgtgctgtgtcaagccactttatcattttcacattttatatctgtctttgttcctaaaagcccagagggtagggaggggggcttagtttaattagcagttggtagctttgtttgcacatgctcctgtttagaagtatttctttttagaaagggatgtttgagaaagttcaacagatatggaaaacctgaatgtgctcccatagcatcctgtgcttttctgcctcctcttcttatacaggtaggaccccttttgtctctagtttaggactatgaggcactttctgaacaaaaat

SEQ ID NO: 8679 - DNA, 1552 bp, Homo sapiens
tttagaacacgatgttcttgatgataatacagagcagacagatgacaaaataccagctacagaacagacaaaccaagtgattgaaaaagcatctgactcagaggaaccagaggagaaacaagagactgagaatgaggaagcctcagtgattgaaaccaactccacagttcctggagctgattctattcctgatcctgaactaagtggagaatctttgacggcagagtagtaaatgcttccacgtgccttcaactggatatttatagtcttactgatgtcagttattgctttttcggtggcacttactttttttgcccctctaagggtatgcttgtgtatcatttgaattcagattgcctagctatttgaacatctcaaagttatatatactgggtattaaaattaaaagcaagttatatcagtgaagtaagatccttttgaatgtacaaagacccacactattgagacagcttttagatacttttttgtccattctaaaagtaagcaaacatgattgccttcttgttttctgtatgtataacccgtaaatatccattttgacataggaagaactttggttaagagtaagttctctaattgtgtttgttttaaggaatgaaacttggttaagattttgactacttcattattaaaaattgatagaattttagctcctgagatatttacaactgggagaaatgtctatttaggtgtttacattaagcggtatgaaagttgttaccacataggcactggtacgaattctcaataagaatgcagtggaacagttaagtagaactgtaactacgttggcactggtacgaattctcagtgagaatgcaatgaaacagtcaactgcagtgtttctttttgatgtcttttattttacaactggcgcaaaggcacattatgtatataattagtttatatttacacactagcatataggaaatatttctgcacttgaccctatttgaattctgagcattatttataagtataaaatgatgatatataagtgaattttgtgctcttgtttgtattttattaaggaaaatgaaaataatctggcatcagtttcattttgctaaatatctagtcttcttcaaacagtatcttggtgggtgacttggctacctgaaaaatcttaggaggaatagctcacaatacaataaatctgtagattctgcttagagcaaattatggtacttttattcagacttgtttcctttctagttaacagaaatagtgacatttagaggttttaatcagaagttaggtttttctgattcaggaacatcgtaggccagccatttgtaatttttaactttgagaaacaaattttgtgagaataggtagtgggttgctggtagttaattggatttaatatttgtattaaggattaactggaaaaaatgtgtctcagtgctaattcttggacctttaatacagtgtgcttatctgttacggcctccttttatctctcttctccaatattaaaaaaaatggaaatcaaattattatgctgaagggaaaaatatacctgtataag

SEQ ID NO: 8680 - DNA, 433 bp, Homo sapiens
tttttttttttgatgtgtgatttttttctttttattttataggtatgtgattttacagaaaacatacatagagttacagcagacgtgcttgtaggatcttctagaactaaatgcctaggatcaaggtttattttgaaactaattccagttctgccttgaagctaaggttggaaatgaccagctcaacctctccattcctgtttaaggagggtcctcattcacatccagggatgcttttctgaatgagtccaggctgaacatttctggccaggagggaaagctggaatccttataaaagcaatgacagtctcagattttgtaggcttttgaactggagctgaattctctccttgctattcctcatcacgaggctgggcctcctcctgttgttacagatgtgaaacaagcctctgtgcaccgcgcatgagccgcg

SEQ ID NO: 8681 - DNA, 1648 bp, Homo sapiens
ggccaaagcagttttctgggacaacagaatgagtcagaccaagatggataggatggttagggctttgcttcttgctgtttttctttgaagctagttcattgtcctgcaggtcccttcatcttccatacctagcccactcttttagcccttaccttaaatctctcagataagttggttcacaaagaatgttaagtactgaatcatgtgtgactgagaccagagatggcaaatgaatggcacaccatttctccttctcctgccccagggcaggtaccactgatctgcatcagagttgcctgctattctctggtgtatccttcacatctaggtgccctcaagcagctgtgtgagtgttgagatctctgccatctctggctgagatactgctgtcctgtgaagtgtttcccatgacctttttcttcccctttgaatccctctgtctggagtagtccttgcctcttcctgctccagtagggccttttccctaccccagcccctgtgccagggctaagctggtacaagagctgccaacctcacagagtgtttgctagggcgagagaggtgcaggggaaggagggcagaggtatgcaccttcccccttgaagagaggggaaaggcctacagtggcccacataattgcctgactcacacttcagctacctcttaatgcctgtggagggactggagctgctggatcccagtgtggtggtgtaggaggccacagtgagcaggtggccccagctgggtttcccaggtcaggaatgtgggccccaggcaaggtgcagcctttgctcacagctccatccatgtctagaccttcaggccagtctgcagatgaggttccctacctttttcttctcttcattgaccaaatcaaccaatcactacagctgctctgcttctgctttccaaagtagcccaggtcctggggccagatgcaggggaggtgcctatccatgagtgaaggccagtgtcttcctcacctggggtggggtcccacacttgtgacctcagttttaggaccaagatctgtgttggtttcttagattgctagcttttcctccaggggaccacagcaggtgaagctcaagagcgcatggctctgctaatagtaaattgttttcagggccttgtccagctgagagcttcatgtccaccagattctgagaggtgtcagcagcacttttttttttttatttgttgtttgttttccatgaggttatcggaccatgggctgagctcaggcactttctgtaggagactgttatttctgtaaagatggttatttaaccctcctccaccccatcacggtggccctgagggctgacccggaggccagtggagctgcctggtgtccacgggggagggccaaggcctgctgagctgattctccagctgctgccccagcctttccgccttgcacagcacagaggtggtcaccccagggacagccaggcacctgctcctcttgcccttcctgggggaagggagctgccttctgtccctgtaactgctttccttatggcccagcccggccactcagacttgtttgaagctgcactggcagcttttttgtctcctttgggtattcacaacagccagggacttgattttgatgtattttaaaccacattaaataaagagtctg

SEQ ID NO: 8682 - DNA, 1121 bp, Homo sapiens
ctagaaatttgaaacttccctaaaaagctcctaatgcccacctgctagatagcttctctgtggcctcctatttagctaagcagcagtgtttttggatactttttttttctgtttgtgaataaggccagcactcaagatgggcagccaagggtgcactgactattagctggcccataggatatctgtaaggctggtgggacagttttggacctggaatcatgtgtaactaacaaggttggacgtttcttccccatcagggtatgaaaaatcatctcaaactagccaaaaggcagttttggaaactacattgggggacgttatttttatttatatatggggcctaggccaatccaggatggtagctggaataccttccttcttaaaatctgatcatggcagggatatgcagggcactttttactatttggccttctaagcagattgggaaggaggtattttctggttttcgctttcctccgacttaataggacttgccttctcccttgggcagggagagaggctgggttggtgctctcccttactctactcatactgacttagagcctctggtgcatgtttgggcatccaagaaagggaggggaaggaatgagctaaaaacaaaacagaatgaggtgggaaagggagattttcttctttacagaggaaaataggaaaccctccaagaattgtgcaagtaaagacatttgttgaatgcactgagtcccttggtgtagtagcaataaggaaaaatgaaattactttcctgtgcacacagtccagcctaattggtatgtgatgttgcacttagcagccatgtggtgggcatgtgtgactactctggttttcactttagtttctaaactttttatccctctcaagtccagcatggatggggaaatgtctctggatccccacagctgtgtacttgtttgcatttgtttccctttgagatttgtgtttgtgtcctgctttgagctgtaccttgtccagtccattgtgaaattatcccagcagctgtaatgtacagttccttctgaagcaagcaacatcagcagcagcagcagcagcagcacaattctgtgttttataaagacaacagtggcttctaaaaaaaaaaaaaa

SEQ ID NO: 8683 - DNA, 362 bp, Homo sapiens
caaagaagtttggttatctccattgtttacaataacttaacaaccttaattatgattgatagcaaatacggagacattagaactttagaaatcccatgcaattttggagcatacataagcgttatttactaagatataacctaaagaagattaaacaccattttggcaattccgtgtacctaaacgtgtcacataatcctgtttgcctttcttttccagacacttcaggggccctctgaagtatctgaaaagccaggtgccagggaagaaaattttgaaactgaagtttgattttgggaaggctgctaaatgtttgaggtttaaaacacttgatattataaaataaagtcgacgcggccgcg

SEQ ID NO: 8684 - DNA, 524 bp, Homo sapiens
gaaagagttagtttggggaaatatcctctccaccacaatcttagtcattgaagtcaatttaacaatatattgaaatatttttcttagaagtttaaagttccattaaagagtaacaattacagaaattataggtagcctttagttctacaagtgacatctcaaaagggagatgattcatcaatttcaaactttccctgcaagtaatactggatgaaaattaacttggcaaacataattaataatcatgggttattaattacttctgcaaggtgggtgtgctgattttaaaaggcttgaataaaacataaatttccttaatttgatactgtaaatggagtaatttggtgatgtaaatggtaatatgtaagggatttttgcttcagatcttacaacttaaaatatttttctaaaattagtttttgtaccatctctccagcatgttccagcctttatcagtcagtccaggcttctataacaaaatatcatggactgaattgcttacacaacaggtcgacgcggccgcg

SEQ ID NO: 8685 - DNA, 243 bp, Homo sapiens
tctcaagcaagcggggaacgtgactgggggctacacgcatcagctaacagaacaaaaagttttacaatgcttttttcatacagtatctggaatttgcagataacacaagtagtttaggtcaggggttgatattattattattgttacttttttttaactaccagggccgggtggtgtcgccaaggttgtctggctatttatcttacttctgttttgttttgttttctaactttttgctttctc

SEQ ID NO: 8686 - DNA, 836 bp, Homo sapiens
gacaatcatccccatttaatgaccagcagtcactgagcgctgtgaaaattcactcagtgataccccgtgttggtcttgaaggaaaccgtacatatgaatttttggatagctaatgtatatctctcaagtgccaacatttaaaacttgtaattatttttgatgtgagtatttcaggtatgttagtataccttcctgccttcttcttaaacatcatgctcagtataattcacattttcatgatgaaaagttaaagttatattcataatgtattattataagtatccagctctgatgtatgtaaaacacttcataaaatgtaaagggctataacaaatatgttataaagtgattctctcagccctgaggtatacagaatcatttgcctcagactgctgttggattttaaaatttttaaaatatctgctaagtaatttgctatgtcttctcccacactatcaatatgcctgcttctaacaggctccccactttcttctaatgtgctgttatgagctttggacatgagataaccgtgcctgttcagagtgtctacagtaagagctggacaaactctggggggacacagtctttgagacagctcttttggttgctttccacttttctgaaaggttcacagtaaccttctagataataggaaactcccagttaaagcctaggctaggcaattttttttagttgcaactaaggtaaggatatactacaaactaaggatgctgctagactaaggggattaaacagcaaggtaccaaagtacagccaaagcaaccaccaagggctctgtatttgcagaggggtctatcatgttttaaggaaaaagg

SEQ ID NO: 8687 - DNA, 1343 bp, Homo sapiens
cttgaagatagactacaggagatgtaccttaaaagtaaaatgctatctgaatatctccggggacacacacgagtccatgtgaaagaattaggtgtcgtactggggattgaatccaacgacctgcctctgttgactgctattgccagtactcattctccttatgtggctcaaatactcttataagctaaagctcaggacagttcttccttggaagaaaaaaatcaaattctcaactgaaggagaaaggaataagctctctgtgatgtcaaaagcatgagaagagcaaacagaaacagtcattccacctttttgttttgtgtttttgctgtcaagctgatgcttcattgaagacttaggtttacttgacataatagcatttgtgattgtcgtgaacactttaggccatttgttacccatgaatcaacaaagaaactgacctttttggtaggaggaaacataagcactaaacactaagctgttgcaacagattgccttgtgctgtttgggcagaataaagacaagtgacttgagcggggtggtcagcagtgtacataatattccagtaggaaactgcttccaagtttaagcatgagctccccaaactggagaaaacatattttgctattctgagacaacaatcagaatacagactttggattccaggtcacagtttgctttttagacaaggtaaagcaaagaaagccacattgtgccatcttcagctccagtggctttagcagtgactgtttgacataaaacatgtaagaattgcttgttgggaagagtgctttagggacccactgttttcatttcttcttggagtttaccttgtttcagatgcagccatgggtaggtcagagatggattgttggtgcaataaacccaagaatcaatgtagcctcttaatcccatcaagatgtagtttgtagcagcaaagtgtacagtctgaaaccgtatgttttatccttatattttagagctttcagcagcctttttaagagaggccacttaccaaagttatttctataagctcaagagtgtttcggttggtaagttcttccagctgaagccactttttccttatagttaatacaaatgactatttttactttaaaaggcacagctgtccctggtgggaaatgaaacctgcagcagttcaggatgactaatgaaagcaattagcttgaacatttagaaaaaattcatatatgatctaaatttttatattatcatttctgtgccttctaattcctgcatcctgttcaaaacatctttccagacattaacttacacattgtataaaaccgaccaaaatgatttcctaaagttcatgcaaaaaaaaa

SEQ ID NO: 8688 - DNA, 491 bp, Homo sapiens
ctggtgcggggccgccggggtgagcggcctgactacaagggagaggaggaactgcggcgcctggaggctgccctggtgaagcggcctaatcctgacatcctggaccacgagcgcaagcggcgcgtcgagctgcgatgcctcgagctggaggagatgatggaagagcaggggtacgaggaacagcaaattcaggaaaaagtggcgacctttcgactcatgttgctggagaaggatgtgaaccctgggggcaaggaggagaccccagggcagaggccagcggtcacggagactcaccagttggcagaattaaatgagaagaagaatgaaagactccgtgctgctttggcatcagtgattcttacgtagatggcagctcttttgatcctcagcgtcgtgcccgagaagctaaacaaccagctcctgagcctcccaaaccttacagccttgttcgggagtctagcagttctcgctcaccaaccccaaagcagaag

SEQ ID NO: 8689 - DNA, 695 bp, Homo sapiens
aattggcattgtgagactttatatttttgcctaaatgtaccctgtctgttaaaaaaacaaaaccaaaaacttgattgctgggggccaccctagagtttctgattcagtaggtctggcggtggggatggtgggcctggtaatttgcctttctaacaagcgtccaggtaatgccccagctgctggtcccaggaccacactttgcagattattactctgagaagagcactaactctgacgttggattccttctgttcctcattagtgaatttatttgggggagattattcaatctggtagatccgcatttacttagctgtgaagtggaggttaatgcaacctgcctgagactgtgagaatgagaaactctaattgaaataccaggcccagcgtgcctggatgcttgaaaaatgctgactcccatggtccgtccttccctcactcttctcagctataaagtgagaagcgaaattcagtatcttttaagattcctctcaggtgtaaaatgctgtgattctaaaagtttaattttgtagttccagagacaatgccaaacacctatgtgtacttagtgctttgtaaagagtggtaataacagtgacaccacataggccgtaattttgtttttgcttttgttagggtgttcagcatcttgactccttaaataaggttttcagtcagatttatatagcagcatt

SEQ ID NO: 8690 - DNA, 343 bp, Homo sapiens
gaaaacttggtaatagtttttattttaagatttttttccatattttgaaaaggcttgaaatcaactctaagtaatactattccaactttcaaagtacacatctccagaaatggaaaagattctaccaagcactgacagtagatagtggcttcttcattccatgggatattttagaatgattttaactatagtctcaatatcactatcactttgccttgtgaaggctctgtacatattgaaccatgtgtacctttggacagcagtacaggcctttttgtgtttaccttcttacacgcatgtagtattaacttactgaattcagataaaactggtattgaagagg

SEQ ID NO: 8691 - DNA, 549 bp, Homo sapiens
  misc_feature (1)...(549): n = a,t,c or g
tatctggcaagttaaccaaactgcatcaaatcctaaaccttatatgagttggcagtgccacagtaaagccacaagtgactttgcatttattacctcttcaagtctagttgccacatctggacactccaatgacaatagaaatgtttgcctctgggacacattaatatcacccggaaacagcctcattcatggtttcacgtgccacgatcatggtgccacggtactgcagtatgcacccaaacagcaactcctaatctcggggggtaggaaaggacacgtctgcatttttgacatcaggcaaaggcagctcattcacacgttccgggcccatgactcagctattaaggctctggccttggatccctatgaggaatattttaccacaggttcagcagaaggtaacataaaggtttggagattgacaggccatggcttaatttcattcatttaaaaagtggaacatgcttaagcagtccatatttttcggaaacattgggggctgggagttcatggccaggtttgncatccttcccgggggcnattcgggtt

SEQ ID NO: 8692 - DNA, 1192 bp, Homo sapiens
ggcccagcctaatttattactttttataagcgatagcgtactgagccgccccctgaaggcggctgccaggtcttgccccaggcacctgggactctgtttgcaggccctgccctctgggctgagaaggatgcactttggacaagtcatctgtgtttgtgttttccagtttttctgtactttttaagtgttttgtgttacctggtctcattcccctccccacacctacccatttgaggggatggagttgaagtcacctggtcacctgtaccggcccagttcggctacaacctgggagtgtccgtaaacaattcctctcacccacaaaacaatgtaatcccagcgatgggactggattctgaaggccacttcccaccatcatagctggccatgcccagggcagtgcctgctctatatatagagtctgcctccaatcctgctggcttcagcctggagaagggatatgggagctggagctttgatggatgaataggtgttcaccggatctgggcagaggggtcatccgctccccaggtgggcactgataaaggaaggtacaggcctcacctggaactgccaaggcagcctccagaaatgctcggctgtctcggggcacgctccagtatgccagtcctgcgggattacgtccagctacttccagaaacactcagtgtcccctcccctcaggctctgccttggcctggccttgtccagtctaccctggacaagatgccgtgtgtttgaggcccagcagagtaagcccttggccgtggatgtgttctgaaacacctgttaggggttccctccatatgtcagagcctctctgggatgaagttcaagccagaaaacccagtcgaggctcaagtttgaatttcagcttcactgtgtggctctgggaaaatggctttcccactctgtgcctcagtttccttgtgtttacaagactaatcccattgactgtttattaagcacctactgtgtgccaagcgcttttacgtggcttctccctcagccagccttgagaaggctggaggtggtgtcatcacctccattttacagacaaagcagctgagaccccagcgaggggcggagacctgtcccacgatcacccagcaggagtcgtggcagaacggagcatcagccagacctgttgtgggccgttgcattcagggaactttgaatggaagggttggtg

SEQ ID NO: 8693 - DNA, 1074 bp, Homo sapiens
gtgaatttaagtgcagccacatactgttttttaaaccatatgttttaccactaatttcccaaagttataataaaatcctgaaagtaaaaatctactagaatttgctgtaaggcagactgttaaatgatagagaattatttcacattttaggcactgaaatgttgaggtttcgaggtatagtaagtatacaatgcacttcacttggatgccttttcatttttaggcagcctcaggagcaccaaaatacattggaattctaagtactaagatatatttgttccgtaatgttaaaagacattactaattatttggaaagagatggccaaaataatcaactctacaggcttcaagctggtgggggaatgctgttactcattaatgcttttttactgaatggtcggaatcacatatgcaccacacatactgatcttaagtaacattattttatagaactgtttaaatgggtttaaatggtgttctttagatgaaatgtgttctgttttgttcattgtcttaaactgaatagggctgaataggctttatgtaattcttcatttcatggtagagtttgatgctgtgtttaagtgggttcttgtttataggattttcaactacagtttgaatgccatggaggaatttgaataatatattaatgaaggacatattcttgtaatcacaaatttgcatttgctcaggtttcattgctgtgtgataggatttttcctctaacttgaaatttaaaaacttttatttcctattccttttgtcggtaaagcagtctgaatttggaacattttatcatggagtcaacagtgaagactaccagataattttgtattggagaagagggaataacagctaaattgtggatttcagtgctttacatggtgcctttcgagtcagcttttacattataggggcttgttatagtttagctaagatgaccacttaacagtttatacagaactcatatgtataaatcaacattcttaggatattatttatatcctttgaataaatccctgtgaagtttttcctccccactaaaatggtgcataataaaacatgaaatat

SEQ ID NO: 8694 - DNA, 679 bp, Homo sapiens
  misc_feature (1)...(679): n = a,t,c or g
gtgtgagccaccgtgctcagccactagctttggttttttaaacatagattatattcctcaagatgaagggcttaacatatccacagcttcctcagtttgctnactccccatgcgtctttgtgaaggncagtatctagtttntctgtaggtcagtgttccttgtgctgtcatttcccttatatctggaatttgtcagcattcctgaaaacctacacgtgtatatcagtaaccaaaatgctatgccttttttgcacctttgtacagcagccaaatcatgaactcaaaatgtatttgatcacagttctataatgtttttacctacctattatggaataatcagtttttacagagattattaatatggtagaaccctgttatgtaattccnaaacttaaggaccatatttacattgcttaacacagaattttacatctaagcaaggactggctttagaagcagtgtagttctacctctcattttacagatgagaaaaccgaagcccagaaaaactctcatttgctcaaagtcacagagaaaattagtggcaaagccaaaaagattcagatcttctgactcgaagttgagagttctttatactctattatgctgcctctccagtgtaatatttgcctttctgtaaatgggattaaatatgatttgtaaataaaaaaaaaaaaaa

SEQ ID NO: 8695 - DNA, 369 bp, Homo sapiens
tggatacataatctttcactgtatttgaggctatcttgagtctctggttgagatctgggtcactaaggcttctgggggatcatgtcttcaacaagccttccaatgaatgtccaaagaaaaacatataatttccttttatttttttttttaccaaagttcttatgaattggaaaataatttgtttcaaagacggtgatgaaaggaaaaaaaaagtttaactttccaaaggtaatgctttcatgaagagttagaaatagcagttttagtaattagttgtaggaattctggttaagacttcaacattttaccttacttaaaagatttgctttatgcaacatttaatgcccagttttgcatggctctaaaaat

SEQ ID NO: 8696 - DNA, 407 bp, Homo sapiens
cttcgcgccatcctctagcctcggccacacgagtggcatgggactgcaggcgcaccctgcatttgtctcctgaatgttaggcttttgattttttgtttcagtcactcttgaagtcactcttgactgaagcaaaaaattaaaagctttacattcaaaattctcaaaatgaagctgggtgtggtggtgcacacctgaggttccagccacttgggtggccggaggattgcttggggtcaggtattggaggctgcagtgtatcgtgatggtgcctataggaatagctactgcactccaacctggacaacgttatcaagaccccatctcttagaaaaatgcaaaattaaatgcaaaagaaatgggctgggcatagtgattcatgcctgtaatctcagtaccctgggaggctg

SEQ ID NO: 8697 - DNA, 591 bp, Homo sapiens
cattttattgtttacattttaactagaactggcttaattgtataagaaaaacaaaatctccaaataaccttgaattagtgttaccataaacagtgagttttatctcaacactgtggcttaataacagcagattcaaagcatgttgggaaaagaaagagagaaacagagagcatatgaagatgctatttaactctatagttgcagcttaaccatttgagctcttttttgttgttgttgttgttatttgcccatcagttttagaacgtgcactagaataggccatcatatgtaacctgctggtgtcctagaaaacctggcatgcctttcaccttctgcaggagtttttaccctttctccctttcctgctctcatgatttctcagtagctacccttattgcaacaatagcacatttattatctttatcgtattttaatatcttaacttcttacaataggtgattcagtttctgccagtgttttcccagagtccacggtggcctgtgaagattgagcagtcgggcaactccacgccacatgcatgttgccaaccaccctaggattctccccgcagatgcgccttcctaattcatc

SEQ ID NO: 8698 - DNA, 227 bp, Homo sapiens
caatattccaattagggtaatgctgcttctcatggatgaagtattcgacttaaaagaaagaaatcagtggttgcgaaggaatatcaaaaacctacttcaacagcttattagagctacatatggcgatactattaatagaaaaatagttgaccatgttgactggatgacttcacctgaacaagtagccgactcagtgaaacgtttcagagatgcattttggccaaatg

SEQ ID NO: 8699 - DNA, 793 bp, Homo sapiens
ttgtgtctgcaccagtcttttagtgtctcaaaatagattattaatacatccataagtctgtggttcttctcattctcatctataatccaccactaccaagagagatttctgtgtcttaaatgatttggtgcatattttgcaacattgagagaaaactgcccccatctcaagcaagaatggcgttggtttcttccatttcaaactaatcagcattctccagcaatgacaaagtgccagagtgtatatatgaaagctaaggaaagcacaaaacaatggttcagagataaattggctaatttgtttaacagttggagactgtgcaatgtacgacttggaggagtttgtttggcataatgattttgtaggtctgtcagcattttgatatattgtggattagccaggtgaatgatccttgaaacatctctttcaggtctggagaaagagacagaatgcccttaaagtgtgaaataaccttatacctgaattacagttttgtgatataaaataaagctgagtataaaataaaaccaatcaaacacagaatttgattggatttgttattcattggtatacaacaatttttattcttatgtgtgctttaagggctgtgttttgctcttagggtactcaattttatgtttccttttggcattctttgtgcaaaaagaagcatgtggtggctctcatttaaatttccaaattattagtttttatcttaaacagattactgattatacagaagatataatttattggaagaactgccaattaccatttggcctccaaaaatagg

SEQ ID NO: 8700 - DNA, 498 bp, Homo sapiens
gctcgacggacagtgcagagaggtgatttccaatctgcagaatggaaagtgcaacttaaaaccaaagagttagcccttcagcaggatgttttgggggagccaacctccagtgggattcaaatgataggaagccacaacggaggggaggtcagtgatgttaagcaatgtggagacgtctccagtgaacactcatgccttaagacacatgtgagaactcaaaatagtgagaacacatttgagtgttatctgtatggagtagacttccttactctgcacaagaaaacctctactggagagcaacgttctgtatttagtcagtgtggaaaagccttcagcctgaacccagatgttgtttgccagaagaaccgttgcacaaggaagaagaaagctttttgattgcagttgactctggggaaatccttccattaatccattcacaccttccagggacatttaagaactccacaatgggagaaagtctcccatggaaatgggaag

SEQ ID NO: 8701 - DNA, 671 bp, Homo sapiens
  misc_feature (1)...(671): n = a,t,c or g
cctgcgggttggacaagcttgatctaaagcttttcccaagttcctcacagtattagtttcctagggttgctgtacaaaataacagactgaatgatttaaccaagagaaatttattgcctcacagttctggagcctgnaagtgcaatatcaacggtggagacagggttnggtttcctctggaggccataatgaaagcatctgttccaggtctctgtccttggcttgtagatggccatcttctggtggatccacacagtcttctccatgtgtatccttccttcagtttcccttatagggacaccagtgatgtcagattagggatcgaacccaacaacctcatttgaagttactcacctgtttgaaaaccctatgtccaaatacagttatagtgtaaggaactaggacttagggcttacaaatatggagtggggcatcatccagaccataccatttaaattgcagggtttctctccaatgtgagttcacatacacacattaaggtttgtgggattcagaaaggtattcccagattctctacattcatacagtttctctccagtgagatttctgatgtgtttggtaaggcttgagaattcagcaaagtcatttccacattcccctgatgcagggtcttctccactgtgaattcatatgtgttcattaagacctga

SEQ ID NO: 8702 - DNA, 607 bp, Homo sapiens
tttttgcgtgttttaattttttattagagaagttggaagtttaatttcaatattgcatggtatcatcattttctccgctttgttcagaggaacacacagaatcaatttttacaagcatatacaacaattcatctggtgctgtgccctaaaatcagtaatctgattagttctagactaccgggtttccatgcgctcctcttgggctttggtggcatggcctcaattcccagcggaatactttttcatgcactgtctgcaactcaactacagcaggcttaaagaccatgcagattaacactgtagcaaattgttttgatatttaacagacataaaaaggtcatttcctgatatgaaattctgaaaatctgcataaatatttttgtgtaaaattaaattagttatgtattttttcaaactagaacttgaagtatcaagaatgcccacataattcatatacacatatatatatagagagagggtttttcattatgctaaaagtcttgatagtcaaattatattctgtgccatacatttatttaaccagtatttatttggcattaggttaactgtgtatggattagtctttattggtgcttgtgtatcatgc

SEQ ID NO: 8703 - DNA, 326 bp, Homo sapiens
ttttttttgaaagttttccaataatttaatcaatgcaaatatacacatatacacattctctacatcaatagtattcaacagtttttatcaaaaggagaaaattttgattttataaaggcagtggaaataaaaaacagtaattattaagttttgctcaaggaccatctagaaggaaaatttagtgacacatctgaaataagcaactgatggccagcctagccttattaagtaacacatattcaaattgtagatctccccctcctatcttccaccccatagctaagaaaggaaacccagggatagaactaattgaactctattagccg

SEQ ID NO: 8704 - DNA, 367 bp, Homo sapiens
gggaaatagaaattaatgtaatcagttgcaagatacttgccttctataattataacaacttaatctgttaggcacctttggctattcaataatcattggatgttgtaatagaatgtaagtggcttttaatgtagctccaaggatatttataaattgtgttattgctgttattgttttaaatgtgagtgaatattaaattataggaagtggtatcaagtgataggaaaatggcattaggttttgaaattttattttgataatttaacacatatggagggtttgctatatgtatgagatattctgttagatgctgtgggagctagagagatatactctttttcactcaaagagagtaaaatatagtggg

SEQ ID NO: 8705 - DNA, 417 bp, Homo sapiens
cgatccattccctataattcacatccccaaaggtcaaaacaaactaggaggacctgggaatttcagctggagatactgattattgagttctgaagtagagtgttggaaataggcaattagagaaagtccattgatgtcattttgtttataatattgcagttcatactgaatgaccacttgatatgactaattcagggaatatatatttttctatgaaagctatgaatgttactatcacggcttttccttatttttacttgtatgtagcagcatttacagaaatgccaaaaatgtgcctcattaagaggcagggtcttaatcagttagataaaaataaaatgtataggcttaaggatccaaaacagtcatatttttagatacagtgaaatccttttaatgtttcctctaccagcaccc

SEQ ID NO: 8706 - DNA, 733 bp, Homo sapiens
ttattattgaaataataacttgcatttttattttttaatattgcaaatggcataaactccaggattcccacttcccaagatgtgtttttatttctcactgattgtatcctgaaggaatcacaggtcttggcaaggtcaagtcaccatcgctggttacacatatcctggatatgtgcaggttccctgtgtcaaggccttttgagccacttggagatgtaatttaaaaaggcaaaacaatgcacagaacaattggggaaaagttacaagtaaaataattttatgcagacagaaatgtttttaaagctgttcatgatttagtagaaagaatcaggagcttgaaacaattacttctgttgctctttttctgaggtttcattccaatgagagttgcacactgtcagcttggttttgtggctgctgatagtcgtactttcttgaaatggaatacatttccagttgttgtcttaaacgaatcttgcttatcgtgtcataaaagttgggctctgacaaagtttcctctgtaggtggcacactgaatatcctcataattctccttttgttccttttggcatacatgaagagaccgaagctaacaaggataactatcaagtaaacattggtggcttcattccaggcttcgtgaacagtataatcaatagaaccatcgtcacccatcactccataacccccagccatgggggctgccggctccggaggcggcacgcggccagcg

SEQ ID NO: 8707 - DNA, 604 bp, Homo sapiens
ttgccattcgcagacaagtgttttgttccttctcaaaagacggtttgtaatcaagctatattaagaactttaacaggtgttctcaaatgcaggttttaatagctttacagattgtaacattggaacagagaaagaacatagaaaacttttaaagaactgacatgttcacaaatatcaagcaaaacaagagttaactaaatgagttgcactcagaaagttaaagcaagtcttttatcttttgcttggaatattgctgatccttgttttgtttttcagagtcaaggaaactcattttgaactatttatggcctttaataattgagtaaggtatactcctgagaacaaaatttggaacatgtttgtttctctctgccttattggttctttaaggaccactgcaacatggtcttgggaattatacttcaagaagcctataaggttaaagggtgtttatactcacagtgatataggaatagcactgggtggttgcaggaggatggaaaaattcgaacaacaaataaaaacaagaactaggcaaagaaaccataggataacagaaaacccaaaataagagaaagaatggccaaaatcccagtcaggatga

SEQ ID NO: 8708 - DNA, 480 bp, Homo sapiens
tttacatgagatattcaacactttattttaaaatagttttgtgttagatgactttgcccaactgcaggctaaagtaagtgttctgagcatgtttaaggtgggccaggctgaactatttggtttggtaggttagatgtatcaaacacatttttgacttaaggtattttcaacttacaatgggtttatcaggacataactccatttgtaagtcaaggagcagctgtccaagttatttattatggctccaaagcactcactcttcctggtgacgtctgcacaaaataatcagcacgtcatctcaagttggcactgattgaggggcgccttgctggggaggttaccttgcccccagactacaaagttccctagcagacacagcaaaagaaacaagacccggaatgaaagctgccaagatggcagggactccagctccacgaaattcagaggctcattagcttggcagagagatggaaagggaat

SEQ ID NO: 8709 - DNA, 395 bp, Homo sapiens
tcttgaaaatgaagaaggcagaggaggcaatatgctagtctttgtggatgtggaaaataccaatactagtgaagcaggcgttaaggaattccacatagtgcaagtatcaagtagtagcaaacactggaagttacagaaatctgtaaatctttctgaaaacaaagataccaaacttgccagtagggagaagggaaagttttgctttaaggcaataagatgtgagaaagaagaagcggccacacagtcctctgaaaaatatacctttgcagatatcatctttggaaatgaacagataataagttcagcaagcccatgtgcagacttcttttatcgaagtttatcttctggaattgaaaaaaccacaagctcacttgcctgtgcatacgaaaacgtca

SEQ ID NO: 8710 - DNA, 349 bp, Homo sapiens
ccttctgccactcgtatcattgtggcagatatcatatcatatcattttcacctttatctttaggtaggaacttgctgccaccctacctgagaacagtgtacagtaagatctttgtagttgatgctgtattacatatttacctctctgtgagctattttcattttaatagagctgaaatggttaccagaaaggggttcccatccagaccccaagagacggttcttggacctcacacaagaaagaatttggggcaaatccatagaatatagaataaagtgaaagcaagtttattaggaagtaaaggaataaatagtggctactccataggcagagcagcggcgtgggctgg

SEQ ID NO: 8711 - DNA, 484 bp, Homo sapiens
caaaagttgcgagagcttcccccatgcctagccctcaattatcccgttgcagcatcactgctgagtgtcaggatgatctcaatctgtgggtgctacaactcgattatttctctctttaccatacgcttctcacaaaatggtattattttatgttagatgacggcacacccagtggaatgctgaagccttagcatttaatacagctttccagaaattagctctctgaatccaaattgaacttacacaagattcctcaagacaatgacttccctttccaagacagcaagaatactttagtgttggtgttaattccaaatattttcaaacaattttcaccattatgtgagtattaaaatgaagacctgcaggtgccccgccttcagtgctcctgcccctgaaccaagttatcttcctaatgtgagctaccatagtgacagcaagaaaatgaaccaattatctatgcttggtctcagattactacctg

SEQ ID NO: 8712 - DNA, 350 bp, Homo sapiens
tagtaatctaaatagcgcacagcattctttcatgttaatctattcagaggtgtggcacccaggaaacagtggccacatggtgtagggactgagtcataaagaacctgagggggttgtatttccctaaaaataaagttgtttaaatccaagaatcaagctgttaaaagaaagaaatgaaaaaagaaagaaaaatcgagcacaagcccacacacataaaaggatcctgatgtttttagtttgttttttggcattaaggagtatagtgcagtagtggaaagaacagaggatatatagtcttctgttacaactaactactcaattaaaaacaaatattctgataactgatctgg

SEQ ID NO: 8713 - DNA, 1249 bp, Homo sapiens
tcagatgcagtgaaatcacagttccctttcatcttcagaacctctgtcgtgaatgtgttcaagaggctttggttaagtcaggaagaagtgcccagggtgtgtgtccccagtctccctaaggcctggactcgcccatgaacccaagtcggcttctagacagcatgtccctaacagcagccctgggcccccacctcttctaccatccaccccagacttaccacacacccttcctgctgctcctcttcctgcccttatcaacctgggtccctcacacttcgccagttgcgtccccgtggacagtcatgagtctagaggaaaggggcatctggtctcaggcccgtgctctcgggtggcctccacctgctccctctctcctcactggcctttctttccgtctagcttcctcttcaggaaatgtcctgactcccctcagctcccccttcacccctccttgcccgcctaccctccctccagaatagcccctcacccttcttccccttctagttgatccttttcacctccctgatccccttcatttcttcaccgcggttcctcgtcataggggttctcactctgaactttccctctctactacccatggcaggaacctagtacaggtctcccacccagggccttccaccctcggctcctgtgctgggagaaacttccaggcgtggacagcccagcctgaggcattccagtgctggggcaccgtcgcctaacctggtttctagctttgccctcactccccggaaaaactgacactgacacaggggccctttccttgcccctttagctggtacctcagtggggaggcttccttaccaagaatgagttcctgaaacccagggccagagacaaggacaacttaggggaagacggggttttcggtggagccaggggcaaatcttaatggggaccagtgggggataccccaggagcccatggcctgactgcacagcctgcctggaggatgggtgcgcagctctgcccctccctgaggcccaggactatgcccagaagcgatggggtacccgtgtaggggagccaaggccagtagtttgggggtaggagtcccctagagtctcagaagactgggctctttggagtacagggtccccggcctctcctttaagattctctccccagctggaaggccgatgactgggtggtcgggagggagacccagctctcctttctgtcccgtttgcagcactgtttttgtttccttaataaatttttagttatg

SEQ ID NO: 8714 - DNA, 588 bp, Homo sapiens
gctcattttgtctctgggatagttgactaagataacacgcacaggtccttcagcttgggaaaccaaaaagattcttgctgtttcttttgctccctctggatcccagccctggccattcagagtccaggaaaatcaagacttgtccagttaccaccagtggcagttcgcagcctccaggacttggctcgcatcgccatccggggcaccattaaaaagattattcatcaggaaactgtgagcaaaaacggaaacggactaaagaacacccccaggtttaaacgaaggagagttcgccgccgtcgaatggaaacgattgtctttttggacaaagaagtctttgccagtcggatttccaacccctcagatgacaacagctgtgaagacttggaagaggaacggagggaagaagaagagaagaccccgccggaaacaaagccagaccccccagtgaacttcctacgccagaaggtcctgagcctccctctgccagatcccctgaaatactacttgctttattacagagaaaaataagtctcctgtttgaaagggggaaataggaagagcagattgctgagtgtgaagttcgtg

SEQ ID NO: 8715 - DNA, 607 bp, Homo sapiens
agtaatatatagatacatgggtgatacaaatgtttggggccttgtagataatgtagaaacagcatgcaacctcaccgctcttgctccacggagtccaagtgtctgaaaagttgataatacatcaaattagaactgacttggtagaccagggaaatgagatagctggtaggacactgtcatcacttgctataatgagtgacctacttttgatcctatgtcaacttcagtgactaggtgaaaaagctactgaattgtgtccctcatctcaaatggatttttaaattaggtttgtgctgtgggtacttcctgattaattttaaaaatggagcttgtctcctaaggccagtgacccttaagtctgttatgtgctagaaacacccagaagctaattctggcactacctgtgaaattccagattttgaaaattgggaaatgtatccccaataatgcaattttttcagaagcttgccaagctgatttagatgaattccattgtcatcagtagtggtgagtttgaccattaggggcctatatctggttttagttgtcttaaaacttaatgacatcatgcaatatttttaaaggtactctatttctctttgagttt

SEQ ID NO: 8716 - DNA, 592 bp, Homo sapiens
  misc_feature (1)...(592): n = a,t,c or g
aaaaatacatgccaatgtcattcatattatgaaattacaggcagaataacttagatttctgggcatttcaaagaaaagcatcctgagtaatataatttaattaataaaattagtttctcaggaacttctttctgatcttacagactctgcagtgatgcaaatcattataaccttgtgccaaacaaggtatctgttaaatgccacaaatgatagaagtaaaatactattgtcagtagcaagtttactctagtaactggatgttttatcgtaatctcatgaaggttagagcagaattgaattgcagtgccatcattttaattgaaattaaagcaaaagtcttaactcttttccacagcaattagaataagtaccgtagtgtaacttctcacattcagtcatcattgcagccagcatttttactttatcttcatggttttcacaaatgatatcacctcccttgggaaacctggtaggttaataccttaccctttaggaaaaggcatagtaatccatagcccgtcagggtttccnggatgttgggccagtgatattgcctgngggtaaccacattttggggagtccncctccacag

SEQ ID NO: 8717 - DNA, 1082 bp, Homo sapiens
  misc_feature (1)...(1082): n = a,t,c or g
aaaaatggttttttttttttttctgggaaagcctctctgccagctgaagctgccgcagcagagctcatgagaagccctttcctaaggtggctccaggagccctaaccgggctgctgggcagtgcagcattttacttttttgctttttgtttaaaaaagggagatgagtaagcccccgaggacccagcggctgcaacttaaccagcctccagttcaccccagccccagccaggaagagaagcccctctcctgtgcagacaggcaggactactgggtgggcgtgggtgagcaggagctagagggggatccaggcacagcccaggggctgtttgccagatgacccctgaaggccatcatccccagaacatgtgacctcgggacgcccaggtgtgtctgcatgtgtgagcatgtacatgagtgggtgtgtctaggtgcgtgcgcgtgtgcgtctgacagtcctaccagagcagacgctgcccagctcggcgtgggctgggctggcctgcctggccccgagagcccagccctaggttctgacacctgcgaagtgggaaggaccttaaccacccacctgccccaggtgctcacccagttcccgcccttcacagaccccttgtccacgccaggagcctatgtggactgacaggtaggtggacagacggacggatggacagacagccttgccttccttccttcctcggtccactcctttctcctgggatccagggttggggtctgagctccctgtggtggtcattaagcccctcaccacggcacctgccgaggtttgcagcaatgacgtttaatacttctggaatgattaggaatctgagaacagaccgtgggcggctatgctgaccagggctccggatgtggaagctgggccctgcctccttgcaggggactctgcccagctggaaggggcaggcagctcggcaggccctgaccggcaagcgggcagtgccaggcagcccagcagcagctggagcttccagaatggcctctcgatccctgcgctccaggtactcggccgcctccagcaggatcagcagggagttcagctccaatcctccngcccgcgac

SEQ ID NO: 8718 - DNA, 302 bp, Homo sapiens
atttccgaagtcataatgggaagagagcttctgctttcttcagaaaatctgtttcaaatctttcttaaaacatcttataaacaggaaccaaacatggtggtaaattacctccttcctttcactcaactagtggagagcagaggcaccagataggcacatatcctcaagaggggtctcatgagaactaagaaccacaataaaaactaaaaaccgcagttcacagaagccctttcctcaggaccagtatagtgagaatcacagccttgaaacaaatgcaagcaaatgcaataaaagtggtcgac

SEQ ID NO: 8719 - DNA, 493 bp, Homo sapiens
ttgagatatacttacactaatcattattcatagtttatctgaaattcaaactgaactgggtgtcctgtatttaattctcgcagtcctgggcacacacgaagcctcctatgagtgctggcagtccagcctatgctccttccaaagcaattctcctttcctactgccccgtcaggcctgttctgtgctggaatcatcattgtcctcaactgcaaaatggaaaatgaaatgatagtggttcctccctcccggggttgccaagatgattaaataacataacaactaagatgtatccggccccttctcctctacttgcaaggcatcgatcccttcattcctcgcaatcacaccacgtgaaggtgccatgaagccaccccattttgcagaagaggaaactgaggttggagaggtgaaagcactcagccgaggtcacacagctatgtcccactcatctttgggtgaccctcaggttcggaccctgaggtctgaacactgc

SEQ ID NO: 8720 - DNA, 526 bp, Homo sapiens
aaagagatggaatacagactatctaattcctttctcgtctaaacttaacattgctgcgaaagttaattttttagcctattcagaagtgctgactgataacttaaaagttggaagcttttataaaacatattcaaggatactttttgatttaatggaactggctatttgagaagtgtttgaaacttttgccatggctgcaggacttacattcttttttgggaggacggtggggagacagggagtggtaaagggaaaaggttaaaaatccacctgtggttgtatattcttctattctgtcactctgttacctagactgtgagaggcttttgccttcagtcagattaaaaagagcagggccctaacattgagtgatagcacctgctttgataaataggttttctcactcttctttttttccttcttttatccctcactccctcccctaaaccctgcttcagcacaatggactaattctaggcattctgatccataagggccctccattttcctaaatgtgtttcaaggg

SEQ ID NO: 8721 - DNA, 4091 bp, Homo sapiens
  misc_feature (1)...(4091): n = a,t,c or g
cctccatctcttttcctccgcctccgccggcgcgatgggcgaaccgctgacggacagcgagaagcggaagcagatcagcgtgcgcggcctggcggggctaggcgacgtggccgaggtgcggaagagcttcaaccggcacttgcacttcacgctggtcaaggaccgcaatgtggccacgccccgcgactacttcttcgcgctggcgcacacggtgcgcgaccacctcgtgggccgctggatccgcacgcagcagcactactacgagcgcgaccccaagcgcatttattatctttccctggaattctacatgggtcgcacgctgcagaacacgatggtgaacctgggccttcagaatgcctgcgatgaagccatctatcagttggggttagacttggaggaactcgaggagatagaagaagatgctggccttgggaatggaggcctggggaggctggcagcgtgtttccttgactcaatggctaccttgggcctggcagcatacggctatggaatccgctatgaatttgggatttttaaccagaagattgtcaatggctggcaggtagaggaggccgatgactggctgcgctacggcaacccctgggagaaagcgcggcctgagtatatgcttcccgtgcacttctacggacgcgtggagcacacccccgacggcgtgaagtggctggacacacaggtggtgctggccatgccctacgacaccccagtgcccggctacaagaacaacaccgtcaacaccatgcggctgtggtccgccaaggctcccaacgacttcaagctgcaggacttcaacgtgggagactacatcgaggcggtcctggaccggaacttggctgagaacatctccagggtcctgtatccaaatgataacttctttgaggggaaggagctgcggctgaagcaggagtacttcgtggtggccgccacgctccaggacatcatccgccgcttcaagtcgtccaagttcggctgccgggaccctgtgagaacctgtttcgagacgttcccagacaaggtggccatccagctgaacgacacccaccccgccctctccatccctgagctcatgcggatcctggtggacgtggagaaggtggactgggacaaggcctgggaaatcacgaagaagacctgtgcatacaccaaccacactgtgctgcctgaggccttggagcgctggcccgtgtccatgtttgagaagctgctgccgcggcacctggagataatctatgccatcaaccagcggcacctggaccacgtggccgcgctgtttcccggcgatgtggaccgcctgcgcaggatgtctgtgatcgaggagggggactgcaagcggatcaacatggcccacctgtgtgtgattgggtcccatgctgtcaatggtgtggcgaggatccactcggagatcgtgaaacagtcggtctttaaggatttttatgaactggagccagagaagttccagaataagaccaatggcatcaccccccgccggtggctgctgctgtgcaacccggggctggccgataccatcgtggagaaaattggggaggagttcctgactgacctgagccagctgaagaagctgctgccgctggtcagtgacgaggtgttcatcagggacgtggccaaggtcaaacaggagaacaagctcaagttctcggccttcctggagaaggagtacaaggtgaagatcaacccctcctccatgttcgatgtgcatgtgaagaggatccacgagtacaagcggcagctgctcaactgcctgcacgtcgtcaccctgtacaatcgaatcaagagagacccggccaaggcttttgtgcccaggactgttatgattgggggcaaggcagcgcccggttaccacatggccaagctgatcatcaagttggtcacctccatcggcgacgtcgtcaatcatgacccagttgtgggtgacaggttgaaagtgatcttcctggagaactaccgtgtgtccttggctgagaaagtgatcccggccgctgatctgtcgcagcagatctccactgcaggcaccgaggcctcaggcacaggcaacatgaagttcatgctcaacggggccctcaccatcggcaccatggacggcgccaacgtggagatggccgaggaggccggggccgagaacctcttcatcttcggcctgcgggtggaggatgtcgaggccttggaccggaaagggtacaatgccagggagtactacgaccacctgcccgagctgaagcaggccgtggaccagatcagcagtggctttttttctcccaaggagccagactgcttcaaggacatcgtgaacatgctgatgcaccatgacaggttcaaggtgtttgcagactatgaagcctacatgcagtgccaggcacaggtggaccagctgtaccgggaaccccaaggagtggaccaagaaggtcatcaggaacatcgcctgctcgggcaagttctccagtgaccggaccatcacggagtatgcacgggagatctggggtgtggagccctccgacctgcagatcccgccccccaacatcccccgggactaggcacaccctgccttggcgggaccagcgggcatttgttttcttgctgactttgcacctccttttttccccaaacactttgccagccgctggtggtccctgcttttctgagtaccatgtttccaggaggggccatgggggtcagggtggttttgagagagcagggtaaggaaggaatgtgctagaagtgctcctagtttcttgtaaaggaagccagagttgacagtacaaagggtcgtggccagccctgcagcttcagcacctgccccacccagagtgggagtcaggtggagccacctgctgggctcccccagaactttgcacacatcttgctatgtattagccgatgtctttagtgttgagcctctggattctggggtctgggccagtgcataagtgaagcctgggaatgagtgttanttacagcatctgggctgccagccacagggaagggccaagccccatgtagccccagtcatcctgcccagccctgcctcctgggccattgccggggaggggttcggattccttttagggcattcgcttttcacagccccctgccccctgccctctgtcctggctctgcacctggtatatgggtcatggacccagatggggctttccctttgtagccatccaatgggcattgtgtgggtgcttggaacccgggatgactgagggggacactggagtgggtgcttgtgtctgctgtctcagaggccttggtcaggatgaagttggctgacacagcttagcttggttttgcttattcaaaagagaaaataacctacacatgcaaatgaaactagctgagcccttttcttgttttagcaactgaaaaattgtacttggtcacttttgtgctgagagaggcccatttttctgcctggcagggggcaggtctgtgccctcccgctgactcctgctgtgtcctgaggtgcatttcctgttgtacacacaagggccaggctccattctccctccctttccaccagtgccacagcctcgtctggaaaaaaggaccaggggtcccggaggaacccatttgtgctctgcttggacagcaggcctggcactgggaggtgggggtgagcccctcacagccttgcccctccccaaggctggcaacctgcctcccattgcccaagagagagggcagggaacaggctactgtccttccctgtggaattgccgagaaatctagcaccttgcatgctggatctgggctgcggggaggctctttttctccctggcctccagtgcccaccaggaggatctgcgcacggtgcacagcccaccagagcactacagccttttattgagtggggtggggcaagtgctgggctgtggtcgtgccctgacagcatcttccccaggcagcggctctgtggaggaggccatactcccctagttggccactggggccaccaccctgaccaccactgtgcccctcattgttactgccttgtgagataaaaactgattaaacctttgtggctgtggttggctgaaaaaaaaaaaaaaaaa

SEQ ID NO: 8722 - DNA, 360 bp, Homo sapiens
  misc_feature (1)...(360): n = a,t,c or g
aacaattacctatagaggagcaaagataagaattacatctgattcatcttcagaaaccatgcaagcaagagaagagtagagtgaaatattttaagtgttgaaaggaaaaaaaaaacccactaacctaaaattctatattctgggaaattatcatttaaaagtaaaggagaaataaagacttttaaggcaaacaaaatcaaaggaatttgtttccagtaaacctgtcttgcaaggcatgttaaaagtagttcttcagagagaaggaaaattatataggtcagaaacgcagacctatnaaaagaaagaaaaagcntccganaaggaataaaggaaaaaggtaaaatatgttttatttttttc

SEQ ID NO: 8723 - DNA, 251 bp, Homo sapiens
  misc_feature (1)...(251): n = a,t,c or g
tctcccacacctgtgaagataagctatcagtctacattgccagggcaaaattcagcnnnnnnnnnnnnnnnnnnnnnnnnnnnnnnnnnnnnnnnnnnnnnnnnnngggcaaattgtaagggaggtatgtagctnnnnnnnnnnnnnnnnnnnnnnnnnnnnnnnnnnnnnnnnnnnnnnnnnnnnnnnnnnnnnnnnnnnnnnnnnnnnnnnnttggcttagtgnttnttgggtcctcaagatttatttt

SEQ ID NO: 8724 - DNA, 1198 bp, Homo sapiens
ggaagaacagaagatgaccttgtgcccacagcaccttctctgggcaccaaagaaggttacctcaccaaacagggaggcctggtcaagacctggaaaacaagatggtttactctgcacaggaatgaactgaaatacttcaaagaccagatgtcaccagaaccaattcggatcctagacctaacagaatgttcagctgtacaattcgattattcacaagaaagggtaaactgtttttgtttggtatttccattcaggacattttatctctgtgcaaagaccggagtagaagctgatgagtggatcaagatattacgctggaaattgtcacaaataagaaaacagctcaaccaaggggaaggcacgatccgatctcggtcgttcatctttaaatagatctttcttgccaaggaatgctctggcccaggagcaaggtggaatgtttccctgacgctgtgatctgcagcaggcttcaaatgaaaaccgactaaggattttctttcaaaaacaaatcagaagcagatgctgattgggacccatataccacgttgctgactcacgttgctgcccttccatgatgttgccatctccttgagaacactgaagcaatcaccattctgatagaaagtgcttaaaccaccactcttaggtctgctcactcttagaacacacaatggaagaggaagggtttttgttttcactcattgtggtccccaagcctattgacactagttgcctagagtcccactgtgagtcatggtcagcctgtctgacatccaggttgtgctattaaccaagaaggaaacagatacttggaggcttagatgacttctgcaggatttatattcagatagaaaacatcaaatattttcaggggagaggtttttttttttaatttttccccctttatacaaaaaaaaaagaacatttccaaaactaaaatagaaaatgcttgtggcatttattttctctttttaaaaggttcagaaatttggcaggtcctttgcttctaatgacaaaactgtgagagctagatgtcctatgggcaattaggtagtataataaaggtaaatgaaggtacaatttttaaaccattattttcaccctgttggggtaaatgttttaaagagtgagaaaacataaattgagaaagggtgataaagtaatagataacttttagttaataataattatggtatta

SEQ ID NO: 8725 - DNA, 1049 bp, Homo sapiens
tttttttttggtacacaaattcagaagtctttattttgaaaaaaattcttccaacagtatttcacaatgaacaagaacttaaccaaatttatctatcatactaaagtatttcagaaatgaatattgaaaacagcctgtaagttttcatccaatatttaaaaccacctcctgaactaaaattggtcttcaaaaatcatggcgtattaacattttcccaaacatgccctgctgactagaaggtcctgttattctttcttttgaacttcccagtaagtttccttgttccctattcctaggatttaaagtgcaaaggtactttttatgagctattaggacaagtattcttcattgaaaataaacttttgcagaaaacaaatcctgtgcttgactaacagcaaagacatgttaagaaatttctgagctccaaaccatgaggaatcagaatcacaactttcagagtaataactcacattttttctaaagcataggaagctaattttgtataatgaacaaatgtggttgtgccaaaataggttttgccacagttaatttccactttctcttcttaaaaataaggtatagtctaagctaatgtagataaggaaaggcacgataccaacaaactgcaaaacaaagtatagccccaagccatgcactttttagagtcatgagtagggacaatgaaaaaattaaggtgcaaaatagatgtgaacttccacaatctttcaatggactgtcttaacagtttaatttaaaagcataggctttttcatatatcttcagatagtcaattagagagattttttttcttctttaaatggaagaatttcttaaatggaagcacaagatcatacctacacagctggtgagcctcaaaatagaataatgtctactttattaataaagtttccagtcaggcagaatcaagagtaatcttcatatatgcataaggatattatcattataacaatatttttagtagaaaagtctataaacaaatgttctccaaagggacatccatataatggaatcctggagacattaatgtt

SEQ ID NO: 8726 - DNA, 436 bp, Homo sapiens
cttttaataaccacacccctctctgtgtcgggaaacgccagcaaccactcacctgttctccgtttccacaatttcgtcatttccagaatgttatatacagagaatcacatagtatgagaccttttggggttgttttaactcagcaaaattccctagagagtcatcagagttctagtttcttccatttctttgtggagccacatcccgtgacgtggatgcacccagtttactcagccactcgtctgctgaaggaaatctaggctgtttctagtttttggctattatgaataaaactgatataaatttccaagtccaggttttagtgtgaacataagtttccatttctctggataaatgcccaagagtgcaattgctgggtgatatggtagttcacgtttagcaatctttttttttttttcccatcgttcctgaattt

SEQ ID NO: 8727 - DNA, 793 bp, Homo sapiens
ttttttttttgtcaagaaatttattaacctttataaacactattttcactcaatcattcataaaaaatgatttgtgattaaatctgtaataaaaccatataacgttcatcaatgcattcaataagaccagtttcttccatggaacataataaaccactttaaaacagcagttttcattcatgtcatataaggctgtcaaactaaaagtattccttataatgagttgttacccaagaaatccatctcacttcccgtgatgtggagcctggtgatgtgccctctaagagttgggtctgaaagaagactctgcccctttatggccacctccccagtctctctcaaacaagtttcacaacacggaaaatatttatgagcagagaaatcaaattcaggaggaactttagattcctttttgtgtcctcctgccaataacttcataaccacaaagttgggtttggcaacctttaaaattctattaacctcatggtccgggttaggaatattttccaatatcatttttgcctgttgaaagtgcttactagctgccacatacagttcaggagactgaggaggagggctatatttattgaggtcagacatttccttgaactgtaagtagtgcactggcggcggggtcatcacactgttgaatggagcaaacctgtgttcataccgaacttgttcactatcaagctcaaacttcggtttacgtactttgccgtccatgtcaaatgctaccatggttttaaacattccagcacacatgttctgatatgcttggctcattgtgatc

SEQ ID NO: 8728 - DNA, 645 bp, Homo sapiens
ttttttctgaatgaaagctaattccattcttttatttcctcataccacaaacatttcaatttatctgcctttttacaacctgatttacacaagcaaattgcaaacgaaaaccaggcattctttaatcatccaaaatgcatgtataaaatatagaacaaaccctagtatttaaacataaacagggttagctgaagcagctttattgcaatctcttcaagttagcatattacagtttaaatatttatgcctgtaaagatctgcataatctacaatacagagttatttcagaagcagttgacttaactagttgagaaaaaaaaacaacaaacttcaacgcaaagctataataattatctgaaacttatttacaattaaacatttagggtcctgatttacaaaactcagtgcctttcatgatttattgatgagttttatagagaaagtaagcagtatgtagaatattccccaggtaaaatctggagtgaatggcttttagaggaaagtctatcagtatgcttaactaaaaactaaagagtgacaaaactgtatacagcagcaatcagaataacaggccacaagagaagaacgccatttttgacaatatcctttgtatgtataggaagaaaaatgattgccccccccccc

SEQ ID NO: 8729 - DNA, 373 bp, Homo sapiens
  misc_feature (1)...(373): n = a,t,c or g
ggggaaatccatgcaaacaaatacatatatctctaaaatctctaaaataatgtcaataaaggattagaattataaggagaaataaagcagagtgaactggagaaatcctgggtgtgatgtttaagtcacagtggtcaggacacacagtggtttaagtcatctctggaagtgattttggggacacagatttgaataaaagagagattgaactatagaatatttatgggaagagnnnnnnnnnnnnnnnnnnnnnnnnnnnnnnnnnnnnnnnnnnnnnnnnnnnnnnnnnnnnnnnnnnnnnnnnnnnnnnnnnnnnnnnnnnnnnnnnnnnnnnnnnnnnnnnnnnnnnnnnnnnnnnnnnnnncaacttggt

SEQ ID NO: 8730 - DNA, 624 bp, Homo sapiens
  misc_feature (1)...(624): n = a,t,c or g
ttttttttttgttgtctcttcattcaagtttggctttaatattttattaaaaatttttgtatttgtaaatattaaaacactgaaacttgctactgacacaagaacgacaatgcactaacaataaaatcaaagtagaagctaaactattcagaagcagtagcaactccatgattccaaggtaatttaaacaggcaatttcagagtgcttcaagatgaaggcgcaaagcagcctctcagcctgcagtgatgctacgacaccggcagatgggcgctgcaaagcttctcaaatgcagcgggaagtccatttaccaacgggctgttgcgatctcttaattagcttgaactgagtttgtattagaatttataatttttactgcatattgcagttactcgtatattactgacactggaacagacatgttttaacaaactggttgagccgtatcagtgcgaaccagctgaatgtcagcgctgttccctcctgtgacagaagccaccggcgcctgcctgagggcactcccctcactgggactctcagtaccacgcccacctgtccccaaggtttgtttcatcactaagccccaccttccaggattttcacctttctccttcacttganccttc

SEQ ID NO: 8731 - DNA, 177 bp, Homo sapiens
aaatgcaatggattcaattaaaacatcacagagtctgcaggtgtactttgctgtagggtagtttcgtggtcgcctttttagcctgtcaatgcagtctctcttcagtctctcctcagcctgctgtaagcctagcagctccttcgttgaaagtacagactcatcgatcacagggccttc

SEQ ID NO: 8732 - DNA, 500 bp, Homo sapiens
ttttttttttttatttaaaaaaaaaaaactttttaattctgattgccaaattatttaaggcaggtataaaaaaggaaagcattcaatatacattttacataaaataaactagattacagcataaaacaagtaaccaggcaatggcgttaaagtctctctcttctaaaactggataattgtaaacattaaaaaaaaaaaaaaaagactgtagaactattcaagtaatagaacaatcacagatgtctctggtacgcaggctattgggttatttgccattcaagattatcaaaaaatgacacctcattattcacagatgctcattatttccccattttaatctttacattatatacaacacagtttttgtggtactggcaaccccatgccttccaaaagtactttttccacaatacacaagtacaaacagtgactacaggaacattttacactggtgcgtctttaacaggagccaccaaatagacatctaaattgtaccaaag

SEQ ID NO: 8733 - DNA, 448 bp, Homo sapiens
tttttatgttacaacttattttattaagggaccagccacattggattcatccagtagacatgacatagaactatgctttacgatgaagctcatgccatcttagctgctgagtccagaacaaagctggatggcttccttgtttttctttgatggagttgtttaacaggcttggtcttttttagtcttttctggatactgtaacaaatcttcacgtgcactgattggacaatagacaaaacagattgcctttctctgcccatcatcctaaatcttcaatgataaatcatcatatctcacatgtactgatgaatttttaaatatatgtttttaatcaaattgtttatataggcaggggcctaacatagctgacagggtggtgctggcaactggttcatcttcacttgggcctctcctcagaactgcttgaatgtccttcatggcaagaccc

SEQ ID NO: 8734 - DNA, 334 bp, Homo sapiens
ctagattgatttgtagaagagaactgcagtctgttccacgcctagcctgagccatggcctgtactgcctgttatgttgtaagaccctctgatttccaggaccctctggctttggattttggtccccatctttggttctgcatgttttttactgatatttcaaccttatatgactcggagctggggtgggctgcctgcactgcagtccgtggatctctgtctcagtctccaggcccaggacgcagcttggaaacctaaacggaattgtctttatcacaactcacaccagtcacttaatgaaatcgagctgcacaaatcgacccaaagggggtgcc

SEQ ID NO: 8735 - DNA, 270 bp, Homo sapiens
aaatacaatcgactttattctgacaccgtgctacaacttccattgatgtagaatatgtaaaagaacgacacaagagctaggaccccattatctgaaaatgaaatcaaatataattctcaatcggaagagtttttcccatgccaattacttttcatatttatcatcatccttcggttttctgacatcatttcttcataaaagtacatgcacactcaaaaatgggagctgtgtttccaaatgaattgaatctataacttttggcccagtacc

SEQ ID NO: 8736 - DNA, 396 bp, Homo sapiens
  misc_feature (1)...(396): n = a,t,c or g
ccatttttgtaaggatcctttcaattgtatcttcctatctaattcaagattggtggaaggtctatgcaaagattgataacatggtaactgattagacatgttattttaaatgcagtccaagatttggatgaaaagctcacgttcaggttttttttgccttttgttgtaggtactcgataaatatttattgaggtagtgaaactaatctgaaattggatctgatacagagaatttgaccgattttacaaggtgtccatttactttttccccataagtattgtttaaataggctggtttattatcgactatcacacagatcttactgatttgcctcatttccttaaagatgtaaaataactgtgnttctctgtatgtttgtgttgctaaagaggaggt

SEQ ID NO: 8737 - DNA, 350 bp, Homo sapiens
ccttaggctacccaggggatgccaaccatcagtcaactcattagcatacaaaatgacacttatcaccttgaagacccaaggatttttgaagtagtatgccaggaaatgggacagagaccaaatagagatttcataataccatagccttctctctggacctcttctatatctgtacttgctgctctatcttactagacttacttccctatctacactctctctctaggttgatctcttccagcttccggggtctaaaaaacaatccatatactaggacacggtatgggtgattgctggaacaactctatgaatatactaaaacaattgaattgtacactttaaatgagtat

SEQ ID NO: 8738 - DNA, 224 bp, Homo sapiens
caaagctccacctcaaaaataaaaaagaaaaaacaaaaatcctctccccttttttaaattgggttgtctctttattattgagttttaacatgtcccttgtcagatacgtgatttgcaaatattttctcccattctgtgggttgtgttttcactttatcgataatgtccttagacatataataaatttgtattttaaaagtgacttgatttggctgtgcaaggtg

SEQ ID NO: 8739 - DNA, 282 bp, Homo sapiens
aagagaaagagaaaatagtttctaaaaaattgtatacagacaaccttttatttccaacaaacgtgtgccgagagagagagagagaaaatagttttaaaaaaattgtatacagacaaccttttgtttccaaccaacgtgtatctagaaaagagttagtcgacttattttatacatagcatcagtgaatagtaatgagtggtaggtcatttcaaaatcctgttgcctatattatgtgaatacccaggaggtcatcttgatacgggacttaataaaggttgattt

SEQ ID NO: 8740 - DNA, 1285 bp, Homo sapiens
tataattatgaatctttatatttttatgatagttgatagtttacaaagctagtttcacttgatctttacaaaaaaccctatggggtgatatttttattacccacattttattgataaggaattaaatctcacaaaggtttgaagactttcccaaaagtgtcacaggacaactaaaactagttaaccccaaggccctgtatcagaatgatcacctgcctttcccccaccaacccacactcaccaggcacagtgtccaagaggctctgctcttatctcaatgccatctttgggttgcctcatcctacctgcaatgcttaccttcaaagcagatgctgacaatgtgtttggattttggaggcttgattatgagataaaactgaatagtgctggacacatgttgagtttcagttttctgacccttctcttttgagactccaggtccaaccctcatctgtaccttcagattcatggacaccactggatgaggttctggcttgcttcattttcattcatgactttgactcccagaccacactttgatcctggttcttccagcgttgatctagaaacatcctaacctctaaggcaccatcaaaccaattttgtccaagaagtgtaaatatcattgcccacaacagatctagcaacaattaacatttgctgagcacttaccatgtgccaagcatggtaagtgatgaatgctttatgttcattaactcatttaatgctcatagcaaccctttgagattggttactcataattgtattgatgagaaagccgaggtgagtaacttgctgaagattcaccacaataagtggggaagcccaggatttgtgcctacatcattttgactctagagcgtgggctcttaatcatttaggaagtactggcctccagaagtcatcttacatccacctcctcacaatggataattgaggatgacaagtggttataagcactttctttgttgaaatttaagcttaaaaattgatttggagttagacatcaatccatgacctgggggaaaatacctacaaagagagacaatgggaagactgagaacccattaatgaaaagcaagcagtccacactatatggcttgtagtgtaacatttggacaaacacgtattctgtggtgagcttaggcaagatgctgcccacactgggaaggcagccaagaattactgccacctccacccaagaggatcaccctactaaaggccacagagaggaccagcccccgtcagagactgcttgtaatttctctcactgtgggagcttcct

SEQ ID NO: 8741 - DNA, 425 bp, Homo sapiens
aaatattttaatttacacaatgttagattgtttttcacccatgtgtatacataacagtgtttcccaaattcacagggtccatttccataattctaaagcaaaaatagaggcacacaaatggataataattcatagttttatgcctttttttaacctatctttaaagaaattcagttgccatgtaggacaaagatgtgatggaacctgtaacaaatttctatggacttgggaaaattaaaggtctaaaaatcctaaatgtaggtaggctctggggcaggtttggcaatttgtggcatgggggttcactcaccctatgggtccgtggaactcccttatcctggcaggctggtaggggactttcaggcaaatatgggggctcaatagggcttagggggaggggggcttgttttaaatagggttccccc

SEQ ID NO: 8742 - DNA, 724 bp, Homo sapiens
agagaataatgtgaatacaacaggaatcctgttggtattctatttatattgtaagcagcagttcaattgttttgaaaaagtaatttcaattttaatcactgaactaaagaaatgggcaaggctgacttccgtaatataggttctacctaaccatctctaacaccgctgtcaaggaggaccagtgttaaggtacattactaacaaccacacaaatttttaaaagaaaagaacactcttagcagcctatggtactttgaaatgaaatattgcctctcattctcacttgtgttgccattccaaaagtatgaatttgctgaggtttatattctgggtattatataaccattggttctgtttggcataaccctattaaatggtgctcagagctgaattacctacaggaaactttctggtttaattagcataaattggtataaatattagtgagcccatacttctgtgatataattaaaccaacttaatgattctcacataaggtgtcaatttattttactaatgcattcataatctatgctttgtagcaacatttttcaaatgtttaaaatgctaaatcttctcaattttccaatcttttcttgaatctattagatacctatagtgtagttactgaatagctaggagacaaatacacctagttagaaatggcactgctttataaaaggcactagagaaaagacgagactattcctatatttaaatgctg

SEQ ID NO: 8743 - DNA, 442 bp, Homo sapiens
tttttttttttggtcttcatggtatcacatcaccaggtcttatataacttgaacctgtattcatgcaacacttttcttactggattcccaaactctttatatctttctccactccatattacaaattaatttctatgacacaatttttttaaatcaaaacttcaatttcactctcttttactcagtatttaaacctcaaactacagcaactgggtaattttaacacccttcctagaaagtcctaacaaatcttacctcccacatgggaaggagggccaacctgttaaactcactgtcccaaggaataactatactaaattctccccttttatgtttctgctctcattcattctcttacgtaaagccatccctatttccttttacctttccaaatcccacccattcttcaaagccaagttcacatccctccttaaagatgttt

SEQ ID NO: 8744 - DNA, 148 bp, Homo sapiens
tttgatatttggggacttttctaggaaacctgcttcaacccatttaaggtttccttctgcattgtcttatataaaccctctaaattaggactgttttgtggccctaactgtccccataattattcacatcacccctacccactatcta

SEQ ID NO: 8745 - DNA, 587 bp, Homo sapiens
gcgtcgacgttagattaactttttcaagatttcaggacaaatgtttatttaataattaagggcaaacaaaaacattaaagcataggaatacatcaactgaatacaagttgtcttgtttggtctgaaatcttgaaaaagttaatctaactacttacctgaggtagatttaggttggcactgcttcaagggaacctccgtccatcccagaagttaccttctagttttggttacaggctcccaagtggtcctctccaacctcaggttatgctatatgaataataccaacacctttttctcccatggttaaaagccttcagccttgtttcatacccccatagttctctgtttgggggatggtccatcattaatttacttaaaaactagagacaactaccagtaagatcagttgatagaagggtcaagtcattgccctgttaatgataccaactttgagcccttctccatgttctctctaatgactaacaagtagccgtaaggactacttttcagtcacaccatgcctcacagccaatactattttaagtatactagcaatgtccaacatatactagtgataggcatgattt

SEQ ID NO: 8746 - DNA, 521 bp, Homo sapiens
  misc_feature (1)...(521): n = a,t,c or g
atcagacattaaaatagtttatttctttttccattctgtaatcttaaaataacatcagcttcagtgcctgttcacaatacaaaaaaagtcaaaaaacaaaaacaacacccaaaacataaaaaagaaacaatttgccaaataagttatttgttcctaagagtatcaaaagtgcaaaatattcaccttcttttcagatctctcccaagcataattatcctccttgacaaactgaacagacagattcagcagctgccacactgcacttgtttttaggggacaatgtcagacaggtggatgtgaactacagttcctctgtaaagatgtttggcatcagcttttaaagaattctagttaacaaaacaggtctgagtatgtgcttccaatctctattcccaaacaaaggaaatcactaaaaaaacagatcacacttctttttataacagaaaaatatttatgtaatgatggcagctgnaaattgattgggatgttaataaataaaaaggaacaagtatcaacaagct

SEQ ID NO: 8747 - DNA, 513 bp, Homo sapiens
ccctagcagccaggcagcacctgccagagcatgaataaggctatcttggaccgcccagcgtagccaacctgtgctgaatgaagccacatgaatatgcccaggagaaactagcagaagaatcacccaccttgcccacgttagagatataaaccactatttgaggcagtttgttatgcagcaaaacttagccgaaactattaccttgctaccttgactgctggtgtaatttcccatctcatggagtcacagagttttcttgccaactgcagtgagttggcaaatgggaatgatcagtagcctcagtgtgttttctgatccactccatcctgtattatcatctgcgaataccgtttttcctttaaatgcaatgtgtctttcaaagctgacttgaatttctcacctttcgagttacctgccatttggactcacttatttggaggagatatgtaaagacccagcgtaatacctgtatgctcaataaaaagtatttgctggtaaaaaaaaaaaaaaaaa

SEQ ID NO: 8748 - DNA, 785 bp, Homo sapiens
tttttttttttttttggttagaagtgaatacttttattgagtgattttagaagttgttttcggatattccaagtatttaggatgtggctgtggtggaaacaagtaatggaaccaaagccctgtgtgtaagtagtcactgaagctaaccaggtagctgaaatttatttcccccaaatttactgaaagaatgtgacctttgtgctctcaaactgtggttcaggcactccagaatttttttctgtaccttcaattctctcagatttaaaaaattatactagagaagaggacttttgcctatgaatacaaacaacattgcaatctgcatctgcaaacattcttttcaatagacggttaggtcatggatacaagtaaacacttggatataaggcaaacatttaaaagtgcatttcaggtattaagtcatgaatgatatggaaaagttgccactaaactttccactgaatagtgtttcacagcacaaaaataatctattttcctgatacttttttagtatggataccaagacagcatgacatcagttgtctaatttttttcccaatttgatttaaaaaacccacatgttcaggcttaaaagatagcattatgtttaatgggtgctaggaaaccaggccacatggaccaacagacctaaatttactctaaccctgaattttgttagcacccaataaatgaattaattgaaatctggatttctctatacggagatgaagaaagtcttttagtgtagttattttaaaacaagttgctcctatttccttatcaga

SEQ ID NO: 8749 - DNA, 335 bp, Homo sapiens
cagttttcttactcaagagccctcaaactcctctggtgaatggagggatgttaggaaaggagatgagaaatagcagtggccatgagaacatgcctcctcctttcatgagcctgagattcctggctgtcaaccctgtttatcttttctcttgggagcaaaggagggttcaaagctgagtggggcctgaagctgtcaattaacatgtgcatttctcttctctgtttcttgttcatctggcgatctggcaccacaggggaaggtaagctgttgttgcttctgtggggtcctgcaggccaccttctccagtacccgcctcctaccctaccccctttccc

SEQ ID NO: 8750 - DNA, 2265 bp, Homo sapiens
cgcgagcaggagacggcggcgggcgaaccctgctgggcctccagtcaccctcgtcttgcattttcccgcgtgcgtgtgtgagtgggtgtgtgtgttttcttacaaagggtatttcgcgatcgatcgattgattcgtagttcccccccgcgcgcctttgccctttgtgctgtaatcgagctcccgccatcccaggtgcttctccgttcctctaaacgccagcgtctggacgtgagcgcaggtcgccggtttgtgccttcggtccccgcttcgccccctgccgtcccctccttatcacggtcccgctcgcggcctcgccgccccgctgtctccgccgcccgccatggcgactgcgacccccgtgccgccgcggatgggcagccgcgctggcggccccaccacgccgctgagccccacgcgcctgtcgcggctccaggagaaggaggagctgcgcgagctcaatgaccggctggcggtgtacatcgacaaggtgcgcagcctggagacggagaacagcgcgctgcagctgcaggtgacggagcgcgaggaggtgcgcggccgtgagctcaccggcctcaaggcgctctacgagaccgagctggccgacgcgcgacgcgcgctcgacgacacggcccgcgagcgcgccaagctgcagatcgagctgggcaagtgcaaggcggaacacgaccagctgctcctcaactatgctaagaaggaatctgatcttaatggcgcccagatcaagcttcgagaatatgaagcagcactgaattcgaaagatgcagctcttgctactgcacttggtgacaaaaaaagtttagagggagatttggaggatctgaaggatcagattgcccagttggaagcctccttagctgcagccaaaaaacagttagcagatgaaactttacttaaagtagatttggagaatcgttgtcagagccttactgaggacttggagtttcgcaaaagcatgtatgaagaggagattaacgagaccagaaggaagcatgaaacgcgcttggtagaggtggattctgggcgtcaaattgagtatgagtacaagctggcgcaagcccttcatgagatgagagagcaacatgatgcccaagtgaggctgtataaggaggagctggagcagacttaccatgccaaacttgagaatgccagactgtcatcagagatgaatacttctactgtcaacagtgccagggaagaactgatggaaagccgcatgagaattgagagcctttcatcccagctttctaatctacagaaagagtctagagcatgtttggaaaggattcaagaattagaggacttgcttgctaaagaaaaagacaactctcgtcgcatgctgacagacaaagagagagagatggcggaaataagggatcaaatgcagcaacagctgaatgactatgaacagcttcttgatgtaaagttagccctggacatggaaatcagtgcttacaggaaactcttagaaggcgaagaagagaggttgaagctgtctccaagcccttcttcccgtgtgacagtatcccgagcatcctcaagtcgtagtgtacgtacaactagaggaaagcggaagagggttgatgtggaagaatcagaggcgagtagtagtgttagcatctctcattccgcctcagccactggaaatgtttgcatcgaagaaattgatgttgatgggaaatttatccgcttgaagaacacttctgaacaggatcaaccaatgggaggctgggagatgatcagaaaaattggagacacatcagtcagttataaatatacctcaagatatgtgctgaaggcaggccagactgttacaatttgggctgcaaacgctggtgtcacagccagccccccaactgacctcatctggaagaaccagaactcgtggggcactggcgaagatgtgaaggttatattgaaaaattctcagggagaggaggttgctcaaagaagtacagtctttaaaacaaccatacctgaagaagaggaggaggaggaagaagcagctggagtggttgttgaggaagaacttttccaccagcagggaaccccaagagcatccaatagaagctgtgcaattatgtaaaattttcaactgtcttcctcaaaataaagaagtatggtaatccttacctgtatacagtgcagagccttctcagaagccaattagcgttatttttatatttcctttatgtgaatttttaagctgcaaatctgatggccttaatttcctttttgacactgagagt

SEQ ID NO: 8751 - DNA, 341 bp, Homo sapiens
cagtaaatgccatgacaagatttcataaaaatcatatccagtgtaggaaaaaattttttaaggaacaccaggggattatttcctgaacaagcctaaggtattatctagctccaatcaataggccaacatcataaatagtaatgaaatgttagaggatgcctctctcaaccattattatttaccgtagttttgaaaactctagctaaatcagtaagatagggaaaagaaaggtcttaaccgttaaaagagtgagataaatttatcagtatctgtggaggatattactgtctatatagaaaatccaagcaaatcaattgtaaaaaagtggcttacgcaaagga

SEQ ID NO: 8752 - DNA, 360 bp, Homo sapiens
ttttttttttttttctacaaggcatatatatttatttacacatataaattttttttttaatgtaaagcttaagtgaacacatacctgatcccacctccattaaaacaaataccaccacttatgttagagtctaacagtaatacttacttttaagtcagttactgcattagatagtaggaacagaattctctagaaaatggttatatggcctatgagatttaaccactggagttgcaggttcaagaagagactgccaaggattctaacactggcaccattaatacacctctctacctaaggagccccagaaaaatcactttccagggacaaagaagtccttaaagtgtatatggaaggttt

SEQ ID NO: 8753 - DNA, 327 bp, Homo sapiens
ccttaagtttttgagttcacagtgatatttgtgcatttctgggggaccaattgacttttcagtggcttcgaggagttcaattctgctgagtttagcaaattctccaactttgtcctagagcacaaaaattaaatatcagcaactatcattcatttacatatatcttcaaaatgtatttcactcaatgcttacacttgtcaaggtgaaactcattaaaaaaacatttgagatataaaccttttgtgcattattctttagaataatgaagataaacttaggatataaactgttacctttttgatcatctttaaaaattttctgaccaat

SEQ ID NO: 8754 - DNA, 377 bp, Homo sapiens
tttgttttattttaatgggcaaattacaatagttgtatatatttacagggtacatcgtacatgttatgatacatgtatacactgaggaatgattaaatccagtgaattaacatatccagcacttcacatacttattgatccacactttattcaatgctgtgcccaacacagtctcagagacaaagagcagtctgaaatttccagatgctttggtaggtcagaaggcgcatgccatccaccctcttacactccgctcaactccctttccctgtagaggggagggaggcaaggcttttgggctcaggcttctcctacacttttttttccaccccccacccccacaaggacctcaaaggcaaaagcttcccatttccttt

SEQ ID NO: 8755 - DNA, 652 bp, Homo sapiens
ttttttttagatctgtaattgtaatttattttaggtcagtggttcggtggaggcataggggtcaagggtccagcactcccagtatttcttggagggtgttcagcagtttccagaccggctgactctaactcttatctgcagggaagcgtgttactctcgagggaggggcgtggggaaggcggcgggaggaggagcgcacgggccggctgccgtgcccaccacggctgaggaacatggttttcgagtcggtggtcgtggacgtgttgaaccggttcttgggggactatgtggtggacttggacacgtcccagctctctctgggcatctggaaaggtaaggaggccgccgccgccgctccccggcctctcgtgcttcccggccgtctcgctgcccgagcggcgtcctgcgttctcggggcttcgagcaccttgctcgccgggtgcagccacctgccgccgcccgcctgtgggtcaagttacgtaaagccgggcggcagttccactggcctccgccctcgagttgtttatattttgggggaaaggagagggtcatgagtgcgggatgaaaaggtctatattttccgagcggagcggaccttccgtgggctccgtgggtctggcgttcaagtcccggcgaggggccgttctctaca

SEQ ID NO: 8756 - DNA, 805 bp, Homo sapiens
  misc_feature (1)...(805): n = a,t,c or g
gaaagaaccccaggtctacttttgaaattttgtattataattgtaatgttgcccatggttaaaaaaaaaaagtgttcagtgatctatgtctcctactactcctatttctctgtttttcctctgcaggagcttgctgctgttaacagttattcttccaagttgttttctttgtggggagatgggaggtgggaggaaatataaacatatatgtatagatctttcaaaatatatgacggtatacccgtatgttctgagtcttgctgtttttacctggtaatatttagaaacatttattttgagataaaggagagcacttttaagttgaacctgtagttttaaaaagtacatttcaagtaagccaaagccagagaagtaaatgtatttttcattgttgtatcagaattttgaatttactattttaaaaattcaagagttttgtagctgatctatttcttcccctcagccatcccaaataggtcatttgtcaacagatttaagaatgtttagaaacaacaactttgggaaacgggaaacaatttggtataagtgggtgtgccataacctctctcgtagccattcattcccggatacataccctagagaaactcttacacatgcgtaccaggggatggatttaagcatttgtgtgtaataggaagaaaagaagaaaaaacccggggaagatccccaggtgtccacccaacagtgtgttgggataaatactgtggtatattcccaacagtgggaatttccacaggaagtggaaantggaanggcagctatggtatgtggaactgggacaaaa

SEQ ID NO: 8757 - DNA, 457 bp, Homo sapiens
acactcactgcaatttattgtataagcatacgaagatgaagggttgaaaggattctcttttaatacccaatgcttgattataaaaactataaatagtaagtgtggaacaaaccctattaatatattaaccattgtttaaaagaaaaatgatatgttctgttgtattagtgcaaaagaaaacaaaatggatattatagtatttgatgacattttctgttgccagtcagattagatgcaacaatcctacaggcctacaaatcacaagtaattggaaggggcataaaggtcttaaataatttgaaaaataatcttattaacaaataacctgattcattaggcagttaggtaaatctaagcatttaactagcattcaagaaggcaagatacttatttatgttaataagcctcgagtcttatttatgttgggcagtgatgtttgacgtttataacattagaa

SEQ ID NO: 8758 - DNA, 524 bp, Homo sapiens
  misc_feature (1)...(524): n = a,t,c or g
gtcttgttttattattattacagaaagtggggtattgaaatatcctactataattatattgctctattcaactttgttagtatttgctttatatatttggaaaccccaattttgagacacacacacgcacaaatacacacatggataaacaaatttgtcataggttcccagttaataaatctattattgtttaatgtctttctttgtctctttgcagttttgacttaaagtacattttataaaatatgacagcttttgacttaagatgtagcttgtgtaatattattttgacctcttctgctctcatttgggttaatatttacatgcaatgtctaaatctatcttgccaccttcagtcttttcttaatcattaggatgtcagctgacccttgtaggaaagggcaaattgggatcttgggtttttaatnaattttaaaatnaaatttctttattggaaagtatgtcctcttggattgggaaagttttctggaaaccaagggggacttaccaatttttttttgttg

SEQ ID NO: 8759 - DNA, 372 bp, Homo sapiens
ccgcgtcgacgcagtattagaacataaaaaaattctataagtaactagaatactggtagtcctagacgtttcttgcattctgaaagccatagaactgaagttgttatgtatggttatttctactttttaaaaaaagcaaattcttgctggtctatataatagaatgacttattttcttacgtggtaagaacagaaatcctacaaggaactgggagctaggctggcagggaaaattgaaggtgatgtgtttaataggaatgtaatgcaaatacttctgttttcaaagagagaaattattgcttatgaacattactggagcctggctttttgtttttttacttaagtaaataggtaaggaaaaaatttcccatt

SEQ ID NO: 8760 - DNA, 346 bp, Homo sapiens
atctacgattcatagatctggaattcgcggccgcgtcgactgaatattacagtgcagtttaataacattcttaatgctttcaactgtgtcaccttctttggtttaatacttgctttttgcagttctaggcttcacagccttcagtcaggggcaaaggaattgggcaccagtggcattgggactcactaaagccctggtggctcctaggagttgttgggagctcagagcttcatttctcctgctcaccttcataccatggtgccacagcatgtcttgattgcaataaacaaatgtttattctactccttgtggggcctgtcctatgttaggagaggcaaagggggga

SEQ ID NO: 8761 - DNA, 344 bp, Homo sapiens
aaaggcattctgcagtacaaacaaaggtatagttgtttgtttccctttataaactgctattttataaatgctttcttcttttttaaaatgttgttttcattttgttttttaatcatttttctccttcataggagcaatatgaacttgttcatagagctattgcccaactgtttgaaaaacagctacaactatatgaaattcatggagctcagaaaattgctgatggagtggtaggtgttcttggtctattaattttaggaaacttttactctttggtaagatgtaatatttagccttttttttgttgtcttgtgttttgtctaacatgagaagaatatccagga

SEQ ID NO: 8762 - DNA, 346 bp, Homo sapiens
aaaaagcctccttttgggggtcctaatcattgtctggtgagagcatatcccagaaaactaagcatggcttgatctggaggggcccactgggaatattaattactttgtttaaaaaaacattcaaagatataatataaaagttgaaaagccttataaaccaccgccagaagtaactgatgagaacaatttgatgtctgcttttcccaggttttaaataatcagttttcattataccaccttttcattttttgaaaagtcacactggcttaaaaacattatttttcattctgctcctttttctttctgtgttctatttttcccatgcactcataccatcccctttgtt

SEQ ID NO: 8763 - DNA, 1033 bp, Homo sapiens
gtttatccaaatggatttgatgactttttaggatcacagctctttgaggcactcagctcctttgaaagcaaaactatttctttagccaaaagaaaaaaattggatcttccagtgagcctttctgtgtggctgcaggactagcccggaacgagagttctgtggagcgtcacagggcgggtgcctttttaacttgggcattgccacgtgaatgtccccgccctgctgtccctaccccccagggtacctccgcagtccccctgccctagcctcgggcatttgtgttgtggccatcttttcctgccgggtggcatgttaagatctctgttcctggatgatagagttttacctagaatcttttgaaaccattattggcaacttggttaagtataaatatttataattttgtaactaccaacctggctcggtgcctgacccctggtaggtgcataataccctccccttaggtaatggcattagactttaaaatatgtgtttggcccagctctgttaataattagccatttgactttgtgcctgagagtttggattgtgggaattttcaggttgcacttcttgtctgttttcccttaattaaaagcaaataatgaccatttgaactgaaaaagaatcaatatgttaaactatttggaaagttctacaagagataatggtatgtatattgaaaattatacctcagacattgcttatttgcatatttgtgtgtatttagtctgaataatgaaattaagactttaaaaatgaacattcgcattgtttcatagtggcgtaagtttcatgtgagccttgggttaatattaattttccacttcctttttttttttttttttaaaggattctatgcttttatcctgacatctgcacgtcatcggaacatctctcttccagggcgtagacgtttcatttaccgtgtacagtcattttcttcagtttgcacttgcggccactgttttttgtgtggtcttgagtgtgtatctctacatgcgctctttgaaaagcgccccggaatgaccga

SEQ ID NO: 8764 - DNA, 695 bp, Homo sapiens
ctaagatgtcattcatgagtaaaagcaataggaagacattctcgaatacactgggggagaggaaactacagaatacagacaatcataagaaaaatcaacatacattcacaaatggagtagctgtactttgaggactgacagtgtacaccaaatccagctaaactcacctgcttactgtctgagatcaatagccactctgattaccatgtgcttattttgacaacttaatttgttttgtgtccaaggactgacattatacagtaaatatttactcaaaatatattcctcacactttttctatttttttataaaaacagtcaacacttgccccaccctactcccagcatatgcacacacacacgtgcacacacaatactcacttaacaaacatttaatttattgaacatttattatatgccaaagctggtataagacaccaaaagagtaagacagaaagtattcttccctggagctttgtctgactttccaagctttattaggcatcaaacaaaactgaagtgctttttaagattcaagtctcctacgtcgtctaaggcagagtaagtagccttcagtactatattttactctaatttttttttaacacaatggcagtactaataagtatgaaactttggtataaatgtcagattctaggattggtgcctcctggctttctgcaacactcctagtaa

SEQ ID NO: 8765 - DNA, 356 bp, Homo sapiens
gaaataatgaaacctaagtagaccactacatatatgtaagatgttatttaattcctagcctaatcttgaccctgactaacaggagcatacatctattaaaaatatttatgaatatttggttttacactagtaacaatctatctcagttgcttatgagactctcatgcctaggaacagcacattcatgtatttaaactttcaaacagaattgtgtcacttagagtgatcaacatgcttattattcattatttacagcattcttcagtatacctgttccttcacaaaagggctatgaattgactttctatctttaaatattgaagaatagggctatttttaataaaactctaagtcag

SEQ ID NO: 8766 - DNA, 396 bp, Homo sapiens
ggggcgttctggggctgcagaagactgactgtggatgtgccatttgccaggaaggtatctaacttggctttgtgcctgaagaactgtttcttgtctttcgctgtagcagtgggaaactccttaagctgtggttcagcctgggccctccctctctcctattaaacaaaactaggagagtccatatgtctccattgtgagttatttagaatggaggagtcgtgactgcttctaaccagagcctcagcccccctgaggatgtgaaaagaaaacaaacaacttgtaccttctttctgatatcaccgtcattcctctttctttgtcaccaaggaaacgagtcaaaggaacagcacatacaggagagtttgtagaaaaataaaaaaaagtgataacctccaa

SEQ ID NO: 8767 - DNA, 402 bp, Homo sapiens
  misc_feature (1)...(402): n = a,t,c or g
gaaagaccactcactggagtgtatgcatatacatgctggatatatacctgggtacatttccatcgtttaccaagtgtctatcatagggttcaatacacatttttttcttatccccagatacacgtatatgaagaaatactgctgtcttaaattgtacagataagaaaaaaattcagagatgttaaatgcctacccacaagcatacagtctttaggggacagagcttgggctcaagggtagtgggtaaaggctccagtgcttgtgtgttatctactggggccccacaaatctgaggcagagcacattaacacaggttctgttacatttgcatccatcttctctgtatgtctttgggaaaggatgggggcacggcccttcntgggcttgatccgttaatgggcc

SEQ ID NO: 8768 - DNA, 156 bp, Homo sapiens
aagtcactgtgccgcccacctagtaaaccttctgtctgtgctcatggcatctccaagatggggcactgctgtgtgcagaatccagggtcctctttctgcttgcaactcctttccctggatgccccagaaacaatccgggcctcctttccgtcgacc

SEQ ID NO: 8769 - DNA, 366 bp, Homo sapiens
tatttttctgctttcagttttatttattaaatagtttctactagcctaatgttaaagtctgccaactagttccttcaagttaatcacattcacttttgattccctcttaacacattaagatattttataactctgtgagtttaaaatctgatgcaaattcattgtggtcaggcaagatgcaagaccagtcaggcaaatacacttcccttattttttatgggtctgaaatatcttttgtcttgggagatgtattattatacaaaagatctatttggcaatttatagtttgctttttatctattcaattgttccctggtattcttagaacagaaaagcgaaccttttaagaataataacatgccaatt

SEQ ID NO: 8770 - DNA, 516 bp, Homo sapiens
  misc_feature (1)...(516): n = a,t,c or g
ttttttttttttttagattttgacattatttaatcataggagttcactccagtataccttttctgcctttgaataaggtatgaaccttcacaaaaagctaccatcatcattaattgggaatgtctccagtgtgaattttttggggcagattaagtcatacttcttggctcaagaaccagatgggatcctgaggtagtttacagaagacacagttctggtgtacagagtataggagactttaataacttcataatgtctggtataaatgatatacctaaggctatggacgtctctccagcctaaattcccaaaggtannnnnnnnnnnnnnnnnnnnnnnnnnnnnnnnnnnnnnnnnnnnnnnnnnnnnnnnnnnnnnnnnnnnnnnnnnnnnnnnnnnnnnnnnnnnnnnnnnnnnnnnnnnnnnnnnnnnnnnnnnnnnnnnnnnnnnnnnnnnnnnnnnnnnaacttctaaagaccccaaacgcttccaatatcagacattaaaataaatctg

SEQ ID NO: 8771 - DNA, 529 bp, Homo sapiens
aacttcccaggagctccgagaggcggggaagtggcggtgggacgcaattccccgcgcggagtcgggcagtggcagcgggagaagcggcacgcaggggcgcggcggggccgagcagaggcggtcccctgggaggacggggtctcccctcgttgcctttgtagtggagaaggtggacaagtggcagtcggcgtgatcgcagggaagcggggccggcgcgggcggccgagggtccaggcgagccccgggcggacgggagatgccgctgctacaccgaaagccgtttgtgagacagaagccgcccgcggacctgcggcccgacgaggaagttttctactgtaaagtcaccaacgagatcttccgccactacgatgacttttttgaacgaaccattctgtgcaacagccttgtgtggagttgtgctgtgacgggtagacctggactgacgtatcaggaagcacttgagtcagaaaaaaaagcaagacagaatcttcagagttttccagaaccactaattatttcagttttatac

SEQ ID NO: 8772 - DNA, 1334 bp, Homo sapiens
aagtttttcttccttccttttacgaattctggcagctgcttcttccctctcttttcgatgttgttctgcttttaattcccggaactcctgctttgcctgtcgtaatatatcaacataatcttcaataaaatccctagttgaaactagggtcagtagctttccacagagagcatggagtatcttcattttttctcctggtgtcaaatcatacactgaggtgcttgacagtttcttcactagactgggattgctcaaacgaagctccatacaagcatcatctgtagcatcaaatcctcctcgtttttgatatctatactttgcatttgctgatgttacatcagcacctgaagctaagatgtgcagtctgaggatttctgaaagagtgcagctatcaagatccaaacttttcaaactgcagcctttggtgtcagcatcagttagttgctctttggctacttcctcttcttcttcagctattgcctggaaggattgcagtcaggaagaaaaaaagcaaattcacacagtgggccttcactgtcatttcctacaagagcttcctctaatacttctagggttactccatcaggaaactcatcttgaagatcaaaaagttccccaaatgcattaaggaactccaaaaccatcagagcatcaccaaagatttcaggaggtagtctagttttcactggtgttggttctggaagttccttaaggtcatcacattccatatcttctctaggtttactccactgttttaagtattccacatactttcgcttttcttcacggtaacttctctctttccttttctctttctactttaagcctctctttttcttcttttttctttagtctctcttcttcaacaatttttttcaattcttccctctttttctctttatcttctttttcttttttcttcgcttctagggcatctgctttttctctttttaatttagccttttcaaaagccagtgacttcatttcttcttgtttcaaaagtttatctctttctttagtagctttgctcctataacttgcaagagtctgtttattagcaacattgtcctcttgactaatatgtattcgtttgggaggtctccctcttcgtctgttagcaggactgaagataaatgtgggtggatcatcagggaagaaataagaaaaatcttgttctgctattttatacgttgaaagagatgatgcctttattttaatgactccatcttgtggttcacagtgttgcttcagaaaaagctttagtttatcacgagaaaataggtgttttctccggctgatttgtgttgctttaacaatagcagactcatgtaatt

SEQ ID NO: 8773 - DNA, 361 bp, Homo sapiens
cacacagtcagtaaaagaaattttgaagaggaatccaaatgtaaacttaacagataaagatggaaatacagctttgatgattgcatcaaaggagggacatacggagattgtgcaggatctgctcgacgctggaacatatgtgaacatacctgacaggagtggggatactgtgttgattggcgctgtcagaggtggtcatgttgaaattgttcgagcgcttctccaaaaatatgctgatatagacattagaggacaggataataaaactgctttgtattgggctgttgagaaaggaaatgcaacaatggtgagagatatcttacagtgcaatcctgacactgaaatatgcacaaaggatggt

SEQ ID NO: 8774 - DNA, 289 bp, Homo sapiens
cataatcaaagtttatgattaaatgtaaggaagtggtatctagtcagtccataaagattgtgctaatttttttgtggaaaagtagccattagttcaggaaactcagtgctgccttcagatgtcattgatgtttctcctgttggaaagctgatgtgtccagctcaacctttgtgctgacatcataccatttctgatcatgaaatattggctactggtgtatgtagcagttcttaaatcagcagtattatgaaaaaaaattccccctcattagaatgtttaagaaatcttt

SEQ ID NO: 8775 - DNA, 237 bp, Homo sapiens
agcaacggctgccagcttggcagcccatccttacggctggcacggtgctacctattttcttcatcatcggtctcatcttcattcccatcggcattggcatttttgtcacctccaacaacatccgcgagatcgagattgattataccggaacagagccttccagtccctgtaataaatgtttatctccggatgtgacaccttgcttttgtaccattaacttcacactggaaaagtcat

SEQ ID NO: 8776 - DNA, 371 bp, Homo sapiens
  misc_feature (1)...(371): n = a,t,c or g
cgattcttgtgtcttagcctgctgagnnnnnnnnnnnnnnnnnnnnnnnnnnnnnnnnnnnnnnnnnnnnnnnnnnnnnnnnnnnnnnnnnnnnnnnnnnnnnnnnnnnnnnnnnnnnnttccccaacatctaaaacaatgcctgacatagtagatcctcagtcacctttattaatggataaaaaatattccagcagaaagggagacgtctgtcatttagcatcataaaggattataatatcaaggaaggtaaaatggaaacgtgtttgggattgcttgaggatcttttctccaaaatgaaaattgggaaaatgcatttctggttgttagcctgcagtattgggaggttttgaaaggaaaaccgcttaatt

SEQ ID NO: 8777 - DNA, 396 bp, Homo sapiens
ggtcgacttttttacatttttgtgttgttttattagatgattttttaagttacaaaaaaaaaaagagggaagaaggaaaagcaataaggcaaacttgccaataggttcatgaacaaaagtcaattatggaatgtggcagaaggcaaatataaatgtattcaaagttttacctttaacaattacacttgtggttccagttatctgttgataatataaattactccgtatttagtgactcaaacaacaattttatttctctctcatgggtctggagtttggctggattcagctaggtagttcttgctgagggtcattcatggggttgtcatcggatggtggctggtgatggaagcatctgaagacttactaattgcagccagggcatgggtgggctca

SEQ ID NO: 8778 - DNA, 1277 bp, Homo sapiens
ccgggttgctgtgcgactattctccgggagccgttcgtgtcaccgccggaacctggcgcaggttaattatagaaaatgccaagtaggaaatttgccgatggtgaagtggtaagaggtcgatggcctgggagttcactttattatgaagtagaaattctgagccacgacagcacctcccagctttacactgtgaagtataaagatggaacagagcttgaattgaaagagaatgatattaagcctttaacttcctttaggcaaaggaaaggtggctcaacttccagttccccttccagacgccgagggagtcgatcaaggtcacgctcccgatcccctggtcgaccacctaaaagtgcccgccgatctgcttctgcttcccaccaggccgacattaaggaagcaaggagggaagtggaagttaaattgactccgctgattctgaagccatttggaaatagcatcagcagatataatggggagcctgagcatattgagagaaatgacgcacctcataaaaatacacaggaaaaattcagtttgtcacaagaaagcagttacatagcaacacagtatagccttcgtccaagaagagaagaagtcaaattaaaagaaatagattctaaggaagaaaaatacgttgcaaaagaactggcagtgagaacctttgaagtgacccccatccgggcaaaggacttggagtttggaggagtacctggtgtgtttctcatcatgtttggcctgcctgtgttcctcttcctgttgctgttgatgtgtaaacagaaagatcccagtcttctgaatttccctcctcctttgccagctttgtatgagttatgggaaaccagagtatttggggtctacctcctgtggtttttgattcaagtcctgttctacctactgccaattggaaaggttgtagaaggaacgcctcttattgatggaagaagactcaagtatagattaaatggattctatccttttatcctgacatctgcagtcatcggaacatctctcttccagggcgtagagtttcattacgtgtacagtcattttcttcagtttgcacttgcggccactgttttttgtgtggtcttgagtgtgtatctctacatgcgctctttgaaagcgccccggaatgacctgtcgcctgccagctctggtgagcagtgatgaattgcatgttggatgaatgcgtcccagagccctccagcagccatttccagatttgaatagattgctttttttctaacttcatttttgggaaatgaagagaagta

SEQ ID NO: 8779 - DNA, 729 bp, Homo sapiens
acttaagcttaattgccttttgggctttactttttaaaaaattggaatttctttcttttacaatttaatctttactcctgtacgataagagtgatagttctttaaaaaaattaacagcatcaatgtctggtttaatactgaagattcatgattataaagagccaaggtttttaacacaactgtaatttcattcttcaattttagtcctttttttttcaattccattttatttcttccacgagcaggtaaacatgcctcaaaatttgcattccgtagagcagtttttctttttgaagggtatagtcagtcagtctacaaaaaagcactgccacaaagctaaatcgttactgtttgaaagggcaaatgctccattgccacacagaatgtaaaaagaaaataatcaacattagattttaaatgcaggtagttatttcagatgtttgaaccataaacaaacaaccattgctgaaaagcttcttaaaagcttgaaattcagaacttcagggtttcaaaaagtcagaagaatagcaaaatcaagtgttgacttttaacctgccaggaagctatattatattattttctcatttcaacaatgtccaagcccataaaagttaactgcaagaatttaggtatagttttaaaatcccatgtcctcttttactattaatagaataatgcttacctttgctttttattctagaaatgttttcttagtgttaaaagtgtagc

SEQ ID NO: 8780 - DNA, 402 bp, Homo sapiens
aagtgaatggagtggatgatgcagcaaattttagaaccgtgcggaatgccatgcagattgtgggctttatggatcatgaagctgagtctgtcttggcggtggtggcagcagtgttgaaactggggaacattgagttcaagcccgaatctcgagtgaatggtctagatgaaagcaaaatcaaagataaaaatgagttaaaagaaatttgtgaattgaccggcattgatcaatcagttctagaacgagcattcagtttccgaacagttgaggccaaacaggagaaagtttcaactacactgaatgtggctcaggcttattatgcccgtgatgctctggctaaaaacctctacagcaggttgttttcatggttggtaaatcgaatcaatgaaagcattcaggcac

SEQ ID NO: 8781 - DNA, 408 bp, Homo sapiens
gtcccttcctcatcacaggaagaaggatgggtacagtacaataaaatattgaataaataagcaaattcaataaagtagcaggatccgaagtcaacacacaaaaaatattcattttttctattatgtgcaataacaatgaatgatctagaaaggaaatttaaaaaacaattccatttacaatagaatagcataaaaaagcataaaatacttaggaatgaatttaaccaaggagttgaaagacttatacaatgaaaactacaaaatagttctgaaagaaattaaaggagacacaaaaacctggaagacatcccatgttcacagattgaaaaaagtattgttaagatgtcaataataccgaatatgatatgcagatttaatgcaatcgttgtgaaaatcgcaaagatattt

SEQ ID NO: 8782 - DNA, 735 bp, Homo sapiens
ggctcgcggtcactggtccctggctcggttccccgcaccccggggctcacacttacccgcgcggaggagcagcggccgggtgtccacccccatcctgcggccagtctcctcgattcccctcgctctgagccgggagagccgaacagctgaagagagttcactgactccccagccccaggtgggccttgtgcacatcatgaccagttttgaagatgctgacacagaagagacagtaacttgtctccagatgacggtttaccatcctggccagttgcagtgtggaatatttcagtcaataagttttaacagagagaaactcccttccagcgaagtggtgaaatttggccgaaattccaacatctgtcattatacttttcaggacaaacaggtttcccgagttcagttttctctgcagctgtttaaaaaattcaacagctcagttctctcctttgaaataaaaaatatgagtaaaaagaccaatctgatcgtggacagcagagagctgggctacctaaataaaatggacctgccatacaggtgcatggtcagattcggagagtatcagtttctgatggagaaggaagatggcgagtcattggaattttttgagactcaatttattttatctccaagatcactcttgcaagaaaacaactggccaccacacaggcccataccggagtatggcacttattcgctctgctcctcccaaagcagttctccgacagaaatggg

SEQ ID NO: 8783 - DNA, 725 bp, Homo sapiens
gaatcctcagtgcaatcattattttgattcgtttggtacctgttttcctggagttcccgattttattattttggggtggctccaagcattaagaggtttaatctttgatggcattgttctagttttgaaatttctagtatatttcagagtctcttagaagacttgtgtgggaagtttcactttgttttcagtgaagatcacaaacctccttcttcctttactcaagaggaaaggtcccagtatacatatttgaatggttgatggttttcaagaccttcagggagctccctgcattttacctagaaacagaaaaggcccgcaaaatcttaagtttcctggcctgcatttcccgggtaggggcaaatgactccaagctggtctctaagccaatacccttataaaccagagcccaggaaagacagctcgagtgtataattctctggagctcaattctatgcagttgtgctgatatttcattaagtcactgtgtatttttaagtgttgatacattaaaagtcgctttatggaagatgagtaaattttttaaatacttggaaattttatttccttgttaacttctacagatcagggcatgcaaccaaaagcagcttaaatgaaatattttaaaataaaatatcaggaagctatttttagatttcttctggcttatgtttctactttaggaccctcattgttctcttattaaaaaaaattatttcctgtgc

SEQ ID NO: 8784 - DNA, 1354 bp, Homo sapiens
attcggcacagggcgaaggatggcggggacactgtgaatgtcagcccagaaggtgatcagagcctgttaattaaaatggaaagaagacagaagggaaggtagacatcaggttctccctggagacttttcgttttcatttacgctgcggaaactgacgtttttgcctaacaccccatgtaatgtaaacgtataggcttgagtacgtgtcaggccgcatgtgtagtgaaccctaaagctttcctaattgtagttagcatcgtccctaagcggaacgattttccgtgaacatgatttgtacttttctacgagccgtacagtatacggagaagctgcacaggtcctcggcaaagcgattgcttttgccatacatcgtgcttaacaaagcgtgcttgaagactgagcccagtttgagatgtgggcttcaatatcaaaagaaaacgctgcgacctagatgtattcttggagtcacccagaaaaccatctggacgcagggaccgagcccccgaaaagcaaaggaggatagcagcaaacaagtgtctgtgcacaggagtcagagagggggaaccgccgtcccaacatcacaattagtgaatgaagtcggaagagattttacctatttaatagtggtgctttttggaatcagcattacaggtggcttgttttacacgagtttcaaagaacttttttcttcatccagtcctagcaagatatatgggagagccttagaaaaatgcagatcacatcctgaggtgatcggtgtctttggtgagtctgttaaaggctatggggaggtgacaaggcggggtcgccggcagcatgtcaggttcactgaatatgtaaaagatgggctgaaacacacgtgtgtgaaattctacattgagggctctgagccagggaagcaaggaacggtgtatgcgcaagtgaaagagaacccaggaagtggtgaatatgattttcgatatatatttgtagaaattgaatcttatcctagaagaactattatcattgaagataatcgatcccaagatgattaaaataatcaagcaagcaggtttctgatggatgttgaatggcgtggactcgctactccgttcttcacagctgccttccagaatgtgttcaaaagaaagacaagaaggagtgtatggcttataaagtgaatctaatacagtatttgttgcatttaaacaaactagacattttcttacggaaaaattatgaaatacagcatattttatgttctcccattgactcaatcatgacaatatttctgctttaacaccatctttcatgattagaaatgtttgttattggaaatgttacaccatgtaaataaaggaaatagattttaaaa

SEQ ID NO: 8785 - DNA, 1076 bp, Homo sapiens
agttccgcggggggctgtcggggaaccatggctgccccgagagacaatgtcactttattattcaagttatactgcttggcagtgatgaccctgatggctgcagtctataccatagctttaagatacacaaggacatcagacaaagaactctacttttcaacgacagccgtgtgtatcacagaagttataaagttattgctaagtgtgggaattttagctaaagaaactggtagtctgggtagattcaaagcatctttaagagaaaatgtcttggggagccccaaggaactgttgaagttaagtgtgccatcgttagtgtatgctgttcagaacaacatggctttcctagctcttagcaatctggatgcagcagtgtaccaggtgacctaccagttgaagattccgtgtactgctttatgcactgttttaatgttaaaccggacactcagcaaattacagtgggtttcagtttttatgctgtgtgctggagttacgcttgtacagtggaaaccagcccaagctacaaaagtggtggtggaacaaaatccattattagggtttggcgctatagctattgctgtattgtgctcaggatttgcaggagtatattttgaaaaagttttaaagagttcagatacttctctttgggtgagaaacattcaaatgtatctatcagggattattgtgacattagctggcgtctacttgtcagatggagctgaaattaaagaaaaaggatttttctatggttacacatattatgtctggtttgtcatctttcttgcaagtgttggtggcctctacacttctgttgtggttaagtacacagacaacatcatgaaaggcttttctgcagcagcggccattgtcctttccaccattgcttcagtaatgctgtttggattacagataacactcacctttgccctgggtactcttcttgtatgtgtttccatatatctctatggattacccagacaagacactacatccatccaacaaggagaaacagcttcaaaggagagagttattggtgtgtgattttagcctcacgtgagactccttttaagactaaa

SEQ ID NO: 8786 - DNA, 545 bp, Homo sapiens
ctcttggcaagatgtttcttatattattccaaagttatttcataccattattatgtaaatatgaagagtttttttctgtttataattgtttataaaacaatgacttttaaagatttagtgcttaacattttcccaagtgtgggaacattatttttagattgagtaggtaccttgtagcagtgtgctttgcattttctgatgtattacatgactgtttcttttgtaaagagaatcaactaggtatttaagactgataattttacaatttatatgcttcacatagcatgtcaacttttgactaagaattttgttttacttttttaacatgtgttaaacagagaaagggtccatgaaggaaagtgtatgagttgcatttgtaaaaatgagactttttcagtggaactctaaaccttgtgatgactactaacaaatgtaaaattatgagtgattaagaaaacattgctttgtggttatcactttaagttttgacacctagattatagtcttagtaatagcatccactggaaaaggtgaaaatgttttat

SEQ ID NO: 8787 - DNA, 668 bp, Homo sapiens
tttttttttaaatggctatatgaaatggaagctactagtttatctatttgggtctccagatctcctccttgtttatcatccaagtaccaggaaactggagaaactctcatctgggtaccaaccaaagacatctcttgtatgaggggatgaacaaacacagatgactcatttctcttacactgagacagaagcagaattaactcctgtcagcctgacacaattctgcatgggacatctcaaatgcctcaaagacacctaggtgattttgaaggaattcccagtcgccctgggccgctgcgaactgactaagccaggcctggagagactcaggctgattctaaatagaaaatggaacttccctggtggaactccacaacctggatcacccattctgatttactagctcttgggtaagagaaagaacaaaaatactctactccagtatcacattttacaggtgaatatagttgtggttgtgatcatggctctggatactttgcagccttgatctctcactacagattatgccatcagattctatttcctcctggagcctctgacctcactgtagcaggtcaatgaacaagatgtgaaacatctcaaagagccacactcccaatgcagaaaatgccttttgttagttttctgtacattctctatccaaagtc

SEQ ID NO: 8788 - DNA, 645 bp, Homo sapiens
ttttttttttgagctctagaatcatatttatttgatttgcattaccattattgatgacattttcacatttaaaaactacataagattttataataaatgcaaccactcttacctgcttaagcaaatataaacaaacactcccaggcctattgtttttaaggctgtatatttcacttgatggaaaaagtgatgaacagcaatgacttcccaagaaaaaagaaagaaaagtgggtgttacatattcctgaaagccagactctaatcacacagaggaattttattgtaagttacatgcaaagcaaattagttcttcaggaaaataaataaataaatggatcaactaagatatactaaacctcaaaaaaccctgaataaagataaaggtaaaaatgtattaataaaaaaaacccttaaaatacttaagaaagtattaaaatacaaaactttaacttcttctacagtcaaagtttcattcacagggagctgtaggtcagttggttgttgaaaacttatttgagaaagtcaaaaaataattgctttatttctctgtttcattagtactaattcacaggatctttgtaggttttatctgaaagaaggatataaaaacttaaaagtcagagcagggaaaggggagtaataaat

SEQ ID NO: 8789 - DNA, 894 bp, Homo sapiens
accactgacatcaaggtttactgtgaaatgcagcagataaatattttacaataggaaatttaatgaaattcatacttttaagcaatcatttcagtaaaagaaattgttatagatgatgtgtatgtatgacgatagattcagaactggttagagttgaatttcagcattacattttaaaggtatttgccaaaccctaaagctcattttatttcaagtgaaaacatcatcatgaaaaaagtcacgtcacattgactaacaaggttggtaacaaatgtaatgatcaactttatcatttaacatttcacaagactttttattggtttctaaaaagcagttaatattttaaggtacggtatataaacaaaatagccatatctgatttttggcaacatgaaaatgccaatttcctttcaaaccaattcccggactacagctacaaatgtggtcaacaacgtcatcctggagtaaaattcagctcctgacacacacttctatggcaattataacatagttaacaaacacttggcctgtacctatatgaacactgatccattgggggccactgaataaaaatttcttcaatctcatttgctattttagttgaggattctaatttacagaagagctgggcctttccttctcccattccttttataacttcctatccagtttcctgcagtttgtttttcctcctatttgaattgttcttataatctttaaacgtttctgtttccattcactttatgcgtgcatgcttctctatgacttatcaaacgtagcactgggtgtaaagtggtatttttccaaggtcaaaaaaagtatacgaattcatttattaggattaggcttaaactgctttcattgagattattcaaaggatttttgccctcatta

SEQ ID NO: 8790 - DNA, 689 bp, Homo sapiens
  misc_feature (1)...(689): n = a,t,c or g
cgaataaattgatactgaaacttagcaacttcttaaaagtgtaaagaagcctcataagatcataaggaaaatgtatatatgcttttcacagctttctagaattttttgacatttgattttcttgagacttgtaaacctggatatgttgaagggtatttgttaattttacttttcaaagatactttaaaacagtagagctagcaatgacaccttgcatttcatttcaacactgcttcaaggtttcttttgtatataattcttagaatgctcatttcttttaaatggtttaatttgtacagcagaggaatgttattgtagtagtatgtaactattacctaatactgagtttttgcaaaaaacaatgaatgctcatatgtaattgaaatacttcagatcacatgaaaatgctgatttaacatttaagtatcacagcattaaaagaaaaagaaagtaaaccagtcctttgtattcagttacctaatggggtgccatcaataaggctgcgatacagcccggggagctcagtcaggccacaccttcctggcatcctattgggccttatttcatttttaaatgagtttaatggantctggccnggtcctgtggaatggataggaggtttntggcntaaatttaanggccgggnttcctttgtgttgtgtggggggaantttccgttggggggcacc

SEQ ID NO: 8791 - DNA, 356 bp, Homo sapiens
agctctacttcttcaagcaaaggtaaatatcctgaatctacctttctccagtggcccttcttatcccatacactgtatacctgagtctgaattcaagaaagtttgtgcaatgatgttctggttggtaatatttctggaaaggaaaaatgacaaccaattgaatcagtgagctcttgagttttaagggacattacaagatcataaggaacttcgatgaaattgttcatcctgctttagaaacactcttagtcttttgggtgggaagataacttttgattttataactatgtccctgaattaagaatttctaatagcaacttatattgagcacaacataagactactttttcaagaat

SEQ ID NO: 8792 - DNA, 991 bp, Homo sapiens
tcacaactagcgcgcgtctttttaaaacgttgatcaaagccagtttcagcgccaacatttaaaaaaaaattaagacacgtcatcctagtagctagacacaattttgccaaggaaaaccaaagtacgttttaaataaaagctagaaacatggcacagaggggaaagggttgaaaacaccagcagttaaagatggacggaggaaagttttaatatttggtctacatgcaggagatgttctgtcagggagtgggcgtctccacccaatcgagctgcagggggaaaggctgccttgtccaatcagaacaggggtgtctttatatatacgggtacgaaaggctagactttcgttttttcgtcatttagcagggtttagaagttcgcaatggctcgtaccaagcagactgctcgcaagtccacgggtgggaaagcgccacgcaagcagctggccaccaaggctgctcgaaagagcgctccagccaccggcggcgtgaagaagccccaccgttaccggcccggcacggtggctctgcgcgagatccgccgctaccagaagtcgaccgagctgctgattcgcaaactgccattccagcgtctagtccgtgagatcgcgcaggacttcaagactgatctgcgttttcagagctcggcggtgatggcgctgcaggaggcctgcgaggcctaccctggtggggctgtttgaggacaccaacctatgcgccattcacgccaagcgagtgactatcatgccgaaggacatccagcttgctcgccgcattcgtggggagagggcgtaaattgtcttgtgaatgtgtgctaaccaaaacccaaaggctcttttcagagccaaccaccttttctataaaagttgctgtttactgttgctgtccgtaaactggaacctctgttcactcaaggtaatgaacgattcttgcctctatcgttcccctccctcacggaattggtgcaaaaagctttattataattgggagat

SEQ ID NO: 8793 - DNA, 374 bp, Homo sapiens
gttatattgtaggtaatcattaagacctaattattagatgatactaatctttaaagtgaccagttttcttacaatttagtttcttgagttcttcaagggaatttaattgttgagcaccattatctatagacacatatactcttacatattgtgctatattatgtagattcagccataaatagtgcttaatcttattaatataaatgtatgcgattcctgtaaaattaatgacacaattattaaactgctatagatgggcatgtatatgtttataaataccatgctatattatgtaggtccatctatatagtgttatgaaaatttcatacatccaaaaaagttaaagatgcatcgccagatgcttcctttggcca

SEQ ID NO: 8794 - DNA, 241 bp, Homo sapiens
ctccctgctctgacaatcactatagatccattcacaggagtgtataaatcctcaaaatcttttttagtaccaaaattagcatggaccagtttaccctagaacaaagacattagatttaatgagcattatggtatcggaacagctctaaaatcttgagacagaagagtgttatagatcaaacctaagacaggcaacccaagtaagagataaaaggaggccaaggcctaaataagacatgagt

SEQ ID NO: 8795 - DNA, 1448 bp, Homo sapiens
  misc_feature (1)...(1448): n = a,t,c or g
gctgggaagaaaaagagcctcaagctttgaaggccattcccatggtagacagagctgatgtgaaaagtggccatcctgttgccccaggacatgaccttctgaagtgaccaggctgaaagggaagcaatactcgtgtgatctctcaccccatcactcagggtggcgcaatcacgactcattggctcactgcagcctagnacctcccagctgggagcaattctcctgccttcggccttctgagtagctggggacttacagttggttctaaagagtggtgagtcagaagagacgtcaggcagcaagcgacttggggccatggcttcttgacctagacttctcacctccggaggtggcccgagcccactttcctgggagaacctgctacggtacggactcttcctggggagccatcttccagctcatctgtgtgctggccatcatcgtacccattcccaagtcccacgagggcggaggctgaaccgtctgagcccagaagtgctgaggtgacgaggaagcccaaggctgctgttccttctgtgaacaagaggcccaagaaagagactaagaagaagcggtagaagaggaggcctgaggagctgggcgggcagggagagggtcttggggacagccctcctgggaatctacattgtgttcccccgcattccaggctcagggtctgaggaggctgtgacgccctatgaccgcagagatctagacagtcgtaacagtccccaggctccagctgggcaatccaccacttcctcttccttctgcttctgtgacggtttagagtcaagggggctgaaacacactgtgagcatagactgtattaggtttgttcagaagccgggtcagctcacagagtcacattttcttgcttagtcatgtgtctctccttgagttgccccctccttgtgggtttacactacattttggagtcattgtctaatgctgacaagcacaccctctcccattatttgtgcactacagatctcctgctgatcagtcacctttgttgctgctgtgtagacagagccaggcctcacctgtttgtttaggccaagatgccatggacatgcagcgttagtgatcccactagctgtgacagccaggcccagaaaatgcctggcgtgagagccagcagacagccaggccagggtaggcagtgccctgcttctgctccatcaggtgcaggggatttggctgaaggcgtgcatatttcctgggcacaaacttcctgagcctctgaaatgggaggctcgtcaatttcagaccaacctcttttcaacccatcatagcacgttcaaggtgtgccttttacttctacctgtacatcccccatcccttcaattctttcattccctgaccagtgagagggttcctgggggaagtatggtgaataaactgacatgcatgcttcagaaaaaaaaaaaaaaaaaaaaagtttt

SEQ ID NO: 8796 - DNA, 332 bp, Homo sapiens
gtgtttcatttggttttgtaaaactttgctgtaagtcatcacagttaattctttgaatggacattttagagtgtaactttttttcaaaattagcagaacagatatctctgctcattctctttatacatttagttttttaaagttcccctagtatacctgttaggcactctaaataggacacagttaaagctaaaagaaggaccagttgctccctagagcctacagttcagaactatcttgttgtcatgtcctggtttggtttggtttgtttttaactcaacaagttggaaaccatgagtttaaagcaaactatttccttttcttaagcttaa

SEQ ID NO: 8797 - DNA, 530 bp, Homo sapiens
ttttttttttttttttttatgtaaaactgacttttattacaattaaaaaagaacaaagacaatttgataagtgcctttaattacaacatacctgctatttacatgtaatcatacttttatatatagcttgaataagttttattacatgtaaactataagatattacaagttaaactccagtcttttctggatattcaattgaaatactactggcagaaacatacagaaaacaaatacccatttcagttcctcaggtaccattactggttgaatgatcaagatctggccacagaagagaagtggaaatatgcatcaaaacaaaacttattcttaacatgactaacagtattgttatttaaaccctaaacataattaataattggatcattaaaaacacaacttcaatttatatagcacctttcttccgaagagttgaaagcattcgtgcttatctctattatttcgtttgtccccataacatctctatgaggtaggcaatggttagtatcattatccccattttgtatatg

SEQ ID NO: 8798 - DNA, 328 bp, Homo sapiens
tcgtaaaggttatgtagagacatgcaaatatgtttatgatgtaattagtcatataaaggttatatagaaacatatatgtttatgatataatgtgaggtataagaagagatacatacaatttttagcatttaaaaatatgtactagttaaatccacatcaacaagactggaaggaaatataaaactactaatcgttgtgaaaaagagtggcatcctatctttgaatttttttttttcctgcattgattgcttttatttaggaaagacctgatgtcatatggaagccaagaagaaactcttgtccaatttgtagggaaagcagagagaca

SEQ ID NO: 8799 - DNA, 231 bp, Homo sapiens
cttggctcatctgaagtataaacattagtggttctcaaagcgagaccagcaccattacctaggaacctattaggaatgaaaattctttggcccacagacctactcgatcagcaatttagggggtggggcccagcagcaatctgcttataagcctgtgttatatgtgactctactacatgtttcttgagaactattgataagttttcttagaagtttggagatcatcatctt

SEQ ID NO: 8800 - DNA, 157 bp, Homo sapiens
ttacaagataaataactaagtttaattctttagattgaggaaaagaaacaaagagaggaagcagagcgagagagactgagaattgcagaagaaaaagaagaaagacggcttgcagaacagagggcacgaattcagcaggagtatgaagaggaacagg

SEQ ID NO: 8801 - DNA, 317 bp, Homo sapiens
ttttttttttaccaagcctttggattttttattagttctgcaataaataataggtttatagttcacctgttgttgatctcatcagtggtcgccaagtaagagggtgaatcactcatcccaagagactctgctacctcttagctctggagggtaaaaagcaagggccagagcaaatacattggggagagggggagaaaaaaaaaatcaggctattttaatagccctcacatgccaagtgcttttgattcatcatgtttagttttcataagcttgtgaggtagataatattatccccattttatagatgagggaatttg

SEQ ID NO: 8802 - DNA, 314 bp, Homo sapiens
  misc_feature (1)...(314): n = a,t,c or g
cttcattcatgttttatcctttttttctttatttttggacactgataagaacctgtatgagattgtttccttttttccccccgcgttgtaggtatcttttgcaccaacctaataaaaatcccacccttaggcttgagttnnnnnnnnnnnnnnnnnnnnnnnnnnnnnnnnnnnnnnnnnnnnnnnnnnnnnnnnnnnnnnnnnnnnnnnnnnnnnnnnnnnnnnnnnnnnnnnnnnnnnnnnnnnnnnnnnnnnnnnnnnnnnnnnnnnnnnnnnnnnnnnnnnnnnnnnnnnnnnnnnnnnnntccccaagg

SEQ ID NO: 8803 - DNA, 248 bp, Homo sapiens
caaaacatacctggtaatgtggcaatcattaaagtacaccagaggaatacagtaaacttggacctacccattaagaggtaaacccctatagtagctttcccagatggcctaagaaaaagcccaggaagaaaaaaaaaaatggcacgtgaggcaaatatgtatgcttcactttagaacttggccagacttccttaaacagtaacttcagaggataaacagcaaatatctaatctaaaatgtttgcattg

SEQ ID NO: 8804 - DNA, 326 bp, Homo sapiens
agagcactgaagtttacattgtggtatatagcctttgttgcagtaagtgatggtaacccatttgagcagctgtatgatctgaatagtctggaggggggtatgattacttacggctacattagtcaccataaataatccagttgccctgcagagtaacactcttggctgagcataatgtataactttaatctggacccagtataattccatagtacagaagctggtttgttcttctcagtctatttgatattactttgtttcattcttctgttgctcccagaaaattgttcatttaagaacactgtgcctggatgtggtggctcatg

SEQ ID NO: 8805 - DNA, 911 bp, Homo sapiens
  misc_feature (1)...(911): n = a,t,c or g
ggacaaggtggtggtcttcctcaaggggacgccggagcagccccagtgcggctttcanaacgccgtggtgcagatcctgcggctgcacggcgtccgcgattacgcggcctacaacgtgctggacgacccggagctccgacaaggcattaaagactattccaactggcccaccatcccgcaagtgtacctcaatggcgagtttgtagggggctgtgacattcttctgcagatgcaccagaatggggacttggtggaagaactgaaaaagctggggatccactccgcccttttagatgaaaagaaagaccaagactccaagtgagggcggccaagtcctcgctgagcagagagggagccgttcatgtcagagactcactgccagaaaagccttacccattttggttttcactattgagaccgcaactgcttgcactgatcattttggttcgtgagcagttggtgattttagttggtctggtgttcgggctaagaatattttattgtggacttaattacaaccactgcactgtaatgattcaatgctgtattatgatattgctgtaaacaaaattcattcttatattgtcacttattctttgcctgattcagaagttaaataggagctttggaatcattattcatgacccctctgcaaatgtgtcagtctccaaagagagtatctccccccaaattttgtgtagcttcttttgttatggaaaatggtggacaaaaaaagaaactgtgataactggggcgttgttttttaaaataaactccagcacagggatgctgtgcatgcctgagttgattccgaagtgcatatgtctgtaaggatttggagtgcctgcagtgttttatgtgtgggaagtaagggtgagtctcatattcttctattaaatttgccacaagaa

SEQ ID NO: 8806 - DNA, 233 bp, Homo sapiens
ttttttttgcttatatcagaaaatatttccaaaactttagaaatataaaaaacaactgggtacatctttttaatattatatggggaggcaaaaggcactccaagcaaaagtactcaatgcaccacacagtttacctttgattaaagtctcagacttactgaattgcctgttaacttgcagatttccaactaattgagatgcaaataatttctgtctggtggaacaggtcgacg

SEQ ID NO: 8807 - DNA, 78 bp, Homo sapiens
gagcctcctgcagctttaggtacatgtcttccagctcccgtactcgctgtaaatactgttccagttcagaggactttt

SEQ ID NO: 8808 - DNA, 430 bp, Homo sapiens
cggacgcgtgggattgtcaagctgtttgtttactctttctttgaaaacatcaccttctgaaatttgtcttttagctctctcagattcttccccaaatgaggcagggtgcagacagcacagtcagctctgcagagtttggaggggctcactgccactgggtactcagaacctctgtggactggatgtcagctctttcctttggcagcgtgtttccttttccgagtatgtgctgttaaactagattggccggttcgctttccatttcctgacacttgacatggaatgcctttgaccattggtgctctgacagagaagtcatggagtcattgccatttcctggttgcccttttggaatgtgatcctgttagtagaggttttctagcttctactaagatatttctttccctaaccattcatacacttggcatgg

SEQ ID NO: 8809 - DNA, 580 bp, Homo sapiens
tgttgccttcataatagaacccaagagtctgtttcaatttatgaattcagtatttgcaccgagattttgattcccaaagtttggaaaaaaatgacaaaacaacgagggaagaaggaaccagaccttagtgccacatatttttctcttggggttgtaaggtagtctcctgctttccagaacactttattatatttcacttatagacctgattttctgtgtcaaagtataattctcatgctgaagctgtagcctaaaaagccaaaagaaagttgtcttcattgtacaaacatattcatcactttaacaataagggaacaaaatttagtattcaagctgagtgagaatactgtttcaatgagcatgtccctaagataaaccagaattggcagttaatttaggcgtctagaaaatctcagttcccaccagtaaaattatcctgagtagctaatgcaccttgagaaaaatctggcatactgaataaataacattaacttgggagccaagagctgggtaagccttacctttagactactctgtgactacagaaataaagccagcacttttggaactaataagcctt

SEQ ID NO: 8810 - DNA, 507 bp, Homo sapiens
ctttttttttttttttttttgcattgatgactaagtatttattgagacaaataatacaaattggtggcatacaaattattaaaaatagaatgctgaattttatttataggtgggccatcagatactgtttacaggttaagccttactataatgaactgcaaagaagtatgtatactgtttgaaatgaggaactttatccaggcaaacatgggatgtcaagagtggcctgtggtactggagacaaggaatatcaagtaattgacatgttacttgtctgtcagattttaagaatactgttatttaggcatattcaaagaaacaactgcctgttttaatagggataagtatataacgaaaacatttaatatccatacccccctcaaaaagccctttattcccaagtagcaactagtgtaaattaattttcaattcctttctacccttcctttgctagaaatacttatgcataactaaaacactcaagtcactgaagggaacaaatccttt

SEQ ID NO: 8811 - DNA, 517 bp, Homo sapiens
gttattcttcctgaaaaagtaagatatacctgggaaatattcttggatccttcacacatccacttaatttcttgaaggaagaaaacagacaaaagacatgtaacaacagaaacaaataaaccacttactgtaaaatttcagaaattgtgggctcattccctccctctagtttatttatttgctcatctttatcacctaatggtagtttgttttctttggtagagtatatggcagtcccacatcgatgataattggtgctcccttcatccaactggatcactttgagattcagttttacatcattttagcattttgtttgtatatcagttgtgatgagccactgataaaattttgttctaaaatgaaacatattactttgttagtacattttttagtgtcacactgacttttaaaatttgaatgatatatagactttgtttttttaatgcaatatgaatatttgctcatgttttctaaattccttataaaataaaattaattcgaattcaaaaaaaaa

SEQ ID NO: 8812 - DNA, 277 bp, Homo sapiens
caaagctttaggttcacccctgtaagtgttgctggtgtcagaataggaacctccctgcgctttgaagggatgaatgtgacctctcccacattctccggtgctgtgatgtaccttaaacacagcaagggcacctggcctgggtggagcccactcctcagcacccacctcacttcttgcagtattctgcagaccccagccctgtgcctgtgctcctggacagctggagataaggagtgggccctggaagatgctcattcaggccctgctcaagattcca

SEQ ID NO: 8813 - DNA, 658 bp, Homo sapiens
tttttttttttttttacatttcctgttttcattttattgggaacttcaaagaaaagaaagagagacggattggttcccaagacaagccgtgacgtagactcccaacaagctggggaattctggacagcgaaggggtggacagtgagactcagcacagcccaaagtcaaaggcattagggttgttctgaaaatagagattcaagaagccctggaaaatgctcttatccatgagaagagcacagactgtggggtcccacttcatggctgatatccagagccgcagggctcggcgtgtggctcacacagtccagtatcccatacacatccagccgctcaaaccagggccagaggaggtaatcaatcatggatatacaggttccaccaaagaaggtggtgttctgatactcaagaatctcttccaggttgctgaattcctgacgcagggctgccttcagattagtgcattctctcccacatctcaacgctaccaggcactccttggtcaaatgtgggaccttacaaaatagctccaataacatcttttggcgagctcgttcataagggtcatatggaaacagcttccttcctgggataagcatcatccaggtactcacaagcaataacagattcatagatcagttgacattggctggtctcc

SEQ ID NO: 8814 - DNA, 364 bp, Homo sapiens
cttttttgtccttcttttatcctcttcattttcactatctgctgtataaagactttgatctgcaaagggctgcctttcatctttaattattcttccatttgtcagcagtaatcgtagatcattatctttcgctctccattcaggtactgtggaggatggttggagatgtttgttgaattttccattcagtttagagctcaagatgtcctcttcccatggacacatctctaatcttttgaggacctcccttgtgtggagctctagggatgtctaggttagaaggagttcggacattatgatctcgaagtttcctcatctttcttcggggaatggtatgggggaagttggctttcatttgagggat

SEQ ID NO: 8815 - DNA, 1143 bp, Homo sapiens
  misc_feature (1)...(1143): n = a,t,c or g
cacaaggcaaaaatcatatgcaaaagatatgctaacatctcttcattatttggataaccgctttgttcagcctcgtctagagagcttggtatctagaagtcgttggaaagagcaatataaggagcgagtagaaaattattctaatgtaagtattcatttgaagaatcctgaaaactgttcctgccaggcttgtggactgcatcgctactgtaaatattcagtgcatttatcaggagagttgtataacaccaggaccatgcaaatagataatttcatgtcacatgataaacaggtgttcactgttggcagaatttgtgccagccgtaccagaatttatcataaactgaaacattttaaattcaaactataccaggaatgttgcaccattgcaatgacagaagaagttgaagatgaacaagttaaagaaacagtggaaagaattttcaggcggtcaaaagaaaatggctggattaaggagaaatatggtcaacttgaagaatatctcaattttgcggattactttcaagaagagaagtttgagttgtaacacatttccatcagagaagattttttaaattcctgtaaatgtgaagatcatgattcttgtttttctgtatcatgtgacatgtttgtacattttatctatatcttcatggcaaaatattttgtttaaaacatgattatcttaattcctgtgaagtggcactctacactctaattaaacttttatctgatgtacataaaagcattatcttaatttttaagtctgtaaatatattttaaagttatataataatggctttataacagatgactgtcaagtgaatgagctgttgatatcctgtcagtttagtcaaaatatattgtatcttaaaaatgtatttagactaacgtctacatgtatttttacggaattcctgtccagatctgtttattcttttacagtattaaatgattttcactaatatattttttactgctatcatctaaatcagtgggccatggaagaaacctcatatatcattcagttcaatcccattgcttcaggatcagatcatagcatatctattctaagtagagggaattgcttttttcccttttcttggaaagtttctctttcaaataggntttcagggccnccta

SEQ ID NO: 8816 - DNA, 997 bp, Homo sapiens
agaatactcctttggtagatcaaagatattcatccgaaacccaagaacattattcaaattagaagacctgaggaagcaacgcctggaggacttggccactctcattcagaagatatatcgggggtggaaatgccgcacacacttcctgctaatgaaaaaaagccaaattgtgattgccgcctggtacaggagatatgcgcaacaaaagaggtaccagcagacaaagagttccgccttagtaattcagtcttatatccggggttggaaggctcgaaaaattctgcgggaactgaagcatcaaaagcgctgtaaggaagcagtcacgaccattgctgcatattggcatgggacccaggctcgaagggaattgaaacgcttgaaggaggaggctaggcgtaagcatgctattgctgtcatttgggcttactggcttggactgaaggtacgtagagaatacaggaaattcttcagagccaatgctggaaagaaaatctatgagtttacgcttcagagaattgtgcaaaaatacttcttggaaatgaaaaataagatgccttccttatctccaatagacaagaattggccctcaagaccttacttattcttggattctactcacaaggagctaaaaaggattttccacttgtggaggtgtaaaaaatacagggaccaattcacagaccagcagaaacttatttatgaagagaaactagaagccagtgaactcttcaaagacaagaaggctttatacccatctagtgttgggcaaccattccaaggggcttacctggaaatcaacaagaaccccaagtataagaaactcaaagatgccattgaagaaaaagatcatcattgctgaaatcgtgaacaaaattaaccgtgctaatgggaagggtacatctcggattttcctcttaacaaacaataatctccttcgttgctgaccaaaagtctggacaaatcaagtcagaggttccactggtggatgtgaccaagg

SEQ ID NO: 8817 - DNA, 363 bp, Homo sapiens
ttgagaacaacatggattttatgggattaattataatgcagaacaaattaaagcaagaaacccctgcagtacttgaagatttgcataaagccaacattcgcaccgtcatggtcacaggtgacagtatgttgactgctgtctctgtggccagagattgtggaatgattctacctcaggataaagtgattattgctgaagcattacctccaaaggatgggaaagttgccaaaataaattggcattatgcagactccctcacgcagtgcagtcatccatcagcaattgacccagaggctattccggttaaattggtccatgatagcttagaggatcttcaaatgactcgttatcattttgcaatga

SEQ ID NO: 8818 - DNA, 1295 bp, Homo sapiens
tacagcatctcagaagatagcgctaaatgctcacagttctctgaagagtattttttcttctcttcccaacatcgtatatactggctgtgcaaaatgtggattggaactagaaacagatgagaacaggatctacaaacaatgttttagctgcttgccatttactatgaagaaaatatattataggccagcgttaatgactgccattgatggaagacatgatgtttgtatccgtgtagaatcaaagctgatagagaagattcttctcaacatttctgcagactgcctcaacagagtgatagttccttcctcagagatcacctatgggatggtcgtggcagacctggttccactccttgttggcagtcagcgcagaaccttgtgtattaaagattcagagcctttttgtgttagatgaaaacagctatccattacaacaagatttctccctcctggatttttatcctgacattgtaaagcatggagccaatgcccgtctctgaggccagaggaagaaattgcaggcatttcaaggaagaagtactgaaatgatttgtcttttgaaataaatgaatgacagggcttttgctttggattttttatgaaatatattttacaaagagaattgcactagatatataaattaaaacttttttcctaagaaaatcctgtgaggtttaaaaagattgtttttgtcttttggtttcttcctttctcctggagaaatgatctaccagtcaaggcaatatgtagcagatccctgggaattaaaggtttgcccatttgttcactgtatttagtccctgctacattccaggcattgtactaagtatggggaaccacagagaagacattccctcagaaactgctgccagtgctttcgcttatccctacctaaaaaaccgtcaatgtgaaatcatttccttgattataactataatgataatggattagtttatataaacctatgtttagacaagttcaagacaagcgtgtctttctataaaaagtattgaaaatgaaggaaatgagatcatgtttcaatttattaaagcagggaagagcgttctgtggttagttcgtgtctaggatttgagtgccttactgaatgcatttaccagcaaacatgtagcaatctgttctctcattgtgattgtggaagaagctcatgtaaaatgatagtcattaatgaggaagtatggcgtggtacttattctgtaagttcagagtatgctgagtgttaatagattatcatattgcctgaaaataaattcatgaacacatgaaaaaaaaaaaaa

SEQ ID NO: 8819 - DNA, 472 bp, Homo sapiens
tcactcttgagaaaaaaacctaagattagcccaggtagttgcctgtaacttcagtttttctgcctgggtttgatatagtttagggttggggttagattaagatctaaattacatcaggacaaagagacagactattaactccacagttaattaaggacgtatgttccatgtttatttgttaaagcagtgtgaatagccttcaagcatgtgaataatcttccatcttccccgccacacatacacacacacactttttgtttctttcaggtagacaccttttaaaatgcagaactaactgaggcatttcagtaactttgctttcaaatcaataaagtcaaatgtatggaaacattttgtgccctactctccataccccgtgtactcaaattctctactgtatgaattatgctttaagtagaattcagtgccaaggagaacttggtgaaataaattattttaattttttttttat

SEQ ID NO: 8820 - DNA, 317 bp, Homo sapiens
gggttcgaaaatatttatctgtcaactgctcagcactgtcaataaacgttggcagatgtttactctgttttctttgtttcctcacttgtaaaatgcagtaatgatagtacccatttcataggcttgttataaggactgattaagaaaatctatcacatacttagtgctcaacaaatacttgctatcattgcattctcccaactggtgttcccacctccaggttccttttgattccaatctattctgtacacagtgccagattaatttttctgaagatcataactttaattaactttgatcatatcattactctttca

SEQ ID NO: 8821 - DNA, 546 bp, Homo sapiens
atttggcattagaaaccttttattgagacaaggtaaacagtgggctgaaaatattacaggctgaaggaaggctgaggaaaccagtatgaaggcagctcaaatgatgaactaaatatattccaaaggtactatttatacttaaggcagttttaaaagtgaggtcttaaccaaaaagcctttacatggcattcaaaacaaaaacaaaaacaaaaaaaacacgggggggggggggtcacttaaatctcttggattgactaaaagagctaaattatgtacccaaaatctgtacagcaggggcctgttttcagcaggaaagcctatgtacaagtaagaacctcttactcttgtaacattgtcctgttttgttttgtcttataagaatatataactcctatcctcacagagttagtccataaggcctcagtgacctcacagaaatatggagttaacctctactacagaactatttacactgcactgtaaatacacatatgtgtgtccaccctcacagctaagctgtcaatgccttgagtgaagggtcgacgc

SEQ ID NO: 8822 - DNA, 212 bp, Homo sapiens
gcctgttatttttgcagtgatttctgatctgcatactgaagagtctgtacttatgcattcataggtaacacaccatggtgactgaaatttgaatcctgggttgactagtgttgttatctaatggtaactgaaatcagtgcacaccagaaccctgcaaagcaaggactggctctacagcattcccttaaaaaacattttttttaaaagtgtcc

SEQ ID NO: 8823 - DNA, 350 bp, Homo sapiens
  misc_feature (1)...(350): n = a,t,c or g
taaaatttcatcaggatgtacaaagaattgtccttaaaccataaaatgaatttggaattaattttcttctcaccctccataggctacaagatagtcttgaattcatcaatcaggacaacaatacattaaaggctgataataacacagttattaatggactgcttggaaatataggtaaatgggtcctttgattttataagtttaaaaaatactagcagggtaacaagtgttttttgaagttattccttaataatgcctatatgtcatgataacaaagaatttcaatactgtaagtggaacaggcatttaaattgcatgtataacatttattnggaaaacatatntttcat

SEQ ID NO: 8824 - DNA, 588 bp, Homo sapiens
ttttttttagtagaataggtaactttattttaaataactttcttaaccctgcccattaagatcacagtaaacatacaataatttttattatggaaattaatctttacatacaaaatcagctacgtaattttacttacaaaacaataaaaactgttctttactgtggcaacaaaagaagcattttgacaaatgaaaaaaattaatgcaaacaaattaaaacaatgcttttctttttacttgcttcactgtctcttctatttattttctatgatcatttgacacaaacatggattactttgatatctactgaaacataaatgataaggttcttaaaggttgaattaaaagtctgggtgttcaatattttagaagctgaataaacaaaacgaaattggggtttgtgattacagaggatttatcattttttccctttgcccatatgaaaatatataatagaaaattacccacgggaaaacatttttaaatttaatgttgcgttcctatcaagtttaataataatgccaagttggcaatttaattaattactttcactaaggattaatactttgtctagaatggagtagaggt

SEQ ID NO: 8825 - DNA, 87 bp, Homo sapiens
aaagaactgaatacaaaatattggccttgatgtggagtaacagagtcattcattgctggtggaaatgtcgacgcggccgcgaattcc

SEQ ID NO: 8826 - DNA, 316 bp, Homo sapiens
ctcttcacctaagacgacaaacacatttattaatttgttcaatgaaaatctatccagtacttacaacatgccacagactatgagggacactgcaggtacaaaggaaccagatatgatccttgtccccgaaggagttcagaaaatttcctatacacttcagaaagtggaagaatgagctgggactgatactttttcctatgagttttgtcattatgttttttaacgcatgcccatcatctgtcctgaagaataatttccccaatgttgtgatagtcataagtttaagtttttagtttgacttattgcttgccatcat

SEQ ID NO: 8827 - DNA, 314 bp, Homo sapiens
ttttgaacttgtatttcaggtatgctaccgcattcttatgcaactctgtggacaatatgatcagccagtgcttgcagttcgagtgctttttgaaatgcagaaagctggtattgaccccaatgccattacttatggttattataataaggtaaataccttggtttaatggataaagagtattacttttgtcattatgcaacattaatggcagaaataatttatgcagggggttatttggcatttattttagagtatataaaatacattttgtcaatcaaggaagactttagttctcttttatgttatacaatcta

SEQ ID NO: 8828 - DNA, 422 bp, Homo sapiens
  misc_feature (1)...(422): n = a,t,c or g
tatgataaaccagtggaatgtggataccatgtcaagactgaagatccagacttgaggacttcctcctggattaaacagtttgatacttccagatttcatcctcaggatctaagtagaagccagaaatgcatcagaaaggaaggttcatcagaaattagtcagagggtacaaagtaggaattatgtggacagcagcggctcaagccttcagaatggaaagtatatgcagaattcaaacctgacttcgggggcgtgccagataagtaatgggcagtctaagcccagaaaggccagttgggtgaaactttccttctcggtgccccttcaccccaccaaggaggaccgggcattcaaattccaccacctattcaggcaaccggggcaacaaaagggtaaacgttccaaaaaaagggatnggcaaca

SEQ ID NO: 8829 - DNA, 2657 bp, Homo sapiens
aagcagtctcaagcctgccgcagggagaagatggcggtcgccgtgagaactttgcaggaacagctggaaaaggccaaagagagtcttaagaacgtggatgagaacattcgcaagctcaccgggcgggacccgaatgatgtgaggcccatccaagccagattgctggccctttctggtcctggtggaggtagaggacgtggtagtttattgctgaggcgtggattctcagatagtggaggacccccagccaaacagagagaccttgaaggggcagtgcagtaggctggggcggggagcgtcggaccagaagagaatcacgccaggaaagcgacccggaggatgatgatgttaaaaagccagcattgcagtgtgtcagttgtagctacctccaaagagcgcacacgtagagaccttatccaggatcaaaatatggatgaaaagggaaagcaaaggaaccgacgaatatttggcttattgatgggcactcttcagaaatttaaacaagaatccactgttgctactgaaaggcaaaacaggcgccaggaaattgaacaaaaacttgaagtgcaggcggaagaagaaagaaagcaggttgaaaatgaaaggagagaactgtttgaagagaggcgtgctaaacagacagaactgcggcttttagaacagaaggttgagcttgcgcagctgcaagaagaatggaatgaacataatgccaaaataattaaatatataagaactaagacaaagccccatttgttttatattcccggaagaatgtgtccagctacccaaaaactaatagaagagtcacagagaaaaatgaacgctttatttgatggtagacgcatcgaatttgcagaacaaataaataaaatggaggctaggcctagaagacaatcaatgaaggaaaaagagcatcaggtggtgcgtaatgaagaacacaaggcggaacaagaagagggtaaggtggctcagcgagaggaagagttggtggagacaggtaaccagcacaatgatgttgaaatagaggaagcaggagaggaagaggaaaaggaaatagggattgttcatagtgatgcagagaaagagcaggaggaggaggaacaaaaacaggaaatggaggttaagatggaggaggaaactgaggtaagggaaagtgagaagcagcaggatagtcagcctgaagaagttatggatgtgctagagatggttgagaatgtcaaacatgtaattgctgaccaggaggtaatggaaactaatcgagttgaaagtgtagaaccttcagaaaatgaagctagcaaagaattggaaccagaaatggaatttgaaattgagccagataaagaatgtaaatccctttctcctgggaaagagaatgtcagtgctttagacatggaaaaggagtctgacgaaaaagaagaaaaagaatctgagccccaacctgagcctgtggctcaacctcaggctcagtctcagccccagctccagcttcaatcccagtccgagccacagcctcagctacaacctgagcctgctcaacctcagcttcagtctcagccccagcttcagcttcaatcccagtgccatgcagtactccagtcccatcctccctcctcaacctgaggatttgtcattagctgttttacagccaacaccccaagttactcaggagcatgggcattttctacctgagaggaaggattttcctgtagagtctgtaaaactgactgaggtaccagtagacccagtcttgacagtacatccagagagcgagagcgaaaccaatactaggagcaggagtagaggtcgaactagaaatagaaccaccaagagtagaagtcgaagcagtagcagtagcagttctagtagcagttcaaccagtagcagcagtggaagtagttccagcagtggaagtagtagcagtcgccagtagttccagtagcagctccagtacaagtggcagcagccagccagagatagtagcagtagcactagtagtagtagtgagagtagaagtcggagtaggggccggggacataatagagatagaaagcacagaaggagcgtggatcggaagagaagggatacttcaggactagaaagaagtcacaaatcttcaaaaggtggtagtagtagagatacaaaaggatcaaaggataagaattcccggtccgacagaaagaggtctatatcagagagtagtcgatcaggcaaaagatcttcaagaagtgaaagagacccgaaaatcagacaggaaagacaaaaggcgttaatggaagaagccaggctttcttagccattctttgcagcagaagatttcttgataaaaaaggattacctttccttgtaaagaggatgctgccttaagaattgcatgttgtaaaaaatctttttggaaaatacagactgtttgtttaccagacattcttgtactttttgcataattttgtaagagttatttatcaaaattatgtgaggttccaaaatatgtaaaaatgataataataaaaaaagattaacatcccttgtcatcttttttaaatatcctatactcttcagtaagaatctgtatattttaataggcaaatctttaagtctgttcccttctaattctgtatcatacattgcttttgtagaaataaatgtgtgtttatttcatt

SEQ ID NO: 8830 - DNA, 4539 bp, Homo sapiens
aacagaaactcttccaacatgctcaggaccaaccaaccatatactggaccgatgcttaacaaccagaatactgctgtccacttagtgtctgggcagacatttgctgcctctggaagtccagtgatagccaatcatgcctctcctcagcttgtgggtggacagatgcccttgcagcaggcatccccaactgtattacacctgtcacctgggcagagcagcgtttcccaaggaagacctggcttcgccaccatgccatcggtgacaagcatgtcaggacctagtcggttccctgctgtcagctcagccagcactgcccatcctagtcttgggtctgcagttcagtctggttcatcaggatcaaactttacaggagatcagctgacccagccaaacaggactccagtaccagtcagtgtgtctcatcgtcttccagtttcttcttccaagtctaccagcaccttcagtaacacacctggaacaggaacccagcaacaattcttctgccaggctcagaaaaaatgtctgaatcagacttcccccatttctgctcccaagaccacagacggcctgaggcaagcacagatccctgggctcttgagcaccacactgccagggcaggattctggaagcaaagttatatccgcatccttaggaaccgcacaaccacagcaggaaaaagtagttggatcatctcctggccatccagctgtgcaggtggagagtcattcgggaggacaaaaaaggcctgctgcgaaacagctaacgaaaggagctttcattctccagcagttgcagagggaccaagcccacactgtgacaccagacaaaagtcacttccgatcactaagtgatgcggtacagagactgctctcctaccacgtgtgccagggctccatgcccactgaagaagacttgagaaaagtggacaatgaatttgagacagttgccactcagctcctaaaaaggacccaagctatgcttaacaaatacagatgcctgctcctagaagatgccatgcgaatcaatccctctgctgagatggtgatgatcgataggatgttcaaccaggaggaaagagcttccctgtcccgagacaagcgtttggcacttgtagaccctgagggttttcaggctgatttctgttgttccttcaaacttgataaagctgctcatgagacacagtttggccggagtgaccagcatggcagtaaagcaagcagctctctgcaaccgccagccaaggcccaaggcagagaccgagccaaaaccggtgtgacggaacccatgaatcatgaccagtttcatctagtgcctaatcacatcgtggtctctgcagaaggaaacatttctaaaaaaacagaatgccttggcagagcactgaaatttgacaaagtgggcttagtgcagtaccagagcacgtctgaagagaaggccagccggagagagcctctgaaggccagtcagtgctctcccggccctgaggggcaccggaaaacctcatccagatcggatcatggtactgagagcaaactgtcaagcatcctagcagattcgcacttggagatgacgtgtaacaattccttccaggacaaaagtctgaggaattctccaaagaatgaagttttacacacagacatcatgaaagggtcaggcgaaccccagccagatctccagctgacaaagagcttggaaaccacatttaagaacatcttggaactcaaaaaggcgggacggcagccccagagtgaccccacggttagcggctctgttgagttagatttccccaacttttctcctatggcttcacaggaaaactgcctggaaaagttcatcccggaccacagtgaaggtgttgtagaaactgactccattttagaagcagctgtaaatagtatcctagagtgttaatagcagcagtcctccccctaccccgccccgagaccccaccccgagaccccaccccggaccagttacattcgttcctggcaaaagcaaatggaaatggtctcctgtctccagcctgcttgatctttcatcacaggttattctttctaatctcaatcctgttctttgtttaagagcaatacttgtcgtgattacagggagatcctttagtaaaattaatccttggcagaaagcagtctgataggccccactcatttcaagtgttatgaaagtgcttataggcattttgtttatttgttttgttttttaaaaacactgtaactcaatgagaccacagtatacttggcccttggtaaaattttgacaatcataagtcatttgaaaagaacagacttactaaaatcaaacgagacggatagaagctactttttaaagaatatcccactgcatctgcaaatttagttttgggtttttttattattattattttgagtttttttgtgtgtgttttgttgttattgttgaggggaagaccacatggttcttccccctcagccatctttgagcagtaaattgctggctgtgctgccagggacccgcagccctggtggaaaagccagtagcacatacgcagggcattgcagggcttccctattgatggttcaagtgcttttctgatgcttccggagcaaaacctcatgcttttaggcatatctatgttgaatttcacctagggaatgttctgttcttagttacagcagcaaaatttgaaataatttcaccaggctaaataaaggaaaatggaaaccagttaagaggcacagtgtacagaggaggccgggatagagccatgagggttataatattaatatgtatatatgtaaaagcatatatatgttaactattgagaaaaaacaagttttgcattttataattggatatagtcaacatataatgtatgtttttgtttgttgctggattttgtttcatttaacctctctttgcaccctctcccacaacaaataccaagcatcaaaagcactttcatttgaaaattattatgttgtaatttttcagtttaaactttaaggagactctggccttgtttatgcttcttgtctgagaacagtagtgacccctggcagcaattcattaccaaaacacagacaaaccaaaggtaaccagctagcccaccactgaaaggaaagatctgagacatgggattcccatttgagagccaaaggatatgccctgtcatggtttctgtttggcctgtgttcatattagtgagcatggcttactgcttttttttttttttttttttgtcagggagtattctccgttttcctttctcgtatacctgccccaggttatcccatttctgttgttacctttattcttaatgtcattgtaaccatcacttatctcctctcattgggaaagctacatgatagtatttttatgcactcttctcccacacatacacacacgtgcatgtatctgagctgctcggatccagaggtcatttttgttacagtgtgtgcacactcactctccttcttagtgtgcatactctctcatttattctgtttatctccctggctctggaggtgcagccactggtcttcactttaatgtgttgccagaatctgcttctggctgtcgccaacatggggatgacccccattgtcatcatgttgggcatttcttttccagattggcctgtgatggaaaggaaggcttctaattagaaaacacagcaacagaagacctataccccggtgcccctgtgtcccactacacacagaaaaccctgtgagatggccagtcttcataatagcaacgtaccttcaccccagccacatggccccagccaatacaaattggaaaatctggcccattttagggttaccattttttccttatttgtgccaatgtccaagttgcagatttcccctttttcctgtattgtaacatattagataagttggtgtcgccagttggtactttctgtttgggtagtcctagggtaacaccctgccctaaactccatgatttcataggcttttcttcccttggggctcatgctcccctaattcctagcaagatgatccttcctaatcaaattcttctcattgcagaactttatccctggaagccttcatgtgggctgctagtgagttacattaattactgcaaatcagtggaattctcaagagacaagataagcttcatgtacatttgtcacctctctttcttccctatcctgccctgctgtcccaatcctagcttttctatataccatcctaaagggtttttaagccctaacacttgtctagcaaatggagagcctaatttaccaaaatgaaacttgtaaatttttgtgtcattgtatgtaagtttactttttatggaggaaggattctagataatgacaaatgaagattatgacatgtatttcactcctgtgattaggttctacgcacatgggtcataactcgcatgtcgagccccctctagtgaagggtaggagagctcagcctcggatggccaacattcagttgttcaggttcattcgtcaaagttaagttttagaactatttgtactcagtaacaaaaatcattttctttggt

SEQ ID NO: 8831 - DNA, 576 bp, Homo sapiens
gtcgacgtcatttcaatgttgtgactatgtgctacatgcactaagactgggtattctcttagaagagtgcgttttgttaaacagatggcagttcactctcattagttctatttgtcaatattacagccacacacttcaggataacttactcaaatgtgaagtcatgggaagctatggctagtaacaggaatgcttatgaaaaatttggagggcaagcacgagcaagaggcttttgccactcactagcacagccagagcaaggatgaagcaatgaagtcttgttcctagtggtgcttgtatgtcagaagccatagtgagctcagcacagggcgttctgcacatcatctctttaatccaagaaaaacaaaatggcggatgaaactcctattgacctgggatacaaagccactgactttggctcttgatcttttggtgggttctgaatcactccttctgtattagggcatatactttcactctaaaacattgtggtaaatgaaataaatcttgtacagatgtcgttggccttgttatgttatgttataaatcctgtacagatgtccttggccttaaaaa

SEQ ID NO: 8832 - DNA, 796 bp, Homo sapiens
tttttttttcaaaaacatacttcatatttcctcttttattatataaatatcagtttaaccttttactgtaagaatataaacgttttaagaggatctttgttattatttatacaaattcacaaacagtacaattaattgataaaggtctctgggtttctttaactccatggtcttgcatgttgctgtggagggttctaaagaaataacaacaaaaatccaacgaaaatatacatcctactcagaagtgatttctttaaagccacaagtcccaacccccaccaaaagaaagaaagtcatctattcctccatttagaaacggaattttttaaaacccacaaactcccattttgttaatagaacagagataagatatgagcttcatcacagccccaggggctctgcaggccagctctgctcctgtttcccacaggaagccgcactgtgtgacctttttggggggaaacttggaagagggtgagggtagggcagaatttgcatatataatcatcattttcaagacacaatctgcatctccaacaaaaacaacggttcaactctcattgctcccacatatttgtgctataaattaagatttagaaataggtcctcaaatcccaatgaacaaggagaaaaaggaaattatagccagaatgtggaagtggggcacactggacggatggaggctgggaagaagccaacacaaaaagacggacaaacccaagggcatctttccagtctaggcacaaacatgtttcagtctcaaaatatctctcttgtagaattccagggcttcaga

SEQ ID NO: 8833 - DNA, 335 bp, Homo sapiens
ctgggtccggcggcgccaggagaaggcgacggcgtccagaccccgccaagacggagaggggaccgcgccctcccccgggacaccccaggatccctggaaaatcccccgatcccccacttcacagctggacaagccgaagccccgagaaaggagcgtgacccggccagctccctcagcgaggggtgccccggctaaaggtggctcccccatcttccagcggcgtccctcgagacctaaaagtcccagagtttggagggcggggtctggcttgagcgtaccagtcgtcgtgcaaagaaaaatggattcggggtggggccattgggatgaaccgaaaa

SEQ ID NO: 8834 - DNA, 286 bp, Homo sapiens
ctcaggctcatcccacacactcggtgctagtcactgctgtgtgtttacatgagtaatggagctgccgggggaggggagttgtaagcagagcgctgagcctcgcagctcgcattcggagggaagctgacatccacaccaagtcgagacttccagggatgtggccggggagcagtcacatgctgtagctttcatgagcacaggcatcagtcaagcagatgtttgtcgactggaatggcgccaaatcttaaaggcagaccacggcaaaaaggaaccatgcccacaaaag

SEQ ID NO: 8835 - DNA, 524 bp, Homo sapiens
aatcttgccctaattcctatctaagagatctggggagtcatgtcctacaaaccatacattctcatcagatgggttgtatctaaccctatatgtcatgacttactttccaatcagactctgccataacattataagacaggcaaaaaaatcaaaatattttaccccaaaacatgtttctttgccatatcttgatatggcctggcaaagatgttctttctgggggaaattttgcatctgtaaagaatctctgttaacatagctagatctttttcttccaggccctcccaatcctgaagagattaactgagagtccagcaccttctaaaggtctgaataggaaacagttgtcatctgttgtctctaagggcagccactataagacttcaaaagaaccttggtctccacaatcttttatctgaaccctgaatatttcctttctattgatcccaggtctttagacaaactcaaccaattggcagccagaaaatgtttaaatttacctatagcctggaagtaccgtcgac

SEQ ID NO: 8836 - DNA, 203 bp, Homo sapiens
cacagtacctggccccatgaaagcattcaataaatactaataataccttcttctatgccccctttctggaagttccccttctaggacacagaggtgctgatcagcttttccctgtcagcatcaagagaccctcctttcagacacagtcagtctccagcagctacaacgggaaaggccaattgagggcatttctaacaaagttc

SEQ ID NO: 8837 - DNA, 879 bp, Homo sapiens
tccttctcacattttgaaatggtaaaattgactggaaataatttttcttggtgccttattggttttccttgcaaacctttctcatattttctcatgaccattgccagtgaccaaggcccatgtgtgtgttgtgtgtaattgtgggcatgtacaagcttaaataacgtgccgacagcactgtttcaaagttggtattcattaggctgttgcctcctggggctggagctgcgctaatcctgacaccggctgccaggagaaaacctcatgggatccacacacccaaaccttaaataacagccatccgtggacctggcactcttccagttacaggatgggggaaccccagagctaggaaatgtagttgtatattttaatgaactgctaccccagccaaagaagcttctttcacttttgtgctctacagaaagcccaaggggggtaggagggacagagctttgaataactgctttcctaacactaaatgtggccaacaggacagagcacatcacacgtataggcaggtgtgagggacagtggctaagaattgcctgctccctctgcatgctctttcttgtttccaaagtccaatcaagtgatcctgggaaacaaatctgtctggattgcggagggtggttctgaaagaactgccaagacgttaaagaagggtgaagagtaggcagaatataagtagctaacctgagtcaagactctcaaaagctagcagcctgatgacaataggatttatttcagccaggatagtgtctgtctgtgagtgcatcattttaagacagtatgacttcatgttgttacaaactatgtatagtatgtatgttttgtgggttgtatatatacataatatatattatatatatatatgaa

SEQ ID NO: 8838 - DNA, 496 bp, Homo sapiens
gggagtgggaacgtgcacctcagcggtcgagctcggccgggaccctaggtgcgggggaggcggggtcccggctccgctgcctgcccagacctggcggggatggcccgtgcggctccgggtgtgggacgtatcctgggagcgcccggggttattcccactgactcccgggagtgggtgtgcgcccttcgccccctgcctggtctgtggggatccatcgttgctggagactggaggtcaggggccatgggagccccggggcgaacggtgcgggcctgggccttgtggaaaggaggagtgaccgcccgatcgtgcagcagggcatccccctgacctggtagtacttaggtgggtaggatgattggggtcggttggcgtaactgagggaaccctggtcagactgctccgcaaatgattacagtgttatttctccggtagtaattttgcttgatgtatggcatttccggacccataagatgatactgtaggttgtattttg

SEQ ID NO: 8839 - DNA, 1345 bp, Homo sapiens
  misc_feature (1)...(1345): n = a,t,c or g
ttttttttttttttttttgtacctaggtgttctttaatgacagttcaaggggccaattaaacagcaaacagcttggcaaggccctggggtgtggtgtgggcacgagtgccttgtgccagtctggccccagcacagcccctttctccagtgactcctggtatggtcaacagcttctggcccaggcctgggccccgagaaggctggagtcctctgctgggtgtacagctgccctgcaggctctgtgaagcgtctatgagcccagcccaggcctgggttntaaaagaagtccgaagctttgcgcccggggcagggagctgcagcaggttgtccgtgatggaggccgggtcctgtgtgagaggggtgcgtgtggcagagccaggcgccggtgtgcttgtgggggtctgcagcccactggccggggtcttgaggtgggtggagcgtgctggggatggtgtgtagctggcccgcagggcccggtctgtgtacttgctggccgtcctgctcacaaggcgctgtagggctggcgacatggctgggctcaggcctttgggggtgaggctggccagattctccgtcactctccgcaaggcttcctgcttcttggcccggttcttggcagcggcctcgttggccatcttcagacccagccgttccctgcggcctggctccaggatcttaaaagctgggccgggtgtcctgtccacgtagggcgtttccgacccttcaactctcaagggtgtgttctcaacctccccccaggtcatcatcggggactcgttcacaccaggggcaggggaaggagtggcaacaaatccaaatccacccactcgaggggactcctgggggatcagctccttgccatcggggcccaccttgccctgtttgtgctgggcattgagggcggctgcctgctggagctggcacctgctcagggcttggctgaaggggtccctaaggaagcgcgtgttcttatgtaccacctgccggggcttcttaaacagctgctcctcgtcagggacaccctctggatagtacatgagggaattcttggccttgtacttccaggtctccacactggcctggctgctctcgatggcctggtgctctgctgacgggagttcgagattatctttctgcctcttctcaaactcttcctcagcctggtagagccaagcgtggcgtgcccggcttctctccttggccacctccatgatctcctggaaggaggcattgtcctcactcgtgtagcggctcaggaagacatctaggctgggcagcggctccttctcctcctcctctccagcctctccatcctaccaggccctcggccgcggggcctgggctt

SEQ ID NO: 8840 - DNA, 434 bp, Homo sapiens
gcggatcctcctgccttgataacatctgcttcttatggagagtgctttggagaaagtcaaagctttagcgggaaaaacgcccaggagaacttcaacgggagttgttctctaccacaacaatgctcctgctcattcctctgatcaaacaaaggcaattttgcaagagtttccatgggaaatcagtacgcatctaccttccagtcctggtttggctccttctgacttcttttttgtttctcagtcttaaaaaatctttaaagggcatctatttttcttcagttaatgctgtaaaaaaatattgcattgacatggttaaattcccaggaccctcagttctttaggaatggactcaatggctgatattaatattatcatttacaaaagtatcttgaacttgatggagcttgtgttgataaataaagtttatattttta

SEQ ID NO: 8841 - DNA, 1101 bp, Homo sapiens
  misc_feature (1)...(1101): n = a,t,c or g
gcgccgcggcatggagcaatagcagcagccgtggcgcccacggggcggggccggcggtcggtgacggccntgtggctgcaggcggcggacggctggaagaagttggattccatgggttccaagagaagaagagctacctccccttccagcagtgtcagcggggactttgatgatgggcaccattcttgtgtcaacaccaggcccaagcaggaaaaggaggagactttccaatcttccaactgtagatcctattgccgtgtgccatgaactctataataccatccgagactataaggatgaacagggcagacttctctgtgagctcttcattagggcaccaaagccgaagaaatcaaccagactattatgaagtggtttctcagcccattgacttgattgaaaatccaacagaaacttaaaaatggaagagtatgatgatgttaatttgctgactgctgacttccagcttctttttaacaatgcaaagtcctattattaagccagattctcctgaatataaagccgcttgcaaactctggggatttgtaccttcgacaagaaatgagtttgttcagaaaggagaagcagatgacgaagatgatgatgaagatgggcaagacaatcagggcacagtgactgaaggatcttctccagcttacttgaaggagatcctggagcagcttcttgaagccatagttgtagctacaaatccatcaggacgtctcattagcgaactttttcagaaactgccttctaaagtgcaatatccagattattatgcaataattaaggagcctatagatctcaagaccattgcccagaggatacagaatggaagctacaaaagtattcatgcaatggccaaagatatagatctcctcgcaaaaaatgccaaaacttataatgagcctggctctcaagtattcaaggatgcaaattcaattaaaaaaatattttatatgaaaaaggctgaaattgaacatcatgaaatggctaagtcaagtcttcgaatgaggactccatccaaccttgctgcagccagactgacaggtccttcacacagtaaaggcagccttggtgaagagagaaatcccacttcag

SEQ ID NO: 8842 - DNA, 1691 bp, Homo sapiens
aaaattctgagctgtacacctctaggaaatgaaacactagttcagaagaagcctgtaaactctcttacaaatacatttggttattcaccatgaggttagcaaagcctaaagcgggtatttctcggagctcaagccaaggaaaggcctatgagaacaagcgcaaaacaggccggcagcggcaggaagtggggcatgactattcgatttgactcaagcttcagtagactcagaagaagcttggatgacaaaccctataaatgtactgaatgtgaaaagagtttcagtcagagttcaactctttttcaacaccagaagatccatactggaaagaaatcccataaatgtgctgattgtgggaaaagtttctttcagagttctaatctcattcagcatcgacggatccatacgggggaaaagccctacaaatgtgatgagtgtggagaaagcttcaaacagagctcaaatctcattcagcaccagagaattcatactggagaaaaaccctatcagtgtgatgagtgtggccggtgtttcagccagagctcccaccttattcaacatcagagaacccacactggggagaaaccctaccagtgcagtgaatgtggcaaatgtttcagtcagagctctcatctgaggcagcacatgaaggtgcataaagaagagaagcctcgtaaaacccgggggcaaaaatatcagggtgaagactcacttaccctcttggaaagctggtacaggaaggaagtctgtggctggtctccgttaagtatagggctttttgacagctttttgagacctcttaagaaaaaataaaaagtaaaaaatgaaaggaatcttttttagaaatagagatgctttatagtagatcacttaaatactggatcttttgctagtgtgaaaacattgggaatttaatgacattattgagctgaaagaaattacatgagtccagctaccctcatttcttttttatgtgacatggagcacaaagaactgaaaatatgttttgagggagcatgacatccttgacctcatttgaaattacttccattttcaaaaaccatcatgttttgcagatacattttgagaaaaaccatcatgttttgaggatacatttgtgaaagtgcaggcatgccaatgactactcagttttaggactttctgtggaagaaaaaattaaaagggagaagaaatcaattccactacttttgaagttctgcaacagatgagattttgtttgtaaagttttgtagtatattaaccattggtttatcactctagattcaacatattaaaatgtattcaagctcacagatttttaatcagtaaggcctatctatattagttgtcttttatttcttctccttgtggacagttgttaatgaaaggagtaaggatttccctttttttgttttgtttgttttgttttttttaaccaaattcttagagatactatagaatccaaatgagaactgaattggacctcaagtcttctattcctgctaatagagttctttgtgatggtaactgctgtgtcgtttgttttccacaagttgggatggattcatgtcgatacatccccatgcccttgacctcttctggcattctcctgtgctctgacaaactgagcccggccttttagatctacatgaataaacaaactattttaccaagaaaaaaaaaaaaaaaaa

SEQ ID NO: 8843 - DNA, 377 bp, Homo sapiens
ctgctatgttgaagagattgggacatgtcaagttaatatctgatgggcctccttccttcagtacgcaccatcacttccaactcttcgtaggcttctgtaggtctcatatgctcacttactttctcctcgggtttttctactttttcaggagacattttcactcatactgatgggaagatgacagcagtaatgccaatacacttaatgtgggcgccaagaaataacccctttggggaaacatctgagatacaacttagctgcagactatattctctgacctagatttgtatacaactgaaacagttctgttggtggacaccatcatagagagtctttgatttggacagcgaatattgggtaaaaaaattattgtagca

SEQ ID NO: 8844 - DNA, 374 bp, Homo sapiens
cagcgattgaccagtaactgtgagatcagaattcacccaaaggaagacattttcatctctgtattatttgcacctactcgattatcttgcatgttggctagactagaaatcaaacaacttggaaatcgatcacaaccaggcattaagttcacaatacctttgtctggatatggaggaacaagcaatcttattttggaaggcgttaaaaaattatctgacagttacatggtaacagtgaatggcttagtacctggcaaagaaagtaaaattgttttttctgtccgcaacactggctcccgagcagcttttgttaaagcagtaggttttaaggattctcagaaaaaagttttgctggatcctaaagtattgaggag

SEQ ID NO: 8845 - DNA, 141 bp, Homo sapiens
tgttaagagacgttatgcccatttctctggaaatctcaatggtgacaagtaaggcaaggcatacaatacattcctgtcccactgcaaccttccacagctagcctctgcactgctgggtatctgggaaagactcaggagagg

SEQ ID NO: 8846 - DNA, 14898 bp, Homo sapiens
  misc_feature (1)...(14898): n = a,t,c or g
tttttttttttttttctagaaataaaacatttattcggtttttaaacaattaaaaaatcttgtctgggcaggccctttgctcaggcctgtgtgtcctgctcagccactctgtcgaccacactgacccaggggctgccccggacatagaagcggaggggtttccgggcccactcccctgcatggccgacgcccacccgggctgctgccactacagccggctcactgggctccaggggaccacgctccagccatacagcttcatcctgtgccaggtccctctggtcaaagctcttgttgatggccagggcctggcacagcttggaggggccactgcagagctcgcggtccttgaggacacggctggcggtgcctttccggagggtgctgcgaagctgacgcatggtctccagaccttccaggggctccagtgctcgcagcaagacgcaagccccgtcccctgtgggacggacagtttggaagtggagcctccctaggctcctgtcctctctgccctagtacacatccagacatcctgtgctgcagggagggtgcagctgccttcctgcctgggccagggacctgctctgtgcacctgcaccatctcctgggtctgacctggtgggagggggctgcacctcactgtgtccagacccctctgcctaccttgccatcctccaagcctgcaccatgaggtgtgcctcctgtgggcacctctggcttccacccaccaggcagggcctcccccactgtggccgcccccacaaagccagactgttaaaaacacatgacaaatgctgggtatcagttcctttccacctggcttcccctggtcttgtgactggcagcagctataaagccagcaaaggaagctccagagagccagtcctcgggtgcgatcattcagccaggaagcaggaagccgttgcctagccaggccccagcgctccccttctgcctcacccactcagtgtttgtgttggtcaagtggtgggggctaggagttggcttagagcagctgccagtgtgcaccggatgttgggagagcccatgcaatgactcagtggaaggactgactgcaacaccctgcacaggcagggcaggaggaggctgacaaagccccctcacctcccttgggatccctcctccagcctagccccctccctcaccaggccaggccccttgagaaacagagacagcaagcgaaggctcctgggcccaggggctcactcaagcacagatacccgaattccctctgccctgcaggtttggaaaggccccttggattcctggctggggacaatgatgacctggaccctggccagaagagccctggccctccagcaaggcagcacctgctctgatgcacctgtgcacccctggccctcccagccacctgggagtccgaagcttagcctggaggtggccaagccagtccctactcttgggctgcggccacgtgaggctccgcatcagcagccaggggcgagcactagtggacaaagccagcaaatgcggcgttcctgtgagcagataccctcaaccagccagctgtcaaaagtatttcaagataaaatccaggccaagcaaagcctttaagttcccgtccattctgtgattcccacgctgcttccagctcaccaggtggggtgcctgctgcccaccctgacccacctcagtagggaggagcaggaccctctacatccctgtgggtgcagggcacacgcccctcgttgtctcactgagcccccacagagccgcctgcaaatgagtcaaagcctggccgccctcatcaccacagccccgtgccctggctccttcacacagaacacatccaagtcccacatcctgacaaaaacatgacccctttgatcacttcctgccaaacctccctttcctcaccgactcctccgccgaccctaagtccccctgctgtgcccactgctccatccttggcaacctgaccacgctgctcttagcactgcagtcatcctcttctccaatcagcttctcatcctcatgtgctgcctccgtcaagggcaggcgacactgtgtcctcggccttctttctgcctccactccaaccaaccctttcnnnnnnnnnnnnnnnnnnnnnnnnnnnnnnnnnnnnnnnnnnnnnnnnnnnnnnnnnnnnnnnnnnnnnnnnnnnnnnnnnnnnnnnnnnnnnnnnnnnnnnnnnnnnnnnnnnnnnnnnnnnnnnnnnnnnnnnnnnnnnnnnnnnnnnnnnnnnnnnnnnnnnnnnnnnnnnnnnnnnnnnnnnnnnnnnnnnnnnnnnnnnnnnnnnnnnnnnnnnnnnnnnnnnnnnnnnnnnnnnnnnnnnnnnnnnnnnnnnnnnnnnnnnnnnnnnnnnnnnnnnnnnnnnnnnnnnnnnnnnnnnnnnnnnnacccggccctttctacccctttaacctaaccagccctgccccgtcagcgtagccagagctcccgaaaccctggcctggcctggaagtggcacctcctcgctcaaatgctggccccacctcagtcctcctagtggtcccctggctgctagcggacagggctctgccggccctccaaccccccgtgccccagcactgctcaccctggctggagatgttcatgcagaagtacatgccgtaaatgatgtacacgtacagggtccccggcttcatgaacatgcctcggttgcggggggtctgccggccaccccttgagtgggcggcttcatcctctggccccaggtatgcctcggtctccacgatgcggcctcggagttctgtgccattaggaagtcgccggactaggacctgtgggcagtcagtttctgctcagggcgggaagggatgggggtccactcaccctaacagtgcccagcctggacctcatctccccagctcagggtgtgtcagccgcccaggtctagccagggaccttgccccgtctccatcctgcctcttctcttgctcctgctgaggctgaatgtggctattgagggcaccagttgtctcctccagccctgctagacaaccagaccgcaggccgaagatacctcaggccacagccaggctgggctgggaaccggcagtcatggattcaccttgcaggtcaagtcctctcagcaggaccctccattccccagattcctcctttcccaagtgcccttgagaaaaccatcagcatttagcacgaggccaggcatcacggaaggcacaggaccccaaggatgtccccacaccagctacctgggcaatcccagagcccgtgaagtcccctaaacctgggctgctgaggtggccacaagggaccctcatactcagctcccaccctccggctttctgagcagtaggcccagctgccccacggtgccccagcctggaccatggtcctggtaacggccaacagttgtgtcactgctcggagccccagagttaacagcagagcactggggaccaaccacatcccctgcacctctcgtttttaggccagataggtcagctggacagccaggctaccttcacctcagcccacgaagccctgtggtgccaaaggccatggtcagtatcacgggctggggaggaggggcactggagcttagatgctcgccgggggagcattcaggagggcttcccggagatagggtggtgggaagaaggggtcagcgcggggagcattcaggagggcttcccggagatagggtggtgggaagaaggggccagcgtggggagcattcaggagggcttcccggaggtagggtggtgggaagaaggggccagcgtggggagcattcaggaggccttcccggaggtagggtggtgggaagaaggggccagcgtggggagcattcaggagggcttcccggagatagggtggtgggaagaaggggtcagcgcggggagcattcaggagggcttcctggaggtagggtggtgggaagaaggggtcagcgcggggagcattcaggaggccttcccggaggtagggtggtgggaagaaggggtcagcgccgggagcattcaggaggccttcccggagatagggtggtgggaagaaggggtcagcgccgggagcattcaggagggcttcccggaggtagggtggtgggaagaaggggtcagtgtggggagcattcaggaggccttcccggagatagggtggtgggaagaaggggtcagtgtggggagcattcaggaggccttcccggagatagggtggtgggaagaaggggtcagtgtggggagcattcaggaggccttcctggagatagggtggtgggaagaaggggtcagtgcctgggcgggaagcccagaaatccttaggcatccagagccatgaggacagaagtgaacaggccaggcttggccaggccatgtccaggggagaaagggtggccctgttccatcttccctggagcttagagggaatgcccctccaggggcttcactctgcacactcctgtgcctccatgggggcacactgggggggcccaactaccactctggagaggaggttcccacagcccttttctcattgtttccttttccatcccaaatttctgatcaggatttcactgataccatttccaccagtggcagatactggggcctctcacccctccccacccccatggccaacacacacccctcttccttgttggcagagcctcctgggggagaccacaccctcctcagcccagagagtggcctgggatttcatggcaactcactgcagtgacccttttagggatgagtgcatgacccaagcctggctgaggggtctgcaagggcatccactaggaggttatggagagggcagagggctgtccctgatccaagggacacagggtgagacaccctcttctctgctggacatcatcttgtccaccaatgggctcaagtgggcatgactgtggcctgacaaggatgctgaatagagacaaacgtattgtggtccctgatgccatgctgcgcccttgccctgttcctacgacgcacctgccacacgtgctgttttgttgtatcacaaatgcccattgnnnnnnnnnnnnnnnnnnnnnnnnnnnnnnnnnnnnnnnnnnnnnnnnnnnnnnnnnnnnnnnnnnnnnnnnnnnnnnnnnnnnnnnnnnnnnnnnnnnnnnnnnnnnnnnnnnnnnnnnnnnnnnnnnnnnnnnnnnnnnnnnnnnnnnnnnnnnnnnnnnnnnnnnnnnnnnnnnnnnnnnnnnnnnnnnnnnnnnnnnnnnnnnnnnnnnnnnnnnnnnnnnnnnnnnnnnnnnnnnnnnnnnnnnnnnnnnnnnnnnnnnnnnnnnnnnnnnnnnnnnnnnnnnnnnnnnnnnnnnnaatgcccattacttaaggtgcttttagaaggatccgcatggggacagaatgttctctgttctccatgaggtcgagcccacattctagggtctgctcctttagcacccaactcctggcactggtatttctcttctggttcttcttggtgattataacctaaaagtaggctcattaaaggacaaagggaaggccttggagcctctggagaaccagaaaggcaggcctggggctttggcatcgaggaccaccgccaccacctcgctcccaacagatccagccaagatgccacggctgtgtgagcatctgctcgtggggacaggctgcaccgtaggccccaccaggatgggacctgggcagtccctgcttcttactccaagtctgattggcagagcccagatccttgacctacattaagctgcaggggccctgggaagccagcactgcactgtgagccactacagcgggaaggggcagcccgacactggccacagccacagttcccacgtgtggaaaaactgaggtggattgccggtgaggaaggctaacggtgcaagtgctcctgccctagatgcccagagccgggggcagacagtggcacccctgctccaccctgggcaagcagcactgacaatctctacattcttcccagatgacctcaggcaactgagatgaagctaagcagggaccagtgtgagcaaagccgctaaatgcatgaggacaaggaggactaactgagggccaatccagcaggcagcggacaggggttcagggacaactgcagtgacaggcacttcaggagggccctcgctgctatgttcacattacctgtcccagaaatgcccgggccagggggactgccggctggtcgaagaactccaaccccagtcgggtaaggtggccctttgggcttgagaaatagatgctgcggtatgggcccggagtggtgggcggtcccaagcagcgctccctggggcaaggtgcctgggctgcatcggacgagctgtgtggctgctctgcaggtgcctgggctgcgtcggacgagctgtgtggctgccctgctctagctggtcgctgcttcttttgccccatccgtcggcaaaactgtaatgggaaaaaaaataaataagcatccgaataggagacagctgtgtggtaaggtcaggctcaggaagtgcaaggactggatctgaccacctgctttggtttcttcatctgcaaagcgggggtgaccatcctgtgggttgttatgaggcacaaacaccctgacacactcgaggcctcaggaaatgatcacgtctgacgatggacggctgctgctgggggcagggtggctgctctgccccacatatgtgcgagctgcacggcatgggggcccaggctgcatgacctggggagcagatgggggcctgagcctgggacagcagggctggtgccctccgattcccactcatcatgcaggtcccaagcaaacgtctgagctggtttctggagccctgccctttcatccaacccttgccagaattcaaaacacaggatcttagcagggccaaggtcggacacacagggaggggtgagcaccggggtgaccaccgcgtgctcagggtccctaactgtcctctgcttcatggcccaggctggataacgagcaagtggggcaaaggcaaggtctcctgagggactaggagggtctgctgagaccgagcaggccgccagcctcccacctctggcctccccatgggtagggggaacctaaccacacatcctcggctgtcctggggcaaaggagaagggaagatgaaggtggcgggtgagcgccggcctggcagcacccggagggctggtctttagcagcacctaagtcctcctggcatgggagagatgcattatttttaacgggagtgctgacgttaatgtagaacggagactgccagtcggcctggaacggacgctgacgtgaccgtctccgcagctcggcccgcgctgccagcgcgccgtgggttcagcccccgggcgctgcggccactgctctcggcccgagcttggcccttggcctatgctctggctctgccccgaaccctcggggcggtgggcgctacgcccgtccccggcactcccgctcccgcggccgcgctcgctgctgcgcctgggggtgggcgcgtctgttccgcggggcggccgaggcgcgcgctcacctgggccccgctgcgcgcgggcatccggcggctcgggccggggcttcgtgggactcggaccccggcgcggagcccagcagccgccgaccacggaagcacccctaggaccggggcggagcggcgcctgcgcagaaggggacggaagccgggagaaggggggcagtgagcgccgggaactggctgcgcccccggggcggggcgggccacgtggaggtggatcctcttcccagcgcccaccgccaggtccggaccgattcccgggcccgatgcggtgcctgcgaggcgagagcggggaaggggcacctgggggtggggcgagccccgcactgtgccccggcgcccctcccaatgagctgtccgcccccgcctgcgccctggtcgcctggcggccccagagcccactccaccagccggtggtcagaccaccgagaggacgggcccgtcgtgaacctgagtggatcctcgaggggcccgggcggagtggtcgtgctttgggggagggggcgggccgcagacgtgttttccggtggggtgccagcggagtgagcgcctgggaggccgccccagccctggtccggagtgggccggggagtccttatccaggaagtggacgccaggcttgtgcggaggcccccgcccctggccggggttgtcacaggctggtcgggggaaggaaggagggagcggcgcggattctgcctctgcagcagagcccccatccctctttccgcccagggatgctgaagggagctcgcccacgttctgggttgggcctgctggagcgcaggcagcctcctctagaggccgaggccagaccagggctgaacacggcccggcagtgcgcagccgtcctacgcttctgaggcctccccgacggcccagcgcctgtaagctctcacaacctctcaagtcagatccatgcccctagggaggggcagggacggtgcttggcccagtggacggaagggcctaggggacgggccctgagggagctgggcacactgctggctcccacggcccatggcagccccagcacccagcagagccatcccccgcttctggccacttgaaggtttatctgggtctgcagggcccctccactgtggcaggcacaatcccaccccacaacccacctctgccgcacaaaaaccctcgaggggcttttcctgagctttgacttctgtgaccctggtcctggaaaggagcacctgaaaaggccttgaagagcaactgggcacctggccgcgtcaggtgggagacgctgggcaggacagacgcacaggccatgtgtctggagccctcagatgagtgtgacacctggtcctacagaaaggctaacagggcaggacctggtctccaactgcctctcctcctctgaccagccgtcccacccccatgggccccagccaggacttcctggggagggaggggccatcagccggctggaagccaccagctgtttgtagcactgtgtgccgcttcccggggtgggggcataatgtgtcatcaatccgtgtttataaagcagccctggatgtgattccacaccctccctgcttatctgcagccatgcctcccaaacaatgagtctctccttcctgtgggaacagccccccatccccccgagtgctccccctcagtctagtagggaaactgaggccccagttgagcctttgtcctcttgatgggcagggagaggatgggtgttactttgtacttatatttattctgatgttacaagtgatacatggtccttgcagaactcacggggagtccagaggctcccagaggggtgtttttatccccacctttcttatgaggaaagagaatcacttggagagcagattggcccctgccccaggaggtggagaggccggcaccggggcgccagcaaccaacttctccagatgttctggactgagtgctgggggttgcgcaatctctgggcactccccccccccacttcctggtttgtggtctcatgctcccaccacaggctggaagcggtgggatgagagttccaactgtggcctgcagagtgggctggcgggctggtccaggacaagagaaagtggtgccaggtgagaggagggggcctggggcttcctctgtccccagtttgtcccactgctgggctggaacaggcttgttggaggaggcaaggatatcagtggaagatggagatgagaacacccttgaggctttgaaaggagtgaaggctagtattggtgctggggtgagcagccctgacccccgacctccacaataggccacaggctgtggaggggctggagctgcctccagctgtaggaggtgtggccatcagtcgctggagcctttataaacaagtctttgagagatgtggctgtattggctacaggggccagggttctagtatcagccttatgaccccagggtgcccagcacactggctccgtcttctctctgatggaggggggtgctgacagctgttgaggtgggtgtcaggtcagagcccatggactcctctacacagctttgagctggcagcttcccagcagggtggctgctggcctcttgactggtctctgcggccatctgtgtctgatgagccctggagggccaaagcttccttgggcagagaaggcagccactgggcaggccgaggttgggtgtgtgtgagctacatcctccctgcctggggctgtgctgccaggccctgggcccaggtgcttatgggaaccccttgccaaaccctgggatatggggagggggcagctgcctcagaaatagcctatgacttcaggacactggctggcctggcccccttctgcctcttccccaaatagccaggagctggtcatgggcccatccctggagccctgctccccgggcggtttcttctgatccttccagggactccccaaagcccagggtctgaccccttgggtgattacttgtggcctagaagctgagctgaggattctggggtagcagaggattctggggtagctgttgggaacactcctcttactggtcagggctcccattccctcgtgtcctggtgtgagggccacaaaccctgggtttggtctagaccctaaccctaacccattctcagacgcctgcccaccagccccgggagtgctgggcaactgcagctgatttccatttctccagggtgcatgacgcgggaagagaggggccgggagctgggtttccgtatagggggctcctccaccaggacagagagtagtagggcaggcaggaggcagagcacacatatgtgcacacacttgtctatgtggactgggtacaatcctgagnnnnnnnnnnnnnnnnnnnnnnnnnnnnnnnnnnnnnnnnnnnnnnnnnnnnnnnnnngtttattnnnnnnnnnnnnnnnnnnnnnnnnnnnnnngaaaagagagtcagggaagggagatnnnnnnnnnnnnnnnnnnnnnnnnnnnnnnnnnnnnnnnnnnnnnnnnnnnnnnnnnnnnnnnnnnnnnnnnnnnnnnnnnnnnnnnnnnnnnnnnctcagtgggggagcttcnnnnnnnnnnnnnnnnnnnnnnnnnnnnnnnnnnnnnnnnnnnnnnnnnnnnnnnnnnnnnnnnnnnnnnnnnnnattcttcacttgcttcatctggatgtatacgtgcaggcttgggctcagaggcctgacactgagcacacgtgtatcgacccccctctgatcatccttctgatgacctcactcaggaggccagggtgggctgagagcctggggattcctggacacaggctctgagctggggatttgcctgcagaggcagactggggcatgctccccactgaaggtgactcctgggtgcggggggtttcagctctgagccagctgtgactggtgctcctggcagctggcgatgagtgtctgggtcttggagcgggtctaggtggggtctgacagagtccactgcaggaggaagacctgctgacaccagatgcccagctgtggcatgctttggaggcaagcccagtccccagctttccagagaggacaccacttctggccctgccagcctagtctgggcatccaggcccgatagggcttgcttatccctggcaggtcaataatgctaagcatggagactgtcctgtctctggctgtgagcctggcatgggaggggtggcacgtgcaggctatcggagcactgagtgttggcactggggcaggctccctctcacccggtgtccgtgatgcactggcagtcatcccctggtggagttaccctccaccccctccaaagcttccattgtctccttctacatgagaattgtgttgatattgcttgtgttcagagagcacccattatgtgcaggcaccgccctatcccgtggcatggacaaggatatgggcaggggaatcttgcccaggctctgggatctaccggtaagtgtaccagcacctttagttcaaattctccccttttctgtctagccaaggagcaggccattgtctgcgtcgggccctcaagtgcaacagctcagtttggagagggctggtgccacccagacccagaggatggcactgaagcagcagcaccttgtgaccagcacagggcctgaagacacatttgtccgaggcatgggggggcaccctgtagaggggtccttagggacccatgggacgaagggatccctgcaccctctatccagaggaagccttggccacccaccactcagagctcctggacagccctgcccgtactctgctgttggcacccctgtcccccaccctgggagggtcagcccacccagtgtcaggagagaaatgctgggaaactctcaccagcagccccagcggaaagcagagtgccattttgagtccagcccagattgtgcagggatatgagcccaccccggggtggccgctgagctctgagacagtgagaagagcccagagtggacaccagacactgcgctgcctctgctgagtggcttcgggtggggccggtgcagcctggcctgagtgcctgctggtggagcggggcttctgggggtaggggcacagggcagggggaggggtaatgactgtggtcctgaactgagtgtgtgcatcggtgtgtacacgtgtgtgtgtgcacgtgtatgtacccatgaaagatgtacatgagtaggtgggtgcatgtgagcacgtgcatgtgcaggcgaatgaacgcatgaagtggaaggatgtggggacgtgtgtgtatgattgtgagtgatcggtgcacatgaatgtgtgtgagggaatgtgagtgcttagtgggattgggtgagtgtgggatacaggacttgtcagcgtgggcctctggaggaggtcgggtttaggggagccagggatacacacccatcctccgccctttaccccgtgcctgctctccctcctcaccctcttctcagcacaaatcagggcaggacagctcaagcctcaatctggagccagggagaggcggagccgcccagcgctgacactgcggtccgctcccaccaggtcctccgtcgggccgaggcgctggagaccccagccccaggtgtccccgcaggcggaccctggggagaagggagcccggcggccttccgggaggaggtgacttgggccgggcaggcgggcggcgcgcattcctgagctctgagtcagcgcgaccgccccgctccggccgggcccgcccccgggcgcacgcccctcgctccagggcattcccgggcgggccggaccggcgggcgggcggggactcggcgcgggccctcccggccagcggcggcagcctcctccccggcgccctcaggaccccccagagcccccggcggcggcagtgagtgagcgcggccgggagcgcagggctccgggggcgggcgggttccggggctgcgtccggagggcggggcgagtcctcagcacccggggccggagctgctcagagcggccggggccgtgtcggggccggggccggggccggggaggggtcgcggcgaggcccccccggggcggccgggcttttcttcctggagtttcccgagtcgcccgcggaggcggcccagccccggattcctagcccggcgcgccgcaaaaatagcccgtggccggattagcagccccagcggcctggccgggcgggacagctcggctccagcccccgcccaacagctgagggtcccaggagcgggagtctagagtccgggggtgccccaggttcctctgaactccccccgctgcattttccttcccggccacgaccggcgggtggtgtctccgagctgaaactccagcccagggcgggatggtccctgtcccggctgccctcaccgatgggaatagcaggagccgtggagctgggggtgggggactgactccgccttctgccccacgacactgactcccccatctgtacacttcgaagctccagggtgggctgggagcgactcccgaagacagactctcactctgtgcgcagaggccaacggggacaggccttctcccggctggggtgacagccagaccccagatgctcagggcattggcagagggcctggttgtctgtcatgctgggggcatgtttgtggggctgggcggggaatgggcaggggatcttccctggccccccagggcctgcttccgaccgaggtggtcctgaccagagtttcttctgtgtgtgccgcttgagatggtgaatgtgtgtgtctgtcccggtgggtggggcctaggtctggaggcccttctcctatcctgggaactcccacccgccaacgggacttcctgttggagaccgggagaagattcaaggatgaaactggcttttcaggtttgacccagctagatgcctgggcagtcccaggctcggttctcctcacccctgtggagctaaccccaacctcctagccccgaccccaagggtgggcagaagctggggaccaagcagctggctggggctcaaggggtccctgaggcggagccccctgccaccaggggtcattctgggcaagccgggccccttttcctgagaatggggcaggggcaaatggagtgcatgggagtctggtggtgccagattgaaggggcctcagaccctttcccagcccttccaagtagctttcactggctgggtggcctccgttgcacaagcaggcccctcaaccagcacccctcatgagctggccggtccccaccttggggagctgactttctagggtgcgctcttggtttagggggagtcgtccaggtctcccctgcctttcagggaccatcaggccctcccctaggatcttcccagctacagtccctgcccagggcacccccagttgctcttggctgtgagggcctccgccacaccggctccagttcccccacctcagtgtctgtgccagga

SEQ ID NO: 8847 - DNA, 509 bp, Homo sapiens
  misc_feature (1)...(509): n = a,t,c or g
atccattatttttattgtttattttgctgctcagattgtcccagccctggctgtagntccttttgactcctgtgtccttttacagagtcagtggtcttccctctcccagctctggagccagccatnttttccacgtatctctatttccntttagtngagaatggtattcagaaaccaaacttactgtctataaatattattctgtacattctgctgaaagtttaaaagtgttgctttttatatttgaatccttaatctcccggggatttaggcgtagggagtgagggggaggatatcaaatttcattttttcacacatatataaccaattatttcagcatctcttatattgaggagttgcttctttacccagatagctacaatgctgacactaacataaatcagcttgatatatgtcagtttttttcctgggttctccattctggttcatttgtatgtgtttccataactacactaataacagtgttaaattattaaaactgnataata

SEQ ID NO: 8848 - DNA, 876 bp, Homo sapiens
tttccggcactaagtcaagttctttacttcccagaagtgatggctaaggggagggaggagggtgagaagaggaagacagaaagagccagagagaatgaggaggtgagaagggggggacagtaaaccactgttctatgaagtctcacgaggcaagtgctcaaggtaaaaaaagagtcctggagaatcgtccacggctgcgggaagcatctcggtttccttctgcttttaagtcctctcagggaaggctgtcgccgctgccgctgcattaaatagttatgtacatcgcagagagtcccaggccatgggcaggtgggggaggggcgtcatttcaccaggggccgagttttatcatcgtcaccgcactggtgagctttgtactttttcacttctgccatgtacttggcccacgcgtcacctttacttgttaatacctcatcctccgtcttctgcttcttggctactattcccgtcttgagggctagtttgttcccgcctctgcgtttgcccacgaagctaagtgtggagcccggaccgcccttcctcttcggatccccgggggccaagcggcggcggccgacttggttcgggtcgctgcggacccgggggcggctcctcctgccgctgccgctgctcctcctccatcttccgcttgaacagctccaggaagctgccgtcgttggcgaacaagttcacgccgcccgacaccgggctcgaacccgcgcccgacacctcctcgtccccgctctcgggcgacgtccccgatcccgactcagcccaacggctcccgccaccgccaccgcccgcggggcccggagcctcccggccctgaggctccgcccgtctccctcgggcagccattttgtcgccaggtgccgc

SEQ ID NO: 8849 - DNA, 189 bp, Homo sapiens
cgcgggaataaaagacaagagacaaaagagtatatttggaagaaggggtccgggggcaccttgcctctagtggacaaggccctgagctttacacggccctctgtatttattagagaaaagcgatagtgagaaggggggtggaagaagaggtcagttggttggtccagagtaggcttgcaagactgcatt

SEQ ID NO: 8850 - DNA, 180 bp, Homo sapiens
tgcctttccatattcctcatccttatttggtgatagctgaacatctcctgcagaatagtagagagttaggtaaacagttttgcgcttggaaattggcttttttttcctactccttggcctttctttggaagtttgttttaatctagttaggtcttgggctgggtttgggattcgttgttg

SEQ ID NO: 8851 - DNA, 717 bp, Homo sapiens
ctttggtggggttgagttgggggtattttctaattttttttgtacatttggaacagtgactataaatgagacccctttaaactgtcttattttccaccagattgagaaccagatgttctctacacactatcactgttcaatagagctttcttcagtgatggaaatgctctgtaatctacactgttcagtacaggtagctacagagcatctgaaatatggctagaaactacatttttgttttgattaatttaaatagccatacagttgctaccatactggtcacggcagctgtagactgactgggtccatagttcatcacctcaaaattctttcaaaatttattatctctttctctccttacatgtttatttcccaggcctaccctggtgattagaacagctgaagggcctttcttgttaggctgtccatgccctaaggatgggttcctgtttatccttgccacgcagctgagcttactgcatgtttatatctcccaaggactgttctctgctcagaaatgccctgtcaagggtgtggcatcacgcagtttcatccaagttgtttcaggaattgctgacactgctgggtgcagttctatcccctaaagcctagggtgtggccctttaacttccccttcagtagaactgggaaaggcagtaccattcctagttatgagtgaagcatccactttcttttgtaacaatgaggaacagaaag

SEQ ID NO: 8852 - DNA, 2682 bp, Homo sapiens
ataagaaaaaaaatattttaaaagggtaaccgttaaacagctaggacctgcaacttcagtgcttctgggataactggaacatcagaaggacagattttattacagcataatcacacctcatttctttcatcagcagttgtcaccagacgctgttacttcctaaaatggcggacaatcttcccacagagtttgatgtggttataatagggacaggtttgcccgaatccatccttgcagctgcatgttcaagaagtggtcagagggttctgcatattgattcaagaagctactatggaggaaactgggctagtttcagcttttcaggattgctatcctggttgaaggagtatcagcaaaacaatgacattggggaagaaagtactgttgtatggcaggacctgatccatgaaacagaagaagccatcactcttcgcaagaaggatgaaactattcaacacacagaagcttttccgtacgccagtcaggatatggaggacaacgttgaagagattggtgctctgcagaaaaatccttctttgggggtgtctaataccttcactgaagttctggattctgcattacctgaagaaagccagttatcatattttaatagcgacgaaatgcctgcaaaacacactcagaaaagtgatacagagatttcactagaagtaactgatgtagaggaatcagtggagaaggaaaagtattgtggagataaaacttgtatgcacacagtttcagataaagatggagataaagatgaaagcaaatctacagtagaagataaggccgatgaaccaattagaaataggattacttactctcaaatagttaaagaaggcaggaggtttaatattgatttggtgtcaaaactgctgtattctcaaggattgctaattgatcttttaatcaaatcagatgttagtcgttatgtagaatttaaaaatgtcactaggattcttgcatttcgggaaggaaaggtagaacaagttccttgttccagagcagatgtctttaatagcaaggaactcaccatggttgaaaagaggatgctaatgaaatttctcacattttgtttagagtatgaacaacatcctgatgaataccaagctttcaggcagtgttcattttcagaatacttaaaaactaaaaaactaactcccaaccttcaacattttgtactgcactcaattgcaatgacatcagaatcatcttgcactacaatagatggtcttaacgcaactaaaaacttccttcagtgtctcggacggtttggcaacaccccctttttatttcccttgtatggccaaggagaaattccccagggtttctgtaggatgtgtgcagtttttggtggaatctattgtcttcgtcataaagtacaatgctttgtagtcgacaaagaatctggacgatgtaaagcaattatagatcactttggtcaaagaataaatgctaaatattttattgtggaagacagttacctttctgaggaaacatgctcaaatgtgcagtataagcagatctctagggcagtactcattacagatcagtctatactaaagacagatttagatcagcagacttccattctgatagttcctccagcagagccaggagcttgtgctgtacgggtcacagaattatgttcttcaaccatgacatgcatgaaggacacctatctggtacatttgacatgttcatcttctaaaacagcaagagaagacttagaatcagtggtgaagaaattattcactccgtatactgaaacagaaataaacgaggaagaacttacaaagccaagactcttgtgggctctttattttaatatgagagattcctcgggaatcagcagaagctcgtataatggcttgccttccaatgtttatgtctgctctgggcctgactgtggcctgggaaatgagcatgctgtcaagcaagctgaaacacttttccaggagatctttccaactgaagaattctgccctccacctccaaatccagaagacattatctttgatggtgatgataagcagccagaggctcctggaaccaataatgtagtaatggccaaactagaatcctctgaggaaagcaaaaacctagaaagcccagagaagcacccttcaaaattggaaaagagcaatctcgaaatgctgttttggacctccttcatggcatcagaattttctcatttaaaggacagtttcccatatgagtaattagaagtggttatatatgatgaatgctatgcagatgttgtctttaactctcagacattcagcattgaatatctttgttaacctatcaatgagtgatttattgattattgaacattttgtttagaatgggctatatgacccagaatcttaaaacagagttagctttattttagtattgggtatatatgtaagggttccatattagcaactcagcttaaaggtaatgtatttgctaatgatcttcagattttatctttgtctacagaacaattagtaatacccaagtaatattttaattacttttgcagctgttacagttgctgcggcctgttcgaatagtgaaacatacacaaatggtaaattatgtggatcttttgcatataatataaatgtatagacatggtggtaggaatagcaactaatacaaatgccaatatgataataaaatacatttgtctat

SEQ ID NO: 8853 - DNA, 390 bp, Homo sapiens
tcatcaaatcaaattggtaattcattagcttttgtaaattgatggttcagttccattcttaagagcatattttctagagtagcctcattcttttattctatgtttttgcagttgaaattttattaaacaatagtgacttttggtttcattcatttggaaaccttgatataatcttgtttaaaaaatatagttttatttttttataattatattttgagaaaataaatagtcagcttttctctcttagtataatgcctttcataatcctttaacatgcctattaacagatacgaaaaccggtgaggtccaaacattgtggtgtgtggcaaccgctgtatagcaaaatttgatcatcattgcccatgggtgggtaatgatgatcaaattttg

SEQ ID NO: 8854 - DNA, 359 bp, Homo sapiens
ggaatttggaataaaggaactgtatcatttattctctccttcccacttttttattgctttgcaaaaagcagacacttttccttgtcttactgatgtacaaaccttgcttcgttgcaaaatattctgaaaagtcctttcagatctccaaaatcttattacctatttaatgctttaatttgaagtgagatatatatgatgggttttttcatagtgtgaacattagttttatttcgaataactatattttcttgtctataggctatgcataacttgtgattcaaaaaacatcacttaataactttactatttaaaatgtctgtattaaatcattgggctagggaaattgggtgctcttttat

SEQ ID NO: 8855 - DNA, 358 bp, Homo sapiens
cttctttccttcccccacatataactcctaaaaagaaatgtagtcactgagatcataattcacggcttatcaaaggttctttaagtttaagaataaagtatgttttaccctcaaagagaatattgtaagagcatatgagccatgggttaaaattctaaattatttatccaagtatgtatatgtttgttacaagctgctaaaaatctttccttatttttgcaaatctgataggtaaactattatcagttctacattccatatttataaggatatacatacacattctgataccaaacatgacccagaaaccatacaactttgtaacagtaaccacattggtgggagttactaaaaatgg

SEQ ID NO: 8856 - DNA, 238 bp, Homo sapiens
aagaaccctgtgacaggggaagcaacttaaaaaaaatagcctaaaacttactttataaaaagttagactaatgccactgatccctaaatccttaaatagacatatttttcccataagtttttcctttcagcacttccctttcaaactttaccttgttggaggcttcattttctttttcactccacgataaaacttcatggaactgagagaaaacatcttgtcatgtttactactcttc

SEQ ID NO: 8857 - DNA, 393 bp, Homo sapiens
tacaaataaaaatactgtagtgtttcagaggaaatacaattagagattgagaggggagggtattaatgtaagagaacggtaggctaaaatcacataaatagaaaaatgtgaagagtgtgtaggaaagaacaagcaattcagtgtagttatagtgtgggcattatgaaaggaaatggtgggcagttggagaatgacaaatgtaacttgaatcatgtgggttaacatttgtatgaattatgtgggtctacattatagaacagcatttttttcaactcaaataattattggtgagtgttactaaaataattatttgtgtgtttaccccccttgtggtatataggactcttggatgcaggtgttggaaatatgatttcagtaaccttaagcaaaaat

SEQ ID NO: 8858 - DNA, 892 bp, Homo sapiens
tttgcaaaaaagtggcggtgttttaatcaagtctcattacaacggcagaattaggaatgagtcccacctagcttccacatgcgtgggcagcagctgtcacacgggcctgtcgtggcactcagcccatggacagacatatgtggctcagggcaagaaccagtggatgggctctgcacaggaacgctggcctcgggatgggagacccggcctgcccaacactgctcagagcccctcccaactctgacaacaggctcgggtcaggactccccgaaatcaggcaccctcctgccccactgctgagatccccaacgggccagacctagcttggaaactttcttcccacctgggcttggccaggaaggcagcaaacagagatgatgactcggaattgatgggctattcggaaatggctagggaaacaactgtttccctactgtcctggcgggacccaccctgggctaacgggcttcccaaggaagtcctagtggctctggggtcctgaagtccccaaatgggaacctaggctgagagaagcaaggctgtgagggcatccaaagggctgcctcaggttttgttcctgagaacgaagcgtggccccggaggctcaggcgtgctcagtggggccagggccaccagcatgggagtgggcaggggctgccacctgtagggggccagcactgggctccggggacgccagcagaggggccgagaggccatcagcagagtctgtgtcgaggtccagcctcccgtaagtcgcacagaggcaggtcattagcttcgcaaaggcttgagcttttccaccaccagaaaccccagggagagacaggagcaggcagagaggaaagccaggggaggggagagcaagacagaagcagagttaagaaaacacgac

SEQ ID NO: 8859 - DNA, 84 bp, Homo sapiens
tgcagttagatttcatttgttacagtctgtagtctatcctgggttcccagatattctggttattttaaaaaatttgcatacagt

SEQ ID NO: 8860 - DNA, 323 bp, Homo sapiens
gcccgctccagctgcagctgctcctcaatggcctgcttcatccaggccacatcggccatgacctgctcccgcctggccaggtggaggcgctggctctcgtcctccttctcgaggagggcctgcaggatccgcctgtctgcctccagctcctcttggatctgctgtgtgcgtctgctgagttgagcgttatactgatgtctcaagaaacgccccagctctgccttctgccggaaggcttccatctgctttcgctcttcctccagcctctctagctcccaccgctgcttcaacagattctcctgctccttctttagtttggtcgg

SEQ ID NO: 8861 - DNA, 197 bp, Homo sapiens
aaaaaaaatggacacacccaactttttggataatgcccctctctcatccttggcatgagattactgattacgaattactgatgggatttgttggagactgacactaggagaggaattgtgaactattacagtgaaagctggacctagtaaaacttaccccataagaatgcacccatttgagacaggcacaagacatt

SEQ ID NO: 8862 - DNA, 430 bp, Homo sapiens
ccgagctagcatgcttctcctatggggtgtgtggccttctctcctgtcttcttgaggcagagcttcaatctagaatctgttcacaaactgaacaaatgcaacaaacagtaaacagtcttttgctcatagttaaggtgccttgagttgggtgtgaggggctgagtgtgttctcaggggtgctctgcccacggctccggccaactgctgcaggtgcgcatcatatgggtggtctttgtggaatgccatcagcactagcttagtacctcctaaatgggagctggagggctacagtgctcaacactggattatacgaatgtggattgtccaggaaatgcttttaatccccctcatccactctctacccacgtgacctgcctctccctctttacttggtgtttactcaggaatgtgggtgagttgtcgtgttagc

SEQ ID NO: 8863 - DNA, 722 bp, Homo sapiens
  misc_feature (1)...(722): n = a,t,c or g
tttttttttttttaaatggtatttgctttatttttattgttattgataatacattagacattaccctcccatcaggtgcacagaagaaagtcaaggctggaatttcattctcttatctaaatctctctgttctctctcagggaatattttcagagaataggtggaatgaagtgaggctgtggagaatgttatctatgataggatagagggcatagaaggccaggagtcaggagacctgggttctgtcctggattatacaccagctcactgaggagctttgtcttctctggatcaagagtcccacctgaaaatgaaggaactggtccagataacactgggagccctttcccccaagatggcactggcattcagaggatgggtgcaggtccagtcctcttctgcctgtggggtggatgctgcctggagtgtgctgggtctatgagagaaatgagggtactcatgtgttccaatgtaaccatatttctgatacgtcctgggatcgtcggtctcatcgtctgtactgttgctttcagcctgaaagggtgagacacatgatcacatcaggggagtcttcctgcattgcagctggattcagtgagcatttacggtagacactgtgacatgccatctggatccccctttgaggaaggactaacaagccccagctgctgggacagtggtcagcagacagacttcanntcgtcaagcccttttaggggttg

SEQ ID NO: 8864 - DNA, 724 bp, Homo sapiens
tttttttttttttaagttggtgctaagtttcattctttatatttaattgatagaaactgcatgcatcaaagaaaatgcatactgagctttaatgtgcataaaatggatattagcattttaaagaggaagattaacacattaatccaagtaattttcatatattgcttctaataaaatcttcacagtataaaactcttaatgaagctaatcataggcattccatttagtgggacgattagggataacataaaagtatttctttttcataggttttctaagatttatgcttttgcttattaaaaataaaaatgggaattgcatttcggttcttcctaagaaaatgttgaaaatgcaaatagactttctcacgctatcacgtaggtataaattattgagaaggtactgcccattatggagaacttaagtcctgaggggtggcagttatgagaaggagggaatagagaaataaacaaatgaaaaagtatacaaaacttcaacacttcaaacccaggtctccccgctcccagcttcccatgaattatagattatatacaccagagtaattacaaaaatctcatgtaggaactttcatgtgagcatttactgaggagtaggagatgcctctggagcatttgctttcaagcctccaagtcatctctgtattgcttgtagacagactggagggcatggagagcttcgactgttaccctgagcttgccaatac

SEQ ID NO: 8865 - DNA, 652 bp, Homo sapiens
gcttcagctgccctcgcagatgccgctgaggagctgctggaccgccttgcgtcacacagcatgctgccctcagacgtgtccatcctgtaccacatgaaaacgctgctgctcctgcaagatactgagagattgaagcatgctctggaaatgttcccagaacattgcacgatgcctcctgaccatgccagagtaatctcagctttctttagttactggatcacacatatccttcctgagaagagcagtgactaaaatggaatatctctttaagaacagctcctctttaacaaaaaaacttaaaagacaaatgtgagatgggcttagagttagttctctgggaacttgaaagacatttatgccatattatttattcacgtgtttgttcctggtgggcaagatgccatctgaggcttcagatgagaaattggggtaaaatggaaatttttcacttatttgcaattatatatatcttgaattactacataaaacttgattctgtttctctacttattgtaaaaattgaaaatggacattctgttaagttaaatgtatagtttgaagctcatatatttttatgaagttttgaatcaccttgtatctgaaagtctctgctttaagaatgctttctgggtattaaaatgttctagtttaa

SEQ ID NO: 8866 - DNA, 602 bp, Homo sapiens
  misc_feature (1)...(602): n = a,t,c or g
cgggtttagcggcagctcttcgggattgtttccattgccaccctaaccgtgctggcctatgaacgttacattcgcgtggtccatgccagagtgatcaatttttcctgggcctggagggccattacctacatctggctctactcactggcgtgggcaggagcacctctcctgggatggaacaggtacatcctggacgtacacggactaggctgcactgtggactggaaatccaaggatgccaacgattcctcctttgtgcttttcttatttcttggctgcctggtggtgcccctgggtgtcatagcccattgctatggccatattctatatttccattcgaatgcttcgttggtgtggaagatcttcagacaattcaagtgatcaagattttaaaatatgaaaagaaactggccaaaatgtgctttttaatgatattcaccttcctggactgttggatgccttatatcgagatctgcttcttggtggttaatggncatggncacctggtcactccaacaatatctattgtttcgtacctctttgctaaatcgaacactgtatacaatccagtgatttatgtcttcatgatcagaaagtttcga

SEQ ID NO: 8867 - DNA, 672 bp, Homo sapiens
acaagataaccaatgcaaaggtatttattaacacattttatttggttaaaaggttattgtttggttaaaggctactaggtaaaaagaagcttaaataaacaggaaggtaagttatatgatgaccaaaatgactcaaaaagtttaatgttacaaaatagctattttatgcacatatacctattaataaacattaagaatggacaaatcaacactccatgaaaggccaaagaaacaaaaaaaaaaccttttcattaagcatttcatcttcttgatactatatttctgttttgattccttatgctttgaaaattcagaaaaaccagaatccataaattcacttcatcttctcatcttgtctctgaggcttggctctttaaaatagaaaggagtacaccttcttcttctgcttgtccgttctgaagatagatcttctgacttattttcagattcagcagtgttatttgaaacaaaactggtattttgacaagtcctggaatggtctatcacctattcctgatttttgggttctccggttgactttaaatttcatcttgttcatcttctcatgctcatcatcacttacttgaaaggctggggagcactccaaggcaaaattttcttttattatcacatttttaccagaagaaacgctcaaaggtactaaaccttcac

SEQ ID NO: 8868 - DNA, 382 bp, Homo sapiens
ccttgtgcctataatcagggcctagtcatttccctcagtcttccatgaacacagacactgttgatcttgtgactctgtgctgtgaaaataggaaaatatagcaagtagggtgttactctcatattcatggtccaagactggtttgcttccacatcatcaggcccggcaaccttatggagtgaagtgaggaaaggggcaagcctctttaaggaccaacccagaagttctacacctgtttcccacacattccagtggctagaacttagtcacaggaccacagctagatgcaagggcgtcttaggagatcttcacccagccatatgctggattaaaaagggaagagcagacagcttagccagtcttgttatttgggggtgggagt

SEQ ID NO: 8869 - DNA, 359 bp, Homo sapiens
cggggcttgtgaaggggtttgggggagtggagaggagcactgaattttctaggtgttctcataatccgggagcaaaactttaaaagcctggccctgcatttccagcgtggggacagcttttgcggccccctttcagagactcgagggaaacaaggtattctatggcagataacttgggaagctcttggggcagtctgttggtgaagggagggacaaatgtcactccaattcacagtccatgacatgcctgtccttagttccttgtcacgggggcagctgcttccaggggtgaatttgagggtctcaagcacatcgtgagtccggctccctgaaaccaggctgctccctgaaaccagccc

SEQ ID NO: 8870 - DNA, 1184 bp, Homo sapiens
gatttcaaatattacagttggcatggtatggctttggttcagaaccttggatgatgtgggctgctggggcagtagcagccatgtctagcatcacctttcctgctgtcagtgcacttgtttcacgaactgctgatgctgatcaacagggtgtcgttcaaggaatgataacaggaattcgaggattatgcaatggtctgggaccggccctctatggattcattttctacatattccatgtggaacttaaagaactgccaataacaggaacagacttgggaacaaacacaagccctcagcaccactttgaacagaattccatcatccctggccctcccttcctatttggagcctgttcagtactgctgggctctgcttgttgccttgtttattccggaacataccaatttaagcttaaggtccagcagttggagaaagcactgtggcagtcacagccatcctcataatacacaagcgccaggagaggccaaagaacctttactccaggacacaaatgtgtgacgactgaaatcaggaagatttttctatcagcacccaggtcttagttttcacctctagttctggatgtacattccatttccatccacagtgtactttaagattgtcttaagaaatgtatctgcatgaactccgtgggaactaaaggaagtgggaacttagaaccagacagttttccaaagatgttacaatttcttttgaaaaaccttttgtttattagcaccaatttcttgccactaagctatttgttttattatacatcctttaattaaaaactatatatgtaacttcttagatattagcaaatgtctctgctaccatttccttaaggtgttgagctttaactctatgctgactcagtgagacacagtaggtagtatggttgtggacctatttgttttaacattgtaaaattttgagtcagattttaatattgtaaaatcttgggtcaaataattcaaagccttaatgcagatgcactaaaacaaagaaatggtaaatgaattgtttgcatttaaaaaaaaaaactcttaagaaaactgtactaaatctgaatcatgttttgagcttgtttgcagtacttttaaacattattcactactgggttttgaagtgagaaagtatccgccatttagcatttaagttgggggatttagagcccggaaacc

SEQ ID NO: 8871 - DNA, 242 bp, Homo sapiens
ttatgataaatatagtatattcaacaaactactccaagcattcaagaattttaatctcataaagaaaatactgtatttctaaaaataaagataggcatgatttattactattcagataagatggctgcataagtcctgattttaattctgaaatctttctattaagaaagatcagaagacaggtagacagagagaaggggctgctacacaaatataatgggaagactccttaagtttctata

SEQ ID NO: 8872 - DNA, 379 bp, Homo sapiens
gggaggctggaggggtgaggagagtcagaatggtggttatcgcgggcaccacagaatgggaggagatggtggcaaaactccagggaggctcttgtgctcagaaatgcctccccggacacacccacctccctcttgctcccaagcaagccttcctgagcccgtggcacccagatttttacccccaggtgtccgccaagattgagggcacatcttcctcactcatccacagactgacacaccagtctcctttggaaacacactcgcagacactttcagaaattatgccttgccagctatgtaggtagcccttcgtttagttagttgacacctaaaattagccaacacagtgagtaatcacattagaattctatttgcatgt

SEQ ID NO: 8873 - DNA, 602 bp, Homo sapiens
ttttttttttttttttagagttgaaatatattctttattttcaggatggaaataggatagggaaggaggaaagatacctttgttagttgccactgcagtaccatcgaaagaacatccacgccaacactgtcgcactcgctgatgcgagggccccgaggactgcaagcaggaacagattgctgggcgtcagagcctcgggcctggccagcagctcgcccaggctgggcctccagggctcgatcagctcggcatcccgcgggcgcccagcgcagcacttcccggaacgaggcctgcaactctgtctccgcccgcggggcgggcccgtcacgttaagaaagaagtagagccgggccagggggcgctggtcttgcttgatcacgcaggagaacgtcccgcggtgcgtgagctgagccggccggatccgcgccaggtatccttcggcccgcggcatatctcggaaataggacaagtcctgagtccggagacctcctcctgcgaacttccaggaataggtgatctcctcctttggcagctggaagtttacgatgcaagaaaacatagcctggtcgccccgagtcactgtcacatcctgaactgggcag

SEQ ID NO: 8874 - DNA, 74 bp, Homo sapiens
attatattaactctaataatcactatgccactttctgttgtaattctttaggcacttcttctttgtatgttttt

SEQ ID NO: 8875 - DNA, 372 bp, Homo sapiens
ggcctcaggtataaaaattgagctgccccaaggtagaaatggaaaatgtctcgcccggctgaattattccaggcaaggtgaagatgaccggttctccccactaagaaatgtctcttatatgttgggttcgcccttatatgttgggttcagagtaagtactttcttcccctgcgcgggagttagggatagcagaactgtatttaataaacgaagactgaaatggggccaggatgcagtgaagtagatccagtaggttacatggtcctgagagataagagactcagagagccacccagcagtgaaagacacaaacttaccaccccctcccaccaccaccacttgggcttcccgtggagtctggggtacagatca

SEQ ID NO: 8876 - DNA, 1709 bp, Homo sapiens
attgtttgttgctgttttacttagtaggtaaaagcaaaacaacccaatcataaaatgcacacagctgtatctaaaagaaaaatgcaaacacaacttaaccatactttatttgactgcatcttatttagacagcttgcacatttcaaatcccattaaatctctctccaaaaggatatgggacaatagaagaaaattatgcagcaatatccagtcaaacagcagtccaatattttgagatacacgtgatattttatagatactcaactcatatctgacgtcaatataatttatggttatgtttttacaaacctgaaagccctgtaacattacagcactcattttagtgatgtcatggtgcactgaaaagtaactctgatgtactaccaatttgattttatctatactcctgaaaagtgatgaacttcatgatttttagacaccataataaatatacacatccagtcttagacatgtcagccagtaccataacacagggcaaggtaaagttaaaacatgaaaaaacaaactgctttacatagatttgtcgagcaagtgggaagggtaatttgggaaagaggcagaaaatattaaaatcgattttttattttttcttattttgctggtttcaacttcaaaaactaccgtctggtttctgatctgtggactttgctaaagtagtttcatcccaatgtacaggaaatacaggaaattataatcagcccacacatcaaaaatgatagtatacccgttagcttcttcaatactaacatatatagcttcatggtagcatgtataaaaatgttcagcagtaccaactgccaaaccagtgtcagtggatagtacagtcagtcctaaagaggcagcaccccattaaaagaaagttgcatctattttgctcagttgtagccaagtgaacccatgctaccaatttcagatagaattgttttaaggcttatttaagaaaaacaacagcctattatcaaaaagtaaattactgtttgaggctacttcaacctgaatggagtctttcagtgttggtgctgggttttcatgctagaggttaaaattttaatctacttaagtaaaaatttttttgcatacccaattaaagacataaggcatacactgacattcaacatattccaaacaatatggcaaccatctgactttttagtcacacagttaacgtcatctttacaaacacccaaccagttcagtcaatttggcaattttggaggaaaaggtcagtatgatggtttcattgacaatctggcaaaaacactaaaatggttgaaccaatgatctatctactttacaaccatccctattagtgatttaagcaaatatatgttcatcaaccattatgtatcaaccagcaagtcaaatataaagaagtgaaataaaatttgatgacataaatgttttagttccatttccttcatattaaataacaaaagcatcactgtgattggtattcttctaaatgctagtgcctaaatgaagtttgaccaaaaacatattgaaaggctgagtactgtgtggttaccatatttttattataaccagtattgtattctgctcattaaactttcaagagcaatataaaaaggaaaacattttctttaaaaataaagaactataaataatcccaccagcagaaagtttttattttcaaatataaattgtgtatctttatttttaaagtattt

SEQ ID NO: 8877 - DNA, 262 bp, Homo sapiens
  misc_feature (1)...(262): n = a,t,c or g
tgacctcacgccggagaccagtgggccccggaaaggcacccagacatcgccagtgccccggaaaaagacataccagtgcatcaagtgccagatgaccttcgagaacgagagagagatccaaatccacgttgccaaccacatgattgaggaaggcatcaaccacgagtgtaagctgtgcaaccagatgtttcgattccccggccaagctcctctgttcacctcatttgaggcacagttttcgaggggcttngggcgggcactt

SEQ ID NO: 8878 - DNA, 366 bp, Homo sapiens
tgccactcctctctactgaagtccacagtcacatcctcaaatgacactgatacctcacaggcactgccatgttcccctggctggggagcgtcctcgttagctggcatgttcccgacggacttggacttcagccctggggctttcttgctgacaactttataattccagtgggatcggtggactcaacggggactgctggggtcagaaggaagatcctgcagctttcactgtgagatctggcccagggactccgcagagactccaagaactctggaaagacagtgtccatatgatcagaggcagatagcacttactacacagacatctcctgggggaaccaaagtacagttcactgcactggatact

SEQ ID NO: 8879 - DNA, 699 bp, Homo sapiens
tcagtccccagtcatctatcgacagtgagctgagtacttcagaattggaggatgattctatctccatgggatataaattacaggacctcactgatgttcagatcatggctcgtctgcaagaagaaagtctcaggcaagattatgcttctacttcagcatctgtatcaagacatagttccagtgtgtcattgagttcaggaaaaaaagggacatgtagtgatcaagaatatgaccaatacagtctggaggatgaagaggaatttgatcatttgccaccacctcagcctcgtcttccaagatgttcccctttccaaagaggaattccccattcacagactttctccagcattcgggagtgtaggaggagccccagttcccagtattttccttcaaataattaccagcagcaacagtattattcacctcaagcccaaactccagatcagcaaccaaataggaccaatggagataagctccgaagaagtatgcctaacctagcccggatgccaagtacaactgccattagtagcaacattagttctccggtcaccgtgcgaaatagtcagagttttgactcaagcttgcatggagctggaaatggaatttcaagaatacaatcttgtattccatcaccgggacagcttcaacacagggtccacagcgtggggcatttcccagtgtctatccgacaggctctta

SEQ ID NO: 8880 - DNA, 1512 bp, Homo sapiens
tttttttttttttttttttagtaaaacaaaatttatttgtaaaacaggacctgttatataaaatggcacacaatcaagttatacaaaaatacaaaatttctttctgattacagttctagttgcaaatgataattagaaagcattcctggtagcttccaaatagctgagattgcgagcatatggaacagggagcagcaacagtccatgatgcagggatgtccaagtgagtagaacctaatttccaagttcaggacttccatcaggtcactttggagggacacctcttaaaattgctagctcctggaatgtcttctgttttgatacccatcttctagacttttgccaattctaaatttagttcccaatggtttgtgaaagtccaaaatctgtgcggctatgaaacagatggtattctgaattttctcacatgatttgctctctcatctatttggacaattgttagttatataattatattcatttcaaatgaataaaagagaacagcgatactgtttggtgatactagatattagatgttaacttctggagaattattctttcaaaatagctactctcgcaatgttggtttcccagatcttgctaagacatgagctcttaattgtgtgtatgcatgtgttttttaaaatccagactcttattgcaaatattctgaaaaatcagaaatattacatgaacttttaaaagaaaccaaggcatttagcaaattttagcctagctagagtaaagaacaccaatacttaaaaaaaaatacaatttaccttttgcagcaatttaaaggtccaaccctttgaaaggaagcacattagcaaacggctgcttattaagccctagtgacattacttgtatgcatttccataataccgatctaattcactgtctagttctggtaggaggcaatgctttctttcaaaagattctccttccatggaatgataaaatgctgaggcttttttttttttttttttttttgtacagagcctgtatttagtgcaataagtttaaaaaatttgctctgaaatatttactttacattaacaaaaatagctttttttaaaaaaattgtaacaaaaaggagttatcgcataaacagatcatgaattattcttagcaaattacacttttttttcttaaagcattcaccattacaacaagcagaacaatggagtattagccattcatatctggtaagcttcaggaataaaaaagcaaaaaaccccaaacccacccccaaacaaaaacaacagtcacactggaggatcaaaacattagccaattcttcagttaaacatcgtagaactctggatactcaatgaattgccaaggagaggagcacctgccagtgtgttttcagattgtatagcaagcatttgaataaaatggccgtttaaccctaagccactgacgttactctgaagccgaagcccaagcaccggaattttcaatgctttatgttccatgtttctgtcccttctttattcctctcagcattac

SEQ ID NO: 8881 - DNA, 384 bp, Homo sapiens
tataatagcaatattccaaacaatatgtccttcactgtctattgttggaaaactcatgcatcccagcatgaagtaactcctagttttaattttagttattttgagatatatttgagaattgcatctcttctcttgaatttcatttagaagagattaaccagccaaatatccaggaaagtttcaaaacattctagtgtttttcatcctttgctaggatgcactctgtacaaaacattcctctgaaaatctaatatttgcagtatctaagaattgatcatttctattttcattaaattctgtggaaaaaattaaatgaatgaaattcaacttcataattcagttcatcagcttttggatcttgagaatctaaacacgtctttaaat

SEQ ID NO: 8882 - DNA, 482 bp, Homo sapiens
ccctgtatttcatccatgcctgtaagaagttctcacgtctctccacatgccacgtcatctgaaccgccaggcgataggttattcgtattttattccaaagtccataggacacgatgtggacttgtttttccacgtgcccttgtagatggtgccatccagtgtctgtgatgttccacctcctctgttgggttgtcacctcccccagagaccttctggtctcactgcttttctgtttgtatccagcaaaacactcaacaattctgtataagaacacctatctcattattcaaaaaaaatgcatgtataaacaaaaagaaatatttcaaatatttactttacaattgttttattcaaaggaaattaaatacaaatgtatatttttcattaaaaatggggatttaaaaatagttttataattagtgttatgttgctttatcttatctttgcataaattatgtattattaaaggtttctgatatcca

SEQ ID NO: 8883 - DNA, 482 bp, Homo sapiens
gaaattcaggaatctagaaagaaaagaggttgtagctcctccaaatatgccccgtcttactaccatgtgatgccaaagcaaaattccactcttgttggtgataaaagatcagacccagagcagaatgaaaagctaaagacaccgagtactcctgtggcttgcagcactcctgctcagttgaagaggaaaattcgcaaaaagtcaaactggtacttaggcaccataaaaaagcgaaggaagatttcacaggcaaaggatgatagccagaatgccatagatcacaaaattgagagtgatacagaggaaactcaagacacaagtgtagatcataatgagaccggaaacacaggagagtcttcggtggaagaaaatgaaaaacagcaaaatgcctctgaaagcaaactggaattgagaaataattcaaatacttgtaatatagagaatgagcttgaagactctaggaagactacagcatgtacaga

SEQ ID NO: 8884 - DNA, 393 bp, Homo sapiens
gtccaattgacggtggtttccaagcgcctcatgtaactgattaggttagggtacgttccacgtcaggtgaccagaggcagtataaaaggcagcctggaaagcagaggtccttctccgccccttcctccgtcttcctggatgctgcatcacttccaggggggctgctccagcacctgcccatctcagcgccagccggtgaaagaaagtagacgtgtaatttcaggttagtttcactgtacagttgtttttttcacgcaattccctgaggggtgggtgggaagagacaaaggacgccgagagaaaccgatcacactgggccttgctgatggggtaggatgtgttctcgttactagtaattcttggaacagaaaacgagaaagcatttccgtctcc

SEQ ID NO: 8885 - DNA, 466 bp, Homo sapiens
gtcttattttaactagcaaggtttttgggaataaaaaccttcacaatccctgatttctcactttttatattgtatctgcaagtcctttcatacattacttctgaacgagcatttttcaatgaaatccaagatgctaagaaatctagtaattactgaaaaatgctgtgatgccagtaaagcctaatcctaaggtaaacaaacgcacaagttccacatttaacttgctttgtaaaatgcaagttacaaatcatagcatataggttattattagtaaagaaaatcattaaatcttaaaatgaaaaactgggaaatttgaattcagtagttcaatgcatatagtaagtaacctgctgtaatcttaagttttttacatgcttagagcttagataatccaactcacttgcatttgatttttgataatgatcttgaatttatatacattaatttttttctttttttttttttt

SEQ ID NO: 8886 - DNA, 416 bp, Homo sapiens
tgaatggtcttaatgaacctggatgagtgggcaagtaaagggaggaagccagggtcttgaagactgggaagaagtagcccgaggcaaggaaaccaaactttgcacagggaacacttagtgtgtgaaagctcttctcagtcatccttgctgactcattgagcaggtagtaacttatctagtgactaaatcagcaccagcttagagacacagggaaatgagggttgagaccttaaaggaactgtaaaagagactacaaattaaggagttgccctggagaggaaatatcatgagaaatgttaggaagaaagagccatcattcttcaaaatggagggcctcatgcaggatttcctaggtcctgttatggcagatgagtgtactcagatggggaatatgggacaggaagctgatacaataa

SEQ ID NO: 8887 - DNA, 474 bp, Homo sapiens
caggaggagaaaagcaactggagaaatgtagagaaaagctagatgtacagagagatgaagaacagcaaggcaggaagaggggcagcaaaaagggaggctcatcagagtgagggagaggaggagggatttgcagccaggacagacagagcagagtggtgctggtggcaaggagaacagaggaagaacaacagcagggaacacagctgggaatctagggtgccagagagtgggtacagaggggtataacagggaagagataatttaacagggagagcagaggaggcgcagaggtgggagaagaggtggtaatatatggagattgaggacgatcgaaagactgggaagaagaagcaacaagaggttaagtaagttgtgaggatggagcagaagaggtggaagagaaggaatagaggtaagaagggaataaacagcagcagaagagaggggtacagaatgaggtgcagaatcccaggg

SEQ ID NO: 8888 - DNA, 2333 bp, Homo sapiens
gcggcagcggctcttatagtgcaaccatggcagactattcaacagtgcctcccccctcttctggctcagctggtggcggtggtggcggcggtggtggtggaggagttaacgacgctttcaaagatgcactgcagagagcccggcagattgcagcaaaaattggaggtgatgcagggacatcactgaattcaaatgactatggttatgggggacaaaaaagacctttagaagatggagatcaaccagatgctaagaaagttgctcctcaaaatgactcttttggaacacagttaccaccgatgcatcagcagcaaagcagatctgtaatgacagaagaatacaaagttccagatggaatggttggattcataattggcagaggaggtgaacagatctcacgcatacaacaggaatctggatgcaaaatacagatagctcctgacagtggtggccttccagaaaggtcctgtatgttaactggaacacctgaatctgtccagtcagcaaaacggttactggaccagattgttgaaaaaggaagaccagctcctggcttccatcatggcgatggaccgggaaatgcagttcaagaaatcatgattccagctagcaaggcaggattagtcattggaaaagggggagaaactattaaacagcttcaggaacgggctggagttaaaatggttatgattcaagacgggccgcagaacactggtgctgacaaacctcttaggattacaggagacccatataaagttcaacaagccaaggaaatggtgttagagttaattcgtgatcaaggcggtttcagagaagttcggaatgagtatgggtcaagaataggaggaaatgaagggatagatgtccccattccaagatttgctgttggcattgtaataggaagaaatggagagatgatcaaaaaaatacaaaatgatgctggtgttcgcattcagtttaagccagatgatgggacaacacccgaaaggatagcacaaataacaggacctccagaccgatgtcaacatgctgcagaaattattacagaccttcttcgaagtgttcaggctggtaatcctggtggacctggacctggtggtcgaggaagaggtagaggtcaaggcaactggaacatgggaccacctggtggattacaggaatttaattttattgtgccaactgggaaaactggattaataataggaaaaggaggtgaaaccataaaaagcataagccagcagtctggtgcaagaatagaacttcagagaaatcctccaccaaatgcagatcctaatatgaagttatttacaattcgtggcactccacaacagatagactatgctcggcaactcatagaagaaaagattggtggcccagtaaatcctttagggccacctgtaccccatgggccccatggtgtcccaggcccccatggacctcctgggcctccagggcctggaactccaatgggaccatacaaccctgcaccttataatcctggaccaccaggcccggctcctcatggtcctccagccccatatgctccccagggatggggaaatgcatatccacactggcagcagcaggctcctcctgatccagctaaggcaggaacggatccaaattcagcagcttgggctgcttattacgctcactattatcaacagcaagcacagccaccaccagcagcccctgcaggtgcaccaactacaactcaaactaatggacaaggagatcagcagaatccagccccagctggacaggttgattataccaaggcttgggaagagtactacaagaaaatgggtcaggcagttcctgctccgacttgggctcctccaggtggtcagccagattatagtgcagcctgggctgagtattatagacaacaagcagcctattatgcccagacaagtccccagggaatgccacagcatcctccagcacctcagggccaataataagaagtggacaatacagtatttgcttcattgtgtgggggaaaaaaacctttgttaaatatatggatgcagacgacttgatgaagatcttaattttgtttttggtttaaaatagtgtttcctttttttttttttttttttgaaaatgtacaaaatatctatcactactgataggaggttaatatttctgtgtagaaatgaaaattggtttgtttttagtatttagtgtagatgtacacattccagcaaatgtatttgcaattatgtggttgatgctttgtgatataaatgtactttttcaatgtatactttcacttttaaaatgcctgttttgtgctttacaataaatgatatgaaacctcaaaaaaaaaa

SEQ ID NO: 8889 - DNA, 2279 bp, Homo sapiens
gcacgaggccagaacatttgttgaacacaagtgataatgttacagtgcagtgtcacacaccaagagtcatcattcagactgttgccacagaggacatcacttcttccatatcccaagcagaactgacagtcgatagtgatattcagtcatctgattttcctgagcctccagacgccctagaagcagacactttcccagatgaaattcatcaccctaagatgactgtggagccatcatttaatgatgctcatgtatccaaattcagtgagcaaaatagcacagaactgatgaatagtgttttggtcagaacagaagaagaaatctctgacaccgaccttaaacaagaggaatcaccctctgatttagccagtgcttatgttactgagggtttagagtctcccactatagaagaacaagttgatcaaacaattgatgatgaaacaatacttatcgttccttcaccacatggctttatccaggcatctgatgttatagatactgaatctgtcttgcctttgacaacactaacagatcccatactccaacatcatcaggaagaatcaaatatcattggatcatccttgggcagtcctgtttcagaagattcaaaggatgtcgaagatttggtaaactgtcattagaataattcttagaaataggcagttcaagcaaagaaggcacactgttaattacaacctcttcaaagaaataggagcaacccccaagaggcttaatttaccaatttaaatagccacagtccttaagccacacacattgttgctgctatgactttttacctcctttaaacacatcatctgaggttgagttttatgacagtatgtagttgagtggaggctgggagttttaagcataaatccctgtttagtgttacatgggaataaggaatttcattcacttcagccactaagaaaagtttagaatcacgaaagcttaactgctgtggtttaaagtacagtttctctaaagatcagacatggcactgtctcctctcaagcctggttgtagttcagatgagtcttttcaacatggtcttcaacatggtctagagcttaccagtgatcttctgatcttcaagaagactaagtttgagacttgaccagcatacaagtatagagacctaggaggtggtcttgtggtggtacatttggttaacccattgcctggcagtgggagctgatttaggcagggtaaacaggaaagcattaaaagttaaaattcactacaggttttttgttacttttaaagggaatatggataagcatagtaacaaaacccaccagaatctaagcagttttcaccccctcagaaaccactgtcattagtttacaaagttagcactttgaagtaaaactaaatgaggaaggaagtaatgttacctatccttgataccatgaccatttattagatgttttgctatataaattaccgagagaatagtttgtcatccacttagtgtgttagctggtggggtacaatataacctctcatctcaggctattttaaaaaaccaatatttgcttcctataacaaaaggaaacaaatctaagaatcattcctgtactacagaagggttaaggcaaaggtagccttttgggctttttaatgaatatgacccctatagaaaagtcaagaaaaaaaaacccttgtataaattattttatttattattgtaattagatcttcacaaagttgtcttttcactgtgttttgtcaacgtgaaattaaattgtagttataagcaaaagttggttgcctagggaacaattgtatattcagtttaacagaaataaaagaatatttgtcttaagatgcaagatttgtttttacatagccttttgccatacaattataaaaatttcatttcaaaagtgaaatttttttgtgctgttttagctttaagggttggaatgtttaggtgcaacatcagctccttaaagaaaaagcaaagtgatctaggatatgtctcccttgcaagagggaattaacatttacaattaacatgaaaatcatgtatcagacttctgcaggagattcttcagcataccttatccaaaaattactcactgtcctaatgtatcattttgaagagtcctggtaagtacttctccttggcagcctcaccttcccacatcatggaagtacaggtttgcacatatacacaacatgatgatagaaaatatgatatagtaaattagctttctaaatttcggttctaagtctccttgtcgataccagtagataagtatgcaggcagtaat

SEQ ID NO: 8890 - DNA, 476 bp, Homo sapiens
cttccatccaaagtcaagactgagacaggcagtgttccttctttagacagggcatttcctagtttatccattgatggtattatcctgaagagtcccaactctgcatttgagtctctaattcagtcttccaggctgctgtagccccatgcattatccctgtgtcccacagccttgtggtcattgaaacccagctatagtcattaggaattatcagatgacctgagagcaaacactatttcaagctttcatcattgtagaatcttcctttcttatttcttgtctcttatattttccctatcactttactttcatttcagccatgacttattaggatattttattcatcactcttaaggtgttctctactgggagaaattttctgtacatctactatgctaggtagaatagaagtccctattattgttttctataaaaattgtgtaatataaaaagcaaatgaaatgtagaacacaaag

SEQ ID NO: 8891 - DNA, 231 bp, Homo sapiens
cctcttctctgagccccagactgggtaatagtcaactgcctacttgacatttctacatatccaaaatcaaactcttggttgatttaccccaaccatacttacctcttcaatgagatcaccatctgcccagttactttccacagaaaataaggtgtcagaactattcctccctcaaaagtggagcccactgggaccctgtctataaacgtgtaagataccatcacctttcac

SEQ ID NO: 8892 - DNA, 218 bp, Homo sapiens
gttctgctggcatttcgtcgggatgaagacaacacagccaggaaatccagaggttggccttgataacttagagttctaacaagggcagcactgatagtcctggccttgaaccggggcattgctgctgtcaaggaggatgcagtcgagatgctggccagctacgggctggcgtactccctcatgaagttcttcacgggtcccatgagtgacttcaaaaa

SEQ ID NO: 8893 - DNA, 443 bp, Homo sapiens
agggaatgttatgttagcgctcccttctgtttccataatattagtgtgtcagtttttccattgttcactgcttcacatctcgaaatatacaatctctgtgtgccatcaaaatttgaggtaacttgtaagaacgtatataatacaataaaaaataaacatcaaaatcacagaaaatacatactagaataataggtaaagggtgatgaaagtgagaagcatgtataatcataattcttcatgagcgaaaatgctatacagaatctttttctttaaatcctttgaatgtacctctttttaaagaaaaacaccaactcaataataaaaatagctacacacagtcttgactgcctttttaccaactgcagtgctatagcttcctgattgccactataaaagctcttcttaacttactgttttaagatgaaaataagatatgcttcttt

SEQ ID NO: 8894 - DNA, 2792 bp, Homo sapiens
ctactactactaaattcgcggccgcgtcgacgaagaagcaggtatttattttaataaaggaatggttggtattctagttaatcaagtaattcttttattagcaaggcagaaactagtgtttttctataaacttgaatgttaattgtacaggtgtattttacaatttttgtttaattaaaaaaatgttactatattaataatcaacctggtcaaaacctttcaggtttcttcgtttgagtcagtcgccttgattcagaatgtcacgagccttatgatatcatgctgaggcgcccttgcaaatccgacaattaagatcctcctagaccttgaggtgatcagcataagaggccagatcccctcgagtcatctacacctagcttcaccttattctttaaagggcagaaaatttgagacggtgatcgccgtaacagtaaatttggcttacaattggggcccccctccggtttagaaagaggaacaccagattgaccacattcccaactagaaaaatcttcttgcgtcaatcaagcctcacctggctcatttggctgtcagtttgatcgtcgttagattgaagaaaacatctagatgcagcgatcggctatagatacttctagatcgtctagatctactagaccatgggccaaagagggtcgacctgcaaacttgcaaggtttattttaaatacacattacagtgttttatattatgtaatgctaagttgtaattcagcttttaacaaatctttttttaggtagtaaaaaaaaaaatactcaacaactaataggcccagagtttatttccaaatgagacactaaatttaaatagttttgagatttgatttcagcagaggcacacaaactcttaaaaacgagttattgtctgacattttgttttttcccctaacttgaaaaataggtcacggtctagatcacattctcgatccagaggaaggcgatactctcgggtcacgcagcaggagccaggggacgaaggtcaaggtcagcatctcctcgacgatcaagatctatctctcttcggggatcaagatcagcttcactcagaagatctaggtctggttctataaaaggatcgaggtatttccaatcccccgtcgaggtcaaggatcaagatccaggtctttttcaacgaccaagaagcagccgatcaaagtccagatcttccatctccaaaaagaagtcgttccccatcaggaagtcctcgcagaagtgcaagtcctgaaagggatggactgaagctctcaagttcaccctttaggaaaagttattttgtttacattattataagggatttgtgatgtctgtaaagtgtaaccctaggaaagataattcaaccatctaatcaaaatggatctggattactatgtaaattcacagcagtaagataatataaattttgttgaatgtattaacatcatatggtctgaaaatgtgggtttttatttggcacatttaaataaaatgtttctaactagatttttgatttgtgttcaatattaacacttcttaatttgatatatttgagagtcagacattataattgttaaccttattcatacatacctacattcagaattgaaaggtgttggttaagtcttgaacatcactattctatgcataaaacttggccaggatcttaagggactttgaaaattccatcttacccttgtagctctgggtaagatgacctgagtcccttatgatacagcctgaatgcatcatgacagatccttaagttagctaatccgtttgaagttggtgttagtaggtattgtatgatcagtggtgaagcaagtaggaccactgatgtgtctaaatgagcatgacaggaactaaacgaaactgattaaatgtatgagaaatagaaactgatttctggatgatctttatactaattgcagctttcaggctactaggtggcatagtgttaattaggactccccaagatatggggagttctactctcaatggtcttgtttctttgctttctacattagttaaccagttttataccaaaaaatgcatgtttgaggaattgtctgaaattgggacaaaacaccttcatgtaaaccagctttgcaaaattttccagcccagatactcttcatctattcaaatggattgtcttattctgagcaaagacctgttgttaatcttcaagctaggttttgcagttcccaaccacaacattcttctattttgccaggctggtgcaaagtaattaaagatgtcaatcagaaatgtcaatgagactaaagtggttttgtaaatctcagctatatttagcaacactccatgtagctaatattttttggtagcatctggtagaccttagaatgttacatagccagtaggttctttattcaaattttaagtatcttaagaatagtagggcagtaacagttacttttgagagttttctggtcaagcttttaccaggcattctctagccttggtacaaaaaaaaaaaaacctgctggttgcgcagatacctaggcttgtccattttatgcatttcagcaaagtcattggatactattgcaacttgggaatactggtctgcatcaagtttaattcggtagtttgaccgctagtatgttggaagttatttggattgtttttggaattttgactggctgaattatggttggtataaagttatgtgtataactggcaggcttatttatctgttgcacttggttatttttaattgttctgtattatttaaagataagtttactcaacaataaatctgcagagattgaacaaata

SEQ ID NO: 8895 - DNA, 990 bp, Homo sapiens
  misc_feature (1)...(990): n = a,t,c or g
tgcggccgctccaacatgtggtaccagcggccatgtgccctcaaggggagggaggaagagcacaggagggtgggaggaggacaaacagccccttttatagggtcatgggggggctccactcagagtctggcaggaatctgccaggaaaacctcgttctagatagggagaagcagaactgtgtgtggggcaggccgccgtggtcctgagagacagggcccgggccttccactgctcgtttgcacacctcttcggcctatcccaaggaccttcctagcatataaaaacaggggctctcctgatttgtaaacagaacaacaaataaaaataaaaacaaaaccaaaaattcctccatggcagcccacccaatgaataccccagatttttagggccattgcgggtctgtagctgggtgtagagagagttaagctttcatctcccatgtttacaacactttgtgataaaatagttgagtggagcaatcacatcccccactgcgtgcgctcccccgggatgcctcacagctgctctgtgatcacacgtgcaaatgttattattattattttttgcctttggcatcaaagggcaagcctgttcattaaaaaatcttctatattcaacactccatagtgaaaagaatggatacttcaaaattcctaaagcaatcatgtgaaaattatttttatttttaaaatttttgaaagtgttttgatttttatgggtccttgataattggccagccctgttttgcaaagagatggactatttctgagactagaatgttttctttgaaaatattgaagagtataagagatttaagacaataaaggctgtaatcttaccataaaggaagaaaaacatctatgtgtgtcaatattgttttgagataaagtcacaatgattgatatcaatgctttcaccattttatttcaacttaaaccagtgtcactcacatgaagcttattttancatacatattatccagtgatttc

SEQ ID NO: 8896 - DNA, 188 bp, Homo sapiens
ttggtggggaactctcagtagaagaattttgtaactgatatatatgaataattacttttgaaagcaaatatctttagaaaataacaaactaaaattaagcttttaataaattaagataatagaaaggtttttaatgagaaggattattactgaatttcttgggttgacaaaacaaattctttgatagg

SEQ ID NO: 8897 - DNA, 537 bp, Homo sapiens
cctattctgagtggttactggggtgggggagttggatggggacagctaaggagtgtagggtgtcttcttgggctgatgaaaatgtcgtaaagttgatggtggtaatggctgcagaagtctgtattagaaaccactgaatcatacacttcccgtgggtgaattacatggtatgtgaattgtacctcagtaaagctatgtttaagaaacagaagtgactgcctgggggctcccaccaagtcaggtagccacgatgtgctcagtggggaaggggcagtgggggtccccacccaccacaggcaccttgcagcagggggtgcccagcaggttctcccagtctcataaggacacaaagcctcatctgtcctgggaggttctggtcacctgggctggctatgtgtatgaaggaagggtggctgacagcaagaaggtctgcatccactcgggtgagggaactcttacgttactttgcaacaggcaggaaggggacttatttgtcgacgcggccgcgaattccagatctatgaatcgtagatactg

SEQ ID NO: 8898 - DNA, 418 bp, Homo sapiens
ctttcaattgacaaatgatgccctctgactagtagatttctatgatccttttttgtcattttatgaatatcattgattttataattggtgctatttgaagaaaaaaatgtacatttattcatagatagataagtatcaggtctgaccccagtggaaaacaaagccaaacaaaactgaaccacaaaaaaaaaggctggtgttcaccaaaaccaaacttgttcatttagataatttgaaaaagttccatagaaaaggcgtgcagtactaagggaacaatccatgtgattaatgttttcattatgttcatgtaagaagccccttatttttagccataattttgcatactgaaaatccaataatcagaaaagtaattttgtcacattatttattaaaaatgttctcaaatacagaaaaaaaa

SEQ ID NO: 8899 - DNA, 385 bp, Homo sapiens
gaaactgcgcgcggacctcagtgtggcaggcactcccggggtgcagacggggtgaaggcagccttctctgtggtcacgtgcatgtaacggcaccttctctctcagggcctcctccctccctgcgtggtttgggggctgttcctgatagcacagatgccctgatcacaaacacctgcctgcattgctgaccacaggcctggcctggagaaacccacagcctcttcagggaagcgagcaaggggcttggaagtgcctgaagccagtgggctggggactcacggccgggacactcagggcaggccatgcgccgtttctcctggaataactggaggtgatttcatgggaacctgggaggctgggctttcaggcttggggggagaggctc

SEQ ID NO: 8900 - DNA, 521 bp, Homo sapiens
gtcaaagacaatacctagagctggaatgccgtcgcttcaagagaagaatgttacttgggcgtcataacttagagcaggaccttgtcagggaggagttaaacaaaagacagactcagaaggacttagagcatgccatgctactccgacagcatgaatctatgcaagaactggagttccgccacctcaacacaattcagaagatgcgctgtgagttgatcagattacagcatcaaactgagctcactaaccagctggaatataataagcgaagagaacgagaactaagacgaaagcatgtcatggaagttcgacaacagcctaagagtttgaagtctaaagaactccaaataaaaaagcagtttcaggatacctgcaaaatccaaaccagacagtacaaagcattaagaaatcacctgctggagactacaccaaagagtgagcacaaagctgttctgaaacggctcaaggaggaacagacccggaaattagctatcttggctgagcagtatgatcacagcatt

SEQ ID NO: 8901 - DNA, 813 bp, Homo sapiens
catcatcttagcatctgcctcaaatgcggggctggtgagatggaaagtcctttcactgacaatccggggtacctttctcaagtgccacataaaatcccattccatttcagatccatcaatgagggtccacccaggggtgaaaaatatcaaccaaagcagcagtattatccattttgatcttctaattttgtcctgccaggcttgtttggtccccgagggcactgtcagctgagatcagagctcccgaggaggcgggcggggacgctaccttggactatgactatgctcttctggagctgaagcgtgctcacaaaaagaaatacatggaacttggaatcagcccaacgatcaagaaaatgcctggtggaatgatccacttctcaggatttgataacgatagggctgatcagttggtctatcggttttgcagtgtgtctgacgaatccaatgatctcctttaccaatattgcgatgctgagtcgggctccaccggttcgggggtctatctgcgtctgaaagatccagacaaaaagaattggaagcgcaaaatcattgcggtctactcagggcaccagtgggtggatgtccacggggttcagaaggactacaacgttgctgttcgcatcactcccctaaaatacgcccagatttgcctctggattcacgggaacgatgccaattgtgcttacggctaacagagacctgaaacagggcggtgtatcatctaaatcacagagaaaaccagctctgcttaccgtagtgagatcacttcataggttatgcctggacttgaactctgtcaatagcatttct

SEQ ID NO: 8902 - DNA, 460 bp, Homo sapiens
ggacaaccggccgtcggggcttatccgcacttacctggggagaagccctctggtctccggggacgagagcagcttgttgctgaacgcggccagcacggtcgcgcgtccggtgttcaccgagtatcaggccagtgcgtttgggaatgtcaagctggtggtccacgactgtcccgtctgggacatatttgacagtgattggtacacttctcgaaatctaattgggggcgctgacatcattgtgatcaaatacaacgttaatgacaagttttcattccatgaagtaaaggataattatattccagtgataaaaagagcattaaattcagttccagtaattattgctgctgttggtaccagacaaaatgaagagttaccttgtacatgcccactatgtacctcagacagagggagctgtgttagtacaactgaagggatccaacttgcaaaagaactaggagca

SEQ ID NO: 8903 - DNA, 278 bp, Homo sapiens
tgccttggctcccaaagtgttaaaattataggcatgaaccactgcactgactggacacacccgttactccacccctactagctgtggaaccctgaacccagtcactcacatagtcctagcatgtttctcacctgcaaaataaggtagttagatgatctttaagatctcttttagttctgagttttagggcaacaagtaatacagatgagtcagtgggcatcaagggctcccacatccccttccagagggaagggccagatctttcatcagggccttgg

SEQ ID NO: 8904 - DNA, 518 bp, Homo sapiens
ttttttcaggccggaataaaggtttattgtgctggtgcattatatctcagcacctggagagctgtgcagaggttgggggagccccagatggagggatgggggagaggacctcctgccagagcctccctaaagcaggacggagcccaggctccctgtcgaggactgacgaatattgtggacacaggctgccagacaatgtgtgagcaacagggggtggccagggcccccctgctccaggctgggcgtcagaaacccttccccagcccctcggacttccccagggtggaggtcccctcaaacacagcccctcagcttctaggctgctttggaggccagacaggaagagttccattcattcaacctgatcccagcagcagtagcgggatgagaaactcacccccaggcaggggtgcattggagagcgcttgagaggatttaaatgccctataccccacatcactaatcctggaccaacttagaacagggggccaccttcaggaaaattaagagcagtattt

SEQ ID NO: 8905 - DNA, 642 bp, Homo sapiens
aaagaatgtcactttctgacaggcccagaagccccaagttattctgagacctcaggaggcgaggaagttacccaactcatagatatttgatggtataaagccgtggctgggctcagctttaaaaaagtcttatctgagattccttctatggaacaaagttccatcaaagctgattttaaaagcctgtgtgaaaaataatcattcttgctgcactgttttataatcaggccaagaatagtcaagcaaatgggtcctaccatgatttgtcttctaataaaaataggaaactagagagagaaaaattttgtttcaaaaactatagtatacctgttgttagattctaatcttgcctaatgtttttccgtttttattattttccacagtttggattaaattctattttttcccggccacaggtcttcaaaataatgttttcaatttttccttttccttttcctttttccccatttttcctatttggaaatcactgaaacctaagctgtgctttcttaaagccctgtgaactgaagactagacaacttaaacttcagaagaaaacagcagtaacctatttatatgtgttgctgttacatactattatgtttcagcaggtgctgcctctaagcctctgaaacagagagt

SEQ ID NO: 8906 - DNA, 394 bp, Homo sapiens
  misc_feature (1)...(394): n = a,t,c or g
agttgtggaggctggaaagtcccaacatccaaggtgccagctgttncagttcctggtgagggctcttttcctagtttgcagacaggcaccntcttgctgtgtgcccacatggcctttcttggtgtgtgcgcctctgtctctgtttggtcttcctgattataggaaaaaacaaggcagacattgcagctgtatgccatgggactcaggccccatcgccacattcttcgcaaggctcagaataatttaaagttccaacagctttaagtttgaattatntantttcacagttgattcacttgttcttttcctgtctcccacaatagaaaataagctcccagggatgcaaccttggcaggctcctaaactgccacggctccagtttcttgtagattag

SEQ ID NO: 8907 - DNA, 1249 bp, Homo sapiens
ttttaatttaaaacaattactttattaaaaaatagcaaatctcacaaatacttatttaatttcttatcactggccattggaaaacacaccagcatgtgtactgattgtctaacataaactgaagctgggcttgccacaagacgcctgtgcatcaacagcttgcgatcaacactggaataagtttggtgagctcaggaaagagaaatccctccgccctgtcaaggaacatcagcacaatgcatttcaagtataatcccataaggcaacaatatgaagcacagcagcacaatctctgcgtcacatttcctgatgaagccttcaacaagggcctaggccctcccagttatgggcgaattacagcgagtcacatttactaaaagcagtaagtgaaaacgatcattgaacttgcactttaattactttaattccttgttgtggaagatgattctgctactggatttggctggaaaagtaaagactgctgcttctcttcaaatcacaagaaagcaaactacatttcattttagctagcagaagtatttggaacatcttgtgcatctgccaaatggagtttttgtatggaagaattcaattcttctaaatctgacagaagcctatccagattgggagtcactggctgttttctctttatcctcaggaagttcctctaactccccatagagctccaaattcaagcgagctaatttctcctgcattccccgaacatgttccatctgttcaatggaacattcatttccaaatgcttgaagttttccagagtggaaatcattcaaaagactgagcagccctctctccatctcctgaacatctgagacatcagtgaggaaggagtgctggatcggagttgactgagcgcctttgccctctccaccctgaggtttggtcttttctttcatcactctttttaactttggtcgctgtgaagttgactgtgatgcaggatttgaaaaccctgtgcttttactcactggaatggcattttttttggcattgacaacctgagtacagtgggcactaaaagacttaggactcctcctcttcactttccgctcttccattgttttaagttccttattgcaccacggccagcttcttaagacctgaagaagaagggtattggggcccccttccgcaacccgcaaagacccgacagcctcagaagccaccgccgcagccacaagcagagccccggtcacatcccgggacccgctcctccgcagctccgttt

SEQ ID NO: 8908 - DNA, 292 bp, Homo sapiens
  misc_feature (1)...(292): n = a,t,c or g
ggcatgcaccactcttttagcaattttatttatttattttgttattttgaaaaagtatttttaacttttactttagattaatggggtatatgtgcaggcttgcctatatgggtatattgtgtgatgctgaggtttggggtatgaatgatcctgtcagccagatcgtgagcatcgtacacaagcaattttaaaatatacaaatggtgtggtatggtgagtnnnnnnnnnnnnnnnnnnnnnnnnnnnnnnnnnnnnnnnnnnnnnnnnnnnnnnnnnnnnnnntggacaacag

SEQ ID NO: 8909 - DNA, 453 bp, Homo sapiens
gtcgccaagatggcgtcctccgcctccgcccggactccggcagggaagcgagtgataaatcaggaagaattgcggcggttaatgaaggagaagcagcgtctgagcaccagtcggaaacggatagaatctccattcgcgaagtacaaccgtttggggcagctgagttgtgccctgtgtaacactccggttaagagcgagctcctgtggcagactcacgtcctgggaaagcagcaccgagagaaagtggccgagctgaaaggcgcgaaggaagccagccagggttcgtccgccagttcagcgcctcagtccgtcaagaggaaagcgccggacgcagacgaccaagatgtcaagagagcgaaggccaccttggtgcctcaggtacagccctccacatctgcgtggaccaccaactttgacaaaataggaaaggagttcattagagcgactcccagt

SEQ ID NO: 8910 - DNA, 3395 bp, Homo sapiens
tttttttttgaagtaattatttaatgacacaggaaaataacatgttatgaaacaagctggttacaagtagtaggtagatgacttaatttttgataaaaaaattaaaaagcataaacatgcatataaaaattaggtttatgtacaaaataccaacagtatttacttctgctcagtaattaaatattcttccctttgtttttgtcttttaaaaaacattatttctgaaaaaaaaaatcagaaaaacatgatcgtggagagaattattaaacaccaggaattagggaacccaagaaggctaagcccaggagctcaggcagtcaaggttggaagtccaggacaggtccgaccagggtgatggtgggccaagcccagaaatgggaagattgttcttttcttttcctactggaatgttctttaccagttttctctatattcgatgttagcacacttatttaatgggatcctatgattaactggcacaacagcaaaatgatgctagcaactttggctttgaactgctacaaaatgtactatcttgtagttatatactgtacaaaacacactagaaatcaagtgctcctacaacgaaaaactcatctgactaaatcactgattttgctgtttttttttctaactttgttcattttcaatcttcacagcaaatgtattttttgtttcagggcctggaagaggtatttttttctcagaaagaagctaacattaatgtgtgctgggcaccgtctgacagcttggctctaactccaagtaagttgcccttgtcttctaagtactctacagagtgcaaaggcttaccaaatccaaaccaccttgaattaaacaaatctaaaataacctgagactcttttctgcaccgccaccagctgcccagtacactaggtcaccttttacagcagtgagcacagcaatccatgccacaaaaatcttcacaaaacaagaaggaaaggtacaaaaagaattatattaaaatggtaacatacacttgtatgagggagggatatttaaaattaaaatattatcatcacaagaaacaccagatattccttggctctgcccttggggcaacccaagaaacttaaagcctgttttatatcccagaaataaaagagagacgtgatagaagtaacagtgctcagtgcttgcaacccaagtcaatttatactcttgttaggtaagtccaaattctaaagtctacaaaaatcctgttaaatcaaggggaaaaaaaattcattttaggacaaagttattcaagatgaaaggaaggcatgtgttcagtgagagaactgccctgctgtcagatgatttcttgctaatgtgtttaaagattttggatttctcaactttcttggttttctggtagccaaatccaccaccacctcctcgctttttctgcttgccttcattactgttgacgttcagatcaacgaagggaggcaccttgaaaccaaatgacagagcaacctgaggcaaatttaggttattaacattaaagatctgtttcagagaatgggaatcataggctcgtatgtatgacttatatgcttcctgggctgacttatgaagaaagtaattcttttcaatcaatttctcaagctgagactgaatgtcagaaattttagaccaggaaaagtcaaattcacttaatggaaccttggattgttttaagtaacgaagaaaacccaattcttctgggcgcaaaatgagcaaggcatgcccctctcccatttaggcctctggctgttctacccacacgatgaatatattccttagggtcatccggagggtcatactgaacaatccagtcgacttcaggaatgtctagtcctctcgctgccacatccgtacacaatagtgttcccgaatctgcattgcagaactggaagaatgtggttgtacgcttattttgcttttgctttccatgaatggccaagacgggcaaatcaatgtagttcagcaactcatagtggtatttcacagacatacaagatgaaaagaagaccataagcttcttctttcggttcttcttaaggaatgtaaagagcagaaggaatctcttttcagaaggacaaacaacatatccctgttcaagaccatccactgttgcattcgctttatcatcatcaacgccaacatacaatggctcctttttcagagaaatccttgccaggtcttcaacttttcgagtttgggtggcagaaaagagcatagtctgtctacgtgttggcaaaagtttaataatttgctttaattcctcttcaaaccccacatccaagatacgatcagcttcatcaataaccagacactgcaggtttttatacataaatcctggggtattctgcatatggtccagcagacggcctggtgtggccacaatgatgttgatcccattaccaagtttctgtgcttcagcagatctgttactgccacccattatcaagccataggtatgcacgtggtgagtcatcagctccttaagaacaccaaaggtttgcatggctagttctctagtaggtgagagaataaggactcctgttccattcctgggcatgaaccttaacttaacaatgagttcaactgcagggatgagaaaagccagggttttaccactgcctgtttttgcagctgctagaagatccctgccttccagaagtggtctgatacttttatgctgaatttcagtcatgtttgtaaaacccatttcttttattgccttcagagtgttttcattgacaagattacatagagaagcaaacgaagtatcctcaaaagctcctgtcagtcccaggggcagactgggcacctcactctcatcttcatcattatctggcttctccacattattttctgtttctttagtagtctcggcactttcttcttcagatttccctttgttttcagtttttgcttttttcgtatcaggctcagcatcattcaccatttttctctttttcttctttttcttttttgattctgaattggaagactgcattgctgcttctccattggttaatacagtggatttctggggagactttgtaacttttatatttcccactgcttcttgagacatgcctccattttgagtttctgataagcccacattcatgggcttttgttttgattttttaacctttctacttcccattgtttcttcagatacatctccattttgagtttccgatagggtcagatttgaggccccctgaaactttaggttccgctgccgcaatttgaggttccgcttctcgatcttcttacgcaggagtttcatcggcaggtgtgacattctgcccaacaagtgcctagaataaggcgccacacagtacagctactcagttctcaggctgacagttacttcccttccgccgcacgtggtc

SEQ ID NO: 8911 - DNA, 731 bp, Homo sapiens
tcatttttttttttttttttttagcaaaaggcattttaatcaggtttttagagattgcaatttgggagacacaagtctagcaagcagctaaatcatgttgcattcaggcaaggttaggcagagcttttaagggctactgtaaatttacgtatctggaaggttttagcacagtccatgataaatgatggctggttgtcagctcaggatgtctctagtcaatgatcaatatagttgggtatggttatctctccaggcggttgatcaggcccagtatatacaactcaagtcaaatgcagctagttttacactttggcccagttcagcaggtgaaactccatctagatgtgtatgtgaccaggatccaactccttatgccctcctggctcctttttggatattctgacattaatcatctccattgtgaattttcttttcagatccatcagtttcattttggattttttttccccacaattcagattcatcagtttcatctttaagacttctagtcttctgatctgttctagtctggatcagctgtcctctacacctggtacacatctgtcaactctacactgccctttcacaagcatcctatagttccctgtgcctttatcccacagaggtcatgtgtcttgtctttttgttttcatcctccttaattcacttccttgttttcatgaagtaatcctcacatatcctgcagagatcgtccaggacgctgccgggaa

SEQ ID NO: 8912 - DNA, 394 bp, Homo sapiens
atgggctccatcttctctccatccttctctcctaagaaattccctttcaagggccacttggtccccagccacctcaatcaactctaatttatgtttttcaaaatctccatgcccaaccttattctacctccatatattttcccttatttgattcattctctctttctggaaggcataatccatcattcatgtctaaattttatccattccccagaattcttcccaaatggcctcagagccatcaagccttccttctctcatctctacgtgagtaagtactttacctgtgtagggcactgacctttttccaccttgtttgatcattattggctctcttggatggtaagcaacttaaggactgaaattactggcctgactgaaaccttgcatctaa

SEQ ID NO: 8913 - DNA, 220 bp, Homo sapiens
ctgatgtactgtgtgggaagcacatggttaagttagttgccaaagggcaattaacaagggtattgcctaattaaacaagggaaaagaaaaatcactgtggatgctctcagctggctggcgggaagattttactcccgagtagcggaaagatctgctcgaggcctgggtgctttggtgtcggagatccgagagtcggagatcggagagtcggacacaggac

SEQ ID NO: 8914 - DNA, 329 bp, Homo sapiens
atttcttactgtcaaagcaaaaatataaatgagttctcttataaaacaaagtcattatgacaataattgcatgctcaaaaaaacaaacaaaactaaacaaactaaacataaaacaaaatcaaaagctggttgccagttcagtttcttaattagagggctgggtgaaaaaaatactgtttcaggtaatagcaggaaatgccctcttaacttgcaggatttttatttgtatgcacaaatgaaactgctggttataatgaggctgtggggtaagaggaaggacttttcgtcttatgatggtaggaaaattacctgaggtggcaacattctgg

SEQ ID NO: 8915 - DNA, 346 bp, Homo sapiens
tttttttttccaagatcatcaaagcattcatatttgttttctactaatacttttatatttttacatatgaaagattatgtttagatctttgatccatctgggatttactctggggcataaagaataatgaagggatctagtttaaaaaataaatttagctttaaaatacgatgagtatacatttctggatacaattatacaatttgctattgttttaactttctcttagaatgttcatactctgaaaaataaaatcaaatgaagctcacctgcttttacaatatacatttttctaagcacacttgatatatatgtaaatatgtgtcagagtctatacatatatatg

SEQ ID NO: 8916 - DNA, 1919 bp, Homo sapiens
aattaaaaaatatttttccccagaaaagtttcctatttccattttcctcaatgtcgtcctcactttccttggatcttgatttctttcctttttacactgtattttttctcaaaaagtttcttctcaactaagctcacttcttcatggagaagggaagtctttattctgagcaggaaggagaagagatttagtataaactgataactcagagaataatttgattcttcataggttgtcacatgtgtacaatagcatctgcagaatttctgtgtactaagccaatataatgaattcttagtcagcagtgattggcctttctctttcaggactccctgaaggctgtgtccatggaaacacgttctatcagtgtcctcttcagtccagttgaactgaaaacttgaagggcttttttttccagcagttgctgttgactcgaccagtgtgctaaattgtttctgtagattcaccaccatttctctttttttatatgctactggtttgtcgacaaatgagtagtagagtggcttttcacttttccacaggtacttggcccttgcttcttcccatttttgttttttctcatcaaaaagcttcttcataatttggtaccactttctgaaatcaaaccatggcttatcttttttgttcttttcattatgcttttcagcaagattagacaaagaccactcgaaactgtcatccattagaaagagcagtttcaataccaccacaatgatagctacagcttgtacatcgtacttaacagcttttgccattttggctataggatcaaatgtcagaaaatccacttctcccattccagtcatttttaccacgtggcaagttaagctatgcatttcatcagggaggttgacttccatcaagtatttcatacacagtatgttgggatgaagatagcagtcttcagttatgtctggaaaacgaggcaaatctaaaaatgttccaacttctattgtttttttatagatgtcctcgtagtcaggccaagactctataccaaagattcctctgtcacgtccatataatttcatctgttctggaaaatgctgaaaagcatttatgtaaggaatatggtcctcttcaacaaacctcaaaagatctgaaagtgttattgcttctctctgccaaagtaaggacagataacagaaggcaagtgtctgtggcatggtcatcttcacgattcccttctcctttcgttgtgagtattcaactccatccagagatccagagcagacagacgtttctgattgtgatgctttgctgacggggaaaggttttcgagtgtggatgtcagactgagactccgctccactttcaagaaaaggaggacagctgacatcacttagcagctcaggctcactagcccagtctgaatgacttagattatcttctaataccgtaggtttccttccagtggtataaactgggttcttacaatatgcctgcttgctcttctgaaggtagcgcttccaaaaattatgtaaaacatcgttctttaactctgggcctactccaaggttctttaaggcttctgcttgttgataaagaatatactggaaaccttcacacacataccaatcccagcctttttcagtattgtttttttttttaagcccccggttgagggcttttatttgggtattaggaataagatcagtgtttgtaacttcctgatatctctctgtaacattgtggcaagaagtgcaataatatttgccttcatcagtaagaccccatgagacagcagcacactgagtacagcgttctttaaactcttccgactcctcgaggtccaatcgcggcgccgcgggagcttccacagccgggaccgttacccgggtagcgagcgcagcttccgggaaaggctggagaaccgttccggccggaaacgcgggaat

SEQ ID NO: 8917 - DNA, 312 bp, Homo sapiens
gagccctgggaatggtgagcgaaggatagtcgttcagatattatcagggggtcagcgaggcctccaaatgggagtcccaactaggacacctccacctgcccagtgactagacaccgggggcattgccaagcctcaggcaacgggaagaagacaatttggtcgaaacaacaagagggttagaaatgaatgttcctgggatgttctaaatcttgaagtaggtgcttagacacacaggtgtatctgtgtgtaaaaacttcatggcatggtacagtggaagattttatgcttaacacttattatataaataatttt

SEQ ID NO: 8918 - DNA, 575 bp, Homo sapiens
gtaattcttctgtttttgttttgttctgtcttttcttcattttggctttgggtggagggaggggcaggtgacacaaaggattttttttttttttttttaatttttggaatcttttccaataaccagctaaagatttgcactgaaatacaacttgtatgccttttgcatttttaaagcctgcttcctggatttaagcagagtgatagtgttcaaagagccagttcagcctgtaacatatttgaaaaagatatgtctgcactttgaggtcccttttgaatgccattcactagacctctcaagcattttgtttcattgctacatccaagcgcctcacaagtccacaatgcgggacagcatcaaaagctcaagactttggaaaaagcttgtgggcttgcactgggggagggaagggaacaaaatttgtgtacttctttgtttaatttagaaataaggcatccaagagatgccattattttctgtgtttcaattgttgtgcctttgagttaaactgcatttttgtcttttggttgaaatctgaaatgtactgtcccaatataaaacagtaattatttgac

SEQ ID NO: 8919 - DNA, 322 bp, Homo sapiens
cttaggtacaattctgaccttataactatcataaacactttgatttaacttagaagctgtgtgagactgactgtgaaatatgacctgaggctgggctttctgtcccattcagagtcctatatagtttggccttgatcacattcactagtgcccttttatggggcactgcagactctgtgtgttttcatcataatcctactcatattgcatacaaagaaactgtcttcaaaatgtatagtattttacattttgagagtcttagaatgctctctcttgtaaataaggaatggaatcattttagatagttcaacagacacaatat

SEQ ID NO: 8920 - DNA, 199 bp, Homo sapiens
gtgctagacacagagatgcgtgattgacctaccagattatgagcatgtagaagatgaaacttttcctcctttcccacctccagcctctccagagagacaagatggtgaaggaactgagcctgatgaagagtcaagaaatggagcacctgtttcctgtacctccaaagaggacagttaaaaggatataccaagctggatg

SEQ ID NO: 8921 - DNA, 221 bp, Homo sapiens
attgctggatcttttcaggagacttgaatgtaagctccacagttgggctctgtagctaggtccagatatatccttagaaagtcattaaaaccacccaggctgtatgtaaaaatgttgctctcttgatgatactctgagaaaaactgtaaaagatgtaaagctttgagcttcttgtgaaatattctccttaatgattggagatgatgtatttccttgatttg

SEQ ID NO: 8922 - DNA, 602 bp, Homo sapiens
ccaaccacagcctccagcacccgagagaacggccgcccacagcacacgttctccggacaggagggcgaaggcccaagacctggagaggtgggctcgagggaaagatctgggtcccaccactacttcctggagacgccggggaaagcaggccatccttcgagccacccatctcttctccgattggttaactgccttcttattgcgctccgctggctggtgattggttgggatgcaccgtctatcacctgcttccttatgggcagctctcaaaaaaggcacaaacaattgaaggatggataccatggcatatgttaaaagcgtgttgaaaggaaaataagaaagccaggaatctcaggatgaatcagtctagatcgagatcagatggtggcagtgaagaaaccttacctcaagaccataatcatcatgaaaatgagagaagatggcagcaagagcgtctccacagagaagaggcctattatcagtttattaatgaactcaatgatgaagattatcggcttatgagagaccataatcttttaggcacccctggagaaataacatcagaagaactgcaacagcggttagatggcgtcaaggaacaa

SEQ ID NO: 8923 - DNA, 246 bp, Homo sapiens
  misc_feature (1)...(246): n = a,t,c or g
tgggcttgcagtttaattagaacgccttagttcctggaagaaggcgcgagtaacctcttgaaacatgtttgaggaggacaaatatatcaggcagtgattagtatcatctgagtaataatgaatttatcagattctttttttttntcctgnnatggantntcactctgtttcccngnnngnngtgcggggnagnantnnntgctnactgcaccctttacctccnggtttcaaacgnttntcctgctt

SEQ ID NO: 8924 - DNA, 631 bp, Homo sapiens
gaaagaaagttatgtttttattctgtaactgcttctaaatattcttcagtaccccattcaacccgagaaactactgtcacagctgacaggagttattaacctctctaaatttcagggggaaaatgtataaatatgtcatgtatttgataaatagttttcccttttttttaatgaaaagattatctgattggattgacctgcctactaatttttgctattaactttttcattcttaggcaataagcaacaaagaccagcatagcatatcatatactttatctcgggcccagactgtggtggttgaatatactcatgacagcaacaccgatatgtttcagattggccggtcgactgaaagccccattgattttgtagtaactgacacggttcctggaagtcaaagtaattctgatacacagtcagtacaaagcactatatcaagatttgcctgcagaatcatatgtgaacggaatcctccctttacagcacggatttatgctgcaggatttgactcatcaaaaaacatctttcttggggagaaggctgccaaatggaagacatcagatggacagatggatggcttgaccactaatggtgttcttgtgatgcatccacgcaatgggttcacaga

SEQ ID NO: 8925 - DNA, 347 bp, Homo sapiens
tatcaatgtgctctttccaattttctggaaatccaaacataaatttccttatgagataatttggatatcctgcttctttcatggaaatttggtctatcatgccttttaatatataaacgttgcctgatatagtcctaagtttgttgtgctcaatccgctctataattacattactgtgccaatatatgttagtgacgtctatcaattttccttctacacatatagcagtattattattgatgcttttaatcatccattcctgtagctgaactacctgattttttttaagtccatttgtaacagtttgaaatattcttggaggagaaagctttgaaatatttcttttt

SEQ ID NO: 8926 - DNA, 218 bp, Homo sapiens
gcctttctataaagctacagtaattaaaacagtgtggtattggtgaaagaattgacaaatagatcaatggaacagaaaagagagcccagaaatagacctacacaaataaagtttgctgatctttgccaaaggagcgaaagcaattcaatcgagaaaggatagtcttttcaacaaatggtgctagaaccgctggatatccacatgcaaaaatgaatcca

SEQ ID NO: 8927 - DNA, 816 bp, Homo sapiens
  misc_feature (1)...(816): n = a,t,c or g
aatgaattttctagacgaaaacgttctaaatcagaagacatggacaatgtacagtctaaacgtcgtcgatatatggaagaagaatatgaggcagaatttcaagtaaagattacagccaaaggagacattaaccagaaacttcaaaaggttatacagtggttgctggaagaaaaattgtgtgcgctgcagtgtgctgtatttgataagactttggcagaattgaaaacacgagtggaaaagattgaatgtaacaagaggcataaaacagttctcactgaactacaggccaagatagccaggttaaccaaacgctttgaagcagccaaagaagatcttaagaaaagacatgaacatccacccaacccaaccagtatcaccangaaaaactgtaattgatgtcaacagcaataattaacatgtcttacagaaatgcagggcacagtgagacagatgctggagtccaaaagaaatgtaagcgagagtgcaccaccatcctttcaaactcctgtgaatacagtatcttcaaccaatcttgtcactcctccagcagttgtcagtagtcaacctaaattgcagactccagtgacttcgggttccctcacagcaacgtcagttcttcctgcacccaatacagctactgtagttgctactactcaggtgcctagtggaaatccccagcctacaatctctttacagcctttgccagtgattttgcatgtacctgttgcagtatcctcccagcctcagcttctacagagccatccagggactttggtgactaatcaaccatctggcaatgttgaattcatttctgtg

SEQ ID NO: 8928 - DNA, 341 bp, Homo sapiens
  misc_feature (1)...(341): n = a,t,c or g
cttcatttatgttttagtatcttctctgatgccctccnaaccctagctatcaagctattcagtaagaaattctcccacacaatttttagtatttttcaaaagnaaggatacttcccactgctcaaaaaatcttaattatacagatcagtaaaagattaagtgctctccaaatgtgcatgtggactgatgggaagatgattnnnnnnnnnnnnnnnnnnnnnnnnnnnnnnnnnnnnnnnnnnnnnnnnnnnnnnnnnnnnnnnnnnnnnnnnnnnnnnnnnnnnnnnnnnnnnnnnnnnnnnnnnnnnnnnnnnnnntctctactaaaagtacaaaatccc

SEQ ID NO: 8929 - DNA, 561 bp, Homo sapiens
ttcaaggaaccagcagcacaaacactgttggggcaacagtgaacagccaagccgcccaagctcagcctcctgccatgacgtccagcaggaagggcacattcacagatgacttgcacaagttggtagacaattgggcccgagatgccatgaatctctcaggcaggagaggaagcaaagggcacatgaattatgagggccctggaatggcaaggaagttctctgcacctgggcaactgtgcatctccatgacctcgaacctgggtggctctgcccccatctctgcagcatcagctacctctctaggtcacttcaccaagtctatgtgccccccacagcagtatggctttccagctaccccatttggcgctcaatggagtgggacgggtggcccagcaccacagccacttggccagttccaacctgtgggaactgcctccttgcagaatttcaacatcagcaatttgcagaaatccatcagcaaccccccaggctccaacctgcggaccacttagacctagagacattaactgaatagatctgggggcaggagatggaatgctg

SEQ ID NO: 8930 - DNA, 1628 bp, Homo sapiens
gagtgacacaaccagctgactcccgtagaggaagacactgtggaggccagttctggagctattgcagcctcggttgcccggccggggacccgagccgaaaagttatcgtcagaatgtcgggcaaagaccgaattgaaatctttccctcgcgaatggcacagaccatcatgaaggctcgtttaaagggagcacagacaggtcgaaacctcctgaagaaaaaatctgatgccttaactcttcgatttcgacagatcctaaagaagataatagagactaaaatgttgatgggcgaagtgatgagagaagctgccttttcactagctgaagccaagtttcacagcaggtgactttcaggcactacagttatccaaaatgtccaataaagcgcaagtgaagattcgagcgaagaaagataatgtagcaggtgttactttgccagtatttgaacattaccatgaaggaactgacagttatgaactgactggtttagccagaggtgggggaaccagttggctaaattaaagaggaattatgccaaagcagtggaactactggtggaactagcttctctgcagacttcttttgttactttggatgaagctattaagataaccaacaggcgtgtaaatgccattgaacatgtcatcattccccggattgaacgtactcttgcttatatcatcacagagctggatgagagagagcgagaagagttctataggttaaagaaaatacaagagaagaaaaagattctaaaggaaaaatctgagaaggacttggagcaaaggagagcagctggagaggtgttggagcctgctaatcttctggctgaagagaaggacgaggatcttctatttgaataatctttcctgttctggttctttgagaaaccctaacactggcttcattttaattcacagtgtgtaggtttgatttgtgtggctatttattttttggcctaagaatttcactggttgtaaaatttacctagatgtctatttatgggattacttttgcagaatcataatttagcaaccatttatcatggatgaaagagatctgtaaaacctgcccaggaacttacagaatttactttgcagaagcgttatcatactccatttacatctgtgttacacgtgatctgcttaccaagcatattaggaaatacctcttaggaagcattagcggtctcaggccaattactgtggagcagctttcattcctacccacttgcaaaccttggcgctgttgtctgagattgctgcagccattcttgttaccatggtacttctcaaactttgtgaaaacctgcacttttccttgcatgacaggttcctgtcttgtctgtcatgggagccattctgccaatttaaatgcgactgtggtataaacagtaaaatgatttaaaagtaagtcattccgtttttattaatttactgttaagtcatgttctcatgctcagatcagtagtgtcagccagagctttctctgcagacatgtaggaagtgggtagctatttttcccactccatgtattagagttttacaaaaaggcttacttttgagacaactgttgcattttggggtactaataaatgattgccgatgcagttaaaaaaaaaaaaaaaa

SEQ ID NO: 8931 - DNA, 722 bp, Homo sapiens
tggccttgagcaatccttccacctcagcctcgggaagggctgagattacaggtgggagccactgcgcccagccagcagtttcagttacattatagagagagtttaatggcatttccacagttcaggaccagggaaagaaacacagaggctgcctggccctatgtgaaacttttgggggccgactccaggcctgagcctgctctgaggggatcagtcatgtccccgccttagtcccaggacctgagggagctctggattggtggcttggcccagagccaggtggatggcagtgttgaggggctggtgcttgagactggttggcagagtgggccctgtgctgaggatgggacatcttggtcacaggtcacatgaggttcctgctgagaagggctaggggatgatcatccatcttcatgggtgtgttccggttgaggaaactccagtcccagaagtgagcttggaaagggcggctcagcccaatgctccggagctgaagtggtgctgggacgtggctcaagacccgagcttgctgcaggagccccattccccttctgtcagagggggtggtccgccaggagacagtcttgcatctggtccaggaagcagacagttcagtctgctcgggtgtccagggccacacaagcctgggggtgtcagaggaactgggctccggtacttcaagtaggacaggtacgtgtcccagcccagcgtcaggccgttga

SEQ ID NO: 8932 - DNA, 212 bp, Homo sapiens
ctgattggagactgggatagtatcagttctcttccaagctgtttttgtggagtaatagaaggtttccattgtactgtgattatgattgagagggtgctgagtatgtggagattctgcatggtagattcttcttccaatgtatgtagatttatgtaaaggacagcagattaagcaattgaaaatgaagtcagtgtttaactaccccaaaaaaa

SEQ ID NO: 8933 - DNA, 350 bp, Homo sapiens
gagattagttggactcgaggtatgttaaaacccaattttatccaaaaaggctacagaataggactgagggagccagtcaatcagattactcatctagtcaaccgttcacaggggttcattcgcacgcaatgcgcattaacgctgcgcagcctttgcgctactgcagggtcacagcgcatcatcagaagagcagaatgctgcaatccaaacaaagaagaaaaaaggaaaaaaaatgaacaacaagaagagttagaagcttttactaagtaaattatctctaataatttttaatatcaattaacttttacttatctttgacagaattgtggctatagtataaaacattctct

SEQ ID NO: 8934 - DNA, 1056 bp, Homo sapiens
ggcacgagaggctgagttgccaataaaagttgcttttaaattaggtgtggctgggaatattataagatattggggaaaatatacaaatcaagaaaatttctgagcttagattgcttcatagatttatttaagtactcatcccacctttaaaacctctaaactgagaagaagggacccaaatcatgttattggtgtgatttatgtgagaagtagaactgtagtcattggacccttaggcaaaggaaaatccgtgtctttatatcagaagatcggcaaaccgaatgtatattacacagtttaggttatgattccctactttaacctacttactttattaaatgaccaactaccgatactgatcacaatagttattagagattctaatttagttgggaaggttctaatcactttccattaccaggcatttgaaaaataggggattcctttccgaatatattagccagggagcatagttaggatgttacccgggccatttattcatcctgttaaatggatgattttccccgacccttgtgagatcagcgtgacaggagtgtgtgtgtgtgtgtgtgtgttcctgtggggtgtgtggtttgggtggggtgcctgccaggtggcaaaggcatatgtaaatacatctgatctgcatctttatttcacagttaactaaaagtaaaaatgtctattctgattccatattgattttgtctaagatgtaaaaatttgagttcatctttggccaaaacctacctgaattaacatacaaaatatttgatttttaaaatttaattcaaatctcaaaatcaattaagtattctcagatcctatatcttggttaatatgctcccagatactttaaacatggcaaccttttggcctaagagaatgtttgttcatggaaaaaagcttttgagatgagagggtgtcttactttcttgtggcaattgattttctgttttaacacctttgggtaaaatcttgcaaagagcttttataatttgttttactgaattgtatggagattgtataccaagtaaagctcttttaaattacaat

SEQ ID NO: 8935 - DNA, 2278 bp, Homo sapiens
  misc_feature (1)...(2278): n = a,t,c or g
tcgcgcgcgcctccaggagcaaggatggagaggctggtgatcaggatgcccttctgtcatctgtctacctacagcctggtttgggtcatggcagcagtggtgctgtgcacagcacaagtgcaagtggtgacccaggatgaaagagagcagctgtacacacctgcttccttaaaatgctctctgcaaaatgcccaggaagccctcattgtgacatggcagaaaaagaaagctgtaagcccagaaaacatggtcaccttcagcgagaaccatggggtggtgatccagcctgcctataaggacaagataaacattacccagctgggactccaaaactcaaccatcaccttctggaatatcaccctggaggatgaagggtgttacatgtgtctcttcaatacctttggttttgggaagatctcaggaacggcctgcctcaccgtctatgcccatagtatcccttcactacaaattctctgaagaccacctaaatatcacttgctctgccactgcccgcccagcccccatggtcttctgggaaggtccctcggtcaggggattgaaaatagtacagtgactctgtcttcacccaaatggggaccacgtctgttaccagcatcctccatatcaaagaccctaagaatcaggtggggaaggaggtgatctgccaggtgctgcacctgggggactgtgaccgactttaagcaaaccgtcaacaaaggctattggttttcagttccgctattgctaagcattgtttccctggtaattcttctcgtcctaatctcaatcttactgtactggaaacgtcaccggaatcaggaccgagagccctaaataagttcacacagcaccctgaaagtgattccctggtctacttgaatttgacacaagagaaaagcaggaggaaaaggggccattctccaaaggacctgaaagagcaaaagaggtgggagcgaaagccttaaggatcccacgactttttactgccatctgagctactcagtgtttgaatcccaagaggaagtcagtttacctctcaggtctgttgtaggacttgattttgtaaagcaatgccatgttatgtggttgaaagggcactggacttagttagtatcaggagcactgagctcacagactgacttgggctcctactggtggggacctctgttagtcactttacctcatccaaagtataaaggaattggaccaaataatttaccacatagctctaaaacttaatttaaaatgtaattccagaaaaaaaaagggaataagcaaagggggaagaattcgaaagagagagagaagaaagaatacagagagcttaccttttgcctttctgttgatgttacatctcttcttcctatgttcttaggtctatgagtctgtttccccatcatttggtatctagtccagttcctgcttactgctttgctaatagctgggccttgctagaatccttggtttcactgctgttcttcatgtgcttctatgagatttactccaacacaaataggactgaatttattgtgaagtaacattggcaacttaacttattcatttaacttatttttatagctagataaatattgttagcttagacaatagctcacattttttgagaagcatgccctccctgtccatttgtcttataacatgacccagccctattttacgtcattctaaattcagcctcatataatgaaaatacattatgaaaacagatgtttaggagatttcctgtatagcagtcagccaattcatatgctttgtctctgctggcttctttttccatgcgttaacttttcccaatagcagaggaggcaaatatgagcatacaatccctttgttctaaagatattgttccagctagtggaatgatgttgaatctttaataaccataattagttgctttttcagtatcttctgctttgtctgtgtctatccagtggcctaggaattaaagtgtaagttgttttcgctgttaaattggatatttatatatatatatatagcaagattttcatgtgttatttaattctgtattgtttcttatatttgtagtaaaatattgaacaattaaaagtgttgactccaaatatttgggcttatgatattctcttggggaaatgtgggaaatgaatgataatccttgtcttttcccattcatatgtaaaaaccctcccctcctctctatgctttcccctcctaaaaaggatgagctggggctggggcgcggtgggntcaagnctgccaatcccagttactttgggggggt

SEQ ID NO: 8936 - DNA, 316 bp, Homo sapiens
caaacatttgcaagtgtaacgatttctgggttatagcaataatcatttgtgtgaactcataagttatataccaaaaatcacacatgggtatgcttcaaaaattatttttaatgatcaactgataagtcaatttggtccttctgcaattattttctaaagcaactgtaactcaccaattttgccaaagagttaactactcattcatcacagtcatttactttctaaacaccactatcaagatttaggtcagataaggtatccccatatttgtcagtgagagagggacaactgctaaagaggaaagcaaaaagatgtc

SEQ ID NO: 8937 - DNA, 370 bp, Homo sapiens
  misc_feature (1)...(370): n = a,t,c or g
atagggaaagcaaaaccacaaataaagggactactatatgttgacccacatgaaggaacttatttcataaaaataaaaggagcaaaatatttaaaaaatatgtataagggtgtttattacaatattatttgtcgtgacaaaaaactggaaacaaacttattatggactattctgcagttatttaaaatcactatcaaatgacaatatccatcagttactaagagaggggaaagcaagtattagagtaatatgtttgcatgattctgttttttaaaaaaagtacaccatcacaatcagtgtgaannnnnnnnnnnnnnnnnnnnnnnnnnnnnnnnnnnnnnnnnnnnnnnnnnnnnnnntatgttctagt

SEQ ID NO: 8938 - DNA, 365 bp, Homo sapiens
aaattttcaaaatcaagatgtgagaaatattttaaaggttttaaataaaagaaatagtcctaaaaatgatttggctctagaaaataccaaaagttaataaaaaataaaaattatctttaccactgtgatttagttaaaaagcctatgtcattcttaatgctgtaaagtctaattataaaagaaaaacatattgataaaaccatataaagcagttgtcttttatacttaaagaaggaaatgttgattagtaaatcagtcaaaccataatgaataaacttaaaaaaaacttttacacaaagatgttccgtgaatgtataaaatcagagccataagttgctcttattagaaacagtgtttattataaa

SEQ ID NO: 8939 - DNA, 414 bp, Homo sapiens
  misc_feature (1)...(414): n = a,t,c or g
ttcactgataggttttgtttatttccccatgaactcgctgtaaanagtaaaatgctgggattgttctgctaacttacggccaacaaaaaattcatcctcatngagagccctcgtcctttgggggtggtgctggctcctgcactgccctgcaagtgtctctaatgtgaggtcatcagggtttagggccaatcagtatgaattcctccgaagctattttgaaggcangatttgaagaccacaagagactttttgtccttccctcaagtaagcattcttgatacctggttttatagcatacaataataactaagggccattaccnnnnnnnnnnnnnnnnnnnnnnnnnnnnnnttttgccttttgttanccaggctggagtgcaatggcatgaatctcggctcaccctancctcca

SEQ ID NO: 8940 - DNA, 903 bp, Homo sapiens
ttttttctaatacaatttaaatcaaatgataatttattctaagggtttttacaaaatacgaaaattttacatacataagaagaacagtataactgagcaacttacattctaattaaaactttgttgcaaaacatgtttgtgactactcttatgctgctttcatatagtaaagttataagaaaaacaatcatatatatgcagggttttaaaaaaataaactcataaaaatacaggcttgagacctattttagaattaagtcaaaacaagccaacaactgaattgtacctatggccagtgggtggcactaaaatacatttgaggcttgttttaactgtttgttttctcaaggcagaaaaacaccagtagtttcagtctcattgccctaatatggaattccatattttattagagattacagagtaaatagtttcttaaggtccattttttttttatcatcactgatgtctgtctccattccctgctccactttgagtatctttctgcgactttttcccacaacctacaaaggtcctgcaagggtaccagaccctcttaactgtggcacagaattgtggtgtgaaacacatgatggcaaacaagaacattttgcttcttaacaataccccatgtttaatgctctggggcagctttttctttgaagcagcagcagaaattcaattttcctagcttgttcaaatatcttatttaatattagagtcacaaattacacattttgttatatttaaatcccttgggccttgtaatcaaagaagcacatgcagattgacttttacatgctgtgtagtattccttaggtgcaatagatagaaagtgaggatatttgtccacctactcagattttcaagatcagattccaccggtttagtagttttcagtggagg

SEQ ID NO: 8941 - DNA, 295 bp, Homo sapiens
ataacaaatcatctttataaccaaccagtatctcatcacttccttgcgtcagtctctccaatggcctcccaatgccactgggagctttcctcaggcgctggctgatggcagttctctcttgcactaacgatgagctgcgatggccttgtccactccttcagacactaggacctctctcctgacttgatctgatgctccccaatatttgcctacctgaccttgaagtttccatttaaatgtcaaatcctcagtgacttgtctgctgactaacccagtatcttgcagaacacctccc

SEQ ID NO: 8942 - DNA, 438 bp, Homo sapiens
acttgcgcccggctggtttgtgcttgttgtatcaaatttgggaaatccttctttgctgccaggcatgttgttttaataaatacagtagtatacctatctataatgtggtatatctcatctgacatttatttccaatatttgcttgattacaaaggcagacttcttagaagttgctttcttattatctttggagttataggggccacagggtttttaaaaggaggttgggattgtgccttacatgtggggtttcatacattgtccaaactgaggacaccaacagatttgtgaatgaggtgtgcatcttattaaatgttaatgtgatttgacaatgagacctttctttgtgtggacagtattatatacaattgatagtgtgtcattcagtctaagctgttagcactttcactaaaatatattcaaattttttttgatgtc

SEQ ID NO: 8943 - DNA, 872 bp, Homo sapiens
tttttttgttttttaaaattatgttttatttaatgagtgcttcttcatttaaaaataatataatctggtcacaaaggctacattctcatctctgaccatgaggtggtcatagttctaggcgtcaaatgctgttctatgaccaattgatcttgagctcttcctagagctgattttaaaaatcattctttaagaatttgcctctctgatatgctcactctctgtatttattatttatatcagaaataaactcatgtatatattaaactaacaaaaatgtgaaattattttagcgatttatatggaaatgtttctaaggagcagggtgagattgtacctctacttatgacatttataactgcagacatctgtttagcttatatgtatgcattccaggaattcaagcaaagggcaaaagattgtgatgctttccatgtcattcaggattgcagtggtttgccatacagataaagaaaattaagtaaaagtatgaagacctgtaaaatacagtggacagattatttatggctaatagaaaatacagagttccttttcataagagagttggatagaagaaacagtatttttcatattcttatttgcaaaaacctttctaatatgtcaataagtaaaatctgatcacaaatatagccttttctcctgtaagagctctcctaactcttctgtttagccacatttgcgtaagtattttcaatttctttgtcttcaggacacgtgtgggtaaattcttcacgggcataggcattgtggagataacgccagactcctggagaattctgctggaatgtcaaagtcacgatatttcttggcagcaactttaataatgttcagcttgggtaacaagctacaatcag

SEQ ID NO: 8944 - DNA, 174 bp, Homo sapiens
gaaaagttatgtgagtgtggactgtccatctcaaaatattttatttattatgctatacttgagtactccttgtgatgaatgaggtaggtggtgcaggcattatgaagtactactattgccccagagggtgggtagcatctacagcatagatacactggacaaagggatgattca

SEQ ID NO: 8945 - DNA, 87 bp, Homo sapiens
acctaagaaaaatccagaagaccagaccatgccccaaaataggacaatatatgttaccttgaaggtaaaccacaggagaaaccaaga

SEQ ID NO: 8946 - DNA, 1177 bp, Homo sapiens
caagtttctctttaaaaaaatgaaatagaagtgaaattatgggtatttttcactttttcctgtatttttctggattttgcccccaaagccaataatgtgtattagccacacccactccctccccagtgagtggaaacttaccaaggcagggtcatcgtgtttatacagtgtcaccgcagaacagctggcaaacccagccacggccaggagtcatcgtcatgctatcacatttggctgcagctaccaaaacaagaacaactctttgttagattatcagaatacacaaacctaacaccctcctccattcataaaaactgtgaagagccatgagggactgagtgactttaaattcattcttaaaaacaccaatattcagtaaatcaacaacataccagcactgatgaggagacataacccagagccaatgttgccagattcacactggaagataaaacaccagtccaagaactaattatttaatgttgcttactcaccatgtacttaaaaaaataaaggctgtgctgttgcaagttgacacttaagtatatttttaatgttattagctttcattaacagcaacagaaggtgtgctttatacatatgaaggaaaatcctgaaaatgcactttaataaaaatgtgtctcaggaactatccccgctcatttaatataatgggagtattcttctctttcatggatcttattttccagttatcattctttacttagggatcaaaaagaaacctccctgtatgatgtggtggatatgggctactctggctgcccacgtccgttccccctgcttctcttaatggccctacaatagccttccagggcgccatctccatttcttccagcagaacatgagctttgtggggaggagacaccactatctgctccagaggagagcaaagaacctcaactatcagaggattacttctccctggccacagtggctggttcaatacgagacttctgttaggacttccagctgaccacgaagctggaaagaaggctggagtttctgcagctactttgcactgtaacaggaagatctgtccacagatagaggaaaccaagcccagtgcctgtgactgggggagcagaggtgggagttaacacactgggatcctggttgatgtcgtgcctggaggaagttcataacacttgctctttgt

SEQ ID NO: 8947 - DNA, 341 bp, Homo sapiens
aaaaaaaaaaaaaactcaagatagtaaaagcacctagtgtgatagattatcggttaggtcatttgtgggttgattcttcagaaacagcagttgatacctagcagcgttattgatgggcattaatctatgttagttggcaccttaagatactagtgcagctagatttcatttagggaaatcaccagtaacttgactgaccaattgattttagagagaaagtaaccaaaccaaatatttatctgggcaaagtcataaattctccacttgaatgcgctcatgaaaaataaggccaaaacaagagttctgggccacagctcagcccagagggttcctggggatgg

SEQ ID NO: 8948 - DNA, 349 bp, Homo sapiens
  misc_feature (1)...(349): n = a,t,c or g
aggctaggtnctttggatgnggagaattaaatgagcatggcattttcagaggatacttgttggagattgcttgggtaggatggatgtagtcaggtaatgggcctagaaattcagactgaagcatttggtattgatgtgatgggaactggcagcccttgagagattttagctgagaagtgatgtaaaatctgtttggaagactttgagtagaggagattagaggcaaggttaggatgtagggtatgttgcaatagtaattaaggcttaagaatcggcccnnnnnnnnnnnnnnnnnnnnnnnnnnnnnnnnnnnnnnnnnnnnnnnnnnnnnnnnnnnnnnncaattagc

SEQ ID NO: 8949 - DNA, 268 bp, Homo sapiens
ctttcctgcttacaagagaactttggaaccaaggagcaggacttttagctgcttgttttattgctattgtaccaggctacatatctcggtcagtagctggatcctttgataatgaaggcattgctatttttgcacttcagttcacatactatttatgggtaaaatctgtaaaaactgggtcagttttttggacaatgtgctgctgcttatcctatttctatatggtctctgcttggggtggttatgtatttatcatcaatcttattcc

SEQ ID NO: 8950 - DNA, 275 bp, Homo sapiens
ttcaggcagaggtggacagttaagcaagttctgcacgtacccaaataaactctgaacagattgattccctctgcaccccagtaagggtgtgctccactgtgttcccttgtccccagggcccagatttcttcccaaagtaaactggggccactggaactgtggcccattagtgagccaaaagattgggcatctgctgtacctagagggagtttgttctgtagatgccaatgggctgccgtgagggttgctggttattcactttctctggtcttgct

SEQ ID NO: 8951 - DNA, 465 bp, Homo sapiens
  misc_feature (1)...(465): n = a,t,c or g
gagcacctttcacaacctcgggaacgttcattcccggctgaagcttctcaccagcatggccatctcggtggtgtgcttcttcttcctggtgcactgactgcctggtgcccagcacatgtgctgccctacagcaccctgtggtcttcctcgataaagggaaccactttcttatttttttctattttttttttttnnnnnnnnnnnnnnntnaaggactaaccntgngtnatgttttcaaaaatnaaanggnatntttnggaggaanatncnttttaggggtancatataaatngccnttttgcaaanaangaaaaaaacccntcaagtngggccaaatnattctccnatgttnggctgntaaaacanggttnccangtctttctntctaactccctccctttctatcgnctctntttgcatggatttctttgaaaaaaaataaattgctcaaatnaaaaaaaaaaa

SEQ ID NO: 8952 - DNA, 414 bp, Homo sapiens
ggaagagagtttttactgtaatccggagaaaatgcaggtcttctttgatgcctttcatattggatgacataaatgagactgtttttaacactttattagcaatatgaagagtttcaaaagaggaaaaatgggtttttattgtaagtttacattatttgggctttataaaagcatggtcttttaaatgttcacacttccctgggcatgaatggactgtgctgtatggccctagatcgggaaaaagagctaatccgccaagcagctctgcagcagaccaaggagatggacctcagcgtggtgcggctcatgtttacagcttttcttccggatagcactggcagcttcacaaggcgcctggaacccgtgggtatcagacgccatctatgacagtagtgagtacttcacttccaacag

SEQ ID NO: 8953 - DNA, 2270 bp, Homo sapiens
  misc_feature (1)...(2270): n = a,t,c or g
tttttctcataaatagttcaccgggtgaaccaaagactttatttttcaaaagcaggtaacaccaaagtactatgtggtatccatattcgttgcaaaaatgataattactggaattttccaaacatcaaatgaagggggatcaatggttaccactatcgttttcaaccaatatacagatgttcgctcaaggtctaggttttatttctacatagtagtattcacatgagttccctattctgaagtattatcaaaacgaggacccttgaaggtcgagcccagctttgtcttgacttcaaagatgacacagcagccaacctagaatcctggcttgctgcttgagtcctagaaatcatgtcttctcatgttttacaacaagctgtgtctctgaaaactaaaatcagactttagattcctctgaaacagttcctggttcccaagcatccgcaccatggtacccagacatgctcaaaatgtgctttcccttatctttcaaaacccaccaccaggaaaccaaaacggaccccactctgagagttccatgatgaaggtgtttaagaatcacattaaccccaagtaaaggcagtagatgaaattatccatttctttttcttttttttttttttaagtgagactacattggcaaatgggaaaatgacaccaatcatttgattacagaaaatggttttataaatcctcctcttgaaattatgttcaggcccagcannnnnnnnnnnnnnnnnnnnnnnnnnnnnnnnnnnnnnnnnnnnnnnnnnnnnnnnnnnnnnnnnngggttcgacaccagcctggggcaacatagtaagaccccatctctgtttttttttaaaaaaaagaaattctgttcaaaagtacttcagaccaaaaggaggtcataaaaactgttcatataattactctatgagaaaaaaatccctgtatggaaaggggcactgaagatctggcacaggggaaacaaggggagaccagggcagtgataagatccagccctatttttctagcatgcatttacgaccttgtggatatgtcctgtactgggttgttaattagcccccttcccttggtattttaaaaaaaaaaaaatttagagaaattaaggtgaatcttgtgtgcctaatgaagtcctgcgggttaacagaatctcaaagcccaagccctgttaaagtcctgtcaagggcaagatttttgtccatccagggaacgggaaagagccggatatagagataaatggtaaggccacctaaaggcctggttccagccgaagctcctggggagaacagcctcaaaaatgaggcaactgtggcttcctcagtttgagactgccaccagaaaggcccatggaagcaggaaaaaagagccactggtggcccggggtcgacaggaaaatattcggatagggcaatgatcaacagttagatggcaggactcagggtctcagggaggcaggaaaccgtggaactgacactcaaggggaatgtctttgcaagtcctatgcacgactccaagcagcaatttctggggtttggagatttgttagttttgcgacgtattccccccaaaagaagacatgaaggtgggccccctggagaggtgagaccaccagggcagaacctccaccaggcgtgaagctggatgagaggtggaaaggacttcctgcggcacccggctccctccacgtctggctgagtcctacaaacgcttgtaggtgcccaggagagctctgcagttgggacagtaatggtccacgtcctgcagggcatccacgcagaaggggatgaagcagcagcccgctatgcaccccagcaggcacaggctcccgcaggacagccaggtcagagcaccggcgttataggacagctgactcacgatcatcttgttgcaggaaggacaacacatttggatagggcggtccaaaaaggtgatggggtgctgcacgtagaccgtctgcacggtaattggattgttattggggatgggcgctggctgggtataatacgaaggaggattcatgcccttcccatcaggccccgtcacaagccccgtagttggcccaggcatgggagctggaggtgtggggtaataactgttaacagccactgtctcttcataggatggaggtgcggatggtgctgaggaaggcccagtggccgcctggtaaggtcctggaaccgacattttaaccgccgcccgcgccgcctgctcgtgccggtattctttggatgcctctagtgtcgactctgctatgctgcgcgtg

SEQ ID NO: 8954 - DNA, 512 bp, Homo sapiens
tttttacagtacgggccgtttgagtcattattattacaatatactttgacaaaaatagaatctcatttcatatcaatacaacaacaacaaaaaaaaacagtttcctggactgttacaccgctaacgttttccaaaggtcgctatttacaattacagtagccaagagggaaggtgggatgcagcctggaggtggtgggacaaggaggtagccagagacaataggggcgccaagagcaaggaggtggggtcaggagcagaaggagctaacaggagaagctagggagaggggccaaggaggaatgagggaggtgggacctctacggacccatccgtaggccctcccaccccacagaccatcccagtgttgactcccccaggtagtgtgcgtgcaagaccaaggacgtcccctcaccacactcgccccaatgaaagagctctggcctggagcaccccagggaagtccaggccgactctcgccccagccacctcactgaagaccctctccccattct

SEQ ID NO: 8955 - DNA, 367 bp, Homo sapiens
cccctttagaatgtagaatgcgcctgttttgtctctcagtattctggagctccctgtggtcccttttcaggtgtttggtcaaagacgtaaagtactcttttaaaagattctggaagggctgttgtttctctggactaattatctcactaggaggaaaactcaaattaaacttctctgcagcactctttactttccttggtacaagtccagcaatatcatctccacaatgtcgacagaaactaatcactacagagacatgagtgtgggactcccgatcagcattaataatattttttagctgttcatagattaaggaaagaccttccttgtcagtgaaaatcccaactattgtcaattctgcaataaa

SEQ ID NO: 8956 - DNA, 559 bp, Homo sapiens
tgaaaatccaaaatagggaaatgtacagatataaagtagattaatggttgctttgcactggtaggggaagagggactagaggagcagtgcagtgataacccataatggttgtgcagctctgtgaatatactgaagactactgaactttaaatggggcaaaacctatatggtatggtgaaatttacaacctttaataaaaggtcattttcttaaaaaaagaactttaaagatacttgcaaatttacatcaatggttaatccactgggcaaatggtttaattaaaaaatcatgtaatgcaccaggaacagaaactagcccagaatgatattcttttcctgggctcctcatttccatgagttaatgacttgactgtgaagtgaataaatcctgctttgaaagacttccagaacaacattaccttagccatgagcaacaacttaagactttgagctctcccttgtttgaaatattcatgtgatggagagtacccatctccacaccaatgcagaagaaactcatgtcactccactgtacactttaagaccaaattgacaagctg

SEQ ID NO: 8957 - DNA, 66 bp, Homo sapiens
caaacatgtcataaaacaaaactaaatcgaattatgtaaaggtaataacgtaaaagacacatggct

SEQ ID NO: 8958 - DNA, 520 bp, Homo sapiens
cgcggccgcgtcgaccggtgctagcgacacgggagtggcaaacgcatcctcttgccgttcccggtgtttgggccttgcctgtgacggtgggaaaagaaaatggccttgctgtgctacaaccggggctgcggtcagcgcttcgatcctgagaccaattccgacgatgcttgcacataccacccaggtgttccggtctttcacgatgcattaaagggttggtcttgctgtaagagaagaacaactgatttttctgatttcttaagcattgtaggctgtacaaaaggtagacataatagtgagaagccacctgagccagtcaaacctgaagtcaagactactgagaagaaggagctatgtgaattaaaacccaaatttcaggaacacatcattcaagcccctaagccagtagaagcaataaaaagaccaagcccagatgaaccaatgacaaatttggaattaaaaatatctgcctccctaaaacaagcacttgataaacttaaactgtcatcagggaatgaag

SEQ ID NO: 8959 - DNA, 327 bp, Homo sapiens
agaagcttacttcattgaaaaaagaggaaagtgaaaatgtgctaagtatatgaaagggaaagcttggattaaagatgagaaacatttttagactataacatgttaaagagagatactataggctttatgttttagtcaacttcttttacctatagggaccaatagataaagtcttaacctggagacagtggttggatgaaatggtttctaagaggtttatccaggttttgtggaaacaataggaacaagacagataaaataaggggtcttattaaaaaataatgctctaaatatttgagatactagaacactattttgttttctgtc

SEQ ID NO: 8960 - DNA, 395 bp, Homo sapiens
gattcaatgcaatctcaatcaaaatcacagccagctttttaagaacagaaagtcacaagttgattctaaaatttacatgaaaatgcaaaggacctagtagacaagaatttttggaaaagaataacaaaatcaaagattttacactacctgaattcagaacttagtaaagcactggtaattatgagagtgtagtattggtgtaaaggcagataaatagatcagtggaacagaatgtagttcaaaatggaccaacacttacatagccagtttattttcaactaagccaccaaagcaattcaatggggaaaagaaagtcttttcaacagactgtgcttgaaaaactggttaactattagggacaaatatttatcttgatgcctgcctcacaacataca

SEQ ID NO: 8961 - DNA, 455 bp, Homo sapiens
ccccttctaagatagttacaaaatgatgccatcaaattatactcttttttcttaagagcaaagctgtgtaaaatagtattcagtaatcatctttaagatattgtcaacattactaaatacaagtatatatatatatatttagtgaaaaatgctgtaatgtgcctcatgaattggtattttaatacagtaatatgctatggtagcatggagtattctaagatattctgattatctcatttagagaaaggtattttagaacttgtaccaatttataatataccaccagaaggggaatgttcatgtttaatagttaacttaaaaccatagatatttttggtacattgatacatttcccgtgaaattttcttaatgacaatggatttaataataaaagaaggtactttgtgaataataaagcttgcactattctagaaagttattctagaaagtgatac

SEQ ID NO: 8962 - DNA, 1648 bp, Homo sapiens
  misc_feature (1)...(1648): n = a,t,c or g
aagaaatctcgcgaggctggagttctccgggagcgccggtcggaggcggtcggcggaggtgtctaccccgccggtgatggcgttgaacgccactggcttcccggccttccgtccgctgcctccgtccgattctgcgtctgcttgctgaggaggcggattaggggggcgcggagtctcttcccttgagtgcataggtcccggttggtagagggtttgagtccgcatcgccacagctgaaggctgcgagggactaagagcagaatatatctttagaaatgagttgcacaattgagaaggcacttgccgagcgctaaagctcttgttgaaagattaagagatcatgacgatgcagcagaatctctgattgagcaaaccacagctctcaacaagcgagtagaagccatgaaacagtatcaggaagaaattcaagaacttaatgaagtcgcgagacatcggccacggtccacgttagttatgggaatccagcaagaaaacagacaaatcagagagttgcaacaagaaaacaaagaattacgtacatctctggaagaacatcagtcggccttggaacttataatgagcaagtaccgagaacaaatgtttagattgctaatggctagcaaaaaagatgatccgggtataataatgaagttaaaagagcagcactccaagattgacatggtacatcgtaacaagtccgaaggattcttccttgatgcatctcgacacatccttgaccacctcaacatggactggagagaaggcacttggaagcaaatcagaatgtacactaaataaacagtcaacttttggggtgtggatggaaggggggtccattttaaaagtgcttttacattgaatttccctcccagattagatcagcaaataaatgaaatttattaaaagaatgttgtgtctttaatagccatgctgttcagtgtagaaactttaaatctctcattaattttctgtgtattgtatcatgtacagcctgttagatatttgcaggttttataggttattcagtccaacgctttatttatttgctcttgttagttgttgctgtgaancagntcatttcctttctggacatcaaagatattttcttggcattaattttaaactgatttcataaggtcaaagtattaaatgttttaattcagattgtggatagtttgtagtcctttgattttgcaaatgaaattaaaatgcctttgtttagatgttaggattaagtatagtagtgctctctccattgtgtcttaatttttttttaactcacttgtggcaggtctttattgaataaaggaggaataaacctagacagggagttagaaatgaaagacatttcaagacagttcaagggttatgttggtgacacttcttgtcttccagacagttttgaaagcacagatcttgcctcttgtgcttgttaaaaaatctgtgatacttctctgaagattttataattaaataagtgaaccattaccatgaccttttataaaagtgctgccctatttgaagtattggggtttttttctcatgatgaggctttgttaggacttgggtactgaaaaaatcagtagtttttttccttctattttaaagggcaaaggaaatgcttgcttcagctagggcatgggtgggc

SEQ ID NO: 8963 - DNA, 451 bp, Homo sapiens
  misc_feature (1)...(451): n = a,t,c or g
tattggatgagctggtgtgagtgctgccgctacaccgagacctcgagaagacctcttgcctcatggatgtctggtccctctgcacagctccaaccaacaggactgtagggtgatgacgatcactttcccagtgatgagaagggtggtctaggactgggcttctaccctcagtgcaagaccagtgccagatgtgcccccacttcctgcctcctgnnggccttcttccctgttactccatgctggtggcctcacccatcaagaccactgtctcctggtactggactatctacctgccttgtccctgttctgggggaaggtgtccaccccgatcaagaacatggagaaagtcctctttcaaggctcccattaggaggatgagctgccttgacccagaagggatgagacgggctcttacctctctacaaccttccctccccttcccactccttcc

SEQ ID NO: 8964 - DNA, 333 bp, Homo sapiens
aatattaattaatgcttaggctatatccaagggtgagaaattaaatactgtgaacaaaaatgtaaacaggagactgacccgaagaagagaacccaagagattctgatccccattcctcagtcctggcaaccggtcaaaaggaaccccccaaaacaaaacaatataaagtcgtaagagataaccctgatagggctaggctatggagacactggatctacaggtactttcatttcttttctctgtttttccatgctgtgacatgttataaaatttcacaaatttaaaatgaatgacggccaggtactggtggcctcgtgctggtaatcccagcac

SEQ ID NO: 8965 - DNA, 286 bp, Homo sapiens
  misc_feature (1)...(286): n = a,t,c or g
attgaaaactccttgcacttagatttaatttatatgttagttacattattaaaagtcataaggcatttatctgagtcattgctctacagagagcaattaatggcttgtaataataaaaagaatattttttttgtaatgcattgttgaaagacatccagaatatcaagaaaatgtatataggnatatgctacttgcctcctccctgcatttcctcgtggggcactatttncngcataggcctacagaattagactttcatacttagnggntaaggtacactcttctt

SEQ ID NO: 8966 - DNA, 538 bp, Homo sapiens
  misc_feature (1)...(538): n = a,t,c or g
tgcggccgcggaggacctgtcggacgcgctgtgcgagtttgacgcggtgctgggccgacttcgcgtcgcccttccacgagcgccacttccactacgaggagcacctggagcgcatgaagcggcgcagcagcgcagctgacacgngcaacagcggcttcagcgactcggagagtgcagattcactttataggaacagcttcagcttcagtgatgaaaaactgaattctccaacagactctaccccagctcttctctctgccactgtcactcctcagaaagctaaattaggagacacaaaagagctagaagccttcattgctgatcttgacaaaactttagcaagtatgtgaaacaagaagttctgggtcctttcatcataagggagaagcttcagaaagttccgaggacctgctaaaatcagctactagaatctgctgccagaggggacaaagacgtgcactcaaccttctaccaggccactctcaggctcaccttaaaatcagcccttgatcccatttctgggcaatttagacagtga

SEQ ID NO: 8967 - DNA, 1778 bp, Homo sapiens
  misc_feature (1)...(1778): n = a,t,c or g
tttttttttttttttggaattaatcatttatcacaaaatgaacaatttcaattcttaaacatacaatcactttttttcatactaactcaaaatgagtaaacagaattttattcaaactttacaaatatcatttacatttagcctgagattaaacatgagaaagttcaacctgaagttagacttcattgcccagttaagcatctgaaaataaagctgagaatgaacatacatcatcaaacaaagcattccaatgaagtctggcaatgaattgtgacacaaactgaactttaatttgctctggtccacatgatcttcagagcctaaaagttcctgttttttattaatgatggaaaaatatctgcaaatgataaatgcatgaaggtatgaccagatgcaaaattttagttcaacatttctatagcagctgctttaggtgaccattaaaaaacaactccccaatccttactgttcaacatgtacttgaaaacatgcagcagcatggtacagtttattaaatttataaatatcagtacctgtaataaaatataaaatacgtgacgtattccgtttttcaaatattaagtaatatataattaattcatctttattaatccattattagtaatataaatagattaagtgaagcagtgaatttcaaaatttgtgcaggggaaactagttgataatttgtttccaataaggctggtagccaattaattactacaaagtttgtccaagctagtattgaacccctgatttagcaggctgaatcaaagtgtatagttaggtacttctaattcctctattactgtgcaaatctagaatttcctatgtaaaagacagtgctggcagcatcaaagccctgtaatagtatgaaatagtgattaggatttgaaatgaagagatattatatgaagacatgtgaatgtcttaatgatggtatcatagcaacggcctcagaattcccttactgaaacagaaactaagacaaatcattattcaataatcttctgagccaaaagcctaagttggaagcaagtgataaaaacacaaaaccaaagatgcattttctatgaccatatgcaagaattttaagctttatatcaacattctgtaccagcaccagcccctctgaaaggaaaaagtgtagtcatgactgtccatctcttttcaaagcttccagtctttgaagcagtgcgtttgccaaatgcttctcggtaggcggggcctgagtgtatccaacaaggagtagactgtttcatggtagggagtctgtaaatgatcatctacctggtcaaaagcatagcctaccaccttgagccctgccttcagtgagttctaggcaatatctgtttctttcctttgtttccacattgatataggccacatcatccgcacaccgcaggcttttcgagacaaacatgttgttaacagcaaagagaacatcatttacaactgcttcagcttcgagcctcatgtctttcatgtcagttccttcaaaaccgttcagctctgaaccttcttcaaatcctgacatactgcttagctccatgggattacagtctgtttccattcttgatgatgcagaaagatcaagaatccagtacttgaagggaaggaatcctcacaggtcagtgaagtaggtcaccaaacagttgtgataatcagcaccgagctgcgcgcggatcctcgagannnnnnnnnnnnnnnnnnnnnnnnnnnnnnnnnnnnnnnnnnnnnnnnnnnnnnnnnnnnnnnncggtattcaaacccgtcca

SEQ ID NO: 8968 - DNA, 972 bp, Homo sapiens
aatgtccttccagattaaaaaaatggtattttattataacttttaaaattgcggaacatcagactgaatatcatcagacacatacacaaaaccactcatctctaaagtcattttctataccctctcaaaatttggccagtgagttttgcctcagggaattttccagttcaaccccatacaccaacatggaataaatggaaacactagccttttggttttgcccacagttccaaagtgctattacaggtggaatatctgctgcaggaggtcattcttgctgctgtgggtgtgagtaaaatgcttagttccttctaaaatcataattgcaatatggacttctgcttcacgctgcatcctaaggcacaaatcaggtaacctacatctcccaaatgatcaacagagcactccatcctattttaccctcaatgctgagaaattactcctgggcccagaagttgtcacataggtggcttgggttacttggtgctcaggcaacaactgccacaggccccagcttgatgaacaccatcaatttctttaaatatgttgatactaagatggaggcctctgctcagaggaagcaaggacataaacgctgggacagactgcactgagggtcactacactaacagacccagatgacacgatggaacgtgaatactgaagctgacaatcttctgaaaaatctctttttcaaaacccatacgcctaatcgagaaatcagggacagggaaacattcgcataattacccaccaacatgttcttcttaacagaagtgaagattattttaagaatatgaaaagtgtttcaagacatctgttttcagggatagaccagagcagcagaagtacttttcagagctggttcattttaaagtctatctcaagaacaagggcagcctgctttcacaaggtaccaagacatgttctggcaaaaacattttcactttaagttatatgctgtcaagttca

SEQ ID NO: 8969 - DNA, 425 bp, Homo sapiens
ttttttttttttttgacattttgtttatttatttaaaacaaacatctgtgcgctatgtacaggcccggctcccagggaggtgggcgggcagggggccaagctgggtgggagagcgatggcagctgggggttggggggggtctggccccttgcctggccagcagggtcagcttctccattcctgccacctgccagctggcccaagctgatggcttcccgcgggacagccacctccctgcaggagagcagggccagaggagcctcttctcaaagcaaaataaatacgggactgacccagctccgcccacagcccgttttcggcatcagccttcatcgtaagagagaaaagctggttccgagggccgggcaggagaaaggccagcagtgcctgggtccagccggcgtcgttttgggggttgaagcagt

SEQ ID NO: 8970 - DNA, 336 bp, Homo sapiens
gttttagactgacctgcactaggcaccagcagaccagacagaattagaatggaggcccttgtgctgagtgccacataatcaaactgaactttgaatttgaactgaaatgagccagttttctaaaaaaaaagaaaaaaagagatttcagtcaacctgagttagtgaaataagacagtcctctctgttttaacctgtaaagaaagttttcaactttaaaacaaccaatctactttttgtcccttatttctgctttctttaaaccttttctgcctagaaggctaacctcctctgcttagctcattagaagacccattttatagaatgagctgttgccca

SEQ ID NO: 8971 - DNA, 468 bp, Homo sapiens
aagagtctgtaggtagttgaattaacagcttgttccttgggtgctgtgataagtttggactttattgtttctcagactggtctcctactggaaccaactgaaatgtttattaaaaatacagattcctgggttccctcccaccctactgaaatcagaatcagtccctggactggatgacaaaaagcaccccaagggatttttatgcatagtaaagtttgtgaaccatagctgtaggcaagagttatgtgttcaggtatgtataatggaaaaattctgtctcaaatgaggcaaagtggcctactagtaagctgctgcaattgctttattgatgaaggcctggaccagaacaacaatgctaataaacaagagaggatggatatttagaattatgaattcaaaccatctgacataagaagtgagagatcaggtgtcctcaaggttggctccacgcatagtcggctgctggtg

SEQ ID NO: 8972 - DNA, 361 bp, Homo sapiens
gtcagaattgatgatgcttcttgtttgtatggatttttagtagtattgctaaggcatctcgggtttattagttgggaaccactgatagggatatgatttagcctttactttcttagtttaatgacaaatatttctattatccaagggggcaaattcagtgccacatcacactttttcttttaaatcttaaaattacctcagatttttttttttgttttaagaaaactggaatgcaattatatattaaataaattttaactgccatcttgttgcatgtgtctgtttcatgtgagtgaatagtgtatcacttcagaaaaaccttgttcttttttttgatggactattaagtattttttcaact

SEQ ID NO: 8973 - DNA, 754 bp, Homo sapiens
agtggttctccgcccctgccactgggccatggagactgtggcacagtagactgtagtgtgaggctcgcgggggcagtggccatggaggccgtgctgaacgagctggtgtctgtggaggacctgctgaagtttgaaaagaaatttcagtctgagaaggcagcaggctcggtgtccaagagcacgcagtttgagtacgcctggtgcctggtgcggagcaagtacaatgatgacatccgtaaaggcatcgtgctgctcgaggagctgctgcccaaagggagcaaggaggaacagcgggattacgtcttctacctggccgtggggaactaccggctcaaggaatacgagaaggccttaaagtacgtccgcgggttgctgcagacagagccccagaacaaccaggccaaggaactggagcggctcattgacaaggccatgaagaaagatggactcgtgggcatggccatcgtgggaggcatggccctgggtgtggcgggactggccggactcatcggacttgctgtgtccaagtccaaatcctgaaggagacgcgggagcccacggagaacgctccaggagggcctgtccatcctcgctgtcctttccctgtcctttccctgttctccccctgccccccgtctctatcctctgtggccttcagctaatttctgctcccctgagattcgtccttcagccccatcatgtgctttgggatgagtgtaaataaaacggggctgtggcttgggaaaaaaaaaaa

SEQ ID NO: 8974 - DNA, 425 bp, Homo sapiens
tttttttttccaaaggaaagcagttgtcttcatgcataaaagtcagtgcttgttttatacattgcaagaaacaaaaagcatattttttgtttgttgcttccccaaaagacattccttttagaatgccttggaactatgttctatcatatcactctttaaaaaaaacaaagaagaatatattcttatttggaagagacttaatataatcaactcatggttacttttactgatgcttgagtcttttaaatgtagtaattgatcaaattgtattaagccataagggactttctggaattcagttaaggcaactaggtgagtgttactactgcaggtgaggtttcaggattcatttggtcagactgaagacgttctatgtagtataaattgattatatctcattcttgaactacaagactttaaaatgc

SEQ ID NO: 8975 - DNA, 59 bp, Homo sapiens
ctataattttataccaattagacaactccctatttcctcatttctcccttcctcctttt

SEQ ID NO: 8976 - DNA, 599 bp, Homo sapiens
tgatctttccacccactcccctttctcctcttctccactgagaataatctccctgtcttttattcacttcattttctatactcctatttatccattttgattgtttatacctactatttgtattcgaatgacttcatttttcccaccctgtgggtcagtttgtgacttttggaattttccacaggtacctgtacaacttgatatttgaaaacaggattcatcaccatatatccccagcccccgttttctttttaaacaggcctcattgcgtaattcctttgccctgaaaagtgtcaccacctttatatttttaccccagccttggagttatctttttctgctctccattctccatgtccaaaaacttgctgtcagtccagtttttaatcagttttctccttgaggcttgatctcccatttctctcatcccattatagcttttcatgtagatctgaggcccaggttactgtaattcttttttttccaatttccttgctcccaggatccccatcttggtataaagtttctaagggtgctcctcctcaaactccatttttacaatatccgtattgtaaaattttcattttcagtaacaccca

SEQ ID NO: 8977 - DNA, 509 bp, Homo sapiens
tttttttttttttacttcaacaagcatttattaaacgcctactatgtgctcagcactatactaggcactcgggggtgcagagatacaaatgtaaaagttattattcctgccctcaaggagcttacaatttaattttggaaataaatacaaatatgaaactgtaacacagagtgctagaaaataattacaaagcaacatattagtaagtacatggaccacagtacaaactcaaaagataagtgctgaggcagcacagaatgagggaggtcatcgcatgaggtgatgtcaatcagggagagctcagtcagaagatataaaggaagaaaggctttgaagggagtgatgaacatgagctgggaccaaagagcaatctaagcaaaaagaatagcatgagaaaggcacagaggcaagagcttgtaagacatcagtagaaggctgtaggaagtttgaatctgttgaatcaaggtgaatatgctagagagtaatgaaggctgatgaatactcgtgcc

SEQ ID NO: 8978 - DNA, 314 bp, Homo sapiens
atctctcccaaaacgcttctcagcgcccattgttattgtgtcatctacaaagcaacacatatattaaaactcagatttgtttttaacaaaaaagtgcttaaaaccaccctaggcaattgtttttcacttcattttcaaccaataaaatcaaattcatttagatcctatgaataatactgaaaaaataatgcttattctcttacattttaaataatgtgcccttcatccctcaactttacattaactgactcatttcagtatctaaatgaattgagctctcatttgaaaaacagaaggtacaactatatagaatt

SEQ ID NO: 8979 - DNA, 122 bp, Homo sapiens
cacagggttttacaggcatgggccaccacgcccagtcagcagctggactgtatatattctctgggctaggttctaatgccatctgacatttgagcctcacaacccttgccaactgggggacc

SEQ ID NO: 8980 - DNA, 307 bp, Homo sapiens
  misc_feature (1)...(307): n = a,t,c or g
cagcacatgaagaaacttttaggagacaagctctatacaacatcacccaatgttgaggnatcttatctaccatccccagatgtcctgaaagggaaaatactaattaaagcaaagaagctgtcctcaaattgctctggggtagaaggagatgttactgacgaagatgaaggagcagaaatgtctcagaggatgggaaaagagaacatggagcaacccaataatgtgcctgtgaagcgatttcagctttgtaaagaactgtctgaactggtcagcatctgcaaatcagttcagttcaaagaatttcagg

SEQ ID NO: 8981 - DNA, 3699 bp, Homo sapiens
cgggcagtgacagccggcgcggatcgcgcgtccacggaggagaatcagcttagagaactatcaacacaggacaatgcaagcccatgagctgttccggtattttcgaatgccagagctggttgacttccgacagtgcgtgactcttccgaccaacacgcttatgggcttcggagctttttccagacgactcaccaccttctggcggccacgccacccaaaacccctgaagccgccatggcacctctccatgcagtcagtggaagtggcgggtagtggtggtgcacgaagatccgcactacttgacagcgacgagcccttggtgtatttctatgatgatgttacaacattatacgaaggtttccagagagggatacaggtgtcaaataatggcccttgtttaggctctcggaaaccagaccaaccctatgaatggctttcatataaacaggttgcagaattgtcggagtgcataggctcagcactgatccagaagggcttcaagactgccccagatcagttcattggcatctttgctcaaaatagacctgagtgggtgattattgaacaaggatgctttgcttattcgatggtgatcgttccactttatgatacccttggaaatgaagccatcacgtacatagtcaacaaagctgaactctctctggtttttgttgacaagccagagaaggccaaactcttattagagggtgtagaaaataagttaataccaggccttaaaatcatagttgtcatggactcgtacggcagtgaactggtggaacgaggccagaggtgtggggtggaagtcaccagcatgaaggcgatggaggacctgggaagagccaacagacggaagcccaagcctccagcacctgaagatcttgcagtaatttgtttcacaagtggaactacaggcaaccccaaaggagcaatggtcactcaccgaaacatagtgagcgattgttcagcttttgtgaaagcaacagagaatacagtcaatccttgcccagatgatactttgatatctttcttgcctctcgcccatatgtttgagagagttgtagagtgtgtaatgctgtgtcatggagctaaaatcggatttttccaaggagatatcaggctgctcatggatgacctcaaggtgcttcaacccactgtcttccccgtggttccaagactgctgaaccggatgtttgaccgaattttcggacaagcaaacaccaccgtgaagcgatggctcttggactttgcctccaagaggaaagaagcagacgttcgcagcggcatcatcagaaacaacagcctgtgggaccggctgatcttccacaaagtacagtcgagcctgggcggaagagtccggctgatggtgacaggagccgccccggtgtctgccactgtgctgacgttcctcagagcagccctgggctgtcagttttatgaaggatacggacagacagagtgcactgccgggtgctgcctaaccatgcctggagactggaccacaggccatgttggggccccgatgccgtgcaatttgataaaacttggttggcagttggaagaaatgaattacatggcgtccgagggcgagggcgaggtgtgtgtgaaagggccaaatgtatttcagggctacttgaaggacccagcgaaaacagcagaagctttggacaaagacggctggttacacacaggggacatcggaaaatggttaccaaatggcaccttgaaaattatcgaccggaaaaagcacatatttaagctggcacaaggagaatacatagcccctgaaaagattgaaaatatctacatgcgaagtgagcctgttgctcaggtgtttgtccacggagaaagcctgcaggcatttctcattgcaattgtggtaccagatgttgagacattatgttcctgggcccaaaagagaggatttgaagggtcgtttgaggaactgtgcagaaataaggatgtcaaaaaagctatcctcgaagatatggtgagacttgggaaggattctggtctgaaaccatttgaacaggtcaaaggcatcacattgcaccctgaattattttctatcgacaatggccttctgactccaacaatgaaggcgaaaaggccagagctgcggaactatttcaggtcgcagatagatgacctctattccatcatcaaggtttagtgtgaagaagaaagctcagaggaaatggcacagttccacaatctcttctcctgctgatggccttcatgttgttaattttgaatacagcaagtgtagggaaggaagcgttctgtgtttgacttgtccattcggggttcttctcataggaatgctagaggaaacagaacactgccttacagtcacctcagtgttcagaccatgtttatggtaatacacacttccaaaagtagccttaaaaattgtaaagggatactataaatgtgctaattatttgagacttcctcagtttaaaaagtgggttttaaatcttctgtctccctgtttttctaatcaaggggttaggactttgctatctctgagatgtctgctacttcgtcgaaattctgcagctgtctgctgctctaaagagtacagtgctctagagggaagtgttccctttaaaaataagaacaactgtcctggctggagatctcacaagcggaccagagatctttttaaatccctgctactgtcccttctcacaggcattcacagaacccttctgattcgaagggttacgaaactcatgttcttctccagtcccctgtggtttctgttggagcataaggtttccagtaagcgggagggcagatccaactcagaaccatgcagataaggagcctctggcaaatgggtgctcatcagaacgcgtggattctctttcatggcagaatgctcttggactcggttctccaggcctgattccccgactccatcctttttcaggggttatttaaaaatctgccttagattctatagtgaagacaagcatttcaagaaagagttacctggatcagccatgctcagctgtgacgcctgaataactgtctactttatcttcactgaaccactcactctgtgtaaaggccaacagatttttaatgtggttttcatatcaaaagatcatgttgggattaacttgcctttttccccaaaaaataaactctcaggcaagcatttctttaaagctattaagggagtatatacttgagtacttattgaaatggacagtaataagcaaatgttcttataatgctacctgatttctatgaaatgtgtttgacaagccaaaattctaggatgtagaaatctggaaagttcatttcctgggattcacttctccagggattttttaaagttaatttgggaaattaacagcagttcactttattgtgagtctttgccacatttgactgaattgagctgtcatttgtacatttaaagcagctgttttggggtctgtgagagtacatgtattatatacaagcacaacagggcttgcactaaagaattgtcattgtaataacactacttggtagcctaacttcatatatgtattcttaattgcacaaaaagtcaataatttgtcaccttggggttttgaatgtttgctttaagtgttggctatttctatgttttataaaccaaaacaaaatttccaaaaacaatgaaggaaaccaaaataaatatttctgcatttcaggtga

SEQ ID NO: 8982 - DNA, 392 bp, Homo sapiens
atttattccaagaacgtaatttgaaagagattaaagcacataggcacaaatattttcagtgcagtattgtttatattggaaacaacccaaatgttcagtaacagggggaacaattttgtaaatcttgctacagcaagttaacaaaattataagctgccacttataattgtaaattttgaaagtttgtagcacagcaaggaaactgatcatgttaaatgtttctgatatcttagttaatttttctcccgccagttccgatcggtgtcctggtcataccgtcagcatataagtatgtatttcataaacatttactttgtattaactcagtagtattcccttcctagagtggtttgcttcccagattgtaatggacaatcatctcacctggggat

SEQ ID NO: 8983 - DNA, 406 bp, Homo sapiens
ttttttttttgatcttcttcaacttggatttatgtccatgattcgtgcaaatagctatccagggatggacagccaccctaatctgggcttctggcaccacaggcctccagctatggggtccagggtctgaacctcagggcctggccttgccatcttcggtgagcctggccgcccagacgcaccctctttgttgccattgctcatcaacaacttcttgagctccaaattttcctcccgcagcctctcggcagcctgatcccgctgttccaggcccttatccaacttggccttcagagcctcgttctccttccgaagctgctcacacagggtctgcagaatggaggtgcgctgctcattcttgtgcaccttggatgccagtcggttgaactccagggccatgcggcag

SEQ ID NO: 8984 - DNA, 1649 bp, Homo sapiens
caagggaaaaaggcaaaaactatttaccctgcctttgcaggctggggtttttgaacccgaggaaaggctgggacgcctgtttccagatggttgtcatggtcacgctgggcgaagagctggaggggagttgtcccctcagctgagcggctgcggtgaaatgccccagtgttcctgggttggctttacggcaaactaaatgcaggggacgctggagtccgactcacctacaccggcttcctcccagccgctggtgtgcggcacacacaacatctgcattaggcagaggtgcaagtgggctgattgaacttttccttcaaaacctgcttgtctgtcctggacctttgatgaaatgggatcctggtcacgcaggctgagacagtggggaccgccgaggccagagtgggctatgcttgagcagggatgagaagggccgcggcagcacggcagccttgacccacgcctgcgtcttgtggtgcaaggccagagggctctctctagaacctgaccgtgcactccatctcctggggagccatttttgggcaagagtgagtgtggggggaaaaagtgttgcacaagagatacgggaaccctgagctagggtttcctgtcaccaaagagtgagctgcatttccagttctgcgttaaagtatcgtttgttctggtgcctgcctgtggtggtgatttggagactcaaatttcctttgccaggtctcttttgtctttctttgggattggtagtatagaagatgctgggaattgtcttcctcgctcagcctcggcttcccgcactgtaagatgaggcagttgcagaggaggcctcggacgtcctgtgaccctcggcccacactcccccttgggtggccctggcagggctggctaggtgcgttccctgcagaccacgggaagccctgtgcttgcctgggtcagggctaagctgtgcgccctagaggagggaggaggactgcagattcttggtcgagaagaatgaagaggatttctgtgtttgctgagcagccattgtggagggttacccgcctccactttcccgttgcccatttcactgccaccagctcctcttcctctgctcgaacctatgagtcccagcctcactggcggcctcagacatgctcaggagtgacggggacagagggaggccgctgagttgcccgttagaactcttactgctgcgccagtgacccaggtggagagggaccctgaaccaaacagaacgtgtgctaattttccgaactccaaactgtacactcatattcatttttaaattgtatttttccaaacttcaaaaaggacgatgagcgtgggggataggaaacaaaacctgtaaacgttgtgaatgggctcagtggactctgggaccaaaccttctgtaatctctaaaacaatgggaccaagagctggatggaacctggagtcaaaaagaactgcttcagtccccgctgtaccgcctgcctagctgtgggagcaggcagggcgcctgggagcctgcgttttctggaccgttccatgggactcatccctacctcacagggctgttgtgaggtgttgtgtgactgcgtgtcctgcaaacgcccagctcggtgcccagccagcggtgggcacccaataaacgctacaacataaaaaaaaaaaaa

SEQ ID NO: 8985 - DNA, 990 bp, Homo sapiens
gctcgactttttttttttgatcttcttcaacttggatttatgtccatgattcgtgcaaatagctatccagggatggacagccaccctaatctgggcttctggcaccacaggcctccagctatggggtccagggtctgaacctcagggcctggcagcttcaggctggcgcccctcggcggacgtggctggcatggccttctcccatctgtgatggcttcagcaaggctactgtgagtggtggtggagagggccccagagccagaatatccatcattctcttctgttctggagacaaacccacacttcccacagctcctcacagaggggtaggggtgtgcgtggggcaggtcctgctacagagcttgaagcaaaaattaaacacacacacaaattggtcatggcaactagagggcctgaaaccacttccgggaggttttgaaggaagggggtcttggctgcctcccactcttaggattgctgctcctggaggcttctgcaacggatggtgggtcaaagccggatgaggcctctctccactcagcagcagggaaggagtttttcccagtcactcccagcagagtacaaatgaaagccttctgggtggagcctccccagtcctgtaaacagctcagttcagggactggtatacaagctggccacccatctcagcctctcatccagctgaggctctggccacaccgtgcaagtggcttctagtttcttggcaatctgagatcagctggctctgcaagatgaaggtggagccaaatgacacaatctggtctcactgaggcccctcacggtcattttttggagactctggttctgtaggcctggctgtgggagggtccatcacttgggagctctgatttggatttcgaacccctccacagggtagacgccaggtgtattccggcagatggaagaggcgcgagttggggagtgggggcgggtgctccatggccatggggggaggggggtagcggatcc

SEQ ID NO: 8986 - DNA, 726 bp, Homo sapiens
atttattaagcacctactttgtgccagacattgtgctaggcaccctcactgtgtgctgttcccacagcacaatcatctgctcagaaattaaaaccaagaaaaggaacactgttgcaaccgtacaaactgggggggcggggggcagggggcagtagcgtggatgcaggcaactccgggccagaaaatgcacccaccagaagcttgttttccatctctcagaaagtttccactaaacagttgttttaaagcctctcgatgttgacagagaggaatgttgttctctctgtgccccccggggctggtgtctggtggacattcaaatactctgaatgctatttgataaaaggagcctgatggcttggtgtaaagaatatcaatatttggattacaaaatgcgtgttttttcagttcatatggttgcaacagcccttatgaaagatataaacatccctgccctgactgcataaatgttgaaggtagacctagttctggattcctgagtcagaatcttccagttgtccacaacctcacaaggccagagaagcgagaggagatttctattctgaaaaggagtgagtggacggcacaactggtttggaaacacgacaaactgcgcctgcatttacagaagcaatgcacacagaagaacgtcctagagctatctggtctcgcacacacgcttgggactcacgggcgggcctggcctcggccagccctagttatcgg

SEQ ID NO: 8987 - DNA, 1303 bp, Homo sapiens
cagcggcagtggagttcgctgcgccatgattgggggccacctgtcttttcgcttgtgtccctctttctagtgtcgcgctcgagtcccgacgggccgctccaagcctcgacatgtcgtacaactacgtggtaacggcccagaagcccaccgccgtgaacggctgcgtgaccggacactttacttcggccgaagacttaaacctgttgattgccaaaaacacgagattagagatctatgtggtcaccgccgaggggcttcggcccgtcaaagaggtgggcatgtatgggaagattgcggtcatggagcttttcaggcccaagggggagagcaaggacctgctgtttatcttgacagcgaagtacaatgcctgcatcctggagtataaacagagtggcgagagcattgatatcattacgcgagcccatggcaatgtccaggaccgcattggccgcccctcagagaccggcattattggcatcattgaccctgagtgccggatgattggcctgcgtctctatgatggccttttcaaggttattccactagatcgcgataataaagaactcaaggccttcaacatccgcctggaggagctgcatgtcattgatgtcaagttcctatatggttgccaagcacctactatttgctttgtctaccaggaccctcaggggcggcacgtaaaaacctatgaggtgtctctccgagaaaaggaattcaataagggcccttggaaacaggaaaatgtcgaagctgaagcttccatggtgatcgcagtcccagagccctttgggggggccatcatcattggacaggagtcaatcacctatcacaatggtgacaaatacctggctattgcccctcctatcatcaagcaaagcacgattgtgtgccacaatcgagtggaccctaatggctcaagatacctgctgggagacatggaaggccggctcttcacagccttgcagaagaaccaactgaaaaaaaaattctcaggctttacagcaagcaaacttcactatgatttttacaattctgattctgtatcccctgggggttatcccagttgcttctttaggatggggtttattacgttgtacatatatcccgatgtgtctgtgtgaatctttgtcttttttgggggagggcagagggcggttctttttttagatattgttcctaaaaaggaataaatgcatacacctgtttgtcaaaacacctttgctttttgtgcaactgctttatattaacgatactaaaaaaaaatagctttgggaaaaaaaactactgtatgtaacggaattgc

SEQ ID NO: 8988 - DNA, 379 bp, Homo sapiens
ggtcgaccacgagcatcactagacacatgagtagcattgcactcggcaacaggaattttttcaggcccattattataatcttatgggaccgcatcctatatgcagtttgtcattgaccaaaatgtccttatgcgatgcatgactatatttgcaaaggactagtatctagaatacatttaaaagtcttaaaatagtaacaaaacaaagaatgcaattagaacatgagcaaaagatacaaagcaacatttcactggagaagatatacagattgcaaataagcacatgaaaagatgtttgataccattagggaaacgcttctttaaaccaggagatatcaccacgtgttagaatcaacaaaataaggccaggcatggtggct

SEQ ID NO: 8989 - DNA, 284 bp, Homo sapiens
gctattacagtgcttgcaaaacctatctttcgcttggctcatgcgttattaggatgatgcttaaattattattttttaatgtaactgtgtctcctttgtaagtagaacagctctaacatcatcacctgtcaggagttttagttgtttaaattgctgagagccacaagtagtgggtaacaatgttacaggaagggggaagctgttactagactgtctctatagttatcctttttatattttaaatttgacgtttgggattcttaaagacctctgtttggctcctg

SEQ ID NO: 8990 - DNA, 525 bp, Homo sapiens
aattatcagatgtcaattaacaatggaataaaatgaaattaaattttaaaatgaaaacattctagaaaatattcccaagaagagatttatttatttatttttctggctatctatccttaagggttcgggaaaaaatggccggtggagaacaaaagattgaaattttagctcattcatgatgcacgtgaccgggaaggagtgttaagatgtcctgtacttccttccataatcacaggttgaggtgagggttgcctaaagtctgatcagccacattttgacagtggagactcagaggcctagttaggaacacagaaggaaaaatgttaaaggcagacctttataaccaaaacaatcaacaggtctaaaagccaaagaaaccagtatttcagaattgttaacttactcctagatgtgtgttaggcatcgggcttatcttaaagaagtgtcttagaccacagaaacatagacccatgatatttggaccaagcataggttaaaactaggggagggaggcacgaattacaa

SEQ ID NO: 8991 - DNA, 1012 bp, Homo sapiens
ttttttttttttttatttttaaaaaatttatttcatataaatctcatatggtacaaaagtattacatgcttgggcctgtcttgcaaaataagaggttctttcagttcttcaggccaaccttccttcagaggcaaataaataagaaacatgtagaacatatttagaaaattttttaccataataaaaatatgtgaacatcttatatttagcatagtttagcaatccagtttatgtcgacaaatttagttcactgctgggaggcacatgtcacagaagaacctaataggcagcagatattttaacctgtaggaacaaaatgtttaacatttttcttgtattttttgaagaaggtactccatttgtacagttcaagtttggttggccctttttagtctttttgttcagtattttaaacacttccattttcttctttttgtactgcctttgggcttcttctctctcctgttttctcctctcgaattcttgtttcttagcagcacgtttggcttgtatctgttcatattcttcttgtgctttttgatttgatgttttctttttatttttctttggaattgtaaaggagtttactgttttaatacattgttcttctggctgaggctggtcaaagctacactgatcttcaaataaaggctcgtcaatgctacactgttcttcaagcaacggctggtgaacttgttctgacaaaggatggtcgacttttcttgcttgcttcctatgtctttcctcttcagctaaatagagatgtttcagattatctgggtatcgatctgtgaattgagattccagtgacgtttgagccttcttttccttccgtagcaatttcttgtaactttgctgtattttcagttttcttcgaaaagcaaagccttgtccctcgcgaacgctccccacgaaggcttgcgggtggttaggccgccatgtcttctgtctcacattcttattcctgtacccgacagtggaaaccccttcaccacgcgcctcaataccacca

SEQ ID NO: 8992 - DNA, 211 bp, Homo sapiens
attttctatttgcaattcaaacccaaggcgagggtgaagagggcaagcttgggttcttgattatatctgcaaggtcaccattgctatgcagagttagaggaggccaggtggcaacccagcacatttgaaaattggatctttgttggaaactgcctcgatttcatggcagaaaccaaacttgagatgtctatattagaggcatctggggagt

SEQ ID NO: 8993 - DNA, 281 bp, Homo sapiens
gaaattttctgtgattattcagccctcgaaacaactttcaggtacagtgactgccataatgtaaactggctcccaagaaggtcatactctccaatgtacattcagagtactgactctgagttttctgccaggtatgaatggtggtactgtcaactgaatatggaggtagatctgctattgctggttagttggcagtatacaccatgtatcaatgttaacatgtccaaagcttgaggattctatggaacatatagatagacatatctagtgtatatttagaa

SEQ ID NO: 8994 - DNA, 867 bp, Homo sapiens
tttttttttatttgatcttagcttttctgcagcatgagatttactggcagaatttttcacaatagattttaaatctgtatctgtaaataagttattgtctgagtttgtgtccacaggctcattctcagatagatgctgctccttatttttccacaatgagggtgtagcaggttgtgtttgttctaaaagagaacaagacgtttctattcttgctgatttgcatgaagacatttcttgattttcttcatccctttccctttttttggtagacggctgaaagtagtttctgatggagttggtctgctgctgctgagaagccctatctttacttttatttatacttggcaatttagttggtgaaagctgatagtttgggattctcatcttagccaaagtatttgataccatactattattattagagcttgttttgcaggactcctttacagtgggtgcgtcttgtgaaagcattctgaatttttgttccattttggagactttgatttcttttggcctttcactcaaatcccatgtatctgcttgctctgattctgtgtcagctacgtatgttgtagtgttcactggggcgcttggcattagtttttcatcaactgacacgccttgtgaaaggcttggtcctggagttgttgtctttaatcctgtactgggatggccctgaggatcacagtaattctttgtagtcatgaaaatcaccgccaatccaatttctgcttcaggaataggtctaagaccttgcctttggagcatatccattattgactgaatccatttcttctgacagtcaggaattaaggtctgtgagtttgttattcctgtatcaacaacacacgttcccggagccaaaaa

SEQ ID NO: 8995 - DNA, 570 bp, Homo sapiens
gcagcttctcctccagtacccttccagcccacctggctggctgtggggataatgggcacttgggagcattggagggggaggaagcatagagaaagcagcaggagacgcacctggaagcccaggggagggaagtccacctccctgcaagtgtagggcagtgagaggagccctggcaccagcagagcaagaaagaaatgcatgcaccgttcagaataagctgtcaggtcgtctggctgtttaagatttatttattaatggtatgtgacatttagcatttctcaatgcctaagattaaactaatgctttgaatcctgatcatgcttttgagctgctcctcttgggtacttgtggcatcgtgttggcagaccctgagtgacatcttcagcggcgggaaaacgaaatgtatttcactgggatgtcaaatcaacagtgccttgacatctttccacactgctttggaacttgcagtagaccagagagaaattcaacatgtctgtctgtatgaaattggttggtgcagcatgatagagctcaatttcaaggatgcatttgattcctttgagaggctaa

SEQ ID NO: 8996 - DNA, 401 bp, Homo sapiens
taccttctttcccggagtcctggtccacgagttggatttactgctgtcgcgggtgggcctcacgccattccctgtccctcggccccctgagtgagtccggtctcccggcgaaagtgagcgaggtttgcccggagcgcgcacgaggggaaaatgcctaaaaaaaagactggtgcgaggaagaaggctgagaaccgccgagaacgtgaaaaacaactaagagcatcaagaagcactatagatttagctaaacatccatgtaatgcctcaatggtatcagctttttttgatatcagttggtagttggaaaaactatatactattttatctgacgtatacctgaataaaattttagtgaagacagtgttttttggcattatagtttgttggtgaatttagtatct

SEQ ID NO: 8997 - DNA, 117 bp, Homo sapiens
gattgctgcgtggcaggctattctgctagtccttcctttcacatcccatttcagtaatggtgcttgaaattgtgcttcagtgtgtcttataaactttggtctgagagtcacttaaga

SEQ ID NO: 8998 - DNA, 356 bp, Homo sapiens
  misc_feature (1)...(356): n = a,t,c or g
gctcattctctcaggcagtcccagcattggcacggtacctcctcccgctgtgggccacacgtctctgctccctgtcaaccctcctgccatcagcaccaccaccagcgacttgtctgcccgggaggatgcaacaccatctgcctccaccggccacctttcagtgtttcctgctttccaagtaaagataccagcagtgccctcagagcagaccagccagagtttttctgaagcctcccacagggtgctccccggaggaggcccgagatgctctcgtgactttggagccggggtggctggccaccttggcctgggcatctttggggtgggcttcgggagcccggcactgctgcanagtg

SEQ ID NO: 8999 - DNA, 287 bp, Homo sapiens
tgttagtccatggcaaattagtaaagtttgtaaaaagaatgtctttctctggtattgttgacaccaacatagtaagaatgtttaagtgctttgcattaagcatctcagggaataaggaaagggagctgtataaaataattctttgtctagtaggacaaactgtgtagttaactgagtctcgtatagaggtgcctgcctcacatgattattgggagcattagatgagtttatgcattataagtcattttgacctagtgcctagcacttagtaaatgtaaagctattta

SEQ ID NO: 9000 - DNA, 414 bp, Homo sapiens
  misc_feature (1)...(414): n = a,t,c or g
gctgagactgacttttttattgacaaaaattatatatattcatcctgtacaacatgttgttctgaaatatgtatacactgtggaacagttaaacagataattaacatatgcgttacctcacatacatttttnnnnnnnnnnnnnnnnnnnnnnnnnnnnnnnnnnnnnnnnnnnnantaccaagaatacttttttaaaaaaacattaatagcaagaacatgaaagtaaaaatatacgctgttatatatttcattaaggagctccttttgcatgtgattatttttcataagagtagacatgaaaaatcaataaaaccactgaaaatgcagtaagatttcaaactaattagccaaaaatctcacatttagatttagttccctgcccatattaaagcaagcacaaggacagttgttt

SEQ ID NO: 9001 - DNA, 470 bp, Homo sapiens
tttttttttttgagaatttcagaacagttttattaggagattgttgaaaaggaaaagaaaattaaatacaataacagtaaacgtggttctcacattgaaaccaggctcaaataactaggctaccatagaaaaatttccaatttcttgcattatgatgtaaaaacagatttttgtacagattttgtacaacaaaattcgtaataaccttttatcatttttaggaaaactttaaatatataggataaaaataggacaattttcataggtcctacatgaagatgagtatgttctgttccaagggcttgcatagagcgccaggtgactctatgccaggagcagagcaatggctgattctactacatatgtaagttgtaggcttttttaaaaatctttcaaaaaatgtatgatgcaaaaagcttgacacaagtccattcaattttaagtgttgtaatcctttaaagcctgcattt

SEQ ID NO: 9002 - DNA, 372 bp, Homo sapiens
tgcacattcatttacaaatatgtaatcaaacattatcaaaattaaaaaaaaatagcagatgcatctccgcatgaataaattaggagacttggagtaacagaactgtgggtgttgtggttcagtaattagaaaaaaatcaaatgtctaataataatcaagcagaatttgtgtggaattcagacttgaaactgaaaacttgggacgtaagaatttaattattctctaaccttcttttactttaggacctaactggcatccaacagcaattaccttagcttaaaacaccaaccaattaaaaagaatactatgaagaattggtagcatgggcctttctttttatattttaagtgttactaaaaaaacccccgtatt

SEQ ID NO: 9003 - DNA, 774 bp, Homo sapiens
tcaacacccttttttcagatgccattctggaatataaactttatgaagctttaaagttcatcatgctgtatcaagtcactgaagtttatgaacaaatgaagactaaaaaggtcattcccagtctttttagactcctgttttccagggagacatcctctgatcctttgagcttcatgatgaatcacctgaattctgtaggcgacacatgtggactagagcagattgatatgtttatacttgggatactcccttgaagtaaagataaaagtgttcagactgttcaagtttaactccagagactttgaagtctgctacccagaggagcctctcagggactggccggagatctccctgctgaccgagaacgaccgccactaccacattccagtcttttaagtccgctgggggccgaacagcagtgctcaccagtgacggtggtcacagttgcaataaagtctctctctgaaaccaaagctagcatttcagcatggaaggaattaggaccttttcttcaggattacaggtacactggatgcagccatgcatggatggtttttctttatttttcagtgatttcctctgaagcagctgcactgatacatttgggagttggtggcttgactttgtccataaggggcgtgccacttcacatgatggcgggcctttaagagcacaaagaagtttaatatggacaacaacaggaaaaagcaagaagaaaacaagtagggaaaaacagctaacctggagagaaagaatttctttaacctttatgtt

SEQ ID NO: 9004 - DNA, 1308 bp, Homo sapiens
  misc_feature (1)...(1308): n = a,t,c or g
aaccagatggtaagacctgaatgctacaagagtgaacataacttaaatgctaactacacgttcaagtacagacataagaatgctagtggtacaaacactgtactccaaatgatgttgttaatcacctaccagcctaagactagtatctacttgatggaacttgaaaaagccataaagtccaacttgtttaaaatgttcagacttagacttacacttcaagatctagtatacatttattaataagccctaacctcgtaccataaaaaaatggggcatgtgctgtatttgggacatgcggacacacccacacccacccacaatctctcccctcctcatgtttactagactgaaaagccaccctgtatcctatcattaaaaaacaaaacaaaacaaaacaaaacagtgcttttagtcaagcagcacaacacaaggacagatcatctgtgattaacagaagcgaacgccttaaaatgatgggagagagacaaattaactaggtactaagtcagatttccaagtgaaaaagacatgagcaaaacttctggtcttaatttctcaaataaaactaaaataaatgaaatggtaacagagtgactttctctaaatttattagggagtttgttacaaatgtttgggctttacaggcatgatttcacggattcaaacaagaaattaacactgatatttagccttctcatgacatacacagaaataacattgctacaaactgcaatggagagaatcttgtttcaaatggcttagtttggggttttgtctaaatgtatcattatataatgaaagcaccaatttgagggtttctcaaatagtgatttgaattttaggacataacagtataacatggtaactttactcctcatatataaataaggcataatcggatgtgtattaatgctggaaaatacattttatgnaaaagcataaatacaagtatttgggtacacattgaaagttaggacttaaccaatttcttcttacaaaaaatgataaggacatatggtatttgttgaatctaaatcagcacttctaatcatttctggtattaaggcgatcttatttccttctactttaaaccaaccactgccaccaactgaataaggatttccctaaacagcctcaatttgagagactaaccagaggaccttctctatgcaaattacatgccaatacaccttaaaagaaaataagacaaaagtgaatgagttttttcattccatattgctttctttggttgcagagcaatccagtgccctttccagataataaaattgaaatgaagatttcaattta

SEQ ID NO: 9005 - DNA, 326 bp, Homo sapiens
gaaataattcaagactgcagcactgtcaacctgaaacctttgtaaatatttcctagcttctggtttggtgcggtgacagcactttcatcacaggatgttaccttgtattcaccaggcggagtgcgagctgctgcacatcctcctcagatctcacctgtccccactgtacatccacccgccagctgcttgcaaacctcatctctagctttagttcgaaaccacattgcagggttcaggtgacctctacaaaaaactacctcttcagaatgaggtaatgaatagttatttattttaaaatatgaaaagtcaggagctctagaacatga

SEQ ID NO: 9006 - DNA, 422 bp, Homo sapiens
acttttaaaaaaacaagtattatttacgtaattgttaaaacaggcctgtgtagagatatttcattttaacatatatatgtatgtacttttttctactgcagtaattcatttcaagagaaatttcattatgtatcttctacagagccctaaactgagagcgccagcgtaattcaaataaaccctgaggtgtgggaggcttcgggccagttcctcattagtagcctcagcatgggggctctggagaccaacgcagaaggtcttccagggagagctgaaacgttcagataagtgagctctgggaagaaggggtagttggctggctctcgcaggctcacccctgggatagagcaaagagaacagacaggggagttctgagaggcaccagagctatctaaactcagggggatggaaccgagtgagcg

SEQ ID NO: 9007 - DNA, 772 bp, Homo sapiens
cacatacattatctttttaatgttcacactactaccacaaatataagtattattctccgcatgttataaatgagaaaatggagactcagagaaaatgtgatttgcacaaggcaacaacatctgataaaaggtagaaccaagatgccaatacagatctgttttcgcttcaaacaccacgttctttttattctctaaccctgccatgtagcacctttgaataattcttaaatgtatcattacagggttgttcaatttttagctgcaatgcttaatatttcttaatgactctattattaccagtgaataatcctattctttatttaacgtggaagtgaactgaacaaaactgaaggtattgcttatgaacagacttatttctattcttgaggaaaactggaagtaactacaaaaagccatttattccacttgaatgaagtaaatattgatactagaccttacatttaaagagaccagtctagcaagtgactctcattttaacaataaccatattaaaagagaaaaaaataaagcagtaagttaaataaaaggttaataaaacttggaggaaacagctcagtgttttcttttaaaccctgaagaataccaaatgtatgttatgttgcataaagagtcatgtcaagagaagactattaacaacccaatagtagagtcagcattaagaacttcaatgatattcaactcaaacatgcgtagggagagtaaagttattttattaaatcatgcacgtcacgtgtgttagtgcaaatagttt

SEQ ID NO: 9008 - DNA, 4500 bp, Homo sapiens
ggtcggacagggcccagaggtggatatgaacctgcctaaggctgaccttggtgtttcaggacccaaggtggacattgatgttccagatgtgaatcttgaagctccagaggggaaactaaaaggccctaagttcaagatgccaagcatgaatatacagacgcacaaaatctctatgcctgatgttggacttaatttgaaagcccctaaactgaaaactgatgtagatgtttcccttcccaaagtggaaggagacttgaagggtcctgaaattgatgtgaaagcccctaagatggatgtgaatgttggtgatattgatattgaaggtccagaagggaagttgaagggccccaagtttaagatgcctgagatgcatttcaaggcccccaagatctccatgcccgatgtggacttacacttgaaaggccccaaagtcaaaggggatatggatgtgtctgtgcccaaggtagaaggtgacctcaagggcccagaagctgacatcaagggcccaaaagtggacatcaacaccccagatgtggatgttcatggcccagactggcacctgaagatgcccaaggtgaaaatgcccaaattcagcatgcctggcttcaaaggagaaggtccagatgtggatgtgaacctgcccaaggctgacattgatgtctcaggacccaaagtggacgttgatgttcctgatgtgaatatcgaaggtccagatgcgaaactaaagggccccaagttcaagatgcctgagatgagcatcaaagcccccaagatctccatgcctgatattgacttaaacctgaaaggacccaaagtgaagggcgatgtggatgttacccttcctaaagtggaaggtgacctcaagggcccagaagctgacatcaagggcccaaaagtggacatcaacacccctgatgtggatgttcatggcccagactggcacctgaagatgcccaaggtgaaaatgcccaaattcagcatgcctggcttcaaaggagaaggtccagatgtggatgtgagcctgcccaaggccgacatcgatgtctcgggacccaaggtggacgttgatattccagatgtgaatatttaaggtccagacgcaaaactgaagggccccaaggtcaagatgcctgaaataaatatcaaagctcccaagatctccatacctgatgttgacctggatttgaaaggacccaaagtaaaaggagattttgatgtgtctgtccctaaggttgaagggactttgaaaggcccagaagtagatcttaaaggtccacgtctggatttcgaaggccctgatgccaaactcagtggcccatctttgaagatgccatcgctggagatatctgctcctaaagtaactgctcctgatgttgatttgcatctcaaggcaccaaaaattggattttcaggtccgaagttagaaggtggtgaagtggacctcaagggacccaaagttgaagctccaagcttagatgtacacatggacagcccagatattaacatcgaagggccagatgttaaaatccccaaatttaagaaacccaagtttggatttgggccaaaaagccccaaagctgacatcaagtcaccttcactggatgtcactgttcctgaggcagagctgaaccttgagactcctgaaattagtgttggtggcaagggcaagaaaagtaagtttaaaatgcctaaaattcatatgagtggtcctaagattaaggccaaaaaacagggatttgacctgaatgttcctgggggtgaaattgatgccagcctcaaggctccggatgtagatgtcaacatcgcagggccggatgctgcactcaaagtcgacgtgaaatcgcccaaaaccaagaaaacgatgtttggaaaaatgtacttcccagatgtagagtttgacattaaatcacctaaatttaaagctgaggcccctctccctagccccaaactggagggtgaactccaggcacctgatctggaactttctttgccagcgattcacgtcgaaggtcttgacatcaaggcgaaggctcccaaggtcaagatgccagatgtggacatctcagtgccaaaaatagagggtgacctgaaaggccccaaagtgcaggcaaacttgggtgcacctgacatcaacatcgaaggcctagatgctaaagtcaaaacaccgtccttcggcatttctgcccctcaagtctccatccctgatgtgaatgtaaacttgaaaggaccaaagataaagggtgatgtccccagcgtgggactggaaggaccagatgtagatctgcaaggtccagaagcaaaaattaagttccccaagttttccatgcccaagatcggcatcccaggtgtgaaaatggagggtgggggagccgaggtccatgcccagctaccctctcttgaaggagacttgagaggaccagatgttaagctcgaagggcccgatgtttctctaaaggggccaggagtagacttaccttcagtgaacctctctatgccaaaagtctctgggcctgaccttgatctgaacttgaaaggaccaagtttgaagggagacctggatgcatctgttcccagcatgaaggtgcatgctccagggctcaacctcagtggtgtcggtggcaaaatgcaggtgggaggagacggtgtgaaagtgccagggatcgatgccacaacaaagcttaacgttggggcaccagatgtgacactgaggggaccaagcctgcagggagatctggctgtctctggtgacatcaaatgccctaaagtatccgtaggagctcctgatctaagcttggaggcatccgaaggcagcattaaacttcccaaaatgaagctgccccaatttggtatctctactccggggtccgacttgcacgtcaatgccaaggggccacaggtttctggcgaactgaaggggccaggtgtggatgtgaacctgaaagggtctcggatttcagcaccgaatgtggactttaacttggaaggaccaaaagtgaaagggagccttggggccactggtgagatcaaaggccccactgtcggaggaggtcttccaggcattggtgttcaaggcctagaaggaaacctccagatgcctggaattaagtcctctggatgtgatgtgaacctgccaggcgtgaatgtgaaactcccaactgggcagatttctgggcctgaaatcaaaggtggtctgaaaggttcagaagtaggtttccatggggctgctcctgatatcagtgtgaaggggcctgcctttaatatggcatctcctgagtcagattttggcatcaacttgaagggcccaaaaatcaaaggaggtgcggatgtttcagggggtgtcagtgccccagacatcagccttggtgaagggcatttgagtgttaaaggttccgggggtgagtggaagggaccccaagtctcctctgctctcaacttggacacatctaagtttgctgggggccttcatttctcaggaccaaaggtggaaggaggtgtgaaaggaggtcagattggactccaggctcctgggctgagtgtgtctgggcctcaaggtcacttggaaagtggatctggaaaagtaacattccctaaaatgaagatccccaaatttaccttctctggccgtgagctggttggcagagaaatgggggtggatgttcacttccctaaagcagaggccagcatccaagctggtgctggagacggcgagtgggaagagtctgaagtcaaactgaaaaagtccaagatcaaaatgcccaagtttaatttttccaaacctaaagggaaaggtggtgtcactggctcaccagaagcatcaatttctgggtccaaaggtgacctgaaaagttcaaaggccagcctgggctctctggaaggagaggcagaggccgaagcctcttcaccgaaaggcaaattctccttatttaaaagtaagaagccacggcaccgctcaaattcattcagtgatgaaagagagttctctggaccttccaccccgacggggacgctggagtttgaaggtggggaagtgtctctggaaggtgggaaagttaaagggaaacacgggaagctgaaattcggtacctttggtggattggggtcaaagagcaaaggtcattatgaggtgactgggagcgatgatgagacaggcaagttacaggggagtggggtgtccctggcctctaagaagtcccgactgtcctcctcttctagcaatgacagtgggaataaggttggcatccagcttcccgaggtggagctgtcagtttccacaaagaaagagtagcaggcctttgtatgtgtgtacatatatatatatataacaaaacatcagccttgggtggtgtgttcctatataaactccaaagggaaacacaccgactgcctcagcaatcatgcaaagaccttgcctggcccggtggcaagcgctgaaaaaccgaccgcctgtaggctcctggaactatacagataggtaaagagttccaagttcgtccggaattc

SEQ ID NO: 9009 - DNA, 1251 bp, Homo sapiens
tcagattctactttaatgtcagtgcagatttgcattgaatcatgccattgtgttttttctcatttttatgctgttgggtcttagtttttaaattgatataaagaactcagcaatggttttattttctactcatacttagggtttaggaaacactaccactagttatcatttaatcaacttcaatggtctactgaaacaaaaatggtaacttttcattagtggattatttagagttatagtagttgtttccagaaaacacttcctcacaattgtacttcccaatcaaatcatgtgatcatacagttattcccatgaaaggcagaatgtttgtttcaaaattaatctagttttctgtacatttaaatttgagaaggtgacaactggctcttttccagtcttccttcatgtcagttttctgatagaccactattggcaaacagtatctgtcaactaccaaatgtgtaaaattttctgtatttcactttgtcttatttgtaaatagtgaactaaaacttttggcagatcagcaacatttgctgagcctgttttttaagctaatgtgtattcttactaatgttcctatcaagaatggatttgtaatatatgctgtctatttctaatgttcacattcatattttgaggttctatcttattttaatagagaacagacttctcaaaaaatcttcagaagcagcttattattgaaatatcgaaatattgaaataaacccggtggggttagattactcatctgtccaccaagtgggacatttgcatggactgggggcttaaaggacttagaagagacctgtaagtaaatcctgaaaatgagccaatccccacttgaatggttactggagtaaacccacctttaccaccccaattacagcacccgaggccgataaaccaacttggctctggttcatttttcttttcttcatttgtgatgctcagattcaaaatgtgtgttctacactgttacaggcttctcttttgtttgattaaagattttagtcctacttttgtatggacacattagaatattcagagaccaaaatagaagaatttgctgttagatatttttcagaagtcagcagatttgtggcaaatcatttatttgcctttttaaaaattcatttaagcagttcagagagtagactactcagaaaattatttcacgtaattgtctaagaggtcaatattttttaatgcatattgaatcaaataaagtgctctaaagaaattattatac

SEQ ID NO: 9010 - DNA, 841 bp, Homo sapiens
gaaaaaggcaactcagaaagctaagaagaaatagatagaggaatactcagagctatctgagtattttctttagtttgttagctctttggagctttgaaactggaaagacccagggagtgatgtggagaaagagactgagcttgtaagacacaggagcagtgagctaagggagatggagtagtggggacaaattctggcacattctgtctacactctgggtagatagaggagggaggatggagcacccatggtgggggtatgttggtgacagcattttcccaccagccagtgtaacaagtggctgatttgggggaaagatggcataaacaaatgagagaatgtgtttactatttgatgtagatgggttatttgcttcatttttcaaatcagtgtatataatcaagaatattcagcatgtttgaatagactgtcagagctggaactctttcattaacatctctggcacctttagttttagccctgaacattttatcttaaaattaaacattaccaaatgccttagtttatttcatttattaaatttatattcttatttgttatttatatcagcttccaatcagaagactatacaacctcctaggaataactgaagtgaagtgatggactccgatttggagagtagtaagacgtgaaaggaatacacttgtgtttaagcaccatggccttgatgattcactgttggggagaagaaacaagaaaagtaactggttgtcacctatgagacccttacgtgattgttagttaagtttttattcaaagcagctgtaatttagttaataaaataattatgatctatgttgtttgcccgaattgagatcca

SEQ ID NO: 9011 - DNA, 257 bp, Homo sapiens
agatcaagctgttagtctccaaaaacgaaggaaatatgagtgatgtgagtgaaagtgtttcaatttagaaacctgctgtatagataaccaacataatacgaaagctgaaggaatcaaaaggagtcccattgctacaggcccaatttgaatgtcagaaattgctgtggtaggacattgtaaccaactctgcgctactaccacaaatgttctatggattctgtttcttaaataataagagttgaaactacttgatcagt

SEQ ID NO: 9012 - DNA, 466 bp, Homo sapiens
gaaacatttctataaccctattgaatattgacacggaagaggctccacacacaaaaactctttataagttctcatatattttgatgatcatgttcgtggtagatatgaatattgtgttaaatgtaagaaaagtggcttttgttctggaatattactttggtcagttaggaatcagatccgccacacataaagggcaggttcataaaggctgtacaattccactgtcctacatcaggcaaggagggtaaaataactcttcaggcctttattcacccaaattgaatgtgtttcataagaaattctactcagagagaaagtctgcatactgagaaaattatatagcaatcatgttttcctgacccaaaaataaaacaacaagatggaaaagttcacagcactttatgccccacacgctcccctacgaccatctggagacaagactgaactgggaggagggactgtggac

SEQ ID NO: 9013 - DNA, 335 bp, Homo sapiens
gttttaaatttccagaaaaattgcaagagaaaaaccaggaactcctatatatcttttacctaattcaccagttgtttacattttgtcctatttgcctcatttttgtcctgctccatgcacacgtgatgttttttccctggaccatttgaaaatgtttgagatatagtgcccatttgcctctaaatatgtacatctgctaagcaaaaggatactatcttataaaactacagaactaatcaaactcaggaaatttaacacttatttgtacaatgctcttatctaatacacagtccatattcacattttgtccgttgtcccaacagtatacttttttt

SEQ ID NO: 9014 - DNA, 210 bp, Homo sapiens
ttgtagttcctaagtaaagccattccctcaggcctcagtcccttctttagaaaatctctgtctggtgagaatcccttctacagagatgacaactaaatctacttctaacttcaaccttacctttcctttgcctgatgggcaatttcatctaggttttacttccttatctaaagcttagtaaattcaaagtcaagttcatcttttctcccc

SEQ ID NO: 9015 - DNA, 172 bp, Homo sapiens
agaaaaatagaataattgtcaaagcaacaacagatgctatcacttactaccattacacagacctaggttttgcctaaatcaattgacccaactggtttatatttctgctttctctcattccaggaattcacaaataccctaacaccctgtaccttttttactttgtgatcta

SEQ ID NO: 9016 - DNA, 972 bp, Homo sapiens
  misc_feature (1)...(972): n = a,t,c or g
tgacaatacatatacaaacatctttattgacaagtgagccaataagggcacatttagtttacagataaccaaaaacatttgaaatgcataacattaaaatttccaagattcatgttgcagtacaaacatgtggcaggttaaacatcaggcataaaaaggacaaatactgaaacgcaaagggccagagatcccaagtcgcttaacactatttaaaatgttattcaactgcaaacttcagcctctgggaaccatcccagatagctactggttaagtgatatgaagtaggaaaaaagaaggttctggaaggtctcaaggagggctgtgcagaaaacagcaccagatggaagcaagagccgganaggagtcacgtcccatctttatgacaagacacagaacaagatggtcacagttcttcatgggtaaacaaaagatgtggaagacacagccaaccttaagtaacttctactgacggatgctctggcacttctctatgtagagaaggagagagaaagagagcaccaagcaggagtgggggactctatatttattgtctgccagttcttttatatgcattgtcttatttaatccttatgacaacctcatgagaagccaatgatttattccctttgttgaaacctaatacagataaagaaactgagactcagagtagggagtttttccaaggtcacatgactgcttagtggggatggcagaattcaaactcaactttggaaagcccatgttggtcttctttccttagtcaaattttggctctcaaatgaattcctcttcactcaagaatttggcaagtttcaataacttgaattctcctaacaatatatagtaacatcctagaggtaggagtattttgatgcagcatttcccatctcttttatttttctgtccccaattatctctcagtacttttccattccacctagtttctctgactggtttaaaccctttatctg

SEQ ID NO: 9017 - DNA, 1855 bp, Homo sapiens
  misc_feature (1)...(1855): n = a,t,c or g
cgtccgtttgctgcggtaggaacatggcggatcggctcacgcagcttcaggacgctgtgaattcgcttgcagatcagttttgtaatgccattggagtattgcagcaatgtggtcctcctgcctctttcaataatattcagacagcaattaacaaagaccagccagctaaccctacagaagagtatgcccagctttttgcagcactgattgcacgaacagcaaaagacattgatgttttgatagattccttacccagtgaagaatctacagctgctttacaggctgctagcttgtataagctagaagaagaaaaccatgaagctgctacatgtctggaggatgttgtttatcgaggagacatgcttctggagaagatacaaagcgcacttgctgatattgcacagtcacagctgaagacaagaagtggtacccatagccagtctcttccagactcatagcatcagtggataccatgtggctgagaaaagaactgtttgagtgccattaagaattctgcatcagacttagatacaagccttaccaacaattacagaaacattaaacactatgacacattacctttttagctatttttaatagtcttctattttcactcttgataagcttataaaatcatgattgaatcagctttaaagcatcataccatcattttttaactgagtgaaattattaaggcatgtaatacattaatgaacataatataaggaaacatatgtaaaattctgttatgacataatttatgtctccattttgttgtattggccagtacttttacaaatcaaaacatctctcaagccaaaggagaagacagtaagaacagacataagggacattttagtttaggctagtgtcctgcctcttagaggtggcattgtgtaaatctgagctttgagcaagaaagttttggaaattgtgttgcttttaagaaatagagttagtgtggctggataagaaagtcacatttatgcaaatgtttcttctgctagaacctcatacctgttctagttcatctccacgtttattttaccaagagatcctctgtcaagagaatttcctggctgttgtgaaagaatttttctacatcctgaactatttttcctatttcttttcaccttgctttttttcatccttaatttgcttgtcatcacaatgaagtatgttttttgaatcatcaattctttctcattctccatttatctgaaggttcttttgcccttattaacctctcaacttttattgctgtattctagtcagaccagaacatacttccactacatcagttacttggcatcatttcacctcagtttattattgccaaataataatttgtgtcagcattttcaactatggttattcatccaacccttggatctctttgagtctactgataatctccactggaaaggtggaattgaaatgtggtccacattttaactagctatttcctggggctgtatttttcagaatatgctgagccnacatttgctgcaatctgttgctattcagagtttaagtttcaggagaaaacaggaacaatagaacactctgcctgttatttttgttgtaatcaagcttttccacagttcttgaaaagtactatgtttcaaatttcaggaacaccagcgttagctgtaaaagttgcagcaatttattggctagtcatagaaaatttttgaacttttaactgtattttaattgatgtttattaaaaacaacaggcagagtgttctattgttcctgttttctcctgaaacttaaactctgaatagcaacagattgcagcaaatgtagctcagcatattctgaaaaatacagccccaggaaatagctagtt

SEQ ID NO: 9018 - DNA, 601 bp, Homo sapiens
ttttttttttaaggagagcaaagttgaggactacataatttcttgacttataaagctacaataatcagtgcagtatggtatgctgtcagggtagaaaatagatcaacagaacagaatagagtccagaaatagacccacatgtatgtggtcaaagatgccaggtaagtcaatgggaacagaatactcttttaatattgttgaacaactaaataatcacatggagaaaaatgaacctcaatcttgacctcacactgcacagaaaagtctacttgaaatgggtcatagacttaaatgtaaaagctaaaactgtcagtcctttaggacaaaacatcaaagaaagtcttcacaactttggggtaggtaaatatttcttagacacataaagcattagccccataaattttttttcaataaattagacatcatcaggattaagatcttttgctcttaaaaagatgccattaataaaatgaaaaagtggccaggtgtggtggctcactaaaataaccttctgatctttagtcccatttttcatgttcttaaatattagaggacaatggtacctatattctgataactggaaagttattttcttttctga

SEQ ID NO: 9019 - DNA, 419 bp, Homo sapiens
tgaatgtatagcaatattttattaattctttctagcaggtaaaactttttttcctcccaaggtaaaacttgattatgttgtttgggctcctcctcgttatgtcaggcttaaagaaactaattaaattactgaaaagtaagggaagatcttttaataaattctgaagtgtcaacacagattagagtcttgatcatctaaagagtataatatgtaatactctatttacctaaatgttaatattttttaaatggacactgatttatacacgtgtgagcatgtgcatacatgcacggacatcccatttacttggttctttgtaaacttccgaatagaaaaagcagcacatttaagatggaaatataaaaggaaatgaactttctaagcttttcagattactcccagtatagcaactttcaaat

SEQ ID NO: 9020 - DNA, 555 bp, Homo sapiens
tttttttttttttgcgcgatcctacggctttattgacacctttcatcatgctcttaacactgatgttttcatgggttccttccctgtaatgaaactgagtgtagataatcaatttccataaagaaatgtacagttaaattaagaatattaaatcttccacacatgggctcaaataggaagtattttgtttagtaaaatgaaaattacttttaaaaaatatctgcagtgtttttgaaatgcaaggcaccaatagagagcagacattccagctgagtgattgtctggaaaaaaaaaaaaatggaaccggtcagtcctctgtccttgttaattagaatacttccttcttcgtgtctatgcaacatcttccagataatccgcaacatcactgagctgggatacagtcagatcttgtgtgaggtcatcaagcttatcactggtattgatgtcatctatttccacagaaaggtcttcttctatctcttcaccaatacttatctcacttttctctgagcgatggctggtactattaaaatcatcaacatagtcatcatcttc

SEQ ID NO: 9021 - DNA, 496 bp, Homo sapiens
tgcgactttcacagacaattcttcaacatgtctcaactttctgatttattacaaacatttctttctttaaacaatcagttaatttatttcaggacaagaatttaccagataacattctttttacataaattctgctccccctttttttcaaagatgataaccattcttttccaaagcgaacttcctttatgtctgtggactagactgtctaaggccacaagattagaagttactataatacatgttacactgttaacttttagcaaactttacttttgttgaaaaccttgtaagtttgagatttcaattatcctttgctattaataagaccttgtttagtctaaattaacttagaattggtatagatggctttttttttcttaactttgtatctctctctctttctctctttctttctctctttgactttgtctctctctttgactttccttttggattacttttattttgctaccactgtcaaagtgcagaattt

SEQ ID NO: 9022 - DNA, 831 bp, Homo sapiens
ttttttaacttgacgaaatgcttcatttacttcagcaaactttaaaaagacactgtaacttttataaagtgagcacattttccaaataaccatttaagaatataataaacagaatatccagattcttaagtgtacaagcaatagagagtgatgtctgatttccgacaacaaaagggaagatgctgggtcattcaaaggaaatgccaaacagctgagcattcagtgggtcagaaatgagggtggcgcgagaggtgtgaagggcaggagcgcgcagccatctctccaggaggcgggcagaggacgacttgatgcctatcgctttctctgcgcagagcacacagggaaggggcagtttcccaaaataagctgtgtgtgtaggtgcggggggttggggaatgacggacttttattatgtgctcatatcaggctgtacaaacaaccagcagactcctatacatacaaagttgagttttgaattatacatgtactttttttttctataaaacctacacgtccccataatactatctgcattagttttcctgataggaaaaaaagtattgcagaatgctcaaattagacttatttataaaaaagtaggttctgaaaaatctcagaaatagctcccagaagcagtagagttcataacctagaatttattgccttttctttacacccatctttctgtagctacttttgctcatgtaatcaggaaaaacacctctataaggtaggttgatggcacatattgattcatttggatggagttacatctgttgaaggcctaaaacttgtaaatgcgaattatacttattgatagctttgtggaga

SEQ ID NO: 9023 - DNA, 667 bp, Homo sapiens
aagcgacctctcgaagcaactgtagacctggcctttccccctggtgctcttcatcctttaccaaagagacaagcacttgaaaaaagcaatggtaccagcgcggtctttaaccccagcgtcttgcactaccagcaggctctcaccagcgcacagttgcagcaacacgccgcgttcattccaacagataattctgaaataatcagcagaaacggaatggaatgccaagaatctgcattgagaataactaaacattgttactgtacatactatcctgtttcctcctcaatagaattgccacaaactgcatgctaaataaagatgtagttcttctggacagaccacaactctaagaagctagtgctgctatctcatatatgagtattaaatatggtatgcttagtatattccaacctaagatagttaactacctgagaccagctgtgatgtttaaagacataaaggataaagtttacttttaaagggtttctaaacatagtttctgtcctaggaatattgtcttatctccataactatagctgatgcagaaagtccagccagtttactcatttcgattcagaatatttcaaatttagcaataaacaattagcattagttaaaaaagaaacatattcccaagggcagggttcgattcctagcctcctaatta

SEQ ID NO: 9024 - DNA, 499 bp, Homo sapiens
tttgtgattctttttttcattgaaaatgtcaatttagaaaacacaaaagatttcacactttattcagacaacactgagagaagaaaagggaagagtgagtaggggagatggggagatccggctcccaaggatttcaggaaacacagtggggcacctgatctagcacacattcagagggtagggaggggaagggatctagctatactctgggcatggagcagggaaggtcgtccttgctatggaggaaaggagagaggaaggacagaggaagagtggtcccccatctcatctcgacaatctcacaagacaggagtatatcgggacctagctaccagggagggatggatgcaagaagggattccaggatctaacagatccttgacactctggatctactctcaagaaacaacctccctcagagaatctggatctgggggaaatggtggtgtcagccaatctcctttagagaccccaaagcaacaccagtttggggttccct

SEQ ID NO: 9025 - DNA, 389 bp, Homo sapiens
caacatataggtactatatgttggagttaatgtgccatcacttctacatataggtactatgggccttttaaatctatataactcttagagcttattaaagttcctttatgtattatctcatgtgattctccccaagagggaagaatgaccattatgtaccatgtaacctcatgttacaggtaggtaactaatactgagagaagtaaaataatttattgaaggttgcatgtagtagagatagtaatgctcactaaacattccatttgttctacatttctcagcttccttaattaatttgaggccatgtggttaacaatggccaatgaaatgtgagtgaaagtgaatagagatgctaggtgcctgaagagcataggacagttttagacaac

SEQ ID NO: 9026 - DNA, 391 bp, Homo sapiens
cctttgtctctgaaaagacctttgaaacactttgcaccgtcaggacctggattctcaccgtgggctacacgaccgcttttggggccatgtttgcaaagacctggagagtccacgccatcttcaaaaatgtgaaaatgaagaagaagatcatcaaggaccagaaactgcttgtgatcgtggggggcatgctgctgatcgacctgtgtatcctgatctgctggcaggctgtggaccccctgcgaaggacagtggagaagtacagcatggagccggacccagcaggacgggatatctccatccgccctctcctggagcactgtgagaacacccatatgaccatctggcttggcatcgtctatgcctacaagggacttctcatgttgttcggttg

SEQ ID NO: 9027 - DNA, 1075 bp, Homo sapiens
ggttgtccaggactggttcacagacctcagtctttacaggttcctgcagacagcagagatggtgaagccctccaccccatcccccagccacgagtccagcagctcatcgggctccgatgaaggcaccgagtactacccccacctagtcttcttgcagaacaaagctcgccgagaggacttctgtcctcgggaagctgcggcagatgcacctgatgattgaccagctcatggcccactcccacctgcgttacaagggaactctgtccatgttacaatgcaatgtcttcccggggcttccacctgacttcctgggactctgaggtcaacttattcctgggtacccttcatggacagtgaagcagagagtgaaaacccaccaagagcaggacctggttccagcccactcttctccctgctgcctgggtatcgtggccaccccagtttccagtccttggtgagcaagctccggagccaagtgatgtccatggcccggccacagctgtcacacacgatcctcaccgagaagaactggttccactacgctgcccggatctgggatggggtgagaaagtcctctgctctggcagagtacagccgcctgctggcctgaggccaaggagaggaatgtcatgcaggggacctcctgggtccgcagtgtactgcgagggagcacagatgtccatcccccgctggggtggagagcggcagcaggcctgatggatgagggatcgtggcttcccggcccagagacatgaggtgtccgaggccaggccccccaccctcagttggggctgttccgggggtgactgtgagcgatcccaccccaaacctgagatggggtagcccgtcctgtgtcctccacagggacaagcagtgggaggagtctgaatggtcaccaggaagcccgggctccatcttgacctcctttttcagggacaggagcaacaggcccctcttccctgactctaagcccttccctgtaaggtgaggcagggtctggagagctctttattggaacagatctggtggttcaaataaacacagtcatgcaaaaaaaaaaaaaaaaaaaaaaaaa

SEQ ID NO: 9028 - DNA, 617 bp, Homo sapiens
  misc_feature (1)...(617): n = a,t,c or g
ctgagagcaggcatgcacagctctgtgcacctagaggaggctggcattctacgggctggtcccaggagggcctgatcagcagtggccaacagtatccagtgcaacaccagaaccagaggcaggagaagtgtcccctccagtcggtgcgggtgtcaacagcaacagctggacctttaaatacggaccaggcaaccccaaacaatccggtcccggtgagttgcccgacaaattcattatcccaggatctcctgcaatcatctccatccggcaggagcctactaacagccaaattgacaaaagtgacttcataaccttcggcaaaaaggaggagaccaagaaaaagaagaaaaagaagaagggtaacaagacccaggagaaaaaagagaaagggaacagcacgactgacaacagtgaccagtgaggtcctcaaatgggaaacaagccacttagccagtttttgtaataatgggcaaatctctcccatgtaggcaattccctgctcctttttcctatcttacatggggccctctttaggagaccttcaggaattttgcaggaaagtttccctgtgtctgttttgggacgcttttaacagggttttgttcgtaaaagnttta

SEQ ID NO: 9029 - DNA, 416 bp, Homo sapiens
ctaaaaagaagccacagaaatgtttaaaaacttcatcgacttagcctgagtcataacggttaagaaagcacttaaacagaagcagaggctaattcagtgtcacatgaggaagtagctgtcagatgtcacataattactttcgtaatagctcagattagaatggctaccccattctctagacaaaatcaaattgtcctattgtgactcttctaaaaatgaagatgaagagctatttaatgacacaccttggattaaaacgggaatcacatcttaaagctaaaaaatgaacctgcaagccttctaaatgagtcactgagcatcactagtgacaagtctcgggtgagcgtaaatgggtcatgacaagatgggacagcaacaaaatcatggcttaggatcgacaagaagttaaaaaacag

SEQ ID NO: 9030 - DNA, 377 bp, Homo sapiens
ggacagttgtctttgattaaagccccaccaaaacccattttatgtatttaatgtacatactattcatattattatggcctgtaaacactaatatctgagcaatcaaactgttttatctaccatttttgatgaaatttgaataaagtttaaaaacgtgtaagcctttgaacaaatgtatgaaagctttaaaagatcattagcacttttattttgtttacaaataagctgccatttaaaaaaataaaacctcactacttgaacataaagctcccaaacaatattgtattaaaatgtactatattgacctaggaggatataggaaattatattcacctgattaactggagcagtttcacatagtggaaatactttttgct

SEQ ID NO: 9031 - DNA, 108 bp, Homo sapiens
ccttctttattgtgtttatttgaacatgatatgagtttccaagatgaaatgatcaaaaaagataagtaccacaagaaagtttttttgtttggttggtttttttgtttg

SEQ ID NO: 9032 - DNA, 675 bp, Homo sapiens
caggcccttgcctttctcggaaaaagtgtggggccacagcccttttagggcattgcatgcaggtgggcctggcttcacccctacctgcttcctccccaccgcagctggcagagggggaggtttggggccagaccccactagctgggagcctgggggctcctctaaggctgaggaaggaaatttggccccaggttgttggggggtcttgggtctcccaggacggaaggcccagggcagggagggggcatgtggttgggctcctttatctccctgtgtccccttcctgctttgagctagggggctgactctgcctcccaggacacaagtctccaaagtgcctgtgagggcgggccctccgcaccctctgccctctgcctgggcaggccaacctcagcccacctgcccagaggccctccctgtggacaccccctcacctatttggccaaacaattctgggttgcagctttcaggggccatggcttgggaagcagcccctgcagattccctcagggccccgaggtcagggtttgagggatgagaccaggtgatagtgggggaggggttacttcctttgttacctagcaagtagggctatttccatcggtattttaaatgtggggtcacagatcttttggggagggtgtgcttggcagggggcctcttggagccaaaggg

SEQ ID NO: 9033 - DNA, 1185 bp, Homo sapiens
  misc_feature (1)...(1185): n = a,t,c or g
catttcagcttaattttatttcctcttataaatgggcacagcacaggaagtgttaaaaaacaaacaaacaaacaaaaaaaaacaaaaacaaaaacaaaaacaaaaccagttccttcacaaggctggaacagggagagtacccgcagtggggcaggcgcttcggtctcttttttccactgtctttttcttttgtttttcttatttaaggttttggccatgaactcaggacaggtatggttaataaacaggttacaggggagagaaggggcagggaagtcctgggggagggaatggcagacccccacccaccccaggcaggttctgtacaggagaaaggactcacaggagggagggacactgtcttcagggggctctctggagccacgctgcctacgaaaaatatttacatgcatttgccacgctgagcccagggtcactgtggtcccaggcaggcacctgggggatgctggggccatcggctctcagatggcaactcccagggcccagtctcgatgcctctgtaaatctgtacagtttgcgggcttctatttacaggcaagaggcctggggaggcaagtccagggttgtagttgttgggagaaaaaatccagagaacacaggaggcagccactcctaccccatgaggcagagggtctgctccctgtgtccaggggcccccaccaggaggcctgacaggcggctttgccaaccccaggggggtttgggccaacacaccctaagccctgcccagccctagttgccacccacatgcctccagcgatcaaggggaccagtctttcaggcaaggcccccatctggcctcctggcctcctggagacagggtctgggctctccaggtcctggcctgcctcgtgctctggcagccaaggccccagaggctctcaagccacagaagctccctctcatttggaactccctgtgcttccagcaaatgccaaagcccctcagaacactccattacaggcaggggtagggggacatgagggccctgcacccacattgcacctgggagagcctagctggtcctcactgaactctcttggactgccttgccccggtcaggccggccagggcagatttgggctggtcagactcctcatcctcaggaggataaagcctggacatctgccttgggtccaggganccatgaacaagcccctggcc

SEQ ID NO: 9034 - DNA, 752 bp, Homo sapiens
gagaattgtacagtttttgcctcataagcaaacttgaatcacctgtgtatgaacagggaatgaacacattgcaatggctttaaatgctcttttatctcgttgtaaaggtaaggcaagattttgatgtagtaggatgtaggtaatgtatttaaatatttcatatgaccatatcgtgtccaaactcagtctgagaatgtgacagctttccgcctaactagaatgcagaccagaatgagttcaactcattctgtgcaacttcacagggggtttattagaatgctcagtgtagaggacattcctgtcatccatgccaactacctaactcgttatcagagctgataggagcatgggaaaagtctgtccagcgattcagttgttcccctccttccaaaaacagcctccaataccacaacctgaaaaggggccgaatgggttattttacagcatacaagcttctgctccagtatgataatttttaattgcctaagaatcattggatcagacctaaatgatccatctgcatttttataagaatggatctttctttgcccttcctctcctagctgctagatttaactaccttttacaaatgttacaaaatgtattttagaggcgacatctctcaagatgacctgagttccttcctgccaactgttccacctagaatacaagtagagaagagcactggctggcaagcatcaacaggagtcttcttcccaacacgagcgcatccatgtcctgagaaaaagtct

SEQ ID NO: 9035 - DNA, 804 bp, Homo sapiens
atttttggactacggtattcaagaaacaaatcgacaatctaaggacaaatcatcagggcatctatgtacttcaggacaacaaatttcgcctgcttactcagatgtctgcaggaaaacagtatttagaacatgcatcctaagtatttagcatttaccgtgtggcttaatcagaggtggcttatcaaaccttgggaataaaaagtattgtaacagctgaagtgtcttcaatgcctgcttgcaaatttcaggtgatgatacagaagctgtagaacatactgaaatgcaaggcttcaacagtgtaaaagagataaattattcatgtaaaagtatttcaagtagtgatgatttaattacattgttcgatgtttgtacaggagtaagcatgtatttttatcaatttaacacagatcaaaggagatgaagggacattctgccatgacatacacttaaccaaaactattcaaaatgaaaaccggatttcaaataaccagacaccaagatgcagggcccttattttaaacctttttatttggttagagtgatatgtatttagccatagatggagaaacaaagctcagggtttgttgaattagcatgagagaaaattatgtaccaacagaattatttgtgagaagaatgaacaaattttgataaagtatgaatttgttttattttaaaaagcaaacatactaaattttttttattttattgcttataatttattaagaatgtttacacctgtataaggatttcatatatacattgtatgtgtgtatatataaatacatatatgactgcctaaaa

SEQ ID NO: 9036 - DNA, 463 bp, Homo sapiens
ttttttacacaagaaagtgctgcttacattgttgttttgtgttatttagtgatttgttcagcgctcatctcttccaccagactgcgcttcctgaggacagggaccttaaagcacctcacatagggtgcgcgtctggtacactgtcgccgagtaccagacaaccagtgtctcacacgggggaagacgatgaagacagcaatggcatccttgggaagatgggcaggagaccccatgacacctggcacctgggcctaagctgggaggccagcggcgtccccaggagaccacggcccaggctgggagcttgaccggccagacgcccgtgggtgggcctgggccctcccgcctgggagcctccagtgtggcgcctggctctgggtgggtaacaggagctacaggccagcaatgcccttcctgtcctcggcctggctcaaggactgggtgcagagggcatcagcgatgc

SEQ ID NO: 9037 - DNA, 1255 bp, Homo sapiens
cggtttaaattgaactttattaaaataggtgccagttttcctctctcctagttccactgatgagctaggcccagaactatgtaactttgagccaagtttccaaagatggtaaagctaacaacagcaaagtagtaaggacaaatcggtcacttttggtaatgacacacaaattaaactttcaaaacatgtgcatagctttattcatctacttagatctaaccttttcacggagcttcggcaaaattcgagtgtgcaaaatgcatttctaaaacgtaatgccaagcaaagctttcacatttacactggcaggaaatacagagagaaactaacaagtcacattagggaaaattcagatcttttttttttttaatgacaagaattgcacagtttattattttgagacaattgttgcagacataaatatttaaaattttctaagcaaggtgcttttaacaaaatttttaaagttggaaagagctgataacttggatcatagctcacacagaattccaaattaaagtggactccattatctccctatattttgcaaacaatgctttgtataacacttctttaaaacactaaaagagacagcaagctgaaacttttttcaaagcacacaagaaatgtttacttgaagaaggtgctgaggggagaagggagtgaagaatccttttactatttcccactacaggacagccactaacagactaagaacaaaaaagatacaacaaaaaaagtaaatcacttccccagcttataaaatagttccagtttcgcaagatctgtaactttaaacagagagcaccagttgggcaatagaatgagcatttcatactgcataaaaattagtgaggtggtaagaaccatcgactatctcaggcattactacatggcgtttcccaattttttttttttaatatacatgcaaggcacattgatataaaaatagatctctggccaacaaatatattaaataagcaaattaaaattttgggctttgcgatattggcaacatcaaaatataaccagatagctttggccccacacatctttctcattcctccacctcatttggtgtttcccacccattattttgggttcaatcaccttcaagtttgggtatgtgcttgagaaatgacttttcttcttgtcaagtagcattcactaaagttttcctttgctaagtaaaaagacaagagaaacagctggagttttgattgatttgatttaaactaaatctgattggttcagg

SEQ ID NO: 9038 - DNA, 555 bp, Homo sapiens
  misc_feature (1)...(555): n = a,t,c or g
ggttaacagtctatttactgcacaattaattgttcactaatcaaatagaatgtggtaatttttcagactttatgatctgtttccaaaattggcacaaagtgctagggtttatatacacttatcgtaactgtatttttgtgccttggttttatcatgtcaatgcactgtactctgtaaaagttttgcagacaaaatagaaagtatgataatccgtcagaagtatgatgtaaaactggaatcctctgtattttttaaatgttctaaaaattttatcgctgttaaggtattaatcattcagtattactaatggaatagaaattcatacttttgtatggacaacaattcaaattgatattgcatttatagcactgtaagaaactttcatcttgagcaactttgtagatgatgggtgttttattttcaatcgccatatttgatcagtcattggaaaattgggccccagtgctgtttgttccacctccgtatgtaaaaactgacagtgagacacaacgttctgaactgtgaggggtgtcccaggaaaaagaaaaacnggaa

SEQ ID NO: 9039 - DNA, 575 bp, Homo sapiens
ttttaagtaaacaaattttagaattttcagccatttcaaaaatgattttatttttcaagtcttaaattcaatattttacacctatgttttgagggctaaaaatatgaaattatataatgtatgatacagggttatcaaatatctaataatttttgaaattaggctcttgtttttggtttttttgttgttgtttttacaggatttcaggttacaaactgcaaagtttatgccataattaagtatggtatggttgccagaaaagcctaaaattactacttagaaaatttaagactgtttacccccattgtcttgtacttgcgagctaacttgtactattcttgtgaaagcactgtcatcttttagtagcaaattttgataatgtttctcgtggaaaaaaaaatcagtatctatctttagaacaatgtaattataatgtgggaagtgtgcatgaatgagagagagtgtgtgtgtatctgtgtgtgtgtgcgcgcgtgtgtgtgtcttttaatagtttatgccagcaatctttgcttgaatgtttaacgatgccttcagtgtgatgctggccaatagat

SEQ ID NO: 9040 - DNA, 688 bp, Homo sapiens
gaaacatttggaagaaagggattttgccctagaataacacataaggaaagcagagaattagagtatattgttactgaatgttccagagacttctagtgattttaacacttattaagtatagcatgttgatggggagatttgtttctctaaagatcactttgttttattaaatcctaatagaaaatacccttgaaaatcctatctcatttattcctgtaacaaatttattgagcacctacctactatatgccaagaaatgtattagccatcaggcagagagctgttcaaatggtagatatgatctgtgctcctgtgaaacttctagtggggagagccaaacaataaacaatattcctttttaactctaggttaatgcagaaatgggataaagcccatgttgcttttggggaggagggtgagttgtgtctctgaatcacatgtcatttcatagggggaaaaatgccccaaatacttagggagtaggctctttagcctatgtccggtcggcctcagcttaagttgttttccctcccactggctgggcagcatatttgtgttttacctggtaaaacagtaaatttcgtaccttctataattggcattcttcaaagaggtagaactttgatttttttgtagaatattaaaacaagctttcttaggttaaagaagtgatcttactacgaacagc

SEQ ID NO: 9041 - DNA, 1446 bp, Homo sapiens
tttttcccagtcacggacgttgtaaaacgacggccattcggtgggcgtgctgctcgtccggccccggcccggaaccgggctgggtagagtgatgcggaccctcctgctggtgctgtggctggcgacgcgcggaagcgcgctctactttcacatcggagagacggagaagaagtgctttattgaggagatcccggacgagaccatggtcataggaaactaccggacgcagctgtatgacaagcagcgggaggagtaccagccggccaccccggggtttggtatgtgtgtggaggtgaaggacccagaggacaaggtcatcctggcccgggagtatggctccgaggggaggttcactttcacttcccatacccctgggtgagcaccagatctgtcttcactccaattccaccaagttttccctctttgctggaggcatgctgagagttcacctggacatccaggtaggtgaacatgccaatgactatgcagaaattcctgctaaagacaagttgagtgagttgcagctacgagtgcgacagctggtggaacaagtggagcagatccagaaagagcagaactaccagcggtggcgagaggagcgcttccggcagaccagtgagagcaccaaccagcgggtgctgtggtggtccattctgcagaccctcatcctcgtggccatcggtgtctggcagatgcggcacctcaagagcttctttgaagccaagaagcttgtgtagctgtcccaggcgtcacaacccatcctcccaggctgggggagaaaggacctcctggaactgacttcttctgtcaggaggactggtttccagccatacctgttctggaagggagaggggctggaggcacccacaggcacaagctgaaggcagcagcttggctaatactgagcaggtagtggggcaaattcctgccctctctctctggcctctgggccgtttggtagtaatcacccaggggctggtaaagcccctcctcttggcacctcagaatcacagtgttactgatcagggatgtgaggctgctgttgggggtggggggaggggaatgggcaggcaagccagtcttctgtcttcctttgctaacttagggttttgagcaggttggggtatggtgcctgtcatacccacctgccaccctgggaacctcactgttctctctttcagcctagacctgctgatccagggtgtgtgtgagttgagggtgggtggaggggtttgcagtgtgggaatgtggccctgcagttgacctgagctgcttcacatggttgtccattctggggcttaaagaactgggaccagaccaagtagaggccttggtgctggttggggtggggcctgcagagtcttagttactgatttcattttcaataaatgtaggtttgttacatgagtttcccaataaaaaaaaaaatgacttcttgtccagtgc

SEQ ID NO: 9042 - DNA, 403 bp, Homo sapiens
acattggcgtcaacaaagacagcctaatgcctctctggtggaatggatcagaacctctgtgggtcactctgaccaaggccaaaaggaaggtctacatgtactactggccaggctgtgaggttgagattctgggtgtcagacccacctactgcctagaatataaaaatgtcccaacggatatcaattttgccaatgcagtcagcgatgctcttgactccttcaagagtggccgggccgacctggcagccatataccatgagcgcattgacgtggaaggccaccactaccgggcctgcatctccgcagaggaaagatgccctcaaggctggtagacactgtcctgaagtacatgaccaagtggatccaggagcggggcctgcaggaccgcctgaacgtcattatt

SEQ ID NO: 9043 - DNA, 598 bp, Homo sapiens
ttcccttcaaggtcatttacttgtacgagacagaaaaagatagcattggggacatgggatgggggagggagggcaatagtggaacgaactttccatgggaaactttcccttttgtaagttgagggccaggggtagggatattttttagtttgtgattttacatttatctgtacatactttttcaagattgatcatttttataaccatggttttcctgaaatcctcaattcatcaatatgaaggaaatgaaccacatagactttatgcaataaataacagtgcaagtgagtataactctaactgatgttccacaaaacatttttgatttcaggtttgtatgatgtagtttttaatcgtacattttcatatgcttcaaactaacacatttttaaagctttcccccacttttctctctatttgtattgttagccatcttgaagtgatgttgtttaacataaattgtactgttgaatttggctttacgggtgtaaacactgatggtatatcagtatctgagaccccaaactctccaaatactgatggtgcattttattcttgaagtgaaatctgtgcaataaaataacagactgtctgcaaa

SEQ ID NO: 9044 - DNA, 1936 bp, Homo sapiens
tgggatcataaggagcccttaaatacttgttattgactggggttatttttatgctgtagcaaatgtgacaggctctttttagcaaaatttttgaaaatttttttggtattactctgaaacaaaatttaagttggagtttcagggatttagggagtagttttcattctacatgaactgaggtaatattatggtaactccaatatttggttaaaaaaactatacaaatcagaatagtactaaaatactgtagaattttagcatttttattttgcactttggtgtggattgaggtgttcagaaataccaaccataaaaatgtaatctagttggcaaaggtgtgcgctaaaacacggaaccgaacatgcattgatttggataacttttgagggtttttgtcaaatagcatgtgaagagttacatttttcttaaaagattggtggtcccaatgtcagagttcttggaacagataactgaatgatagattttttttttttaaagataaaactttacaacctgcacatttgttatgcatactaaatggtgtgttaaaattagggtttctttgcctctctacactacactaatctgcctaaaggtggttgtttcatatttataatgctaattatcatacctacctactttaaattttaggtagaaaattatctgatttacatacaaacatatttttctcacattgagtaatatgcataatgtagttccaaatgtatttcattactatagtcacaatatccaactaaaaattacgctatctagaattgtaccaaccaaaatctcgtattggcagatcttgacaggctggacctgcaagatgtggcttgaattttaaccatttattacataatctctagtgatcatgcatctagttatcataagaaataatttaaaaggttttgttgctgaaagcagttaagtggtgcagtaaaatacttaagttattcaaagaatgttatctttcttgcaagagtaatttaagcacatgggaaagattctagactttttgtttcttgcaacaacagtgccctctgctgctagaaacctttttctacttactatcatttttattgtggcttgagctcagtcaatctggtgcagatgaggctggacaactactaaccaataaaatcaggagtttgtacaaaagttaaatggaacattataattattttaagtaatgttaattgaaaaaattttttctttttgacaatataaaaaacattttaaatttcctagaaatgtcttcagggtaatgccaatttaagatctctcttaacttgtggccaagaaattctagattttccagctgactttggtataatatatatttatcaggaacttctctcagcagagagtacccattcttcgagttcaaagcacaattttaaacatgtaaaatggatatataatttgccaaaggtaattaatttattctttttttcttaaagaagaaaaagacattggttgttgttacaaaaagtctaaattactgttggttgaaacacagcagctgtggagttcagtccaggcatgaagactaaatctgctttacccaagtaaggtgtaaggttgcatgtttcagtcctctaccatcctgcactgtgagcagcactatacctgtgcgttgtctgaaagccttccgtatattctccagctaaatggtcgtctggtagcctttgcatttaacaaactagcatgaggctttttatatctaaatgctacgtgatagacaatttcagctagccacatattgtatgtatgagattcataaagactttcaatcatttcattttcagacaactgaaattttgtttagtatgtgaattctttttttgaaatgtatagtgaataggatgttgcactggtggcaattcatcatggagcataataaaattaatttgacccaaatagaaaaaaaaaa

SEQ ID NO: 9045 - DNA, 424 bp, Homo sapiens
gctgctctcagcggcggggctcgccagcgcttcagtgggcggggacgcggcaggtgactccagaccaaggaggatgagctgctgtccctggaagagaacggatggagggaagcagctcctacgaagttccctctgtggctgctgctgatctggaggagggtgctggtcagactaggagcttgcctgccaccccctccaaagatgttcacaagggtgttggaggcatcatcttttcctcctcaccgattttagacttgagtgaaagtggtctgtgccgtttggaggaggtctttagaatccccagccttcaacaattgcatctgcaaaggaatgccctgtgtgtgaattcctcaagatttctttcagttgcttccgaacctgacttggctggacctccggtacaatagaattaaagcgcttcctt

SEQ ID NO: 9046 - DNA, 304 bp, Homo sapiens
ccaacattaaatcagaaatcaagcaaatgcttacccaacaaatatttgagccctcatagctgggtttaagatgactcagtgtgcaaaattattaattccctttttatttctctacctgttgaccactgttgagacaccaaatttggagtgacaggcatcagaggattacaacagggttggaactgacttctttaagcaaaagcaaagggtcttctgtgaccacaatatcatcatccatatgccttttcacataggatgatgtgttttttgtcactccatgggggcctggtctgccattttcccc

SEQ ID NO: 9047 - DNA, 824 bp, Homo sapiens
gcgtccgcggtaacctggctgctcggggagccggtgctgtggctgggctgccgcgccgacgagctgctgagctggaagaggccgctgcggacgctgctcggcttcgtcgctgccaacctgctgttctggttccttgcattgactccatggagagtatatcacctgatttccgtcatgatacttgggcgtgttattatgcaaataataaaggatatggttttgtctagaacaagaggtgcacagttgtggagaagcctcagtgaaagctgggaagttatcaattccaaaccagatgaaagacccagggctcagccactgtattgcagaatcatggatgaatttcagcatatttcttcaagaaatgtctctttttaaacagcagagccctgggcaagttttgtctcctgggtctgtagtgtgtgcacattttttacgatcttggggaagttacattcctggggttatactcagctatctactgtttactgtgttgcatttttgtgtccattgtttaaatgtaatgatattggacaaaaaatttacagcaaaattaagtcagttctgctgaaactggattttggaattggagaatatattaatcagaagaaacgtgagagatctgaagcagacaaagaaaaaagtcacaaagatgacagtgaattagacttttcagctctttgtcctaagattagctcacggttgctgccaaagagttatctgtgtctgacacagacgtctcagaggtatcctggactgataatgggaccttcaacctttcagaaggatacactccacagacagacacttctgatgatcttgaccga

SEQ ID NO: 9048 - DNA, 363 bp, Homo sapiens
cccacgcgtccgaacttatgacatgatgattcagtccctcaaggcgttgattgaaaatgcagatgctgtatatgaaaagatcgtacattgtcagaaggcagccatggaattccatgaacacttgcacagcataggcaccaaggaaggtttgaaggaaagaaaactacaaaaagcagtggagagctttacctggaatattaccatcttaaagggacaagcagatcttttgaaatatgctaagaatgagacattggagaacctgaaacaaatccattttgctgctgtttcatgtggactgaataaaccaggcaccgaaaatgctgatgtccagaagcccgcccgacttggaaagtcatacccgaa

SEQ ID NO: 9049 - DNA, 539 bp, Homo sapiens
ggaagagaaccagtaagagagaaaaaaatacacaacatctatataaaagaataaaaatataaggataaatttccccccatagaccttattttcctcttcgcatccttcagaagccctgtcagtgatactctttcctcctgatgggctgtgggctttctgggggtagggtcacaggcgttgtcatggttaagtgactttatgaaacatctgctctatgaaaacctaagctgtaaaatctaaaaaaagaaaatccaccccctacacattccagccatttctcctctctagcacgttgggcctcactggccgtgggtgcatgactcacttttgatcatgtttcacgtcattgggccccatctccgatggccagcgtgatggctttcttgtacctcttcaccaggtccaccaccatggccttctgcttgggggtgacgcggcagcagatgactgctgctgcactcgcaggccaggtccacaaagtttttctgccgatgctctttcttagcttctagcctccttttactttgggtccgcatccg

SEQ ID NO: 9050 - DNA, 227 bp, Homo sapiens
cctggggagactgcagtacctgtcccaggtcctcaaagagtcgctgaggctgtacccaccagcatggggcacctttcgcctgctggaagaggagaccttgattgatggggtcagagtccccggcaacaccccgctcttgttcagcacctatgtcatggggccggatggacacatactttgaggacccgctgactttcaaccccgatcgcttcggccctggagcaccc

SEQ ID NO: 9051 - DNA, 522 bp, Homo sapiens
  misc_feature (1)...(522): n = a,t,c or g
ataatatatgtgctattcaaaaaatgtgatcatttaggacattatcacaagttgctatggaaataactgaagacttcctcaggagaaggaaagaaaatgaggaacataatgatagagtcggggctcgatgcagctgaaatactgaatactgaaatactagaaaccaacaaaactggtttctagaattctccagggatttgggcttgggaaacttggtaagaatagtttttatttttgaacattcaactttggttcttcaaagtaatctttaaacatgggaatatgttttcaagacaatttataggacatacttatgtagttggtgaggtcttctcaaaagtatctaccnttgttagataataacaagtgattaaggaaaggggaggatatgggttttatactcctnaccaatttccngtgcccttcttctgtaccccgggggtgnttcctttactcttccctttaggtaggaccttgcnccttggggcncgtctgttctagtatttggggangtgtttatgc

SEQ ID NO: 9052 - DNA, 903 bp, Homo sapiens
cccacgcgtccggggggagactcctgaacccccatcaggtcctgtctacccatcctcccttatgccacagccggcccagcagcccagctatgtaatcgcctctacaggccagcagcttcctacaggaggattctcaggctctggccctcccatctcccagcaggtcctccagccccctccctcaccacagggatttgtgcaacagcctccgcctgcacagatgcctgtatattattacccatctggtcagtaccctacctcaaccacgcaacagtaccggcccatggccccggttcagtacaacgctcagaggagtcaacagatgccacaggcagcacagcaagcaggttaccagccagtcttgtctggtcaacagggattccaaggcctaataggagtgcagcagccacctcagagtcagaacgtgataaataaccaacaaggaactccggtgcaaagcgtgatggtttcctacccaacaatgtcttcttatcaggtgccaatgacccagggttctcaaggactgccccagcagtcataccaacagccaatcatgctacctaaccagggcaggtcaagggtcactcccagccactgggaatgcctgtttactgtaatgttcacaccgcccacccctcaggaacaaccttaggctgattggcccacactgcccctccagcactgtcccagtggatgtcagctagctgcagaacaaactgtgcaagtatgagcaatgctggttggcaggtcaaattctgagagctctggctgtggtacatttcttcagatatttctcatggcctttgatggaagaggaacaaggtgggaaaactggctgaggacttaagtattcactcaacactcaaatgattgctgctggtattctgtaaaaaataaacaaat

SEQ ID NO: 9053 - DNA, 501 bp, Homo sapiens
tttttttttcatattcaagcacagtataacaaggccagagtgcctgctggacaaggtccctgagttagggcatgctctcttctagtttttctttctatacatcaccacctcacagatcaccatcaccactgtccattcacatggaggtaactcctttgagtttccactgctatgcccttctgtctcttatgccaaacggcacagatagattacagacgaatgattgataaagacagatatatagatgatagataaaaatggactgatagattatttaacaatagatagataagatgaatttagatgaaagcagaattggggaagtttgagaactaccaataacatcagacattaggatacgaatcaaggtatttctcagaacagaacacttactgtaccacataagcttatttatcttatatgtacattggtatgctgtttctgaatttttcttaagaccacagaaagacagtaactatgttttagtgatggtatgcacta

SEQ ID NO: 9054 - DNA, 475 bp, Homo sapiens
ttttttttttttttattggactgtaggtttttattaaaacaaacatttctcatagctctaagcaaagcattagaattcatcaagcggactcacatcttttctctgcacagagagggctgaaaagggagagaaagtcccttatgtatgtctagatttggtaaagcgaaggatttcagcgaatgagtcactgaggctatacacgtttgcaaattgtaaggcactggcgggcagagagcacagataaaggacttctggggtcccccatcctgtccagcaacctcccagctcacaccttagcttctaccaagaagggtgaacacagcatccctgctatcttcactcagaccccagaagacacaggaaaccgcacagctccactcccaccataacttattaggagataagtcacattttatcaacttgccatcgcgcctcctatagattatacttcggtaaacccaatctgtataaattc

SEQ ID NO: 9055 - DNA, 545 bp, Homo sapiens
  misc_feature (1)...(545): n = a,t,c or g
gtatgattataccatgagagacaggattaatatagaagatggcaaggcaaatttctaattagagggaatattaattttctacaaaataaagtttgttcatcaatacaaacctgctttcaaatcaaatcagaaagacatccttcggaatgtgttcagaacccaaacatcatgtcaatggcaacagaacagtcgaacctttcccagagggaacacagatggctgtatttggaatgggatgtttctggggagctgaaaggaaattctgggtcttgaaaggagtgtattcaactcaagttggttttgcaggaggctatacttcaaatcctacttataaagaagtctgctcagaaaaaactggccatgcagaagtcgtccgagtggtgtaccagccagaacacatgagttttgaggaactgctcannnnnnnnnnnnnnnnnnnnnnnnnnnnnnnnnnnnnnnnnnnnnnnnnnnnnnnnnnnnnnnnnnnccgctcggcatctacccgacctctgccaagcaaatggaggcagcctgancttcnaata

SEQ ID NO: 9056 - DNA, 361 bp, Homo sapiens
atgggtgtttcagcttcaattgaccaatcacataacagttatatgtttggggggaaaaagaaaagtttctaaaaaatgtagcccattacatatatgggtatgaaagcagaaaagtggaggaggcagggatatcattgacaaacacctttgccagtttctttgtattcgtgattttttgtgctattaaatgcagtattaaaacaagaaaagcccacctgggctagtgaaaggagaggaaataagggggcttgtaaaaggggagccgtcgctccaaaagtagagaagacaagaaatgctgtaagataagcaaccaacgcagacaggcctcagctaagagtatagtgtgtgtgtgttaaaaaaa

SEQ ID NO: 9057 - DNA, 1108 bp, Homo sapiens
gtggtgggtgctgtgaagagtaaacattactcagtggaaagctaagttcagaaggtactttgtttttcctcccttgccttaagtccttggtatttataatcaatgctgaaccttctatttcactaccgctccctgttttagatattcagatttaaaaggttttcaaagaattactttcttccatgttcaaagctagattttactaaacacatgtatcacattcatatatattgtttcttggccccactgccaaaggaagtcagtcagtaatttcacaaccgttatcagagtttggaagcagaaatagctgttaactaaaatctcccactgctcagactactttctgccctaatggccattactatccagtctgtattgctacaagggacccactggtaccccttttagattctatcaaaaggaacagggttttcctagaggcaggcagcctggtggtatggcacagcagaagcttactgctaatgaaatggggacctccccctcccttgtggtttcagcacagaacctgaatgccaggaaaaattcctgggccaagaagctaaagctaaagaaaccttccttttttcaacgtttttttttctttcaaactgtagggtcacttttgattgaggcaaaggggtcctactgtaagtggaaaagactcactcccctaacataagttttcactgtggtgggatggtgccgcccgatatgcttgatatgcttttccttccacatgttaagctaggaaacctaacaggatgtcagcagggcagttaactctggactcagagccctcaagggcatgtggcagaacctcatggacatcacaagaccatcagtctgaatccaggtcgtgggggctgtcatagccgaactccttctgcacatccagagggtacttgctccacatccgctgtctgctgctgcctctttcctcctcactcaggctgttgtagtcagcagagcctagaatgacatcccgggagtggattctaaatgtgattttcctaggctactgcaggagccccttctcttctcagaaaggtctgtttttgttcccgattgtaatgcaaaatccttgctcaataaataaaaaaggatatag

SEQ ID NO: 9058 - DNA, 1252 bp, Homo sapiens
agaggagactgaaaaagataatttattccatcagaggcatcacaattacagattacagacatttgcaagtaaataatatgcagggttagagcgctgcgttttaacatttaacattcatgagtaaacagagatggccggtgggtaaatatcttgccaaggtggttcctggtattaagccttttgagtctaagatgacaaatccctaggggtcaggtggttttcccgcacgaactcttgtcaatgagaaatccctcagccccttttgtcttgggtctcacagctccagaagtgagccgggccagaacgaagccatcctagagtccccaaggacagccctcccgtggaccccggctagggcccccgagagtctcatcctcaggagtgcgccagctctgggcctggcgtgccggcggggtctgcagccacaggtcccgcgagtcccggacacttccaggacgtggtctcctggtgagacagctcctccgggtaccagtctcgactcctccgggcagcgacaacaaagtcgagtcccgccctccacgttcgcctgtgcgcgctcttgtcctctctcggccgcgccaactctggggcacagctggctcctcctgggggcgatgcagcatccaccagggcttccgcccaccccgggccagggcgccgaccctccctgccggaccctctctagaaggccgcgggtctgggtctggctcatcccttaaagattccaagattgggcgcactctgagctccccaaacacaaaatgatgggatccctgcgcgtgcccccacgtcacagagtggtaggggtccaggggcattctaattataaacggggctcaatcacaccccaaaattctaaacgcctccacccctaacctgcaggtgcaaacagcacccctatttcattgccggcagctactttgtactttcgtactgatagacaaagatagtgacaacaaagacggaaagaaacaagcatcgaaagctacatgaagggggtgcagcgctgttctaaaacacaaaatgccgagccccgttttccctttccctccccgctcggtcctgcgcccaccccgtcccgcgctggccactcaggcaagctgtaaatggatataggtaaagatgcaggaggtgatggagaaggcgatggctgcgtagatgaagatggagaggtgcggaaaatggtcgagatagcagccctcgtccagtggaggcgcctccttcttgggcggggggcgcgatcctcgtgccg

SEQ ID NO: 9059 - DNA, 437 bp, Homo sapiens
  misc_feature (1)...(437): n = a,t,c or g
ttttttttttgtttttcaataattctggagtctttggttgaaaggaacaatactacctaaggacaaaatactattattaaaaaaaaagtcttctagtgtatattgtgtaacacatttctggagctggtaggaataaccatttttatttttctgtagtgccatctatacaaacttttactgtttgaaaactgagatttaagttgcaaactttggtttcttgaactctgacatataaaaaagtctattaagttatcaatgatcatttttgcttttcccaattgccatttcaaaggctatctcttgtttgttatattgactaccataatagtagagtgtttcccatagacgggcagagagacagagtgggtgagcaaaagattatgtgtgtttgagcccgggaattccggaccggtaccgcaggcgancaanggnntcaa

SEQ ID NO: 9060 - DNA, 899 bp, Homo sapiens
ccagggatctgagcagctccttctagcatccttcatccttcaggtaccagccatccagacagtgcttgagctgcagaaactgagaccagacctctggcctggccctccccaggggcctcctttcctatagtcactgcttctgcatcagatactttcagctgcaactccctactgggtggggcacccatttcaggcagaaggttttggtaccctccactgaccctacacccagggctgctactgccgcttgtggcttcaggatgaaaggtgagaccccggtgaacagcactatgagtattgggcaagcacgcaagatggtggaacagcttaagattgaagccagcttgtgtcggataaaggtgtccaaggcagcagcagacctgatgacttactgtgatgcccacgcctgtgaggatcccctcatcacccctgtgcccacttcggagaaccccttccgggagaagaagttcttctgtgctctcctctgagctcccctgtcccttctcacaactcctcccttttccctctcctgggcccttccttaggtcagtaattgttgtgagccccttaggctccttgcatcccatccctaacccttgcctgaccatgtgaggttatctgaagcacaaggcccaccctcacctatctgtcgaccccatttcctaccacctttgtggccgaccccaagcaccccagagatatgaggcaacctttgctccacccacagcagggccccgtcagactctgccagcgcgtcctgcccgcttccctcggtgacctgctcagacaatggagagggatgggccaggttcttgctctcagtctcacctggagctactgggagggtaaagccatttgaagaataaagtcatccagagcctcaggacaaaaaaaaaaaa

SEQ ID NO: 9061 - DNA, 495 bp, Homo sapiens
tttttttttaatgtttaccttttaaaacatccaaatgtttattttcacaagcttagtagtacaagatgcaacataattcaagaaaatcaaccacagtgctaatactttaatatattattccaaatattagacgttacagtttaaatctttttaacattagctctaatgttggaataacatttaagttaataaataactgtgaatataaccatatgttcagtctattctccccagtttatcctaaatgacaattttattgtgatttggggtcataaaagtgataaataattgtttatatgttttcataaattgcatgtttatttaattaatcctgaagagaacctagaaatacattccaatgggttaccataaattaggacggtattttttaggctcttcgattttttttaaacatgagtgagtcacactgtaactgctcttaaatttaggggttccattgccccataacctttttttggaaatggtattttcccg

SEQ ID NO: 9062 - DNA, 1390 bp, Homo sapiens
  misc_feature (1)...(1390): n = a,t,c or g
cccctttcctcagggggcgtggccacaccacacactgcgccagtnacacatagttacttcctggctgggacggcacctatagaaactagggtacaaatctcccaaagatggtttgcaccgtcatttcaaatgtttgcacaatataccacttagaggcttaaaatcagggtggttcagttcaaaaggtaatatcaaccgtcagcaaacatgtcagtttaaaaataagttcggttaacaaggaagtgttaagcagattttttgaatacacttacaatatactggcttataatcatttttattctgccatatggtttatttcatatacactcacttttacactcacttccaattatagcattcaataagttacggttaaagaaaagtgaatggtgtttttgtaatttgttttctagtagctagcagagagcctggcacatagtatgtattcaaaacaagtgtgttaattaataaaaatatataaatctcatttgagatttaagaatataaataattttcttttaatctttattttgctcaatatttaataggaagtatgatttcaaggactactaaaggaaggcaatatacatgtgaaaaccataaaatacattttttgcattctactatttttaggggcatgaaatgaatgaaagctttagccacttttttgcccctacatatgagacaacatattttgtatttcactcaagggctctgccagtaaaaagtaatgaaattgtacctttctaatgacatctatgcagcaggggtctatcgccttgtgggatggcaccaaattatccaagtgtattagggagacctggggcttttttctttaatcccttcttattaatgaagtgcatagtgctgctcccgggagaccactggctggacagatacacaggggaaggaggtccagaggagggaaaaactgggaagacataaatgaattatacccagccatgaaacaatgccaactgtctcttccctaaggaagagtacaagtaccctaaaattgaaaggtggtccctacactgaaaacgcacatagtttgtcaaaagtgtacaaaagggaaagagtcttattttaagctttcaggctttcttaaaaacttggggaccagaatttcaatgtatgtttccattgttgaagataacattttcttcaaagagccttaaccttttgtactggaaggaaatattttctggacttaagtagttgcctaaatttaagattcctacactttatttctgccattgatggcttttcctaaacccttatactatctttttattatctgaggccttttcctaatggcaggctcatagggtgctaggctaggagctggctgctccaggtatttggaaggactttacaagggaggtttagg

SEQ ID NO: 9063 - DNA, 429 bp, Homo sapiens
tgcaacactgcttttcagtttatgcagtttattttttgttctttttaagctttttattatagtgaatgtcttatatttcattaaaagttttgatattatatgtgaaacaacagttctgataaagcaatatctagataaaggctattacttacctttctcaaattgatagattttctccttgtaacaagctctgatataaaatatgataatttgttgaaaacttttacacattcaaaactaaattatcatatatttaatgagactttgggtgtgtatgtgtgagtgtgtgtctgtgtgtgtgaagaatttcctatatttgttaaaatgtcagatttcttatgatattacctgtctgatgaggaagactttggggataaaagccatggtcattcaggatgctgtccgagatttgtcctatgtgacttttct

SEQ ID NO: 9064 - DNA, 313 bp, Homo sapiens
gaaaagagagattagatcttaaggcacttgatggcctccaaaaatcctgactttggaacatcaaatgcatatgtgcacttttatctttgttctgagtcactgcagtccccaaagtcatatgccaatgttcacactgaaatactgtattgtacaccaaactggaaggcaattttcctatgaaaatcaaagccggtatattcattggtatgctctatacagatatcttaataaaaattttatagtgtgaacagtgcacagagttaaggcataaaaatgtatcattctttataaaaatctactgaaaatgtgtaat

SEQ ID NO: 9065 - DNA, 609 bp, Homo sapiens
gtaagacatataattcctatgattttcacatttttatatcttatatatgggaaaagccaaattaaattgaattcagattaattccagcattagactaaatgagcaaacttaagtaaatgtacaaactaggtaagtataaaaccacaggttaacaatattggagtacttttagaattacattaaaactgtcttaaatgtcctatcccaaatctaaaaaaaaagaaaatggcaggctgagataatacagaattttaaaatgcactttgtaccagtgtctatatggaaagaagtagatgctgaatacctcaagatgccaagggaacaagcaacattgggaagttgtcacaacatgctcaaagacaaactacaattgtctgctagctatttcttcagaactggaactaatacgactatccttttctgttttatactttgattagaatgttatttcctcgcttacttaaaatgtacttcaactttttaacaactgatacaataacttcataaaagtataacactaggttgaaaccttaaggaaaaattgaaattgttaatgctttcgatcttttgggaggccagtacacagacaaataaatttcttctttttat

SEQ ID NO: 9066 - DNA, 1007 bp, Homo sapiens
gggaagcgggactccaaatgggtcgcagtcgcagccgctctccacggagggaacgtaggcgttcccggttccacatcccgggagagagaacgcaggcgccgagaaaggtccaggtctcgggagagagatcggagaaggagccgctcgcgatccccgcacccgaagacgctcccgatctccaagaccgacatagatccacatctccttccccttctcgactgaaagaaagaagagatgaggaaaagaaagaaacaaaagaaacaaagagcaaagaaccggcagattactgaggaagacttagagggcaaaacagaggaagaaatagaaatgatgaagttaatgggatttgcctcctttgactccacaaaaggtaagaaggtggatggctctgtaaatgcctatgccataaatgtctctcagaagaggaagtacaggcagtacatgaatcgaaaaggtggattcaacagacctttggatttcattgcatgagaattgaagtgttgaaggatgattttttttcccctcatcttggtcagagagtggattttgtattttgtatttaacttgcattcaaaaaacaggatctcagttctcctttcttgtaaagtaagaaaatcttatttatgatatatgcagttaacttaccttgcctcaacagaagaaaggttaaatattacatttttttcttttaggaaatatcatttgtggcaggcgtcaaccccattttatttgtccttattcctgtggaagcagtatatgttttcttcctgaatgctcattaggacttcttaaaaaacatgaaagtaatttggaagtaagtttatccaataaagcagtatttctacccttttagatttgataaatatttttattactaaagaatctccccagacattttcttttttttttcacacatagatttaagtatcttgattgttagtagtctaaaaatggggaagaatgaaaaagcataactagatttttccatcttctgtggtcgcccgccc

SEQ ID NO: 9067 - DNA, 447 bp, Homo sapiens
ttttttttttacattttaaataacttttattagagtatattgttacaactctttcatcttattagttctgctgttaagtgccaaattcataaactttatcatagggatatgtatcataggaaaacaaacagtatatataaggtcagtactatctcgggttcaggcatccactgggatcttgcaaatgtatccaccacagataagggcgggggtgaggggtggctactgttaagtcacattgtgacattccaggtgtacatgaaatttggagggacactattcactatatcacacaagcaacataatgcctcttttgacacagtaagattttaaaaaaaagactctcaaactttaattcagcttgataaaattagaattcttcttctggggaattttctttttgagacaggatctcattctgtcaggccggagtgcagtgccgtgatc

SEQ ID NO: 9068 - DNA, 466 bp, Homo sapiens
tgaaatccacatacatctcatttgtttaaattaaggccatgcacaaatattttttttagttcagtgctgaccattaaaaactatcatgcttgatacggtgcaaaagttaaaatgagtatcactaaaaatgccttctttttatgtggtgcaatatgaaatacaccaagactgtgtcttggacattctgatggacccaggtaaagttgttaaaagaacgaataaaactttattaaaataatttagacacctgtgtaccagcaacaattgatttaatagacctatagtgtctatactatcccttagaataaaggtttatgattttcctgatactaagatgcagtcacataatcttttgtgcatattcctatacaaattatttctaattttaataagaaggaccgtgactacggaatatttgtacatacttgcattatgcagtatttatttaaaagttggtgtttttttt

SEQ ID NO: 9069 - DNA, 537 bp, Homo sapiens
ggtcaacaccacatgaagagctagagagacttgcaggtctggagcaagccatcctctctcctggacagaactcgggggattactttgctcctataccattggatgaccatgctgaaaataaagtggatattttagaattgctacagaaagccaaagtggatttgaaacctcttctttccagcctttctgcaaataaagaaaaacttaaagaaagctcacattcaggggttgtgctttcagtggaggaggtagaagcaggtctgaagggcttgaaggttgaccagcaagtgaagaattcaactcccttcatggcagaacacctagaagagaccttgagtgccgtaaccaacaatcgacaactgaagaaagacggagacatgactgcgttcaacaagctagtgagcacaatgaaggcaagtgggactttgccttctcagcccaaagtcagcgtaagtatctgacacaaaccccccacccttttgtcctttttttttcttctttttcccaccacaataaaaggatttttaaaaaggtaaa

SEQ ID NO: 9070 - DNA, 1032 bp, Homo sapiens
  misc_feature (1)...(1032): n = a,t,c or g
tttttttttttttaccagagtaaactagaatatcattttaagtatttattgaataaaatgattctatcaacactgctactgtattcaagccagtgcaataaaaaagtgggtggacagaggtcattcactttgactttgcctgccccctccaaatccccagtgtaaacaggaaaatgagaagtcacaggtagaggacatgctgtcccaggcccatgtaacccaggcatgtaacatacaaaggaagcccctctggttaaactagtccctgaagaaggtaaagcctcacgtatgcagctttaaaaaaaaaaagtagagggccctcagctcatttgtgaaaggaagcaagagcccataattaatgtaagtcctttgggaacctcattctggctgtgtgtaggtttcctggggcccctacataaatgggtaagacgaagtgcttcaaacaaactgtacggctccctttttaatgtctgaaggtctatggggactgtctcctaggatctttgcatgtctgttgaaacaaggcagctggggaacagtacttgtgctactgagtccataggctcatctgttatttgcctggggagccaggggggtaaattcccgaatccagcattgctctcctgcgggctgtttccttggcaacactgtggtttagccgtctcagtcgttcctgagcattctgtagaatgttgttaaccaagacaacgcgtcgccgggcattaagtagcttcttaacataggggtcaagatccagggccaccttctgatcctcatttatgcggcacagttctgtggctaggttgtcaatttgttcccggagctctacctggctctctctgacggcgtgtacgtgagagtcgagctgctgcacagcgggtcgcaggaactccagcagcccttcggcgaaaaggtcgcggcctgtgggccccgccaccggggtccctgccccngatacagcggcggaaccagcccccgccatcacgaattgtcctgaagcccgaaacctgccgcgagggccgccgggaaccc

SEQ ID NO: 9071 - DNA, 1384 bp, Homo sapiens
ggagccaagaccatggcgaaagcggcgggataagagcagcagcagcgggaagaaaagtctaaaacggaaagccgctgccgaagaacttcaggaggctgcaggcgctggggatggggcgacggaaaacggggtccaacccccgaaagcggctgcctttccgccaggctttagcatttcggagattaaaaacaaacagcggcgacacttaatgttcacgcggtggaaacagcagcagcggaaggaaaagttggcagctaagaaaaaacttaaaaaagaaagagaggctcttggcgataaggctccaccaaagcctgtacccaagaccattgacaaccagcgagtgtatgatgaaaccacagtagaccctaatgatgaagaggtcgcttatgatgaagctacagatgaatttgcttcttacttcaacaaacagacttctcccaagattctcatcacaacatcagatagacctcatgggagaacagtacgactctgtgaacagctctccacagttataccaaactcacatgtttattacagaagaggactggctctgaaaaaaattattccacagtgcatcgcaagagatttcacagacctgattgttattaatgaagatcgtaaaaccccaaatggacttattttgagtcacttgccaaatggcccaactgctcattttaaaatgagcagtgttcgtcttcgtaaagaaattaagagaagaggcaaggaccccacagaacacatacctgaaataattctgaataattttacaacacggctgggtcattcaattggacgtatgtttgcatctctctttcctcataatcctcaatttatcggaaggcaggttgccacattccacaatcaacgggattacatattcttcagatttcacagatacatattcaggagtgaaaagaaagtgggaattcaggaacttggaccacgttttaccttaaaattaaggtctcttcagaaaggaacctttgattctaaatatggagagtatgaatgggtccataagccccgggaaatggatacaagtagaagaaaattccatttataaagtactgagagaatgatattggattttgctgaacaggcctatcttgaactttggtaaattatttttgacagaatactcttttcaaaatggcatttgctgatttcataaacctttcacgtctggacgaattaccaaatgccatgaattgccactgtgtgtttatgtagaaaatacaaataaaagttattttgatggcttaggtttccttaaacttagttctcttgtttttgggtaactgtgaataattaagttggaatcaagattcagattaactttcctatttgcatagaacacatgagaggaataaaatggttggtaaat

SEQ ID NO: 9072 - DNA, 207 bp, Homo sapiens
cgtgtgtgaggcggacagtgggtggccaccgggagctcttggctgcatcttctccctgcccccaccccactatgacctttgaccctacggcgcaggggcagccaggacccttgattcagaccatggaccctggaccttgtagatgagggacactggcctggccctcgggtcttcggaggacgtagggggctggcatgggtgccgact

SEQ ID NO: 9073 - DNA, 519 bp, Homo sapiens
accatcatagccaccacttacaggcggccgtcacggtacacactgtcgatgcagaatgctaacaatctcctcacctccacgccaagatgagatctgggagctacagaatgttctggaaagaaaaagaacccggcttaaaacccacagcaagagacctcccttgtgtttgtgctttgtgcagagttgtttgagtcatttcctgcctgtcgacatggttaaaaacgagagaaacaacaacacagtcacatttgtgaagatgtgaggctggttctgaaatggaggggaaataagcctgatgaacagacctgccataacactaatggaaggtaacagaaggcgaacctccaaacacagagacggaacctgcaagtgaagctgagccagaggaatgttccaaagagccagaagcattcagctctccttaactggaagagagaaaaattctgctcacccagagactggaatgtgggcacatgcagatacaaatgtgtgcattgaggatttcgcctttgtttctta

SEQ ID NO: 9074 - DNA, 122 bp, Homo sapiens
tatcatcaccgacacccacgcagaccctgaggagcgggactgccccacagcacgcacagacatcggagacgtccagatcctgagcagctttgtcagagatcacttacctgatctgaagcccg

SEQ ID NO: 9075 - DNA, 794 bp, Homo sapiens
ttttttttttgagaaacatcagggactttaatcacatcccgcagctctgcggacctgcccaggcgctgatgctgcgcacagcccacccccattccctccctcccgccctcctggccctggcagctcagctctgtccggggtcggagagggggtcctgaggcagcagcagcccagctccagagtgacaggcaggggctgtccagctgagtctccgcccccacgttgccctggggcaggcccagctgctgtcagtgctgcttgagacactcagcagcatcttccaaaggtcaggttggccaagtgtgggggctccagacaccttaaggctggcgataccaggttgtgccagttatttatgtagttcaggaggccctggacagctgacttccactgcgccgaggactcgcagttatagccaaagcaggcgacgtgcgagtctgtgcagttgttgcaggagatggtctcgtactggaagatgccacagcggtgctgacagtcgatgcggctttcgatgatggcgttctggatgaggtgcacctgctcccggaagatgtttcgcagctcgttggggaaatacccggggaagtacatcttcccctggtacagctgatccatcatctggtacactgctgtcgccacttggtccagcttctcccgggtgatcttggcggggatggccaggtgcagctccttcatcgtgtcgtcgctccagtcggtgagcagcgcccctgacacggggatgtcgcccacccaccaggacttgaagttcacatggtggcggtagaaggagaact

SEQ ID NO: 9076 - DNA, 499 bp, Homo sapiens
ctttgagtcaataattttattactattatttttcacactgaggagacttagttacataaagtgatattctatgaattgattatcagtagtagaagcacaaaggtatggacagtgaaacaagaagaaacaccctttatcagaatgaagtccatgtgacagaagtacatacttcagacagcctatgtacaaataagtagagcttcctgtctatgtacagacatattcacagagaataaactgacatagtatcaccatgtatctcatcatccagtgaaaattacgcataataaacacaacacatacaaaatgacagaagtaatttggaagtgcatccactggatttttgtagggatgaggataggggttacaatgctcctttaaaacggaggcgaacaaaggaagcatgagaccacgtctatcctaaaaaagatcctttacaaaaatggcattctgatatttttaacataacctgtctaaaagacagtttatatgttataga

SEQ ID NO: 9077 - DNA, 1305 bp, Homo sapiens
tcatttattttataaaggcatctccttctataactcaaaattgtctttaagtgtcatataaaagtgtacattttacttttaagcaactaatttagatacctaagaaaaactatgtgcattaggaaaagtcatgtttttcttctccgaaaggttgatcacatgatatgtctactaagaattttcacctctgtacttgtatgtatattttattgttactcaatcttgtattttatttacaaattcaacactgtcaaccctgggaattctaaaataccaatgtatttttaggttgtagctaatgttgtattcactttcaattctcagttgtccacactggtgatataagaggaacaaatcagaatcattaaatactttgtaatgccatcataaactcatatattcatcctcaaactcccttgtttaatgctaattggtggcctggaacttcactgagatgcaaaatcaagaactgaagcctagttgctagataacaaaaagctataaatgtttatgtatgtgaattttaaattagaataaccgtcttaaactcctacttgccatttctaaggcaaagcattcattttaatattgtactttgccttttcattcagttagtggagtaagtcatgaaacccttaggaagaaaaacaagttatgacttattcactaaaattgatgcaagacagttggttctagatgaccatggccatgtgttcatcatataaaaccttcagttctctctatggtgcttgggctggagattgacatgtgaggatgtgccaatcatattaaatggatttggtctatgtgggtgatatgtggcctgaatgtaactgtgatagactgaaatttgttcttaggctctcaaaatccactgaagaagtcaagtgaaggtgggtaaaatagggagattagtgacaactttgtgccaaattttttaaaaaatggaagcaggtagccaatattagaatgataatttaagggtgtggttgaattttagttagttgtcacatagttattgaacctcatatgctcagtgctgtgggaatcaaacatggaagaggtatggctcctgcccctaatgagaacaagggggaaaaatccagatataatctaaatgctaggttatgtcagggtataggaacacagagaatgggggacctgtaagaactggaagagtcagagagggctccattgaaggaggtcaaacataattccggaaagaattaggtagtgaggagattgtgccaggaaaataagtgggaaaggcccagttatgtttcctttgaatggaagagagacaaa

SEQ ID NO: 9078 - DNA, 552 bp, Homo sapiens
tttgtcttaattatcatttatttgttcacacatcaaggtggtagaaaggggggcatggtgtctgccttcagagaccctccactctaaatgaagaaaagttcagtgaagcaaacacgtgacgtaaagtaaaataagaattgctactgtgaataagagtcacgtattgccacaaagcatacctatgaaaatttgaaatagggaagttgccctcatgaaaaagttttgattttggaggaagaaacagaattaaagaaactaaagtcaggagatatttgggcctttgaagtagaagagaggcatggggttggcttctgtccacttgctgagcaacttgttttccttttcacagtggatatgaccttggatgccgacacagccaacaacttcctcctcatttctgacgacctcaggagcgtccgaagtgggctcatcacacagaatcggcaagaccttgccgagagatttgacgtgtccgtttgcatcctgggctcccctcgctttacctgtggccgccactactgggaggtggacgtgggaaccagcacagaatgg

SEQ ID NO: 9079 - DNA, 365 bp, Homo sapiens
tcgagtggctcttcctggctgctgaggcgggttaaggtctgagggtcttgtggggccacggcgctgatcaccaggtgtttggcttggtcggttcttatttctcgcctggcaatggcgacgtacacctgcataacttgccgggtggcgttccgcgacgcggacatgcagcgggcccactataagacggactggcaccggctacaacctgcggcggaaggtggccagcatggccccagtgaccgccgagggcttccaggagcgagtgcgggcgcagcgggccgtcgcggaggaggagagcaagggctcggccacctactgcaccgtttgcagtaagaagtttgcctctttcaacgcctacgagaacc

SEQ ID NO: 9080 - DNA, 669 bp, Homo sapiens
taacctaagacgccactatcaaaccaatcacagcaagcattatgaccagtatacggaaagaatgcgtgacgagaagcttcacgagctgaaaaaagggctcaggaagtatctcttaggctcgtcagacaccgagtgtcccgagcaaaaacaagtgtttgcaaacccaagtccaacccagaaatcccccgtgcagcctgtagaggacctagctgggaacttatgggagaagttacgtgaaaaaatcaggtcttttgtggcatattctatcgcaatcgatgagatcacgggtattaaataataccacccagttggccatattcatccgtggtgtcgatgagaatttcgatgtgtccgaagaacttctggacacggtgcccatgacgggtacaaaatctggcaacgagatctttttgcgtgttgagaagagcctgaaaaagttctgtatcaactggtcgagattagtaagcgtggcctccactggcaccccagcgatggtggatgccaataacgggcttgtcacaaaactgaagtccagggtggcgacgttctgcaagggtgcggaactgaagtccatctgttgtataattcatccgggaatcacctctgtgctcaagaagttgaagatggaccacgtcatggacgtggtagtgaagtccgtgaactggatat

SEQ ID NO: 9081 - DNA, 381 bp, Homo sapiens
ccacgcgtccggttaaagtactctgcagtgtaattttattacatcctgagctgttacactataaacacagtggcgctctctgtcattcttggaaaaactcctaaattcttaaagccttcctttgcaaacggtaatggggtttgctctttgtattatgtggtggtggttgtttgttgctgtgtagttttctgcttttttgactgactcccacctccatcctagttttggttggtggtcaagttgggagtttttcattgtatccttaattcactggctttctcatatgaggagtctgcctagactggcaaataggctgaaattccttttcaggaaacaacttcccctataaaagcctttctattaaagtaaaaaaaaaaaaaa

SEQ ID NO: 9082 - DNA, 434 bp, Homo sapiens
ttttttttaattcaatactaaagacttcagagcctttaagatgcaatgatgggtttatcaataatactgttcatgctattcgtttcttagtccttgtccttagcctgaaattctaagtctctataaattagcaccagttttccaaatgcatattttatcaaatcctatgatcctaggctggtctaggtaccatcccccaatcttaccttgtgtgtttctgttttaagaccctctcccatgctggccttgcaaactgaaatgcctttgcttttggatctctctctctctttttaaaatagagatggggtcttgctgtgttgcacagggctaatcttgaattccggggctcaagcaatcctcccaccttgggcctctcaaagtgctgggaattacagggcatggaaccattgtggcttgcctgcccttgggatctc

SEQ ID NO: 9083 - DNA, 380 bp, Homo sapiens
cggacgcgtgggctctgcagtctccggctctctcctgcaggatcggtcaacgcagccgtcgccgccctctgcacccagcccaggtcgccactgcttcagtccggttctcaaagcctcagcaccatcttttatccccgagcagcctggatcgtcgttccctcagtccggacgccactgctaggtccgaccaccgccgcttctgatatttcggtgagtcttttcctgtggaggtttggtctcccgatctctgtggtagccaccttaggcgtgtacggtcctttgaaaaatggccgagtcagagaaccgcaaggagctgtcagaatccagtcaagaagaggctggtaatcagataatggtggaagggctcggggaacatctgg

SEQ ID NO: 9084 - DNA, 1285 bp, Homo sapiens
ttttttttttttttagggagaaggtgctttattctgggatctgcgtaccaggctggctggggtgctggagtgggaaggggaatccaaggagcaaaccaagaaggtcctagggccagcctaggcctccacggcccggccgttgatgacgcggatgtggcggatgacgtcctggatggcttcagatgttgtgccctggcccccgatgtccggagtgtgcatctgtaggacacaggcaggctcggcacacaccaggccctgccaccccccgctgtctcctgtgacgtgcaggactgggattgccacaggagggaagtggcaccagctaagggccagaagatggggccagatccagtaccatcctcccctgggggctgtggtcagtgcatgaggcgggctacaggaggctgcagggggagactgggcggggcagcagggtagggtgcgaggggaacctcacattctcattgtccatggatgccaggacagccttacggatggaggtggcataggagtgcagcttgaggtggtccagcatcatgcagctggccagcagggtggccgtggggttggcgatgttcttattggcgatactcttgccggtgttcctcgtagctgtttcaaacaccgcgtacacatggccatagttggccccagccacaaggcctgggcccccgaccagtcccgcgcagacattgttgacgatgttgccatagagattgggcatcaccatgacatcaaactgctggggccgggacaccagctgcatggtggtgttatccacaatcatgttctcgaaggtgatctgagggtagcgggctgccacctccctgcagcactggaggaaaagcccatcgcccagtttcatgatgttggccttgtgcacggccgtcactttcttgcgcccgctctcctgcgccagcttgaaggcatactcggcaatgcgcagggacttggccttggtgatgatcttcaggctctccaccactcccgccacactctcatgctccaggctgctgtactcgccctctgtgttctcccggacaatgaggatgtctatgtccttgtgccgggtcaccacgcctggaaggctcttccagtggatgacgttggcatagaggtccaggctggtgcgaaggatgttgtttcgagatttgtgcgacggtggcaggttatggttggtttcgatgttgcccttcagggccacgcggttccggcggatggccatgatggcattgcgaatgtcctcttcatcagcattggaactcacgtgcacctcttcaaagtc

SEQ ID NO: 9085 - DNA, 436 bp, Homo sapiens
tctagtttatagttttttaaaaaatctctttattaacttgttacagtagaatacattttttaaaatatagtacaaaaaattctcggtgatcaccaaaaatgtaatcaataaggttacattcctttgtttctctgaatcttctttttcctataatgaaaagtgtattttttaaaccttaagaaattctttttgcactaccttttcctatccattgcatcatagtttatgtcccaccagttaggatcttggagaactgctcacattaatcttgtttcctgggttttatttcaaactgtcctgaactttatagtaatttttgctaaaggaagttcctagtaagcagttatttgcctttggtaaacttaattttagatgaaaactatgcacaaaaaaacaattgtcttatgattagaccttcaagttagggagggtgaat

SEQ ID NO: 9086 - DNA, 1228 bp, Homo sapiens
  misc_feature (1)...(1228): n = a,t,c or g
ctgaactgaattcagtgatacggaagctggaagacagaaatacgctgttggcagatgagaggaatgaactgctgaaacgctcacgagagaccgaggttcagctgaagcccctggtggagaagaacaagcggatgaacaagaagaatgaggatctgttgcagagtatccagaggatggaggagaaaatcaagaacctcacgcgggaaaacgtggaaatgaaagaaaagctgtcagcgcaggcgtctctgaagcggcatacctccttgaatgacctcagcctgacgagggatgagcaggagatcgagttcctgaggctgcaggtgctggagcagcagcacgtcattgacgacctctcactggagagagaacggctgttgcgctccaaaaggcatcgagggaaaagtctgaaaccgcccaagaagcatgttgtggagacattttttggatttgatgaggagtctgtggactcagaaacgttgtccgaaacatcctacaacacagacaggacagacaggaccccagccacgcccgaagaagacttggacgatgccacagcccgagaggaggctgacctgcgcttctgccagctgacccgggagtaccaggccctgcaacgcgcctacgccctgctccagggagcaggtgggaggcacgctggacgctgagagggaggcccggactcgggagcagctacaagctgatctgctgaggtgtcaggccaaaatcgaagatttggagaagttactggttgagaagggacaggattccaagtgggttgaagagaagcagctgctcatcagaacaaaccaagacttgctggaaaagatttacagactggaaatggaagagaaccagctgaagaatgaaatgcaagacgcccaaggatcagaacgagctgttagaantcagagtgctagaactcgaagtaagagactctatctgttgtaaactctcaaacggagcagacattctctttgaacccaaactgaaantcatgtaaagctctcagatgttttcaagcatgtgtaaaggggacatgttatagnnnnnnnnnnnnnnnnnnnnnnnnnnnnnnnaaatctgtatgttcagaataatttcactgccttaatgtgttctggagagcgtgctcacccaagtctatggacatgtaccagagctaatatatttattcctatggcttgttttgcacttaataaaataatttgtttttgcaataaaaaaaaaa

SEQ ID NO: 9087 - DNA, 471 bp, Homo sapiens
attctgacagggtgtgtggcattgtgttctatgccagagtgacaaagttgattcacccctttttggggaccttaatatattttttaagggatgtgcctatgcattgatgcctgaaaaatatgtataaagaaatgaggttgactcttctgagcagttcatcttttccagaggtaagggtaggaggccaacttcaggatctgggtctaagcccgtgggcaagccctggccgagtgagctccaatgctaactcatgtgccgatctctagagcagtgggaaactaccccgctgcaccaaatcaagtagcttcaccttgtgtatgcaggccccaagttattttttagcaatcttacgagtgaaatgttctggtggggttgaaaaacgttcttatttttaaaagaaaggttgtgctcgctacactgctgggtgtttgcgttctgagacctcttgtattcaatctgtgaaggatatgg

SEQ ID NO: 9088 - DNA, 430 bp, Homo sapiens
gaagatgatgatgaagagggtgaggttggagaagatggagagaaaaggaaaaaaagaagggatcaaacaggaaaaaagaaagtctccccagacaagatgattgaaatgcaagcaaaaattgatgaggagagaaaagcacttgaaacaaagctcgacatggaagaagaagaaagaaacaaggctagagctgaattagagaaacgggaaaaagatcttcttaaagcccaacaagagcatcagtctttgctggaaaaattatctgccctggaaaagaaggtaattgttggtggggttgacttgttggccaaagctgaggaacaagagaaacttcttgaagaatctaacatggaactggaagaaaggaggaaaagagcagagcaacttcgcagagaacttgaggaaaaagagcaagaacgcttggatattgaag

SEQ ID NO: 9089 - DNA, 551 bp, Homo sapiens
tttttttttttttttgatttctcaaagctattatttattctgtacaaggttccactgtacattagacattcttctactcttgcttacacagtaaacaagtgtacacttgcccttgggtcaaggttcacaggtcttctctggagaagggtgtcaggccagtaaaactcagggtgtctttctctgatgcctcctcctaggagcctggaatgtgccaggctccacggggcacaagccgggcccagctgtgtgggtgaacagctttactctccaggacagcacagagttttatccaactatgtagggcaaaattgagcccacaggaaagaaccatacaactgaggcaagatgtccccaaatacccaggctccagctcccagggcaggactggagaccagcgctaagaagagctgaggggtggcctgggcatccctgagaaactcggtccaaagggcctattgtctaggaggctctgagaagggggcgggggcaggaaggccagggggaaagggatgttaagagaataaataaaagggagagaagctctagggacg

SEQ ID NO: 9090 - DNA, 743 bp, Homo sapiens
ttaaaactctgatttcaaaggatcagttgaatttatactttagttatgggtgttttgttactttttttttttttgtatcatgactcagtatggttcaatttcctagtaagaagtggggatttgtgtttttggagtcctcagctcacatgtcttgttcctccttcagcacaagctaggggagatcctaccaacactgataggtcagtcattgatggcaatttgaatgtgggtattactctgtgagccaccctgcttcgcttgtttgtaaggagaaatgcatctggttatgtgaatttcccgagagcagcagacatgggagggccagactttaaaaggcaacgcaaggcagattcgaagagctgttgccctctttcttaaaaaaggcttttgggagggctgtgtttacatggcatgccctaaagcagtcagtctgttagtatgagcaagacatctgaagtacacagttgcttttaggcttgtatagttattttctacacatgccaacacacatgatgataaaggaaccttttctaggaggcattgcagggtttcaatacacaggacatgttctagttacagaagccttgctctgctgtcaacaattgggaaatgctcattttttcatgttttgtgaatactctggtcttgctgtaagctaatgtcatggctgtgggatattagagaagtgggtttatgactctgaagaccagcagacaccagactttaaaagtgcttaaattgga

SEQ ID NO: 9091 - DNA, 382 bp, Homo sapiens
gtggagaacactgtcttatcagtgagtttgttcccatattcctttctgaattaataggaagaacctccctcatctctaattctactaggctactactctatctccctcctgcttttcatcgccaaacttttgagtccttcacctaatcagactatgatatctctaggtagtcgtcaccctccaaattacgtttctgctccttataattccaacaaattgcccacgttctctttcacctcagaccttagcatatgtaagcgttcttttacacaccttccccaagcttaatctggccaactggtttcagcctagaagtcacctcttccatgaagcctcttcttacttaccagggttgagtactcaggagaacctggtatttact

SEQ ID NO: 9092 - DNA, 382 bp, Homo sapiens
acaaatgaactatttgtttttttttctcacaacatctggcctatattgtctgtcaggaagccatggctccaatgtaaagtacatagttcttacatacttcaactgcagctggtccctgacctcaccaggtttcagagatgttcttaaaggaagccagctgtggcaggtcacagattcatgggaaatggaaagaaccaaggaatatagctcttgcctcacctttctacccactgcagatatagttcaagccagagtaatggaagaacttaacttactagcctctcaggctgctcctatccctacctcccagtgtacagcccctccccatctctttagtcccctttccctcacttccccttttataatgtcacacaaatcaggg

SEQ ID NO: 9093 - DNA, 376 bp, Homo sapiens
  misc_feature (1)...(376): n = a,t,c or g
ggagaaacacaaacaccacccaggaacacgcagacatatgcccatagcatcccacaggcccaggcaggaggtcccaccccagaccctgccccagacgctccctcaccctctcggccccctcgccctggcccccaggttctctgcagagatctctcctggacccccagcggtctccttggcgcccacgaacacaggcgtgcacacgaggcgcacatgcattgagacacacgatacctcgttccaccttgggcgtcacggtggggctggaggcagcccccccccccacaacacttgaggccaaaggacacccctgttccccgggggtttaggcttncccctggggccgaggctttggccnacaacagnttgaggngag

SEQ ID NO: 9094 - DNA, 1299 bp, Homo sapiens
cagtatcacgtatttatctttaattcacatcacagcagtcaaggaagtggggaagggggaaaaaaaatcaagtggcagatatttacatctaaaattcacattacttgttggattttgaacatgctaccacaatatatacagtaaaatacctcttgggacaatggtacaaattttgtttcctttaactttgcttttctggtacaggtaagatcatttttaaatcactttttttctttaaacatgaatacacaaaagaaatggttagaagtttccttgttttaaataagcacagaatgcgggaggttaaaaacacatttatagtgctgaataccaattggacatcacactctatacattttttgctcaaattcctgtacaaatacacagcattcaaataggtatttacaaataagcttgaaagaatgaaaatcagtattttacaatcttttcaaagggttctcatctctggcctcccatttcccctcagactgacttattctccaacaaaagggatttcagaatgtgtccttttcatttagttagggaaaatggagagggaaaacaaacggtttcaccttgcataatgcgaagccaaatgaacccatactcccctccctacctcttgtgccaccaagtggagaaggtagctgttcttatgtgatgactgccttgtccagggattgactttcagaagtgccttaaaatctaagccctcctacctatgaatcaaatccaaaactagcccctaacccctaaccctctaacacctgtgaacaccagatggtccagagattgaagcttgcaaatgaatgtaggctgagaagcaggccagccctttgaggtgagggctgctgtaactgacccatatcctcagcagccttccgccccactctgcctggagtgaacctggtggtatcagaagggacccacactggtgataaacccccagaaaaaccctggaggtaatttagacctccatctttcccagtaggttattagcatttctgttaaacaagctggggtttgtttacaagagaaaaacacactgaccatggcctttactgtctggaaagaggggcagtggagaagggacaaggggcttgggcccagggcctggctgtggaggtcatacaggccagcagaagaggaactgggggcaatacgcctgcccaacaaggcagccttgtgaccatcattaatgtgaactcgagcaaataaaaaaaaaaaaatattttgtaggctttttttaaagtaacttaaaagcaccctggtaaagtactactatacccacctgaccct

SEQ ID NO: 9095 - DNA, 398 bp, Homo sapiens
caaggattcatttttcaattttttctctcctcatggaatcacctcaaatggaagggatggaaatgatgattttttacttggtcacaatttacgtacttacataattccaagatcagtattatttttctcaggtgatgcactggaatctcagcaggagggggtagttagagaagttaatgatgcaatttatgacaaaattatttatgataattggatggctgcaattgaggaagttaaagcttgttgcaaaaaccttgaggcattagtagaagacattgatcgttagagcagagtatacatggccctgaaattaactgccctagatatagttactcaaggtataagaagccttgtgttctgtatttttcttgtagtgttagttaaaacatatgtttcaa

SEQ ID NO: 9096 - DNA, 399 bp, Homo sapiens
ttttttttttttttgcagcggtctgccttcatcttttaatggccggtgcggtacagttagtggacagacgggggatgggacacagcaggggtgaaacagggcagtcacagccggggccggggatctggaagcgggggcggtcctccccctgggaaacaccgtctctggaaggacacccttaggatcccctgacctcagggtgccacccacacgggcctggtgttctgggaggcccgggctggagtgacccccagcccctccctacgttccaggggacccttgggtctgtcgagtcccttgctggatgagggtcaagacctaggtcaagctgacttcagccagggtgtggggggcccggcttcgtagcccccagacttacctcccctcttctatcccggg

SEQ ID NO: 9097 - DNA, 1092 bp, Homo sapiens
tctgacaacttcaaacaggactttaattccaaaccaaccacagaaccggcgcctgggagcaagtgggactgaggcccaggtgctaacacggggctggcagtgtcgagagaacgctctggaagctcctaacagacggctccgcgtgcgagtgcacaggcacctgacgggcactctgagctgggcagtctgacaccaagcagtaaggcctcccgggcagcgcagcctcagtccacgagcacagcgggtggccctctggggggaggcagcacggggcgcagccctcggcaggcgagcgggcgggatggatgaaacgcagcggcaccagggagccccaggctctcacaggtgccacccccgaccccaggattttcaaagggacaggatttcaaagtcttcatcttctgagtcgaagaatctttccagtcgctctacatcagaagaatctagaaggaacaggacatagcgcatcaggcatcttgggtgggccacctgggtgtgagtcaagggcccttggcgtggggcagactgagcagtgcctgctctgcagcccacagacagctgtccccatgcgggtgtgaacaggtccgggggttgtgcagacctgcgaatatggggggagggagcagagaagaggagcagggcagggtgaggagggcagggggcggccggcacaatctcaggcctgaggggcctctgtcccgcggtctgaccctcgtggtcatcaggagtggttccattgccattgccttgtttgtagagttttccacagggagacagagatgaggaggacgcgctcacggccactcacttcactgcacgagcccaggccggctcctgcggcacgctggccatggtccgaggggtctacgccacccatggccagtggtgcccaagtgaaccagtcccccacccagactgcgtcaccacagagcctgcatgttctgtctgctccagacccctgaggactccatggtagcacgcccagctccacagcgcccgggcaggcagcgctggtggggaagacgaggtgggtcctgggctgctgggcgcaagcttggaggaggggacgctccactccatacctggtctcac

SEQ ID NO: 9098 - DNA, 1158 bp, Homo sapiens
ccggagcgggcaggtatctgcagaactccacggcaagcagcagtaccgagtaccagtgtatcccagacagcaccatcccccaaggaagactaccgctgctggccatcctaccaccacgggagctgcctcctttcagtgttcaacctggctgaggctgtggatgtctgtgagagccatgcccagtgtcgggcctttgtggtcaccaaccagaccacctggacaggtcggcagctggtctttttcaagactggatggagccaagtggtccctgatcccaacaagaccacatatgtgaaggcctctggctgacctatctgagggctcggctgaccagctgactatcctcagcagctgggcttgcctgtggagggagtgacttgcactggcagcactgcatgtcacctgggaacccctgcagacaaagctaacatcccagacagacagatgtgaccaggacaaacgtgcaataatgccaaatgttaaaatgtgagtttaccagcctagctatgggactgctggctcctagtccaggaatcatgggggtatgactgcctctccaaccctgtgggctgtaagcaagctcaggctagtctccccactgggggctgtgcccctccctgggacggttccgtgggcagccccatcactgtgttcaatagtgtgagaatgtagctaaagcccctgctgctgctgctgcacatgccacagcaggcggtgggggctgcgtggggacaatccatcgtggagtgttctctcagcttaggtctggacaggagacttggcgggggatgctccaggatgtgggtgattctgtacctggggaggctatctctgacctcccgacaggggacactcccaggccagcccaggggtcaggggcagaggtgcacacctcagcatgagccaagactggggtcagggagcaggtgtggtttgagccaggacctggggcgggggtggggccggggcctttctgcctcatttgctttcaatgaaagcctcaaagcagccaaaaccaggctttcccccttcctcgagtttgaatatccagaatcttttgtacttcttgttggttaaattgtttatttttgtaaaaaataaaataaaattagttaataaaatgatgtttcacagcaaaaaaaaaaaaaaaaaagccat

SEQ ID NO: 9099 - DNA, 420 bp, Homo sapiens
tttttttttttttttttctcagagctgttttgctttatttgcagacactgttgcttttcatctttcccatgtacaaagctgaacaattaataaaaaggcacctggagacagcaaagacgcattcatttcatgtgacatagtttaaaaaaagataaaaagattttaaaaatactctggttaacaatgcacgcttcctacgtaacaagcaattctggagacgccgtcccgtgtcctcgtgtcccgcggagttgaccgtgtgctgtgttcggggaaggagagggccagcgtggtggcttccagccctaagaggcttccctctccctcgctgtcaggtgagaaggaagggggaaagacaggcagaaaagcctgagggaccgcaccatttgcagttgacacagacagttgacggtttgagccaca

SEQ ID NO: 9100 - DNA, 491 bp, Homo sapiens
tttttttttaaatggaccaatcagatttattcgtaaagcaaatccaaaaaaatcccatcataattttggaacttaaaaaaaaagtctttcgtacaagatggcaaagcatttcacgtacagtgcgtttctcgacaaatcccaggggcttcacttcccaatttactctgaaccaaaaaggccagttgccaaggtaactctgacaccatgtgactggggccggggcgtctctggggtcttggggcatgtctgcaggcacacacgtgtgctcgcagacacgctggtcctgcctcccactctggctggcccagtcttccatccaagggtctccgggctgagggaggagggtgttgggagaggggaggggaaacagtatgggagaggacgcggatgacgatgtggggggttgagggcccattaggcaccctgcatgggatttttcctcaagggggagaacagtgggtcctcccaggcagcgtctccttctgggaggg

SEQ ID NO: 9101 - DNA, 978 bp, Homo sapiens
ggcaagctgccaaaagcctattgaacaagaagtcggatggcggtgtcaagccacagagcaacaacaaaaacagtctcgtaagcccagcccaagagcccgcgcccttgcagacggccatggagccacaaaccactgtggtacacaacgctacagatgggatcaagggctccacagagagctgcaacaccaccacagaagatgaggacctcaaagctgccccgctccgcactgggaatggcagctcggtgcctgaaggacggagctcccgggacagaacagccccctctgcaggcatgcagccccagccttctctctgctcctcagccatgcgaaaacaggagatcattaagattacagaacagctgattgaagccatcaacaatggggactttgaggcctacacgaagatttgtgatccaggcctcacttcctttgagcctgaggcccttggtaacctcgtggaggggatggatttccataagttttactttgagaatctcctgtccaagaacagcaagcctatccataccaccatcctaaacccacacgtccacgtgattggggaggacgcagcgtgcatcgcctacatccgcctcacccagtacatcgacgggcagggtcggcctcgcaccagccagtcagaagagacccgggtctggcaccgtcgggatggcaagtggctcaatgtccactatcactgctcaggggcccctgccgcaccgctgcagtgagctcagccacaggggctttaggagattccagccggaggtccaaccttcgcagccagtggctctggagggcctgagtgacagcggcagtcctgtttgtttgaggtttaaaacaattcaattacaaaagcggcagcagccaatgcacgcccctgcatgcagccctcccgcccgcccttcgtgtctgtctctgctgtaccgaggtgttttttacatttaagaaaaaaaaaaaagaaaaaaagattgttta

SEQ ID NO: 9102 - DNA, 742 bp, Homo sapiens
  misc_feature (1)...(742): n = a,t,c or g
ttttttttgtttttttttaacaaatcacatctggtcttgtttttctgcagacacaggcaccaggggagggaacgaggcagacacaaacatgcgacaggcaggccgtgtgcccgagggcagtcgggctccaaacaccaactctgtccggcgaaaccagggcgcagtccttcactgcagcggggccacaggcgcgcccgagcagtggaagtgcacattctgccacttgccgtcgcggcggtgccacacgcgggtctcctcagactggctggtgcggggccggccctgcccgtcaatgtactgcgtgagccggatgtaagcgatgcaggcggcatcctctccaatgacgtgcacgtgtgggttcaggatggtcgtgtggattggcttgctgttcttggccagcaggttctcgaagtagaatctgtggaagtccatcccttcaaccaggttgcccagtgcttcaggctcaaacgaggtcagccctgggtcacagattttcgcgtaggcctcaaagtcaccgttgttgacggcctcgatgagctgctccgtggtcttaatgatctcctgcttccgggctttagcgtcttcatcctctatggtggtattggcactgtcagaagactccttaatcccgtccactgggttatggatgacggtggtttgaggctccagggcggcaggaggaagcgtcctttggggctggtggcggctgnactgtttttggtgctattcgtctggggcttga

SEQ ID NO: 9103 - DNA, 1954 bp, Homo sapiens
aaagtgccagatcgtgtaactggtgctatttttcatgctctggtacaatgtgtagcaccacgggggtctcagctttaccaaaatcaaaattccatttgtcagctaagtgcagaggcatttgttttttgctctcctcccacagaattgtcggccatttatttgcaggccttttgcgggatttcttggctatttatttgcaggcctttttttcccagccccaaattcttgggttggctctgtctgcttaaagagcctgtcttcacaaagctgcactcgggtgcctctgtgcgctgtcttagatcctactgccggcccttcaggactccgagccaggaaagaactctccaacctctggctcgagactctactttttttctcattcttttccttactctcctcctccttctacttccgactaattccatctcttttttttttttgttcctctccttttcctattcctccttcccaccatctctgagttgttgactttctcctataatccttctctattccctttctctttttgtccacctctcctttagtctctgtttctctgcccttcttattcctcttctgtcctttctcctctcctcaaatctctgatcatcttctcccgtacatccctgtattgatttttctgtcctctaaaggggctcatgggtggattcaggacagcaagtccatgcactggactaatgacacaaatactttaggtcgccggtttcacctactcagcccagaaagtaaagctgagcgtgaggccctgacctgggagcctgctccaggcccgcctcccggaggcccagcctggcaccgttgccctggcagcgatgatgcatgtgctgtggggccctgccgggcgcctggagtgcctctgcctgaacactgctcctaagcgagcccactcccagcactaccgcatggctctgaggacattttctttcaataaaggcagactctggccccaattattctgatagcaaacctcttcctcctcattgaagccatgccattcaccttggtttgggagagagacatttttttcccattcataaggtttctttttccctttttatgtgaaggccccctctgctttttcagctggtgattgctctggtgagactgaatggacttgctggtgaaatgaaatctcttgctttcctgtcttggtcctgcctaaattcctacaaatatatttaagccaaggactcaggctaattcctaagttgatcacattaatttgttactcctagagggaaaaagatcaattcccttgaagcatgtggagtacctcctgtgacagctgacttgccaggggactccctacagaattctgtgatatacattttacttctgtgtatgtatggtatatatggtatgtataccatgtacacacgttacattgaggtatgaatgactgtggttggaaacacacacacacattcaagtctgtaaatatccttcctcactgaaacctgtgctttggaaatcatttcttgtacagctgtgcagtttcttgtaacagctgaggacaaagctaagacaggcggacaatttagacaaagatcatctaaagagtatagtatctccctagcaactcatgaggacagacaaccaagtggcaaggttgactcccaatgggatggcagacttttcttctctcctttttgagtttgtgtttcctaagtgtttcttaacttctgagtgcaccaggctgtacccgttagatcctttcaatatgacagttttgtgcttctctctgacaggatgtttctccaccgagctgtagcacaggatgggagggaggtgggaatactccttgcctaggctggagtttacagagacactgcacagcttacactcctgttaagtgtaaatattcaacacttccattccatttgtgtaaaaaataaagcacacacgattataaaatcaagatgtatatttcata

SEQ ID NO: 9104 - DNA, 395 bp, Homo sapiens
ggcggccccggcaggcggcggaggctccgcggtgtcggtgctggccccgaacggccggcgccacacggtgaaggtgacgccgagcaccgtgctgcttcaggtttcagaggagcgtgctcgacctttctctccagtggagatttgccaacctgcccaacaatgccaagctggagatggtgcccgcttcccggagccgtgaggggcctgagaacatggttcgcatcgctttgcagctggacgatggctcgaggttgcaggactctttctgttcaggccagaccctctgggagcttctcagccattttccacagatcagggagtgcctgcagcaccccggcggggccaccccagtctgcgtgtacacgagggatgaggtgacgggtgaagctgcctgc

SEQ ID NO: 9105 - DNA, 101 bp, Homo sapiens
ttgactaccatattttaaatttactggaggacttttttgttctcttcttttttctttttttaatagcatcccgctcttatttcagaataaaaaaattttta

SEQ ID NO: 9106 - DNA, 1179 bp, Homo sapiens
  misc_feature (1)...(1179): n = a,t,c or g
gaatggagtgaagaaaggcagtatggcaggcaccagcaaagagttgagggctgttgctcttaaaaattattttttttattattattttgaaagtatggaagttttccattcactggggaaaggagggaaaagtgcatttatttttatacagagttacttaattacctccaaaacacatatgttggaaatcgcttttgctggtgcaaagtatattaatgagcaggaatacatacattgaggttatgaatagagagctcaatttgtacctttgctgtcttgctcaagcttggtatggcatgaaaactcgactttattccaaaagtaacttcaaaatttaaaatactagaacgtttgctgcgataaatcttttggatttttgtgtttttctaatgagaatactgtttttcattacctaaagaacaatttgctaaacatgagaaatcactcactttgattatgtatagattacataggaagaacaatcacatcagtaagttatagtttatattaaaggtaattttctgttggctcataacaaatataccagcattcatgatagcatttcagcattttccaaggtaccaagtgtacttattttgttgttgttgttgttgttgtattttagaaggaattcagctctgatgtttttaaagaaaaccagcatctctgatgttgcaacatacgtgtaaaatgggtgttacatctatcctgccatttaaccccacagttaataaagtggctgaaaataatagtagctctggcttggtgcttgacctggttaaatactgtcttaaagctcatacaaaacaaataggcttttccataagtggcctttaagaaaacatggaagacaattcatgtttgacaaatgctgacagggtgaaggaaagcccagtgtaaaaatgaatcgcgttttaagtgattcggttaaagagtttggggctcccgtaggcaaactaatactagataataaggaaatggggggtgaaatatttttttattgttgaatcattttgtgaatgtccccctcaaaaaaagctaatggaatatttggcataaagggcatttggtggttttatttttgtttgagggggtttgtcagaaaatcccttttgctgcnctttacgcctaactgactaggggaacaattgttgatatgcntagcattgggatacttgt

SEQ ID NO: 9107 - DNA, 62 bp, Homo sapiens
ccagtgtttttcgtaaagtacctgaatagattaataataatgctagtgaaatatatttagtg

SEQ ID NO: 9108 - DNA, 952 bp, Homo sapiens
  misc_feature (1)...(952): n = a,t,c or g
ccagtggcccaaaatttggagtcccaccattggatgtgaggggggaaattattttgcctctaaaatggatacttaccagatggaccccttttatattaaggtttgcacaaacctaatacataacaatatctcagattataaaagctttacgcacagatttagtgaaagtcttatgtaacatatatacttccaaaaggtatttgcttcaattatgaagtcattttgataaaacacttttaaaaactgggaaatttaacaacaaaataaaggataacnttttttaaggagaattttcttgataagatttgtggttatctgtagagtctccttcataaagcctctgatatattgatagggttaggatgagaagttaacatacctattctaaaagatatattcaagaaggaaccaaactttaaaagatcttttagaataggtatgttaacttctcatcctaaccctatcaatatatcagaggctttatgaaggagactctacagataaccacaaatcttatcaagaaaattctccttaaaaaaagttatcctttattttgttgttaaatttcccagtttttaaaagtgttttatcaaaatgacttcataattgaagcaaataccttttggaagtatatatgttacataagactttcactaaatctgtgcgtaaagcttttataatctgagatattgttatgtattaggtttgtgcaaacctaatataaaagggttcatctgtaagtatcatttagaggcaaaataatttccccctcacatctaatgtggactcaaattttggcaactggaatgttatcctcttggtaggcattctaaattaatgaatactgctatgtggtgtagtaaacaaatttgccataaaatgccatttaaggattttctttttacctttatntcattataaaagtatatgagttgnagatcantcaaaaaat

SEQ ID NO: 9109 - DNA, 603 bp, Homo sapiens
  misc_feature (1)...(603): n = a,t,c or g
cctggaccctttcctgctgcaggcggaattctttgaaatccccatgaactttgtggatccgaaagagtacgacatccctgggctggtgcggaagaaccggtacaaaaccatacttcccaaccctcacagcagagtgtgtctgacctcaccagaccctgacgaccctctgagttcctacatcaatgccaactacatccggggctatggtggggaggagaaggtgtacatcgccactcagggacccatcgtcagcacggtcgccgacttctggcgcatggtgtggcaggagcacacgcccatcattgtcatgatcaccaacatcgaggagatgaacgagaaatgcaccgagtattggccggaggagcaggtggcgtacgacggtgttgagatcagtgtgcagaaagtcattcacacggaggattaccggctgcgactcatctccctcaagagtggggactgaggagcgaggcctgaagcattactggttcacatcctgggccgacccagaagancccagaccggggcccccccactncttgcacntggttcggggaagttggaggaggcaagcccagcaggagggggccccattntggcncccat

SEQ ID NO: 9110 - DNA, 488 bp, Homo sapiens
gaaaacaaaccaatatctgcacttgggatatatcaggtggaaagtcaatgactttcatctgtgatttccctcacacactaccatgatgaccagtcctacagtatttacttctaggtgtaatattggttaatggttttaaaatgtaattattgtatttggtaaattgtacctctcattcccagtaaggcagttagacacttgagttttagcattttaccattcctgaaatggatgtaatttaaactgtggtatgtaaatttaatagtagtattgttgaatggcacaatgcttacagaggtagattgcattttgtcaatatataaaatttaaatataatattgatagctgtcataaagggggtgccacatattaaagaaacttaagtggaaccagaagaaaaagaaacaaacttacttttcttcaatgcttagtatgttttactctagtgctaaataaaaactctatcttcaaatgtttaaaaaaaaaaa

SEQ ID NO: 9111 - DNA, 473 bp, Homo sapiens
  misc_feature (1)...(473): n = a,t,c or g
cccacgcgtccgagctcgggtgcagggcctctgcgggagccctcctagacctctgcacttctcctctaacatggccgactcggaaaaccaggggcctgcggagcctagccaggcggcggcagcggcggaggcagcggcagaggaggtaatggcggaaggcggtgcgcagggtggagactgtgacagcgcggctggtgaccctgacagcgcggctggtcagatggctgaggagccccagacccctgcagagaatgcctcaaagtcgaaaaatgactttatcgagagcctgcctaattcggtgaaatgccgagtcctggccctcaaaaagctgcagaagcgatgcantaagatagaagccaaatttgataaggaatttcaggctctggaaaaaaagtataatgacatctataagcccctactcgccaagatccaagagctcaccggcgagatggaggggtgtgcatggaccttgt

SEQ ID NO: 9112 - DNA, 473 bp, Homo sapiens
ttttttttttttttgcactgttattttattttgtttagtccatatattatataaaacataacaggaaaaatgaacgaatttataaaataaattgaggtgtttggatgaaaaaaaatacaagagctttgccttcatgtctacagatctcttaatatattgttggtcttgcaccttagatatcaaataaagatatctagcttgacacaaaagttggtagctgcaaggttaagctgtattagtttgatgatgggccaggaaatgatatattttctaaattttgtccttaaatattggctgtaacaaatgctgatatagcaaaaagtaagcttctattagacagcaagagggaaacttgagtgaatgaatgcaacttacctccaagtcctcttaaaggaggtaaaaaaataaatactgtgttttaccagtgctcccctcaaagcattattctaagcatgcaggagggtatagtgagc

SEQ ID NO: 9113 - DNA, 857 bp, Homo sapiens
ttttttttttttattttcataaatgacttttacttatcatttctcttgacagtaattcttggcaatgtgcatataacatgaagggaagcataactttcagaagtcatcaaagatattatcctgttgtcctcattttcttaaaccattaaaatattttcatttataaaaattaatctaaatataaatattgacactaaagatcaaaatcacttgatgacaaaataattcttctggaactataacatatgcttatggtttttaatagtaaattaaatctttgcacttatttggcacaaggaaacctttataaaagttcagatgccacacagcaggctgctgctgctgcttcttttttgttgttttttgtttgcaaggcttacacagtacacatttttgtcaaagaaaactgaatatttttaacactgtaacacaacaatagttgcttttcatgcctcttaaagaaaacattctattcggaagtcaaatcttttttgttgtgttcttaaaatttgtttttgtttgtttgttttgctttgaatcacaccaacagaacaaaaagccaaagatttacttatttcaaaggagtcatttctgttagatgacacataacacagcatcagcaaggagtactggaagattaatgtagacccccatcaggagtggatcatagcacacaagttagcagaaaatcagatctggaaatgcacatagcagcaaaataacgtagaggttgaaaacaacagagttaggcttttgtgatgcattccaatcataattagcataaaggtgtggctttggcaaattaatctctctggccttcagttattaaatctgaaatatgggaaaacctattgaat

SEQ ID NO: 9114 - DNA, 492 bp, Homo sapiens
aaacacagaacatactgaccctttcaagtacttagtcattttcctgaaagtgtggtctgtttcagaatgctgtggcaaccaggtaggtgtggcactggccatgtgccacgtctttgccctttgtagtctgtcagatattaaagtttctaaccctgtttttttaatctccaagaatggggaaagtggaatgtagagatggaagcagaacgtgatgtttggatacaacagctatttaatccttttttattttttaagcaaaacactcagttttctaccttattttctaatgttgatttcatggtaatactgacagttggaagtgtttaacataaaaactcattgctaaagagcactgaggaaatgggagctagcgcacttgtaataaaaataaagacaaaatattttcttgaatgcatatatgtgattgggtattttaaaaaccagtatcatctgtcatctccaaaagattacaggagtcagcttgttaataca

SEQ ID NO: 9115 - DNA, 465 bp, Homo sapiens
acttcctgccgctgccaggcgcgtcctcccgcgcgctatgacggccagcgcatcacgcgcggcggcggccaggagtcggagtcggagtcgtggtgaccagctgcaagcatccgcgttgcgtcctcctggggaagaggaaaggctcggttggagctggcagtttccaactccctggaggtcatctggagttcggtgaaacctgggaagaatgtgctcaaagggaaacctgggaagaagcagctcttcacctgaaaaatgttcactttgcctcagttgtgaattctttcattgagaaggagaattaccattatgttactatattaatgaaaggagaagtggatgtgactcatgattcagaaccaaagaatgtagagcctgaaaaaaatgaaagttgggagtgggttccttgggaagaactacctcccctggaccagcttttctggggactgcgttgtttaaaagaac

SEQ ID NO: 9116 - DNA, 766 bp, Homo sapiens
gtgcttaaatttatttttcccatgccagagaaagcaagctttggtatggtaaaccacatgagaacatggctcctttctttttggatagcctggccatgtgtgaatgggattttagcttattatgtttctaagacttttccttacagcacacttaatgtaccttttcagtccttctcccaaccccctgcaaattgtctttaaaacaacaacacataaggaatctgaagcacaggagaacacagagccaacaaacagaatgaagaacaatcatctatttttaactgactttctatcattaccatttttccttttgcttaataactatcttgctttgaaactttgactccttttataagttctatgaggcacatatgtatagcaatttggttctaaaaaccagtgatcttactttagctccatcttaaaatttcaccttaagtaaatggcctctagtagatgataagcctaaaaaaagcacaattattaaaacaaacagatccatgttaggacatttctgaataataaagagaaaaggtgtttcgttgggtattgcagaaaagaggaccaatttcatatagtacaagtttcgtaagtcaggccaagtgtcaatttcaaaagacaagaaatgaaattgacagtgaatagtgctcataaattggtagcgtatataaagagaagttcctgtcacattatattcccactagaattattatccacagtaaataaatattattttgttatgccaaaaatatagcgagcagcttca

SEQ ID NO: 9117 - DNA, 910 bp, Homo sapiens
tttttttttttttttttttccagaaatgcttttacttttatttcagaagaaaggacataaaggcagacacttccccctcccgctccccacccctcccagctcctgcctcacccagaactggagtgaaaggccagggccaggaccagggtcccataaagcttgcccttcccccaacccttccttccctcaaagtggcaaggttagaaaaaaattaactatgttgttcctccctggcactggataaaggccccactgcagccaaggagaaagaggggggtccaggctcccctcccaggcagagaagctgcctggctggctagggggagggtggaggtggaggtaggttatgggacagagaggacaagaagtgccctgaacaccttttccctttaacctgacatatttatatatttacagttattagggagggaaggacatctgaggtgacatcagttctgcaaaggcagggaataaaagccaaatagcacccccatctgggtcacattttcctgcctcctagcttctaaaaccttcagtgggaaaaggggaaagtggaggtagggggtggagggagggaatgtttgaagggcctgagcccacagctcactccgaaaggtgaggcagcagaggaggggcagccgagtcccaccaagaacagggccctgggcagaggagaagcagccgttcccgccacgctgccaggaccccatcgccacaccccggcccagcaggggctatgccaaacccatctcctccagcacactccgtggcgactcatcctcctcttgcagtaggtcagcctgctcgatgctttcagcacactcttcttggaggtgtcctggacatccccccccatcaaaaactcatccaggatgaagtaggccttctcaaagttgaagatgatgtccag

SEQ ID NO: 9118 - DNA, 497 bp, Homo sapiens
gaatggcacgcagcggtacttgcactgcaccttcaccctggagcgtgtcagccccagcactagtgacctggcctgcaagctgtgggtgtggcaggtggagggcgacgggcagagcttcagcatcaacttcaacatcaccaaggacacaaggtttgctgagctgctggctctggagagtgaagcgggggtcccagccctgggtgggccccagtgccttcaagatccccttcctcattcggcagaagataatttccagcctggacccaccctgtaggcggggtgccgactggcggactctggcccagaaactccacctggacagccatctcagcttctttgcctccaagcccagccccacagccatgatcctcaacctgtgggaggcgcggcacttccccaacggcaacctcagccagctggctgcagcagtggctgggactgggccagcaggacggtggcttctttcacagtgttcggaggctgagtgctgaggccgg

SEQ ID NO: 9119 - DNA, 590 bp, Homo sapiens
  misc_feature (1)...(590): n = a,t,c or g
ggcggctgcggcaacagcggggccgatgtgtagttggtgactgcctctccagatgctgaggtgcctgtatcattggcacaggccagtgctgaaccgtaggtggagtaggctgtgccttctgaagcagtatctattcacaatgaagttgcagtctcccgaattccagtcacttttcacagaaggactgaagagtctgacagaattatttgtcaaagagaatcacgaattaagaatagcaggaggagcagtgagggatttattaaatggagtaaagcctcaggatatagattttgccaccactgctacccctactcaaatgaaggagatgtttcagtcggctgggattcggatgataaacaacagaggagaaaagcacggaacaattactgccaggcttcatgaagaaaattttgagattactacactacggattgatgtcaccactgatggaagacatgctgaggtagaatttacaactgactggcagaaagatgcggaacgcagagatctcactataaatnctatgttttnaggttttgatggcactttatttgactactttaatgggttatgaaggtttaaaaaataag

SEQ ID NO: 9120 - DNA, 637 bp, Homo sapiens
tttttttttagcaatatatatatataatttatttacattcacgcccgataaaacccctatgtgccccggcggccggcaaaggctgtgtacataaggccaagagtaagtgcgtgaatgcacttaagacaaagtcaggacacgagcttcacatgacaggccccgcgtgggcgaccagccagccctggggacgggcacgccacgccacacacacactcaccactgtacagcctgggactcccattgcatattcacaggccccgccgggcagggcacctcaaggctgggggaggggcaggggcagggaggagccgtggggtgtccctgggtgggtggagagggcagcatgtgagaggcaaatgtgcaccaacactgggcgtgagacgtgagcagcctcaggtgtacggcatgagatgtgtgtggttggggggtgtctgcgtgacccgggaggggggtgtgtgtgagatgagcacacgaggcatgcgtggcacgtgctcgtgtggtggtcgtgtgcctgaatccaggggctaccccctgtccggctgtggccctcggtcctgcaggcttggagcagggcccctcagacgtgcccctacccagcaggcacagaaatgtttgcataaggtccagctcaggcagg

SEQ ID NO: 9121 - DNA, 1632 bp, Homo sapiens
cggagcgctcctttccactcgggaaaccttcagaggagtctcagaaaggacacggctggctgcttttctcagcgccgaagccgcgccatgctcgtcctcagaagcgccctgactcgggcgctggcctcacggacgctggcgcctcagatgtgctcatcttttgctacgggacccagacaatacgatggaatattctatgaatttcgttcttattaccttaagccctcaaagatgaatgagttcctggaaaattttgagaaaaacgctcatcttcggacagctcactctgaattggttggatactggagtgtagaatttggaggcagaatgaatacagtgtttcatatttggaagtatgataattttgctcatcgaactgaagttcgggaaagccttggccaaagataaggaatggcaagaacaattcctcattccaaatttggctctcattgataaacaagagagtgagattacttatctggtaccatggtgcaaattagaaaaacctccaaaagaaggagtctatgaactggccacttttcagatgaaacctggtgggccagctctgtggggtgatgcatttaaaagggcagttcatgctcatgtcaatctaggctacacaaaactagttggagtgttccacacagagtacggagcactcaacagagttcatgttctttggtggaatgagagtgcagatagtcgtgcagctgggagacataagtcccatgaggatcccagagttgtggcagctgttcgggaaagtgtcaactacctagtatctcagcagaatatgcttctgattcctacatcgttttcaccactgaaatagttttctactgaaatacaaaacatttcattaactgctataggatctgtctgctaatggtgcttaaattctcccaagaggttctcacttttatttgaaggaggtggtaagttaatttgctatgtttcttgcattatgaaggctacatctgtgctttgtaagtaccacttcaaaaaatagttctgtttactttctgcatggtatttcagtgtctgtcatacattaaaaatacttgtcactgttttaagatcttgactcttcatttgtttcagaatagctcttctactgtattctgacaactctttgctttatagcattttgttgtattcaaatgataatggtagcatttccatgcttgtgacagcatttttaagttattaatatattttatcaacctttccatcatgtctgttttcctggttttttttggttgttttttgaccagtaaaatttattttgtaataccaaataggatttaagaaaattaacgtatttctttactatggaaaaccacattgtcatttgtgacatcatctatattaaatatggttttcacattagttatttgtcacttacttggaaaatgatgctgttaggtcctggtattaaaaatctagaaaagacttgttggtttatgtgctgaaatgtctttatttataattaattttaactactatttacttcatttcggatcctgtttaacaaagatacttgagacatccatttgttttaatgaaatctgtatggatatggaaatgcttgccctaataaaagcctacatggacaaaaatttaaaaagaaaa

SEQ ID NO: 9122 - DNA, 1771 bp, Homo sapiens
ggtcaaaactaagatgctgaaaaacagctcaccttcatttaccctcctacattaaaataaaacttctgtcctttccacatttgaaccttgaacaagggtgaaactgtaatctttttcctagttttcccttagtccatcctaaatagaatgaaactgggccagccttaaaggactgtactcagtcaattccactaggctggtttttgttcaaagcagtgtctgcccatgtccagttatgtcttcaaagaaatttgtatgtaagtgttgggacatttaggaaaaagtaattaaagttctaggctcagaagttgcttaatttgaacttcaattccaataacatgaactttccaaaatatatataattgctttcaagaaaataaaaattcttgctagtgagctagtgagcattctaactgaggaacaaaactttttttttttttcttcaaggggtccattcctttaagacaattttggatttctttaaaaaatctattttatttgctatattagatggctaacccaaaattgtttcttgggttattgagtaataagtatggtttaaatggcctaaatactacatattttaaaagccttgatgctgggcagagctgcactgaggatctgtgtttttaagaagtgcctgggtcgggtaaggtgaaattctaaactggaggacacattagtcagtttatctctctaaacttgttcatccaaaataggctttttaataaacaatttagcttatacttcaaattaataatccccccacacacattcttccctttgcctcccaactatttaccataaattatagatagaaccccctaaaaatgagagctatgaagtagtttctactaaatgttagaaatctgcttgataaactcttctttgtttttggcaactttgattctatcaagacatctttccccctcttcttggttacaccaaatgagtgccgatgcatttccctccacccctccagctctctctgtcctcagaacacagggccaccactaggcaccatccttagatttagggcaaaacactagtgcaagccagaaactcacttttgaacacttaatgcaaattcaggctgagtgagacaaaccagctgctcatttgatgagctttatttgtatctctgcgtggctggtgttctttcttctccctgccctcagtgtcatgaatcccaagatctttcgtgtagccaagagtagtgctcctttgtattcttattcttatttttattcttaagagcacttggtagtttatatcttagttttctttagaaaaatataaaaggacaaaaaggaaattgtcttaaggaaaccaggtgttcccgcacaggtgatggccgtggacgcagcatccatttcgggcggactttggaacgctgcactccagcgtgtgctcacactgcctccaaatggaaagcgctcctctcctcgccagcgcacagataccacgtggcgctgctgccatcggcacagcctactcacaggaacacaaaggagaagcaaaaccaccggctgaaccaagttgtttctcaacagccggctcaacagtacacatggtggggtactgcctctattccatttttacaaaatgaagtccactgggcaatgcgcacatactgggcaacatttgtgtaccaggttatcccatctttcttatatgattttttcttttttaagcatataaaaattacactcaaggtactttacaaattaatgtgttgaaaatctgatgtgaaataaaagttcttcaagag

SEQ ID NO: 9123 - DNA, 331 bp, Homo sapiens
gcgtcgactttttttttttttttttctcacataaatttttaataaacttttttgtgtctatgtcatatttcataatgtttttcctaaatgcttaacctaggaaacacatgtgtgcacacccatgccaaacacacaaatgaatttaacagtgtggtttatgaaatgaaagcaataatagtttgactcttcagaacctcttcattgtggcctatgtcaagctctctaatcttttctcctcaatgggagggccatgggttaaggggacagatggataaaggtacaagggtttttcaattgctaactgccaaattttcataggttatagtattac

SEQ ID NO: 9124 - DNA, 320 bp, Homo sapiens
tggggctatgcagacctcagttgcagactgggaacctatgagtcagacaaggccatgactgtttatgaatgcttgtctgagtggggccagattctctgtgcaatctgccccaaccccaagctggtcatcacgggtggaacaagcacggttgtgtgtgtgtgggagatgggcacctccaaagaaaaggccaagaccgtcaccctcaaacaggccttactgggccacactgataccgtcacctgcgccacagcatcattagcctatcacataattgtcagtgggtcccgtgatcgaacctgtatcatttgggatttgaacaa

SEQ ID NO: 9125 - DNA, 478 bp, Homo sapiens
cattttttagaattacactttcacctttctttttgcaattgaaagtgatgatgtcaaagtgggatttctgtactccaaggccccacccccaatttagcaagcagaaaaacgttccttgtatcactttaccttggataattgggtgccattaacacaaacaggtcacaatcttgctgttttctagccctgtccaccataatgagattcaggaaacatcctgtcagcctcctggaaagcatccttgtctccttagtatttcatttacaaactacctcttaacagagactgcttttcaaattggccaatcttacctgttttgtgttgtgattgcattttcaaagagtaattattttcagcatatacagttttgaaacctgtagctcctatgcaataacatagttctatagacattatttgggggaaatgtagtaataactcaatctatgttgctgtcctagaaaggaaattgcatgatgaa

SEQ ID NO: 9126 - DNA, 619 bp, Homo sapiens
ttttttttttttgcattttaaaaataagactttatttattttgatgtagttaccccactaatacaaccgagaaccactgacttcaaatattatgagagaaaattactccaggaatttttgcagagaagataatactttatcttgaaaatattttaaatattttaaaagatggaaactacacaaaagaacaaatactcaaataaagctgcaagatctttatgtcataatttcaacaagtagagttttcactggattatgtaacaagtagtgaattaaatagatcagactgaaagactggaaattctcgattaaaattatttagtctttcaaaattaaaaggtatcaccttagagaacactgaataaaactgatacaattttatgaagattttcccccaaactgggtgtaataaaagtaacatacaataaaagaattaaaaattattaaactctaattcttcctgtgtaaggttataggttgagagagattaccaagtttttccataattgcttcttctaaatccaaagaaaaatgaagtcggtaaactaaataagtgatttaaataagaaagtaaaccctaagtattattgaataatttaacagttataacacacaaaga

SEQ ID NO: 9127 - DNA, 693 bp, Homo sapiens
agaaaactctgaatctgatgttgaagaaaatcaagaaaaactggctctggatctccgattgtcaagttctcgagcagcttctatgcctgaattattggaacaactttggaaagccagagctgaaaaaaagaaactacgcaaaacgttgcgggaatttgaagaagcattttatcaacaaaatggaaggaatgcccagaaagaggatcgtgttccagtgcttgaggagtacagagagtacaagaaaattaaagccaagcttaggcttcttgaagttcttataagcaaacaagattcttcaaaatccatataagatacgttccttgaaaattcatatcataaagtcagttgtattccttgaagctatcatcgtgtgtacttggctggtacttaaattcgttttgtcaggcactcagagaatctcattttgtacttggttgtggtgccactaaacaaaacaaatgatgggagagtaagtaggccctctcaaggggagcgtaagtgatgttccatattaaccacagactgtcctctccacctttagcaaacatatggtttacttcattgttttgtactacagatacatccttttagcaaaagactggaattttatcctttcaacttcaagaactttggaaatgcaagctttttgttattaccaactttttgtttctcattactgaagaaaattggagg

SEQ ID NO: 9128 - DNA, 1443 bp, Homo sapiens
ttttcagtcctagagcctgcagtattgtaatttattgtaaaaccatgtaaccaaatacttaaatatatccacaacatctataccacagaaatgcatagtacataatatactaacatctcaaaataaacttctattacagttttatgcaaattatggtaaaagattatcacctgccacattttgaaatggcaccaacttcaacatcaatgcactagtcaaaatccttactagaagtgatgtcttctgcattatcatctgaacattcaaaatcaagctgttaatctaataaccacagtatgttatcatttaaaatcactgtatatttggatgttaaagcaggtagtaatacagcaggaaaagtgtttctaattcacagtttcaaaactaaagggtgcagttttcaaatatctgattgcttaaattggtcactcaatttaacaactgcctccttcaatacatgtaaactatgtttgcacagcattaggagatgtcttttatttcagaattagttcttactgttacaggagcaccacaaattttaaggaagaggctacagtgtgaaatgagctcactgaaggatatgttaaataaaattttaactacaatataaggtactgcaaaagctttgttccccagcacagatcccttaatcaggaaaagtagtgaacacttacccaatacaatatgtaaattcgctctacaggagatggggaaaaacctaactcaactaaaagaaaatactattattagctaacaaacctgtgatagctggcttcagaattttcctaaaaataaaattcaaaagcatacacagtatttatatcctttgataaggaatgtagacatccaaacggaatgaaagaaaaatctggttttaagaatttctaagtggaatcacacacacacaaatgggtaactgagaaaaactaaatattcaaaatttaagtaagaagatttataatagaaaaaagtggcaaattgttactgtgacttgattttctgaaaacatctgcaaattcacactggcattaagaaaacccaagtctcaaaaattctcctttctttctctccagataatgtgttttctgtgcaaaaataaatatctgaaaattgcactaatacttattttaacttctatattatgaataatctgcacatgctgctttacagacgatacatatttgtaaacttactcatgcaaaattagtgtgcgcaacagggatattgttaattttcatacttaaaaatgataccttattatcttttaaaaattgccaaactctgaaatggttaacaaatcttatatgggatattcttgtctgccagactaaaaatcaatttatgttgctggaaaacaaaaagttatacaaggaaaaaggaaacatgggtttttgttttggcaaggatttttggatttttaaatgaggaaaatttattaaaggg

SEQ ID NO: 9129 - DNA, 234 bp, Homo sapiens
tacccacagccgggcctggacatcatcaaggaactgacctctccccgcctcatcaagagccacctgccctaccgctttctgccctctgacctccacaatggagactccaaggtcatctatatggctcgcaaccccaaggatctggtggtgtcttattatcagttccaccgctctctgcggaccatgagctaccgaggcacctttcaagaattctgccggaggtttatgaatgat

SEQ ID NO: 9130 - DNA, 181 bp, Homo sapiens
ccctggacagcctgaggacagccccgaggctgaggcctctaccctggatgtgttcacggagaggctgccgcccagcgggaggatcaccaagacagagtcccttgtcatcccctccaccaggtccgaggggaagcaggctggccgacggggccggagcacatccttgaaggagcggcaggca

SEQ ID NO: 9131 - DNA, 829 bp, Homo sapiens
tgctcctgtgttgaatcaatatctagaatatgctcttgacagctctggagcaaaaagccaagtctctgacaaaagaatcagtactaattgggaaataaatcagagtttgctatagctaaaagggaaaaactcccacacatttatctgtcattttgattcgttctttcatcctatgtagtacattttcagggtctcaaagaagctcatctgtctatgaaggtgctcatggaagcatcttgttttacatatgatgaaaatggagagagcacttcttttgacaggaaacttcacttcttgttactgaaaaccgtcacaacagttcattatgtctgggctttcagaggtttcctgggagttagggagaaccattaggaccgttaaaatggcaatgtcaagagcattctggggttttataatgagtaccaagggaaattttttctctcgagtttgtaagaaaaaagtaggaggacctatttgggaagcctggggatatgtggaaatgaaaggcaatgcctctatttttttaaacggagtgttcccttcctaaccctttgtaagcctgaaaaaaatattatacccatggtttcccatgttcttgttattgagttgcccagtgaagaagagaagtttctcttcagttgtccctctctgtaggttaaatcagcccctgaaaagacacatttgcagctttctgtatttttctttgattaaacatcagttagaattcttggatccagttttttaattcttgttgtatatgtacggtgcttctggggcttatgatttctaatttagcagcaggagttacttctctaaaacctctacctcc

SEQ ID NO: 9132 - DNA, 785 bp, Homo sapiens
ttacttgtggcttatctagttagaacttagcagactttactgggaccaagtttactgctcttgtaggagctcctctcacaagtagttgtaatgctgtagcatgatactcaggatcagtagcttgagatgttactatttttctcttcatctttgacttgcagagagcctcccgtttttggatccaggcatcttttctgaatcctggttccatcagtatacctgctctcctatgaccccaaatcatagtcaatggtgcctcaaacatagcaccttaagttaaaggctgcctagtgctctgaggaaagcttgctgattatcttcctgatctactcaccccaaaaggcagaaaagcaacacagtcactgctgtggtcatttgtaatgtaaagatcagttatatatatatatttgtaatgagagcaagtatatactcattatagaatcaatttaagaagtttaaaataacccagagtagaatttctatatctagtcttggtttttttcatgaatatttgcaagtaattaccattaaattcacacatgaaagattaatctgaaagatcagagaccatgttattcctgaccacgatagaactgctcctgtggtttgggacaagtaataaaacaactgcttgagttttgtttgtaaaatacataattaatatttgacctacctcaaaatgtattgaggatctgtgaaatgctaagtgcccaaaataaaatattgctgattgtcttttttattaaaggtaaatttcctcattaagccaacctgccttctgtaag

SEQ ID NO: 9133 - DNA, 427 bp, Homo sapiens
tgtggattgaagggtaaaggatggagtatttaaaaagtactgtgacagaacaaagtactgtaagtactagagttgagtgtggatggaaacacagaacctgtaaatcaagtgtttcatttacgtgctcaactcctactgaattttagcaattaaaacatgaaaactgaaatattggttaacaaatgaaaatagaatttaaagacctgaacttcttttatgatctttaatgattatttgttctaatctttgacttggaaacccaaattattttcagtctaacgtacttgaaatttaactattaaaaaagttggaggaactcaaactttgaagttagggctccctttctccagataaagcacattgcctgggtttattgtaagggcacttaggaacatgtaaccaaaaacactcaatttaggaataggaa

SEQ ID NO: 9134 - DNA, 677 bp, Homo sapiens
  misc_feature (1)...(677): n = a,t,c or g
gctgaatattaagctactggggttatcagctgtttgggaagagtgtaagtgactacagtagtcatttttttctgcacctgcattattttattttgtgaaaggggaggttgggaggggcttaggggattggaactggggtttggctgaaagaaaaaaaaaaatgtaactgatgaatctaaacgacccactgcaccaacaatcatttatcaatggttctaagttactcattgccagttcaagccaaaggtcatgttgttaagggggtgcttctagtagcacttgtgcatctgagttgaatgaagctgtgcaaacccaccctttaaaccattccacccggcagtattcagcttcttaaccagtcgctatttaggaaaaaaaacccactagttaggccatcaacaagcattctttttatatttcttccagtataataaattattgatatcattgctgacttttatattatgggagggaaaaaataacattaattaaaaaggtgataaaaaaggcactgtttctatttttttctttttttccaaaaaaaggaaagtaataaaaactttaaattctttgtaccngtttaaaaaaaatgtattaaattttacatctgtggcngtgggagttgtttaggttntgggaaacngtccttgggaggntttggttttaggcncggtggg

SEQ ID NO: 9135 - DNA, 1245 bp, Homo sapiens
  misc_feature (1)...(1245): n = a,t,c or g
ttttttttttcaacatctaaatagacttttatttttattttacttgtttggacagaaaagaaaattcatcagctttcattagagtctccttaagtgttggaaacacattaaactcagaaatagtggaccttgtagaaaagcatcacaaattaaaaatatatttctccatgtggtaaaagtgctttcaatcccattaaagggcacagcaagggtgtttggaaacacgatctgaaatttggcctgcaatccgtggcatcgattccaaccacagggcgggggagtcaccatgatctagagcacaggagccacgtggggcccggagcatgcggacagcaacactcgcaataactgagtgaggacgaggcccatagcctgagtagaatagattctgtatttgtaaaaaatgaggtggttacatcaactgggttgaagggggactgggtaatcccagaaattccttgtttctggtctgtggggatggtcagatctgcccaccactctggcaccgaggcttccctggagacgcataaacctgggttgggaaagtgcccagatctgcctgggggacacacgagcctcgctgccagtgccgggcacgcagcctctccagtcctgccgtcagcaaccgcctccggccctcatgtcaaatcacacctgaccagagttgtcaccacagtcctgttttggggtttttccaaggccagccctgttgttctgaggggccactctgagcaggcaaacactgccagggtcactcactacacacagaggaaagacaatgagcaaatggccatcgtagagaattcggttgtgtgtttccagcaatgcctacttatttttccaagacaagtaattctgccaatgatgacatctgcgacaaagcttaaggnccgcgggctccccatgcgcctcgtggagagcaaccacgtctgttcggaaagccagcggcccttccccggccctccacaggcccagaacacagaactgtgatcatgcaaagagccgtgactgaggccggggtcagcgtcgggggtggagaggaggggacatctgccttttacattagatctgaagcaacagtaagaaaataacctgaagatatatttaaaaataaaaaatagcatcatccttcactccaagtttttggcatttccctctctcccctgcccaccagctaagcagagggaatgagcaggaatgcctcgtttttcagaatgggcacccactccccatttcaccactgta

SEQ ID NO: 9136 - DNA, 1131 bp, Homo sapiens
attttattggtgacttcacttttgggctcaaggactgtgtgaaccaacaaggggccagttttccattgttgtggtgaactgtcaagtgcaatttgcaataagttatcatgaaaagtttttagattacacgatcgcatatgctgcatttcacattttattggacattttaccccactgagtggtaaaaaggacagaggctacagatggagttgctttgtttatgaaagtattttggtttgttttctttcatttaattgcctcatatttaaaaaccatgggtccactgttaaaaccacatgtgtatgtgcagctttacattttattttacgtgaagcatgtgattaggaaaactcattttcttttcaagcctcaggacctacctgaagagaagttttcttgtagctcaagttgtgcatgaattactgaatattttactgtgcttttcttcatgaagggtacatgctttgtactcttcactgaaagctgaaaacatttcttgttaccctcttttgtgcctttttattttgccaaccgtgtttatagaaaggacattactaatgacattttgcagattaaaaacattcatttgaacacagtagtcccctagaaaaacaactctacaaaaattttgcagccttattcattataattttgataaaattaacacaaaatcagtcaagaaggaaacatgtatattagtgaagtgtttttggagactgtttgaatgtgaccaaatgtggttctagttgacttcttttcactttggcttatatcaattcttgagagttaatgtgatcatgatattgcaaacaactataaatggtctctaggccttactttgtgattatacgttatctccggctagaaaaaaataatggtagtaaagaaactgacaaactgaaaataagaaaacaaaaatcaaatgcctataataccataatgccagtttggtatagagtccaactttaaaacatgaattgctcgacagagttctattcagtagggtgtttctttgtattgtcttttgtgaatttattatggaaaatgctgcgttgtgttgaatggaaaaggacccaaattactgcttatggagggaaataaggccagcattgatcacttaacaaaaaaaaa

SEQ ID NO: 9137 - DNA, 759 bp, Homo sapiens
ctgataacgactattttataaatatgtaactgtatttttcttcctgtccagaaactgttattgaataaaattcaggtatattcctccaaaacccacacagttcagagattttcaaacaccaggtttccatttgtattaaaatgggcaagataatgaaggcacaggctcactttgtatcaataaaggacatcaaacacagtcatgaggcactaatgacataagcaatcacaaaaagcaagtgttcaaagtcttcagtaactcttctccctttaacatttggcaaaactcagtccagatattttaatacctcagaaagaaaaaataaataagagtagctacattaaaatgtcagattacttataattagtctttagaaatataagggataaaatgaaaggaagagaacacagatttcctatattcttgggattatcccttcctttcctgaggggctcagatgtctctatgcatctggccaaaatgcccagctggtaccctgaagatttaagagatttttggtagttgctggcatggtccctcgacacttaaagtttatatcacaaaaacaaaactaggttggtttcagctctttagtcctttgttaaaaaccataaatcaaatttggttatttaaaagtgaccttaaaaagtttaaagggaaatatatatattctatcttcccaataagaaacagatttcatatttatacttaaatggcaaataaatatattttagccaagcaagttcctctcctctatac

SEQ ID NO: 9138 - DNA, 261 bp, Homo sapiens
tagagctcagttttaattatgtagaattatttctccagcctgtgttaaactagaccatggattggcaaactttttttgtaaattgccaaatacacattttcagttctgaaagccttgtggtctttgttgcagctaatctactctgctgttgtgttatgaaagcagccataggtaatttataattgaatgagtgcgctgtgcctttcttccaataaaactttacaaaagcatcctgtgggctgggagtttaccctttgggaa

SEQ ID NO: 9139 - DNA, 391 bp, Homo sapiens
ggaaattagcacttttgaccaacaattttagttttagatatttacctataaggatataataggaggtgttcaaagatgcatgtaactcaatgtagtattaattataattgtaaaatagtaaataacatttttgtcaaatcataatgttaggaaaattagtgatggcacatttaaccaattgaattatattcagttctgaataccgtgatgcatgttcaaattaattgatacaaaaatccaacaactttagcagtttgtttaccagttattgagtaccaactgtgttcaacattgttatttcactcatatgaaatgataaatgtatgtgcgtgttatgatacggtcaataaaaccacttttataggaagaatactcacaaaaaaaaaaaaaa

SEQ ID NO: 9140 - DNA, 1022 bp, Homo sapiens
  misc_feature (1)...(1022): n = a,t,c or g
gggactacatcaagcacctgcgcgacatctgcgagggctacgtccggcagtgccgcaagcgcgcagacatgttcagcgaggagcagctgcgtaccatcttcgggaacatcgaggacatctaccgctgccagaaggccttcgtgaaggccctggagcagaggttcaaccgcgagcgcccacacctgagcgagctgggtgcctgcttcctggagcatcaagccgacttccagatctactcggagtactgcaataaccaccccaacgcctgcgtgggagctctcccggctcaccaagctcagcaagtacgtgtacttcttcgaggcctgccggctgctgcagaagatgattgacatctccctggatggcttcctgctgactccggtgcagaagatctgcaagtaccctctgcagctgggccgagctgctcaaatacacgcacccccagcacagggacttcaaggatgtttgaagccgccttgcatgccatgaagaacgtggcccagctcatcaacgagcggaagggtagacttgagaacatcgacaagattgctcagtggcagagctccatagaggactgggagggagaaggatctcttggtcaggagctcagaactcatctactcgggggagctgactcgagttacacagcctcaagccaaaagccagcagcgaatgttctttctctttgaccaccagctcatctactgtaagaaggacctgctccgccgcgacgtgttgtactacaagggccggctggacatggacggcctggaggtggtggacctggaggacgggaaggacagagacctccatgtgagcatcaagaacgccttccggctgcaccgtggcgccacaggggacagccacctgctgttgcaccaggaagcctgagcagaagcagcgctggctcaaggcctttgccagggagagggagcaggtgcagctggaccagggagaccaggcttctccatcactgaacttgcagaggaagcaggccatgcttgaattncagcaaagcagca

SEQ ID NO: 9141 - DNA, 480 bp, Homo sapiens
accaacagatggtgttcagcaccgcgatggacatgtagtcgtgtggcggccgcctcggctccagtaggaccacccctggcccctggggcggcggggggagagtggaaggtcactcctgttccccccggggtcccgcctgcatatggcgtgcccaccgggtagaccggcacgtaagcagtgcaaggctgcagctgcagggggtatccgggcgctacgtagccccccagcggcagcgtgcccacagtccccgcgtgcgtgggcaccacgaagccaggggcctgggcagtctgggctactggcatcattgccatcttcaaggccgtgcaggtgcgcacggccttggcccgcggagacatggtgtcggccgagatcgcttcacgcgaggcccggaacttctccttcatctccctggccgtgggcatcgcggcatggtgctctgtaccatcctaccgtagtcatcatcatcgccgcgcagcacct

SEQ ID NO: 9142 - DNA, 2156 bp, Homo sapiens
  misc_feature (1)...(2156): n = a,t,c or g
tttttttttttttttaacgtcaaggaaacaaaatgtttatttaaaaaaatgagatcaatatcattttaatgtagaagatgccatctttatttacaggctaataaaaaaatattaaactcaactagatataatacattatcataaatgcaatagatttgaggccaaccataagtgtaagactggatagatgggaatagggattacataatcagggatgtcaaatactgtgcatcttacacatgaatcacatgaaacctttttgtttctaaacatgaaaacaggcataagtcccactgcagtggggggaaaaaaacaggcaccacaggacaaggctgtgcttaactttcggataggctgttgacttggttaattatccagactccccaaattttcgtctttctcaaatttattttaacaatagtctcaccaccaaaatgttgcttttccatcatattcataacagagatactgtagaagagaattctagaggttaagtgtaaatatatacacgcacacatacaaccctcacattttattaaaacgttttctcaaccattctgtttgtgtatacatgtgtgtatttctccttctgtccccttctcgatgaaatgggctttgcaacagttccctccttacttgtttgggttttgtcctagaagtttcagggacatatgaatttctttcctataaatgtgaaaatattaaaattggttctcagtcctttggaactaataactaattcttagttcatccccaaaaaccatacattctaaaatgaacttttaactagttactttctaacaccggacaggaagctcacagtagcatctgagcaacggtgctctcccgtaggcttataaaccacagtgaagcaggaatgaaaaggaaactgacctgtggagttttaaactacctggaaacttttcattctatttatcagtccttaaaaggaatttatatcatgacaatctcacacaattcttcaaattacacagtgacctcataaaaattccaacttgaagttttaaaaaaccacctcttcatacacttattcggtagttcttgaaaatcaaagggttatagcttacatttcctaaggattcagtcatagcagataaaggatgttctctgaaaaaaatgccatggccattccatcccaggctgtgttttaagaagataagaataacatggtttcatgtcacagcaaaaaggttttcgggtctgctacaatggacaatttttttgactaaataaatacggtggctaaaatccagtttgcagatctcatgtcatgcatggaaggtatgtgtttggcataggggattcataaagaaaaaacaagttgttttttttcttttaagaggcctaccctgtcaagagcaaacaataacatgtaacttgcttattcatttgtacaattaaatactagcttttgctcagagacaatgctataaagtattttaatgtcagtaacaatatacactacgaagtgcacttccattacaaattaacatggtgatatacagatgaacaccaccacccaaaacaaaccataaatgagcaacagttaaaacattaaatttataaatagcaaaaccacaaaataaagtatatacattttatagatttacccttgaacaaatatatagtgtatctgggaaagccaaaaaaaatgtgttttatcacataacatctgaataccagaaatgaagatactgataatattctaaaagccttgtaggctttctcccacttaatattcctttaactgtacgtcctttaaaacagtgatattagcaaagctatcacctctttaatgcaatgttgtgactttgcctagcaggttacaatgacctgcagaatattaaatcagagaggaggcactgcatgtttaatcatgggacaacagacctaacaaatttataaacctgcatatgaagagagctttagtcaaacataaactgacatgaaaacccaaccaaaacaattactgtatcaaaatgtctttatctcatcttgcccaccttttagatgactggaaatcatttacttagaaagaaaactgccgtttgatttgaatgtactgtgtttcatgacatagtaataaatctgaacttttactaccagaaaaatttgtctttaaganccaggactat

SEQ ID NO: 9143 - DNA, 201 bp, Homo sapiens
tcccagcatgtggacagccagaggccccttcagaagagacaggtggagcagtgaggatgaggaggctgcagggccatcacaggctctctcccctctactttctggtacgcgcaaaattgtttctgaaggagaactagatcagttggctcagattcggccattaatattcaattttcatgagcagacagccatcaaggattg

SEQ ID NO: 9144 - DNA, 291 bp, Homo sapiens
gaactctattaatttaagagcctgttgtgacaggactcttgattttatgacaagaaaaaaccatgttggaattcaggcattttgttaggtaccttaatcatcagtaattagtatatgattatttcatttcctacaaggactctatagttgtatgtattaagtgtgtatatatgttcatatgaacatgcaagatataggcaatagaaattaagtaatccaaaagaggattccgttattcactaaagtatcttccttttaaatttggatttataaaatcatagtgcagtaact

SEQ ID NO: 9145 - DNA, 2211 bp, Homo sapiens
taaagtgctaagaactgtgcattgacatccaaacactttcttgtacaaaatttcccgtagcaaagcaaacctgctttgacttaatttatttgttaaatgttgcactttgtttatgtatgttttgtttttggtggggaataaggagagagaggacgacaaattctattgaagtatttattttgtgaagatggcaattttgcatttgtttaaatttttttcattctttaattttgttatcagtgccagcccaatatacctgctctaccattatttgcggtctgataaaagggtccttgtggggcaggttttgcaaagcttatcaggtaataacatatgccacataaccttgttgatatgtttgcttctgatttgggaagctaaacattggtgtttgagaggattgccaattattaattgtcattaccactactctccattactttttgtttggaaattgaacaaaggtcagtaatggtttttggctcttgttaatatccatcataaaatagattgttttagattctttccagggtgatttttccctgggtaccccgtttctacttctaaagaattgcttggcactttcatgtttcaaagggaaacattcgcttgtagttccattttacttgatctctacaagggactgacaacatttgctttacttttattcacagagaaagttggctttgatgtctcttaaagataattctgctagttgctgatcagccagtcagttcacctagcttcaatctttataggacttctaatctaattttcctatagtgtgactaaaagggaggcaaattattggaacggattattcaaatggatccttaaatattgctatgtataataagccagttattatatcaggaccatgttctctgtaggccactttctaaaaaagccacatatgtggcaattttcaggtttttagactattgctccctgtactttaaatgtaaaaaccacacttctgaacaactaagctcatgaatatgattttggttatatgcagcttttgactagcatgtattgtgtctttttctcctctatgaataattttatatttcatgctacttcttgaaagtttactctttgatgctctaagagaacagccagatggtttatatgaataatctttatctgcaggatggtggattggtaaattaggagaatgttgtttgagatatcaagatttatgtctgggaactaaaatatataatgccaaatgtgtttttgtcaattactagagaattctgtgcaaacatatcatctcttcaaatgctgcacactttgcttttgttaaacagcaggtagtagacagaacaataacagtttcgcgttaagacttttaaaggaaatagaatcgggattaagaaatcagaatttatagatatattgggataaatgaagaaataaaaatgtttgtctagaatgtagcatctagtgactttttaaagccctaacgtttacataaagaagctctagttcttatagaaataacaaagcaaataaaagttcttaacaatcccctctttcgaagtgcatttttttaaagcagggcaggagacatttggactctagctatatgacatactgggaaaggcagagggtggagggaagatttcacttcattgtctagcccagaatcttgagcaagctaaagaaaccatcataatctaaaattgcttcatttaacactaacaatttagactttttaaaccaagcattgaataatggctggataactgccgaagtaagcgccgctccatgaagtctgcttacttatttaaaaattgtgtatcagttttaaatactgttcattgtgtgcagatataaggggaatagggcattctgtagaattatacatgtctagtttgtaaagtgtgtcctgtgtactgcagatgtgtgttctctgggctttatgtatctgtacagtagctttcacattaaaaaaattgtggacaaacttgtccggggggtttgaggggagaatggtggtttatatcaataacgatgctgtactatagtccatgtaacaaaagatctggaagtcaccctcctctggcccacggaaaattttggtaatcttctaggttctaaaatgaagatgtatgggtactctggcagactgcatgttgtataatttgaaaaatactaaaagtggaaaataaaattgaattaaactttgaaaaaaaaaaaaaaaaa

SEQ ID NO: 9146 - DNA, 650 bp, Homo sapiens
actactacaaaaaaaaccccgctcgactttttttatgatttggataagatttattgatcagattgttttagaaaaccaacagcaaaacactgacaaggtacataaatacagattggacattttagggtaaattcactgtatttcctacttgcttgtaggaaaccgagtaaagtggaaaagctgtcctgatcatatggcatgcacaccagactgcaaaaggacgtccacactatttaacaggactgtggcaaaatagctttaaagtaaggcgagcattgtgtatggcccaagcataccctgtaggaagagcaaagctaggctcacctctcagagactgtgtctcagaaagaggcttcctttcttgcctaggttcttccatgaaattcgtcattggcaggtgcttttccagggagatgcctgtgctctccctgtgcagactctgtgcacaaggaagtggctttagagagtgtgttttctgatgcctcctttatattctaaatgtataactagtaaaacaacaattactaccgcttggtgaaattgttttttgttttttgtttttttctgaaaactgcctctgactccaccctgtacactgactaagcagggcccttaaaaaacttataaaaagttgtttttttttgttttca

SEQ ID NO: 9147 - DNA, 716 bp, Homo sapiens
gtttccatggctgtcagtcttgtgataatttaccagtatgttgtcaggaacatgccagatccccacaaccttccaatagtggctggttggaagaaatacccactcttttttggtactgctgtatttgcttttgaaggcataggagtggtccttccactggaaaaccaaatgaaagaatcaaagcgtttccctcaagcgttgaatattggcatggggattgttacaactttgtatgtaacattagctactttaggatatatgtgtttccatgatgaaatcaaaggcagcataactttaaatcttccccaagatgtatggttatatcaatcagtgaaaattctatattcctttgggcatttttgtgacatattcaattcagttctatgttccagcagagatcattatccctgggatcacatccaaatttcatactaaatggaagcaaatctgtgaatttgggataagatccttcttggttagtattacttgtgccggagcaattcttattcctcgtttagacattgtgatttccttcgttggagctgtgagcagcagcacattggccctaatcctgccacctttggttgaaattcttacattttcgaaggaacattataatatatggatggtcctgaaaaatatttctatagcattcactggagttgttggcttcttattaggtacatatataactgttgaagaaattatttatccta

SEQ ID NO: 9148 - DNA, 2267 bp, Homo sapiens
cagctgagatgtcacctgctttatttctggctttggctgtggtctgtgatacccatcctgcttgatgttctgcagaatggcacttgactgctgggcatgcatgaagttaagggcaagaaacagtatgccatgtgttcggtaccatcatgtgtctcttcttgcttctgggcccttctactggtgaactttcatcaagatctgcgccatgccgtgtcactatcaagccattaagttttgtctgggttgctgtcagccccagttggcttcctggtcaacaaggacctcaagaactgcctgtggaccgaggccccctaccagtgcatgagacacacacctaccctccccagctttccaggaaccctactggctgccagactgatgggcgggctggtatgtgtggacatgtgttcactgtcattatgctgtggctccagctggggaggtagctgagaacttggcactgcgcacacatactaggttgaaagagagttgaggaaaccagaaggccaagtggatctgctggcaaaccctgaacctgtctcctgcgcttgctctacagttctgaagttgaaaatccttttcatgcctagcatctgcttgagttataaaccccaaggcagccatgtcatagactagtgtttactcttgttttgactttgttttaatgcttcctaagacccaagtgcctcctgctgtttcctcctttgtggtagcctctggccattctgggacctcaatccccagctttcccacttttcagcagtcctttggctcttctttgcttctacctcaaatagccccaggagtgggctttagtctccaatatggagcatctcaagcttctcctgggggatggggattgggatgggcagaatctgttttggatctccgggttatttccagtgggtgtaaaagcagagctgggcctttccctctcttatccctgagggtgggtaagaaggactgtatctacacctgttcttccctaccttctcttttgttagggaggcctcattctaagttcctcaagagagtccttggcttaaagctgtagcaagggtgtgctaggtgggggatttggagcaaaaccgtcgagtaggcatgatactggtatggagtgggcctgcaaaatcagacagaaatgggcttgagaagccgcagggggagcatgcctgtctctcagtgatagagtatgggagggacctccctagcttggaaaatgagaattgaaggggttatgaacaaataggatgcctagttgaggatgttcccaaagttttgtccaatcttatcattagtagattttataagccacagagacaaaccagaaacggaataatgttactttggatgctttatttttttgttctaggtgtggctttgtacatgcagaagaatgctatatggctggcacattttgcctttaaagtcttacgacttttccccattttagtctaatgggaagatacagatgtgcaagtctgcttttttgttttttgttattattttttttttttttgctctgtgttatggacattttcagacatgcacagaagtggagaggatggtccttggacccccatgtgtccatcacctagctgcatcacttatcagctatggtcaacctggtttcatctgtatctctctcttttcacctgtattgtttattgaaaatccaagacactatgccaatgcaaccgtgactactttgggagattggtagtctcttttgatggtgatagtgatggggtgcactatcataatcacatcaggtctgctttttgcttttaatgttaactaatgaagttccagagatgggccttagaaatgtgttttaagaattaacaaggagtctcaaaaagaaatgagagggatgcttcctttcccttgcatctacaaaacaagagagagactgttctgttgtaaaactctttcaaaaattctgatatggtaaggtacttgagacccttcaccagaatgtcaatctttttttctgtgtaacatggaaacttgtgtgacccattagcattgttatcagcttgtactggtctcataactctggttttggaagaataatttggaaattgttgctgtgttctgtgaaaataacctccccaaaataattagtaactggttgttctacttggtaatttgacaccctgttaataacgcaattatttctgtgttcttaaacagtataaatagttgtaagtttgcatgcatgatggaaaaataaaaacctgtatctctgttaaaaaaaaaaaaaa

SEQ ID NO: 9149 - DNA, 319 bp, Homo sapiens
ccgacacccacgggcggagaatcacctgctgccccgcagacccctgtcccttcctcccggaccagcagctagaggctctgactccagccaaagcatgaatggccttgaagtggctcccccaggtctgatcaccaacttctccctggccacggcagagcaatgtggccaggagacgccactggagaacatgctgttcgcctccttctaccttctggattttatcctggctttagttggtaataccctggctctgtggcttttcatccgagaccacaagtccgggaccccggccaacgtgttcctgatgcatctggccgtg

SEQ ID NO: 9150 - DNA, 4710 bp, Homo sapiens
atttgttctctgcttcttccctttctactcacctttgagtatttcagcctcttcatgaatctatctccctctctttgatttcatgtaatctctccttaaatatttctttgcatatgtgggcaagtgtacgtgtgtgtgtgtcatgtgtggcagaggggcttcctaacccctgcctgataggtgcagaacgtcggctatcagagcaagcattgtggagcggttccttatgccaggctgccatgtgagatgatccaagaccaaaacaaggccctagactgcagtaaaacccagaactcaagtagggcagaaggtggaaggctcatatggatagaaggcccaaagtataagacagatggtttgagacttgagacccgaggactaagatggaaagcccatgttccaagatagatagaagcctcaggcctgaaaccaacaaaagcctcaagagccaagaaaacagagggtggcctgaattggaccgaaggcctgagttggatggaagtctcaaggcttgagttagaagtcttaagacctgggacaggacacatggaaggcctaagaactgagacttgtgacacaaggccaacgacctaagattagcccagggttgtagctggaagacctacaacccaaggatggaaggcccctgtcacaaagcctacctagatggatagaggacccaagcgaaaaaggtatctcaagactaacggccggaatctggaggcccatgacccagaacccaggaaggatagaagcttgaagacctggggaaatcccaagatgagaaccctaaaccctacctcttttctattgtttacacttcttactcttagatatttccagttctcctgtttatctttaagcctgattcttttgagatgtactttttgatgttgccggttacctttagattgacagtattatgcctgggccagtcttgagccagctttaaatcacagcttttacctatttgttaggctatagtgttttgtaaacttctgtttctattcacatcttctccacttgagagagacaccaaaatccagtcagtatctaatctggcttttgttaacttccctcaggaagcagacattcatataggtgatactgtatttcagtcctttcttttgaccccagaagccctagactgagaagataaaatggtcaggttgttggggaaaaaaaagtgccaggctctctagagaaaaatgtgaagagatgctccaggccaatgagaagaattagacaagaaatacacagatgtgccagacttctggagaagcacctgccagcaacagcttccttctttgagcttaggtgagcaggattctggggtttgggatttctagtgatggttatggaaagggtgactgtgcctgggacaaagcgaggtcccaaggggacagcctgaactccctgctcatagtagtggccaaataatttggtggactgtgccaacgctactcctgggtttaatacccatctctaggcttaaagatgagagaacctgggactgttgagcatgtttaatactttccttgatttttttcttcctgtttatctgggaagttgatttaaatgactgataatgtgtatgaaagcactgtaaaacataagagaaaaaccaattagtgtattggcaatcatgcagttaacatttgaaagtgcagtgtaaatttgaagcattatgtaaatcaggggtccacagtttttctgtaaggggtcaaatcataaatactttagactctgggccatatggtttctgttacatatttgttttttaaacaacgtttttataaggtcaaaatcattcttagtttttgagccaattggatttggcctgctgttcatagcttaccaccccctgatgtattatttgttattcagagaaaatttctgaatactactagtttccttttctgtgcctgtccctgtgctaggcactaaaaatgcaatgattattgatatctaggtgacctgaaaaaaaatagtgaatgtgctttgtaaactgtaaagcacttgtattctactgtgataagcgttgtggatacaaagaaaggagcaagcataaaaaagtgctctttcaaaaggatatagtactatgcagacacaaggaattgtttgataaatgaataaattatatgtatatttgaggccaatttgtgtttgctgctctggtaattttgagtaaaaatgcgagtattccaggtatcagaaacgaaaacacatggaaactgcttttaaactttaaaatatactgaaaacataagggactaagcttgttgtggtcacctataatgtgccagataccatgctgggtgctagagctaccaaagggggaaaagtattctcatagaacaaaaaatttcagaaaggtgcatattaaagtgctttgtaaactaaagcatgatacaaatgtcaatgggctacatatttatgaatgaatgaatggatgaatgaatattaagtgcctcttacataccagctattttgggtactgtaaaatacaagattaattctcctatgtaataagaggaaagtttatcctctatactattcagatgtaaggaatgatatattgcttaattttaaacaatcaagactttactggtgaggttaagttaaattattactgatacatttttccaggtaaccaggaaagagctagtatgaggaaatgaagtaatagatgtgagatccagaccgaaagtcacttaattcagcttgcgaatgtgctttctaaattataaagcacttgtaaatgaaaaatttgatgctttctgtatgaataaaactttctgtaagctaggtattgtctctacaaaattctcattgtatagttaaaccacagtgagaagggttctataagtagttatacaaaccaagggtttaaatacctgttaaatagatcaattttgattgcctactatgtgaactcactgttaaaggcactgaaaatttatcatatttcatttagccacagccaaaaataaggcaatacctatgttagcattttgtgaactctaaggcaccatataaatgtaactgttgattttctcacttggtgctgggtactaggtttataaaattgtatgatagttattatattgtgcaaataaagtaggaaaatttgaataacaatgattatcttttgaatacggcatacgcaagggattggttgtctgaagaatgccactatagtagttatctattgtgtgccaatctcattgctagggcattgggggatgcaaaggataaaccatctttattgtgtcttgggtagcagaagaaaatatgtgtaaaatcaatttataatttgtaaactgccacccatatataagctatatctgctgaatgatcattgattactcttatccttagagataacaactgggggcacaaacatttattatcattattgaacctacaacagagatctatgtgtagatttacgaagcctacagttctatacagataggaatgaactattggcttactgaatggtgattactttctgtggggctcggaactacatgccctaggatataaaaatgatgttatcattatagagtgctcacagaaggaaatgaagtaatataggtgtgagatccagaccaaaagtcatttaacaagtttattcagtgatgaaaacatgggacaaatggactaatataaggcagtgtactaagctgagtagagagataaagtcctgtccagaagatacatgcttcctggcctgattgaggagatggaaaatttttgcaaaaaacaaggtgttgtggtcttccatccagtttcttaagtgctgatgataaaagtgaattagacccaccttgacctggcctacagaagtaaaggagtaaaaataaatgcctcaggcgtggctttttgattcatttgataaacaaagcatcttttatgtggaatataccattctgggtcctgaggataagagagatgagggcattagatcattgacagctgaagatagaagaacatctttggtttgattgtttaaataatatttcaatgcctattctctgcaaggtactatgtttcgtaaattaaataggtctggcccagaagacccactcaattgcctttgagattaaaaaaaaaaaaaaaaagaaagaaaaatgcaagtttctttcaaaataaagagacatttttcctagtttcaggaatcccccaaatcacttcctcattggcttagtttaaagccaggagactgataaaagggctcagggtttgttctttaattcattaactaaacattctgcttttattacagttaaatggttcaagatgtaacaactagttttaaaggtatttgctcattggtctggcttagagacaggaagacatatgagcaataaaaaaaagattcttttgcatttaccaatttagtaaaaatttattaaaactgaataaagtgctgttcttaagtgcttgaaagacgtaaaccaaagtgcactttatctcatttatcttatggtggaaacacaggaacaaattctctaagagactgtgtttctttagttgagaagaaacttcattgagtagctgtgatatgttcgatactaaggaaaaactaaacagatcacctttgacatgcgttgtaggagtggggaataagaggaggggctttttattttttccgttccatacgggtatttgatggaaggtggatacttaaatgcttaaatggaa

SEQ ID NO: 9151 - DNA, 521 bp, Homo sapiens
ttttttttttttgcagcttgagtaatgccgactttatatcagcacacccagtgcccccacgttcccgctggcccaggtcccggagaccatgatggcacccacagtggacttcgcaaaggagcgtggggaccccgaaggccaggccacccctcagatgggggtcccatgctaaagcagacggtgccggtgccgcaggcgtcctgagacccacggtggagcccgggcctggcgtgcgggaggcggccacgacggcgcctttctcccaggaactccgggagggaccccaggactcagcgccagggcagccttggcaggtgcagtgaggcagtgacttgtgggggttagatgtgggcctgccccacgtgggcagggatcagccaggcatgggggtccagcggatccgagcggggccacagagctctggaggacttttctgcacaatgaatttctgcttaaaaacagagatcaagaggaagctctatcctgcagctccggaaatgggtggctgcgtgcttggggtc

SEQ ID NO: 9152 - DNA, 148 bp, Homo sapiens
agcccagctggtaaaactcgcccatctcttgccttccttcttgccttctggataattgtgtttttgcaatagcttctcatttcccttctaaagaagaaaagcaaaaagcaaaagccaaacaaatatacacatattttatatcaaagat

SEQ ID NO: 9153 - DNA, 697 bp, Homo sapiens
gttgggccccggctctattctgggctgcgggcctgggaagggctcgccgggtgccaaatgagctgtcctaactctgcggggctgcagcttcctgcatgatgctggggagcttggcgcctgacccaggatctagaaggcactctgggcaggccgcgctccgcccacgaaggtacccaaccctctgggatagatgcaggaagcgatggttaagacccattttcacccaacttctcgccgcaggtctggcttaccacacgctcctccccattcccagtgagccgctttttgcagcaccaggcgaacacttacaccagtgctttgtaaaggaatcttattgtccaccccgtgtcttggcaaaagaacagtgatcacacagattcctacttgggctctttcctttaatcttcggaggctgagtttgcccaactcaggtttaaccaccaaggactctgagagctggcaggtctgagtaaccctggtaacaattctcttcaccttatcaaaacctgagctaaaaccaatgcatcagctgatgatgacagcagagagtggcagggctgaggacccaaagtcatttcccaggctggcggagaataaactgccagggagaagaatgagaagacaggagacaaactgtttggaaagctaaatcttccctcttaatgaataaaggtttttgccttgtcttaaaaaaaaa

SEQ ID NO: 9154 - DNA, 1057 bp, Homo sapiens
tacaggtgtgagccaccatgcctgggctaaactctttaagtctctagtaaatgcagctagattcaaatgggctgataaccaaattttaacacatcagcattcaccaccaggtttacttttattttcagattggctcattttgtgcagaccttagagcaaagtttcctttatggtatctgtgtacgtatccaaacttcttttaattgttcacagattttaaaagcggtagcaccacatggttgtgtagatcagacctgtgtatttagatcagacctgtgtatcacgtaaggtcgtgagtgcagtgcagatgagcaccatttagttatatgtgcctaggcaaatctccaacacagttgatgtgtagtcttgtggtagatttgtgcatactgtaagcaaattgcttagcttctctagacatcagtttccacatctgaaaaataagaagatgagagtacacggttgttatgaacaaatgacttaatgctttttaagcacgttgcatgacatctggaacacagaaagccctcaatacattgaagctcttaggattttcacgatgttcctgtctgctcaatgcatgctttctttattgttctgacagttgtgtggtaacaagctaatatgcttccagttgacttccagtctaccctggtgttagaaaccgtttcatctcttattgtaaatttgagtgcttgttgttttttatatttgtgatgactcttccagcagttgttgacaattgttagaggtttgacttttaaataattacttattttttctgattgtggttcagtttaactgaagaatatcctgagattgtaagaaaagcattttttaaaaggtatcacttgtgatcatttatctttctaaattctatttttaatactgttccaccaaagtgatgcagtggttaccatgacaccctaatttcatgtgtttttgtatttatgaaaatagtttcattgtcatttattggcggtatacaaagtaaaatgttataaatgtgaagttataaaataaatatatgctaataaaatcctgagtttttctgattcct

SEQ ID NO: 9155 - DNA, 363 bp, Homo sapiens
gccggtcacgatgccccgaagaagcaaagccacccgcagcccgtgaaatgcgagggggtcaaagtggatactgaagactccctcgacgaaggacccggggccctggtattggagagtgatttgctactaggccaggatctggagtttgaggaggaagaggaagaggaggaaggcgacggcaacagtgaccagctcatgggcttcgagagagactcggaaggagactctctgggggccaggcctgggcttccctatgggctgagcgacgatgagtctgggggcggccgggcactaagtgcggagagtgaagttgaggagccagccaggggtccaggggaggccaggggtgagaggccaggccca

SEQ ID NO: 9156 - DNA, 1902 bp, Homo sapiens
  misc_feature (1)...(1902): n = a,t,c or g
tgtggaggactgtgtacctcagtcctctctctaaactcctcagcctcccaacaggggcctcctcacctgggttctgagtgtgtaccccttttagagagtgagatcgcacccgggcagcactcgttaaagctgggccagcacgagtgactaaggggagagagcatgacatagacctgggtggcaacggggacctctggaagcaggtgggagtaagagaggagagggcagtggagggtagaggaaaaggacctccagaggtggggtgtctgtgggggcggcctttgcctccctaaacctgtgcggaggagtggagtgtgcttgtcgctcaaacacatctctgggggactgaggacgttgtcacaagcccccaactggagaaataattccaatggcagggtcagaggcaagcattctctaaatcttgcccaacccttccatccttccctatcctatgagctgaagccctgctgtgtgtcgcagggtcttcaaaggggcatcctgccaccaccccagggcgctggccacgtcctgttcccctaaagctctgacaccgccttctctccgtgtgctccccccaccacctccaccctgatgtgcttcagtgtgcatgtctgtgaacagccctcctgccctgccaactcccctggctaaagtctccccagcagatttagcacccagggattgagctcacatttcaggctagagaggataacccttgggccacccacatctctcacccctgatgcttcttacttcgcctgagccatcagaactcctccttaccctccttcagcccctctcatcttccttcagcccagccaggcctgcaccaccaactgtgtggcctccacctatgcaacatcgcctctggctccccttcccttcttcctagcggggagtgtgaggggcccaaattgtggggataccatggcccatggcttctaaagggtttagctttactttcaggtagagatggctgagtgaggagggagaagaggctagagagagggaggcttgggcgggggaaacagctgcccaccaggttttcctggacagcagtgcccacctgcctactagcactgaacctgcctggaccctgagtctgtgctcccttgggggccctgcgtttggaaacacccttctttccctctgaatggacatctgtaaggtacaggtggtgagctgcagcctcaggctccatttcttagccagctggcacctggatgtcatgctttgtgtggggacagcctggccacctcagggctccaaggaaggaggaacgtggctcctcctccctcaggcctgttcctgagacagagcctggtctcacaagaggggaagggggacctctattattatttttgcctgtattgaccatttctgcctaggtcgtctcagacagcctcatctcccacacatgcacagacttagagagaaaccaattctttggtctattttcttggtagctttactgattgccagggaaaatgaaaaccagaaaattaattaatctctaaaattaaactttacactgaatgttcttgtttctctaattagaacttctgctagcagctgtggnnnnnnnnnnnnnnnnnnnnnnnnnnnnnnnnnnnnnnnnctacacgtttgcactccggaactgtcagagggtgtcaggcacagacagactctaggttgcctagacaggcacacacatgcagtcactcccaagccccctttggtgctctgctcagcgcctgcttagcggaaggagtccctggagagcaggcactcctgggactggggttgtagcccatgacctgccctttggggacacagttctggaggctctgggccaatgaatcagcccaaggaggatgggcaatggcgctcagctagaatcagtcagctaggtctcttgtg

SEQ ID NO: 9157 - DNA, 516 bp, Homo sapiens
  misc_feature (1)...(516): n = a,t,c or g
ttttttttttttttctgcctcatcaaaatttattaagttgtacatatacagtatattatcagaacaacaccaaagtggctacacttgacagattctcctaaagtggacataattttcctagagattattattccccttgataaaagttgtaatgattgtgaaagctttgaaagacaagcttgaagggccacagcattgactatcagggcaaggagctatagatgccatgcacgcagggcccagaaggcagcagagccgcaggaggctgtggcagccccgtttctgctgtgagcaaacagtgctatgaggagaccaacacaaagaggaaggtgcttcctctccaggggtagggtctttgggttcacattcggaaccacaggacaccacacccaggagaagaaaggagaacaaaactccctacagggtctgggttccctccaagagacggggccagtgtggcnaaaagagggcacgagttgagatgtggaagtttctggtgaggnacccattccttca

SEQ ID NO: 9158 - DNA, 687 bp, Homo sapiens
  misc_feature (1)...(687): n = a,t,c or g
tgaactatggattctgttttatggtggatacctaaggtttatatagtngttgctggaaaacttaaagtagctggtgagcttcctgttatgtcactattaaagaatgatggctgatgtaactctgcccctgaaatctacaagggtcatgcccaaattaatacaggttaacctttgtagaggtatatatgttggcattatttattgacatttatgcttcaagcatgtcttattttatgtaattttaagaaatactctatttaacttgtgaaatatacctaaaagcatactagttagctcttagactctcacttagggagggtaaagaaacatcactgatgccaatatgaagatctataaacaaatcctttgtttagaacttttttctcttcgtgcacctcacaacacacttaccatggtacatatttcttaatgccactaagaaaggcaagatagtgaacgcagaattatttatgtggtatagtgtttgttttcctgttttagtgcttttgtagctaaacttactgggaactgcatcacaactacatttgcagtctcagtggggaggtgggactagcctgtgggttaattttaggagcttaaaagttttataaggctttaaaaacacatacatgtatttgggattcttgtcttaacccctcacaaggggtggtgggtgatccngcctgg

SEQ ID NO: 9159 - DNA, 753 bp, Homo sapiens
tttttttttagtgctcacaagtttatatttttaggtttgaataaagattcttgtgtattttctaaatacacagacaaaacagttccggaagtttacatacatgtcttaggacacttatattaggtaggtaatttacattttaaaaagttggtcttcgtaaaagatcttcccaaagagcttttacaaacagcaggcggaagtgttcttttgtttacagtgttcaaaatgccaatgctcccactaaataatggcctcaaccatctctcctcaacccaaaatattgttctcaatagctagtgtactccaaatttaagtacccaatgtcataaaatttagggctagaaaacatcttttgaagtgtgcttatccctaacacattttaaactatctagaattctttaacttcagttgaaagcagagatacagcagaaaaaaaaaaaaaactttccattttaagtcctaaagtgactaaacacctgttagttctaagtgtggatattatgtaccatagttaagtttaaggatctgggtgactgaacggcacaaaaactggggtttctatctagttcttcagataaaaaccattcttttataaaattaaaatgccacagccagttaagagcatgtgctacactgatgtgtcttaatatagtcaaagtgacaaaacaactgctttatgaagaaagagtagtaaggaaatttattggggggaggaaagacactcaaaattctaaacacagctgtcttatagga

SEQ ID NO: 9160 - DNA, 529 bp, Homo sapiens
tttttaatatgtcacactgtttttatcaattctttatttaggtaacaagttggttatgttcactgcattgtatgaaacatcacaatatcatactgggaagtactatcagtacagggttggatcagagtggacagtttgaacgataaaccattttgcattcttcattccctatcttttaacaaccccccaaacccagtaaagggacaaacagcttttcacatcatcatgtaaagcactttaacttacaaggctaaaatctaaagaataaataaaatatattgtggcaataattccttttagaccaaaaatcaggtgcacaataaatcaaatgatcaggaaagctgtctgtatttaaatgtgtggctctccagaaacagcttcaggaaaacgttacagaaaataccatgaattccatttcacaaaggaccagatgatgactcattttaactacacacaagggcaattacatcctgctgaaacacaatttaaacatacagggaaatgtttacaaagcatccacaacatgtaa

SEQ ID NO: 9161 - DNA, 717 bp, Homo sapiens
cacagttgaagaagcgaccgagggactgggagtcgttagtgaggatgacgcggcatggcaagaactgcaccgcaggggcccgtctacacctaccacgagaagaagaaggacacagcggcctcgggctatgggacccagaacattcgactgagccgggatgccgtgaaggacttcgactgctgttgtctctccctgcagccttgccacgatcctgttgtcaccccagatggctacctgtatgagcgtgaggccatcctggagtacattctgcaccagaagaaggagattgccccggcagatgaaggcctacgaagaagcagcggggcacccggcgcgaggagcagaaggagcttcagcggcgcggcctcgcaggaccatgtgcggggcttcctgggagaaggagtcggctatcgtgagccgggcccctcaaccctttcacagccaaggccctctcgggcaccagcccagatgatgtccaacctgggcccagtgtgggtcctccaagtaaggacaaggacaaagtgctgcccagcttctggatcccgtcgctgacgcccgaagccaaggccaccaagctggagaagccgtcccgcacggtgacctgccccatgtcagggaagcccctgcgcatgtcggacctgacgcccgtgcacttcacaccgctagacagctccgtggaccgcgtggggctcatcacccgcagcgagcgctacgtgt

SEQ ID NO: 9162 - DNA, 1070 bp, Homo sapiens
  misc_feature (1)...(1070): n = a,t,c or g
aagctttctttccaagatacctagcgtcttctctggttcagacattgttcaatggttgataaagaacttaactatagaagatccagtggaggcgctccatttgggaacattaatggctgcccacggctacttctttccaatctcagatcatgtcctcacactcaaggatgatggcaccttttaccggtttcaaaccccctatttttggccatcaaattgttgggagccggaaaacacagattatgccgtttacctctgcaagagaacaatgcaaaacaagggcacgactgggagctcgcagactatgaggctgagagcctggccaggctgcagagagcatttgcccggaagtgggagttcattttcatgcaagcagaagcacaagcaaaagtggacaagaagagagacaagattgaaaggaagatccttgacagccaagagagagcgttctgggacgtgcacaggcccgtgcctggatgtgtaaatacaactgaagtggacattaagaagtcatccagaatgagaaacccccacaaaacacggaagtctgtctatggtttacaaaatgatattagaagtcacagtcctacccacacacccacaccagaaactaaacctccaacagaagatgagttacaacaacagataaaatattggcaaatacagttagatagacatcggttaaaaatgtcaaaagtcgctgacagtctactaagttacacggaacagtatttagaatacgacccgtttcttttgccacctgacccttctaacccatgggctgtccgatgacaccactttctgggaacttgaggcaagcaaagaaccgagccagcagagggtaaaacgatggggttttggcatggacgaggcattgaaagacccagttggggaggaggaacagttccttaaatttctagagtcagaattcagctcggaaaatttaagattctggctgggcagtggaggacctgaaaaagaggcctattaaagaagtacccttcaaggagtttccaggggaattattgggccagngttttcttgggctncccggggcccccccagttgct

SEQ ID NO: 9163 - DNA, 920 bp, Homo sapiens
aatagattgtattattcatagttttaaaattatgacaatgtcataattactacaaagctaaataatcgtgtttatttttgtgcagttgccctttgatagttcctggttttaaaacctattaagtgtataatcttacaaatagtcatctacaaaatttatggagaaagtgcccagcccattcacatcacatggaccaggaattcttttgtaaatgacttaaggtaacatcatgcagttcagtgcctaataaatgctttttaatgatgagcatttctataatgactcgtaagataccatagtctgatttttctcacattaaaataactgaagtcacttgtgtaacgtagttatactttgctgcattttaattaaccttcaacagctattaaagtggaatgtaagttaaattttgaaggaaaggaaataaatgttttccatatttcgtcttgatttactttctgtatgagaacagctgtgtttttgataggtttatggtttgcatgagttcatatttaaagtgatccaggccaatgcatggctattgctgtaaatcttgatgtttatttctgccttgtaaagttctatcacggcctacctggaatttaaaattcagtagacaaattaattggtcctctgcacaacttttttaataagtagattattttacaaagaaatttgaacaaatttaattgaatcttttgtttagcttgcctctaagaacttttcttaataaagctcccaaaacttctcagcaaataaatctcccttaagtaggaaaactagatttcatatttgcttactttgaattaacagcaactttccacaggtaaatctgttcttgccaaagatgtggggcagaatagttaaaaataatatttttatgtttcatggttctaaatggaagccataaatgcagtaat

SEQ ID NO: 9164 - DNA, 1329 bp, Homo sapiens
tcagaaaactaaagcagcacctttattttatacatacaaacagtataaaatgtttattaggtaagagctgtgttttgtttacaatatattatattgcttcaagccaatgcaaaaagttcatacattatattccctatttcattgtgtttagaatatattatattgtttaaatgccactaccacagtgtaatttttttttttttaatactgaatctctggaataatggtaaggtcaaaatatattgtattgagagtttaaaaattaagagcaatttttaaaaatgtaacaaacatctaaatatctgacaataaaatctgaaatgctgtaacttcaacattaactgcaccatccaaattcttgtgacttacgcatttttgcccaatttaacctttctgatgttcccctgcccccagacaccataaatgcattgtaattttgaaaatatctgccaactacacactgaaaattttaacctgatcaattgacataatataaaatctgtcccaaagcactgaaacaagaaaatctataccatcatgctacagacgtacttagaaaacttaaaaggaagagtaaatatcagctcagtgatttataatgaagctaataaaattcaggccagtattcttaagtgtaatgaacattatttgaacattcaacacatgaaaggttaacaaaggctatgaacttggtgtaacttaaaacgtttcagatgtcggagttcaccagatgtaattggattcaggtggatcccgccgctcctcggcctttttaagtgaaggcgtgtgctgcctgagctgggcgcctgctggcctcagggcatgtatgaggctggcttcgtaccttttattgcagtgtcttccatgccaaccttcttgacattggcatttgttgggttcatggcaggttccatgtgcaccacagccaggctcgcagacaggctttgaacagaggtctccctggtaacctttggaacacttacatttgcttttaccaatgcatttacctccatttcgacagggttgtgggcatttgctgatttcacactgctctccctctagtcctggagggcaaatacattttccagggtagaaacaggtccctccattaaagcaggtggttgagcagtttgctttgtcacagttcactccatagaatccaggtgggcagatgcagaaaccaggagtcacacaaagtccaccattcatacatcgtggggtacaaagggctttctcacagtgaggtccgtggaacccatcaggacacctccagatgcgtctttcattacaaaagcctccatttcgcacccgcctggcactcagcttgtt

SEQ ID NO: 9165 - DNA, 427 bp, Homo sapiens
ctcagaaatttgcaccgaagagccccagaaacagaaaagcacacttaaaaacgaaaagcatctaaagaaagatgattctgaaacaccacatttgaaaagcctacttaagaaagaggtgaaatcctccaaggagaagcctgaaagagagaaaactccatcggaagacaaattgtctgtgaaacataaatataaaggtgattgtatgcataaaacaggtgatgagactgagcttcactcttctgagaaaggtttaaaagtagaggaaaatattcaaaagcaaagtcaacaaacaaagctttcttcagatgataaaaccgaacgaaaaagtaaacataggaatgaaaggaaattatcagtattaggcaaagatggaaagccagtttctgaatatattataaaaacagatgagaatgttcgtaaaaaaaaa

SEQ ID NO: 9166 - DNA, 755 bp, Homo sapiens
aggaaagcaataaacagctaactatgagagtgacttaatgtaattatattacctgtcaatcgctacttttcctttcttaccaaaattcacacaggtatgaaagcaatatgacattccaggctcccattatgtgtatttgtgcacatcacttcccacgataagggagaagaaaagaaaccactgcacattcggataaaacatgctgggaatacagcagtaaacagaatagaaaaagtctacattttaattagcagataagtaaaaataagtgactaaatgtatattattcagggggccatatgtgcaattgctgttaagtaaagcagaacatggagtggagtagggatgacaggtttcatcagttaatacttgagcagagagctgaatacagtaagatagttgtaggatatcttgaggcagagtattctcagaacagaacatggtaagtacaaaggccccaaggcaggaacaagcttggtgaatgtgagaaatatgcaagctggttaatgtggctgaagcacagtgaccaagggaaagttttacagagatcacggaggtgcttgagggctggattatgtaggccattaaggagcatcacaggccactgcagagattttgtcttttaaatgagatagagtgctcttggagaaatgtgactggagaggccgatggtagcagtggagatgcagagtagtagccgagatattttaaatgaaattgatttagtataggctgactgaaagagaaatcaagga

SEQ ID NO: 9167 - DNA, 623 bp, Homo sapiens
  misc_feature (1)...(623): n = a,t,c or g
gcaggtttctgtacaggaagtcagattatacatttcagtaacgggcggggtgacggggacggggcaacagcgcaggggccacagggagaagaagagatcgagagctggggtttggcgtaaatcttacaaagtgtataaagaatctgtgtttctctacattaacaaaaaccaaaggctacaagagcggttgtatatacaaaacacggagatattgcttcacttgcaaacaggttccagaccagatggggagacgagacagaggagggggacagggagggccgagagggcgcgttgcgtgcaggagaggggatcggagcggggagagggggggacgggcttctccctgcatcaatcaacaggcagaggtgggaggcctgtgcgagctgctgtgtgcggaggagcgggtgggcgctgagagcccggggggtccgcctgccccggcccccgctgcctggttcttcgggctttggcccagagcacggttctgggtggggacgacgggctggctgggccacccggtcacagagggagggaggcaatcgctccctagattcggccaaggatagtgtgaaaggcggcgcttccgccgttcctcctcgccttttgncagccccgtncattct

SEQ ID NO: 9168 - DNA, 1426 bp, Homo sapiens
gcttcaacatgccaacctgagcaggtctcctctgcattaccttcctcccatttctcttcctgggtcctgatgaggtgagctggaggaaccaatagtcaggatgccctggaattgatgttgctctgttttgtgctcacaaaacagccatgtaacacatgagcacctgagttgaagccatccagtcgcaagtcagcagacagcagttgatggaattctcagtagaaattcagtaagggtgcccaaattttattttttttttcacctatactctaccaatatatggtatttaggaaaacttcttttatccaagcacaaagaaaagcacacacatttttataatcatctgcttcatcagggtaaataaataatttaacaaatttgatcagcatctctagtttaccagtactttaatattagttttcttacaaattaatgtattttgcaatatttccagaaaatcactgtgggagaataatgtaatattctttaggatatatttcctgaccttttcttaaatggcttcatgtgctattcccccaaattctgctttctctattttcttttttatttaacctataattatactttctagtatattctgagtctatcttctaagccaccttacatttttcctggaacaagggagggaataaatagttgtctccactaaatcaggaaaaaaataaaaatatcccaggggagctgtgattatgccaagagctctaaacagaagtttgagaaggtaaaaattaagttgtagtatctgagttgtttttattttcttcctttggtgtttatgaaggtattcataagaactttaatttcaggggaaaaaatgcctgatttgctatttttgacatttcctcgtctcttaagaagtcagttaaatatgttttcatagtttatattcctgtttcatagattactgtgaaacatgtatttaaacctatgaattataaaatagtatttagattctagcgtgagttaaatagattagtcatatatcttttagatttgtggatttgacatgtaaattatgtgttgtgtataagtaagttagttactaaacatatggcatggttattgataaacttgttgctatttttttccaaatgctatcagtgtttgtggacttttaaaaattagtttgaattttggaatgttctgtgataaaatataatttcaactattttgtacatttaaatatgccatgttgtatatgtctgtatttaaaaatgttgtaaatatctgcattttaagaattatgaaagattttcctcaaaaatgacagaactctccatacttaattgtgacacattataagatatctgattttaagcttttggattttgttctaaaaattaagtttaaacatgctgaaaattccataaaaataaaattttgaaaataaaaaaaaaaaaaaaaa

SEQ ID NO: 9169 - DNA, 426 bp, Homo sapiens
  misc_feature (1)...(426): n = a,t,c or g
caaaatagaaacatacgtaaactctgggaacttaaatatacttatgcaaaaactaaatttagaaaaaataaataattttaaaaatttccattccaattttttaccttgcagttgttgattaaatgtattagcaaattttgaatgaaatgcaaatttcattagaaatttagccattagataaagtcagaaagtactgttgttttatgctcatcttactattactgattttttgctgctttatgttttttttcttattcttactaaatcttagcagtgtcactagtaatagtcttacaaagtaggcaggtttttttaggctaagtgattagtgacatagttaatgattaacaaaaaanatagcaagaatgaaaattagtcagatacacctctgantttgtctcctgctaaatatttngtgttgcttat

SEQ ID NO: 9170 - DNA, 454 bp, Homo sapiens
tttttttttttttttgattctaacaaaatttattatgcagtaattacaaaggttaaagactcttccatctcaaataaaaataacagttataattacacacataatatagtaccttatagaatgattccaataaatatcacaggaaatacagtgcattttcaagttggagagacaaatactttctcattcacagtgtttgacataggaaagcctatttacataacaatctgtataaagtcatgctcttagtaacagtctatacagagctgtgccaacacaattctttcagaatgtgaagtaccgggcaaaccactcctggcgctggggatctggagaagccactggagaaagcttcactctgagcaggacgtctttggggaaaattacaaggcacgcaacaatgtgtaatggaaactccagtagtcatgttccttgagctcatgcacatgcatcc

SEQ ID NO: 9171 - DNA, 889 bp, Homo sapiens
tgtggccgcagtaatttttttttttttttttttaaccgaagaaatatcttctttatctatgtccatttcctccaaaaaggaaaaatggcagtgtcagttgtacattacatatatctctctttctttttagtgtttaatcttagcacctgcacagcagagatctttacaattcattgcatatgctttctcccttctcccccaatacagcacctgaggcctaagaagcaactccctcaatgctccacaaaaggctgagacccttcttcatgacagagtgagtatagaaataacaaacatgcccaacgcttttatacagttgctagaacgttttcatttccaacaaatgaagattttcctccttttctttgaatattaattacattttacaaatttttgtgggtttttttgttttgttttgcttcattttgttctgttgtgtgtgtacaacaacaggaaaagtccatggcaaggagtcccgggttagcagagtttggctgtcatctggtccgactgtttgaggatctccgtgttgtacaggtccaaggcgtggttcaccctgatgatctcgctgttggtcagtttcaggcggtgtttcagcatacaggagaacaagtccagctggggtttccccggggccacaggaggggccagggcgattaattcggtcccgaatatccaacaagaggagcatcaccgacgaagaggaatagaactggcccgccctgtgtgtaggactggttgacctgctgcactgcactgccgcaggaggttcgggcgttgaacctcaggttattacccaaacacctgcacgtttgagatcttgatgtagaactgcctcttggagggatccgacaggtccacggggccctggcagtctcatttcgcagta

SEQ ID NO: 9172 - DNA, 891 bp, Homo sapiens
ttttttttaagaggttgtgaacatacatatttatttataatacaaaatgaagattggagggaaaagtgctttaaaaaatagcatgtaagtgtataaaatgaaaattggttggctttcttctccgatacaattttgattgggtgagcattatttgcttttacaataatgctttattttgttttttgcattgcattgcactaacctggtccattaatacaaacagaaaaagaaggtggaggacgtggcccagccgcgtgggtcagcgtgccgaacctcggcctcctatgcaaagaactttctgagtggcgatctgagttccaggattaatgcccctccaataactacatcacccagcttggacccaagccccagctgtggccggacctacaaacccaaccagtctacagatggcaaaaactgccacaaggtttgggggatgttggggacaggggcccttattctatttccctgtagataagaggggaagtaggattctttctagcacctggtaccaaattccagaaggccttttttcatggatgattagacaagggacactgaatcacttacctgaaaacttcagcatgggttatacaaaaggtggactccatctggcctggaggtctgaattcaaattacagtcttcctcattcttagctctgtggccttggacaggtcacttgacctctccaggtctccatataccttgcctttaaaattaagataatacagcacctatctcatcagactgacgtgagactaaaggaattaatccataggatgtgcttagcacaggacttggcacaaaaatcttcaatatagtttcagtattattactaacattattcctcaagatttactctatcaccttggaattctaaagtctcttaa

SEQ ID NO: 9173 - DNA, 704 bp, Homo sapiens
gcctgtgtatgactcagggaatattaggactttggcacagctccatgggttgggagtaagtcttggctcttccctagcctgaatgacagacatcagatcattctggtgctttgtccatgaagatgtagattctgagcccacccaactaatcttttcacttgagcacagaaacagccccgggaatcggacagacccgtgtctttcaggtttgcttcacagagccccaggggttgacaataggtgccttggagactgcctgcatggggatttttaaaaagctttctttgttaaaggtttgtaaaccactcctctgagcctgttttcattttatagattattcagggaactgaactgcacagagatccagaaagtgggtagtgcaggctgtagtgctgataactactgtactacttggatctttgtgctcccaaataccaaatggaagaggatctctgagagtcctttgcaaagatcttgtagggactttaggctggggccttcggaaaattccagaggattccaatggagattttgagggactgactcagaagaacaaagagaatgataatggtgatgtccctgctttttacaacagatcatgttctgatatatatgcaaatctgtgtaaagtaaaccctacctaaaatgtactggggacccaagatggactgcctgtattgcttccaggataaagtccaatttct

SEQ ID NO: 9174 - DNA, 360 bp, Homo sapiens
  misc_feature (1)...(360): n = a,t,c or g
agaaaatacacgctttctgcatgtattagaaacgcacgagctccaccaagtctacaatgaaagtttgaaatttaactgcaaggaattagaagcatatttgcaatcattgcagcttcttctttcttctgctcataaaaggaggaacactttagatagagggcaaatatatctganaacctaatttctttctttttttgataaggaaatcttttccatctccatcctaacatgcacaacctgtgaagagaattgtttctatagtaactggtctgtgatcttttgtggcaagagaatagcaggcaagaattagggccttgacagaatttccacgaagctctgagaacatgtttgtntcgaatg

SEQ ID NO: 9175 - DNA, 364 bp, Homo sapiens
  misc_feature (1)...(364): n = a,t,c or g
gtcacacggtcgaatagctccttcttctcagtaatacaagcttttttggtttgaaatatggatcctcttcccagcataataatgtgattttttttattcattttatgttattatattcacatttttacttaaaggaaaatgctgctatttgtgatgaaattgctcgtcttgaggaaaaatttcttaaagcaaaagaagaaagaaggtgagctggcttcattttgtgttcagcatcacctttttgggtgattgatttgggtgattgataatgggtgttactgctctgggagactttttttcccngtgggntttggatgcgtatcgcaccagcccccttgggcccacttggatccaggcaccggag

SEQ ID NO: 9176 - DNA, 526 bp, Homo sapiens
aggccattagtttcccccatagtagtgccttatagtcctgagcagttctgcatgacaagcatctgccagaagaagctgacaatggcattctgggggtcatcttcaggaacaatttcaaactgaggctgcacaccaccatccttgatctgacaggtatatagacacttctggtctgggcacttcatgctggcatatattcgagtactgcaatagcccacggggtagatggcactctcatcatgaaagccaggtcggtcggtgatgatcttccagtttgtcgttctctttgcctttctcttttttctccttcttagttttcttcccaaatggttcctcagccccagtgctgggccctgaaataggcccagctccctgtatagttcccacagagctggccacaccataagtcaggggcaaactggaactgtgggaaggagctgcagcctgtacttccccttcagttagagcctgaagctggaggagcttctttagcaagtaccttctttcttcttttgctttaagaaat

SEQ ID NO: 9177 - DNA, 1020 bp, Homo sapiens
  misc_feature (1)...(1020): n = a,t,c or g
tttttttttttttggctttgcagggtgatgtttatttgccaggttcagtaggcacacagttaacccaccgaccttcacacaccagagcagacccacaggcatgcagggagaagggcaggaccaccacggagtgccgagcaagggcgaggaccaatgtggctgcctatccaggctgtggtagggtctgacaaagggcacctgtcaggagcctccctcaggaaactggggagtttaaccctacttcctcatcccagaaaaagcaactcaatgtggctctgaggcacctgggcctctgatagaagtgagctgtagaaagagggagttcctcttcatttcattgttgaactgagcagaaaatctgcccctgtaaagggcaaacctccaaatcagattatgagttattgccatgcagcaagccccctagggtggagaggacttgtggggctgagattgtaggaggtgggcatctaggaagagcaaggaggtatcagccctccctgtttggcccagggtaaggacccagtaaggctgggacactgggtgctgggcttgtactctgccctgccaggtctcagtgccacgtcctaattgttcctcctttcccttagaggctcatgaggttcagggtacagggcagcccactgcaggactcggaaaggcagaaaataacacaaataacagggtcttaggaaggacaaaaatggaagcttctgccctcctactcattctctccactcctgaggacctccacagctagtgagcagtatccctagccatgtgccaagtctggacttaaacatactgccctacctttctgcatcctctataccagcctgtatctgctcctagagcagcccacacaccacaggcacacaccttcatgtgcaggagcctaagaaccgactgaacagggacctcgactggagganccagctactccagggaaaggaccgacccaagtttagggacctgggagaagtgtgggacctgcagggacctgncctaggggaatggtgagga

SEQ ID NO: 9178 - DNA, 509 bp, Homo sapiens
  misc_feature (1)...(509): n = a,t,c or g
tcttaaatagtataaattctgtaccatctgctaccttgttccgtcatactttacagctgtcactgtgcctagggaggacatgccatgtaaactaatttgcttccacctccacaattcaaatcggagcaaaaaactgnacaatacaccttactggtaaaccagnaaaatatcaaattaaatcaagtaaaaccttgaagagacactattcttgaaagactaccaaatgttcaattagtttctacctatcactgttttacttgatttaatttgatattttactggtttaccagtaaggtgtattgttcagttttttgctccgatttgaattgtggaggtggaagcaaattagtttacatggcatgtcctccctaggcacagtgacagctgtaaagtatgacggaacaaggtagcagatggtacagaatttatactatttaagaagagatgtggtgttcttcattgagtttttttcttcactattttcanaagttttngntcttttttttttc

SEQ ID NO: 9179 - DNA, 166 bp, Homo sapiens
cttttttgttagtctgtaaaatcatttccaggtaaaatctagagcttaatccatatgttgtgccatcttttgcttttccacacctctgatcctaggtaagttagagctaacgagtatttgctgagcttctattatgggcccagcatatgttataatttcttttacg

SEQ ID NO: 9180 - DNA, 636 bp, Homo sapiens
attggaatgacttgtggctggattaattcccagaaccctctccctcctttcttttctaagtgagttgttgattttaggagtttgctttgtgctgttacctaaaatcagagactggtgtacagtatgacttccatctgaacttgaaaagtattaaaatgggtcaatattcacattcttttagatctcaggatgggaaaatgggtttgttcagatgggatatgggtaaatcttacccaattaagggaagggctaattttaggatttcttctaatttgcttgtgtcaactcttaacttgttaaaactgctgtttaactcgggttttaaattttttaaattaatataataggaaaggaacactaaaatacttactggtaactgcttagagccatttatctgatcctgtggattacagaatgcattccctcttctgctgtagcttatcattgctttgttttgtagctctgcatattttgcccaccttgtcttccctgtaagtttaagacgtttccaaggaaaagcttcagggctgatagtttcttagcaattcctattcttatgcccttactttaaaatagtccttttattttgtgtattttatttcctaagtttcagatgtaatatctgttgtttcctaa

SEQ ID NO: 9181 - DNA, 1399 bp, Homo sapiens
attaatcacccataaaataacttttattttaataaataacagtgggctcaccaaagggcagggattttaacgtgtcaggttttatgcttattggtagtaagtcttaaacaggtgaaatgaactattcaataaaacccaaaaggccctaaaaataaaatactttaataataaaaattaaaaagaaatttccaaaagaaaatagttcactccttgaccatgcttatttattcagagtaccagcgatttcagtaagtgcttcatttttcctgcaaatctgatgttgcacagggaatgtacacattttcataccatcacaatatcatcaatatctcaggccaataatattgtgaatgcaactgttttataacaaacacaaaataaaaaaaaacaatggtacctattttacggcaaaccagaaacaaaaggtaaaatattggcaaaggatgtttatcctaatgtttcctactactggatttttagttggactttaaatgaaggtcatcaactctccctggaataacctcctacctctcgctgtgaatccacagtataaatatggtgaataaagctaaactgtaagagctaactatatactgaataaccaaaataattataactaatactgttcttgaagaccaatctaatgaaaaaagtatcattagatatggtgagaaatacagacaaatcctgtacaatcctaacatcctataaacagtaaaatcaaaacatccaacttccttatagaaagtgttttatcctatgtaattataaatgttaaggactcttgtattttataaacacaagatgggctcactttgatgatatcaattttaagatttataaaaatgtttaaaaaaatctttccacaaaactttatacagtttaaagctatacaccaatctataaatctcagaaaatggaaaacaaaacaaaacaaaaaatctttataagatcacatgtataaaacaagaaatgaaatgtgattttatttaaggcaatactgggctacttcacaaatcaccacctcaaatatttacactgctccacactactagttttctatcacattcacaaaggatttttttttaataccaaatgtttaaaatcttcaatgtagtaaattctttattcacatttccattgtatttcatggactcatagtaactatatccaattagaagcaatgaaaaaaaaaaactgtagctataggaaactgctagagaatctgctttaatttcacatgaataccaccccaaaatcctggatggcaaatttacaaagcagagcaaagtgttgatataatgtgcctattttgtgaaaagtaatcttgatatcatcttgtaaataaatgtttcatgtaaaaatcaatgaactatggcagagtttctggttttagttc

SEQ ID NO: 9182 - DNA, 738 bp, Homo sapiens
tttgccagctctgagcctgtgccaggattccagggggataccctgcagctagcattcattgacctcagacaactccttgacctgtttatggtttgggattggtctacttacctagctgattatgggcagccagcttctaagtaccttcgggtgaatccaaacacagcccttactcttttggagaagatgaaggatactagcaaaaagaacaatatatttgctcagttcaggaagaatgatcgagacaaacagaagttgatagagacagtcgtgaaacagctgagaagtttggtgaatggtatgtcccagcacatgtagacctcacatggcttgcactcagtgacaccaaatccatgattcaatgttgatcttgagcaagtattggtcatgatacagtaatttgtttacagaatccaaaaatacaatagagaagatacatgagggcttaaacaagaaatagtaataaatatcatttgtatggatttttaaataatcgaatactattttatatatggaaaaaaatgaccattttttcacttttaggggaaaatgcaaaagtgtaatacataaattgtcacaaattatacctgaaattgattacaaatacatttgaaaaacatatgcctctactcataagtatttttttctatttagacttgaatgataatctgttttttgatcagtatatggctttggaattcaatcatgtctgatatggtagtatttcactaccatttt

SEQ ID NO: 9183 - DNA, 2051 bp, Homo sapiens
  misc_feature (1)...(2051): n = a,t,c or g
tttttttttttttttctgcctaaggtagatttattgttacacatggttagttttcataacgtaatcccctgccccagagcaactcaggactccatggagcaggaagcctgctcttggtcatagctcataccacagcaggcaggtcacgggggcatgctgtgctgccaagtcctccaaaggaagtcacaaaggtttgcatttggacatttaaatccacaaaatcaggagaaacaataaatgcacaagggctggtgcatatactttggttacagtgacgccaccacacacggtcacgactgtgcaaaaatactgctttcaaatcattaaataaaaaagaactcacacaagctataaaaatgttgccacaaaaagcaaaactttcctctaagaaatattaactgactttgactatgaactaactccagatttgctaaagtacaagaattgtaccataaataattatattttgttcataagtaacattctataaatcttgaagacctagctcacaggcatcttgaaacatggcactgtcctacatccatgggacatttaaaggaagtaagtttgcacaccactaactgggcttttctctcattcttttttttaatcttctggcaggtctcttctagccattacaattactttgattcttttcatgtgaaatattaaaaacaaaaattaattcttaaccccggaactggtcccagtgtttattgcaatacaaacaagtgaccctctaattgacacaacaaaatgttacaaacattattgttaaaaaaaaataccccttcagacgggtctgttggagtataatgatgaaagctaaacataattgcccgaaaataaatcatgtagtttttactttaagtggtcagaccagaagattctttaaacaagtagaaacaaactacttaaaaccagaggactcaagctgcagaaccactcctcacaccccattttcacaaaagtgcatttggctggttgtaggatatattattaggtggggaaacaaaaccccacttttctctctgatcattttttcataagagattctaagagggagtgaaaaagtaccaactggactccattccaggtcttacctctagaagacagccagctctcatttaagaatctcagaacttggaaggaaggaggaaatcnacattaaattctagggcccaacagacagagtgtcttcattgccacccccagtagtggggactacagtgcacctgtagtcccagtagatgctctgacatcacagagcttcctgctctaccagcccacctcatgcatgtcaccaccataactatagcctgcaagtcctcgtggccacctgatgtggatcctctacagtctgtccttggctggcccttcccacttcctttcctgctactttctctttcttcctagactgacctactcatcatttctcaaacaacctgcagtcgacccttggcctggaaacactaccaattccagttgagagccaccaaaaatgaaaacatcattccaatactacttactactacctgacataacataggaagtttcgttacctgtcatcagtgaagctccgtgatgtcagagtgtctgctgggttaagtctggcaacacatttcaaatataaatcatttaactataaatattcagaggacattcaggagacaagcgtatgtctaaagtacaatatcagcatataaattaataggatcaagttcatgaatcaagatagcatacatatattatatgctgatattgtactttagacatacgcttgtctcctgaatgtcctctgaatatttatagctaaatgatttatatttgaaatgtgttgccagacttaacccagcagacactctgacatcacggagcttcactgatgacaggtaacgaaacttcctatgttatgtcaggtagtagtaagtagtattggaatgatgttctcatttttggtggctctcaactggaattggtantgnttccaggccaaggntcgactgcaggttgtttgagaaatgatgagtangtcagtctangaagaaaga

SEQ ID NO: 9184 - DNA, 415 bp, Homo sapiens
attaatcattgaatcagatgaagcagttataaatcactttttactttgtgctaagaattattgtaatttcaggacactttattatttcctctgagcagtttccattggaaggttgagtttcccttttttaagttctaatcatcactaaaggttaagataatcaaataggagttaaaataagttatgtttgatctttttcccttgaaaataatgctgaacttattgtctacattctgattattaggcagaaatgcacttgtttaaatcatagaagtaattcatttggaggatataattactcgattttctagtggtgtgaaatactttttaacaattgtgcttgtctgtaactgaaatgttatagaattttaacactatagggattatagagttatattagctctcctcaagagac

SEQ ID NO: 9185 - DNA, 634 bp, Homo sapiens
ggcacgaggtgagctggtggtggggggagagccccagttgctgggcagaagggcgctgccttctctttgatgactctttcctgcatgctgcgttccatgaaggttcagcagaggatggcccacgggtggttttcatggtggatttgtggcatccaaacgtcgcagcggccgaacggcaggctcttgatttcatctttgctccgggacgatgagagtatttcccatgctggagtcggcgagaagggccgaggcggggcctgggcagactgtggtccggtccagtccctaccggtgttgtttccatgctcagaaacctgcctcagcggaaagctcttatttgggattttatatcatgtcgggtccctctttcccttggttattgtaaatggaaacttttcggcttgtatttccttagattttttttttttccttccaatcatttgcttcagagactcctttctggcctaacagcgcattcctttgattggtccttgagtgaccagagacttagtgcccttgtaagtctgtcttctgttgctacttgtttttttcagtgctctgaaatagagtaactaaatggttatttgtctgaatataataatgtaaaacttcttgtggtcatcttaaaaaaaaa

SEQ ID NO: 9186 - DNA, 405 bp, Homo sapiens
atactgttccacatatttggaactagagctttccctgcattaaaataagtggaagttattcaaaagcccacttagctttctctctttgaatctgggcataggaacacagctgtttgtactcacataatgaaagaaaaaaaggaaactgtgtatgacaaaaaaaaatcaaaatacattttttactaggtgcttgacatgtattttattgcttgattctcacaacaacctctaagagtttggtattatctccattttcaccaagagtgagaaaggttaaataagtttccctaaggacatagagttgataggtgggagaggaaacagttaaatagcaaaggaagtaaaggtagcctgaaattctaactgttcagatttaaattaacaacttcccatatttctagtaat

SEQ ID NO: 9187 - DNA, 604 bp, Homo sapiens
  misc_feature (1)...(604): n = a,t,c or g
ctcgtgccggtttttttgggttttattttattttaatagtagtaaaatacttggnataatttttcatattcttgtcattaatattattttgtatttttatgtggaaatatataattttatgacactaattgctaaagtttattttatgttgaattatttttggagctgaaatctttgtaatattaaagcaactagtttctaattcccagtttctgtatagaatcgcacaagtggtttatggagtgtttggattgtaattataaatggttctttgatatgcaaattaatattttcagttgattttattttatattcctaatggggtgttaaagccgttttttatttttttctaaataaaaagagaacccatgcttttatggacactaggtaaacaccttcagcttaaatttttcgttaaatattttagtttattttaatgttatcttccaggtgtctaaatctccagtctgtctgttgtactggtaatttaactctgtaatggaatagtttgctgccaactatttatattaagtaatttttaaatatttgtaatattgttgactgactaataaactattaagttattggaaaaaaaaaaaaaaaa

SEQ ID NO: 9188 - DNA, 614 bp, Homo sapiens
  misc_feature (1)...(614): n = a,t,c or g
ttccctcccatctccaccaacatcagagaagacagcatcgtgaagcttctgtggcagcctcctacggaaggggctgcaatctgtagttggcagatgctataggaattgcttacaaatgtcgtctttaagaaaaatgttcttatatttttcctatgggcaaaatgaaggcttgggtgctcatctaaagctcagccaactcctgaagcactctctcagagcatactgctgctgtaatgggctggcttaattatcggcagagtgcttgaaaaggctttgcagacctcccctgcccccaagactggggtgactttatatgtacttcattcaaggggtaaatcagggagacgttctccatttatctcttcgtccttcctgcctggaaagtgataggcactaaatatttcccagcagatgggtagtgttctcaaaggaatcaccctttccctaccttcagactctattctttacccttccattgctccagtgctgatggaggccaaagacaaccccagggttttcataggaaattcactggaattgtgcgcaattgtctttgtagtccttttgccttttttttttttaaatattatgtngncaatagcatttgttngggt

SEQ ID NO: 9189 - DNA, 393 bp, Homo sapiens
ttgttttgaactgaagacatcattgggaaaggtaggaaatattagtttaggatagagcatacatgtcatatccagtagcataaaaaaagtattatctccctgtctccattaataaatttagctgtgcaatataggtgcgtttttgcagaagtttctagtaagagattataactccattttacaggttctgaatgctcagagtctatattaaggcttataaagtttttcctgtgatcagtaagtgacacatttaagcagacattcttttcaagttcatgacttagattcctttacaaatttagttctcaatctttaaaaaccacatttcattatgttggttaattattataaattttaagcactcatttctgcaatcaggtttctcagaatttt

SEQ ID NO: 9190 - DNA, 723 bp, Homo sapiens
gccaaggggggcacaggggtgggtggaaaggaatgtctaaaaatgaaatcccttgatatagagggacctagacggacaggatatgctaaaataatttcaaattctagcacaattttagagtagaataagtcatttttttagactaataaaattaatggctgtcatgttcactctgaaaaaaatctaaatgactgaaatgtacagaaataaaaattagcaaacaattattctagggatattttcagattttacttcatttcttgaaatgcgtgtgccatatgcaattgcatttcttgtgccaagaaactaatagaacttatttcactttacctttttttaaaatgtgaatttagttattatagttcaattttatggccttacagatggcttttattttgtttgcagctgacactgcagttcctttcatgcaaaataccataaactgtttgatgaaaatcatgcccctaatggaaactctctagtttttccatataactatcctactgtacatgtttaaacatattttatttttgctccaatggcttaatgtgaaaagctcctgcagataagtggacctgtcatgtggttaatcttgtttaagccaattcattaactgtgtactgatactgatgctatgttttttttaaatggattttattccaggtgaactttttttttataataatgttcgtctaaaataaaaactacataatgaaaatgaaa

SEQ ID NO: 9191 - DNA, 1366 bp, Homo sapiens
aacattagacaattcagtttctttcattttatttttcagatgacttcatttctcaggacagaatgacacaaacacaagaagcagtctctagggctggctgagaccacatttatctgttctcctaaaagcactagctcagctcccaaaagaagaattacaaatctgagaagttagaggaaaggtacagaataggaattctgattaacaagaaaaatcaattaatgacattggtactctattcttcatatcagtaataatacaaactcagcccttttaaatcagagaatctgccattctatatctaataaagtagctttacaacccctaaagtaaaagaattacatgaaggtgtaaaccaatttgcctcctttagagacactgcaatatagaagaggatttttttttttttgtaagcttctccttctcagttctacaggcttcatggtacttcagagccccaataatcaagcagttcatgacaaaagataaaagtgaaaaagtagacacagagatctgtgaagacttcgcccattttgctataggtatccattgatcgatttatcacttcggcaggaattcccgacaatagaagtgcagctgttagtactgttgtctttatcttcttttcactcttgggaaaatatttgtataatcccatgtacgcaagttgtaaagtaagaaatggagcaaatatggacaagtatttgcaaacaaaagctctgactccaagagcaagaagagcacatcccaccaatctaaatattcgaaaagagtcaaattcttctgttgtatttccatcctcttgactgggtttttcactaatcagctgtttccatagcttcattgcctcttcgaatctggaaaggtactgctctaggccatggcgggaacccctctggaccgagtccgctgtcaggtcccctctgttccgctgccggagctcaaggttgacatcactactgcactcaggtggtttaatgaacgagtccaatttgtctcccagttgggtcccctttacctcggccacaccaccctgctggtcagttgttcctgtactgactgaatcacccagcactactcgctttgaaacggaaggaacgctgagggagttcagtttatcactgtcctgctgctttgattttgtttgactttcttcttccgcgccgctcccgggcctgtgaaagcccatgatccggttgatgcgctgttccgagttcatgagcagctttctccgacgcagctccgcccgacgctgggaagccgacagacctgagcccgctgggacccccggcctctccccgccgtcggtagcgacggccatcgactccatcctcccgtccacagtctgggaggggtggcagtggcg

SEQ ID NO: 9192 - DNA, 249 bp, Homo sapiens
cagagatggtactagagccaatgagagatctgttgcctagatgcactatttctttgaggaagagagagaagagaagtgtctggttgggggtgagggggtgcagacttttttgtttctatgtacagagcaaagagatagagtcacaaggaaagacaattaatgactttgagctcaaccaactgaactgccttttcttggagctgcacctggaccaagtttattttttaacaattataataacgatgattt

SEQ ID NO: 9193 - DNA, 395 bp, Homo sapiens
tgaaaaaaaaataattatactactgatcctcttttgggataatgaaattgccgaaggaatgttgttgattataacttttattttttaatgtacagatgtactgtctctcattgagcactgatagaatttatttttctttcaatagtttaaaatcacttatgtggagacacatacttaagtgtgttcaactcgttttcttcccacatatctagtgtgacctttaaaaaccacaactttattttggacattaaatgtgcaatattcactacttattcattgttccacatttttcatacttgtacaaagggtaagtttttatataatggtgagaaacaggaagaaatgacaactggttaagtaaaattctgcaaataaactagattcgaatttaattt

SEQ ID NO: 9194 - DNA, 874 bp, Homo sapiens
aagatttttatttgggtttattaaaaattttttcaaagtaatacatgcacaaggtaaaaaattaaatagtacagaaggacttaaaatgaaaaacacagtttcccatcccaccctttttaaatctaaatcccattccctagaggtaatgcttttaacaatatttattttagatcgtctggtaactttctaactttaaataatatgtttgagcaataatttcttgacttactgactttacaacatctttaataattccccattacaaaagataaggatttaacttacactatcgccactttcctttgtccatctctctccaaatgtctgatagttacatcactttttaatacatctattggtttgattttatagctttgaacaatacactaatcctctagttcttgttccattaactgaagatcttttcatccccactttgaatatataagtatctctacctttgattccacttctcttcctctaattctcaatctctttctgctttctttccctttgtcagcattaattactttcaacttcagttctgaataaaaaatgaaacctttcacactttgttaataggctgatctgaacattgaatactaataaatgatatccacattattttggctatttaaatacttcttactgggagcctagtataagctaggatattttcttccctacacacccaatatcatcatgcctgtgccatagaaaaggaaatgtacctatcaagcctcttcttattcttcatgaataactcaaaatcatgcctcattttattttgctctataattggacctgaattttttgacatattgttgatttgtctttcttttttcttgactaaataatcttctcaagcatccca

SEQ ID NO: 9195 - DNA, 693 bp, Homo sapiens
atttatatatatttattcagtaaacacaattgtttcatgtaccagatttttaatgcatttgaatctttattctacaacacaagcaacataaatacaatatcttttaaaatatttcctctttagaattttcatttccacctcagataaaatgtacacaaaatacacttgcaagcttgcttacagagacctgttaaacaaagaacagacagattctataaaatcagttatatcaacatataaaggagtgtgattttcagtttgtttttttaagtaaatatgaccaaactgactaaataagaaggcaaaacaaaaaattatgcttccttgacaaggcctttggagtaaacaaaatgcttcaaggctcctggtgaatggggttgcaaggatgaattttgcattttataggtaaaatggtatactgactcaaatcattatggctataacaagcttcatttatttataatcttcaatgaaaataagttgattctttggcataatactataaggaataaaaggacccataccacccactggctttatctagagtgggagatagtagtaggggaactgtttataatgtaatttgtctaagtttattcctcttagaaaagcgggaaaagcatattgaataatagtctcttagcatgattagggcaataaacatcttattcttatctgtcccatccccacaac

SEQ ID NO: 9196 - DNA, 1425 bp, Homo sapiens
tttgacagtaaagatacttggcagaattcttcctgaccccaaccgttaccacccgactccttctcagagatgcaaagacagaggccacccaggcccagcccagcgcgacacggcctctgtacggtagtggcagccagggcccactcgaggctccacacgcagcaggctcggcctcacccactcaccctcccacagggaacacccccgagatggcaaacaggggcccgtcttcccggaggcccaggagccttgtggggaagggagccgggttttcagatcacaaatttctgtgaccactttgttatttttcacaaagcacgactggcacgtttcacaatgaagaccagcagatgccggacactcatgaaagaaaaaaatatcaagtttcggtcatggctctaaggcagacgttacatgttttcacagggacaaacacggagacaccaacgcgctgcgtgtcacgggcaagcggcggggccctcacagcaccgtggcctggacgacgatctctgggtcctcgatgtcccttttgctctgcaccatccgcagctccagctgcatggggctgggcctcactccttccccggcctgggcttttgcacactggatggtcctctgcagaacgtggtgcaaggtagacacggtcttctcacaggccaccttgaggttattggggtgcttgtgtgtccacgccaggagcatggcagcaaacaggtccccagtgcccacaaagacggcgtccactttgcgaatgtccatccggatgcgttccatcaccacggagccagcgggattcctcctcctctgactccccagcacaatcaggtagttgctgccctgcggggagggcaggtcggagctggtgatgaccacggtgtcggggcccatagagtgcagcatgtccatcacccgcaaggcttcctcctggctgtggatcttccggccactcagtaactcggcctcaaactggttgggcgtgataatgtctgcaagcggcaccactttttctttgtagacgggaaggaggtcctccgggacgtacatcgagccttcgccgtcccacttgtcacccaagactggatcacacacgtacaccagcctggggttctgctgcttcagctcctgcacaatgtccaccaccatggccaggaacgacttgtccctcgtataacctgtgagcacgtagtcatatttattcatgttgttcagcctcaggccttcgtacaactcctggagctcatctgaattcagcacttggcccttccagtgggcatagcctgtgtggtttgaaaactggacagagttcaccgcgtcaatctcaaatcccaaaacctgcagcgggaacgtggccgcccggttgcccacgtagccgcggatgacgtggctctgtatggagagcacccggcactcctcctccatgccggg

SEQ ID NO: 9197 - DNA, 465 bp, Homo sapiens
gacctgatggacgccgacagcctcctgctgtctctggagcctggcgtccggcagtgggcagggcctcagcccggaccgtcgggcctcgctgctcacgtctcttatgctggttaagcgcgactaccgctatgatcgggttctcttctggggccgcatccttggcctcgtcgccgattactacatcgcgcagggcctgagtgaggaccagctcgcaccgcgcaagacgctctatagcctgaactgcacagagtggagcctcttgccccctgccacagaggagatggtggcgcagtcgtctgtggtgaagggccgcttcatgggggcccatcatacgaatatgaacacactgagctgcagaaggtgaatgaaggtgaaaaagtctttgaagaagaaatagtggtccagatcaaggaagagacccgcttggtgtctgtcattgaccagattgacaaggctgtggcatca

SEQ ID NO: 9198 - DNA, 412 bp, Homo sapiens
tttttttttttagagccataatttattttattttctatacataatatctacacatgatattggtggatgaaatgtctttgattcagccttcattggcctagcttgtgaaatttaggcaggaccaaatcaaacaatgaagcacatttaaaaagaaaagtgtgtttaggaaaacacaatgtattttcctatatcattggatagcagctttttgagaaaaacattgctcaagacttgggtttgggatcccaactgtcttatttggcaataatgctaacagatttatgctgtagtattctaagtgtgtttaggaccgtggacttgtggggatttctggggccacttaaattttaaatatcctggtttaaactctatccaggacaaaggggggactttccaaaattaccttctggcc

SEQ ID NO: 9199 - DNA, 414 bp, Homo sapiens
tgagcttttaccactagactcaaggaagaataattttaacagacatgtatactccatagaaactaaactaaaatagtttaaaaatattccctttttcaccctattttcagatagcacatgagcccaacactcacttaattctcattatgaagatgtttttagaggggcaaaaatattttgcaagctctggaattgttgaatgtattcttttatataactacattaaaagctttagattgaaatttatgactagcaaacaaaaatagaatatataaacgatatatgtaaatatacagcatgagattgtacattttttacttttttaaaattgtgttcttaaaatattgtgtaagaatcactgcacttagctgttggaatgttgttaaatgctatggggaaatacatttagaacct

SEQ ID NO: 9200 - DNA, 376 bp, Homo sapiens
taataaaatggcaatttgtaaattctggtgaatactcaaaattgtagctaaaaacagctatctgaatataggtttaaaacctcaaagacacagagctaagaaatatggaatacattgtatattgctttttcaatagagtagacataaaattgatgacaaatgtttccaaaccctcaataagaactcaaaacatcatactatgccaagctgaattacagaagggtatctaagaaagaagacagtgcatcagttatctctagataaagagccagtaaaatcaagttgcatttgatgtatacatcttattgggagtagttttcagaaagcaatttccctacaatcagaaaaagcatttttttttctatttcagtcgacc

SEQ ID NO: 9201 - DNA, 811 bp, Homo sapiens
ttcctgtttttgctttgttttattattattttttccaatgtgtggggcctacactttgcaatctacctgagacggaaaacaccaatcgaaacacatgaacctgagacatgtcaacattgtaagccataaagttacatcaggaacactgcactactgtacacttttcaaaacagaaagatgggaggtcccaaaaatgagatgccaattctgtgagcaatggtgtgattttttttttttgtttttgtttttgtttttctttttttctaaaaagaacaactgaaaaaaaacctttcaacaacatgctaaatgattctcaccctttgatatgattatactatggtcggaatgggtgctaagggctcggaatagagctgcagattataaaattcattgaaaaagggatgttcattgtggctttttgtcttggttaagtgcctagggataggggaggggtaaataaaatgctgctcgataacggattttcttttacataccagtccgttcccaaaaggcccccatattgcaatggttctatcaaaggttaaaataaagacaagaaaaataaacatgttttcaaataacaaagagttgacactttttcccccttaaataaatcagcataagttttccacataatgtaacaatagtaaaaatgcaccttgcaaaatccaaaattactcactgaaaatgtaatagaatatatatttatatatatatatagatctatcttttttgatgccatctttccatagggactgttagctggagtctggagtcttaccaaacatatggtaagagtttagtttctgtc

SEQ ID NO: 9202 - DNA, 1824 bp, Homo sapiens
  misc_feature (1)...(1824): n = a,t,c or g
aagaattgaagcaggactaaatgtctagttgtaacaccatgattaaccacttcagctgacttttctgtccgagctttgaaaattcagtggtgttagtggttacccagttagctctcaagttatcagggtattccagagtggggatatgatttaaatcagccgtgtaaccatggacccaaaatttaccagaccacaaaacttttctaatactctaccctcttagaaaaaccaccaccatcaccagacaggtgcgaaaggatgaaagtgaccatgttttgtttacggttttccaggtttaagctgttactgtcttcagtaagccgtgattttcattgctgggcttgtctgtagattttagaccctattgctgcttgaggcaactcatcttaggttggcaaaaaggcaggnnnnnnnnnnnnnnnnnnnnnnnnnnnnnnnnnnnnnnnnnnnnnnnnnnnnnnnnnnnnnnnnnnnnnnnnnnnnnnnnnnnnnnnnnnnnnnnnnnnnnnnnnnnnnnnnnnnnnnnnnnntgaacaataacagttaagaaaaaaaaaggcaggcaggcggttatggtggttccctcccatcccaccacataaagtttctgagacttgagaacagcaaaatgctgttaaagggaaatattaagaatgagaatctgcagtaagggtgattctgtgcccacagttcttcaattctttataccgttttacccacatgtggtgttaccaaagccgggcagaaccatgctagcggaagatgtgaaatccagatagctcattattgccaagagctaggcagctttgatctccaaattgttattgctttcatttttattgtaatggaattgctttgttttgtttttttgtttttgtattgaagagggttgttttccctttatttttcataagctaatgtaaatgaagaaaaaatgtcttctctgggctgtaggcctggctcagcgtacacaggtatacatcctaagctctctatgttctctaatctgtggtgactgaacatgtgtctcaatgcacggggcatttctacctgtgtttctgcagcacccccactgccttgagtccccagcagtgctgttatttgcctaacacctgtagccatctgccacgcagccagacgtgaaacgctgagacagagaccatttaggttaaatacgacagcttatcctgctgggtggggaaagtaaaaaatatgctggttcaaggcctaaagtaaaatgatcaataatgtttgtagcattaatgaaatattttcaagaaatgtgtccaggggtagcacttggctatgttgacgaggcctttggtaactcagagagctcttggccctgatggggacttgcccttacgctttctttatcaggctctgagttcacacggagcctctggcacttccctgctgtcttgggagaaaggaaactggttgccgcggcaggttgtggaatctgttgctggaaccaggctggaaccacctggtagtgaacaggggcccagtggggcaggctgggcatgttgtggtctatgggtttgtttcctggagaatgttcaggaatgtcttcccagctgctttggtgctgagctctattatctcacagcacgtccagaaggctaacccaggtggggaggatgctgacaccagctccaggtggagttggtggtcttaatttggagatgcaggggcaacctgtgaccctttgaggcaagagccctgcacccagctgtcccgtgcagccgtggcaaggggctgcacacggaggggcaggcgggccagttcagggtccgtgccaggccctcctcagtgccctgt

SEQ ID NO: 9203 - DNA, 389 bp, Homo sapiens
ggaagagttgtggcgaggcagatcctgccccgtggccgcggccgtctcgtgtcccaccggccttccgggttccagcgccaggcctggtgcctgccccaggaggatgagcatttgcattgcctgcaccttatcgtgcccttccacctgctgaagcagctgtgcctgccgctcttgtgaactgcgaacttccccttacctcctctctctggctcgggagctggctcggccgcctgtcagtgcaatgctgccccatgtggtgctcaccttccggcgcctgggctgcgccttggcctcctgccggctggcgcctgcgagacacagaggaagtggtcttctgcacacagccccagtggcccgctcggacaggagcgccccggtgttcacccgtg

SEQ ID NO: 9204 - DNA, 1226 bp, Homo sapiens
  misc_feature (1)...(1226): n = a,t,c or g
tttaaatctcaagctaatcagaactatgctggtgccaaatttagtgagccgccatcaccaagtgttcttcccaaaccaccaagccactgggtccctgtttcctttaatccttcagataaggaaataatgacatttcaacttaaaaccttacttaaagtacaggtataaaataagacaaatgtttaaatttagttatgttcacggatagttgtcaattggtctgaaacaaattcgctagggaatctatttgtgtagaactaattaatgtaaaaaaaacagaccatctcgtgttgtgtgcactgtgatataatggtagtatcagtgcaacttaaactaatgattgtacttgatattaagtgttctcaactgagtaacttttaagtggaaaccaagtttagatttggggagtggtaaaggaatcagctttttctattgttaggggaagacagtaatttatcattcatggaccagtagattgttgaaagttggtgaatcggattataagcttctagctaacacaaggattcagaattaggtaaacatctgaaggtttagtatattagaaacacccaaaccagtaatatgctaacctgatgcactgctgaaagaaaatgtgaatttttcgtaataattgcattttagtgaattgtacagtgggtggaaagggcatttggagctcattagaatgagacatagtacaccccaatggccctgtttattaaatgtagtggattaagtgtctgtcaacaaatacaccaaaaccattttttatagaaacagtatttaatggtcactcaatagctttcaaaatacatttttgtattacagcactgcacaagctattctaatagtgctctggcctcatcattcctgcaaagcttgctttggggagttggataatgtgaaaattttaagtacctaggggagaaagagccatgtaaatatctgtaataaacttgtagcatatgtaaagttttcttggcctttatcttacaaaaatggagtattttagtatgaatttgctgaatgtaagaccgtggactgtttttttatgatatggcctaattttaaaggtccaaaataacctggtttttaaggtttgcccttgtgctaaagtgccagtgtatgtatgttatacttgatttggttgtaaactatatttcaaagtaaaccctngtgtaataagttttatacctaaaaagggtttaagctgctaaaactatttt

SEQ ID NO: 9205 - DNA, 445 bp, Homo sapiens
tagattttaatgtttgtatgtgtatgtcttaatcttaccatttattcttccactttgctagttatgcaggactccacttaacccttttattctgaacatatgggacagccagttctacttcataatgtttatgttattgaataacatttttgggaagaaatgtattgccaaatttaggggacttttttttagtgcactgtaggatgtttttaggcatattggaaaggaatattcctttctttcacttgtggtcacttcctaggagtattcctacagtatacgtatttctggggggcagtgagcgggaggacatcttacttggtaaatcagttttgctaattattttgtagcaaacccatctttatagttagactttttggggggtgaggggaatagtttaagttttttattttaaaagcttgaatagcattctcttatgtaaacg

SEQ ID NO: 9206 - DNA, 320 bp, Homo sapiens
attccattttcaagtttacaataaatgtttgggcttggctagcccgactgcacttttcttggcaagtccaaaccctggggctgctctgcctggtggtccgaggcgagggggacagagcgagcgccccaggacggcgacttcccacggaggaagagcagagagcagagcagctggtaattcagaaagaagaagtgagaacacccaacagcaacactttgtacacggatgtgcctgcttttgttgatactttcttactgtaaagctctccataaatagtgaaaatgtttggtaaatttattgcaatttaaaaaaaaaaaaaa

SEQ ID NO: 9207 - DNA, 664 bp, Homo sapiens
gaccggcagtccaggaaaactgcaaaagatgggaagtaaggtcctggcaggcagacccggcatgtagccgctggccatcttgaatcctagggcatgaagttgccccaaagttcagcacttggttaagcctgatccctctggtttatcacaaagaataggatgggataaagaaagtggacacttaaataagctataaattatatggtccttgtctagcaggagacaactgcacaggtatactaccagcgtttggatattgatatatacatggcaaatctgaatattgttttatgagaggcctggcaatgggtaaaacaccaaacttgaaatcagaacataggtgcaaatggccactcctgtagtttcttttctgtaaaatgggatctggacgaatgataccaaacgtttctttctaacattgtattttataactctggcctatgattgtgttgtgtcttgcattaaaaaaaaaaatttgagagtggtagaattacttctgttatctgaaatacctgagatgcactttaaactgttgaaatgtaagctctgagggcagggaccgtatcttatttactgttagtatccgttgcatctagtgtggtgcacctggcacacagtaggcactcaataaatatgtattgattaaaaacaaaaaaaaaaaaaa

SEQ ID NO: 9208 - DNA, 1259 bp, Homo sapiens
  misc_feature (1)...(1259): n = a,t,c or g
agagcgggctccctacccctcgactcctgcgaccggaacggaaccccaacccgggcccgaagaatgatgaagctcaggtcgaacaagacccgaacttacgaacggcgacggctacaaagaagcggccccatgcctgtgtttccgcagcgagacacgacgcgaggtgctactcgtgagcagtagtcgccatccagacagatggattgtccctggaggaggcatggagccgaggaggagccaagtgtggcagcagttcgtgaagtctgtgaggaggctggagtaaaagggacattgggaagattagttggaatttttgagaaccaggagaggaagcacaggacgtatgtctatgtgctcattgtcactgaagtgctggaagactgggaagattcagttaacattggaaggaagagggaatggtttaaaatagaagacgccatannnnnnnnnnnnnnnnnnnnnnnnnnnnnnnnnnnnnnnntaccctctgcctttttaagatgatgtatttatttaatttttgccatcattgggtgcttcaccttcctgcgaaggaaattccagagcctgtatttaagctacctaggcttttacactccctttattgcctttccaaatagtatctcatttggtgtactctagtgtcctatacctcttggaaacgaaagagggcccaacctacaactaagaagggacaaaccttgaactaagtaagaccttacacacccagaaagaacactgggccctccttcttcagggacaatgcagtagccacttggcttgtggaatttactgaaggctatttcctgtaacttgctagttaacttagttttgtatttcaggcagaggtgcgctctgtaatgttgggcctttgacttcacagtactggagagctgttcacacagatgtttagacctttctctctctctctctctcttttcttctttctcaacaactctttcacagaggcagtcattttgaaaggttgaaatatttggcctttaccaaagagctttttttttccttaagcaaaatcctttcagaaagaaacaaatggggaagggcagattaagaatgcatatgtcccaatccacttctataggagtttaatcatattcacatgagtaaaatgatggaagaactctttaaggtaatcctttgggataaaggatcctgggaagttctctcaggtaaagaaaggcttacagcagatttgtaatatatgtctggagagctatttataagaaatttaagagggt

SEQ ID NO: 9209 - DNA, 391 bp, Homo sapiens
cccacgcgtccgatttttatatgcacatttagcattcctctttccttcactatttagcctatgattttgcagaggtgtcacactgtattaggatctgcatttctaaaactgacgtggtatcaggaaggcattttcaatcattcaaaatgtggagaatttaatggctaaatctttaaaagccaatgcaacccacccaattgaatctgcattttcttttaagaaaacagagctgattgtatcccaatgtattttaaaaaatagggcaattgattgggccattccgagagaattgtttgcaagttttgggttttattagaaaatatttgaaagtatttttattaatgaaccaaaatgacatgttcatttgactactattgtagccgattttcga

SEQ ID NO: 9210 - DNA, 681 bp, Homo sapiens
tttttttttatcattgaatttattttattttaaagttatctatgtacaccaagtaaatacacacagggggttgcgcagtttggtttgtcttccacgctggcatgcaacattttggcagatgtgagtgggcaggccaggtgccccttgcagtgaccctggctctgaaagggatgcggtgaaggtggggagcaggaggaggaggaggatgtagtgtgaagcttctggtgaagggtttgcgtgtgtgttgtttcttttttatgtaagtgaattatatttcccttacatcttgctaaagagaaggctgctccctctgtgtcatctctctcctcatctgcgctacaccctcacatttccttatgtgtttttaaaagaaccatgtggtggcaacattacataaaaccccctggattcttaagtgccctgctgacagcaaatattagcctaagtccacaggcccacaggaaccttccttccaccctagtgggtctggagacagcatggcttgtctaccccaccgttgccctcttttccatgagttgcagctttagtgcagaggagccagattggacccccttcctcagaacaatggttttcaaactactccacagaatcctcagggtctcttaggactgttcaagggctcatttgctgaggagcctttgaacagtcagtcctaagaga

SEQ ID NO: 9211 - DNA, 416 bp, Homo sapiens
gcctgtgtcgggtagaaagggtccttcctggaccgggaccctctgccacgaccatggaccgtaggaaaaagcctttggacgtcacggcctcctcgttggtagatcttaaggctgaactcttccgaaagcaagaagaattcaaacaagaaaaacttctaaaagattctggagtttttggaaaaccaaaaacaactaacaagaaaccaagtatctggagcaaacagaatgtaggcgtttcaaatccgagctgagaaggatgctgaacagaagattgaagaacaggcagactttagacaaagcaagggaaaaattggaaaaaaagccaaattatatgaaaaaatgactaaaggagactttatagatgaagaagtagaggatatgtaccttgtggatttcacacagaagatcatagacaa

SEQ ID NO: 9212 - DNA, 389 bp, Homo sapiens
ccctaatggaatgctctgtcctgcttgcaagttttggtgcagagaagccaacaaagatttataaatagggatgctcatgacatcatgatttacgacaggtaaaaacaggaagcattttagatttcaaacaaaaggtagttatcaaatatatcactacacatccaagtaactaaatagcacatttattaaaaactatgagtctaaagaataattaatatcatagggaaaacatttatgtaaaatgttaagcaaaaagttttaagaggttaaaaggaaaaaaaaaatcagggtgcaaaaccacatacataagtgtaatctggaatgtccctggctccttgctacttagctggtctacggactagcatcatagcatcaccaggagcttgttg

SEQ ID NO: 9213 - DNA, 979 bp, Homo sapiens
ttggaaccctctttggtgccctcccattctctctggaattgtttcaagtctgctggttttcaaacaagaaaagacctttctggccatagggagaatagcagggagtctatgttttggtggttacattggaaacatcttaagcaagagagggaaagttgattttaggcacacatgtaccctccttgacagcaggaactcagacttcaatcttgggggtctaagaccagaatattttccttctgccagaaaagaatcttgcacatatactcctgaggcatgagtgtgtggtccatggcaagaaatagctaaaggctgctttccaggacccaaagccccatttaatgcaagaaccagagaagtgttctaggccattagtggacaatgtcatgtttggagaaagataacaacacaaataatgtaacctttccttaaaaggcagaactcaatccattttatttgatgcttattctataccctaaccctggggtcacctggaatgaagaactctatgaataatatttgattttacaacgtgttatggttatgtgaaaactaaacatttgccttttataaagactgacaaaatataaatctttattctaaccctatccccaaaactagccaggccacaccccagatgttcttattgactattgggaagatagaaaaggcgttgtgttttttgtttttttgttgttgttgtcattgttgtttttttcagaagaccagtgtctcagttctgtcttagtagtaccacacccgtaaccgtgttttaaaagtttgttttagcctagagacagatcatacgagttcaacaatgtacagtgtgattgaaaagacaggttggtgtctatttttctttttaaaatatctgaatgtgtatttgtaatacgtaaaggtaaaaaaaaatagtgccaaaaatgtgcaaggcatctcattacagctcatgtaccgtctgtttttataagatcaatattaa

SEQ ID NO: 9214 - DNA, 368 bp, Homo sapiens
gtttatacttgtgagtttaataatttcttggcaatgagcactgctgcctttttaaatcatcaatgcctgtctttaaatgccaatcattagaagtttagaattacatttaaatttctcatatatgaatttttcatctgggaactacccactgtcgtcatttttatgtgcagaaaagatcctttttgaaaaccatatttattgggatcttatttaaatttaaattatcctttacaacttcttaaaatgaatatgctaatagataagactttatccattacatctaagaactttttaacctgtatatcaatctaaataggtttctagaaataatcctagctttcatacaccatgtagttctagactccgtc

SEQ ID NO: 9215 - DNA, 1102 bp, Homo sapiens
ccataagcaagatctttaacagatggatgtctccatgagaaaacccaaggcgagaagcccagagccatggcggggttgcttgacgtcctcatggagtcactctgccccacatgctcaaatcttccctctggccccacatccctaggagggcctgacccctgtaaagatacaggaggcagctccctggcctccaaatggcccatggagatggcagtcgggagacagggttctgtgtttgctgcggtgaagggaggagaaggcaggaggaaaaaggatggcttctagccctgaagaggactccagcatcccaggcaccgggtgcttctggctgcagttttccctatggaggcccctcagcctccagccctaacataaatgtcggttaaattcagttttcaagcctctctcccttttcagtgtcagagcagtagatggtccagggcattggaggcctcgaccactctgcattgcagattacagtgacttcctcggggttgccccatcttggtctcctatggtttcttcatcagctttttttttaccagcatctctcaaataacaatgaagatagatatgcccattagtgtctgattaaggagcaaaggctgggatttctgggccacagcgagctgcactctccctcctgcctcagccggggtccgtcttaggcagtttgggaaagggggaaaaagatgccggtcctcactgcttaagttttgtgtccagggtgccactagactttgcatggcacacttaactcctttacaatcaccacacaggcattcatcggccccagttgcacagatgaggaaccagaggctcagaggagtgaagttgccttcctgaggtcacacagcatgaaagtgatgagctaggatttgaatctgggaagttgggctctagagccagactgtactgccttctgccacactgtactgccttctgtgactgggtggcacctccagggcacatttacacaaggccctgaatctgcagaggctgtttctcaagatgcccgtcatggtgtggcctgggccagctctggcttccacaggtccctgactgtcctcagagtggaacatgctcaacctcccgccactgt

SEQ ID NO: 9216 - DNA, 550 bp, Homo sapiens
  misc_feature (1)...(550): n = a,t,c or g
aatgaacttcggtatttcttaacaccaggtactggagcccaccttctttctctccctctggtttcctctttaaatcacagcctgaccccagtctttatagtccattgtaagtggaagttatagctctattcttcacccacaccttgctccctatcattgatacttagaagaaagtaacaatttgcagtactggctgaactcctttgggaaagtttctggagtgtatcaaataagaattcatcatagtaacatggtcgttactggctgaacaaaattctttttgagactattgtacttagtcattaaataattgtttactaaggcaattttcatgtttctagaattcagtgtaatagttaacagctgtatatgtctcacaaaaggaaactacttagggtgggaaacaatggaaggttgtgtataattaattcaatcaggtcatgaatatttatgtaacatatggcattttaatttatatgttcccattctcatacttcattactatacagcagcaacaagataaatttcaggntttttggttttttattaa

SEQ ID NO: 9217 - DNA, 551 bp, Homo sapiens
tttttttttgttttgcttgttctcctggtttggggacatccattcggcaccttgcttgctcctctgagctgctttgaaccttgatgcatggcgacagcgcaaccagaacggtgacgaagatcacaacaatgaccaccatggcaccggcgatgatggcaatcatgatggttagatagtcctcattttgatagggttggctactatcccctatgttcctgtccaacggggtctccatagtcctgcggatcaagtcatagatataggaggcatttccagcagtgtcgttaacataaaggaatacaagcacaagcgtgtgcaaagacttaggggtaccccagggtcacttatgttgaccaccaaacgatgcaatcccacatcagtaggtgctggtttttcctttccagagtaatgttacctgttactggatcaatccggaataagcctttattggtttccactcactatagtatactttagttcagcgttcattccagtgtcaacatccactgcaaaaacttctgctaccacggagccaggaatggctgagaggg

SEQ ID NO: 9218 - DNA, 1140 bp, Homo sapiens
cccacgcgtccggccatgaagtcaccccaagttcaaacccaaaatgcaatttgcagtggttagaaatgacaaaggatgggtggtaggatccagagaaaaaacagtgaaacccgatggaccttaaatagatctgagggcactgatttgattattttgggtgaaatcttttaagaaaatcttgtcagattcttcacagaaaatttggtaaagcctatatttcatcgccagcctagcaaaggcaagctggcaaacagggaaacaaggagaactgtgtgctcagcccctccagagtggcacggattatgaggaggtgatggtccttccccgccaagatcctgagacactgtcactccgaaaatccaaaaagagattcagataccatgaaaggatttgagcgtttttttatgtgaatccaaagatgacatttacaaaaggtggagaagcagttccctactgagggacgtggatacaaaaagcagatgacacaacacatcccatagagttcccagggaagaatgaacccagattcttgacctgcagaggtggcgtactggctgggaggaatctctggctggcgaccgtgctattctgtctgtccacctaactgtgggctcccagatcaccactgccatgggagggggccgtggggtgggcctgcttggggtgacaggcttagctgtgctcccatagcagaggtgggagaagggaatcacatctgggtgagcagctatgttcgtgcccaggcactggtgctgtgtatttgcacacatctcaaaccttggtgaccaaatgtgtaagatattttttatgtattacaaatgaaggaactgggctcagaaaagctccattatttgcccaaattgcagcagtaatgcaggaatttgaatccacattaatctgactccacaacccatgttctttcactgaattcccatatccttgttccccctactgtcctcactggtcaaggtgagcttggtcttccgacaaacaggctagaaaagtatgcttacttatctttagctttatgcttttaaactaattcttaaaaatcttctctggataagtcaaagacaatgggaatgtgtatttctaatacattaattataatacattaccggtttacacaaaaaaaaaaaa

SEQ ID NO: 9219 - DNA, 972 bp, Homo sapiens
ttttaacgttaaatcgattttatttaaagccataaataaataagccaattaacgctcaagtctgagagggctgcagtctttttaacaataccatagtccaaaaagactaatacttattgctgattcagctcacaatattacccctttccagacaacagcacattcaaatgttcaagaaaacattttatgggcaccttttatgggcatttgagattcacagagcaatgggccatggccctgccctcaaggaacttacagtgtagctggagagacacaaaacatccagaacagacatgaggggctggctctacctccacacctctatctgaacaaaaacgattactggcttaagtcctcgtgttgtaacgcatgagccacaggaatatcttagcaagtacgcactttatcaagtttcaatttgacatgtcaaaacaaaagtttttatgttgttcatttatatttgtactcactcagatttccactcaatcaaattaaaagagaaagacataattccaagccaactgtaccataatgtttgctgtcctcgatgaaaggatagcttgttcatgtcctagaatttctccacagttccacatcttgagaccaagttcagcagtttttactgccaaaccgatgtgtaaattcggatagtgtgtagacggcgccccatcctaccttgggatccatactgatgaaatcgttcaggttcattttggaatctccagtctcaatgcagggatatggcggcggaggctctctccaattcccactggagtctttcatgtgagatcggtcagaagcaaagttcttcaaatatgaatctgcacggatcactctaaatttcctcctaaactgtgggtgaatgtcatcatcagacttaaaggcatcttctacataagtgtcaaagaggcagggaaatggcaagacagtatcgagatcataaatgaagttctgtcctccacttgaaacgtc

SEQ ID NO: 9220 - DNA, 428 bp, Homo sapiens
gcaaatattgttggagaagaagatgctaggagaagactcagatgaagaagaggaaatggatacctctgaaaggaagataaatgctggtagccaagatgatgagatgggttgcacctggggaatgggagaagatgcagtagaggatgatgctgaagagaaccctattgtcttagagtttcagcaggaaagggaggccttttatataaaggatcccaaaaaggctctccaaggcttttttgaccgagaaggagaagaattagaatatgaatttgatgaacagggacatagcacttggctctgcagggtgagattacctgtgggacgatttcaactgggaaaacaactggtggctgaggccattcactcaggaaaggaaaaaagaagcaatgatccagtgctcattggaagcttgtcggattcttgacact

SEQ ID NO: 9221 - DNA, 387 bp, Homo sapiens
taccccaagcagggcttccttgaccctctgaaaggccaccaaaacagtacccttggggactgaggggcctctggcctaggcccactcattggcaccctggatgctttcttcatgcctgggacaaacctcatggggaaagccggagctggggcagaggagtagggcctgcctggaggaggccaggctagggagctggggcagaggaggaagggggctttcctggaggaggacaagccaggtaaccccagccctttctccttccaaggctgcgctcggctgagctccagggaatagcggtgtagggtggagacaactgagtcctctgttcaggggccagctgaggttcccattgtgcaatctggtggggccccacttctttctcgtctc

SEQ ID NO: 9222 - DNA, 894 bp, Homo sapiens
  misc_feature (1)...(894): n = a,t,c or g
aatggtgttttgttggcacagggcctgtcctgtgttttcacacaggcctgtggctcctgctgtacaagtggagtggggaggagttgagatggagatgccttggccctggacacttacctgtccctctactggcccagctcatctcctcctgtgggcaatcacgcgtgcactggccaccctcccaccccacagcacacaccacgaggggatggcacagggggaagatgaggctggaccgtgatgttatcaataggctagaacgtccttcaaacactgaacctgcatctttcctcctcttactacttgaacactttgtgagctctgggtgggtccaggggtgcagcgttttgtccctgggggcatgtgatgggggagtcctggggcacatcaagatggctttaacttctttctttcgacctcttaaaaaactaaaccaagccaaaccacaaaggaaatctgcacaacttaagagaaacttgaaagggatcgtgtaactactagtttgtactaagtttttttcaagaaagggaaacaatttatatatatatatatacntatccgccaatttattttttacactgtgtgattaacattagggagtactgagtgcatcactttatcagtgtgacgggtgatgtccacgtcatggctgttctgactctgaaagccacttctgctgatgtctaaaccgcactcaccgcggacgtccgcggggtggggtggccctgctgttcctcctgcaggtgagaggtgtggtgttgcctgttggacttgctgttgagcctggcttgcaaacctgtagtgaaacagctcgtgtctgtgtgcacactgctcctgtgtctgctgtcgttaacattgtgtgtcaagttggtaaagtgacaaataaaggtgtta

SEQ ID NO: 9223 - DNA, 966 bp, Homo sapiens
ttttttttgatttttggatatatattttatttgacagtgttttagaatatcatacagtaaacaagatttctgtaaaagttaatttatccatagtggtacgtttcataaaaatagttgctcacttacagtctttctgtgactattaatacatggaattatatttatagtgataccagctgtaccggggtaaattcacagctaacactaccaccaaatattatttggaatgggatttagatgatgtgctgtcttcacaggttatgggattacagccgcataaagcaattactgcacaagtagtagctgtgaactgtgcaaactagagtttatgccagtgtaatctcaatttttttttccttttgtaatacatggaaaataaagtcagaggatacagtaccaggacgtgcagctacactacagaagcattgtccaaaaccagattcaataaattaatggcaaactatactggatttctagtccaggggagaaagactaattgagattaaaccaaaagcattataaactgctacaagtgtttgtgcttttgtttacgatgaatgggtttcatttttggaaattgcttttacaagctgcaagatccttcacttgaggctttcagccttattctcctcctgtcaaacaactaaactactccgatgtttgatgaaaattaaactgctactcaggatactgcaattacaaggagagggaatgatcagcccagggaggctattacgtgtgacctttgagatggacctgatcgccccttttactttttagactacaagtgcagggaggtggagcttatttgcatttgaactactgtaaagagtaagaatatggaaaggatgaagcctcattcattcgggcatattaaaaagaaattgccttcagaaacactttgccttttaatatgtgtagctacagtaagtaccaatgggctaactaattgaagctaacatttta

SEQ ID NO: 9224 - DNA, 1991 bp, Homo sapiens
ttatttgcaaaatcaaaggtgttaaagaatttaacttgcttcaggaaataaattcaagaacataatggattcattttcattggtggcagacacgaaatttggttcatgataagacttcctttccccacctcctgatcagcattatttaaatctgtatttttctgttagttaagaaagaaatggcttcatgatattgtatttaatagcaaaagtttggctgtcttcttcattactgttaatagctactatattttaacaaggagatttctttttttgttgttgttgttctagagtttggaatatactgattatctcagacttgacatttatactgaaggatgaagtaagacctccagctttttttaaaaaaggtgttgatttggaacacctgtatgggttatggtttattaaggttatggtttagaaagtttttttccctcagagccttaacttgttaagaaggttcatttatcctgcactgaaaacaaaaactctatatactttgtttgtgtgcctcctgcactctcccattccctatgtgaatatgctctagttgatatttttaatatattgatttcttttttctcacagcaacaagtgcttactctagaggttagtggggccctgatatgtcatcagtcaggatgcctgcctaggccaaagctggactaagattattctgtacatttgttgatcttgatatagacttatatccctgtagggactgctaatggctccggcttctggagtaaggtactggagaccactcatccctgtgtctgcttgattggttcagctgttgaattgcccttttatttggaagcagtgttgaagttgtctagggttcaaatggctgctttgtacacctgtcattagtataaggcagatgtttattttatcaagctattttatctctacatttaactaaaaacaaaagttcccaaagatctgccttcacttcagaaattttttttggattaaaaaaattaagcctgaaccttaaataaagtgagttggttattcattccaaggattaagtcccaatctacctctcagcacaatgcagaagctcaccactgtattgctgccattaactcatgccagaaccctttgccaataactggaattacaaatttttgttaaagaaaatttatcaagatctttctttactgccttctctatatgtacatctcaaaaacatgtacatctcaaaaactggagtagaaagttagattgctcaactacaactcctctagaactctatagctctgacatacagattcacactctcctctatttgctaagtatgtaaagaatgttttcttttaaaatgttctcttttgagaacaactgcttatttgttataaaagcatttggttaaaatgatgtcatcataaagaacagtggctttgtttcaatacatatttttgagatgattatctagaagccagattaataaaatcagcttgtgaccttgctaagcatataaactggaaattcagatacattcaaaattatgggttcatttaaaagtgttctaccttttgggtatgagactaatatcactaattcctcaatagttatcatggctctatcttaattaattagaaaatatgtgtgtttaattctttgagaattaaaatagagaatattaacagagggttaaaaactgcttcaactccaataagataaaggaagctcaaaatctatgagctgagtgttcaattagctttgcctactgagttcaattttatgtcaatacaacagtggatcagacagtacgactttgaactggtgaatgtaaacaattgtttttcacctaagctgctttggaagaactgatgcttgctgctaactaaagttttggatgtatcgatttagagaaccaattaatacctgcaaaataaagcatactgtggtacttctgtttgatctagtatgtgtgattttagattgatggattaaaaattaataaagatcatacattccat

SEQ ID NO: 9225 - DNA, 1080 bp, Homo sapiens
aattcggcacgaagggttattcttcgcactataggaaaagaagccttttcatatcctcagaaacaggagccaccagaaatggaactattgaaatttttcaggccagaaaacattacagtttcctcaaggccatcagtagagcagctttctagtctcattaaaacgagtcttcactacccagaatcatttaatcatccatttcatcaaaaaagcctttgtttagtaccagtcactcttttactttccaattgttctaaggctgatgtagatgtcatagttgatcttcggcataaaacaacaagtccagaagcactggaaatccatggatcattcacatggcttggacaaacacagtataaacttcaacttaaaagccaggagattcacagtctgcagctgaaagcatgctttgttcatacaggtgtttataaccttggaactcctagggtatttgccaagttatcggaccaagttacagtgtttgaaacaagtcagcagaattccatgcctgccctgatcatcatcagtaatgtgtgacaacttggaaatttgtactgaaatccacaataatcagtttttgctggatgggttttacagcagtatttgatatacctaacttgttatggaggttgattgatatctgatccctgcaaaatactttgacttgtcattttgttgatgatgcaaagcacgttggactgagaatacttaacattctttttctgtatttctttaaaccctgagaataatttacatgctcataatacaggatatcagcatatttgtgcaccttattaagccccatcttaagaaaacacaaagtctaagtctgctgttacaacttgtcaatggtatacgaatattaggagatgattctgagaaaggaaaggccttgttggcagtactcctgttaagccattagtctctaaattccagctttactgtgaagttctatagagtgttaaatacaaattttcctgtcttgcttcacacagttccttaaaatcagttttgaactttggtcatagagtcttcatatttcagtatttggtggtccctatgacttatacataactttgt

SEQ ID NO: 9226 - DNA, 439 bp, Homo sapiens
atgacgtcgctaccagcactagtgcagcaacagggaaggctgcttctggctgctaatgtggccaccctggggctcctcatggcccggctccttagcacctctccagctcttcagggaacaccagcatcccgagggttcttcgcagctgccatcctcttcctatcacagtcccacgtggcgcgggccaccccgggctcagaccaggcagtgctagccctgtcccctgagtatgagggcatctgggccgacctgcaggagctctggttcctgggcatgcaggccttcaccggctgtgtgcctctgctgccctggctggcccccgctgccctgcgctcccgctggccgcaggagctgctccagctgctaggcagtgtcagccccaactctgtcaagcccgagatggtggcgcctatcagggtgcctggtggaactggcccgc

SEQ ID NO: 9227 - DNA, 1405 bp, Homo sapiens
tgatgttacaaattacttgttgttttaatatgttctttgttgaatagcttattttacatttcagtcaaaatagttatttcacaggtgaaaccactaagtagcttacttcctaccttttaaattaataaagttacagtcagccatattgcttgagtcttgccaaaatctttagagaaacaacacaaactcagacatctaagtcagatcaaattagagcccaatatttttgatacttttattgtatatgactagttttctagaaaactattccagaagatacagtcttccttccagaaaatacagctttactgtccttaagtgcctaatcattttcaagaggaggagcaaacagtttgccctcaagtatctggtctatcaacaggggtctggctaaggaaaaaacggccttagagcgtgatgaacctacttaacactacctggtacctcaactcatgctaaacattctaatttgagcaaagctaaatcatgggtcttagtctgtttagcaaaatctccacaagatgaaatttagcttactaccccaaactgttcaatgttttgggtccaatttagacacaaaaaaatgttttataatcctagacattagattaatgaactttttaaaaacaaagtcatgtttgggcttagaagtttgcataatgttacacagaatgattatgatatcttccgaaacagcttggggttggggggaagttacacataggtgcatttgcataactatccaaactattttactgttttcacaagtacaacataaataacaaaggtgctaatttcaaagacaggtttcaaacaatgagaataagaatatattatttcatatcaggcaataataaccttagcccaaatacttttaacatctaaagtgcattaattgacttccttaggaattttcctaaggaccaaaggtagacacaaatggcctattttaaatagtaatattactccatgttcacagacacttaaaggcaatcactattcaacatacaattgtggaaattactgatttttagttctcagaattagagttccctttgtttttcctcccaggcaaaggaaagcttgatttgctctggggttgagaaagtttactggctaataaagtgaatggttcaatcagagttttccgatctgtaacagtcacctcccacagtcttactttctcactttttgcccactgctgtgccacttcagcgtccacttgtctctgctcagaaaggtcgattttgtttcctaataccacaattgctacctcttttttgtctttgaacttatcgatttctttcttcagaagctccactctttgaaaggattcaaggttattcacactgtacacaagaacgaagccatcagcaaatgaaaaataatgctttggcagctccaa

SEQ ID NO: 9228 - DNA, 516 bp, Homo sapiens
ttttttttttttgaagattgatcacacaattttattagagtcttttgaacaaatgtaatcctctgtgaaaaactcttgcaaaagagacattggagtgtactattttcaaccctgagcattaacactgcataccaagggggggtgggtcaagaagctggttagatcgaagcacaagcacaagccactgatattctctatgtgatcaggtttttacaaaaaaatacatagttttcaataaataatgcttaattttacaactttgatacagcaatgtcatacaccgtttcaacacactacactctgcatgctagatagtctacgaggaaggacgaaactttggccatggcattttctttcccccctagtgctatcaaacacttcatcctccagcgcactgcctcaggtagctttaccttctctctgtttcacagcaataggccgtgcgctgggcttgcaaactctaaaaaaggtcccccccacaaaccactcagacttctacacaaaagggtttttcag

SEQ ID NO: 9229 - DNA, 1447 bp, Homo sapiens
ttttttaagggaacaatgttgctttcaaaacaagacatgctaggctgaaactgatttatggaaaagactgcttgttagcaagtatatttggtcttgagggggatacagattatagaatatgctgacatttgggcttcagaggaagaattttcaaatctaatggaaatagttgaggtgttcaggaatgctgtttcttggagttggaagcttaggttttgaaatgttgaaaccaaaaagacaaaaattaaaacataggaccttaggtcgtcattcacacccggttctcaagaatcaagtggagcacttcaaagaccttggcttgtctgtcccatcctgccactttctcatcttttcatgcttttgaagacaccatttacagctctgactcagccctattttgtgtaaagtaatatattgattattcagaaatagacaatacattttttaattacccaaggactgactgttttgtgcattttactgttggttgtcttcagtagagaatagtaatagggcagagaaaagtatatattttgcctcagtcagtcccaccaccacaatggactattgggatattttctaaaaaaccaatcaatttgcccatgattacctcacaaataattagtgctacctggggtactctcaaatatacagcttttgaaactgtagatgaaaaaagctctactcagagtttttgtcaagactgtgcctgggttgaatatcagtcaattgcctacacttctaaacaataagtgccaatgtctcaattttctcaccctgaatgatagaagctagctttatcaaatgccaaggttagaaagcctggaaataaaacttaagcacagacattcaagtttttgaaaagcataagcctaaattcagataaatcacactgatatattgtactatgcataggaaagttgtaggtgggcgttcagggaagactttgattttaataaagcaatatttagtattgaagacaaacactttttattttcagatttctgccaagtaaaacagaaattgccaataaaataatcagtattttgtaaatggcaggcaagcttctggctgtcgaaaacatctgagtcatttattcagtagacaatatgtccttgatccaggttctttgccagctataagggaatccctgtccttgagaggctcatagtctataagtaacattacagaatttgttagcatacccattcattattagttttacctaaacgtgttaggatcactactggtggaaattgtaaccagcctttgggcatcttaaagggtgaccatgtggcatgccctttttttttttttaagaatttaatgtttttcaagattgtagtgttgatcagcgcaacaattcaagtgtgcaaagtaacaggatagtttgcctcttcactttacccctggataaaggcactttcactgcctggtcactgaatca

SEQ ID NO: 9230 - DNA, 427 bp, Homo sapiens
  misc_feature (1)...(427): n = a,t,c or g
atagtgcctcattatcattcttgagtcagatacttctgttgatgggagaaacagaagaatccttccctttgggtgtgttgagctcccccaaagccatcagcatctcttttgacaaatgctagtcctttctctgtgctttggaatcaggttcctgcatcatcacccggactgtaaaaagtatcataagcctcccttgccagatgccaactcgtggggcatttcaacagagtttctttgaaatgtttacaacgtattccttccttgataagcaatgaacttaacatttagatgcaatccgtgaaaagaaaaaaaaatctgaaaaatatctcctgcatcaggtctgtgttatttatgtattgtgaatgttttcttaattttattggctgtatgctttcttacacataatnaaaatattttgtgaactcaa

SEQ ID NO: 9231 - DNA, 399 bp, Homo sapiens
  misc_feature (1)...(399): n = a,t,c or g
cctgggacgtgccaggtggattttaaggaatgataaaggtactaaccactaaactaaccaatccaggccaaccttccagcagatattataagccttagaaatcaaaccatgtagatttcaatgctagaatagaaattataaaatgtaaactgactagtaaattcaatttttttaaagtaaggaattagcaaaaaatgtacagccatctaaagtaattaatataaactaacatgcaggagagaagggatttactacttgtatttcaaaaatacttccagaggtaaagatcagaggtgtttggcttggcaagcctgggtgtttgctgctttctccatgccaactgtggtgatgtagactgtgtatccaagaatcataaatgccaacaatcccctaanaatt

SEQ ID NO: 9232 - DNA, 390 bp, Homo sapiens
ggaagaagacatggcatcaggttgggttttgcaggatactgaaattgtctaggggccttggctgtgcaaagagcctttccgtcaaaaccctctgcatgagccacagtcagcacgtagtttgcacatgcccacctccaaggtggcacacagctgctctcttttgagtaacaggttagcccagtttgctgcagaccagagtctacttacaatgaggaggctgctctcacagggtcaagagcacaggctctcgctaagtactatgtttaccctcccatcaccaaatctgtcccagcccagatgtcacctggctaggaagcgctggggagtatttagcatctccttatgacaatccttcatcatcaaacagagacagttgccaaagatacagtg

SEQ ID NO: 9233 - DNA, 481 bp, Homo sapiens
  misc_feature (1)...(481): n = a,t,c or g
gggatggaggcggcggccgagcctggaaacctggccggcgtcaggcacatcatcctggtcctctcaggaaaggggggcgttgggaaaagcaccatctccacggagctggccctggcactgcgccatgcaggcaagaaggtgggaatcctggatgtggacctgtgtggccccagtatcccccgcatgctcggggcgcagggcagggctgtgcaccagtgcgaccgcggctgggcacccgtcttcctggaccgggagcagagcatctcgctcatgtctgtgggcttcctgctggagaagccggacgaggccgtggtgtggaagaggccccaagaaaaacgcgctgataaagcagtttgtgttccgacgtgggcctgggggggagttggattacctgggtngttggacacgcccccggggaccttccnattgagcacattggccaccataagaaagccntgcttcccttancaagcccnttggg

SEQ ID NO: 9234 - DNA, 4289 bp, Homo sapiens
tgccgctggagccggtgtccgggctggtgatggggttaattccctttcgtaagactcttacttgcacccacccagccccgccgtcgccccgccgcgccgcgctccaaccgcctcctcctcctcagtaacgcgggccacggaaaggtatgatatatttgatccaagacagtccattccagtccgggaatctacagtggtgacaaggacatgggactcctcctgccagattacagatggttcactacagttgacatcctggctgacaactgtgaaaaagaaccttggattattttattttatttttgtgggacaccacaatcccaaatccaaaggacgcatcaggcttcaagctccctgtagaattcgaaaataaccttttctaatgaggatgtctgatactgttactgtaaaagatgaaactgcaacaatgaaggatttggaggcagaagtgaaagatacaaccagagttgaaaatcttatcaaatcagaaaactatgggaagattttggtagagaagaatgaacattgtattgagaacaatatagatttgcaggagaaaattcagatccagttaacacaatcatttgagaaagaagagaagccctcaaaagatgaagcagaaaaagaaaaggccagtgataagttgcccagaaaaatgttatcaagagattccagtcaagaatacactgattcaactggcatagatctacatgaatttttagtaaatacattaaaaaacaatcccagggacagaatgatgctgctgaaattggaacaagaaattttagatttcattggtaataatgagtctccacgtaaaaaattccccccaatgacatcttaccataggatgctattacacagagtagccgcttactttggattagaccacaatgttgatcagagtgggaagtctgtcatagtaaacaaaactagcaatacaagaatacctgatcagaaatttaatgaacatattaaggatgataaaggtgaagactttcagaaacgttatatcctcaagagagataactctagctttgacaaagatgataaccaggtgagaatacgtttgaaagatgacagaagaagcaaatctatagaagaaagagaagaagagtaccagagagccagagaccgaatattttcccaagattccctgtgttcccaagagaattacattattgacaaaagactccaagacgaggatgccagtagtacccagcagaggcgccagatatttagagttaataaagatgcttcagggagatctacaaatagccatcaaagcagcactgagaatgagttgaagtactcggaaccacgaccctggagcagcacagattcagacagctctcttcgaaacctgaaacctgctgtaaccaaagccagcagcttcagtggaatctcagtcctgacaagaggtgatagttctggaagcagcaaaagcataggcaggctttcaaaaacaggtcagcccttcataaacccagatgggagtccagttgtgtataatcctcctatgactcaacaaccagttagatcccaagtgcctggacctccacagccacctctgccagccccacctcaacaaccagcagctaatcacattttctcacagcaggataacctagggtctcagtttagccacatgagtcttgctcgccagccatctgctgatggttctgaccctcatgccgccatgttccagtccactgtggttcttcagtctccacagcagtctggttatatcatgacagcagcccctccaccacatcctcctccaccgccaccaccaccacctcctcctcctcccctaccacctgggcagccagtccctactgctggatatcctgcctctggtcatcctgtcagccagcctgtgctccagcagcagggatatattcagcagccatcaccacagatgccagcctgttattgcgctccaggccactatcactccagccaacctcagtatcgcccagtcccttctgttcattacaattcacatctaaaccaaccactgccacaacctgcgcagcagacaggttatcaagttatacccaaccagcagcaaaactaccaaggaatagttggagttcagcaaccccagagtcagagcctagtcagtggccaacccaacagcattggaaatcagattcaaggagtggtcatcccctatacttcagtgccaacatatcaggtttcactgcctcaaggttctcaaggaattccccatcagacttatcaacagcctgttatgttccctaatcagtctaatcaaggatctatgcccacaacaggaatgcctgtttactatagtgtcattccacctggtcaacaaaacaatttaagctcttcagtaggttacctgcaacatccaggatcagaacaagtacaatttcctcgaaccacttcaccatgcagttcccagcagcttcaaggccaccaatgtacagctggaccaccaccgccacctggtgggggggatggtgatgatgcagctcagtgtaccaaacaatccacaatcttgtgcccactcacccccgcagtggaaacaaaacaaatattactgtgatcaccagagaggacagaagtgtgtagaatttagcagtgtagacaatattgtccagcacagccctcaactcagtagccccattatttcaccagctcagtcgccagcaccagctcagctgtccaccctgaaaactgtacgtccctctggaccaccactttccatcatgccccaattttctagaccttttgtccccgggcaaggagattccaggtatccattacttggccagccactgcagtacaatcctcctgctgttctgcacggacacattccaaaccaacagggtcagcctggcagcaggcatggaaaccgaggaaggagacaagctaaaaaagctgcatccacagaccttggagcaggagaaacagttgttgggaaggtcttggaaattactgaactaccagatggaataactcgcatggaagctgaaaagctttttggggaactctttaaaattggcgccaagatccggtggctccgggacccccagtcccaaccacgtcggtcaccccctctgctgtggcagtggggacaacactgccaaccctgaacgctctaaacccagtgacttggcctccacctacaccgtcttagccacattcccctccatttcagctgcacagaatgcactgaagaaacaaattaactcagttaacaagtttaagctgagaacaagcaagaagcactatgactttcacattttggaaagggcaagttctcagtaacagccacctttggacccttcgcctttatggttcccctgccctctcccatctttgattggcttggtatttgggagcttctgttaacattatagagactcctaggatgtgtgttcatgggcattatagcttttgaagaaaggccagtgatccagcaaagggggaaaaatatgcatttcaccccacatgactaggaatccacatcagaatgatacagagttagcaggtttttctaaggaaatgccattcaaatgcctcctaacttttatagttattttgttttatatttctaaattcttgtatcagatccaaagctctattgtacagcaaattattcttcaaaatgattataaccagttgcaccctgtatttctttttgcagccagcacaatgtgacccaacttaaaatttgggggaaaaagaatgcaggagtgaaataaccaagtcaaaaccatgtactatctccttgggggttagggatgctaagaagagcccacaaatagaggattactcttcccctgaatctctaaactcagaaacaattaccaaaaaatacataactcttccttgtagggccctttccttattcatttaggtagtgtgaacattaagtataaaataaattatgttcttaatgcctcttaaaccacttacattcaaaggggaacagaaatcattctaagcaggaaaatacttccactttttttttttcaagtatctctctaataactaaatgccacttatttgcattctccttgtggattttttgtcacctaaggaaatgcatttgatgagtgctggaaacttcttaagtgctttacagtttgttttcattgtttgcagcggatcactggacatcaaagattcattgcacttatgaacaaggaaccttcttttcaatttctgtgtaatttgcaaggctgtacaatgtgtgctgatgcaagcctttttcagttcaagagaataaatgtttacaaataaaaaaaaaaaaa

SEQ ID NO: 9235 - DNA, 1123 bp, Homo sapiens
  misc_feature (1)...(1123): n = a,t,c or g
gccatacggccgagaatggggctccctttgccttcatgaaagctacttcccccaacactaagactcagctgtacgtttgcttagctcagtcacatttacattcttctgggtgaactgtaccttttgagtacctgccttcattttctagaatcagacctaacaaggtcagtagaagcctggggcagcagcgggcctggaaagacgaggcagccagcatgaactgctgttctctccctggaccacaaggcgtcgtcttcctccagggtcaagtaattgttcttgttccgcctcacaggaatgtggggaggaaggacgttaacactataaaatgctgcgtcctaccttaaacttgtactgtgagaaagctggaaacttccacctgtacagtgggtctggtttgcatgtttagtttcatttgtgggaactgcttgtccaagagtgagctcaggtcagggcagtttgtgcctatgagaattagctcagctatcaggcaggtttttagacacctttttaaaatgtgctcgtgtttggtttgttttgcttactgtcagtcctgggtcaatcaaaggtttgtaagggtgagaatttttatgcactgctatatcgcaagtgcttaaaacagagactggcccagatgaggcattcttcaaatgtttgttgaaatgaatggacaaactcttaggataaatcctaatttgttgggcaactgttatttgattttagaaggccaaactgattttattttagagaggggaaggggaggggaggctcattagccctcttggtagaaagaggactatttctgcaaatgaataggtttccaccttaagtagtgacagtccttaacttcttattatggagtgagtcttgaccgctttccaagttcaatagaagttcaagattgcctctcagtgattagggaaattgaagcttttaaagctcctggtctcagtaattcctcagaataaacctctttaaaagggatattgatggaaatgtacaattaccagtaattgaggttttatctgaggggatggagatgatgaaatggttccttcttggaagttgttggcattttggctttatttttcacaaataaagtgaanaaatattaaaacgaaaa

SEQ ID NO: 9236 - DNA, 412 bp, Homo sapiens
gaaaaagtgcctttagaaaaggaagaaacaagtcatattgaagaacttcaatctgaagaaactgccatatctgatttctctactggcgaaaatgttggaccacttgctttaccagttgggaaggcaaggcagttaattggactttacaccatggctcacaatcctaatatgacccatttgaagattaatctgccagttactgcccttcctcccctttgggtaagatgtgacagttcagatcctgaaggtacttgttggctaggagctgagcttatcacaacaaacaacagcattacaggaattgtcttatatgtggtcagttgtaaagctgataaaaattattctgtaaatcttgaaaacctaaaaaatttacacaagaaaagacatcacttgtctactgtaacatccaaag

SEQ ID NO: 9237 - DNA, 459 bp, Homo sapiens
ctggatcaaactgggaatcaattaagagttccttagccaaaagcaggatgttgttctgatcaagaatttgttggtgagcgtgcagtctcgatgggagaaggttgtccagcgatctattgaaagagggcgatcactagatgatgccaggaagcgggcaaaacaattccatgaagcttggaaaaaactgattgactggctagaagatgcagagagtcacctggactcagaactagagatatccaatgacccagacaaaattaaacttcagctttctaagcataaggagtttcagaagactcttggtggcaagcagcctgtgtatgataccacaattagaactggcagagcactgaaagaaaagactttgcttcccgaagatactcagaaacttgacaatttcctaggagaagtcagagacaaatggggatactgtttgtggccaagtctgtgggagcggcc

SEQ ID NO: 9238 - DNA, 363 bp, Homo sapiens
  misc_feature (1)...(363): n = a,t,c or g
gtaacataataaattttntgtcttccgatactgtgaaaaaattactaagacactaagggcatcgtgatccaaggaagtttgggaacctcagacttagaaaaacattcttcctcaccgtcattttcagagtggtaatattttgcagcacactgtttttagttaatgtacagaatcacagaatttaaatttaatctctcacaaggaaggaatcccatttataggctatgctgttatcattggctccaatgattgagagctcacttcctcaaagatagcctgtttacacaactggatccagctatccactgatgggaaatgcatgtcacttattgaacaggaaattctgcctcctcttcaaaaaaa

SEQ ID NO: 9239 - DNA, 761 bp, Homo sapiens
tctaagccttgagattttggagatacaaagaggagtgatacaaacctagctctttccccaggaagctgccttgataactagttttctattggtttctgattgaaagttttcagtttcattgattttagaatttaacttcagaatatgacatctgaccttccatatcttagaaacctgttattccttttttttagtctctgcattgtctttgatgccttggtagcatgcactgaaaattaactcttctgtttgaagctgtaattgtcaagattaaagattaactttttatctttgagttcactttaggcattgatctcttaggtgacagtgcccttgatggaaaaacaggataagggggggcacaagcttataaacgtcaagtgaaagtaaatgctgcagaactcatgttgtttttttaaccaacattctttgcttttggatgtttaattcactggagagcataaatcagatctaaattaagaataacttatttagcaatgctgttgctcaccttggggttgagcagtgcattgtggtgtttcagcagttattaatctagttaaatgtagttttgaaatgttagatggtagctttgcatgaaaggaattctagcaatctatcaagtatatattctgaaaacacaagttgtttaaaatgtaggattatttgtggttgtgaaagatgaaggaagttatagcaagataatgtcagatagcatttagggaaagcacagttttaataactgattaagaaacagctac

SEQ ID NO: 9240 - DNA, 843 bp, Homo sapiens
tttttttttttaacttgtagaaatgtaatttatttcatgcaaagctacattctttcctatattttaacagctaatcaaataaacatttcaaaaaattcattacatcacaataagttaaaatactacaaaggaactgcaagtcaatcaatttatcaaaaccaaactgagcgaacactatgcatagataaggccaaagttactaatttgcttataggtagcactttgcagctttttccaagtacatatttgaaaatgtagtgagaatctacagagaaaaaaaatagtttaatctacaacccaatgatcagatagtaaaacatttgtcattacatatcaggtggcaatggctaactaaagataaacttggcatcatgcaccaaaaatgaccacagtaacattttgaaaaattatgatcatatgcacatttgaaaagattaattttctatttcacctaatcaactgaattggataaaggcaaaataacaagtattttattaatgcaatgcagaaattaggtttcttggtatattaataatttgcttgtgtattggtatatataaaaatcactgacgggatctaggagtatttcaagctcacactggactactgaactttagaatactgtcctaaggaaataggtctgggcagaacttatttgagatagattttaaaactatttaaaagcaatactacaattagttacttacaaaaacatttataaaaattaaatatcagaaagtgagaacatcaatattagagctctgttgtatcattcaatgttataatttataaatacatattaatttaaaacacaggtccacatattttctaccttctaaaaaa

SEQ ID NO: 9241 - DNA, 2206 bp, Homo sapiens
tctttgtctgacacccaggttttattgtttccactttattgctcaagcatggaacttgaggcaagcctggaccttcagcaacgtgcagagaagaggctgaggggattttgggacacaacctggccgagaggggaaactgacaggggaaataccagaacagggaacagggggtggtcaccatgacaccagaagacatcatcagccacaccgtcgggggtgaggaagggaacagagagaagaaatgggcatagcagtggtttttcccatgtccctagcacccacatggaggccacatttggaaatggactgggagagggaaaggatgaggaaaacggctgcccagggagtctccctctccaccctggggttcttatcagacctcatccctaccacttgcctcttctacccttaaaaaatggacctaacagagggagcaaaataaattaacaatctgatgaatatatatggatggacatatgttcatgtgcaatggaggaagggaagaggggctgacaccagctaaaatgattccccacctcaatcccccagcctacacctttcccccttcccctaaagccaccatccaaccagatagaaaaataaaggtctaattcactcaaaattcttcagtttttacaaaactaacagggtggagtggggagactggggggcaggcagccgcaggagtagggctggtggagaggggctatgcttctgtctccacctgagactggctccctgccgtgttgctcttctgctcctccttcatctctgtgtcagtgggatggtctcctgaggaagcctctgcccttggcccttgttctcctcctcagccagcctctcaaacatattggcatagagcttcttctcccgggcaagctgccttcggatccgctgctggcacacagccagctggggtcttggcggctttgttgttggggtagagctgcaggaccttctggaaatcagcccgtgcccagttcaaagtcattccacggcccaggtgggcctctccccggcggaagaggcccttctcgttgttgctgtccagttctagggccttgttacagctttcaatggcagcagagaaggcctgtagtttcagatgacacatggccaggttgaggtgagaggccagtcgaagggcctgtgctttctgtgcttcctcattggaaaaactagactcatattccagccaagacacgatcttcttatactgtagtaaagcctggcttgtagttaccttccttgaagtacacagtgccccgctctttcactatggtgctctgttccagcttctcttctgaattcatctccccaagactccttggccttttcaaaactcttgaggtgtgattcatatttcagctcagcatttggtgggatttggaacttttccttcccaacactgccaaaagcatagctgggcttgaggtacacgatggaatgttctcctttctccatgcgctgaatggccctctccagaccataaggcagatccaggttctccccctcgccaatctcaaagcggagctcccgctggtcaaagagcttgtccttgtagtacccttccagtgcaacctccacgatagcaccctcattgggcttagcatagccttcaccgcgagtctgtattctgcgaatgattccgccatcttcctcttccgtcagatcttctcccttaaactcaaacaactccacctcaaatacaagcgtggcattggggggaatctttggaggactgcctgctgaaccgtaggcatattctggtttgcaggtgatgtggcacacctcccccaccttcatggtggctatggcaatgtcccaagccttgatgacctccccttttcccaggtcaaaggagaatttgtccttgcgatccagactggagtcaaactttgtgccatctaatagccagccagtgtagtggacaaagactcggtccccaatcatgggcatctctgtacctgtgccctctctcttgatgaccttcagcacgccttcgtcctgtttggggctgatgtccactccctccatgggcagcggcgccgactgcgccccgctctcggtcgccttcatctcctcggctgtcatctccgcgcggcgcgccgtttatccgggagctggtgccgcgcgagcgcactctgggcgcgggcgggggcgctacctgcggggcgtgcgggaggccgggcgcggcggcactgac

SEQ ID NO: 9242 - DNA, 2081 bp, Homo sapiens
tggaagcagcgtaaaggatggacaggaatgcagaggtaggcaggaggaccagcagtgtgactgctgaaacccaggggagggccccgcggctctgaggttgctcgcgcgcccccgccgatcgccatggatcggatgaagaagatcaaacggcagctgtcaatgacactccgaggtggccgaggcatagacaagaccaatggtgcccctgagcagataggcctggatgagagtggtggtggtggcggcagtgaccctggagaggcccccacacgtgctgctcctggggaacttcgttctgcacggggcccactcagctctgccaccagagattgtgcacgaggacttgaagatggggtctgatggggagagtgaccaggcttcagccacgtcctcggatgaggtgcagtctccagtgagagtgcgtatgcgcaaccatcccccacgcaagatctccactgaggacatcaacaagcgcctatcactaccagctgacatccggctgcctgagggctacctggagaagctgaccctcaatagccccatctttgacaagcccctcagccgccgcctccgtcgtgtcagcctatctgagattggctttgggaaactggagacctacattaagctggacaaactgggcgagggtacctatgccaccgtctacaaaggcaaaagcaagctcacagacaaccttgttggcactcaaggagatcagactggaacatgaagagggggcaccctgcaccgccatccgggaagtgtccctgctcaaggacctcaaacacgccaacatcgttacgctacatgacattatccacacggagaagtccctcacccttgtctttgagtacctggacaaggacctgaagcagtacctggatgactgtgggaacatcatcaacatgcacaacgtgaaaattgttcctgttccagctgctccgtggcctgggcttactgccaccggcagaaggtgctacaccgagacctcaagccccagaacctgctcatcaacgagaggggagagctcaagctgggttgactttggcctgggcccgagccaagtcaatcccaacaaagacatactccaatgaggtggtgacactgtggtaccggccccctgacatcctgcttgggtccacggactactccactcagattgacatgtggggtgtgggctgcatcttctatgagatggccacaggccgtcccctctttccgggctccacggtggaggaacagctacacttcatcttccgtatcttaggaaccccaactgaggagacgtggccaggcatcctgtccaacgaggagttcaagacatacaactaccccaagtaccgagccgaggcccttttgagccacgcaccccgacttgatagcgacggggccgacctcctcaccaagctgttgcagtttgagggtcgaaatcggatctccgcagaggatgccatgaaacatccattcttcctcagtctgggggagcggatccacaaacttcctgacactacttccatatttgcactaaaggagattcagctacaaaaggaggccagccttcggtcttcgtcgatgcctgactcaggcaggccagctttcccccacaggcaggccagctttccgcgtggtggacaccgagttctaagccacagaccgaggccccagcaggcagcggctggagggatgccacacccctcacagggcagcccccaactacatcttccctgcttactctctgcctacctgcctgagccatgttcacctgcccacttgtcccctgctgcctgcccaaacaccccaccattggcctgtcaacccacccattggcctgtctgctgggtgctaacaaagctctcatcactccttcacttggtctgtctgtctctgtcttggtagttgccggtggacagcatggccgtgcagcctcccacactgaggcccgtgctttccaaatcataccagccccgaggaccactaccccacggccagccaggggtccagagctagcccaggctggagatctcgactcagacaagatggtgacaatgccttgagtctgaggcatcctctgcctgctttcctgc

SEQ ID NO: 9243 - DNA, 154 bp, Homo sapiens
ctccattttattatctttgtcaaatatcaaatgactagatatatgtaaatctgtttctgaactttctattatcttccattagtctattcatatttgcatatatagcacacttttaattactgcaaatacataaaatgtcttgatgtcttatcgc

SEQ ID NO: 9244 - DNA, 1070 bp, Homo sapiens
  misc_feature (1)...(1070): n = a,t,c or g
agaaaaggtaaggtgttgtgtcacaaagaggccccagtctctttcttcttacatccatgcctcttactagatgatacatttacagattgggcagtttgttctcaaaacctgggtgagaagactattcctggactctagcaacttcaaaactgaggctgggtttcagaatctttttctgcatcaattcagtcaatttgccttcaacaaagagaagtcagcaagttctatttatgctgaaagaactattccatgagaaaagcagagaaccccaaagtgggcaggcaaccccgacgagagcttatccctgtggcggcatcaggagtggctgtacattgaattttcaagtgctggttgggctgtcgccagcccatgggtaggaggggaggaatggcttaagatgaggtaagatctggtggtggggcatctttcctcaattccatactgactttgatcttgagaaagaaaaactggctatgcattacctaaaaccagtccaaaatgaaacagaccaacacacacacaaaagcaaattgttcaatccctttggaattaagggaagcagcataaggtttttctttttggaaaaaatgcatttattttctttttctccaacagcaagaatcttttgttttcattttgcacgtgaccttatcttggaaactcttatacccaattgcctcccctcctattattcagagcttccctgtctttttacttgaagacaaataagtttgagcacttgagtaaaacttcacaggtgtgtaagtaggaaggcaacattttcaaaaagagaccatatgatgagaacgcctaatgatcaccacatgcaaacaaacaaaactgccagtctcatttcccacatttcttacttaagagaagagaagtaaatgaaaggaagaaggaaatagatttgtaattaaagatgtgggcaaaaaagataggggctgagccagtttcaatttaggccttcagggtggcaggattacttaggagtccaaaggaaatgtgggagtggacttaattagatgcagttgtctttatcctgaangtagtgagctaagcctaatttt

SEQ ID NO: 9245 - DNA, 84 bp, Homo sapiens
cacaagctgctttaaaatgaagtgaccaccttttcttgcatagactaaataactcgaactggcatttttaggttggaaagacag

SEQ ID NO: 9246 - DNA, 506 bp, Homo sapiens
tctctaaaatatctccttggtctgaaaattgatggatatgtcttttaacttaatcatttcttagttctaagactctcagcccaaatttcatattcaaggtattaagtcatatgtgattggtacttcacatactattagagaagccaatttagtgaattttacagagcacagaacatcacatacttaaatataatatggccatattacatgatgacatttaattattcagtttcttgataaccaaactatattagaatttaattaaaatatattattgagaagctaaagtttgaatatatctgtggcaatgattttcatatgttaatatttcttagtctgtgctggcaggtgactgagtacttgctgtcatatcatgcttatgtgacttgttatatgtgctttgcatgatggagttgacacatggccttttacaaactaaaccttcaagattcagaatgctaggcagctcattaacatatggcctcaatccaggtgaccaagcagtg

SEQ ID NO: 9247 - DNA, 591 bp, Homo sapiens
ttttttttttttaatggtgaacaaaatgtttatctcaatttttctttgacatttttatgctttgaaaattcagaatggataaaaacaaatgaagtacaaaatatttcagatttacatagtgataaacaagaaagcacttatcaggaggacttacaaatggaagtacactctagaaccatcatctatcatggctaaatgtgagattagcacagctgtattatttgtacattgcaaacacctagaaagagatgggaaacaaaatcccaggagttttgtgtgtggagtcctgggttttccaacagacatcattccagcattctgagattagggtgattggggatcattctggagttggaatgttcaacaaaagtgatgttgttaggtaaaatgtacaacttctggatctatgcagacattgaaggtgcaatgagtctggcttttactctgctgtttctttcacactttagattttaaaagtacgtctcaaggaatctttctttccaatttgagaactcaactcactttaaaatggaaacacgcaacaaaaaacagatgctgctttctagaactccattgtcatgaaatataata

SEQ ID NO: 9248 - DNA, 699 bp, Homo sapiens
gattctactctgtatatgtaggataatataatctttaacaaggactatcgatgatagaagaataggggcaagacgacaaaagtacctttgaataaaacaatttaagaaattggtttaagatattggatgatagaagatatttaagatatctagatggtgatattttccttacaagatgggtaccagtatagtaatatctgtatactaactagggctttgtattgtcaataattttttaataattttttaatgaggtatttaccactgaagaaatatgataatataaaaccatcaaattttataattgagatgatactctggaaaaacatgtcatttcattttcagaaaactcttaagctctcttcagtctctgtaatgtttctgattgcatgtttcttcatgaaaagtatgttgttgttttgatagtaataataataaatgtaggctcagctctttcccaggattttcatcaaaaagctttaagtgcctaaccctgcttgtctctgtacatagaagcctgcacagatccaacccttgctaggtatcatagtttaggcccatttaccttcccctgtactggcagttcagccgcttacatgcactcaccctgtttgtggctattttaaattcatattattaaaaaaccaaaaaaaacccacctatttgtgttgtccattcactatacgtaactatgtaatt

SEQ ID NO: 9249 - DNA, 476 bp, Homo sapiens
tagccatgtaataatataactccatgttccatgcaactggatttttggaccctgttaatagcattaaggtagaggtttactctatcacctaacacctcaacactacctgtgggatgccttagttacccagcagcaggttaccaagggctgtctggaaagggagggacaaaaggacccagaagtagaagaatggggatggagtggtgagaattgaatggttaatgcactgccattcataattgccaattgaggacaacacaaatgggattggtactttatagtaataaatctgaccagcagagggagggatcaggcagcagtgtttagagcacaccacactggccactgtaaactgagaagctaagttaactggtattttatgattttgagtatagtctttttataagttgtattacactttacaatgttaaaaggaaacaaactttgtattattagccaattcggggaaggggact

SEQ ID NO: 9250 - DNA, 483 bp, Homo sapiens
tagtaatactcattttacctatttttaccaggtggttgtaggaacaggattcattcattccttcattaatataatgaacactttgagaccccactatataacagggccatacatatgacaaggtgatagatggaaagacgttttgcagaatttttgaagacttgcaatgtttttgaagactacaggatagtttgtgatttttatattaaggtcgtatcaactctttatgtcaatatatcaaagtaattgacacttttagagctctgccaatcagtgggccatattcatagaatgtcagtaatctgtctgaatacaagttatagttggtctttagctgttctgtctctgaggagctagaaataaaatattaggttctaatttttttttgttcaaacactgatcatgtaacaaactgcaaatccatgttttcagcaggttcgccaacctttgagttgaatgcagacctttctttagaacaaccta

SEQ ID NO: 9251 - DNA, 3394 bp, Homo sapiens
gcgagctgacagccgccgccgccgccgcctccgcccaccttcctcgccggggcttcgtctttcactccttcgggctgcctccccctccccttgtcccctgccccttgccctgcttctgcagaagatttcaacactacacttgcacaatgtctttgaaaccaagagtagtagattttgatgaaacatggaacaaacttttgacgacaataaaagccgtggtcatgttggaatacgtcgaaagagcaacatggaatgaccgtttctcagatatctatgctttatgtgtggcctatcctgaaccccttggagaaagactttatacagaaactaagatttttttggaaaatcatgttcggcatttgcataagagagttttggagtcagaagaacaagtacttgttatgtatcataggtactgggaagaatacagcaagggtgcagactatatggactgcttatataggtatctcagcacccagtttattaaaaagaataaattaacagaagcggaccttcagtatggctatggtggtgtagatatgaatgaaccacttatggaaataggagagctagcattggatatgtggaggaaattgatggttgaaccacttcaggccatccttatccgaatgctgctccgagaaatcaaaaatgatcgtggtggagaagacccaaaccagaaagtaatccatggggttattaactcctttgttcatgttgaacagtataagaaaaaattccccttaaagttttatcaggaaatttttgagtctccctttctgactgaaacaggagagtattacaaacaagaagcttcaaatttattacaagaatcaaactgctcacagtatatggaaaaggttttaggtagattaaaagatgaagaaattcgatgtcgaaaatacctacatccaagttcatatactaaggtgattcatgaatgtcaacaacgaatggtagcagaccacttacagtttttacatgcagaatgtcataatataattcgacaagagaaaaaaaatgacatggcaaatatgtacgtcttactccgtgctgtgtccactggtttacctcatatgattcaggagctgcaaaaccacatccatgatgagggccttcgagcaaccagcaaccttactcaggaaaacatgccaacactatttgtggagtcagttttggaagtgcatggtaaatttgttcagcttatcaacactgttttgaatggtgatcagcattttatgagtgcgttggataaggcccttacgtcagttgtaaattacagagaacctaagtctgtttgcaaagcacctgaactgcttgctaagtactgtgacaacttactgaagaagtcagcgaaagggatgacagagaatgaagtggaagacaggcttacgagcttcatcacagtgttcaaatacattgatgacaaggacgtctttcaaaagttctacgcaagaatgctggcaaaacgtttaattcatgggttatccatgtctatggactctgaagaagccatgatcaacaaattaaagcaagcctgtggttatgagtttaccagcaagctacatcggatgtatacagatatgagtgtcagcgctgatctcaacaataagttcaacaattttatcaaaaaccaagacacagtaatagatttgggaattagttttcaaatatatgttctacaggctggtgcgtggcctcttactcaggctccttcatctacgtttgcaattccccaggaattagaaaaaagtgtacagatgtttgaattattttatagccaacatttcagtggaaggaaacttacatggttacattatctgtgtacaggtgaagttaaaatgaactatttgggcaaaccatatgtagccatggttacaacataccaaatggcagttcttcttgcctttaacaacagtgaaactgtcagttataaagagcttcaggacagcactcagatgaatgaaaaggaactgacaaaaacaatcaaatcattacttgatgtgaaaatgattaaccatgattcagaaaaggaagatattgatgcagaatcttcgttttcattaaatatgaactttagcagtaaaagaacaaaatttaaaattactacatcaatgcagaaagacacaccacaagaaatggagcagactagaagtgcagttgatgaggaccggaaaatgtatctccaagctgctatagttcgtatcatgaaagcacgaaaagtgcttcggcacaatgcccttattcaagaggtgattagccagtcaagagctaggtttaatcccagtatcagcatgattaagaagtgtattgaagttctgatagacaaacaatacatagaacgcagccaggcgtcggcagatgaatacagctacgtcgcgtgatgtcgctctcctccagcgtggtgtgagaagatcattgccatcaccatttggtgtgttcctgtgggaaaaagcaggactgtgcctccataatttggtcatttggcagcccctgttttctgctgtttacaacatcaccagtgccacgtcatgagcgtcaaagaaaatgcctagagatatttcaagctcatgtcattatgacatttcttaaaactttattaaaagaatgagtgaagtattgctgaaaagtggaaattcggttgggtaccatgctttttctccccttcacgtttgcagttgatgtgtctttttttttttttttaatgtatcttaaaggacataaaatttaaaaacttaaatattgtaatatgacagataacctaataattgtatctacattaaaatgacaaacatgatactgctgcttgtcaaataaaaaaaaaataaagaaatagaatgccttttttatgtggatggagtatcaggttgaccacaaaatatattgactcaaagcagctaatgcatctttagttgcgtttttatctgaatggtttaattcacttgtactcctatttaaatcctacatgaaaaatgtctagattattgttcttgactgcataggactgcattcagcataaagaatgctttatttttatggattagatatattggatctaaacattttgaatcttgaagatgtaattccatcagcagtttctggtggtgtgctactccacagacatcgcagagtgtgagcaggatgcttggtgacctcaagtctggcacagagagagcttttcattcaaaagttgtctttcttcggttgcataatccattaattctagcatagactagtaccctagctctgtggccttccctgagtcttaggaaatctatgataccaacatattccttctatatgcctcccctacctgttacgcttacaaccctcctccaacagtttagatactagagtcactctcatcaatcacagatgtgcttagcaatgcata

SEQ ID NO: 9252 - DNA, 1057 bp, Homo sapiens
agtacgtggggatttgttttattcattctcgcttttcatttttgctttttaaatagaacagctttgatttttagtatatgacatcatcatcatgaatttttttctcttactttgtatttaggctccacctcagtagtttgacaaaggtagaatgagttcattttgagtcaaaaccataaaagttactttgtatagacattggttagaatctgtgacatttaacctttcttctggtaacgtttcaggaagtctggtgcatttttatcagaagaattatttctgtttgacttaagtagcaattatttatttatataaaattcgtatgtagaaagttgtcagtttttacctaaagtcacagtaaatatttgacttaatatctaaaaagcaattaatagaattttcaaaataattatttctagtttggaagcagtcctatttgatgtataaaagatatatccaatgtaaagaaaaaaattttataaaggagttgaatttttaatatttactgatattttaatttgcatgtattttaaagctctgtggtattctttccgtaatcaaagttgttagcaaatgacagatgaatactatttaagtagaaaaatgatcctctacaaagtgatactctggaaaatgttgcatcttctaaatcatacagctgatattacccttatctttgttgcccctctcctactggacatgaagtttcaggtgaccttcaagtaggctgttgagcagttgcaggactagtgaatggaatgcttcccccttccctcctttagagtcccattcttatggttagaatttctcctactacacaaacacttcccagtactctttgcttgtcccttaaaagtgggtctttctcaaagctgggattttagagtcctttttgcagcctttctgacaaggaacatctgtttactaacaagcaaccctatctctcccaacccagtaatccccatttccctgcaaaaccgcattaagtgcctttcccccaccctccccatgttccttaataccctggaaaacttaactcatttctttaccctccaaa

SEQ ID NO: 9253 - DNA, 1511 bp, Homo sapiens
gaaagaactgtggttttcagaggacccaaatgtcacaaagacgctgcgattcaaacagtggaatggaaaagagagaagcatatatttccagccaccttctttctatgtctctgctcaggacctgcctcatattgagaatggtggtgtggctgtcctcactgggaagaaggtagtacagctggatgtgagagacaacatggtgaaacttaatgatggctctcaaataacctatgaaaagtgcttgattgcaacaggaggtactccaagaagtctgtctgccattgatagggctggagcagaggtgaagagtagaacaacgcttttcagaaagattggagactttagaagcttggagaagatttcacgggaagtcaaatcaattacgattatcggtgggggcttccttggtaagcgaactggcctgtgctcttggcagaaaggctcgagccttgggcacagaagtgattcaactcttccccgagaaaggaaatatgggaaagatcctccccgaatacctcagcaactggaccatggaaaaagtcagacgagagggggttaaggtgatgcccaatgctattgtgcaatccgttggagtcagcagtggcaagttacttatcaagctgaaagacggcaggaaggtagaaactgaccacatagtggcagctgtgggcctggagcccaatgttgagttggccaagactggtggcctggaaatagactcagattttggtggcttccgggtaaatgcagagctacaagcacgctctaacatctgggtggcaggagatgctgcatgcttctacgatataaagttgggaaggaggcgggtagagcaccatgatcacgctgttgtgagtggaagattggctggagaaaatatgactggagctgctaagccgtactggcatcagtcaatgttctggagtgatttgggccccgatgttggctatgaagctattggtcttgtggacagtagtttgcccacagttggtgtttttgcaaaagcaactgcacaagacaaccccaaatctgccacagagcagtcaggaactggtatccgatcagagagtgagacagagtccgaggcctcagaaattactattcctcccagcaccccggcagttccacaggctcccgtccagggggaggactacggcaaaggtgtcatcttctacctcagggacaaagtggtcgtggggattgtgctatggaacatctttaaccgaatgccaatagcaaggaagatcattaaggacggtgagcagcatgaagatctcaatgaagtagccaaactattcaacattcatgaagactgaagccccacagtggaattggcaaacccactgcagcccctgagaggaggtcgaatgggtaaaggagcatttttttattcagcagactttctctgtgtatgagtgtgaatgatcaagtcctttgtgaatattttcaactatgtaggtaaattcttaatgttcacatagtgaaataaattctgattcttctaaaaaaaa

SEQ ID NO: 9254 - DNA, 578 bp, Homo sapiens
gggcaaagtgaacccagccccagtttattagaaaaggtgtgaacagagttgcaccgacaggagtagccccagccctctgcccaccctcacccacacccatgccactcgcccccaaaggctgttagtgcctctcagggcgcagctccagtggcctggacagcagggtcccggagtgccggctgctcccgccccagctccctgatagatttattgcacttgagaaaaagaaagctctgatcctctgctcccatccccccaccctgcccggcctgcgctgtctggggctgttctgcgcatctcaaccaccaccagcacgcaccgcctctccggcaccaggctgcctgcccggccctgtgcccggggccacaggggaccatcccaccaccacccaggacgcctgccctccgcagggcaagcctggcccctccagaacaggcgcctgatgtccttggagacctcctcctcctcctgctccccctcctcccattcacccccagagtcttccagtgctgggctcataaatagaagtgcttgagtcacgcgcggagggccactccctgtagctcctgcaccccttg

SEQ ID NO: 9255 - DNA, 284 bp, Homo sapiens
tggaccaaaggacttaagaatttggggggaagtgagggaaaaacgttaggtgctaaccacctgcccagaagagtggatctcacagcccaggaacattcccaagcaggaaaaccgtccgtccgaggaacgtccatcctggctctctgcggctggtgggaaaacacaccctgccctgaggctgtccaggccttctcccccacaccctcaggccgagatccgtgagagacccactttgctccaacaacttgaaacaagtcactttaccctccttaggacccattttg

SEQ ID NO: 9256 - DNA, 823 bp, Homo sapiens
gaagcagacctcgtggaagcgctggaaaaatttgggacaatatgctatgtgatgatgatgccatttaaacgacaggctctagtggaatttgaaaacatagatagtgccaaagaatgtgtgacatttgctgcagatgaacccgtgtacattgctggtcaacaggcttttttcaactattctacaagcaaaaggatcactcggccaggaaatactgatgatccatcaggaggcaacaaagttcttctgctctcaattcagaatccgctttatccaattacagtggatgttttatatactgtatgcaaccctgttggcaaagtgcaacgtattgttatattcaagagaaatgggatacaagcaatggttgagtttgaatcagtcctttgtgcccagaaagctaaagcagcactcaatggagctgatatatatgctggatgttgcacactaaaaattgaatatgcacggccaactcgtctaaatgttattaggaatgacaatgacagttgggactacactaaaccatatttgggaagacgagatagaggaaagggtcgccagagacaagccattttgggagaacacccttcttcgtttagacatgatggctatggatcccatggtccattattgcctttaccaagtcgttacagaatgggctctcgagatacacctgaacttgttgcttatccattaccacaggcttcttcctcttacatgcatggaggaaatccctctggttcagttgtaatggttagtggattacatcaactaaaaatgaattgttcaagagtcttcaacctgttctgcttatatggaaatattg

SEQ ID NO: 9257 - DNA, 456 bp, Homo sapiens
cccacgcgtccggttctcacagtgatctagtgtctgacttttctagggaatccaatcaataaaattgaagactggctgcaggattgcggatactctgaagaaggattttctgaggaagcaggacagtttatctacaatggcttctgcagccatgggaccagctttgaagatgacttgaccctgggagcggaggccacactactggccgccaatggcaaactcttctccaggagtttcctcgagacagccaggccttgccagctacttgatcttggctgtagtttggcttccagcatcatgactggggggaccaacaagactagttcaagcatctcagaaattctggacaaagtgcaagaagatgcagaagatgtcctcttcagtctggggctttggccaaggaggatcacaaagacacttctcggataccctcccgattttttcaccacccctttt

SEQ ID NO: 9258 - DNA, 303 bp, Homo sapiens
cccagggctccatagaccacgtctacacgggttccggataccgaatccgggactccgaactgcagaagatccacagggcgctgtcaagggcgaagccgcggaagtggagcgctgcctggcgcgcaggagcagagacctggaagccggggacaggcagcacagaactgctctacacttggcctgtgccagtggccatgtgcaagtggtcactctcctggttaacagaaaatgccagattgatgtctgtgacaaagaaaacagaacgcctttgatacaggctgtccattgccaggaagaggcttt

SEQ ID NO: 9259 - DNA, 397 bp, Homo sapiens
gttgaatttcattgacttaattagtctttaaatttgaaaacatgttttagggagtttagttctagaaatttctcttagattgaagtgacagaatctgaaagaaaagaatatgattgagctatttgttttcctgaacacctcaccttttatgatgcaataagttactctgagtttcttggcagagtttttgacagctgttgctttcaatggattccattcctgtattccttatgggaggttgtttttaaaatagactactgcgattgaaatgaactcaatatgtagttaagttatagttttcttcaatgtatttttagttacttgggtcacaaatgttcaatttcagcatattttagggtgagtaatcaaaaatgtgaatttgcctttgatttcctac

SEQ ID NO: 9260 - DNA, 50 bp, Homo sapiens
gttttagtgtatgttcagagttgttcatcataaaaaccaaaacctgtaga

SEQ ID NO: 9261 - DNA, 1239 bp, Homo sapiens
aaatgtgtactgttagaagtggcttccgcttactggattaactaatactttataggcttttcaggaggccacatcactagcagtagggagaacaagatgtcatttgtgttcagtgtaagctgagtaaacaggcccttccctagagtgtcctggaaatcacagcaacccattgaaaactgccctccccaccagaacgtgctacgttctttccttcatgcctatgtgtgctccattcctcatttctacttggctcaagaaaacatttctgcagtcaggtgagacttttacaaaagaggagaaaatcaatgcctccttgaacatgatgagatgtgagaacttacaatgaaaaaggcaataatgatagaaattatttcttaggtacagcaatagttgataggatgtgagggtgttaccttggggtgaagtggagaaggtcccaggtgaattggctctcatggaaatttggaattacgaaataaacgtcctggggggttacccagaatacagatttaaaagtttgcctgtagagcaaaataaaacagtcagttgtagtcattaatccttgaggcccaacgcagccgatgggttggtgtttgggaaattctgagatgggagtgagatctgatcggatcctgggaagatgtatacccagttagaacgtgtagggttctgggtccctggcaagtctaggtgggcgggtgacagggaaagcatgggcatttttgtattgctgtcacatgctaacagaggtttgtaattatcttttggacccaaattatagagacattcacgagttttctagccctcacagtaacagagctaagaattcagatgtcaggaagtctgtgaatcttgatggattttctgagaaacctgactcaatggcatatataagagggaagtaagacttttaagaaaagaaaaagttatgcctcattcctcatgtggcttccaataagtatcttaggaacttatttcctttttaaaaaatattttttaaatttttaaaatttgattttaaatttcaaataaatttaaataaattttaaataaattttaaataaaattttacagagacgtggtctccactatgttgcctaggctgggattgcagtggctattcgcagttgtaatcatagcacactgcagcctcgaatttctggggcttgagcagtcctcccgtctcagcctcctgaggtaggctggaggactacagggtgcacaccaccaaggcctggg

SEQ ID NO: 9262 - DNA, 1128 bp, Homo sapiens
tttttttttttgaaatatcattactttactttagtgttccaggcattttaaatattcatacaatcgccttatttcagcagtcatttcctctccagtacagattttgtgtccagaaccagagccatgtacgtcactgaattttctctacagcacccgcatggttacacgggacctactccggtgcccatgtctttgctagtagagcctctcaccacacttggcaagagggctgggacctccccttgcttgatgtaggcctccactgtgaatgaaaacacactttgtcacttcgatcccaggtacatttccaggcactcccggggtgttccatggtatgtggggcaatcatcccacagagctaggtggacacatcatgtcagctggtacctatgtcagcacctgctccactatatcatacagatgctgaggcacttaaatgttcttggtaaaatggagttcataattgccataggagttgagttttggggaaagggactttcaataattaatacccttaatacatatttagcagatttataatttcgtgtctgtttacatttgttgtcaaagcttcataaactatttatgtaaatgaaagcatgtttgagtttccaaatgctgctatgacaagcaaacagagaaactgcttagacaacacctgcttgtgccataaatacatacggcaacatccggtcatccttaaagaaatgcttgtgtttccaaaaagaatttttttttttaagtcataagccttatgcaattcttccaagataataatgtgtttgtccttccttctcaagcatggttcaaggcatctcaaggcatattgctgtctgaggttctgatttaactgtccgggggtacaggggaagagtgggcactaacattttttaaaagcttcacagtcattccagcatgtagtcagtgttgagaaccttggtactaaaggctcttgcatcttcctactgtcacttgtcctcatcaaaagcccttgaggtagtccctgggtcaggcaatgatctctttcatgggctaagaaactaaggcacagagaggttaacaggctcctctgatactgtgcagtcaaatgacagaaccatgattgcaactgacatttccaaattaacc

SEQ ID NO: 9263 - DNA, 408 bp, Homo sapiens
  misc_feature (1)...(408): n = a,t,c or g
ttttttttttaaggttaacagcagttttattcataataacccaaaactggaaacaatgcaatatccatcagcaggtaaatgaagagtgtggtacatacatacaatggaataactatgcaccaatagatacaacctactaatacatgcaacaacatagatgaacctcaaaaacattacactgagcaaaagcagacagacacaaaaaatatatactatactatattactatattctatggtgtgaatatttgnatcccnccaaaattcatgttgaaacntaatctgcaatgcaatagtattaagaggtggggnctttggaggtgattaggtcatgagagctcttccctggtgaatgagcttaagccctttatgagaggggctacacacagcatttgcccttttttttttt

SEQ ID NO: 9264 - DNA, 1551 bp, Homo sapiens
  misc_feature (1)...(1551): n = a,t,c or g
catggaccccagcacctaccaggtgctgagttaatctcaagattggaagcacagctgtgctctactgcctctgcctccggcaccgcctctctgtgcgtcaggggttagcgctgctgctgctgatggctgcgggagcctgctatgcagcagggggccttcaagttcccgggaacacccttcccagtccccctccagcagctgctgccagccccatgcccctgcatatcactccgctaggcctgctgctcctcattctgtactgcctcatctcaggcttgtcgtcagtgtacacagagctgctcatgaagcgacaggggctgcccctgggactttcagaacctcttcctctacacttttggtgtgcttctgaatctaggtctgcatgctgggcggcggctctgggcccaggcctcctggaaggtttctcaggatgggcagcactcgtggtgctgagccaggcactaaatggactgctcatgtctgctgtcatgaagcatggcagcagcatcacacgcctctttgtggtgtcctgctcgctggtggtcaacgccgtgctctcagcagtcctgctacggctgcagctcacagccgccttcttcctggccacattgctcattggcctggcatgcgcctgtactatggcagccgctagtccctgacaacttccaccctgattccggaccctgtagattgggcgccaccaccagatccccctcccaggccttcctccctctcccatcagcagccctgtaacaagtgccttgtgagaaaagctggagaagtgagggcagccaggttattctctggaggttggtggatgaaggggtaccctaaggagatgtgaagtgtgggtttggttaaggaaatgcttaccatcccccacccccaaccaagttcttccagactaaagaattaaggtaacatcaatacctaggcctgagaaataaccccatccttgttgggcagctccctgctttgtcctgcatgaacagagttgatgaaagtggggtgtgggcaacaagtggctttccttgcctactttagtcacccagcagagccactgggagctggctagtccagcccagccatgggtgcatgactcttccataagggatcctcacccttccactttcatgcaagaaggcccagttgccacagattatacaaccattacccaaaccactctgacagtctcctccagttccagcaatgcctagagacatgctccctgccctctccacagtgctgctccccacacctagcctttgttctggaaaccccagagagggctgggcttgactcatctcagggaatgtagcccctgggccctgggcttaaagccgaacactcctgacctctctgttcaccctgagggctgtcttgaagcccgctacccactctgaggctcctaggaggtaccatggcttcccactctgggggcctgccctggcctagcagttttcccaggttcccaacagctngggggaaggtttgcaaagagtgacctgagaccaggtacaggaaaacttttaggttcaatcagtgtttttt

SEQ ID NO: 9265 - DNA, 436 bp, Homo sapiens
ctacagatgccgacagcgaggagagaggccaagtcccatattttctgggacctgatgctccatcatatttttccttagacagtgtcacaggaattctgacagtttctactcagctggaccgagaagagaaagaaaagtacagatacactgtcagagctgttgactgtgggaagccacccagagaatcagtagccactgtggccctcacagtgttggataaaaatgacaacagtcctcggtttatcaacaaggacttcagcttttttgtgcctgaaaactttccaggctatggtgagattggagtaattagtgtaacagatgctgacgctggacgaaatggatgggtcgccctctctgtggtgaaccagagtgatatttttgtcatagatacaggaaagggtatgctgagggctaaagtctctttggacagagagca

SEQ ID NO: 9266 - DNA, 406 bp, Homo sapiens
cgcactagaagaaaaaagcatagcaatgtccacagttacaagaaaaagtgcacattactcggtcacaatcacagtcattacttgaaaaactatatgtaacaagtagataagaaatatcactgatgcctcaaactcattgtcaaaaactgaatgacataaattttacatgaaataaggcaaattcaggaatgcacaaagaatttgtaatccaaccaaagctaaacaacagaaaaaagttgtataagaagcatgaactaaagtacttctccctaaatatttaaaaaataggcttgtctcagtgcacaaagaaaacatcactcatgtgtatcccacactataaaataagaaagaagggtaaagtatgggggataggagggcacagttcattgtaagttgcagctgcatc

SEQ ID NO: 9267 - DNA, 828 bp, Homo sapiens
ttttttattgcccttgtttttagtatttcagggttggtccacaggatcagggaaggagaaaaaagtataaaaatttcttttcttattacaagaattccaagatgtgtcagagttgaccagaagcatagagaaaactacatagtcgagtacccaccaggggaatgtggtagaattggcagtctgttggtctctttgtaatgtcagattaaagaaatcacctggaggctgacattggccccttcccttcccaggaggcagatctggcctaaatacggagatgcgtacaaagaagacctaggatcacaatcgttcttagccatcaaactcttcttccaggtcctagagaaagtggccactctataccaaagccaaagaactgcagagtactcctcttggttggggtttcatattgctcttgcaattcagtttcctctcatctttgctgtcatttcgtgggtaccaacagccttggccaggtgtgagaagtgtccattactattgtttgctctgactatcttgcgcaaagatgccaagtaaggctggagcaaaggccttggtgatactcttgccttggacagataaatggtggtagtgtagctagtccctcagttgcacctgtttgtattccaaaggcagtaaacacagatgttcagaagccctttataatcaagatgtcaaatatctgaaattattccccagctctgacaaaacttgccttctgggtgtggagacaaaacaagaatttgtgactactgctgatcacatctagaactgcttgaggctggccatgaagacttgaaccacaattttcactgaggatctaaacaa

SEQ ID NO: 9268 - DNA, 1794 bp, Homo sapiens
catgttcacttctttatttttgatacaaatgtacatgacacgtcttgacagcccacccaccaccacacaggtagggcctggcccccagggaagaagcgggatggggagagagctggtgggtcccaccgtctgcctctccagccttcccaggctggcagccaggttcccaggcctccagagggtgggaccacagcaggtgcaggtagtgatggtgggtgctggccttgcagaggttacggggaggggactcaagctccacagccaccaagctgagtcggggaccccggggaagccagccccaaggctcaggtgctcagtcctccacccctaagccagcacacattccccctccaacgcaggaagcaggaaggagatgggaggggaagtggttttttgatttaagttcatagagaaggggcgagagtggggagggatcagggaggcagctggcaggaccaaaactggctacccggacagtcccctggctccaggtggggaagggaagctgatccccatgctggtcccactgctctggtcccctcacccctcaaaactcccacatggacccaggcctccggaaaggcactgccgccccacacactcaacacgcaggcacgcgggggcactcagttaccacaaagttaaaattaaggggtggggaagaagaaagaaaaaaaaaaacagactttccagtgtttgcctgctggggaccccagcacacaggttggggcctgtgccctaggcaggggccatatggcattaaagggagagcagcaaggggctggtggctacagggcagggacatccatggagactatgtacaaaggaggggatgcccccgcctcagcccccagtagggctgaactggctcatgggggtggggcgcatgtacggagagctgccccacttggagtgtccccacctgcccctttgctgagggtgccctagaaggcgaggggctgggagtgcatcgttgcaggcccctgctcactaggaggggggagatgctatatacagaggggaggtgcatggaatgtgggggacagaagctcctgcccccccaacctccccatccttaggggctcgacaggggtgggcaccagggcacctggctgcccagggagtgtggcagcactaagggcacttgtgccagtggctctgttggggtggggattaatgtctggagtggcccagctcctatggccagtgaggtcctagggtgcaggtgagggtgtggggagagaggtcactgcttcttctctcgggtggtgatggtgaccagctgcttggcagccttggcgatgtcataggcgcactggatcacctgctgagtcagcagctggaagtccactggggcgccgggctctgggggcactgtcttccggcactcactctgcagccggtaggcgctggcgttgagcagccgcagtgagctccgcactggctccagggctggcctctttgggaagagggaggccatctcggtcacagccaaatggatcttctctgagcagggcacgaagctgtcatgcttgaactcctgggctgcccgcaacagttcctgaatgttcttggtgacctgctctgtcttcaagatgacatcctctgtgctgcccgcaacagttcctgaatgttcttggtgacctgctctgtcttcaagatgacatcctctgtgctgggaagcccaggatctaggtctccatccaggctttccagctctgggtggaagtcttcctctttgcccagctctagaaacctcttcccttccagccccagcagtgggtccccactttg

SEQ ID NO: 9269 - DNA, 1994 bp, Homo sapiens
tttttttttttttttataatcaaattgagtattaatctttaatgcatttttttttctcatttgtaaaaagacatgaatgaagttttgaggttcgtgagatttcatcttttcttgaatggtcacttaaagtccaacttgacaatgaactgctctgaaaacataatatgatatataattgcagaagcaggtagagtataaagatgatgactagatggtttctgaagaaatcaagagaatggtaagaaagtgagagtgacagctttaaggagatatatactacatgtgactaaaataagcttaaatgatactctctactcacagagtgccttttgaatttttaccagaattcattcattaattttaacttaataagacacagcaagagcagtattaggtctaaattacctttaaaaatttggctgcagacattaaatgattacaaaacactatgatcatcttctgaaggtattctacacatcttaatatggctactgacatcctaagcaaaatgtcaaagtggcagattaacaagcttacttaaaaactaactctagaacagagattacacaccttaagtagaattatgcagattatttattagtcaataggatagttctgattaagaagaacagcttactatttaaacacttttcctttgtctctgttggctgttttttgaagagatgtagttgtctctaacatggtctctggtattctgtaacaacaccttatactaggagcttagtacttagatttggaagagaaaatagtttttatcttgcacattatctacaacccactgggagtgggctgcctgaatctctgaactaaaaaggagcctgaccctttatccaaggctcagtacagaaaagggctgtaattgattagcaatgtctgccacagaaacactaggaaacaagtgtggcagggtgacccaggaccagtctaaaatgagcccaagtgaatcattacttttctatgttctgaattatactggcataaaatcgaaggtaacaaaattggagacattagcttttaaaaatgtcctttcaagctctatcagactacaaacacccacataagactacttttacaattaaatcattcagtgatttttcactcacaggttatatgcatccacattaaaaatataagattatgattttctttaaactgttatcattatataatccccatttaaacatgagactattacaataataatgatccatatgttactggagcaggggctttagaattccagatgtaataatcagaagaaattagtttccggtgtgcacttatttttggttttcctgatgcaaaaacttgaactgaatgctgatctgcataacatccagtaagtgtgtaatctaagatcctaaaatgaagctttaaatatgctgtttctccagtacaaattgggtcaaatggctgcttctcatggctcttggctccaaaagttacagttccagaaagactaatttccattgattttgggaacttctggccaataatccagatcaataagcttttctctcgaaatacttcaagctggccaaaactagttttgtattccaaatgtgtaattggacctctattgtaaaaaggtatatgggcttcacagaattcaaaattatttttcacactttcatgaagttttaaattaatggttattcttagttgtacttcttcctccttcatttgataaaaacccaaaattggtgggacagggacctgggaagtgtagaagcataagttgaatgactctaaaggtggagtgaatggaaatttgtaaggcccactaaatgcagagtcatccattgcatcaatactactagaagtcagaattgcagagtcaagagaagttacacaagggtgaactagaatatcctgaagtggagatccattggtggggagactcaagctgatggtaacatttggcatgattccttccaaatcacacttgcaagtcactgttccaacaacttgcc

SEQ ID NO: 9270 - DNA, 808 bp, Homo sapiens
  misc_feature (1)...(808): n = a,t,c or g
ctttcctcaaatttatataccagctgataaaaatacatttcaatctatttacaggacagcactgcctacaagccaacaatgctgtgttagcaacatcccatttttttctagacagtagtacttgtgcaattaaatatatataataaaaagtagaaataaaatgtacttatattcctaaaacataaagctttaaatgtaattggaaaaaatatagaaatcaccaggcatgcccaaaataatacatctacaaccttcataaggctatttgctaaaacagatgtatacttgtgaagggaaaaaaatctaaattaaaaaagtttatgaagactagaaatatgtcaaaacaatgtgtgaggacgaaggctttaatgcaaaatagctttagctcacagaaccaaaatccatctgaaaacaaacaagcctattaccaaactataggttactaaactataggcccatttctaagaacacatttatggttggaagcaaaggaatatttatactaaacaggtaaaagtcaccactgaaacagagagtcgcacggtacattttaattccttatcaacatccatgaaccaccaccatgtatcccaattttcttaagtatgtacttaggaaacagcagtgaggtgtnnnnnnnnnnnnnnnnnnnnnnnnnnnnnnnnnnnnnnnnnnnngagtgcaatggcccgattctcnnnnnnnnnnnnnnnnnnnnnnnnnnnnnnnnnnnnnnnnnnnnnnnnnnnnnnnnnnnnnnnnnnnnnggttacagggtcctgccaccacaccggtcagttttgtattt

SEQ ID NO: 9271 - DNA, 935 bp, Homo sapiens
atttttaagcttttattttatcactcttatcaaacacacatcagaaagcattatcaacagtgcatcttatggtaagtcagtttacaacaaaactgaacaaggcaattgtgtttacagaaaaagtcttcagcaaaaaagtatgcaatacagtcaactgaaacgcattgttcacactttttaggaatataggaaagtggaaaataaaagttctttgctattcagcaggaaagagtttaaaagacttgaatggaaatcagaaatttagggatttgagaaaataactttttggtactgacacacatctacatacatagtcccacttagtttttgttttttctttaaaaaaaaaacaaaagctcacaaacaataagacatcacaaataatacagcagaaccacagtgccaagaaatgccaagaccaatatgctactgaaacaactggtagaaatgtcacagacaactattcactatgtattgtaatattcttgtagttctgaggtgaaggtaaaccaacaggagagattactccttgtaactggctttggtttaagtgatctttcacatttttttctaaccataccttcttataaaaaatgtagcaattacatgttactgagggaaaatagtactaggttttaatattcacaaccaactactccagctgacacaggatgccatcaaccattaaaatttattgatcatacttagattttctaaggctgatctacagatagcaaagatggaacctttttgggaaaaaataaaatcccttctaccccagttttgacactgttaagaggttataaaggaatgttaaattatttaagatatttcaaaatagaattaagaatggaagagtaaattctgctggaaaagatagggcagctttacagtctacaaagtaaataatctacagagatgcagcttaacttttt

SEQ ID NO: 9272 - DNA, 1103 bp, Homo sapiens
  misc_feature (1)...(1103): n = a,t,c or g
ttttttttttttttcttgtcagggtttatttcatcagctaacattcattctcgacctagacaaaaacaattagatgattatgacttgcttttccatcatcaactcatttttttgtatgaataaccaaaaaatttcttcaacacttttttttaagaagaagctataaataaataaagctttaaacaatcctgggttcaagttaaacagttccagttcccgaaaagttcacagccttgttttgtgggcagttctgctgttcctggcttccccttccaggaggggacgtttgcaggtctgggggtcctggtgactaagctgttagctccactccctgcctgtttccgtcctcacagccctgggagggccccggtggacagagtccttacaatttaggagatgctgctggcaaaggaactgttgacccaaagcaggtggcctgaatgggaagtgccaggctggacacttgggggctgagggcactgccagctgccgccgcctctggacacctcagcccggcgctggcccgagaggagactgctttccaaatgcagcgaagagactgagacaagacccgtgcttccgtgtgagttgggatcggggcataagttaacacatattccaatatgtacaaaacaacctgcgctcaggcccgcgcacccaggaagcccatggtgaaggtgaggtcaccttgagccagnctctggctgggtgtccacctctgccgggaagccaaggtgccccacgtggcttgtgcaagacctcacaatcccctgaacgtgttcctcctcctccaaggagtgcacccacccccatgttgagtggccgagcagattcccattgaccctgacctccctttgaaagaaccacaccactaaatccccttggcactcacttccttagtgtgatgcatccacccagggaggtggccctgcgcggcgctggcacgctgtccaccctgccctgttgaccatcctgtccttggaccccaaagtaaaatggggccagtgtaggagacctgagggtggggcccttatgccagacctccaggggtagcgacctcacctgaccccagcttcggcttcctgtgctgcagaaggcgcttg

SEQ ID NO: 9273 - DNA, 1179 bp, Homo sapiens
ttttttgcttagggaacgtatggtttatcagttgagaagacacacgagcttccacaaattgatatatttacttcattgccagcggagtacactcgcatacatagatatctctgagtcactttaagtcacataactgcaaggatacaaacaaacactagttcatccctgtggctgagtgcccttggggaatactcagatcccagtggggcttctctctgcatcttctggccactctggcgttctccctgagcccacccaccttctccccctcccttccattcttccacgatggtagcaaagcagggaagtgccagtggaaagagactggaaggtgcacagaggcttggacaggccagagtccatggcagctgctttggcgtctctccttggttcatgtgggtgggcacttcaccacttcaaggacactgtcaactccctgaagggcaaggccccagggctttgacttccctaggcatggagagacagtagtcaggaaaagcagctccttggcagactgcctgggtgtgtgaacaactgtgagggctcaggggctacaagcagggacagggcaagctcgcaaacaaaaaactgagacccgatgcggtgcatgcggggagcagagctgtgcagggcgctgcaggagcagaggagggggcggggcaggacggcttccttgaagggagcccttcaggcactgtcatgtgccacatcctgtgtgaggcacttcaccttcatcttattgcatctgggattcaaatcccagatctgtctggttctaaaacccacgtgctttcttctgtacaggttgctacctgaggggacatctgctctgggactcagagaatgataaagagatctccagaataaatgaatcactttcagagaaaagtaaaagaacaaaaacacaaaaataaaaaacacacaaaagaagcaaaaaaatactacattctccccaaatttcacatcgtaagtggctggaagtgcaaacataaaggatgctagcaacatggccgcggcaagaggagcctctggagcaaggtcagcttctcccctgattctctgtttcagccaacaaggccaatggatcttccaaaccagctgctgctgctgagctccagaagagggcctcttcaacttccagaggccacggaaggctcaccctcggagctctcagttttg

SEQ ID NO: 9274 - DNA, 422 bp, Homo sapiens
  misc_feature (1)...(422): n = a,t,c or g
agaaggttccctgtgagcaatctgtgtgtcttcagcgagcttgaaccaaagtcttcatatcctgacccactgaattataagcaattgctacttgcccatcttgccaaagtagtccaaacacgcttcaatgaggacagttatatttagcaggtcctcacccctgcaagagacagcatatcctcactattattattcatgtgttattggcaaaaacatagcttgcatctttccagaggcagagtttcaaagacagggttttctttgagacataagcacattgcttaagtacataacaaggttattaacacttgcactcaggggaaaggaaatagctattgcaaattaangngtgcaacttaataaaataagctganngtgtatatgaatttagctctaggtaagcaaaatgcacacatcatata

SEQ ID NO: 9275 - DNA, 463 bp, Homo sapiens
tttttttttgcaaatcatcagcgctcatgtttatttataaagttacatcctaaaagtgattcgaacaataaatagttataaagaagatctgctgccctaccctctgggtgtgaggcctccatatggagtcagcagaggatctgggagggatcctgggaagctctgggatcctggggtctctgccgtctcagtggcgcaacagaagccagcaagcttcccacccttccttgcagcaccagctgggcccccagggtggcgtctctcctgacggaggcttcccgtggacccctaggccgcagccccctggcagggctgggaggcaggccaagactcaggaccagcccccacagtgcaaggctggccggcccagctgctgggaacctgtcaggccctcgggctccagtcacctgagctggcacagggggccaccctgttaggttttcatcactgccatgacggagac

SEQ ID NO: 9276 - DNA, 791 bp, Homo sapiens
ggagctgcaaagtgactgctaatggaggaacgatctgctggctgggggaaatgtggcctgagactagagatgcagagcaggcatctctagaaggagagatgatgccaatagaagccccaggagggaactggccagtgaatacaattttataaagattctcagtactttttctgaaaaaattcctaaaattttcaagggcgcgtctagcccttctgcctctttagaggtgagctcagtgctacttctgggttcttaaggcaaatgccctacaaacaccaaagtcttgtattttccacttctcagccggcactggcttaagtggggattttttttttcccttccctaagtgaaagggacttgttttcaggagaagtgtcctttaaacatccagctaaaactggaagtaattttttgcatgaatggctttttacagctaggtctacagcagaacaaaacttgtattaaactaagtgctactttacatatcttatttcaagggaaatgaaggatttattgtcgtgtaaatgatatacactgatttgtttcctactggacattacatgtccctttatctctaggctgatgttgtgcagcaaactttcaatatctggaaaatcagctggtacctacttcagtgcattattaggatattacgttccctgagagggaattttgccaatgaagtttaggtactgttgtaactgatttccatcccccctccctaagcttctgtactaagtatatgtaaagctattatatcttgtctgatcccatgtgttcatgtgtgtttc

SEQ ID NO: 9277 - DNA, 1018 bp, Homo sapiens
aaatattcatacaagcactcctcgtaatcctggatcaacaaatcacataccttttctggaggaatcaccttgtggaagccaaatctcttcagaacattcggtcattaagccacctcttggagattctccagggagtctttcaaggtcgaaaggggaagaggatgacaaatcaaaaaagcagtttgtttgtattaatatcctagaagacacacaagctgttagagcagtggcttttcatccagctggaggtttatatgctgttggttcaaattcaaaaactctgagagtatgtgcctatccagatgtaattgatccaagtgcacatgagactcctaagcagccggtggtacgttttaaaaggaataaacatcataaaggatccatttactgtgtggcctggagtccttgtgggcagttattagcaacaggatcaaatgacaaatacgtcaaagtgctgcccttcaatgcagagacttgtaacgcaacaggaccagatctggaatttagtatgcatgatggaacaattagagacttggcatttatggaaggcccagaaagcggaggagctattttaataagtgctggagcaggggattgtaacatttatacaaccgattgtcaaagaggacagggcctccatgctttgagtggacatactgggcatattttagcactttatacctggagtggctggatgattgcatctggttcccaagataagactgttagattttgggatcttcgagtaccaagttgtgttcgtgttgttggcacaacatttcatggaactggcagtgcagtggcatctgtagctgtagatcccagtggtcgtctcttagccacaggtcaagaagattctagctgcatgttgtatgacataagaggaggaagaatggtacaaagttatcatcctcattccagtgatgttcgctctgttcgattctcccctggagctcactacttgctaacaggctcttatgatatgaaaataaaggtgacagacctacaaggtgattga

SEQ ID NO: 9278 - DNA, 1995 bp, Homo sapiens
cagtagtgctagcggcttcgcggttcggtcctcgcacccggcagccgccactggtgctgagctgctaggaagcccctatcgccgagctcgttggagcttgaacccattgtcacccctccgactcaccggcccaaaaaaaaaaaaacatggttgaagcagatcgcccaggaaagctcttcattggtgggcttaatacggaaacaaatgagaaagctcttgaagcagtatttggcaaatatggacgaatagtggaagtactcttgatgaaagaccgtgaaaccaacaaatcaagaggatttgcttttgtcacctttgaaagcccagcagacgctaaggatgcagccagagacatgaatggaaagtcattagatggaaaagccatcaaggtggaacaagccaccaaaccatcatttgaaagtggtagacgtggaccgcctccacctccaagaagtagaggccctccaagaggtcttagaggtggaagaggaggaagtggaggaaccaggggacctccctcacggggaggacacatggatgacggtggatattccatgaattttaacatgagttcttccaggggaccactcccagtaaaaagaggaccaccaccaagaagtgggggtcctcctcctaagagatctgcaccttcaggaccagttcgcagtagcagtggaatgggaggaagagctcctgtatcacgtggaagagatagttatggaggtccacctcgaagggaaccgctgccctctcgtagagatgtttatttgtctccaagagatgatgggtattctactaaagacagctattcaagcagagattacccaagttctcgtgatactagagattatgcaccaccaccacgagattatacttaccgtgattatggtcattccagttcacgtgatgactatccatcaagagaatatagcgatagagatggatatggtcgtgatcgtgactattcagatcatccaagtggaggttcctacagagattcatatgagagttatggtaactcacgtagtgctccacctacacgagggcccccgccatcttatggtggaagcagtcgctatgatgattacagcagctcacgtgacggatatggtggaagtcgagacagttactcaagcagccgaagtgatctctactcaagtggtcgtgatcgggttggcagacaagaaagagggcttcccccttctatggaaagggggtaccctcctccacgtgattcctacagcagttcaagccgcggacgaccaagaggtggtggccgtggaggaagccgatctgatagagggggaggcagaagcagatactagaaacaaacaaaactttggaccaaaatcccagttcaaagaaacaaaaagtggaaactattctatcataactacccaaggactactaaaaggaaaaattgtgttactttttttaaattccctgttaagttcccctccataatttttatgttcttgtgaggaaaaaagtaaaacatgtttaattttatttgacttctgcattgcttttcaacaagcaaatgttaaatgtgttaagacttgtactagtgttgtaactttccaagtaaaagtatcccctaaaggccacttcctatctgatttttcccagcaaatgaggcagggcaattctagtcttccacaaaacatctagccatctaaaatggagagatgaatcattctacctatacaaacaagctaggctattagagggtggttggggtatgctactcataagatttcagggtgtcttccaactgaaatctcaatgttctcagtacgaaaaacctgaaatcacatgcctatgtaaggaaagtgctattcacccagtaaacccaaaaaagcaaatggataatgctgggccattttgcctttctgacatttccttgggaatctgcaagaacctcccctttcccttcccccaataagaccatttaagtgtgtgttaaacaactacagaatactaagtaaaaagtttggc

SEQ ID NO: 9279 - DNA, 220 bp, Homo sapiens
cgtcgacggacagcttcgggagttgagtgtcaagcccgaagggaagacttttggaaggaaaatactggcaaatccaagaagtgaaccagccgactttaggaaagccagaagccaggctactctagaccttctgccttcagagcatgaggacttctcccactcatccctgtacctggagccatgcctggccctgtctgggttggtgtgcctcagggtcgac

SEQ ID NO: 9280 - DNA, 383 bp, Homo sapiens
gaaagctcttatgtttagcatcaatgtgtatggctctgttaaatgcagccatttctgagacgagattcttttatatatatatacatataaagtactattggcttttaggagtttcttttatatacatttatgcaatacttgaagaccaatcagaccattaatggacacttagtgtaactttttataaagaaaataatgctaaagtaagaccaaaactgatgtcatcactgaaattaacaattttcaatatgttcatattttaattcacaatggaaaaatgtgttccaaaactggaaactcatagtactcgtgtaaactgtggaagatttcaaatgtgatgttattttgacaatgttttaaattttagagtcacattttattct

SEQ ID NO: 9281 - DNA, 409 bp, Homo sapiens
tttcttgaaagtattttacttcagattgaaaaatgaacagcttccacactgttcactgcaagatacacagtattcacgaatacaatgctggtcatttgaggaaatgtatacacacctcaatttctccttcatgcttttttcttttagaaagatactgtttaccaaaaagaaacttcagcagtacaggaaaaactattttcccaataaatttacgaaaacctaagattcccaatggaatcagaattatcttcccgctaccaccaccttaatataatcacatgcttattggaacactaatattcgcaccctaagagtacatttactttcaacaatgagggtgattctttaaaaacaaacaaaaaacaacaaaaaaaacttcagtgtggtaaatgtaacatagatctctgca

SEQ ID NO: 9282 - DNA, 392 bp, Homo sapiens
tcgactgctaatctatagacaccacagtttctaaattctttgaaaccactttactactttttttaaactttactcagttctaaatactttgtctggagcacaaaacaataaaaggttatcttatagtcgtgactttaaacttgtgtagaccacaattcactttttagttttcttttacttaaatcccatctgcagtctcaaatttaagttctcccagtagagattgagtttgagcctgtatatctattaaaaatttcaacttcccacatatatttactaagatgattaagacttacattgtctgcacaggtctgcaaaaacaaaaattataaactagtccatccaagaaccaaagtttgtataaacaggttgctataagcttggtgaaatga

SEQ ID NO: 9283 - DNA, 579 bp, Homo sapiens
tttttttttttaagaattatgatgctttctgttttgcgtaacaccaaaacaccagtgaaattctggttgctaaaaaattatctctcaccgacatttaaagaagtaattcctcacatggctaaagagtatggattccgatatgaactagttcaatataggtggccccgttggcttcgtcaacagactgaaagacagaggattatttggggttacaaaattcttttccttgatgttcttttcccactagcagtggacaaaatcatttttgttgatgctgaccagattgtgagacatgatctaaaagaacttcgagatttcgatctggatggagctccttatgggtatactccattttgtgatagccgcaggaacatggatggatatcgtttctggaaaacaggatactgggcatcacatcttttaagacggaaataccatatcagtgctttatatgtagtggatctcaagaagttcaggagaatttggagcaggtgacaggctcaggagccagtatcaagctctcagtcaagatccaaacagtctttcaaacctagatcaggatctccccaataatatgat

SEQ ID NO: 9284 - DNA, 1515 bp, Homo sapiens
tgtagctcgcgttgaagccgcacgtccggccccgatcccggcaccatgagcttcggctcggagcactacctgtgctcctcctcctcctaccgcaaggtgttcggggatggctctcgcctgtccgcccgcctctctggggccggcggcgcgggggcttccgtcgagtcgctgtcccgcagcaatgtggcctcctcggccgcctgctcctcggcctcgtcgctcggcctcggactggcctatgcccggccgccggcgtccgacgggctggacctgagccaggcggcggcgcgcaccaacgagtacaagatcatccgctccaacgagaaggagcagctgcagggcctcaacgaccgcttcgccgtgttcatcgagaaggtgcatcagctggagacgcagaaccgcgcgttggaggccgagctggcgcgctgcgacacccacgctgagccgtcgcgcgtcgggcagctcttccagcgcgagcctcgccacctgccgcagctggaggaggccagctcggctcgctcgcaggccctgctggagcgcgacgggctggcggaggaggtgcagcggctgcgggcgcgctgcgaggaggagagccgcggacgcgaacgccgagcgcgcctgaagcggcagcagcgcgacgtggacggcgccacgctggcccgcctggacctggagaagaaggtggagtcgctgctggacgagctggccttcgtacgccaggtgcacgacgaggaggtagccgagctgctggccacgctgcagcggtcgtcgcaggccgcggccgaggtggacgtgactgtggctaaaccagacctgacctcggctctgagggagatccgcgcccagtatgagtccctggccgctaagaacctgcagtccgcggaagaatggtacaagtccaagtttgccaacctgaacgagcaggcggcgcgcacgaccgaggccatccgggccagccgcgaggagatccacgagtatcggcgccagctgcaggcgcgcaccatcgagatcgagggcctgcgcggggccaacgagtccttggagaggcagatcctggagctggaggagcggcacagtgccgaggtagctggctaccaggatagcattgggcagctggagaatgatctgaggaacaccaagagtgagatggcacgccaccttcgggaataccaggacttgctcaatgtcaaaatggctcttgacattgagatagcagcttacaggaaactgctggaaggcgaggagacacgttttagcaccagtgggttaagcatttcggggctgaatccacttcccaatccaagttacctgctcccacctagaatcctcagtgctacaacctccaaagtctcatccactgggctatcacttaagaaagaggaggaggaggaggaggcatctaaggtagcctctaagaaaacctcccagataggggaaagttttgaagaaatattagaggagacagtaatatctactaagaaaaccgagaaatcaaatatagaagaaaccaccatt

SEQ ID NO: 9285 - DNA, 380 bp, Homo sapiens
  misc_feature (1)...(380): n = a,t,c or g
ctctgcagaaggagaaggaaatagcaaaaaactctccaagaagcgcgctgcgaccaccgtcttacaggagcttaaaaaacttccacctcttcctgtggtggaaaagccaaaactatttttttaaaaaacgccctaaaacaatagtaaaggccggaccagaatatggccaagggatgaaccctattagccgcctggcgcaaattcaacaggccaaaaaggaaaaggagccggattatgttttgctttcagaaagaggaatgccctggacgtcgagaatttgtgatgcaggtgaaggtaggcaatgaagttgctacaggaacaggacctantannaagatagccaaaaaaaatgctgcanaagcaatgctgntactacttgg

SEQ ID NO: 9286 - DNA, 591 bp, Homo sapiens
tttttttttatattattataaatgtttactgcataacagtacaaaattgatgttcccaaaaagagggtaaaaaaatctttaactgacattaaacatcttaagtaatttggaaaaatcccaaggttgaaatgtaactatcagggaacaacgaaaaatgctttcatgcatgtacacatgttaagtaacaaataaggcaaaccccaagtcaatacagtacatcaatgacacttaaataacattatgaatataaaaagaaaggataaaatgttgactgctattgatgaaaaagcatttcaacaatatacacaaaatgatactaaacagctttttaaaaaagatgtcctaagaagatcaagccacaataagttagtgttttccataatacatgctaaattatttgatcccatatctatactgttactgtcttaattcctaaatgttgtgacagcatatttaattactgaggtacattagtttacatctttttataggtattctaagaggattaacttttcgtttccagtttttcatcttcttcacctcctccaaagaaaattaaaggaaacattcctagaatgcagccaatagtca

SEQ ID NO: 9287 - DNA, 2288 bp, Homo sapiens
  misc_feature (1)...(2288): n = a,t,c or g
gtggaagagacctacttgcacattcttaacctgtatttgaacacaaaatatctatacttcatgctccagcccaagcctataccctgtaatagcatactattattgaaatcgcttgaccggtcttgttcacataggcctctgggagtgatttggttctttgccctaatgtttcatttgacggtctctttttgatcaaccaatttttctaaaagttcagtcgaaagcttttaagtatagcttcctcccttgaaaaaaaatgtaaactatgactgctgagtgataaaacactgtggtgtgaaagtgtcatcttcactgccaatcaggcaaagaccggaaagatttgcattttattatgtctgtcttatcatgcaatggaaatgatgctttttgtaagtatgcatcttaccaatgatgtaatggtttaatacctttgaatgttttaataaccaagttgctgctgaacttatactaaatcaggggaccaaaaaacttgctcttatcttctcaaattgtattctatatccattaatgtatcagttatcccaaagccttcaggtggaggggtttaccaccttcctaggtcgttcaaccaggttttgtgaggaatgcattcaaagtggctttataaaagaagattttctttagcaagaataatgaggtcatgtcatttgttaataagtatctgtgataaatccgtggttcaaggttaagccattctggtattctggtattagcaactgtaaattctgccacctcatacatggaacagagcttgtgggatgctaatagttagtgaagtatacatgatttaatttctaataatctttatgttttctttaaggatggtggtgtattgctctttttcagctttatttttaagagtacagtcaggaaaccaacaaggggcctaagagtggctgcccctgcttgggacattacagcaagtgaaaccaaagttaatgtgacaagctttgctttgttatcattggtcttcactagaggataccttttacatgtacttctctcttggatcaaatatgtctttaactgtacatctcagtggctggaggccatgccttttaagcatgtgtaaaatttttaaagaaatgaacatacacatagttattttagtaatatttcctgaaagaaaaaccaaattctgctataagtcttgatcttcaatgaacttttaaataatgcatttagctggaaaacaagactttcccagcttgtattacctagaagcgtgaatgtataggatacctgactactaagactatattctcagccctgccctgtcttttatttgcgggtctaatctaatattagaatatattaaccgcttaaggcattgaagccatatgggatggggaatgcatttcttcagtgtttctccgagagactttccatttccttggagttatggcggcaagtaagtatcatagtattaagaaatttgcctaaatctgagttgtgcctttctttactcacaaggcatgggctttgtcctggtgatcagtttgtaagccttcttccttcccagctccttaataaaagcaaagtgattgagtaggtaatgttcaaagtgtctgcctgtgtacatgtacttgtattgattatgtagttcagtaagatgtgcccaagtcatttcagaaagaaagacccttcagttttgatgcattttgctgaacacttgggtagtgagtgggatcctatccagttgaggaatgcttgcaatgctcattgaagggatttgctttgggactttgtcatcttccagaaaggaaacatattgtatatttggcccagtgtgattgattgctttatctttggtaacttttacttgaatgggatttgctgaattaatgactattgaatttaaaactaattatgagttgacaaataaataaaaggtagtgtttatgtctgagcttattgtgtttgagctaacaccaggttactcagtaaccatgacctgctcctccatttccatttattctcaacattaaatagttttatcttgttgttgccagaaatgcacttgtgccaggtattgtccctgctgtatggaaaagcttcttgggcaatgaattctgtaatagtgccctacattatggttttctggtgggaattgttttaacagtgacaacccggggtttccaatatatttttgttttattgttattaccaaaaattccactatggattgatgttcagtggntttctataggcaacttttttgggtaactcttgggggtttcnggattgttttaggccaaantttgggg

SEQ ID NO: 9288 - DNA, 316 bp, Homo sapiens
  misc_feature (1)...(316): n = a,t,c or g
atacattgcacttaatccattgtttaaatttacaacttaactttccaagtttatatcctagtcaaacaaaatttacttggttggtccaaataaaataaattgtttttgactaagtgactaagacatacacaattaattatattggttaattagaaatactcagcacaatatttaatgagaaatcacatcagtcacaagaatcaaatatgtaaattatgctttaaacaataaagtaggatttaaatcatttaaaaaactaaactgcagggaatttcagatgacataaagcattatttcattttgagggtagntnatt

SEQ ID NO: 9289 - DNA, 400 bp, Homo sapiens
aaaggcaaaaaatcactttatcttgaacaaaaagacccattagggtcatggatgtcctctgagcaaaagcagcaacccgctcggactcggaaaattcccggcgcccgcgatgcagagcagtggaccgaagggctgccccagagcagcccagaccgccagctgagcgggaggaccggagcgcgccgccccagcacacaaagtagtcgcgggacgaggggtgccgccgaggccaatcagagctgcgcgccgcgtgagtggagtgcgagccggccaatcagagggccggaagatgagcttcccgttccaaactcttccctgtagccttgggacccagatcccaagcctggggccgctttacggtgggagagcgaaatggtgcccttaagacaagaattcattt

SEQ ID NO: 9290 - DNA, 951 bp, Homo sapiens
cccagacatcaaacttaccagacaaagactttgaaacaactctcttcattatactcaaatgtcaaaaggaaaacataaacaaagaaataaaggaatcagaaaaaatattaaaaagtaggaatatcagcaaagagataacaaattctggagtggaaaactacaatgataaaaatttaaaaatcaccagagggatttaagagtatatttgcacacacagaggaagccatgaacttgaagagaagaaaatggaaaatactgtctctgagaaacagaaagaataaaaaataaacaatgagcagagactaatgaatttgtgggacatcatcaaatagaccaacattcatattctagaaggataaattatgttgttaaaaagtttaccattctttcttttcacctttcttccttcttccttccccctcctcctttttacttttcttcctcttcctttctcttcttctttctcgccttcattatccctttcgctgtttctctttctccctttctcttttttcttttctttcaattttctcaattactaagagatgtttaagtacccttagcatgttagtagatatggttatttctccctttagttctcttttgagatttatagtcactcaaataaagagataacccaaacataagcgtcacaaacaggctttcataccattcttaatttggtcctgtaattcttcattgctgtattaattttctgatgcttttaaggatgttttataacaaattgtgtagctttttccaatggaatgtttattctgaattatctaattcatattgtaagtatagagggagtttaatataaaattattaaactaatatttgtgaaagaatgtatttgtgcatttaacaaatatgttaatcctccgactgcttcttgggcagctgagcacaccggcataaacaataacaccacttcaacaaaacaaaaaa

SEQ ID NO: 9291 - DNA, 637 bp, Homo sapiens
tttttttaacacttcaaatcagctttattatgggtgacagatttagggttcttaaatagcgatacgagtggctagaagaagcgcttcatccccacagtggagttctttgttgtgaggggagggaatgcaaggagtcatcagcgggggtggcccttggccacttttcagcacctacacagtgcctggccatagtaggtcccaataaatatttgtcagccatttgtgggcagtggggacaatggatcataggggcaccctttggaaaccatatataggaaagaacatcttacatcccatatgcctgcaattcttggttccaacttaggggtatttccactccactctgccctcctgtggcctgtcttattttctggaggaggactgggcctgcctcatcctagcatcttaaaccctctttccagagctgcagcttctccacgtggaagatgtctgctctggtgggcatacattcattttaggagagaaactaaactcacaacccttcattttgggggatccatcttaaaaccaggaaggccttccagcctgccttttaatgggtaatcatttttggaattcctccctaccatgtattcttctattttttaccctctcctccttggtttatgggcatttc

SEQ ID NO: 9292 - DNA, 1083 bp, Homo sapiens
aaccttgaaggagtttttattgaaacacagtacagaaaacaccaaacgtcactgacagcagtgagctcatagctgtaatggagttggccccagatgccaaaccacctcgctgaggtgtgacttcctctggagggtgacatggcaaggaaagggaaggtgttctctgtcaaattcagagaccatgtgcacctccaacaaaatcacactccctacaagttcagtgtgcccccagtgggcacccgtgggcaacatcttgacaatgggaagggttaacggaagtagtggggacatccaacccaatggcacatacccaggaatgggaatgtagggctgcttgaggtcttcttgggaggaaggaaggaggaggagctatgcccacagtttcagctttttgggggcccttgaggacaagggggccacagttttgcgggagagggtttccaaaggggggagaaggttgggtgacattggacagtgactctggggctgcggccacgatgtggcaaaaatggagcagctgggtggaggcaagatgaggggctgaggagtggaaagacaccagaatggggcagggagagcaattccactcagagtggagcagggaacagccagcatattagggccaagacccggtcagccagcttcaaccccttcacacgcaggatgagctcatggaggttgatctgccataagttgaaggccctcgcctgaaagagatctgggtccttctgaagaatgaacaggtattcttcttcttgtgctcacgtagcgctctgatgcagcaacgtgacatgttgagaaaggagctggctggcgcgggtgcccagggcggcctcaatgccacgcagcaggtcgttggtcttcaagatgagcagcatctggcgcggcacgtggttgaggagatggctgatctgggggaggtagttggccgcgttgttgcgaatctctaagtcctcagtggcagtgacgggagcttggctgatgcctctgttgaccgagtcccacgatcgcgccgtcagcatgcaggcaaacaaggggtagagatccccggctcccagtcgctggctgtactccttcactctc

SEQ ID NO: 9293 - DNA, 467 bp, Homo sapiens
ggattgcaggcctgagccaccgcgcccggccccttatgggttcttctacactgctgggatctctgttttaagtgctcagcttcatgattgattgctgggcttccattttcccatccagttctggagttcgtagagagtgaagatggtagacttgaacagataaataaacttaacgatcttgtaagagttgtctagctacttaaaaccctcagaagtaagagcttagtctcacgagttgtaagagtgggatttggagcttggtggtggagactgacttcagctgagagatgcacaacagtcatggttttcttaagcctcttatgaaaccatgaatgagagatgaagctaaagaatagaatccagagatcacaaactcatctagagtacttccacaaaatttacaaagatgtggggaacttttatggggttagggtatatttttgttttgttgttgtttaatatcccac

SEQ ID NO: 9294 - DNA, 359 bp, Homo sapiens
gtgagaggaagcaactttcattgtatcgtagcaataaactccacactgggtgacatctaccttagaaatcccttccctctaaccaggccatgatgggaacctttgctgcctgcccttggagaaccccggattggcttccctgggactcaggtctggtggcaggagggcagcagtgtgcccccaccatccctcatggcctgccgccagcagggccataatggcaggactttgatttgacttccagccccacatgaggaggggggctaccaagccaggtgcagtgtttgtggccctttatttaagttgttttcttatattattctgcatataaacaatgacgtttaaaatggaaaaaacaa

SEQ ID NO: 9295 - DNA, 468 bp, Homo sapiens
agaagtgcgactgccagctgccgaggcgttcggtcctgctgttgcggccgctgccccagggctgcggggacgctcccggagccctgcctgttccctgtccatccaggccagcagctgaaggagcctcacctgcctcccttctctgagtagcacggatttgaggagaagcagcgaagatgtccagcgagcctccccctccttatcctgggggccccacagccccacttctggaagagaaaagtggagccccgcccaccccaggccgttcctccccagctgtgatgcagccccctccagggcatgccactgccccctgcggacattggccccccaccctatgagccgccgggtcacccaatgccccagcctgggtttatcccaccacacatgagtgcagatgggaactacatggccttccgggttttttacccttctttcaggggcccccacccacccttggggtaatta

SEQ ID NO: 9296 - DNA, 381 bp, Homo sapiens
cattgaggtaggagactctatgacatgccctcagaatatcagaatcttcttagaaataaactaggaaatgcagatgtttttaactactcagacttttgaggaattaatccttttaaaacatttttgttaaagttagtgtatcagtaagaaacagacctagtttaaaaggaataatcaacaattttataaaggagatggcttattcaaccatagcccctccaacatatctactggaaattctgctggttaactttatctctctctctcttaatttagactttcaacctatgaaaatgtaaatacctttgaaaaaactaaactatcagtcatttacatcttctcatgaatgaaatgcagtgtagggagaggagatggcaggat

SEQ ID NO: 9297 - DNA, 472 bp, Homo sapiens
ttttttttttttgtgagtaaatttaaatgcttttattaacaatcttcttacattacaaggataatatgacaaaaagaaagtttctgcgtacatattatgataaaccaacatagctctatttgtatccagtgttctaggtcccgtcacacaggtactataaagcgtagtctgcaaaataataacatcaagaggttttttttaaagaaagtattaacatattaatatgtatgtggtttcatatgcacgcacgtgttggggaaaccctaggctcatattcgaatctagtgttgcagagcctgagggactctcgtgagatgctctgacctccacatcccacctcatccttcctctgtggttcccagtctgatccttccatgagctacatcagcgccaacacctttccatgaaggaagtgatgttggggtcgcagtttagcctcactcttgatctttgagtcacacacactcggtga

SEQ ID NO: 9298 - DNA, 486 bp, Homo sapiens
tttttttttttttttttaactgtgttacgtatagtttatttttatttcatagccttttaaaaaatataagccacctaatattttgaaaaacatacacagaataatcatttagctgccacaatattacaaaaataaaatgacacagaataaattgcacaagagaacaaaataatctctgctgagtcactctgactaggaacacataatagtcactaggaaggtgaagtggagcagtactgccatttcttcatgatcaattatcactaaaatcagtcacaggaactattcccaggaggtcatccattcactatacaggaatatgtgcaatatatagatgtcaagttaacatcttgaatttaattccaaataccattctttcttttcctctgggagacaaattcaatgggcaagctagaatagtgaagaccagggggataccaagccccatggctgacccacacctctcccagctggggtctacaacac

SEQ ID NO: 9299 - DNA, 711 bp, Homo sapiens
ttttttttttttaagttttatcttttaaatgggatttatttatgtttacataaaggtagcaaatgttacataagttgtttccttaagaacatttattttgtacaatcacattgttatcaagcaagacttatggaaaatttcctgggtccacaacactgaactttgaaactactgtagcattctcttttccaagtttaaacatgactttgtgcactgaagaagtatgggcttcgcattgcacagtggtcacatgtgacaacctgacaccaagcgagaagccttttgatgaaggaatgttttatcttttgttgagttacaaaatgggtactttcatgtgtgtgattatcaaacccatattttttttcagttcatttctgctacaataaaaataaaccagttaaaactaagcagtatagcaatgtaatcgaccaactatctatcatgttatatcttatatacgatgtgttaggtgatattgatgctttatattacacatctgtatttaatatactttgggcaatacaaagttagaacatgtctggtaaataaacaaacaaaaagatttccctgaaaattgatgcattgttttaacaatcacaaaaacttaggtttattcttcagaagtgtggtggaattgcttaacattaaaataaaacatcttgctgttgtcatttttttcatattcccattttatacatttttagataacag

SEQ ID NO: 9300 - DNA, 404 bp, Homo sapiens
cattaatggtatttcttttttacactctacaagtgaattagggagtctcttgttgacccctttgttgcaggaatgtgcgtcgggctaggttatccatgagtttctttattcctaatgcagttagaaagacctttctccttgagctctttgactcccagaaggtaccccagtccccagtgtacttagaaaggatctcgaacattgctggacgtcctcatagtactcacaaagggctagccttgaatgtcactcgcccagtcttcagtctcctgacttagagatacaatcacgtcacaggtctcttggcctcaatctgaaaactgctgccgccgcgccgaggagactcgcatgccgccaccacctcactgggagggcgccgagcccaccgtcgccccctagaccct

SEQ ID NO: 9301 - DNA, 731 bp, Homo sapiens
ttttttttttttttgaattaagtctcatttattctagggcaaactcaaaagggttttttttttttcttttttagcaaatcctagcacattattaacaaaaaaatctgtacatttgccatgatacacttgaaagtgaaacaaataagatataaatacagatatggatgtaacatgaaaaagccccccccccaaaaaaacccaaaaaacaaaaaaacccacccaacctgggggtgtggggaccatgcgtgtgaacacagtgccaacataactattttggtggctgatattttttcagagcacttctttatttccaaacattattgttagcaaagtcctggtgggattctacaaagttcttatttgctgtcctttaaagtgtaacattacgcttgataaataaagggtggcagggaaagaaaaagactgatgagacaaagtcagttgcattacctgcacagggtggtaagctagtgaggcgcatagaaaaggcaggcccgtggcatcgccgcaggtccgggaagcacacacagtgtacttgaaggaagctgcgtgcgcccgaggaccggctgcaccctgcccagaccctggctgcaggggaggcagcagcttggaggaagcagggagtcagcccgcccagccccgcagtggagcagcgggggtcttggccctggccagtccggtagacagggaggcagagacaggcttaggtgctctgctcttttgtgttctgt

SEQ ID NO: 9302 - DNA, 396 bp, Homo sapiens
ttccttttaaatgcttcttttatttcattggttgtacattgggtgagtgaactgaatattacaaccaaaacatagtattgatacaaattagactcctgtttacactgtaaggtaatgaatgagggaattctttaagtgttacagaaagatttagtagaaatgttaccagtggtatggctgaaagaatatttcggtgaagtgctgttatatcctgaaaaccaagagtgaaatgtagttcccatacaagtggagagttagtctcttaactacagtatttgttgaactgatatcttcatgtcttggatattggtgatttttgttttttaattaaacaaagcatttaagatttattcatcatagtcagacttctgaatataaacaaacttttggcaaata

SEQ ID NO: 9303 - DNA, 735 bp, Homo sapiens
cctctttgcactactactatcaataaattttaaatcagttggatttttaagcattttttaaaagctgacattaaagtaaatctaaaaaaagtttaacaaactggccaagacactaatttttatgtataatcacaatattttatactcacctttattgactaaaaataattatgctacatgttgtcctgcatcagaagaattatttcttcttgccagtgttttgggatttgaagataatggttcactcaaagaacctattattttctctactgaggaacccaatgtagaacttgcactgatatttttattactgcctttatatgaatctataggtatctaaatgttaaggcatgtatgatctttgatcatttcttttttcaaattaaagttgtataaaagtttcaatatcttgccttaaattagttgcctattctttctaggattcaaatattgtgacatttaaaaaagaaaacattcacttttgaaacttagacttcagatcaaaaaggactgaacccccactatcataatccatacattcatttccatgttgtttgactagcagtgcatatatgaatgaatatggtaattaatcttacctataagaaccaaatactttaattatattaagatagtgaataaagatgtataatatttttattaataccttgaatatattcagtggattgaatgtgacttcataactgtactacgattgtattaaaatatttctgg

SEQ ID NO: 9304 - DNA, 2673 bp, Homo sapiens
ggcgctcttccagcgggcaggcagcatggcggccgtggagacgcgggtgtgcgagacagacggctgcagcagtgaggccaagctccagtgtcccacttgcatcaagctgggcatccagggctcgtacttctgctcgcaggaatgttttaaaggaagttgggctactcacaagttactacataagaaagcaaaagatgaaaaggcgaagcgagaagtgtcttcctggactgtggaaggtgatattaatactgacccatgggcaggttatcgatatactggtaaactcagaccacattatccactgatgccaacaaggccagtgccaagttatattcaaagaccagattatgctgatcatcccttaggaatgtctgaatctgaacaggctcttaaaggtacttctcagattaaattactctcatctgaagatatagaagggatgcgacttgtatgtaggcttgctagagaagttttggatgttgctgccggcatgattaaaccaggtgtaactactgaagaaatagatcacgctgtacacttagcatgtattgcaagaaattgctacccttctcccctgaattattataatttcccaaagtcttgttgtacctcagtgaatgaagtcatttgccatggaataccagacagaaggcccttacaagaaggtgacattgttaatgtggatatcactctttatcgcaatggttatcatggggacctgaatgagacattttttgttggagaagtggatgatggagcacggaaacttgttcagaccacatatgagtgcctgatgcaagccattgatgcagtgaagcctggtgttcggtacagagaattgggaaacattatccagaagcatgcccaagcaaatgggttttcagttgttcgaagctattgtgggcatggaatccacaagctttttcatacagctcccaatgtaccccactatgctaaaaataaagcagttggagtgatgaagtcgggccatgtatttacaattgagccaatgatttgtgaaggcggatggcaggatgaaacctggccagatggttggactgcggtgacaagagacggaaagcggtctgctcagtttgagccacaccctcctggtcacagacactggctgtgaaatcctaacccggcgacttgacagtgcacggcctcacttcatgtctcaattttaatttctcccaagatggcacatctcagtaccttcttactgtgctatgcattttattgagagtacagaaaggaagaggaacctttttttaatcacttgttttgttttgactatagataagaaaggactacagcatttgatgtgtgtcctcaagaacttgtcttgggtctgaaaaagctgagaagaataaaggaaacattgctcaactcttcagccccctccccctgcacacctgttttctcatttgccctttgagcacttttacttaaacttgcttgtagttgcttttatcactgccgcaaaacagccatcaagagccatctgctttccaggtgaacattggaaatgagaatctttgaaacttagcaatatgtgttgcaccagattttttaaattatatatatggaaatatatatgtatacattttaagttctgtatacataattaccaaacactatgtgacctggagtttgtgttgtttctgctctgacaggtttatatgttcttacaaatggatccatagtttgcagtgatttaattcctggttgggatttggcctcccctctcccccatgctaattatttacccttgtaattgtgcatagggaagcactcacccaatgagactttctccaatgtggactctgtgtgtcagtgaatgaatgtagtaaaattcactttggaaggttatcaggcttttaaaaatctagtttatgggcaaaaatagccattttccaagtggtggctgactgttgcagggaatgagaatttcataatacactgctatttcagacctctgtttggtcagaaatggaaaagaaaaagccccctttcttcccttttctgttttacttcaagggcataccttggaggtgctcagagaagcgtgaagtttgcactatggtggaggatggggaaagagttctaaagtgtctccagctgtgaacccaggaggtcaagtgggctattaaaatctaacgttgagtaaatgtgatagtgatgagaaaggaattttgtgtactgtaaccttgcagtagagatgcagctgtccttcgtgtgtggaaacacacctctcctttacatagttgggaacctcattagaaatgacctcagctgccccatatctacgttcctttcagcagttgtccaagtaggagtgtatccagtgaagacatatcaaatcacaaagtcattgtcattagagtgtacttgattactgggcatccttgtaatataatttcataccactgacacattatacttgtaagagaacatctttcccagagtgcctcagaccttattgctttaaaatataataatgttttcattacttttattatttgaatgatttagtaaagttgactgaatctggtatagactttgggagtatgtgtgtgaagtttttatcaaactgtaatatttgtgaatggaatgccttgcaatatgaatgttaatataatgtgtaaagggagattaaaaagtttgaatgat

SEQ ID NO: 9305 - DNA, 542 bp, Homo sapiens
gcggacgcgtgggttcttgcccgtgttgtgtgtgtgtgtgagtgagagagcgagtgagtgagtgagtgagtgtgtgtgtgggggggactcggcttgttgttgtcggtgacttccccctccccttcaccccttcccctccccgccgccgctgcagtggccgctccctgggccgtaggaaatgagcgataacgatgacatcgaggtggagagcgacgaaggagcaaccgaggtttcaatctgcggctgacaaacgggctcatcataatgcactggaacgaaaacgtagggaccacatcaaagacagctttcacagtttgcgggactcagtcccatcactccaaggagagaaggcatcccgggcccaaatcctagacaaagccacagaatatatccagtatatgcgaaggaaaaaccacacacaccagcaagatattgacgacctcaagcggcagaatgctcttctggagcagcaagtccgtgcactggagaaggcgaggtcaagtgcccaactgcagaccaactacccctcctcagacaacagc

SEQ ID NO: 9306 - DNA, 408 bp, Homo sapiens
cttgcgttcctacatcctctcatctgagaatcagagagcataatcttcttacgggcccgtgatttattaacgtggcttaatctgaaggttctcagtcaaattctttgtgatctactgattgtgggggcatggcaaggtttgcttaaaggagcttggctggtttgggcccttgtagctgacagaaggtggccagggagaaggcagcacactgctcggagaatgaaggcgcttctgttgctggtcttgccttggctcagtcctgctaactacattgacaatgtgggcaacctgcacttcctgtattcagaactctgtaaaggtgcctcccactacggcctgaccaaagataggaagaggcgctcacaagatggctgccagacggctgtgcgagcctcacagccacggctc

SEQ ID NO: 9307 - DNA, 497 bp, Homo sapiens
cagaacgaaaccagatcgaagggcattcttctgggagtggttggcacagatgtcccagtgaaagaacttctgaagaccatccccaaatacaagttagggattcacggttatgcctttgcaatcacaaataatggatatatcctgacgcatccggaactcaggctgctgtacgaagaaggaaaaaagcgaaggaaacctaactatagtagcgttgacctctctgaggtggagtgggaagaccgagatgacgtgttgagaaatgctatggtgaatcgaaagacggggaagttttccatggaggtgaagaagacagtggacaaagggaagcgggttttggtgatgacaaatgactactattatacagacatcaagggtactcctttcagtttaggtgtggcgctttccagaggtcatgggaaatatttcttccgagggaatgtaaccatcgaagaaggcctgcatgacttagaacatcccgatgtgtcctttggcagatg

SEQ ID NO: 9308 - DNA, 310 bp, Homo sapiens
ggtggcccacattgagcggaagaagaagccatataatagcaacattggcttctacaccaagaggaatgctcttcgcgttgctgaggtctggatggacgattacaagtctcatgtgtacatagcgtggaacctgccgctggagaatccgggaattgacatcggtgatgtctccgaaagaagagcattaaggaaaagtttaaagtgtaagaatttccagtggtacctggaccatgtttacccagaaatgagaagatacaataataccgttgcttacggggagcttcgcaacaacaaggcaaaagacgtctgg

SEQ ID NO: 9309 - DNA, 953 bp, Homo sapiens
  misc_feature (1)...(953): n = a,t,c or g
cgcagctgtgaggcgaggtcgggtcccgtagcggcgcgcagcctccttgggggactcggggtcctgcagaagaatagaaggaaggtgataggatgtgatgatagaatttgtgatagccaagcaacaacttttcctaattcggcatgttaaaaaataagggtcactcatctaagaaagataacttggcagtcaatgcagttgctttacaagatcacattttacatgatcttcaacttcgaaatctttcagttgcagatcattctaagacacaagtacaaaagaaagagaacaaatctctaaaaagagatacaaaggcaataatagatactggacttaaaaaaactacacagtgccccaaactagaagactcagaaaaagaatatgttcttgatcccaaaccgccgccgttgactttggcacagaagttgggcctcattgggcctccaccacctccactgtcatcagatgaatgggagaaggtgaaacagcgctctctcctgcaaggggactccgtgcaaccatgccccatctgtaaagaagaattcgagcttcgtcctcaggtgctgctttcatgctcccatgtgttccacaaaaaagaaccagtatcaaacccgagtgattacacgatggggcccgcctgtttcagaatcnaagtggtgtgaccagaatccnagcctactggagaaggatgtgttgttagaaagtggtacagaaaacctgaggaaacaggtacctcccacagatgccaagttaagaaaaaaattctttgaaaaaaagttcacagaaatcagccaccgcatcctgtgctcatacaacaccaacattgaagagctctttgcagaaatcgatcagtgcttggccataaatcgaagtgttcttcagcagttggaagaaaaatgtggccatgagatcacagaagaggaatgggagaaaatccaagtgcaggctctggc

SEQ ID NO: 9310 - DNA, 378 bp, Homo sapiens
gtcttgagtattttgagaatttgatgttgaacgttataaagtcaaagaactgcttgtttagatgaggtttatttttatttctgatattattcattcttgtcacacatcaagaagaaaacactagagtgctgctggaattccaaatctgaagaattctaacgactgcattctttgttattaaaaagggcacaatccttcctttttatttggcagtttaatttcagtaggaagcatgtcacatgtgcactgttggttagaattatgcatctgtcatgcctgactgctgaaccctacctaagccttttggcgcagttttaaaacttatactggtggactgtgaacctcaaaacaaatgggtatttttggggttttgaggga

SEQ ID NO: 9311 - DNA, 594 bp, Homo sapiens
  misc_feature (1)...(594): n = a,t,c or g
gttatgcaccattatagcaaaaaaattgcacactgataaaagtaactgttccctcgttggcttcaccagctttcccaagaattgtttaatcccattccctgtataaaatcactctctgctgagaatcctttttctgagaaaagaattctgagaattttttttctgcttgaggcagaccaacactcattccaagaacaactggaaaggctgaataaaacacagaaaacttttttaaaaagtttttggaaagcttcccagttaacaaacatttgaagggtcataatctcaaaagaatgaaaaacacaaggaggcaagctggccctctgtgaactactttttcccttcaggaaacgtgctgattttagcttaagaggccgagcatttgggcagacggccatagctaagaggcagcaaaggcagcagagtcttcagctggagagacaagaaatggagactgaggttgtcaaggcagctggaactgaaggggccaagatatccatgtagaagggagacacagnaaaggnacactttccccttgaggcatctgctgagttaagctatgcaganaggctatgaaaagcagcaggttttggc

SEQ ID NO: 9312 - DNA, 1816 bp, Homo sapiens
  misc_feature (1)...(1816): n = a,t,c or g
gaatcccagcacttataatcccagtcttttatcactcaggtgctaggaaaaaaaacatagactcaagacccaagattcaatggaccaggagaaaggggggcggtgatcaggtcaccagtgaccccaacctatggtctcggtctttcctggaggctgccaacccagccctcatcctcccttgctcacaaagttacagggtaggcacctgtcaggacagaacagcagcagcgctacagcccagaggttatacatttcaacagaacagggatccttggctactgtagaagcagtcctgtatggagaccttggaccagcaggggaagatctatgggcatgggaggtgggcgttggaaaggctgagtaggaatggtgcctggcaccctgaaaccatgatctgagcctccctggagaaggtattttatatgtctgctgccagctgctggtctccacaccctcaaccgttctcaacccccctgcagggagaaggcctcctgggcactgtccttccacctgtgccagccaccccctgccccactgctgaatgaaggccatttcaagcgctgcttctcactccattcctctcagctgttattgctgcagggccaagccctttttagtgctgtgctcgtccagctcaccaccacagcccctctcagccctcagtaggtgggaggggccanctgcctctttaggccagttgcatcctccatttatccaaaccactcctctcctcccagtggagtggggttctgccagtacagacctactgcatcatctgcgtcancggtcctagcccatctgcagggtgaaagaactcatcaagagctccttctgcccttgtaagcccatcccagctacttgtaaccatctctaagggcaatggcattgctccctacccattcatctgcatgagctactcttggcttccttaaagggtcaagaaagcaatttttctgcttactagattcattgagatcagctgtgtgagccccaaagtgggacaagggtgtctccttncattacttaaagatattcatgagggtgggtcactacagatgttggggagcaagggctaggatcactttttaaaaaatcaccacttgtggctgtcccagagtgcggttgtacatcctccccacctcataacgcagccactgaggaagagtggttttcctaagaagacattgctggagttgactttcttctgtccaaacaaacaaacaaaaactaaacacacacacaaacccccagaaacccacaatatgtacacgctaaggaaaaactagcacccttctgtccactcagcaataagagggatctcttcccacctaccctacctactcctacccccaacccccttccccattaatgtgagtaatgaattagccctggaccacaggtggtcactgtaggctaatggaaaatacccaagggagggcaaagccccccatcagatgcatgaatgtttgcgaatgttgactgccactgccccacacactgtgtctttatagaattcccctttgcccaccctcttcctgtctccacctggacacaacttgctcaaaggctggtgacttgtgggccattcatctacaaccaagtcctgatggagcaagaggcccacgcctaggggatgcaagaacaacccgtttcttaaatgttaccagtcccagccaatcttacggtgacattacagttaaatttcccaattgaaaacaagcaaacagacactcaaactggtcctgtaattgttgctagactttatgtgttgtacaactaaacattgctgtttgaacagtaaaaaaaaaaaaaaaaa

SEQ ID NO: 9313 - DNA, 1002 bp, Homo sapiens
atgattgattttttccaaagatgacaagctgtgttgaaatacattttttcttttgaccaattgacagaatctaataagctttaataatcttccccttttatgtgaaaagttttgagaactgtgaaatgtttaggaacaaactgttgaaatccattggaagggaaaaaagaaagtggtaccagtgttaccagctcaactaaaacctgcaattctgcatttcaactcttcacttcctcagcctacaaatagctcattagatgacattcacgcatgctgggtataggcaaggaaagtaattttcaaagtacatttgcagttctctttttcagagatgattctatgatagtgcctctgaaagttgatgcagcatttttgcctttccaaaaagtatttatcctcactgctttttgcagtacttgtattttcacagatggattatctggggtaattttcttcaaagggagtttgttatacacagtgaaaatgtattatagagtagaatagtaaagctctaggggtttcagaaagctttgatgaacagatgacaaacatctgaaaccccctccgcactgttacccagtgtgtatataatgacttgttatagctcagtgtgcccttgaatccatacagtttcttaaaagacaataaaatcttattaataaagttaatgtaacttctaagttctaggaaaatgctgattctgtctgccccattcaattgggggctactaattgatttgttgcttggatttcctgagaatttctctatttgtaggaggggttttttctttttacggtctgttgatgacaattactttatgggagtgatgcaccgatggtagccaaggaatctgttggggaagttcggaaagaaaccttttctttcttttattcagtttaaagtaaactttatcctggatgtttagaatcaacattaagagttatattatggtgttcagagattaagctgacttggatacaatattttcttttgaaaatgaaa

SEQ ID NO: 9314 - DNA, 441 bp, Homo sapiens
ggacggtattaatgacaatgaatccccatggtttggtcacattagaaacacaacgccttcattcttcatcaatatttattgggcgcctattatgtgcaaggcctacactaggcgctggggaagatacaaagataaatctgacagactgccctcaaagagcttacagtctagtataggagcatacagtctctggagaagatattttaagtgtaactaacctcccccatcccacccccacaaaaaaaagaaaaaacctactagacttggtttcttccatttacttttagtttagcagcttcacgtaaaaagcataaatctgaaagtcttttaaaatgcatacttttactggtaaacaaaattcattttcattagaaaaaatgctgaatatttattgcaattaagaaaaatcttcagccgggcacggtgggctcacacctggtt

SEQ ID NO: 9315 - DNA, 442 bp, Homo sapiens
tttttttggaaaagacaccactctatttattattgaaatacatccaatactaggtgattctgtttctttattatggctagagatggtggcatcacttcttcaaagccatttgacaggtgcttttcaaggtttcttgtccatgtttctgataggtttcatagcagagtaataagaatgttgtccagcttgcttcacatgtatttctctatgtgaactgccaccactacctatatttggtaaaacagggacaactcttcctcttttaacttttaaattatatctgcgcccagaggcttgggcaggaaggtgattgagagtaacttctcccactgttggtttcacatcaaaccattctggattcaattttctgcctaattttctttgcaacatatgtaaaaggatgaggaactccgctttaagttcattggtcagcatgttggga

SEQ ID NO: 9316 - DNA, 1623 bp, Homo sapiens
  misc_feature (1)...(1623): n = a,t,c or g
gctcttcttggtgttccacaggccatgtgtgccctaaccctcgttcatgcaaggtctgtgtagggaaggtggacttcagctcagcaacagcatcccttcccacagggatcaggtgggtggcttgagataccccttccatggggcaccacccattcagtgagacggggaagccctgggtgggagggagaacacctccacatgtcttctactctctccataggatggaatgagtgtcccagtcccaggagtatccatttcccactgtgtagcccagtactctggtctcactgtctctgctgaatcctgtctcactgtgcatattattgtggtttgtatcagtcagtaaaccaatgtgagtcttcatctcttgcattcttaggttcatagttttgtgtgtctcctgtaatgacccttctctttccctttccaactcctgaaagattgccactatttcctctggaactttgtttcgttaccagcaaaatcctcgacatccatacccgtttcctggctttccctctcctttcctctgaatggtagtcttttatattcagctgtccacttgacatcaaaatagacattttgaactcaatttgcctaaaacttacccacaaatttctccccaagtctctccctaactgcaacaacaaaaaccacaggcttctccctgtcactggatggcaactccattcttttgattgcttaagccagggcatccgattgagtactttcttgatttctccagcccacatccagtccatcggcaagccctgttggtcctaccttcagaatatgtccggggttcagttgtcctggccaccctgctgctgtaaccatggtcagaactccatcctgcccctctggattatgactttcgtttcctcacagtggtcctgcttgggctctaggccttccactcccattctctctacagcagctgggctgattcctttagcacccaaggatatgttggcatcacagtgacttagataccatcacaaagacctcccattcaacttagagtgaaagtcagaatcctcacagtgaatccccaggccctagaggatgtgaacccccaggccctagaggatctgaacccccatccctcctctgattatctctcccacccccacttccctttgcattctgctccagctgccctggncttcatggctgggtttccaccaaagnaggcacttcccatcacagggccatttccccgcctgtggctttctgcttnacattcccttttccctnatatccccttgactcattattccctttcttccttaactcttctgagatccagcttctcagtgataccacacagccctactccccccagagcccatctagagcttcaacctttccagtcgcccttgccagggtcagtggaggctctttgttccccatacagtacgtgtcgtcgtactatattgttaggcttatttaanttatgtatgttttgcctttttgtgctaaatgtaaacaccacaaggggaggtatctttgtctgttgacaatgatacattcaatgtttctcaagcacccccaatgctgggtttgtatgtggttatcattcaatctgtatttgttgaatgaataaatgattgactatgtgga

SEQ ID NO: 9317 - DNA, 420 bp, Homo sapiens
ttttttttttttagagacagggtttttccatgtttcctaaacttgtctcccactcctgagctcgagcaatctgcctgccccaacctcctaaagtgtagagctgtgtttttagtctttttttgagctgttttacaatccagtgttgaattgataagtttggattcactctgatatttgcagacttaacatcctacttcacaagatgttcatagccttgatccattacagccgctgcctcatccatctctgctcatagccttgatccattacagtagccacctcttccatctctgctcatagcctaaactaatagaagccagagggaagaaatggaagccaacgtgagtccagaacacacattttataagagtataagaaatataaaaatagcaaagtgtatcgtgaagtttgtaatagatg

SEQ ID NO: 9318 - DNA, 400 bp, Homo sapiens
tttttttttcattccttatttcttatttattccctggcacaatcagaccacactacaagtttcttttaccagttgccaaaatgaaatcatgacacccttcagagctactgtcgttacatgcaactcaagacaacgagcagcatcataaccattgtcaacaggcaaactccaacaatgtctgggtttggatttggttttatgttgagagaagcagatttcctctgattttaataatccataagaaacagaaatcataatatattgactccatattacctaaaaagagtcaaaagaagcagaagttctcccccgattcatcctcttgttccacagacattttggaaaataaaagaaggacaaaataggaaagggaaaggggtgtgaggaaaggaacacagga

SEQ ID NO: 9319 - DNA, 639 bp, Homo sapiens
aagtaattctccacgcccacccacccccagccccccgatgttttggcaccatgacattttcaagtatagctttatattttaggagtaatgacaaagtatgtgatcaaaagagaagggattattaattttttccctctttgcttttttttaaactttattccactctgtacctatttttgaggaccttgaaaatcttaatctctccagaagggatactgcattggttcttctccatcagctggcttagaccatcaaacatcttaaatggatacactgttttaatatctaaaaatctgtcattctacttaattaacttagtcataaggacaaagccttagtatatttttgccacatacatgttatgtataaattttactgttgaataatacaagtattcattgctgactgaattcttaaaactttgggaatagaaaaaacacatttattaatggatgctaaagtgattcctgagaaaaataatgtgtatggttaatatggaaaacctttggtaatgtgatttgggtataagaatactaaaaccagagtacagggtgtgaatcatgtaccaggagggattttatttttaaatatctttattgaggtataattgaaatacaataaactgtacatatttaaagt

SEQ ID NO: 9320 - DNA, 466 bp, Homo sapiens
tttttttttgaaatgttttcccaccttgtgtctctagcttggattattcttggacacatgtaattaattggaggggcactcctaagtaggcacaattcccatttaatgtggaataaaaggcataaaatgctgttaggaagaagggtggtggtttctttgatattgtgaaatgcaaagaaggacagcagcacatttggaatgggaaccaaaagagagctgtctggcaatacaccaggacagccaacatcttggtaagttatatataaacttgtctatgacaaaggaaaaagtgttggaagggttccaatagccccggggtttttggatacgagacaaatggtcacatagaccacccagaatctgcaaatgttgggcagttacatcctttaaagtcacataattcagtccatgaccatgtgcaatttacggtaacaatgttcatcccaggcaatgtatttggggctca

SEQ ID NO: 9321 - DNA, 425 bp, Homo sapiens
gaaaatgttggaggtaagaaaggacacctcacataaaggcatgtcaaaacaagggatgggagacattgccaatcatagactctactatgcctcatcatttccttctacctaactcccaatgaaaatgactgctggagtaaggcactgttaataataggaatatgttatatccttcaggtgcgtgaaaaaccactttcatagacactgtaaggaagcaacttagaaatttaatagcaagagaaatatttcaacacttctctgactgtgggaaggagttattttgaaggtattgagctccctctgtcagatcctttgtgaattgcttgtcaagcagatgtgttaccttctttgctaaaggttcccttcagattactacatcattaacagaaacctgtggaagctctaaaattacactgttataacaa

SEQ ID NO: 9322 - DNA, 2653 bp, Homo sapiens
gattcggctgcggtacatctcggcactctagctgcagccgggagaggccttgccgccaccgctgtcgcccaagcctccactgccgctgccacctcagcgccggcctctgcatccccagctccagctccgctctgcgccgctgctgccatcgccgctgccacctccgcagcccgggcctccgccgccgccacccaagcatccgtgagtcattttctgcccatctctggtcgcgcggtctccctggtagagtttgtaggcttgcaagatggcagaagcagattttaaaatggtctcggaacctgtcgcccatggggttgccgaagaggagatggctagctcgactagtgattctggggaagaatctgacagcagtagctctagcagcagcactagtgacagcagcagcagcagcagcactagtggcagcagcagcggcagcggcagcagcagcagcagcagcggcagcactagcagccgcagccgcttgtatagaaagaagagggtacctgagccttccagaagggcgcggcgggccccgttgggaacaaatttcgtggataggctgcctcaggcagttagaaatcgtgtgcaagcgcttagaaacattcaagatgaatgtgacaaggtagataccctgttcttaaaagcaattcatgatcttgaaagaaaatatgctgaactcaacaagcctctgtatgataggcggtttcaaatcatcaatgcagaatacgagcctacagaagaagaatgtgaatggaattcagaggatgaggagttcagcagtgatgaggaggtgcaggataacacccctagtgaaatgcctcccttagagggtgaggaagaagaaaaccctaaagaaaacccagaggtgaaagctgaagagaaggaagttcctaaagaaattcctgaggtgaaggatgaagaaaaggaagttgctaaagaaattcctgaggtaaaggctgaagaaaaagcagattctaaagactgtatggaggcaacccctgaagtaaaagaagatcctaaagaagtcccccaggtaaaggcagatgataaagaacagcctaaagcaacagaggctaaggcaagggctgcagtaagagagactcataaaagagttcctgaggaaaggcttcgggacagtgtagatcttaaaagagctaggaagggaaagcctaaaagagaagaccctaaaggcattcctgactattggctgattgttttaaagaatgttgacaagctcgggcctatgattcagaagtatgatgagcccattctgaagttcttgtcggatgttagcctgaagttctcaaaacctggccagcctgtaagttacacctttgaatttcattttctacccaacccatacttcagaaatgaggtgctggtgaagacatatataataaaggcaaaaccagatcacaatgatcccttcttttcttggggatgggaaattgaagattgcaaaggctgcaagatagaccggagaagaggaaaagatgttactgtgacaactacccagagtcgcacaactgctactggagaaattgaaatccagccaagagtggttcctaatgcatcattcttcaacttctttagtcctcctgagattcctatgattgggaagctggaaccacgagaagatgctatcctggatgaggactttgaaattgggcagattttacatgataatgtcatcctgaaatcaatctattactatactggagaagtcaatggtacctactatcaatttggcaaacattatggaaacaagaaatacagaaaataagtcaatctgaaagatttttcaagaatcttaaaatctcaagaagtgaagcagattcatacagccttgaaaaaagtaaaaccctgacctgtaacctgaacactattattccttatagtcaagtttttgtggtttcttggtagtctatattttaaaaatagtcctaaaaagtgtctaagtgccagtttattctatctaggctgttgtagtataatattcttcaaaatatgtaagctgttgtcaattatctaaagcatgttagtttggtgctacacagtgttgatttttgtgatgtcctttggtcatgtttctgttagactgtagctgtgaaactgtcagaattgttaactgaaacaaatatttgcttgaaaaaaaaagttcatgaagtaccaatgcaagtgttttattttttttcttttttccagcccataagactaagggtttaaatctgcttgcactagctgtgccttcattagtttgctatagaaatccagtacttatagtaaataaaacagtgtattttgaagtttgactgcttgaaaaagattagcatacatctaatgtgaaaagaccacatttgattcaactgagaccttgtgtatgtgacatatagtggcctataaatttaatcataatgatgttattgtttaccactgaggtgttaatataacatagtatttttgaaaaagtttcttcatcttatattgtgtaattgtaaactaaagataccgtgttttctttgtattgtgttctaccttccctttcactgaaaatgatcacttcatttgatactgtttttcatgttcttgtattgcaacctaaaataaataaatattaaagtgtgttatactataaaaaaaaaaaaaaaaa

SEQ ID NO: 9323 - DNA, 127 bp, Homo sapiens
ggaaaagtttgctgaccccctgatctagagcataagattcttggtgacagggactcattttaatcgcagttgatttcatatcatttcaactgtgatttggcatctagtagatttttttaaaattctt

SEQ ID NO: 9324 - DNA, 244 bp, Homo sapiens
ctgtcaggacagaacgccatgggctcccaggacagcttgctggagatcaccttccgctccggagccctgcccgtgctctgtgaccccacgacccctaagccagaggacctgcattcgccgccgctgggcgcgggcttggctgactttgcccaccctgcgggcagccccttaggtaggcgcgactgcttggtgaagctggagtgctttcgctttcttccgcccgaggacaccccgcccccagcgc

SEQ ID NO: 9325 - DNA, 484 bp, Homo sapiens
ggtatataaacaaaccaaaattatttcttcaaatcaagaacttatctacgaagggcgacgcttagtcttagaacctggaaggctggcacaacatttccctaaaactactgaggaaaaccctatatttgtagtaagccgggaacctctgaataccataggattaatatatgaaaaaatttccctccctaaagtacatccacgttatgatttagacggggatgctagcatggctaaggcaataacaggggttgtgtgttatgcctgcagaattgccagtaccttactgctttatcaggaattaatgcgaaaggggatacgatggctgattgaattaattaaagatgattacaatgaaactgttcacaaaaagacagaagttgtgatcacattggatttctgtatcagaaacattgaaaaaactgtgaaagtatatgaaaagttgatgaagatccacctggaagccggcagagttaggtgaaattct

SEQ ID NO: 9326 - DNA, 884 bp, Homo sapiens
tttttttttttttttttacattaaaattgagaaatttatttttttccatgaaatagtaagcagaattaaagaaatatacagcttaaaacagttgaaatgaccttagaattttaatgacaattacacatttatggccaaaggaaaaaaatgaatagtttttaataatgaattcactttaaaatgtttgcttaataattcatctgaaattacatggatacaaggataactgggatctgggcaccttgtaaaataaaataatgccactttatccttctcaaaaaaattgttatcccagtataacagtggtgcggttctgctccccactcacagtagccacccgttctaccatttacaaacgtgtcaagtcagtcttcctgatttgtaaggatgcctattttgggttccacttaaaaatatttccagtaggcggtcagagaaaataacttatttagccccactcagagtagaggatcagtatgtcaacatattggtcggtcatggctttcttctcgtgatcactgaggtcaaatttcctcatataattataaatgttaaaagataaaattacatcttcacagcagccaaaaatttgtatattttttatgtatttacaatattgtacatatttacacgaccacatcaaatactgaattgtagaaacaagtgactatctataaaggcattcatttaatgcccaagcgttattttcttgtgcaaacggaaacttttcttaaacttctattagaaagctaaagacagtcaacgttgcgaaggccaccatccatggttaaagagccaaacctttctaaaatgtggttattttcagcaagttctataaccaccccttccatctcttcctttaatttcttcataccaagagtcac

SEQ ID NO: 9327 - DNA, 1927 bp, Homo sapiens
ctgattccaaggtttgagacatgcagtgtccacagttactagtggtgatgatgtacattcttattaagctgttggatctaactgcttaataaacacaagtattagatatttcttttggaccaggtatgctgtgaaaaaagtactgaggcactaaatagtgtcatgagctgagaaagtttgagaatatctgtgctataggcaagaaaaatacaaaacatcatttagtttttcacctagaaattttctaaataaatagtcatacaaaaaagggaaaatatatacaaacgtacatacaaagtttggatttttattgaaatcttgttaggtatcaaacaaattctgctttcttcagataaaaatattctctcagatgtctccagataactgctaagtctaaattggtccttcaatgtcttatttttattgtcctcgtgaaatgttcatatacagttaagatgttcccaaaaggatttttatcgtgtaaaggagcgtacatgacgacctctaccactgcctccactaacaaactttcctcttgagcctccactgccgctatttgcactagcccaggaaggtccaagtcccccacgacctctagaagcacggtcccgaggacttgggcggtaacctgtagaactaaggggtcgtaatggtggaagagggcctctgttaaaattgctctggcctccacgactttcattgtaatttcctcgaggagtattctgagcactccaactggagcctcttgttccttcccgacgactgtagtttccttttgaagcaggtggtgtgaaaaacctattctgactgtggaaagcaccccgtcctcctctattgcctgaaaacccaccacgggaagaaatcttctgtgatactttgagtggccgttttggtggaggtattccatcttgaggaaccacttctttactttcagcagcaacaaagtcatccacatgcatagatggtggtctacttgtgttctgttttctctgacgaaaaatatcatgaggtcgtataccctgtccaaatcctcccctgccccttcctcttggtggtggcacaacatgagctcttttggcaggttcaatgtattcagattttccacttgacgttataaaggtctcatgcttgtgcttcccaagtttgaatcctttagtagtcttggttcttcctggagatgatggttctgacaaaaatgagcgctctaattctgagtgcaaatcaaagtcactacagcatttttcagagagttcaattaagtcaacctttaccaaatccagatctgtatctatctcttcagcctgaaatggagtgaaccacatagatttcaactgatcatccatgacatcagcaagcacataggcagtcctattgttaaacagattctgaagagattctggagctgaaagtactggttctacatcctggtcactgagaggtaaagggtcacctgatgactccagcatctgcttaagtccaactacactgtccaacaaagaatccagattgtcatcatcttttgaatgttccaaaacaagcttctctagttcaaggaacaaattttctggactttcttctttgctttgtagaagctgttttaactctgcagcattaatactcatcgtccgtgatgtatgagctccctctacttccatgagaccattatcatctccacagcatccaattgtgtcagagttaagaatttgtctcataaattctaaaaatgaagatgcaagctctcctgtgtccttactaaatgtgctgaccactcgtttcagtaaactatgcagagcactactgtttttccttaaagaactttttaaatgaaataatccataatcatgctctgcaagaaacatcattgttctgacacatgtcagtaaacagttgtaactgctctcagagttagctagcgtagccaacagac

SEQ ID NO: 9328 - DNA, 486 bp, Homo sapiens
gaaaaatgccaattggatgccccttaggttgaggtgagaaaatggcatccttgcccttccttcctcaatatgaaacattaacctagttgacaaatttatcccttgtagaaatgaaaatctatttaatcagggaccagaaatggctgaggagataaatgcatcattacaaaattctgcttttgaatcctggacattacaagggggtaaatgcagcatgactttttgttaaccacattccaaaatgtggaacatttcttttagaaatgaaaatatttcaaggctgatgtattttaagactacacattatcaggaaacatacattgagagttcgcttaattaaaggttgttgggcatcaaattatgtttagtaggttactattctctaacaactcaaggatgctttaatggatctgaatttgacaaagagcatgccacactaatactacagtcaacaacagcccagagaacaattactatgtcagctgg

SEQ ID NO: 9329 - DNA, 456 bp, Homo sapiens
ttttgtttgttaatactttattagtattttctaatggacagaacacaaaccaaataaattttttaatccttttagttgaataaaaataactgacattctgattgttgtttcttctttgttaaagaaagaaagtattgatagaacagttaggcacacagttgacacttactgtacaatgatatgcacacattatcttttaacaattataatcctaaaatgtgctcttcatattttttcccttgtaatacaggagccatgctcctaaaagcaaaatttactactaataaaagaattttccaaggagtgacaaaaagacttttaaaacaagtccttaaataaaaggatgcagcaacaacggaatgtaagttgttggattaagaagacagtttaagctacatctcaaaaaattaaaaattcatttatcttacaattactcaaatacacatgcattaaatg

SEQ ID NO: 9330 - DNA, 499 bp, Homo sapiens
  misc_feature (1)...(499): n = a,t,c or g
tacaaattgttattgaattattttattgaatgatgacacccaaactgagctagaacataattctggctctgctagtacatcttctgtgtgatcttggacaagtcactctactttcctttcaattttcttttctcacagggagataatcataaaaacgactgtaaagtacagcacttcatagagtgctttttgtttaaagagctgacaataaatacgagtctcaaggtctaggaaagcctccctcacaacctgagctgcttgaggacaagggattttcttttgaatcagcagtaccttatttgtgtatctgtgatagagttcctggtacataagaaggtctcaataaatatgtgaatttatgaatattaggcagatttgcaaccttggacagggccactggcncctttaaatctcctttctggtgatcttttaatatttaacatctaaaaggccgccggctacttggctttggggataagtatccccggtatggtacttt

SEQ ID NO: 9331 - DNA, 240 bp, Homo sapiens
caaaccatgcctgccagagtgtagcagaggtgaggaagcaggtgggcagcttgcctgacccggctttttcaggagagcgtgtctccaacagagagtctccacactctagttcagggttatcgacctgcctcaatgagatgacagactcatttgggaggggtgttgcaaacaagttttcagtgagaatagttaagttccagagcttgtaaaggattcagtgactgacacttcagtaaatta

SEQ ID NO: 9332 - DNA, 1037 bp, Homo sapiens
tttttttttttttctgttacatactggtctttattaaagatgatgaatccatttctttattaaagatgaggagggggcaggaaaggggggcagtgcctcctctacccactgcctttgcctgcccggggtgagggagcccctctgctccacccatgccccccatgatggcacatctgtatgaggctgaggcatggggggcagtgtgaagaacaggggcaggttccaagaaaaagaagaaaaacccttcccacagccctaataaataacagaagggtttgggatgacctgggcacaggcaaggggagacacagcaccctgaaccccaaaacctctgaagtgggcaagccctacttaagtaggggattaggagagagtgggtgagaggtggagaggccgcacacagggaggggctgagaggaaaaggggtacccccaaggaccctgccatgggggagcctgccccccaccctacagctgggctcgctgattctgagagaagactcaatgacaaacaatgacctcatctccctcctctcctttgcacatgcttagacacgggcggtcccccattgactggaatcatgcccacccactctagaaattctggaaaccaagggctcctattggctgttcagtcgctgaacactggctggagttgccctcttgcaggaggattctaagaagtgaggggaaggctccccattggttggagccaactccttttggttaaaattctgagaaccaggggttctcattagccaggcaatggccaatggggtcaagctttggcccttaaaagggcaatagtaggggcaagtgcgcaccttccatttgtgcccatcgggatatctcagagggccagagaggcagatgtctcctaaatgtccttctagccatcttctaatgtctgggtctggctggcttggggggcaggggactttggcactcacgtggcacacgcacacacacgcgtggcagggaagaagtggggactgggcagattctgggtgggtggtcgggcctcacagcaggtggtca

SEQ ID NO: 9333 - DNA, 358 bp, Homo sapiens
ctaagtagaaattataaaaagtcagaacattgtgatctataaatgcacagaaaatactttgtaaaaagtagcatccttatataataatgctatttagaaagactgaaaccaagactatttaactgtgaactatgtagcagatgttttaaactttttattccattatatcttgtctagatattttaattcaaagggatactggctctcttgatcggaatttcttgttatcaccattccacgttgccacacaaggtgcacaggctggaagtcttttgtgaaattcccagttaaatatatacaactatgtgacttagtgcacaacacatttgtggaaataacccactcccatatactgacc

SEQ ID NO: 9334 - DNA, 478 bp, Homo sapiens
cttgggccacgccgacgcgctcggtgccacgtgccgtgtggtgtctgtgccgcagacgggccatctgcccgctcacttgtggactttgcgctcccggttgtcgcgccctgtgctcccgaccagcagccccaccgtccacctcctcgcccccgcttctcttacgcccccgccccgggcgtgctcctcgcgccctcggcctctctgtccttgctcttttgtaaggggcgggcccggctcagtgacctgtgctgctctgtatggtgccgtgtgtaagaataaacccgttggaatactcgtggtctcagttccttcccgtcccgccgccccggcccgacccactgctagggctgcccaggaggagggaggcaggagggaggccgggaagtccaggtgggcagctctcggcagaccctgggcctctttaacacgcctcttgttttctcttccagtctcggaagggtgctgacctggaccggga

SEQ ID NO: 9335 - DNA, 367 bp, Homo sapiens
ttttttttattttttatggacaaagtataataatattgagggacctttctagggagcctttggtcctttgtccccattttccaaagggagggaactttcctcttaaaagagacagtgggaacttttagccaggtttttggaaaaggcctgtgggctattaatgagagtgagctgcaaaaggaggaagggtttgtttgggtactttgaagtacttagctaggtgttttctacagtatcttatataattgcatcttacagcatctttacatgcgaaatagtttatcagttatcttcaattgcatattacaaaattctgattaaatttttcttaaataagaaaactatcatttcatatgacaagaaatcc

SEQ ID NO: 9336 - DNA, 282 bp, Homo sapiens
ctatgatctcacatgaaaggtcctatgtaacaaccagtatgagtcaaatatattgaaaaaatcatcttatgcaaactttaggaattaaaaggtatttttaaaatggagagttagtgtaagctgggtcctttggaaacatcaaactgaaaaggcctgatttggaaaggtgactctgcccaaaaggttggcaagaatctgacaaagatggtttccttccgaggaagactccggaactcaggtgtggccagtctccttttcagtctgtttgtacacactgcggcc

SEQ ID NO: 9337 - DNA, 115 bp, Homo sapiens
cctctctcctctcctctcctctctttccttccttccttccttttttctttttctctttcttctttatttcttgggtctcactctcatcacccaggctagagtgcagtggcacaaa

SEQ ID NO: 9338 - DNA, 450 bp, Homo sapiens
  misc_feature (1)...(450): n = a,t,c or g
gnnnnngnnnntttgnnanccctnnnnntttnnnnnnnnnnnnnnnnnnnnnnnnnnnnnnnnnnnnnnnnnnnnnnnnnnnnnnnnnnnnnnnnnnnnnnnnnggcacgagggtgaacttgggtctgtcccgggttaacgacgccgtggctgccaagcacccgggactcggggagtatgccgcatgccagtcacacgccttcatgaagggcgttttcaccttcgtcacagttgcaggctctgtggtcagctacggggtgacgagagtggagtcggagaaatgcaacaacctctggctcttcctggagaccgggcagctccccaaagacaggagcacagatcagagaagctaggagagctccagcaggggcacagaggattgggggcaggaggagtctggaacacagccttcatgccccctgaccccaggccgaccctncccacacccta

SEQ ID NO: 9339 - DNA, 805 bp, Homo sapiens
tgtaaaaaataatttgtttgcattactagaaaatgattcttataaagtgatagttccatttatttattttttgccaggcgaaattttaaaggaataaaaggcaaaaaagaaaaaaagaaaatgaagaaagagaagaaaggaaggaaactttgctctcttactggtagacaaacttgcaagaccagcacaaaagaaaaagaaaatttcttttttttttttctactacattaacaggactcaaattctggaggaacagaaagcagactatatgtgcaatgctagtatctgtacattacatagaaattgctcaacttctttttctgccattagttttatcatcagttaatacagcaaatcataaaatatgcatttagcatataattctagaattcccctccatttcattattaattttgttgttttattttgttttccacagctattccagctgtggtgaattcaggttgtgagtgaccaaaaaccctatgtgatacagttttgctttgctcttatgtttgtttgtgcagcactccaatctagatgcagcattgttactaatttcagacaattgttctggccttttaaaaagcaggtccttgtaattttagtaacacagcatcagagatgttaaaacatacacaacataattcaacaaggccacaatgagtgccattttcttcatatcttgttcattaacataatgaagtctccatctgaaggggaaaggacaagaaaggatggggtaccaggggaattttagcagttatctttctcccctgggctgacctaaaaatcccactaaaaa

SEQ ID NO: 9340 - DNA, 1006 bp, Homo sapiens
cccgctccgggtccacatctccggctcagttgacggactggacaaagcttctatagcaaactcagatggccccacagcaggttcccaaacacctcccttcaaaagaaaggggaaactatccaccattggtaaaatctttaagccttggaaatggaggaaaaagaagaccagcgacaaatttagagaaacctcggcagtattagaaaggaagatatccacacgacaaagtagagaggagctgataagaaggggagtgcttaaggaattgcctgatcaagatggagatgtaacagttaactttgaaaattcaaacgggcacatgatacccatcggagaggaatctacccgagaggaaaatgtagtaaagtctgaagaaggtaatggctctgtatctgaaaaaacaccacctctggaggaacaggcagaagataagaaagctggctcctctcattcaaaaaaaacaactggctctaaagcatcagcttcgccatccacttcatccacctcatctcgtcccaaagcttcaaaggagacagtttctagcaaagcagggacagtggggaccaccaagggcaagagaaaaactgacaagcagccaataacttctcacctgtcctcagacacaacaacttctggcacatccgacctgaaaggagagcctgcagagaccagagtggagagtttcaaactcgaacagactgtccctggagctgaggagcagaacacaggcaaattcaagtccatggtccctccaccccctgtggctccagcaccttctcctctggccccccctctccctcttgaggatcagtgcattactgcctcagacactccagttgtcctcgtcagcgttggagctgacctgcccgtctctgccttagacccaagtcagcttctttgggctgaagagcgacgaacagaacactctctactcaggcactggcttaagtgttaacagagaaaatgcaaaatgtttcacaaccaaagaggagctggggaagacagt

SEQ ID NO: 9341 - DNA, 320 bp, Homo sapiens
cttctttatataaaggctaataaggaaggagtgttatttatggctttgccaagctacatcaagaactcagctgtgctgtgcctaccaggggtctcctttcttacccaggactcctttcttctccttgaatatttatgtccattttaacacttcctggttgcaagagggatgtgcctccattatttcctccacagttttggtatttgtcagacatttgttctgctgtctttctaatccagccaacgtctgctcaggaagtggggccagctccactgggacccatagttttacttccttgtcatttgattggatagtttcca

SEQ ID NO: 9342 - DNA, 288 bp, Homo sapiens
  misc_feature (1)...(288): n = a,t,c or g
catgaggaaggaaatgacattcccctttttcatttaagaaggaaatattgggcattaattctcagtattctttatgaagtgaaaactttaaaatgaaatcacaatagaggcttttttttgttttttgtctttctcctttcagcatttctgtaccaaggcgaggcttgggggcgtgacctcgtcctccctgcatcgtcctgggctgggtacaatccacgctggggacccgggggaggaggggccctacttggggaggaggggttcntcatttcctcctgtggcccatgt

SEQ ID NO: 9343 - DNA, 665 bp, Homo sapiens
aggaatacaaggaaagctagcatgcttggagaagaagctgcagaaggtggggtgagggacaagagatgagaggaggcaggattccatcacacagggcttgcaggccatgatactcagaattaaatgtaaagtgtggtggccagctgttactgggtttaaaacaggactgtttcttgttaagatgggggaactgctttcctgccaaaagtgccaaagatcaacttgggaaaacaaaatcctcacagaggggagagtaaagaacacttgattagtcttcattaggcacctgttagctactttttctaaagttaattcctggaaggcctttgaagcttcactatgagattgaatttcaccattctcaatgtctttcaataggatggggatagtgtgatggtccttccaaccatccctggaagaagaagccaaaaaacttttcccgaaaggagtttttcaccaaaggagctcccatctggcgaagaaatacctcccgctacacaccccgagccttaagtctcttggagaagctggtgctgtgagccagaggatgtcagctgccaattgtgttttcctgcagcaattccataaacacatcctggtgtcatcacagccaaggtttttaggttgctataccaatggcttattaaatgaaaatggcactaaaa

SEQ ID NO: 9344 - DNA, 1470 bp, Homo sapiens
agcattagtaactttttattctcaaagtgataaaagcatttaacatatactttacagtataaacaaattaagtactatgcattttgcttataaagtgacaaagtattttaagcattatataattcaatttgtacaaaaagtaaatttccaaatacaagctttggttagtagaactgattatgtactgtcaaatccatttttccaaagttgttcaaggaaaaacaacaacttgactagcacaggtaattcttgtacaatcagagctttttactatttagaaggaggggatatattactataattgctgttaattttcgaatctagataagccttttttcttctcatatgttgctgtaggagagcatatcatcacttttggaaagcaaaaattatgtagaaaatcaccttttgctttattcttaagaaggccatccgttttaaaagtagatctaagactgttagcttccttaactactgagacactttctaaaagtcacactactgaaaagagccgctttaagaattaatgtattccactggggttaaatcatttctgatttccctcaggagggtagtaatatctactagcactagtgcccagaatcaaagtttatatcatctaaaaaaactcaacattttatagactctacaatgcatggattacttttattcatatgaaagtaatataaaatgttacctaacttaaataatataaaatatcggtttaaccaaattaacaatcacaaaactgcagacatttttctattaaagttttccagttcactgagcaatatttactgaaaaatatgattatgaacttaaatatgtcctctttaaaatttgctgtttatgctagactgtacaatggtgctccctttatgatttttaaaaattttacttacataactatgtaattccaaaatagaaaagtgagtgagccatcactaaaatttactggaaactaatattctttcatggaaacaactgataaacattttaaagttctatatttatttaaatttggctttttaaaataggtaagcttttcatttcaattattgtttaatactttaaagctagtttaaacaaagataaaaccaaggagaactagtaaagcattccttactttacatacagtgcctcaagtgccacatacataataacatatcacaaaagaatgtatatggtttagcagattacagagcaaacctaaaagtttatacaaagctaaacactgcctcccttctgttccatttattgtcttttaatttgatcttggctctgtattatccttctataataccactgtgtgacatctatcagtcttctaagtgttctgattacttatatatacctttttctttaaacagctttgtaacatttgagaacattcatccaatcttttccattagatatgatatattcatttttctcacaaaatgctcactttcctgagctatattaaacacc

SEQ ID NO: 9345 - DNA, 380 bp, Homo sapiens
  misc_feature (1)...(380): n = a,t,c or g
gtttttataagatcaatattaaaacccattgggattaaatatttttgaataggatacactcttgagaaactcgagaatggactgagccttcctacaagccactctttgtttttaaaacagtggggaaatacgtttacagagattgtgagcttcagagaatgcatgtgatggtgtgtattacatgctaattcatataagctgtatctgtcagctaccaccctgtgctttaaaaatgcacacactcaaccctctttagcttggagctcagctttttgcttttntttttttttttttttgtagaattatttagctaacataagtattctgattgctaccngatggccattcttacttagtttcatagatgtgctttaactatg

SEQ ID NO: 9346 - DNA, 405 bp, Homo sapiens
accaggaggtgcccgcctcctatcagcctctgggaaggccactgtctccccagtgccttctcctccgctgcagctttccatctcatctccttactcccttgacttggcttcacacagagcctcttctttacacatactaactgtttgcttcataccctcctgcagcagaactacagacctgccatcctgataattgtcaaactcatccctttatcacctttataactcctcaaggatattatcattggacccccaacatttcaaagtgattttcttgagtaataccatatgctgtgatgtggatgtgattggtttgccctcatcaagtctcatgttgagctttgaccctcagtgtggcagtgctgggagggggcctggtgggggtttgggtcatgggggcaccct

SEQ ID NO: 9347 - DNA, 386 bp, Homo sapiens
gaatgcagtactgaagaactgctttcaattctaagtgatgcagaagaatatacagatttgccagtgagacacaatgaagatcatatgaatagtgaactggcaaaatgtcttcccattgaatcaaatcctcattcatttgacagccctcacaccaaagcacatctcctgctacaggcacatctcagccgagccatgctaccctgcccagattatgacactgataccaaaacagtcttggaccaagctctcagagtatgtcaggcaatgctggacgtggctgcaaaccagggctgggctggtgactgtcctgaatatcaccaacctgattcaggatggtgatccagggtcggtggttaaaggactcttctcttcttacactaccaaac

SEQ ID NO: 9348 - DNA, 412 bp, Homo sapiens
ctgcccccagctccggaaagttggcagcaccaacccattggttcagttcttttgtttcctcggagaacagacatgccctgcccctcttcacctccctcctcaacaccgtgtgtgcctatgaccctgtgggctacgggatcccctacaaccacctgctcttctctgactaccgggaacccctggtggaggaggctgcccaggtgctcattgtcactttggaccacgacagtgccagcagtgccagccccactgtggacggcaccaccactggcaccgccatggatgatgccgatcctccaggccctgagaacctgtttgtgaactacctgtcccgcatccatcgtgaggaggacttccagtcatcctcaaagatatagcccggctgctgtccaacccctgctccaaacctact

SEQ ID NO: 9349 - DNA, 760 bp, Homo sapiens
tggagagaaggataagccatttattaaccccacgcccctagcaccagctgtcaccttggacttgttggagatgcaggggctagaaaggaaatgacagagtgtacaggccccttcgaccccgtgtcccataggtggtggcccccagacacaccctctctgctggcagtgcagaacatgcatcccaataccctagaggagaaacaccaccccagggagagccctttctgctccaacctcctgggcaggtcccaggttggggcagcagccatctgcaggtgtttgtcaggcctggccacacatgcggacagaggatacgactggggtaccctagggtgtggggagggtcggcctggggtcagggggcatgaaggctgtgttccagactcctcctgcccccaatcctctgtgcccctgctggagctctcctagcttctctgatctgtgctcctgtctttggggagctgcccggtctccaggaagagccagaggttgttgcatttctccgactccactctcgtcaccccgtagctgaccacagagcctgcaaccacggccactaggaggctccactgcaaagggtatggaaacttcctctgaatgaacatctgcaagccaaaggccatgccggtgcctgtgacgaaggtgaaaacgcccttcatgaaggcgtgtgactggcatgcggcatactccccgagtcccgggtgcttggcagccacggcgtcgtccacccgggacagacccaagttcaccatggttggca

SEQ ID NO: 9350 - DNA, 612 bp, Homo sapiens
  misc_feature (1)...(612): n = a,t,c or g
aatcagttgggtcgtttctcatttaacattttacttttcaagtgtgtatacagaggacttactattatnactttgaggatgagatccatgctcacaaatagaggcgaacatttgaactccgaatccaacccattttcttactgtaagaggaaaagttactggaacgtaactagttgaaatcctgcctactttaatattatttgtttgttaatccagtaatgggaactgccatctctgtagaaatcagtgggtaattgaaaaataggttatgctttttaaagagtctgtggttatgagaggtctcagttaagtgtgtttagaagtgatcagcttgaaccttatgcatgactcgggggctggaatttatgatctgggttacggtatgttctggggacgtgtctgcttgcccatggttactcatgaactgaggggatagcttggcaacttggttaatcatcttgggaaagaaaaacagacttcatatcgcctgacttgattggccttttataggagtatactggagaaatggttgtagaaacagtatttacagcaaaaggaaacaaataatgttcattttaagcaatgtaccattcacactgtcctgccttttcc

SEQ ID NO: 9351 - DNA, 190 bp, Homo sapiens
gctaagcacaagtctacagcgctcttctagagggtttaaaatctgtcgatagcagcatcaaaaaaagaaaagcgaccttccaagcaagctgaccccaagcactccaatcccgttaaaatatgaagatgaatcctcaagagggggtcccgaggggcttagagaagcagatggccttggttttttggacaaa

SEQ ID NO: 9352 - DNA, 490 bp, Homo sapiens
gtctttccaaggttgtaccacctgattccagatggtgaaattaccagcatcaagatcaatcgagtagatcccagtgaaagcctctctattaggctggtgggaggtagcgaaaccccactggtccatatcattatccaacacatttatcgtgatggggtgatcgccagagacggccggctactgccagggagacatcattctaaaggtcaacgggatggacatcagcaatgtccctcacaactacgctgtgcgtctcctgcggcagccctgccagggtgctgtggctgactgtgatgcgtgaacagaagttccgcaggcaggaacaatggacaggccccggatgcctacagaccccgagatgacagctttcatgtgattctcaacaaaagtagccccgaggagcagcttggaataaaactggtgcgcaaggtggatgagcctggggttttcatcttcaatgtgctggatggcggtgtggcatatcgacatg

SEQ ID NO: 9353 - DNA, 762 bp, Homo sapiens
ttcttactaaaaacaaaacaagtttataattaattctctgagcgagcatttttagggataagcctaggaggtattcatcggtgatggtaacaaataacatggtatttgaaagaataaattactaggatcttttaaatagtgataatacaaaagtaatcttaattagtatcacatactaaaagacaactataacttctgaaaaatatttattcttgtttgatgaaagcaacgtttctcagcaatgcattttaaaaaatattttagctgtaaattaaaaatggccataatgtacccttggcagacttcagcatataccaaattttaaatttaaatcagcttgaattcagtggggtatacaaatcaatcattttagttgttttagggctttttattgaatagaaaaaatataaacaatgttgtagagtaatgagaaatcctccacactgaaaaaaaactagtagttttaatttttttggaatcatattttctgaggtgtaactggctttcattagatgatcatacttttcctgacatttttacaatgtattctttctttaaatataaaaactgacaagataaatatagtgtttcaacttcttagcctatttgtgatttttctgttttcctctgacccatcattgattctataaaaaagtgccaggccaagaaacaatagttagagtaattcttcctttaagttctttcagcagtcttgccaagcaagcatgtatcattcctgatgtacttctaccagttgacagc

SEQ ID NO: 9354 - DNA, 1094 bp, Homo sapiens
gatttcttctttttctgaaggtttgtctcttggccatctttttttagtttcttaccataagagtttgacccgaaactgctcacttcacattggatgacaccatgttcttcctctttgaaaagaaaaggggaatgtgtcccactagtgaaaggaaaacttttcaacactatccctgctttagtctcagcaaactcagactattctgcttagccttcattagtcatctgggtgtgagtgtgtcttgttctgtttttctttttaataaaacttttaaaccatatatttagcctgtgaccaggggggccaaaccctaagatttctggtaaacctgaagggtggccctcctcagacaatttatctcccagcaatgaccctactacactcgcgtactgtgaatttgggaggaggtaaagttgacttctcctcgtgggcagttttccaatcaccttgtgagtagacacctgccaatattgtttgaaacctttttttaatatgacatcctctcttgtcattctcttctcccctttcccacagacttccctcctactgggtccaggttcagaaccaagacttctgtacctagtgctgcctgattggtgaacattgacttcaagtagcataggccccttgtgtgactcacaactccgtgtccttcctaaagtttcgggaagcagggttgtctaatatgcacatttcttattttggtcatatttttactttagtgtcactcaccttttacaaagtgactttgtactcatttagggctctatcggaaatgcttccattttgccttttctacagttaggccaattttgaaatatataaattctatgcaacatttatgttgagttaccaatggaagccaaaagttctcttcccaaactgccaagaatgatacaggccataattgaaatgggaataccttttaagtttcattaggggtggggtgggagtgggacaggaacaagacttgcctagatctttgttgtatcttgggggacttttactttgttgtttgatgcttaaacttcaaaattctctgtattcaaatttgattgtggcgaatctacttcaaaaaggaaaaataatccaac

SEQ ID NO: 9355 - DNA, 874 bp, Homo sapiens
  misc_feature (1)...(874): n = a,t,c or g
cctcaaggatgagtttatttcacatgtcacccagcatgcaactgaacacatcacagaaaccaaatacttactaaattagtgtgcattgctttacaaggaaaagtcaataaaatggcatagtgaatatatcattggacttgaagtcagtgttcatctgaaaatgggaacaataatcatgacaataccattcagataatcatattctgaaaattaaatacattgtattacaatgagtttgtaaattctacagtaatgtatctataatactttccaaaagactgctctctgatctaatacaatagaaatttattaaaaaagataattatttatgttatattcatgtaatggatcatgttaacaataaaggacaactttccttttttatttaaactttnnnnnnnnnnnnnnnnnnnnnnnnnnnnnnnnnnnnnnnnnnnnnnnnnnnnnnnnnntggcaactttccttctttagtgagcaaatctttcagtaagcaaagtacaggtgttctctgtgatatttttatttttgcaatttatgtttaaggagcaaatctatgcaaggtagcatctttctagatctggaaagttgaattctttctatatcacagacctacactcacagttgacatcaccattctagacaaagccataactacaacctaagcacttttatttaaaggaatgttcatcaacatccactctccttggtcttgagccaagcccagaaataacaaggtcagatggtcatgatcaggaagaaagtaaactcagacttgaagaaatatactgtcaaattccccatattccaacctgctgtgcttgattttaatacttcttttattaaggtgattctggtagaatttggctgaggact

SEQ ID NO: 9356 - DNA, 681 bp, Homo sapiens
ggcacgagccaaattcaagacaatgtatcatttagacacacagaaaaggaacttgtatgttttccctattatttttctcattttgccaacaatctatagttttaggttatcaaacagatagatcaacttaactggctagtacattgaaaaatcttcctaagaatcctttgttagcataatctatagagataatttctcaaattatatcatcatgatgcatataaactctataatgtataattgtgtttcatttatttaatgtatgagaacatattgaaatacaaaaccatgcattagccaaaaaattggaatacaggtagtgttcagatcagcaaaacattcagtctggtaaatgcctgcctggggctatgatatcattctcaatgcaggttttatggaaaaactaaaagaatatgttgttagatgatgttggttttgaaaaaaaaaaagacattaacatacacattagttagcccagttaattgcattctactaatatagttgcacattagcaataattttgctgtctctggtctttattttgtggcttcaactaactggaccatgtggactgtaaaggtcaaatggaaaaaacgagcagtggcccctcatcctgtaaggtactgctacatcagagtgacctaaaagtctaacactgtgaggaaaactgtgatttgtagg

SEQ ID NO: 9357 - DNA, 865 bp, Homo sapiens
tttggcaaaaaacaatctgttattttttaatatttttattgatatgctcaataataaaatacaagtgttaataaatacattggtacaggataagtttatatccaacaacagtaaaagagtgattcaagttgcagtaatacactgacaggtaaatagtataacattagaaaagcaaaattcttttaacttaaggacagactgaaccatcaggtatgggtctgagatcaagtaatacaggtagcaagagtttttcccacactggaaaatgaaggcagttttccaaatactgtgaatttacaaacattggggaagcgatacaatccatatactgtatacatctgccagtgttctctgggattcagtccgcacattttgtaagtgccggtggtacctaatgaaggcattgcatataaactcaaaagtctgtttccttattctctaaaaaggtagcacggccacttgcttatatgtggtgtctggatggtttctatcaaccccctgctcccaccactcctcagccaatccaaagagaggcttgcaggctctcattctctcctacaaagccagtcttggtttctgagcttggaaccagcaggaacaaagcaccatttacaccttatttctctgcaccaattgtatggatacactagacttaggtccagagtgggcactgtgatacagttgatcccttaaaaaatttcctcctggtaccttgtcaaatgggacaaaaagcagattaagtctataaaggctgtccttctctgcctggcattaggagtgggggacaactggggcattacttctcccagggtctgtcattctgcagagttaacatatattgtgtgcagtacattacaagccatca

SEQ ID NO: 9358 - DNA, 787 bp, Homo sapiens
acaaccagccctggatgattcttaagggcccttctaggaccaaagttctgggaatttctagcttattctgccccctcatagcccttggcctatctatctttatccacatgcagaaacatctggcaaccccacatggctgagatgacctggtcctaggacacccttggacagaagactggcctacctagcagacctggatttttcttcctgatctgctgcttccaagttgtgtgaccttggctaagtcacttaacctttctgattgtcatttcgctttttaataaagtgggtctggtgaacaagaaatgtaataaacacgtggcttgccattcaagagatgagtctgaccattcactttctgtgtgccagagaagagagatcatgggtatagaccagcccctggaaaggctgctttggtcaaggctgagagcagctttgctcaaggaaattattcacgaaggtgaccactgtctttctgacctggcacagaggaaatgttggctgtgaatgtgaccaatagaaagaagcccgtatttctcagtcagtcctagaaccccggtaagtaattaacagagaataaaaatgtgtttgttaaatgacaaagcagcagtttttcaatttgtaaggtctgcttgagagcctttgatgtgtgtttcttttcctgacttttcctttctttagaatttttgatggtctcacctggtgggtggggctttcagggtatgcccacaatgtacatttctcggcatctgtgcctcagtttcctcatttataaaatccctatgat

SEQ ID NO: 9359 - DNA, 422 bp, Homo sapiens
gacggcgggactgggttttctatcagatgttccacgtaataatgctggagttaagaagtttccattattttgctccaaaccagaagactctgttccctgtatatagaataggagtaatatttgaaaacaactggctgatgtttaaaactgaagattgtcatgattgtttatcctaatcccaatgctgaagtaagattgtcttggaaatactaagttggggaaccagtcagaagcatctggattaggcatttagtgatacaaggatccagaataacaaaaactatgtaccagccacattcacacaacaggatttcttgtaaaaacctcaaaatggttataaagagtatcacagatgtggtgttatggttagtgtgtactttgaaagtaatgaatgtttttatgtaattaaatatctttctgcc

SEQ ID NO: 9360 - DNA, 351 bp, Homo sapiens
  misc_feature (1)...(351): n = a,t,c or g
tgccaaccatggtgaacttgggtctgtcccgggtggacgacgccgtggctgccaagcacccggtgagaaggccggtctgggacgcgggcctcaaaccccagaagctgacctgagcgaggcggggggccggggcgtgggggtgccctcgtcagggaagagtggcggaggctgggggcactctcttgctaaggggctcagggcgtccgggtgggcataggggaggtgggacgtgtccaagcgcccagggtctcactcctccacagccagggtgtgcccagaggagggacaggagaggcggtgaaggaagagggcaggggatcgagccttcacccgctctgcaccccanggact

SEQ ID NO: 9361 - DNA, 469 bp, Homo sapiens
tttttttttttttttttttcgctgtcaacagacagtttattctatatacaaacacaattttgtacactgcaattaaatagaatggaatgagcgctcctccgcattcctccccgagtgactggtttggccgccgccactccatccccgagtgggactggaccacggccctggctgctgccactgatgttggcgcctgcaccccacagtccctatgcccgaggcgcaagctcatgctctcccggggaccccagtggcggcgcctgaagcagcatctcctggatgcggacctgctgcaggatggcaggcagctcgtagtggtggaagaagtagatcatggaatgctggatgaagagccaggaggtgaccagggccaggctgctgtactgcccgttaaagcggtagtggtaggcatagaaggcgaagtggtagaggtagaagaacctgtgggggcgggagaagctaccctgcc

SEQ ID NO: 9362 - DNA, 2272 bp, Homo sapiens
ttttttcacattagaatataagttttttaatttttataaataacttatctgttacaaagatagtttacccagctaaatcacaaaaccatcaactcaagatatccaaattacgttttattaataaaacaagtaaaaactgatttatcaatcttcacatagaactgcagatgaagctgaaaaacaaggcctattttaaaaataaattgcatcaaacgtaagggctttgggtctatggtttaattacctaggattgtcatatttcttcccatatacaaaatgcaaagcctgaaagttagggctctgacattcatagagatcaactgtaataatcccatttaaaacacagccacttgcaaacatttacagtgggtggtagtctatattatcttccatcctttgctctatttcagcacttcccttagccccattctaagcactcatataatttcataattctgtctttttaaatgcatactgttctttttcttgatttcagttatatacattcctgatcatctgaatattttccttacaaaaatatatcatcaaaataaagagatgcttgaggttgcttcagtgttcaagtttgcttgtttttttttccagcttttcttcagttgtcctaaatatggctagccttgttttataaatacacatgatactgtcaccaagtcaggattagaaatggactgccccaacagtaaagcatttaaacttctctccaaaaaaagggctgtaggtactgctgctgttgctggttttgagactgtactttcccaataacaactgcttgtgcaagttctgtgggacaccaagcagatgaagcttaaccttgttgttctgtcagtgagttaaaaatatcttttgttttaagcttccctgtggaagacaaacactgtgttgtgtcacccactgctcaagtcagtatttaatgtgacctacagacatcacttctgtaatatcatctgcaattcactgtgcagcatctgccctgccctcacacaacattggaactcatgagggcaaagtacagaataagtagaggaaagttattctgtgcatactttcatctcattaatgcttttttattttaaggcattgttcctctcaggtaaggcttaaaaagggacatgatcgtgcttaattactaaaaggaaaaaagaaaattagttaacaaaaggctattacactatacatatagaaatataagaaaataatcaagaagaaaagaaatcacttaaagcagactcgagagatctgtacagtaggaaaagctttggggtatttcgctgcacatttgtacagacaatgcatgctgctttcctttgcatctttagcccctagatgctggcttcacagagtggagacacgttcagggaagacaaagacaaggccaagagtaccacagatttctgaagttcttccctatccaatggcactatgcggcagccaaatggttcttaaatagttaaaccttgttccttttcttcgtgtatgtagtgtttcactgaaagctttacaaataaaacaagctatcattctattccttcctcctgtcaaaattcagtagtgacatgaggggaaaaaggtattgggaacacctaggtgttaacatattgagaattatccataatgggacactggtaacactgtacacagttaggcagtgggcaaccaagtctttcagcagattacttttcatgtgatgaatttcaactgctcatgacattatactgaggtattattagctctgtgggctgacatttaacattagcagaacaccatcttgtcacaccttcaatttgacaaaatcctatgtagcagtgaaactttttcccgatgacagactagtttcttgaactttagatgtggttttagagaagatacaggccatttggctcagaaatgccttggcatctcacactgttcacagcgaattaaggctggatggttcaaaaaagtacaggcggtacaattccactgagctccctcatcatcttctgtgtcttgagtctttggtgttttgatgatggacctttgatctttgggttttggtggcacaggacctacaaatccaatattgtcataaaagttatgaatagcgctggggttaaaatgtggtcctcgggcttgaaaaagatcaatttctttggttaagcagtcaatgtcaatctggagttgtctattacaacttctcagctgctgcatttcttcaagggaaggtatctgggatatagaatttgatcttttcaggcgccttcgagttagatta

SEQ ID NO: 9363 - DNA, 809 bp, Homo sapiens
tttttaaatttagaaaagagagctttatttcttataaaggtttgcagtccgcaaggtggccattatgacaggctgggaagtgtggcctacagccaaggccagaggagggcatttccagggagggaaggagaggacaggaatttgagccaaatgagttggctacatatacatactcaataggatatcagaggagctacatcattttatgagaatactcataaaagaggtcctaacacatgcatattcaataaacatgcatgttcattctggggtggagacttgacatttaaatgtattataattaggccctacacatcaaaaagtgaagcagggacataaaggtactcagcctctgtaaaggctcagcctctgtaaaggcacagcctctaaaactggccagaaccagtccatggaggatggtctcttatcaggagaaagttactgaaatcagtcccttgtccagagaaagctgtcgttaaggttagtggggcaggagatcagttactcagcgtctgtgaactgggtgagttgtaattgttttaatcttgcttctctcacagccagtgcttgcttggctgctagagaaaaataaaacccatgtggtagttagaatctagttaattctttaagagtagggtacaagacttaaccctcgccctggcatgccctaggccctgtttataatttgaggtcttattgccacaaagagtctgttctgtcagtctcatgatctctattttaacattaatgctgctcagttgttgggtctaaaccataagagggagggaggtacagggaggtatgtctga

SEQ ID NO: 9364 - DNA, 581 bp, Homo sapiens
tttttgcagtttttgctctcagctgtagccctgacatggaaacgcttgctacgtttctgcagcaaagtgggccgagcgcagtacgcacaggtgtggtgttagccagggagaccgaagccacacagaaggggagtcagtaaatgtccatctccacggtgtctgcctttgccattgggaggcctgaactaatcaaacgttcattaataggatcccagcctaacagcaacgcttatgtagcaccattcttagaaactaccaagtatcacacaggtacatgtgtatggggaccttcctcttgactgcttgtcaagaaaaggatccagagggaacttctgcccctacttccatgaagtgagatgcaacaatcatttccaatctatttttttatctcatgctaaaatgaaagtggaggggagagggaagaaggctcccattctacaattataaatgctgtcctggtagcctttcttctcttgccggctaacaattgttctaacagcatcccatggaggccagcaaatgaatgccccagggactacagccagaaaattgtgcctgtaaaatatcatattcctctggag

SEQ ID NO: 9365 - DNA, 1764 bp, Homo sapiens
tttttttttccatagtgtgattgagcctagggtcatacatttaagtatagcaggtgcaattacaagcaagtcctggctctgcaccctggactatcccacgcataggaggtacaaaataaattaaaccctttcatttaggcaaacaagcccaagatgaaggagcataaccctgcttgtgagtatccagtggcatcgagggtattatttatttctttttttttcttttcttttataaaaaacagtcaaatgttagggagagcaaaatataataaaatttaaaaggacaaaaactcaacactgaaggaaaacaactggggataccttcacaatgagaaacaggaatgcatgcttgattcaaagtatgagatgggtgaattcactcacatagttgttctaggcccacagcctaaggcctcagcgtcattctaaaccacagggttgtgtgtatttttctcttccaaagacactcttaatcctatccctgaaaccaatatggtaaggataaggttggagtgatcatcactcactaactacaatatttgctatttaaaaaatatatttatatatagttctggaaattatgaagcaaacaaaatataacacaaagatgcatttgtcacaattaactcaagttgcagcaacagcagaattgtgggaagggacagagagagagggctgctgcaaatgcagcaagtacgtcctgaaatatgtcacatagtgcaacagtcagattacctcagttactctgcgtcaccgcacacaacatgactaatgtcacattgtcactttccattaaaaaaggaaaaagacggtgtttcttctcagaagttgccctacgaattttagacatatagctttaattgattctataaatatgtctaaaatgtggctttattcttctcagtttggaatgatcaacatacaaaattgacatcaaggaggagagctgtaagtgttcacctttactcttgaagacagggtaaggtacaaaaaaggatcctggcctttctcatttcaaatgactgcatttcattccaatgagcagagattcttcataaacctgtgattaataatgtcttctacctaaaaagatgaattaatggcaaacaaaagtttacactatataaactaaatataatgcagagttgaaactaaagggctaaaatgacaagggctaaaaaggagaagatttgttacaaatttattttttatcacattgttccagcatttttaaagtcagttgtttcgtctttggcagcctctgcaacctttacagtgaatccccatcaatgttctttaaaaaaaaaaaaaaaaaaaactattaattccattaaaccatgttgcgtctggtgttgcaaatgacttttttttttactgcttttttttttctttttggaattaacaatgccagttttgtttgtttttttacaaagttaccgagatgacaatatccataattagctgactcttacgtacacactgtgacctgatcatcctgaaaaactttatgggggagaaaggtcagcagcttctctttctttttcttgaaaataataaaactgcgtattctactttatatttaaatgtaaggaagaaaatatacaagcccatatttacatcgtatttctattaagagcaacaatagttcatatgttcatgtttgctactatcacaattcaacatatgaacacagatcagctctataccatgaatactgctggaagtgatggtttaggattaccaactcactgctgccatgaccga

SEQ ID NO: 9366 - DNA, 1332 bp, Homo sapiens
ttgcattggtaacaaaatgatcaactttaatccaggtagaattcaagatggctgtacttcagttgtatgataaaattaatggttctcatgacttgtgtggcatctaaaaataatgtttttatagcatctctctgccactaaattgttgacttgaattttgggaaaaaaaaaagttgggtgtggatatgtatatgtgtgtgtgtatatatgtatttataaacaagtgtgtttgagtaacaagtgagtttcatagtcttcccctacgcatgtgtattccacacacaaatggctgagttatagtcataaaacaatttgcaataaaaaaaaaaccaaaacagattgtcagttaaccaggaaacagttaatgttttttaatgaatctggcattatagtgagcaaatgtcgtattaatttaggctaatttctaatactaccataatttgtgtctaaatttctgttggggtagaaattactaaaattgtggggagttttttctgatttttacattgctttaggaaacatttttactaattcagctgtcttaggtaaaatgaatagttttcttcctgtttttttatgtgtcattgttagtggtctcagaattctgatcagtaactttgtgtatgatgctgaattacaaaccgtttgaatgatccagttgaaaacgtatccctctactttcttcagttgtagaaaaggttaatttccctcagtgtcccacattataccaacctaagagaagaacaggtaatagggagaaataaacatacggtggtttcagtggttttggtcatgtgtccacaggagaaactaaccattcagttgtcttaattttagttcgttctaccctgtgaggagtttgtttccatcagttgttgactttccaaaatgttgcattaagtaatagttgtcactctgttggtctcatggtcaatatcaatcagactttcatgatctctactaattattagtagagtcctgtactatgtctgtaactactaagtttaaagaaaagcacatagtcacttcatctctttttttcttagcctacgctcactccccaacccatcccaacattgacatgctatctgtggacaaatagcagttctcagaatctagtcaagttgccatcatcccccttgccttggccgttcatagtaggtatgcatatgtttgtttctgtacagtactgtgtgtgtgtgtgtatatatatatacatctgtatgcacacatctttgataaaatagctatttgactagcagggttaaagtggcttttaattacttcgtgagtgttattggatacatcttaaaaaaaaaaaatctgaaccag

SEQ ID NO: 9367 - DNA, 969 bp, Homo sapiens
tcaagtatctacaaaatctttataaattcacatatttttctgaaagtgtacaagcagtctcaatttactgggacaaaaatgaacatttttgttctttagtaatgaagtcaatgtacaattcagagcaggtgtccatagaaacaactaggtttgaaaaaactgtaagacaattcacagttgaaatcaaacaaacactgtgaatgtgttaaatacttgccatataacaacactttaacattgatcttgctaaataaggctatgattcataagatgcatgtaatttccaaagctgtttaacattcttataaattaattcacaggattcaaatagttgctttttagcttcaactgggtattagcaaaaataatacaaaatgatccccgtgcaagcacaaatttaccttccttcctaaataaaacatgacagattatattacaacttgatagcctctcttttaaaaagtctgtgacattattaaagaggtgacggaatgcttgttttgcaaaccccaacacatctttcactgtggaccattgctattacttcattaacacagttgctcagatctcaaggtactcacggtctgaaatatattttacaattagaaggtatgcacaggtcaaaaagagcaatccaagggttagaagtcccccagtgccccacactggctcattgccgaggtgacagggtgcaggctgtgtgagccaggcacacttacccctcaactgggcttctgtagctttacaatttggataactagttagcggacagtagttgggacatgtcacatacagatttgagtcctccaataatgtacactttgccaggttttatccctttgttaaagcaaatagaacagagagggaatatagctgccagtaaaaatcatttcccccctcttaatctcccatccttcatctccatgaaaccgactattaagataacctttctctctctgtgcactagtg

SEQ ID NO: 9368 - DNA, 1560 bp, Homo sapiens
  misc_feature (1)...(1560): n = a,t,c or g
tggagggcaaggccaccagacctggcttcgcgctgtccactgcctctctcctcccctccctgccgcagacacgcaggacccgctcgccctcctgcttacccgtccccacggtgactgagctgcgagagcctgcgctgggctcactccctgggcctccgcccctgagctgtcccgtgtcagtccctggcccggagccaggctctctgtgctacttacatctccctcccttggctgaggtcccccgccacagcctggacccttccctcagaagcctggccgatgggtgcttttggggagcctctcagcctctggcaggggaggaggactgacacggaggcacacaggcctctcactgccgaggccagccttccttcctgctctgctctctcagtgccatggagaggcaggaagaggggcctgagggcggaaggggtttggggctcccatttcgccggccagtccctcctcctcagcctggcagtggcgctgggctccttcccctgggctgtactgagccgagcccaggggtttgcagagggtgggggtccatctctccagcttggctgcagacctcctttaccctgactcacaagccccactgatgctctgggccatgcccggctgacggctgctgtggatgccgcgagggacggacacacgtccggggncacccacgaggagggcccccagcctgggagactggccctgcggcctccacgtcaaactctcttcccaaagccctaacagaccagtgggccgaggtgtggctcttatttgcatccatccctgaagatgtgtggctgttgctgtcacctggagtccttttggggccaagatgtgtgttgcaacccggggtcgtggccattcactcccaggcaggggtgagggtggcctggcccaggaggccaggaaggagggccctgtctgcctccacctctgggtgcaccccctgcctaccaccctcccttctagagagcacatcgcctgaccggggagaagtggggccgtggttcgagggagggctggccaggggtgggacccttatgagactcagtctgtgagtaaaactgggggctcaaatgcccaggatgaggggatcagtgactgtctaggaggatcccttgccttgtaggtgccccaagaccgcagggtagaaatcagccgggatgcctgcatcccacccccggccccagggcccaccacataaaatctgggagcccagagctgctgaggtgtggtcagctcccctaaaatgggcacggcccagcctgtcccatgaggaataaaggcccctggcccccttgagagagggcttgttggtgagggctgactccttnggggcccccaaggctcccctcctgtggggaggccaccttttaaggcaccactagcagtcaggatatggtggcatcagccctggggcctcctgggtggcaggggggcagcagctctcctccccactcacaggccctgcagtgctcatttggaattcctcccaagacccctggccacccagaccccccattcttcctaacactggcaataaaccctcaactgtga

SEQ ID NO: 9369 - DNA, 397 bp, Homo sapiens
  misc_feature (1)...(397): n = a,t,c or g
gcttgactgccgaattcaatggcctgaccctgaccggtcgaccccgtctttcccgacgtcacagcaccgaagccctgaggacccgcccccatgggcggagaaagtgactagcgggggtcctctctctcgccgaaacacagcaccagaagctcaggagtctggtcccccttcagggctgaggcagaaactgagccgcatggagccagtggagctggacacccctgggacacctttgccctgactcgcctgagtccagccgcctgtccctggagcgccgccgatacagcgcctccccgttgaccctccctccagccggctcggctccctctccgcgccagtcccaggagagtctgccaggggattaattcttccgcttaagngaaagggagggcggagt

SEQ ID NO: 9370 - DNA, 803 bp, Homo sapiens
gagtatttccagccataacaacatttattagttctctggtaaacattttaacatttctgaagaaacagcaaagtgggcatgtatctttaatgtggagcactggggacatatctggagacctacaactctgaggaacagagacaagtgatttgggggatattctcgattaacaagccaaagaatcaggaaaatgggctggaagcgggtagccacacacctctctccctgtgtggggcctctaatatgtgactgatgccttccttttctgtgcctttgaaatctcatgcaagattggctataggtgaattgtattacggaaccatccaagttcttctagattttattgtcctatcgcaagtctctcttctcaattcaaaaagcagttatccagaggttctttcaccactctcttttcttgtgtttcaaaggaagtgggacaacagaaagcttctccccgttgcttccactaaaaggatttctcatctattaatggtatgagttctttcatgttctcgacatgaactggcacgaataaaggctttgccacattgcttgcattgatagggtttctctccagtgtgagtcctttcatgatatcgaatgtaattggaaataaaggccttaccacagtgcttacattcatagggtttctctccagtgtgagtcctttcatgatatcgaatggaactggaacaagtgaagctttgccacataccttacactcatatggcttatctccagtgtgtgtcctttcatgtatatgcaaggaagagaaatacctgaatgcttttccacattgctta

SEQ ID NO: 9371 - DNA, 304 bp, Homo sapiens
gacgagcccagcactggaagtcgccggtgtttccattcggtgatcatcactgaacacagaggactcaccatggagtttgggctgagctgggttttcctcgttgctcttttaagaggtgtccagtgtcaggtgcagctggtggagtctgggggaggcgtggtccagcctgggaggtccctgagactctcctgtgcagcctctggattcaccttcagtgggtatggcaggcactgggtccgccaggctccaggcaaggggctggagtgggtggctgttatctggtatgatggaagtaatcaatact

SEQ ID NO: 9372 - DNA, 1261 bp, Homo sapiens
ctgagccctacaacacccccagcggccgccggctcccccacgaggtgtgaatgacagaggtggtgccatccagcgcgctcagcgaggtcagcctgcgcctcctctgccacgatgacatagacactgtgaagcacctgtttggcgactggttccccatcgagtacccagactcatggtattcgtgatatcacatccaacaagaagttcttttcccttgctgcaacctacagaggtgcccattgtgggaatgatagtagctgaaattaagaacaggaccaaaatacatatagaggatggagatattctagcatccaacttctctgttgacacacaagtcgcgtacatcctaagtctgggcgtcgtgaaagagttcaggaagcacggcataggttccctcttacttgaaagtttaaaggatcacatatcaaccaccgcccaggaccactgcaaagccatttacctgcatgtcctcaccaccaacaacacagcaataaacttctatgaaaacagagacttcaagcagcaccactatctcccctattactactccattcgaggggtcctcaaagatggcttcacctatgtcctctacatcaacggcggccaccctccctggacgattttggactacatccagcacctgggctctgcactagccagcctgagcccctgctccattccgcacagagtctaccgccaggcccacagcctgctctgcagcttcctgccatggtcgggcatctcttccaagagtggcatcgagtacagccggaccatgtgatgtcggctgggcagccgccaccaggccccacccttcagccgcccgcagagcccgccttcctgtccatctgaccccttctgttttctgcaaggagctgccagccatctaactgggctcgtcggcctgccccagctgcaggcccggtgctaacacgggctcgggaacagaacatcgtgggcatgcgcagacatgccatccgtggcaggctcttcagctcccctccctgcttctggaaacctctgcctgctgccctggccctgcccccctgcgcatgaccgtccccagggctgacccagtgtggctgcattcactgggaggggcctgccctcactgggcctctcccactccgctgcctgttcttgcagctccttcctggaaagctggaggggactttctcctgcaagggaggaacgcaagtattatggacacacttgaccgtaaaggcacaggagcctcggaacaagggggcgcaataaaggg

SEQ ID NO: 9373 - DNA, 270 bp, Homo sapiens
ttgacatccagtaatgctttaattaactgcagtattttgtgctccaacatgcaggcagaaatcacttccagatggagaaaatgaaagctatttacacaaagaagcaatccctttattttaaggaaatttatatctcccaaaggtgtagaacttcgagggtccaagaggctattctgatgaatactaaaacaggactgggaatttttatttaatatataaaatgtcatcgtacccttcatgtaggccagcatttcaggtgtccagtcgacg

SEQ ID NO: 9374 - DNA, 838 bp, Homo sapiens
ttttttttttttttttttcgagggggtaaaaagctctttatttgaagctccagggtggggcagggcactggcctctcaccagaggtcctcacagttcagtttccctacagctcagtgtcaggccccagccacacagtccagctgtgctccgattggcaggcgggtcagacctgcaggttgacaaaaggtgcgaagcccgccatatcctgcagcagcaccagggcctggtgcagcggcggctccacgtcgatgtccacgccgcgcttccgcaagcggctcaggctggactccgccacatggtggcagtgccgcacccgcagcgaacgcagcacggggcagtactcggccaatgtcctgacaccgtcgcttccgacgcggaggcagccggtgaggtcaaggtggtggagttctgggcagttccgagccaactcttgaaccgcggcgtcccccacgttggcgttgacggccagagagaggctgcggagaccagcgccgcgcctctgcgccaggtacacgatggcctcgtccttgagctggcggcaggcggtgagatccagctcctccagggccgggcagcgatcagcgaggccgcgcagcgccagcccgtccacccagtcacagtgcgcgagcgacaggcgctgcaggcgtgggcagccctcggccaaagccccaagcgcccggcgactcagttgcccgcagccgcccaacgccacactccgcagctgcggattccgcgccagcaccggcaccaggtcctcgtctgacagccattcgtgacacggcgccagtgccagctcctgcagcccctcggcatcccgcagcagccgggccaatgcgg

SEQ ID NO: 9375 - DNA, 509 bp, Homo sapiens
tcacccccaaacactgcactttgaatgctgcatgaatctcgtggggggtccctgcccttgcgacccccagatacctccacttgctaccgagtcaacgtgtgtgccatcttccctggtccaggcaccactcagctctggctcttcctgggaggtcagccgaggctccccccatgctcctggtttctgcttaggaggtggggacttgggctgggatggggacggcatacccctcccaggcctctccctctgcctttctgttcttaatcagggttggatccaagaaggtgtccagtgcttgggcctggggtggggggaaggtgttagaggactccaggagctcctgcacccctccccaaatgtccatctttctcagacgggggctctgtctgggggagcacccacaggctgcctttggggtcccagagcctgctctgtgcactgaccccagttcctccatcctgtggccagcctagggctcatggcatgggcccccactgggggagggaggc

SEQ ID NO: 9376 - DNA, 407 bp, Homo sapiens
  misc_feature (1)...(407): n = a,t,c or g
ccaaagtggattttgtgcactcaaaggggttactttaatacttcgataataaaatcagattctgctggcaaacaacttccttacgccctacacattttcagttaggagctgagatttctggcattgctacagtctgctcaaccacaagtaataacgcttccagctagaggagatcacggaagtgcctcccctcctgcccataccttgagctcgtctgcattgtagaagtccacacgcacagcggtcaccatccaggtctggaagagcgtggccaggatctgctccgcaatggagtcagcaataaggtggaagtgcagagggttccgtctatgggaacaggacggatttgaccagggtgacgacatcccggctgggcattgttttccgtcgcagacatnagcaactgg

SEQ ID NO: 9377 - DNA, 695 bp, Homo sapiens
ctgcctgtctgactacacgctggagtactcggtggctttgctcatgaacctctgcctccgcagcacagggaagaacatgtgtgccaaggtggcaggcctcgtgctcaaagtcctttcggatcttcttggccatgaaaaccatgagatacagccgtatgtgaatggagctctgtacagcatcctttctgttccatccattcgtgaggaagcaagagcaatgggaatggaagacatcctacgctgcttcatcaaagaaggcaatgctgaaatgatccgccagatagaattcatcatcaagcagctaaattccgaagagctaccagatggtgttcttgaatctgatgatgatgaagatgaagatgatgaagaggaccatgacatcatggaagccgatctggacaaagacgaactgatccagccccagccttgggagaactctcaggagagaagcttctgaccacagagtacctggggatcatgaccaacacggggaagacaaggcggaaggggctggctaatgtgcagtggagcggggatgagcccctgcaaaggcccgtcacccccggcggccacagaaacgggtacccagtgtaagtcagggctaaaggaagcgggaattgactttcttaagctttgttttgattacagtgtaagatgtatgtatttttaaaattcaaaataaagcattcattttg

SEQ ID NO: 9378 - DNA, 193 bp, Homo sapiens
ataataataagaatgaaacccccaaaccacagtgtgagtctcaggttagcatttgaaaacatctccagagacattgttattcctcaggaggtttccctgactccttaaatgtggctgatgtttcatggttaatttatttattttaataaggtatgagcaatcgaaggggctgatcatctgaggttttgtacct

SEQ ID NO: 9379 - DNA, 178 bp, Homo sapiens
  misc_feature (1)...(178): n = a,t,c or g
atatcacctcaaaccttatgatgatcttacagttaaagatgatatattcttgcaaagtgtctgttcagatcttttgctcccctttttattggattattccttttcttactgttttatatgttttttaatatattggatacaaatccttggncagaatccattattggaaaatagattt

SEQ ID NO: 9380 - DNA, 713 bp, Homo sapiens
caagcagggacagagctgtttccaattcagtttccattgcagatgggcagattttccctgccgccttttcacggtgccaaaggtgctgagctacctgccattgtggaaaggccccggttttgtttccgtactttgtatatgctcaaaaccaagcctcacattgcgcctagaggaatctccctccaactcttgagttcttggaaatgtcctatctgtgacctcagcaatgcagttaaaagtacattcattataatttatctggcatctgggtgttttgtggtcacgaaaagattttcagcctgccatttctatggcacattccgtttccaccaacatagtgctcttgtggagggctgacagtcccatgactgagatcttgtcattgttctaggtgggcagattgcagtgcagcccagaaaggtttgcagttggcaccacctgcaccaaagatcatacagccaacccctacgccataggctagcccttctcctcgtctccagatctagtaaccagtccctctccccttgcattctaggggattgtgaagctagtggtcccaacgagcctcttgggcaaggctgttcaggagaggcgggtctcagggagagagcacagatgggtatctgagtgacagaagtgaggcctcagctcaccagctggtaaaccggactggcagcctgaaattccacacacaggtgtgcctgcaccagcct

SEQ ID NO: 9381 - DNA, 169 bp, Homo sapiens
gggaaatctgggcgtgctgtagctcagggtgactcccagctccgtcactagcagggcgacccccttccttctggagccttagctctgaaagcccccagtgggggtgccctttcagatgccccctttccatttcaaaggctctgactcttgatctttgaaaccggacgcg

SEQ ID NO: 9382 - DNA, 1727 bp, Homo sapiens
agcagatcatcgagattttaaaagggatcgtgagacacatagagatcgagaccgggatcgtggtgttattgactatgaccgggatcgatttgacagagaacgccgaccccgagatgatagagctcagtcatatcgagacaaaaaagaccattcctcatccagaagagggggttttgataggccatcctatgaccggaagtctgaccgaccagtctatgaaggaccatccatgtttggaggagaacgaaggacttatcctgaggagcgaatgcctctgccagctccttcactgagccaccagccacctccagctccacgagtcgagaagaagcctgaatcaaagaatgtggacgatattttgaaaccaccgggccgggagagcagacctgagagaattgttgttataatgagaggattacctggcagtggaaagacacatgttgcaaaacttattcgagataaggaggtagaatttggaggacctgcacccagagttctaagcctggatgattacttcatcactgaagtggaaaaagaagaaaaagatccagattctggaaagaaagtgaaaaagaaggtaatggaatatgaatatgaagctgagatggaggagacttaccgcaccagcatgttcaaaactttcaaaaagactctggatgatggcttttttcccttcatcatcctggatgccatcaatgacagagttaggcattttgaccagttttggagtgcagcaaaaaccaagggatttgaggtatatttggctgaaatgagtgcagataaccagacttgtggcaagagaaatattcatggaagaaagcttaaagaaataaataagatggctgatcactgggaaactgcacctcgtcacatgatgcgtctagatattcgttctttgctgcaagatgctgctattgaagaggtagagatggaagattttgatgcaaatatcgaagaacagaaagaagaaaagaaagatgcagaggaagaggaaagcgaactgggttacattccgaaaagcaaatgggagatggacacatctgaggcaaagctagacaagttggatggcttgaggactggtactaaaaggaaacgtgactgggaggccattgccagcagaatggaggattatcttcagctccccgatgattatgatactcgtgcttctgagcctgggaagaagagggtcagatgggcagacctggaagagaagaaggatgcagataggaaaagggccataggttttgtggtcggacagactgattgggagaagatcacagatgaaagtggtcacctggctgaaaaagccctcaatcgaaccaaatatatatgagacttagtttttgaacggagtcattattctcttccaggtctgcccatctgaccctcttcttcccaggctcagaagcacgagtatcataatcatcggggagctgaagataatcctccattctgctggcaatggcctcccagtcacgtttccttttagtaccagtcctcaagccatccaacttgtctagctttgcctcagatgtgtccatctcccatttgcttttcggaatgtaaccctaaatcgtacacagagagaagctcgaagggttagaaagagacacatacatgcatatcacgtttgaactggaaaagcattaaaactgggaatggattcagtttccactgactagctgtaaatacatccttaggggaaacacaatctcagtcgacgcggc

SEQ ID NO: 9383 - DNA, 1008 bp, Homo sapiens
tttttggaataacaaaataaaagtttattttattagaattaggaatgttctttccctctgggcaacctgaacagtccagttacaatgaaatctaagaacagttatttccacagcatagggtgctctatgcacaaaattacagggttaggagcatttaatcaatttaccattctgattgtctcaccaacccaccccatcccatcccccaagtgctctattaccggggtttgtagctaaaataatttgttacattaactccttttccctcttctactaaatttcagttcctaatcatggttgaaccactttattacacagcagattcaaccatttcaaatgaagtcagccagtcttggatctgttgtatatgggtgtatgtatacacgtgtatctaacatatttatttaaacacacataaaacacatacaatctgggttgtggaaaattacagataatttagtctgatattatatgctactcaattttaccactgtggtttgtgtcctgagctttggatcaaaattttattttaaatcactgaaagtccatctgctgctgaatgaattgttcaaatgaagcatgcacttttcaaaagacaatgaaactgacctcaagacatggagaccttggtgcttactgtgaatagatccctcagataagacttctgtaggtgaaacagggaagctgtcatggcttgcctatcccagctgggggcactgaatctactaataacacaagcaattcactctgggaattctgtcaaatatggtggtatctgttaaaagcttggaagtagaaaagggccagttcatcttgatcatacaaattagggaatgcacccacaactgcaataccctcaggcagtatgccaacattgaaatagaaagcatctctaaaaagcactgttcctccatgggtgaagactggtattaggaagtgcacacacaatttttgggtatttgttgcaacaggaacacgtggatttatgacactcacctcgttccgaat

SEQ ID NO: 9384 - DNA, 502 bp, Homo sapiens
ttttttttcattatttgattacagatacttatcagcttaaagactttatatgctttagcattaattgcacaacttacatatcagggtttctgattgaaaggaagagaatattcctttcttttagtgattgcttaatattaattcataataagtgcaccatctcttgctccttataaatgtgtttagaagaaggaaattgagtgttgggaattaagcaaccaggagacatttttatatactcctacagtgggggaagacttcctattttctttcccaaggatggatacatttctactttgaatctgactccacttgtagacagacaggcagagtccatcagaaagccactttggtctgaaggcttagtgagaggtttgcattaatgatgttcttcgtgatgttatggggtgctggaggtgacaactgaaaaggaaattggctcactgcactatgtatcaacgcctcaagtatttaccatgatctccccaaatgctggcagatt

SEQ ID NO: 9385 - DNA, 803 bp, Homo sapiens
cagcctcttgggactaacatctttctggatgttgtttgctgccagttcttgagtattgtttcttatttggcacagaggagaattctctcaacaaacgttttcgactgtttattgagtcccttaaaaaactgtccatttaataaacatttgtgatctgtgatttgcattgaacgagatgctggaagtatgaggataaataggaaatgatcacctttctcaaggagctctcctgcagttttcacttcaataacttggacacgcctgaaagggttgtcccacacgaaaagagagaaaaggataatgaggttcttttgatgctgtagtttttcctgggaagactaggaaggactctgaatttcaaaagaggtgatttctcgcatgagcatctcttccatcctccctccctccacaagctacagtgatgcatgtagcagacacggcacctacagagtacgtggtccaagccaataaagctcaacaaaacccaagcaaagatggagcttatggcccttaccctttggaaatatccccagattggtttagattgaacctgaatttgaataaagagaagcaaaatgtagggggaagaaggattataaaatattgggattgatattggtatcagtgatttgaagttgatttccaagctattctgttcagtcagaggctttcttagcctttaacgggagaagagaaatacggtcatgcgctgtataacaaggtttccatcaacaccgctctcacgtacaatcccctgagactacagtggggctgagaaattcctatcacctggtgacatcttc

SEQ ID NO: 9386 - DNA, 614 bp, Homo sapiens
tttttgatcaggaaggaaatttattgcacaagaatgggaagaaattatcaagttaactgatgtgtaagggaggtgtacctggaagatactctttaataggcaatgcatgtgtggggatatttttaagttttatcggtacaaatgaaatatattgaacacaaatcgagcaaatatgacttggtcgttaacatccctctgattaaacaggagtgctgctatgagaacgggctgtgccattctgcaggcacacgagagtcgctgggttttagggtagtctctgtggagaatggtgactggaccacgtgggagaggggcttgaggcaggaaggtgagcagactccagagttcaagagatgtttgcatacagcgccctcttgtttccccttacagtgtggctgtggccagtattgagaaccaagtgttcaggaactcatgctgggcctgccggtcccacctgacctgagagtggcggggcactcagcgtttcagcaagctgcttcctcaacgatgcttttgatctcttattgttgctgggggaggctggagttccaccccaaatcaagtgggaagtgtgtcagctgctacgtctctcacctaggagctttagaggctca

SEQ ID NO: 9387 - DNA, 656 bp, Homo sapiens
caccatcaactcccacaccactgctggggaggtggtggagaagctgatccgaggcctggccatggaggacagcaggaacatgtttgctttgtttgaatacaacggccacgtcgacaaagccattgaaagtcgaaccgtcgtagctgatgtcttagccaagtttgaaaagctggctgccacatccgaggttggggacctgccatggaaattctacttcaaactttactgcttcctggacacagacaacgtgccaaaagacagtgtggagtttgcatttatgtttgaacaggcccacgaagcggttatccatggccaccatccagccccggaagaaaacctccaggttcttgctgccctgcgactccagtatctgcagggggattatactctgcacgctgccatcccacctctcgaagaggtttattccctgcagagactcaaggcccgcatcagccagtcaaccaaaaccttcaccccttgtgaacggctggagaagaggcggacgagcttcctagaggggaccctgaggcggacttcccggacaggatccgtggtccggcagaaggtcgaggaggagcagatgctggacatgtggattaaggaagaagtctcctctgctcgagccagtatcattgacaagtggaggaaatttcagg

SEQ ID NO: 9388 - DNA, 1752 bp, Homo sapiens
  misc_feature (1)...(1752): n = a,t,c or g
ctttccagcctcagtcggacgggcgcggagactatctggaaggaacgccgcgatggctgcgcaggggagagccccaggtcagttcaaacttgtattggttggtgatggtggtactggaaaaacgaccttcgtgaaacgtcatttgactggtgaatttgagaagaagtatgtagcccacctcgggtgttgaggttcatcccctaggtgttccacaccaacagaggacctattaagttcaatgtatgggacacagccggccaggagaaattcggtggactgagagatggctattatatccaagcccagtgtgccatcataatgtttgatgtaacatcgagagttacttacaagaatgtgcctaactggcatagagatctggtacngagtgtgtggaaacatccccattgtgttgtgtggccaacaaagttggatattaaggacaggaaaagtgaaggcgaaatccattgtcttccaccgaaagaagaatcttcagtactacgacatttctgccaaaagtaactacaactttgaaaagcccttcctctggcttggntaggaagctcattggagaccctaacttggaatttgttggcccatgccctggtctgcgcccccaccagaagttgtcatggacccaggctttggccagcacagtatgagcacgacttagaggttgctcagacaactgctctcccggatgaggatgatgacctgtgagaatgaagcctgggagccccagccgtcagaagtctaagtttttaataggcagctgtcctggtgaatgtcagccggtgccagcgttgttgttgccaacctcaattattatcatagcctaagcggaacatgtgcttcatctgtgggatgctgaaggagatgagtgggccttcggagtgaatgtggcagtttaaaaaataacttcattgtttggacctgcatatttagctgttttggaacgcagttgattccttgagtttcatatataagactgctgcagtcacatcacaatattcagtggtgaaatcttgtttgttactgtcattcccattccttttcgtttagaatcagaataaagttgtatttcaaatatctaagcaagtgaactcatcccttgtttataaatagcatttggaaaccactaaagtagggaagttttatgccatgttaatatttgaattgccttgcttttatcacttaatttgaaatctattggggttaatttctccctatgtttatttttgtacatttgagccatgtcacacaaactgatgatgacaggtcagcagtattctatttggttagaagggttacatggtgtaaatattagtgcagttaagctaaagcagtgtttgctccaccttcatattggctaggtagggtcacctagggaagcacttgctcaaaatctgtgacctgtcagaataaaaatgtggtttgtacatatcaaatagatattttaagggtaatattttcttttatggcaaaagtaatcatgttttaatgtagaacctcaaacaggatggaacatcagtggatggcaggaggttgggaattcttgctgttaaaaataattacaaattttgcacttttttgtttgaatgttagatgcttagtgtgaagttgatacgcaaggaaaatggtccatgtttacccacagttttcaggtactcctagactttaaagatgtcttgaacatttaagttcttcagcagttcacactacaccgtttttttgtttttttttcccccccgggag

SEQ ID NO: 9389 - DNA, 383 bp, Homo sapiens
ctcaaccagtaacaccaggatcctttgagatcctctaaagtgggccaaagtggtgcccctggaggagccctcctgtcaccgtggtaaccctctcacacctctcctgctgggctttcccgggataccacccaggggcctggagcggctgcatgtgtgcatggcggcctcctgaggacccagccacacaccactggtgttgcctcggtcctgcccacgcatctcacagcaccaggccctgtggggcccccactgattcctccacagcctgcagcctggcaccgtgactctgtgcctctcaccctccatcttcagtactcctggcctgtgacttcagggctgggacttggtggtgctttgccattggtggcaccctctggggaaag

SEQ ID NO: 9390 - DNA, 1206 bp, Homo sapiens
cactaaaatgcattcaaaataaataaattatataattatcactacacagattcaccatacaactcatttctacttaagagattcatatagacacaatgacaaaatagattgtgtccacagaaagatcgagagtgaaatttccagaaactatcttagatgaaataattgaagaattcagttaaatatttattgaacaaatgcagagtaaatgaactaagggctgttataaccttaagttacaacaaacaacttcaaatattcagagggctgtcacacagagaatgaaagacttgctcagtatttctccaaagggcagaacttgagccaagcgataaatataagcaaccaatgggctgcaggatagttgtacaaagtgtatcatgtatcttcatagcttctttgcccatataatgcattccacacttaagtttctccttctaaaaggcgacagcacaagttaatatgtctcataaatgtcttaaataagttgcattttcatggcaagccctccactgccagcaatggatatactcacactattggaaaaaatctaaagttaacaaactggtttagtatggaaatggtctatttgttcctcagctatgtttctgtatcttacattagtggctctcaggaggtggggggtgaaaagagagcatgttctccaaagagggtgaatcataatccccagtgattcagatactgtgcctggggacaatctttcttcaagtccaaatgaatcattataattatcaaccaatggtacatataagagtacggcatgtgctgggacagagaaaagacagttgacaaacactattctacatgaaacaggaaatcttattttatgagtcactagaaaactaactgtaatactgacaggctccatccagattattaaatactacaaaatgagaactgtttcaacaactattcagcataacgtttatggacaaaatgtatatagtatatcttatattctatatgtattttatcacatagtaaggaatgctgaggtgcttaagccatccaataaattgaaaatacaaactttacatttctacgtttgtcagtatacaggattctgaagatgaatcttgaactcagagtgataaatcagttttcaaggaaagccacataatccgtcagtctggctaactgctgttcattgggtattgggggaactggagcaggctctgataaggg

SEQ ID NO: 9391 - DNA, 564 bp, Homo sapiens
ttttttttttttttttcaaaagaaaaaaaaacttttattttttctattgcataaataatggtaaattagactctttttatacagattatatatttacagacaagttcggttaaagaaaacatctggtaaatatggcagttttcctttatacactaagataacatattaataatatatacttcatttgatcggtaagttgcatgctaagttaatttatattaatatgtacattttatataaagattcttttttgactagtctgctgactttctcatcacttaatagcagaaatcatcaactaatactgaatgagagaaaatgggatgctaatgaggtaaatggggaaggatgggtgattgatgagttccgtcttagtggcttattctggatatgaggagctgccaagctcccaatcgtcctggccatgatcaatccccagctgtgcttctatttacacccaacatattgggggcaatatacaaaatacagtcatttactactgtgctttgagagacaactcacgtcccaagtctaatgaccgctacgatcacagcgacccctcct

SEQ ID NO: 9392 - DNA, 844 bp, Homo sapiens
  misc_feature (1)...(844): n = a,t,c or g
gaagaagtcagtaacactgtttccatttgaaaaatcttggtactgctaaattatttgatatgaactcaatccagcatttgtagcaggttttgaatgggtgggactgggtggggaacagcattggacattaatagggcacttttcagacccattttttaaagtgctagaaaatgctttttttaaaaaaaaaatacaagttttaaaatgaccacttactctttaattatttactaattgctagtgtactcagtgtggaaaagactacagattacacactcttttcattcacacttgtacatatagacagcaatgttattaggagcattaaattaaaaaactgaacagcctaatttaaatgtggcttgggcctggtagaagtttgaccaaatggaatggaggctgtgagcaatgtgaggattctatttatttatttacgtttgataaaacttactggaactagtactaccatgcgtattccctgtccaaagcatcactgctttggtatagtataagttcatgaaattctggtgggtagaaagaaatttttatttctatcagcagtactaaaatgtatcagccaaccagagaacatcagtgacctttaacttctgcagagtttgccccagaattcagagttctatttagagggaagttaaaacaacaacaaaaaacaaccatttggaaaatttttgttcacccagcaaaactttttcactaattaggtgatatggaaatgtggatttttgtggttgttaaacttcagctttggggaaactcagtctcctttcattatccatcctttcccntttgagggggttgggggcgnctaatttgggttaagggc

SEQ ID NO: 9393 - DNA, 1910 bp, Homo sapiens
  misc_feature (1)...(1910): n = a,t,c or g
aatgcagttgctgccattcttgcaattatctctgtggtggccgtgtttgagaaccacaatgttaacaatatagccaatatgtacagtctgcacagctgggttggactgatagctgtcatatgctatttgttacagcttctttcaggtttttcagtctttctgcttccatgggctccgctttctctccgagcatttctcatgcccatacatgtttattctgggaattgtcatctttggaacagtgattgcaacagcacttatgggattgacagagaaactgattttttccctgagagatcctgcatacagtacattcccgccagaaggtgttttcgtaaatacgcttggccttctgatcctggtgttcggggccctcattttttggatagtcaccagaccgcaatggaaacgtcctaaggagccaaattctaccattcttcatccaaatggaggcactgaacagggagcaagaggttccatgccagcctactctggcaacaacatggacaaatcagattcagagttaaacagtgaagtagcagcaaggaaaagaaacttagctctggatgaggctgggcagagatctaccatgtaaaatgttgtagagatagagccatataacgtcacgtttcaaaactagctctacagttttgcttctcctattagccatatgataattgggctatgtagtatcaatatttactttaatcacaaaggatggtttcttgaaataatttgtattgattgaggcctatgaactgacctgaattggaaaggatgtgattaatataaataatagcagatataaattgtggttatgttacctttatcttgttgaggaccacaacattagcacggtgccttgtgcagaatagatactcaatatgtgaatatgtgtctactagtagttaattggataaactggcagcatccctggcctgttgtcatgcagtcatttcctgttaattctgggagacaatgatttcacaactagagggaagcagtcctaaaagtttaaaatccgataaggaatatctgggacagggtttagatcatgactctacacagataccatgatgagagtatattaaagaaatttaggaaagcacctggttcctttctccccatgcctgccttctgctccctccccagctggtttgggctcaaattgtccctggagactagggtttatgttagggtattgatagattagagcaggtggttgaagagatcttctctggtcagacttggaagaatttccaaaactgaagttagccccaagacttccctagggttgatgtactttatgatccagatgctaaacttcttagaatgaaaatatgcttcaacacttaagtagcatacactgccctacaaacctcagagagcacttttccccaagttcttgtttttatttttgaaagtactcacacagcacttactatgctccaaacactcctctaagcactttacacatattagctcattcagtccccagacagacgggatgaagtaggtattgttactggttcccattttacaggtgagagatttgaagcctgggggaggcttagtaacttcaccccaaaggtcacacggctcatacatggtgggactgagactcagatgcaggcagtctggcacctcagtctggattctaaccatttcactaagctatttttgtcttgtactactttgacccacccctgaataaacctcaattgctggagtggggtgtagttattaaagggatgctttttaccttttgctggttnctgtggcaggattccccagataaccaaggaaaaggggccacccatacctggaaattagccatagggcccctactactgccaacaagccatggcctaccttgacacttgtttgatcttaaaattgtgtcttggtaa

SEQ ID NO: 9394 - DNA, 502 bp, Homo sapiens
aaaagaattaccataagttttatttttgcttagttttattaaaaaaataaatatgtcataaagctttctttttccttagggagaaaaaaaggaacaagtctcataaaaccaaataagcaatggtaaggtgtcttaacttgaaaaagattaggagtcactggtttacaagttataattgaatgaaagaactgtaacagccacagttggccatttcatgccaatggcagcaaacaacaggattaactagggcaaaataaataagtgtgtggaagccctgataagtgcttaataaacagactgattcactgagacatcagtacagatacatcttgcttaaacaacacagaagttcctgaaaagttttgtgtaaatgatataaccacaaacattaccaggagagcttggtaactgaaagaattccatggcgaattcttttgtgaacaactactttcacttttgtaaatccaggtatttgctttttataaggagtttacctagttgc

SEQ ID NO: 9395 - DNA, 760 bp, Homo sapiens
  misc_feature (1)...(760): n = a,t,c or g
cacgagcagacggggaggctgaagggctgggagctgggaggagacgctgcttaccgatcccggggcttttccagcccacgggcgcctgacgcaggctggggcaagtggtgcgtggggcctggtccccaaggggcggctgagaggccgccactgagcatctctatctgtcattcctttagctatttagggaccaaaggaccaaactttttattgcagatgtgtagctctatgtcaaatagagggggaatggaggaccccctccttcctgcctcatggctgttcttgaaacagcttagagcgattctatgaaaaaatgtaataaaaaattaaaaaaanaacaaaaaacaaaaaaaacaacaaaaaaaggaaaaataacgcttcaatgcttttaaaacagcaagataatagttctttgatactttgagaggcgctttgatgaccctcatccaagtctatgacactttcctatggttttctgtattctatgtctggatggagctgttaaaagatgaacaaattggtggatatttggggaaagcaacacaaatcttaaaactcacccgtgaagtgtgagaaaacaaggaggggaacaaatgggacttaccaagcaaggtcattgttgtgaaaagtctgtaaatgcttctaactcttccccctcttaaaatcataatagttgtacagaattttaaaaaggaaaagtttaaaatacctatataatagaagaaaaattagaggaaagcaaaaaataaaaaaaaaaaaa

SEQ ID NO: 9396 - DNA, 384 bp, Homo sapiens
gtctggcgatcaaaagtgtcttaagtcagtagaatcctgagggtggactagggtgaagtgaactgaaacagactcgacacaggtcattttgtgttagcactgagactcctctccctgcctgaggccacctcccactgcctccctaccagcaaggttactgcagaatcttggagaagataaaggacctggccctggaagcctgcttccctttcccaaccttggaagcaaattctgtcccatcagagcccccctccctagtggctcccaccagagacctccctagtggctgctgtaagggttggcaagcaggcaaaaggcgggggagggagggcagagggtagtgttagaggaaccccataaggcccctggtgggggtggggaagc

SEQ ID NO: 9397 - DNA, 381 bp, Homo sapiens
tgcatttttactgtgcttatttaaaataatggatataatttatattaaggtccaaattattttattcacaggataatcatggtctctgataaaagatgcccacatttctgtgtactcacagttgttgtatatttttcaatttcaattttgaaagtaaactcaacacattgttttcccattttacctccactacctactcgccagacaaaaatatagatttctctaaaaacacatacaaagaaaacgtctttccttaaaacatgatcttattgacatgaaggtagtttgagcaagggtatgtaataaaataaatggctctcaacctgcatcaatttttatactatagttaaaaaatttatagaggacaacctatgtgttatg

SEQ ID NO: 9398 - DNA, 365 bp, Homo sapiens
gcgctgggtgttggaggtggtggaggagcgcaccacgctgaggcggtcctcgctccaagcccgcctccccaaagctctccccggagccccagacaccctccctagccccagcgaagtgcagtgcacccagcagtgcagtgaccccagtcccacccgcatccctcttgggctcgggcaccaagcctcaagtggggctgacctcccggtgccctgctgaagctgtgcccccagcaggcctgaccaaaaaaggagtgtccagtcccgcacccccgggaccatagccaagggggtcatcggccccgcgctgtacagcctccgtatacatatgtacacatataaataaagtgcgtccgtgctgcgaaaaa

SEQ ID NO: 9399 - DNA, 207 bp, Homo sapiens
atctttcgtcaagccatcttatgtttctgatgcatttcaaagtaaatagctgacatcagtaagacatctacctaggatattttattctgttttgttaaaatttacatacaaaaacatgcataatcttaagggtaccattccatgtattttgaaaagtgtacacatctgtgtaactaaacccccaataaaattgccgatcacctcaga

SEQ ID NO: 9400 - DNA, 602 bp, Homo sapiens
attagccgctaggaccttaggcgagaaaatgtggacgcatccccgccggccctgaggccagagaatcccccctcaactggttgcacctcatgtccctcccgcacacgttgactctccctcctaatccccaggaccccgagggctctcccacatctcccgcagcaagagccaccgatcccccttaagaagcgttgactgtacggcggcgccagagggccaaactaagttcggtttcgggaaacgctctcgggagcagttctgtaaatccctgctgggagcagagactgcgaaaagctgagtccgccgatcgtgcccgggacaaggctgccttccactcgccgcatctacctggtaggcggcatgcgcacgggcttagaggcttgagagcctctggaagagaaagggtcccaggaaggaaacctgcccccggcctaagtgtcggcgcccagatcaccacgaaccccgcacctaggcgccgcccaccaagttccaaagaagtccgaggcgacctgggagtcggtcggatcccagccgagaaaagaaacaagcaggatagcaattcttaggggagccaccctgggagttttaggcagcgtttgcct

SEQ ID NO: 9401 - DNA, 555 bp, Homo sapiens
gctgcctatggtcagataagccaggcctttcctcagccgcctccaatgatcccccagcagcagagagaaggcgccgagggctgtaacctgttcatctaccatctgccccaggagtttggggacgctgagctgatgcagatgttcctccctttcggcttcgtgagcttcgacaacccggccagcgcgcagaccgccatccaggccatgaacggcttccagatcggcatgaagaggctcaaggtgcagctgaagcggcccaaagacgccaatcgcccgtactgagcgccggcgggagcgtcccccgggggagaccaggactcgcacagggcaggatgctgaacgggctacattaaaaaacaaacctctctctatatatatttataaatgagaactgttggatgacacctttgacatatcagccaatatcaatcaagctgaagactccagacactgtctgtgtgactgtaacatttcttcaaggaaagtatagcgtctatggagttcagagggcaccgtgtttgggggaaaatatatatgacatgaagaagaagatga

SEQ ID NO: 9402 - DNA, 768 bp, Homo sapiens
tacaggtgtggcaaaatacttattacaaagaaagcaactgcaaccctagagaggggtaagccttctctgggcaatagtcatggacatttacagaggggaaggaagtaaacgttaataaataattctgtaaataaatgctagtacatcataataacataccacttagacactaccatggctttacagcaggttttctctaattcactggaaccatgctattcctgtagagcagctgattctttggtcatagtaccttcaacaaataaactatagaactagagaaactttctaagggaggaaaaagaaaaatcaaagtgatactattagttctgaagttgtgccacttgcggagattttaactttagggattacagagtttcaaggttaggaaatcacaaagctctaggtctcagtgggctaaactttcactcctttctcttcctctacagaagaatattctgtttatcaccctgaacttcaaagggactgtaactggaacaagctcatgactgcaaagttaatagaaccattttgagtagacagaaagaaaggactgaaaatagatgaagtatttttaggagaaagttgagtagtagcagagtgaagtggctatcaaggagactgagacaagaataaacaaagtcactttgcacctgcaaccagaagattcctcagttttccaaccataattcattctgactactactttcagatatattttaaagaaccaatatccatcgtggacaactgcagctacgttttccttcc

SEQ ID NO: 9403 - DNA, 1120 bp, Homo sapiens
gaaaaaaataaagctattgaaataatttagtaatatcctataggtcaccagtgatttccataaaatgctgcacagatacaaagtcttgagtatgttacctagtggcttaaaaagggagccttgtgtgaggcacagctgacttggaacattaaagagcctgggcttccctttctgctttccattctcccaacagaaaaaaaggtcttcaaagaattggccagtcttacagctcaccttggggtgtagatgactctccactgtggtgcctaggcaattttattgaacaggtggccactggtggtgatggctgaaccactcattaaacaaattgctctaaatggcctcagtatcaaggtgtgctttctgtacccttaatctgactttaatcctgcagaacctcagtcttaccatgtttaacagcattgcccatgtacgatatgcctttatcctacactgtatatatactctttatgcagaagtatatctaactgaaaagtataaaaatataatggtggaaaacaaatgaattaaaaaatgtaatccacggcccgatagccccaggtaactgcaggtgaaatgtagccagaagtcagaatcttggggcaaaatcaagtatagtcttatgggctgtgcccttcaaatggtttaagttttaataccctcttaaggcagaatcaaagttctcttaatgttttggcaagtgtttttcttcctggaggttcataaaagtaggtggaagaatcagtctaatggcttgttggcatgcctaagggaaggatgtcaagttgacatccttggatacttggttaaaaactaaggctagtaggtgaagaaaaacaacagaatagtttttggttttaaatttgtacaaaggctacttattgaatactggaaaaaatgacaacagtgttttaccatctttgcataagaaaaaaatgattttccttttgaaactgtagctcaggatttaatcctgagtcacgtcatcatgtggtaaaaacaatctggattttacaataatttatataaagcaaaaaaagtcataaaaatgctaaatgatgcagagctacaaatatgatgaaacatgagcagaggggtcaaatcagatttttactccagg

SEQ ID NO: 9404 - DNA, 405 bp, Homo sapiens
  misc_feature (1)...(405): n = a,t,c or g
agagcgagactccacctcaaaaaataaaatcaagataacctcttgaatgtaatagctcatagcactttaatttggcaagccatttttcctgttttattataaatctatattagatgtttgaatatgggtttgaaatatttcactaccgtgcctgaaaaaggttggttgatagcagcttggagtgctaactggaagatcaaaatcatgtctcttgctgataacctaagagcattaagctcctgagtccagtgaggtcatagcagtgtatgctccttgcccttacggagtgtctgtttttaggaaatttagattttaaaaggcgtgggacatacgaccaggcccntatagccacataaatataaatttccatagaaaccagngttaaaagcgggggatctatttttt

SEQ ID NO: 9405 - DNA, 592 bp, Homo sapiens
tttttttttgcagtttttcctgtttattatatagttattctaaggtggtaagtgtcacaaagttaacttcaagaggaataacatggtccagtgtgaaacacaaggtacaacattttacaatgaaaccacagcacaaagtaactgaactttcaaaattgggtagttcaatgaaacattttgtcaacccttagctctataaagctctgctgatggacttagttgatggatttaaaaaatatattgctgtgtcaaatgttttaacacaaaatgtttttttttaaagagaatacacatccaatcaactgaaactgtgagcagaaagtatgtaacctctttataaaaacgttatccaaatttacaacattcataatatatttcaaagtaaagagttcttagaaaaaataaactcaattccttgcttactgatgagtatcaactcctcaaaaacacatcacagaaagttaactttcatacttctttgcctataacttttagatatctactaccctggcttcaaaaacattttgtggccatatataatacaaacactcaggtattacatgcatcatttatactatcttggaatttatcc

SEQ ID NO: 9406 - DNA, 424 bp, Homo sapiens
gaagaattcgcggcgccactgccgtggccttgcagagcttcacctcccacctgctgggggacgccgggagcccctacctcattggctttatctcagacctgatccgccagagcactaaggactccccgctctgggagttcctgagcctgggctacgcgctcatgctctgccctttcgtcgtggtcctgggcggcatgttcttcctcgccactgcgctcttcttcgtcagcgaccgcgccagggctgagcagcaggtgaaccagctggcgatgccgcccgcatctgtgaaagtctgaggtggtgccattgggacaatgaagaacccacactcccaccttcgttctgggaggtgtcctacagcgtccgggaccggctgggctgccccaaagctttctgtgttgatccacgggcttaggcacccacc

SEQ ID NO: 9407 - DNA, 335 bp, Homo sapiens
tttttttttatgaataggttagtttattttgagagagaggaagacatcatttgggttctgtaaacatcagtcactttattatgcctctgtctggctgaaaaacaccagctcctgctgactccacaagggcacggctgcagagagtgctgcctgccaggtgtgaggtttccagttaaaagtttcagcagggacaccatttgctggatgtgtttaagattaaaattgcttcgtaaaatgtgataaataggttactatacaccttggtcaatatagttaaagcaccagcaatcaaaatacaccgctccgggccgggtgaagtggctcacgcccgtaat

SEQ ID NO: 9408 - DNA, 336 bp, Homo sapiens
gatcatcaaacagctgcagaacccagacatggcgctgtgcccacattttgctgccgcggaaggtttaatcaacatgtagttgcccacgccggttttaatggataccctggaacactgcctcattgtcttgttagatctctgcttaggtcgcagctcacgcattgaatgcacacagtgattgtatgcatgccttttggtacagtgttttcatctcttggtcataattccgagatccccagagaccactgtttctggagtatctgtcatccagtgactgctcatattgtggcattatgcagtgttacatcttgccttgatacccaggtatggagagag

SEQ ID NO: 9409 - DNA, 405 bp, Homo sapiens
  misc_feature (1)...(405): n = a,t,c or g
cacggtcattggtgactaccatggcagcgccttcgaagacttctcccgcagcctgcctgacctcgaccgatacaaaagcgactcggacactgagggcctgctgttctcccgggatctcaacaagggggcccccagccaggatgatgagtctgggggcattgaggacagcccggatcgaggggcctgctccaccccggatatgccccagtttgagcccgtgaaaacagaaaccatgactgtcagcagtctggccattagaaagaagattgagccggaggccgtactgcagaccagagtctccgctatggataacacccaggagaacaanctcaagtccgggaaanggggcagcctgccatgatcccangccccaagacggtgggccacggaaaacccgtccttttt

SEQ ID NO: 9410 - DNA, 4369 bp, Homo sapiens
  misc_feature (1)...(4369): n = a,t,c or g
gcgatgaggaccaggaccaggagagggacacggtgttcctgaaggacaaccacctggccattgagcgcaagtgctccagcatcacggtcagctctacgtctagcctggaggctgaggtggacttcacggtcattggtgactaccatggcagcgccttcgaagacttctcccgcagcctgcctgagctcgaccgggacaaaagcgactcggacactgagggcctgctgttctcccgggatctcaacaagggggcccccagccaggatgatgagtctgggggcattgaggacagcccggatcgaggggcctgctccaccccggatatgccccagtttgagcccgtgaaaacagaaaccatgactgtcagcagtctggccattagaaagaagattgagccggaggccgtactgcagaccagagtctccgctatggataacacccagcaggttgatgggagtgcctcagtggggagggagttcatagcaaccactccctccatcaccacggagaccatatcgaccaccatggagaacagtctcaagtccgggaagggggcagctgccatgatcccaggcccacagacggtggccacggaaatccgttctctttctccgatcatcgggaaagatgtcctcaccagcacctacggcgccactgcggaaaccctctcaacctccaccaccacccatgtcaccaaaactgtgaaaggagggttttctgagacaaggatcgagaagcgaatcatcattactggggatgaagatgtcgatcaagaccaggccctggctttggccatcaaggaggccaaactgcagcatcctgatatgctggtaaccaaagctgtcgtatacagagaaacagacccatccccagaggagagggacaagaagccacaggaatcctgacctctgtgaagagatcctggcatttctggtccaacccaagccagagaaccattaagaaggggccttcattctggattctccgacgcaacactgacgtcccagctgcgacgtactgtcactgatgagagactgggaagggaaaagcatatatatatagatatatagagatatagatatatatacaggaaacaccgcatccttgcactgctgctggggctggcagagcagttggctgacagcaacaaccgacatctgaacacctacatttcctttgcagacaaattgaagaactggtgggatttttttcaagaaaaaaaattatataataactataatcccttgctcacccctttcccccgccaaataagaaacgcaagccagaccacgatgattgtagaagtccctcccgccctggttctgcacgttacagttagcagacgagcaattccatttgttcttctccagcatctctaaggcccacttgaatgcaaaggaaaacacttgcacagcaaagcaagagaagtcacagcagcaagacacgcacagtcaaccattttccgagaaaaaaagaaaattccccacttggaaagaaagaggaggaacactggattcttactttctggatcttgacactgggctgcaaaacctaccttcctctctcccgcctcccctcaccctcaactctcaatgtcttgctgtcattttctgtctcggctccctcctcccccttcccccttcccccaccccacacccttcaccctctgtgtcctggtccttctgagggccactgcagatgactctcctttgaaatgagaaaaagaaaagaaagcaagaacagaaaacgaagccacaggaagggaagtagacattgtatgcttatggtttctcattatgaaggtgcagcttgtaggaggtttgtacggatgtgctttgaagttatgtatattacatataacaggaaaaaatattaaaataaacagtgctggtaagtatgaagctgacattctaaaattataattatctgactgtgattgatgtatcctgaggttcctagatctcactgaactggcccagctaaggagacctggactctgggtgtgggttggctcacagtaggggctgacgggttcagtgtagtaatactgtgtgtggtgtttgtaattggttgattggtggggaggggtggggggccctaatggagaggtgtgggtttggcaagaaagaagcaacacagatgtcgtccccaaaatgccagttcaagacaccttctccctgcccccctggtagtaacagtcagggcctggtctgtgctcaggtactgggtcccagtctgggactctgctgctgaagttgccacagtagaggtccctggcttagtccttatctccctacggggcttgccttggttttcagnnnnnnnnnnnnnnnnnnnnnnnnnnnnnnnnngccacattctgcccttccctgaccccattgtaataaccaactccatatccaaagggaggtggtgctctcagccattgtagaagatggtggctttaacctgactgtctaaaaattcccagctaagccttttcctctactctcttccttgttctgaatcatttcttcttctcaggccaaagtagccatggtaaggaggcttcatggggcagaccctgaaagatcaaaactgcatttgcaaagccctcccctgtcccaggacaaagctgagactgacgggtgatgttgctcataggctccagctctgcataagaccttggcttggagacctccctctcagtcaacagctgaactctgagcttgtgcccagaaattaccccaagaccacaggaacccttcaagaagctcccatcacaagcttgggcattgctctctgccacacgtgggcttcctcaggcttgtctgccacaagctacttctctgagctcagaaagtgccccttgatgagggaaaatgtcccactggcactgcgaatttctcagttccattttacctcccagtcctccttctaaaccagttaataaattcattccacaagtatttactgattacctgcttgtgccagggactattctcaggctgaagaaggtgggaggggagggcggaacctgaggagccacctgagccagctttatatttcaaccatggctggcccatctgagagcatctccccactctcgccaacctatcggggcatagcccaggggatgcccccaggcggcccaggttagatgcgtccctttggcttgtcagtgatgacatacaccttagctgcttagctggtgctggcctgagggcagggcaggaaatcagaatagcatttgcttctctgggcaaatgggaagttcagcggggcagcagaatcagtggcattccccctggtgcaggccggtgggtccactccaactccccctgagtgtagcagcacactttccatacaccaggttctttctacaatcctggtggaaaagccacagaaccttcttcctgcccttcttgagagttccccctctttctgggtcaagagctggagtggtggctccatcctctctgggccacttcggtctaggaactcatctttgcaggaaccaggagtcctgagcacactgaacacacctcagagggaggatccttgttgtggattttgcacctggctttggggcaggggtgaagtgaccagggtttagcttgtggagtttatgggccaccagggtttggggaaatcaccatcccgcggatgctgtgacctcccttctacggagatgcaggcagtgccacgagggaggaggggacctgcaaagctagaatctagggcactgtttcctccccatccttctctttgtagagaatagagacgtttgtcttgtctgtcttcaacctacttttccttttctcttttttgtttctcatcctctctgtgccacctctccacccaggaggccatgtagcatagtggaaaaagtccctgagggcggttaggagttctgggtgaccatcctgggctcagctcctaactcaccatgtgacatcaggctatccccattccccctcttgggcctcagtttcccgacttgcaaaataagcagaaagaaccagatgctctccagggtctttttctactttgctatctcatgggtcttcattttctcttattttgttttctctggatcttttccatctgagggtacaggaagtaccaggacctgtttcagtttttgaatcctgcaagcacattccaagactggcctgaaactgcatgagcaacatcactcgaaataattttttttttcaaaagcaccttaacaaccaattgcgatgctgtcctgttcctttttactcacacccttctctcctttctcgtccccatgctcccccacctcagtgctccgtgctgtatgcgtgtgctctctgttcttgtatactcaatataagtgaaataaatgtgtttgatgctgaaccat

SEQ ID NO: 9411 - DNA, 446 bp, Homo sapiens
agtgatggaagcttcccaagtgatgaaggttccagccaagaggtatctgaatctctctttgttggggagagcaggaattacggctttcagggtggtcagaacaagtatgtaggcactggaggaatagaccagaagcctcgaacattacccaggaacaggacgttcccaattagaggctttcagatttatgatgggcccattcatctcacaaggagcactttcaaaaaatatgtgccaactccagataggtacagcagtgaatttggcttcctcatgaagaattcctggcagataacccccaggaataatatctccctccgtgaagtttggtccacatgtctctctgaatgtcttttttggaaagcctggtccctgggtttgaagattgtgagatggatggtgataagaactccatattccatgacattgatggctctgtgacaggt

SEQ ID NO: 9412 - DNA, 481 bp, Homo sapiens
  misc_feature (1)...(481): n = a,t,c or g
ttttttttttgttggtaccagtcactagatgtgatttatttgaggggctgttgtagggagttaggatacacagcatgcagggagaggaacgcagactagccaaggcctaaggtaccccaagactcactttcgccactggtccttggccttgatgacctgagttggcatctgaggttggcacgcatcccatctccacccacctgccaccaagggcagttggtggttttgccatcccatccctgtcccctgctgcccaccctctgccacctaagcaccaggatgagggtgagttgcattagggcttgccactcccctcagggacctcaagctgtttgccttgagaagctttgagagggtcctgtggtaagtgccctctttcttggcaaccaaaggaagaccaggacatcttcaggaaaagcacggcaggaagaggggttggaagtaaaggggaggggcttgaagaaaagaagggctggnggta

SEQ ID NO: 9413 - DNA, 581 bp, Homo sapiens
  misc_feature (1)...(581): n = a,t,c or g
catggtgccgcggtcctgtcttgctgtgcctgcggcaggggctcggaaccaattcattcctgcacggcctggggcaggagcccttcgagggagctcggtcactgtnttgcaggtcctcgcctagagacctgcgagatggagaaagagagcacgaggcggcacaaaggaaagccccaggagcagagtcttgcccatctctccctctgagcatctcggacattgggactggatgtctttcgtcactggaaaacctcagactgccgacgctgcgggaagagtcatcacctcgagagctcgaggactcgagcggagaccagggccggtgcggtcccacacaccagggatccgaggatccttcgatgctctcgcaggcccagtccgctaccgaggtcgaagagcgtcacgtctccccttcttgttcaacttccagagagagaccctttcaggctggggagctgattttagctgagactggggagggagaaacaaaatttaagaaattatttaggttgaacaacttcggactcttaaatagtaactggggggcagtcccgttcggcaagatcgtggggaagttcccc

SEQ ID NO: 9414 - DNA, 651 bp, Homo sapiens
taccaatatcccagggatggaattatggtagggtcattctaattccattttatacaagggaaactaaggacccagaaagtttaaatcggtcatttatttgtttgtttatgcatatatccagcaaatatttgttgggtacatactatatataggtcactgtcgtgagcattataatgtctaagcaatcaaatttggagtaaagaacttgaattaagttcattcaattcctagactaacattatttctatatgtagttctgatcagtattctagaattatggtttaaatatccagttataaataatatatattacaggatttattattatgtacctggaaactctactgaggtacttttcatgccttacttcattggattatgataggattaaatgagataagccctaccactatcctctctttacagatgaggtcagtgaggctctcaaagataaagtagcacataaaggctcatagctaaaaagtggcagagccagattttcctctgagtttattagactctaaaggctgctggcttaaccatctctttgtacaatctgttctctctgttctctgaactttgcctgtttctcctctctcctatgctaaacaaggtgagatcccagcctgacatccttcctaaaagtcatca

SEQ ID NO: 9415 - DNA, 1908 bp, Homo sapiens
  misc_feature (1)...(1908): n = a,t,c or g
gattcggtacgagggaatgttttgcctcaaagtagtccatataaaatgtcttgaatagaagaaaaaactaccaaaccaaaggttactatttttgaaacatcgtgtgttcattccagcaaggcagaagactgcaccttctttccagtgacatgctgtgtcattttttttaagtcctcttaatttttagacacatttttggtttatgttttaacaatgtatgcctaaccagtcatcttgtctgcaccaatgcaaaggtttctgagaggagtattctctatccctgtggatatgaagacactggcatttcatctatttttccctttcctttttaaaggatttaactttggaatcttccaaaggaagtttggccaatgccagatccccaggaatttggggggttttctttcttttcaactgaaattgtatctgattcctactgttcatgttagtgatcatctaatcacagagccaaacacttttctcccctgtgtggaaaagtaggtatgctttacaataaaatctgtcttttctggtagaaacctgagccactgaaaataaaagagacaactagaagcacagtagagtcccagactgagatctacctttgagaggctttgaaagtaatccctggggtttggattattttcacaagggttatgccgttttattcaagtttgttgctccgttttgcacctctgcaataaaagcaaaatgacaaccagtacataaggggttagcttgacaaagtagacttccttgtgttaatttttaagtttttttttccttaactatatctgtctacaggcagatacagatagttgtatgaaaatctgcttgcctgtaaaatttgcatttataaatgtgttgccgatggatcacttgggcctgtacacataccaattagcgtgaccacttccatcttaaaaacaaacctaaaaaacngnngntnttatatatatatatatatatataaaggactgtgggttgtatacaaactattgcaaacacttgtgcaaatctgtcttgatataaaggaaaagcaaaatctgtataacattattactacttgaatgcctctgtgactgatttttttttcattttaaatataaacttttttgtgaaaagtatgctcaatgttttttttccctttccccattcccttgtaaatacattttgttctatgtgacttggtttggaaatagttaactggtactgtaatttgcattaaataaaaagtaggttagcctggaaatgaaattaaaattcacaagtgtgtggtctttatttcaatacccaaccctcttccttcaccctactattttgccgctgcaatatgtagtcacatcaccatttccattcctctaattagggaaacattaatctttgttatacagaacaagatatcaataccacttcttgttctttccaatgattttattccattgtgtagccccaagaggtgcagcttccaccttggaaacctttggatttgatgtagaggaagctttgcagacactgcttagaaaagaaagaaaacaactctgaaagggacagtttttaaatgtgtataagctgctgtctttgattactgtgttcatgatttggtgtggctgtattttcttttaactttcatcctattagtaatggtctttgggggtctctgtaaaatatatggacaccacgaacagtggggctgtacctcccaggtaaccaacacatgttgtgtttgagtctgctcatttccaatactggatgatgtatgtaaacatgttatgtctcttagtgcaaaaagaaacatcatttttttagggctggctcactctgtcaggcctaatctaaaggctagatataaggtcatgtgactgctgcttcaataaaaacatttatattcgataaaaaaaaaaaaaa

SEQ ID NO: 9416 - DNA, 839 bp, Homo sapiens
ttttttttttttcatgtttgaaaggtatgtattttattactcttgcaggtattttggacaaaaatattgaccagctaattatgctcttccacacatcatgttcactgagtttactaccacagttttagtgcaacaaaatatctttgaaaagccactctacagtaattatggcaaggctcattaatatgcagaggtaaagatttcatttgtatagaaacttagaaaataatgtttgaaaaggaaagccattccatcaggctaaatattttttgtatattaaaaaatatatataaatatttcttgaattagttttatagtcaattttgatgcagtgtcattgagtggtgataaattttgagaggtatatgttaaacaaacatcatacttgagattatagtcttaggtaaacatttaatacacaatgtcaaggtagttccctttttaaaaaatttttgtaccaagtaagtcatacatttaatgttgacatttcttcttacctgtgtgcctcacaccaataaagtactctgcattaaaatttaaatcttgagacagtagtacagcattgaaaaaaaattgtaaagcagcttagatacactgaactcagattttacattttcatttgtcagattagaatataaaaagtaagcttgaaaatcaacttgaaaaagcttattcttcctcaagaaaaagtatgaacaatctgaaaatgatcaactagtgtgaatgaacattgtacatagttaagtcacattcagtggttgctaaacataccactccctcctggaaattacggaaccatctacatgtgaaactaagtcatcttcgttcggacgcgtggg

SEQ ID NO: 9417 - DNA, 714 bp, Homo sapiens
tttttttttttaggttaaattacttcgaaactttaattacagatacttttccacgcaacatttctgaaatgaaagctttgattctcccctttttttgcataaaggctgggaaggtggtttggccagaccgtacatctttttgtatatacatatctacacctgtgtctcttctttattaataaaaggtgtcttgatcacagtcccaaaccaactctgcattggattccagcatataaaactcagagagtaaaacaatttcaaaggaagacaggctgcaaccacaggaaaatggcaggaaaagttgtagcttgatagttgtttcttctaagtttaactcagaaatataataataattaagagaaaaaaataagaggccctagctttcatccctgctaccaaacacgctcgtccagaactctaggctgtcttaaagtgcaattactgttgtgaagttgctcaggccagggatcaggctggacggagttcaaagcagaaacttcaaacactccttgctgttcatgactcaggggctgggaaggaagcagaggagaaaaagaaggacagttctctggcattcaagtgcatcaaaagaataaatgtcttttcttttggtaaagaaaatctgtcaatagtaaggaatcctggtttggaaaaatagaactttctaaaacttctatctgcggatgttccaatgcagcagagggacaaggcagg

SEQ ID NO: 9418 - DNA, 1565 bp, Homo sapiens
cgtgggagctccgtgcaaagtgaagctgaggcctctgtggatcccagtttgtcgtggggtcagaggaaaaaactttactatgacacggactatggttccaagtcccgaggccggcagagtcaacaggaggcagaggaggaggaaagagaggaggaggaggaggcacagatcattcagcggcgcctagccccaagcgctgcaagaggatgattttggtgtcgcctgggttgaggcctttgcaaaaccagtgcctcaggtagatgaggctgagacacgggtcgtgaaggatttggctaaagtttcagtgaaagagaagctgaaaatgttgcgaaaggaatcaccagaactcttggagctgatagaagacctgaaagtcaagttgacagaggttaaggatgagctggagccattgttagagttggtggaacaagggatcattccacccggaaaaggaagccaatacttgaggaccaagtacaacctctacttgaattattgctcgaacatcagtttttatttgatcctgaaagctaggagagtcccagcacatggacatcctgtcatagaaaggcttgttacctaccgaaatttgatcaacaagctgtccgttgtggatcagaagctgtcctcagaaattcgtcatctgttgacacttaaggatgatgctgtaaagaaagaactgattccaaaagcaaaatccaccaagcccaaaccaaagtctgtttcaaagacttctgctgctgcctgtgctgttacagatctttctgatgattctgattttgatgaaaaagcaaaactgaagtactataaagaaatagaagacaggcaaaagctaaagagaaagaaagaagaaaatagcactgaagaacaggctcttgaagatcaaaatgcaaagagagctattacctatcaaattgctaaaaataggggaccttactcctaggagaaagaagattgatcgcaatcccagagtgaaacacagagagaagttcagaagagccaaaattagaagaagaggccaggttcgtgaagttcgtaaagaagagcaacgttatagtggtgaattatctggcattcgtgcaggagttaaaaagagcattaagcttaaatgaagtttttgcttagcataaggtttttggcagttttggatcaataaatttttacttttaactaaagtcattgtattaatatataatactttaaattttaaaaattcttgtccacaaggaaatttgtctgggttattggacaatttataagaactatgggagcaatatgaaggtgcttgagaaaagagatgatgttgaagttttccaatattctgttgaagttttccaatattaagtattagcttagggaaatttcacagttcattgtggagtgttaaacttagaacatgtgtaacttttcacataaagagaatgcatctttgacagttatcttatttgtaaggcagcctataaaatagttctgaagtattttatttacctaactataattattgggccagatacttgttaataaatgggcttaatgttaacatggaaaaaaaaaaaaaaaaaaaa

SEQ ID NO: 9419 - DNA, 509 bp, Homo sapiens
cattattgcaatgaactgtgtatatgctggtgagggggaattgggacaaataattttttttctttttttactttttgggacatataattttaatgtactgtgactctgccatctagctattattactttttatacaagatttggaaatatctctctcattcagatattttaaatgtaatagcatttgatatgatatactcgcacctaataatctggtctccactaaggacttattgtaattaaaaagttaaacaagttagctgatggacaataaatctgttttaaggagggaagagaaaacaggcccttgtaaatattagctcttaagtgccagctactttatatgcaatatcatttgaaagatctcctaccatactaaataaagaattggaggccattatccctatattataattaaaggtgggggaattgggacaaataattttttttctgtttttactttttgggacatataattttaatgtactgtgactctgccatctagctat

SEQ ID NO: 9420 - DNA, 111 bp, Homo sapiens
gaaaacaatttatttgcagtcattcagatggcaccttgactatatggaatgtaaggtcccctgctaaaccagtacagacaatcactccacatggaaaacagttaaaggatg

SEQ ID NO: 9421 - DNA, 836 bp, Homo sapiens
  misc_feature (1)...(836): n = a,t,c or g
ttttttttaacatacaggtgaaaaaggcagaagtaaggcagtccagctgggttggctgacgtcatctctgagggctctgccaggtggattaggtgaagagaggttttatgggcctctaagcaccggccagtagtggggaatgccacatgcaatgggtgagtggggatctggggggggtcaggaccttgcttttcttccaatctctccttcttagccagaactttgcgagagcccctttgatttctcttccctctattcccctcctttccccaaatgtgctaaggtcccaattcccagacccctcccaggactcaagaattgggatagtcaagcaacaaacacaccaagacaggcttcccttgtacagtaaaaagggtcatttttattttgtttccttttggcttagaggagtgatggactttttatcacgtctcattagggcagcattggcctccatgcattcactaatacactaatcttcactgttggtcttttacaggtttacgttggttgcagcaaaaaataaaagaactctgggcactgtcgctttaggggctttgactgggagtttgtttatctctctccagtcaacttctgacgccaaaagtggcctcgtttagaaaggagtgagagtaggccatgttaacatgggaagtttacttacctcctctcgtgcctgctgctttaaaattacagagtctcctcatcctaagncaacaaggaggttaaggaaagnaagnagggggaaaatgttttttcacacacaaaccagncaaccatgtncagnctgnctgncncagtggnctttggtntctgccattttnaaattattnaac

SEQ ID NO: 9422 - DNA, 497 bp, Homo sapiens
atttttatataattctgcattgttctgtatgtagatcctaattttaaaattttacaccatcataaatgaacaaaggtaggaaggagtttggcttcaatagcttacagtaaaaggagtaaaggagttcagcctcaaaacgatattgttgacctgttatgttatgaaaaataatccagtgtttatacttaacggatgccatcccttattatttactattttcttagtctaactaaacaatctttattaaaataagcaatgatatttgacatgggcctaagaaatatatagttagctaacaatattgtcagttagagggatttcttttctaaattaagtacagatttcttcaccaaactccaggataacagaaaagaggacataaaatttggacatagtttctggataaataaatgtaaatttaaatataaattatgtaacaggaaacaaacgaaattaaagaaaataaatttttcaagaaaaaaaaaaaaaaaaaaaaa

SEQ ID NO: 9423 - DNA, 669 bp, Homo sapiens
ctgtttttagccatctgttactgtccaatagcacctcattcccacattctattttcccccggtattctttagatcctagtatttggaaaacaatcggctaaccttgacatttctttttaccttcatatgccactatctcggtagttcgaaaaaaatttagttcttgataaattgccttgaagtttaccttgtgctggagagccttatgataactccaaagactttcttacggtataatacatgttgtttaggattgtgtttcttagtcactgaagataataaatattaaaatggatgttttcatcagaaaattttcatgttttcctttaaggtaacataattgtaagaattgtttaataaaatactcaggaaattctaaaggtttctcccaatacctaaacatttctgaacatcagtattgcagttgtggaagagcagaaggaggatacatttgtttgtgttgctccccaaaattccaccttgcatttgcatcacaaacttccctcaattgaggcagttttctttgttagaacattaagtctgtgtattgtaatagagtgggctcaatattttactataaagcatttaataaactgttaccaatagaagtttgtgttcttcacacctttgctattgctttttaaataaaatgtacatttctgcttaaaa

SEQ ID NO: 9424 - DNA, 1282 bp, Homo sapiens
  misc_feature (1)...(1282): n = a,t,c or g
ttttttttttttttacagttttcaaatattttactgaaaatgcatattgtacaattaatgtataatgacacaccagtgtgagaaacctccataggtatcatttccacaaatatgctatgaatatagagttcctacacaaaactatacaacttaccagatgtaattcctgttacgtaccatactcacaatcgtcttgaagaatatggagaaaaagtgctgagtgacaaaaacaggagccatgtgtgattttaataaatggaaaacacggcatttcagctcagtggtaaagcagtaaaccaatcagatgcttaggctatgcaagtaatcatgtgagaggaaacagaattagatccttacctcatactatatgttgtcagctaacactgtagcagtggtatatgaatcacataaattacctccaacaaaatgtattccatgtattagaaaaaaggaggtatgcctaacattgtgtcacgttccaaaggtgaattttgcaggtcaacgatatgacagttcaaggaagcatacattttattgtttcaagttgatttctaatgctcaaactatttacgtcaaaatttacagaaaataaatctctatatcaacagcttaaaataaatgacttacctaaagtccacttctgaactgcataactcctataaaggtttcagtctgtaccaattagaatgtcttcagttattagtaatagagcatcctaaatcaactggcttaaaaataagtttagtctctcacaaaagaaacagtccaaaggaggagtggctacaaggctgcttggtttggtggctcaaagacatcatccaggtctcagggtctttcagtatttctgctcaggccatgattaaactataatccattgctgaaagatggttaccaggcaccacatccagacaaggtactgttcaccacaagattccacttccctttgcttgaatccttgggcctttgagaaaaccttttccagaagtagtctgtcaggtatatcctttgttttatgtctagaattgggccctgtgaccactgtaaatcaactgcctggcaacngagaaggggagtgtcactggttaaaactaatcaggatttatctcacttccttttgaggataaatggataaccaaactccgcccagcagagtaagggagtgactaagaaagtcactcggcaatgtctgccacagacccttgttagaatgtgttcttaattcattaacaggaaggagtagagcacaaggtttaaaaccagtacgacatcaaatgaaaacaca

SEQ ID NO: 9425 - DNA, 369 bp, Homo sapiens
gttggatcatggggaatttcagaggtcatgccctccctggaaccttcttttttattattggtctttggtggtgtacaaagagtattctgaagtatatctgcaaaaagcaaaagcgaacctgctatcttggttccaaaacattattctatcgattggaaattttggagggaattacaatagttggcatggctttaactggccatggctggggagcagtttattcctggagggccccatctgatgttatatgactataaacaaggtcactggaatcaactcctgggctggcatcatttcaccatgtatttcttctttgggctgttgggtgtggcagatatcttatgtttcaccatcagttcactttctggg

SEQ ID NO: 9426 - DNA, 503 bp, Homo sapiens
  misc_feature (1)...(503): n = a,t,c or g
atttgggagtagtttaacatgatggttctggcccatggtatcatgaagttacagtcaagattgaacaggggctgcagtcagctggagctggagaaaccacttccaagttctctctttgtggccgttggcaggatgcctcagtttcttcccatgtgggtctctgcgtagggcagcatgagtgtcctcacaccatgacacctggcttctccctgagcagctgattccagagatcatggggcagggccaggagaaagctgcagtgccttttaagacatagtcttggaaaggacacaccgtcacttcttatcctagttgttagaaagcaagccactaagttcagccctgcactcaaggagagaggaattacacatacctctaccccaatggaagcagtagcaaaagaatttatngacatatcttaaaagcaccacaccccaactggggattgaaagtagggtcaacaggggaggtaggtttaatctagataaagcttgaaagataga

SEQ ID NO: 9427 - DNA, 1951 bp, Homo sapiens
tttttttttttttgatactcaagatctttactgatttaactataacagcaaccattgatgagaatttaatttttccttaatttccaaacatctgctggtttggaagaatagttaaaatacaaaaacaactgatcatggaatcacacaggactgcctcaaggactgcgtggtaccctctgctatccatccacacacagtgaaatggatgggagggatgagggaacaacacatcatgggagacaaagggaagaccaaggaaagtgctgggcagtctccgcttttccattcagaatggatggaactgggccgttagtggcactaagacaggggcagggctatttttttttttaaataaaatattttaaagatgcataaaatggacaccttagcacgtgagtgtcctttgggctcttcaagacaccttctttaaggtttacccctggagtagcagagggtctcctcacccaggtggaaagagatgggctccatctgcagatgaaggaaaggcactggcgcacagcactcagcaatgtagatacaggcaccaggtaggagcaggatggcttacccagcaacctgcctcttagctccctgctagtgttcttccctcctccccagtttccagttaaaagtacccttggcctgggctttaaaaaaaaaaaaaaaaaagattaagctggagggaaaggggatacacttgggcaagaatggatattttgtgctagattcatggaattttcctaagtgtcccaggagttttggttttaagcaccggcaagagctccctttggaaatttcagtgtggccaaatgattatcaagcattgcagcatctctgccagcctcccacccttagaaaggtggcagagtgagagtttaaatacccttgggaaatgtgtttcatctcagtaatatttccactgggtatccatgacatacagtatggtctgccagggcctgcaggcagagagccataagcaaagagaatccacagacccgctgaacagggactcaagccttctcctaaatctaagctttgccaaaaggttatcaacttccaggaccagcctagagaaataaatttaaattccagagagtaggctaggtgatgtaagtgactgactgaaaaaacaagtatccataactcctaaagttttcagttagaaatttctgtaagttagcctcaagaaactccactactaaactggaaaaccatgactaggaacaggaagcggccctggggttagaagcattctaaagaattgtgacccaactgcatcaatatctgatttcatcttttattaaaagctgagagttaaagaactgtagggataactaagtccacctcaaagtccagaccagaaactgccctcccaaagaaacaatgtttcctttaaaaacaaatacccacaccttcccccagatattatgggtaggtaagtgactaggttttgcagattaatctatagctgcccatgtgcatgtagtccagaaaacatgccaagaaggaagagctctgaaccagacacagaaaggcagtgtggcttcctcgctcaaggggaatgcaaaaggctaagagccctggcttcaagcagctgttatcctagatgaggaaaatgcaaacagattcaatctctgggatattgctgccaacatgctaagcccttcaccagttgccttgattcgaagcagttcctctatgtatactggctaaatgatggactccggcagtgaaaccccacatactcagcaggctgcattctaatgagaatgaaggaatttaactaatggtgtttgagctggaaaggtaaggtctgagagtcccagtgagctggaaacccaaaaaaagagaagaccaatccacctcaaaataagaaagaaaaacaaaattcatttaaaggtactctaaagatgagttctttacttctggaagaagaatccttttcttatag

SEQ ID NO: 9428 - DNA, 573 bp, Homo sapiens
  misc_feature (1)...(573): n = a,t,c or g
aaaggagggacccgcgcgctgctggaggcgatccgcgtgcacccggacgtgcgggcggtgggcgtagagccgcacttcttcgacaggaactacgaaaaggggttggagtggtacagaaatgtgatgcccaagactttggatgggcaaataaccatggagaagactccaagttactttgtgacaaatgaggctcccaagcgcattcactccatggccaaggacatcaaactgattgtggtggtgagaaaccccgtgaccagggccatctctgactacacgcagacactgtcaaagaaacccgagatccccacctttgaggtgctggccttcaaaaaccggaccctcgggctgatcgatgcttcctggagtgccattcgaatagggatctattgcgctgcatctggaaaactggctccagtatttccccctctcccagatcctctttgtcagtggtgagcgactcattgtgggancccgccggggaaatggccaaagtacaggattttctaggcctcaaacgtgttgtgactgagaagcatttctatttcaacaaaaccaaggggttcccttgcc

SEQ ID NO: 9429 - DNA, 432 bp, Homo sapiens
ttttttttttcaggttgcattaagctttataacaacacggttttcatttagcgggagaaatgacagtttaataacagctgaacagatttaactccccccactcatacaaatttccagttttactagaacaattcctggttttggagatctgtgaacaagtgctttatgtcaaatgatgcattttaattgaatcaaactgatgggaagggacacttcattcagcagctcttgatgggggtttctgcagacagcccttgctcacccccaaccctcataaactggatctgatgaatggagtcagctttctcgccactacctcactctctgccatctctaaatagagaaaatgaagcccgaggaggtggtggtggggcaaattggaagaatgctgactgctcctttctccattacatgggctaaggattattccta

SEQ ID NO: 9430 - DNA, 675 bp, Homo sapiens
gcctactactactaaatacccccccggtcgacctaaataaaaaaaaaatgatagtgcattatggtggtaattttaaaggtcttgattaggtcaataattgtttaagcaccgtctcattcatgttttctactttcatttcttaagcttttaaaattcatttaattaatattctgttgttgttttggggagtattcccaatgtatctttgatatttaacctggttaatttgtggacagtcacaacaatggatagaattatgtagtctccgttatcactaaaatgttatcttcaagagatgttaaatatttatatgctttgttgactagctgaaatgtgaattctgttagtgttgactaaagaatctggtagttgcttaattgggcaattaaacaatttatggctctattttgtaaaacaaactactggtaattatttttaatacctattttcattctgattactctttttttaagttaaagactatcagttaattaagattgagtttttatgatggttaaaaataattctctattggtttttcaatatatttttctgtgtgttctcagattatatatttccctcaatttagagtttgctaagtgaaataaactggttcactagtagagaaagaattacgtcgcttaatacctaatatcatagttgtacaatatgaaa

SEQ ID NO: 9431 - DNA, 703 bp, Homo sapiens
agtttcatatggagcgtttatttacccttattattaagatgcgtgtgtttcactggaagcattagctttgaggcctatcaagcacatgatagaaacaggcatgcaaaaggaaggagtattctgtccagggagcatgagcaggcaagctcaccattggaaatagtgatgaaataacagggaaatacaactgaaaaacacactcaaaaatgtattacataaaataatttacttctcattcagagtgaccttccagacctattagtaagacagcagtctgtgagttcagatacaatctgaaagtcatgacaattataatagggcaagaccaataaagttacacatttgaagtcaactagagacaaaattgtggaactgtgtataacagaaaatgacactgatgaggaactccagggatattaagggcaagattgccagagagacaagaagggtacaattagaaaacctgcatctttaatacagtgagatttgtatgcatacactctggtgtcttcattttgcagcccattatattggcttaaaagccagaaaggtgctcatgcatgtaatttatactggagcaacgaatgcagtgtatgtggacgcgtgtgtgtgcactttgaaaggcagtagttttagaagaatgagaagaaaattacttcctgggcattcattaataattcaggtgatatcccggacgcgtggg

SEQ ID NO: 9432 - DNA, 521 bp, Homo sapiens
gcttagcttgtttccccctgtgtagaattgtaacagatccatgtgttccaattattttcttttttaggattatatttcacacatttgggggccctttttgtacaaatattggcatgtaataaggaaaaattgcccatgatgctgagataataccagtgtttttagtggtagaaaatattatttttttataaaccatatctaaatatcttgagataaaaattcccctttgactttttttcctctcccttgtttggcaaattccattttaaaattataaattgctaaaaaatgtcctttccatactatttctctcttccttgtactcatcctaagaagtcttaaatctggaacatttgcttttatcttatctatctgtttcctggctactagaaagaaatttttttagcactcatatcaccctaccatgaaggtctaaatgtaagatgactgtaggacttgaaacaaaaaaaaattaaaaagatccacactcattctttgattttgaagcaaatgtctttccc

SEQ ID NO: 9433 - DNA, 393 bp, Homo sapiens
  misc_feature (1)...(393): n = a,t,c or g
cccacgcgtccgtgcaggcctggcaccaggaggcttgcacccgcctttccttcctgacgtcctctgtccttggggctggcccatagcagtgcctgccgtgcctctggtacatctgtagccaattcccatatcatggggaaaattcgtgtctattttcagtcgtacgcatagacgccccaggatgggtggncccactgtggcggaagggggtccctgggaaacaactctggcacagaacctgccctgcaggctgtagggggcatggtgcctgggagctgaggggcatccgaacgcgttgcgggtngttgtgaggaggcctgtctgcatctccttccggccccactggggtccaggggtgcccagaaaggagcttccctgctgctgagtctgtcc

SEQ ID NO: 9434 - DNA, 8936 bp, Homo sapiens
  misc_feature (1)...(8936): n = a,t,c or g
aactagcttgacatctcccacacttgggtccttaagcagtttcctgcaaatttcctttcctccccaaggatagtgttggctaggagcttgggaaagaaaagattgagtttattccggtctctctctgctcatctccagaactgccctcacacagatgtttgtatgggtgtgtatgcatgcatgtgtactaaacacagatgggcacactctagatatagaacacgtttcttgctgtggttgtgtgacaaatggctagaattttaggaggctctgggactgcacactgtatatgcaatccatctcagactttgggatgggaatccatttcatcatccagcatggcgaaacttggttcattcgccccaatgtgagtccttcctgggtaaaattaaaggcagaccggttgggtgctaaggatccctggtgtggagaggccattccgttgagcagctgactgtgaaatcaataccaaagggatgtgggtcctggcgttgggaattctttgacaacttcttgtccttccttagccatggctgtatccccggaggtctttccggctgtgttcttgggcctgggggtcccgacaagcacagtcaccttgtaggtcacaggacatagggaatggggtgacctttttggtcttcactgtggaggtgcagcaatccccaccgtcatagttgcaaaaggctcggttgttgatggcatcacaataattgtctcccatgaagggctcacagcctttgacacagtgaatcagagcagggtgaggataccacttgagaccagcagtgccagacaactctctctacccgtgtggggttcagccagtgggggatgtcacgcacggtcacgttcattggcaggatgatggactcgctgttgtggtccaggcacgaggtggcaaaactccgaccctatggcatagccatcagggcactgcagtttgaggttgctgttgagctcgtttggaaccgagcactggccttgcatctcctggcagacatggaaggagccgttccaggtgccatctttccggcaatgaatgacattgctcccaagtccctgggaggcatcactgtcttcacacttgatcctacactcactgttgaactggaagccattagtacactggtagagcccatggaattttggtggaggtgggtcacaggtcacaggaacacaagctccctcctgccagctgcccatcctgggtacactgagtcttgaaggcccgtttctttgacttccgagaggatccaggcacatggtatccaggcttgcatttgtatttgcagaaggagcccaccttgtgcttattctctcggcaccgggcggtctggaggtctgcattgggcacagggggtggagcgaggcacatgagctcacacagggcctctgggaaggaccacagcccatcctccatgcaggtcaggaggctgttgttgcctttcaattgtgcagggtgacggcactggaaggaacattgactgccaaaggtggtgccctcagggcaggagaaggaggcagcatagacttgatggtgatctgggatgctgcagtcgactggctcacaggccacctgcttattccacttgccctctgtacaggtcactgtgacgctgggtcccgtctggctcttgatcagctcatcatcccgccgtatctggagcacgtagcctgtccggcagctcacagtacactgggcaccgtggtagcggtcgctgctggagcaattgagagaagcattctccacagccagctctggacagtcagttttctcacatgcgaagtgcacgcagctctgctcggcagggctgtaggtctcccctctctggcagctgctcagggtgacggggtcaaagttgtcgaaggaacggagggccacccccgagatggcgaccaggggcgaactgaagctcacacgtaccgcctggctgtggtagaagggctggctgaggtcatggaccacagggataatcaggggattgttcctgcagctcaggacatggaggcctagatcgtggctctgatctttggtatcaagcagctgcacgctgatggtctcctgcttttggtccccataatatgtcccatccgtcaccaggtggacaatgacagctgcggcaaccattggttgagaaaaatacgcccggagccaaaaagtggtctgagccagctgggaatatgggtagctgatggtgcaagggtaccaggcatgctgggaaatgccttcactgagatctatcaccttggttcgacacacctgggatgctgctggctgtccgatgatgacccagcctgggcattgctggtcttgatgagatactgaagcattggatgcccactgatccaggaatccctggggcgtgtagacaccacagtccttaatgctggttttttgttcaaactcctcacataccccatcaccatcatggaaatagcaccggctgggttcatcaatacaattgaaggagacttcttgtcggcagaaaagggagcagccatcaccattgatcttattcatgtcgtcgcattgttcaccttggtctttttgtataatgccatcgccacagtacccacgtccatggatgtatgtgacagcaggtgatggctcactctcttcagttcctgaaatagttatgacccaatactggtacacactgccaagatttagatccatgtctacgaatttcctattgagatgtaggatggaggccacatccatctggagaggagggtcccggacccaccttatacttcaggggcttacactgtagacagagtggggtgtctgcagtggaggtcaacatggcagcatcgatctccaggtgctcatccagcgtgtagatttggatgccatacacctcctcgcccacgtcccagagtctgatggtcagtgggacatcacagaagacattctgaggacccagggagatgttcttcccactgacagccaacagtttgatgtcattgacagctccactagagtcccagtcagtggagacaaaggtcacccaaatggtcagagactcagggaccaaggggtagaggaactccagctcgaggtagcagccttgaggctcagggcaggctggaggaaccgtgtgtgggttgacagctgaatttgggctccaggtgcggacactggacttacagggctgttcaacatcaggatgaccttctgcttcacgagggctcccagtgtcctgatgggctgcagggccattggggaggaagcgttggaagcatactgcaccaggattctcccttccaggcaaagatgacatgctgatcccaattctctttcaaagaaatggccatctataggtgggaaccactccagtgtcacagagtccgttgtgtggcccagaacttggggggcgagggcaacaggcgctggtttcctggagggctgccagccctggtagaccaggtccaggtaacagtgcattctggcgacttgattgggcgtgaaggagtccgtacagtcgtcatctgcatagctcatgaagttgttgtaaggagtgttgaagaagctatgaaagccacaggtgtcatttcctggccctgggtcaccacaggacttgtgtttaggggctgggttggtatcattgcagaggtctccagtctcgaaggagggctctgtctccatgcaggggtcactgcaggactggatttctgagatgcctcggaagacgtgatagaggcccaggctgtgaccaatctcatggatcatggtgtgggtgtgcccaggcatgccatagaaagatgggttcaagacaatgccacctaagtgcatcagggcctccttgtcccatggccaagttgctactcctgccaactcctcctctgaggattttgcaaagaaaatattgagatgtgttgatccatccaatttaagaatgttcttcagctcattaacatccaagtaggctctgtgtggagagtcggggtcaaagcaagtctgagtgacattggtgatttcagggtcacagcactctccaccatcaaagttgaaccgttcatagttgcagtccatgtcacacaccccgttgtgctgcttcttcacgaaggcagggtggcgcaggtggcggcaatccccgccgtcgtggcccgtcagcgtgtggttgcactcggggtcacagttctcatccccaatcttgctgatgtcacagttggccaggatgaggcggcggcgaagggaggagttgctcacctccagcacgtccagctcccaggagatgttgtattgcttgaaggcctcagccagctgatggtgctggaagtccacctgctcgcgcgtcaccgtcgggttcttatgatcatcttcatagaggttgaccacgcggtagcgcaccaccttgggctggcggaaacttgagagctgattgtagctggcaatgacctctgtgttgtcacacaatgtctgtccgcacagaggaggctccagactcgtgtccagcagaaagccgtgggcattgctgaattccactttggggctgctgccatccttcatgggggaccaggcatgcttcacattgtcccagttctcctggaggaggagctgaggtagagcagtgtgggcgccatgggtttccatgtcagacagtatctcccgctgagtcctggccaccttccacagactgaagtgctcgatgtagccccggtagttgtgattcagggcactgccccctaacatgagcactttgcacttctgggtcagtgggctgaatatgccacccacttgttccccagaggtggccacctgggcaccattcacatagagcttcatgaactgcccatcataggtggcagctaggtatacccactggcctgggaggtagctgcggtgggcattgatggtggtcacttgccgggctcggtctgtcttcaaggagaaaaagtagcgtgggtctttgttgtcttggtcactgatggtgtgaatgcccacgacccatcctcggtcacgtgagatataagaacatttgtcatacagccctgtgatcactgccggagacctctggcccccctccgctcgcagccacacttgcagcgtgaacgcgtcccggggcagctcgaggtcggcccggaggactcgcagctgctcgcctcgcccgctgaaatagagcgcccggctcggcgggctcggctcctcggtggcgcccctcgcctcccgctgctgccgccgccgggggacgcgcacggcttcccaggcacgcccggcggcggcggcggcggcggcgaggcgcggcggccgcgggccgcgggtggcgcaggtggccgggccggcggcggggcgcgggggtcggccggcccgcgggtctctccgggcccggcggggacgctcggccagcccgcagcccagcgcggcgctcagcagccccaggtgcagcacccaactccagagccgcatgtccgacgttccccccgccccccccttcgcccctgcaccgccacccggagctgccagctttgggagcctcggcgcctcgactttcttcgcttcttcacccttcttgggcgagccccccttcacttgcttttttcttttctttctcgctttcctcctcaaggtgtgtgctccactctccccacctttgaaaaatacagcccaactcctcctggttggcaattaatttctctccccgctcctttatctgccttattttccccctaacagctggttgccttcctccttgttttatttcattttattttatatgatttctcgctccaaaaaaaagctcctcttaagactgatccgctgaattccctccccctggaatttttgttttgtttttggaaataatatttttttaaaagttgccttattgtggagcgggaatctgaaatacccaaatgcctgttttcctcggtggagtcaacccgaagagctcccaccttctctggatgtgcctgggcttggactggctagaatctttctctggactgttgcatgtacagtgcctccatcctggaggcaagagagttgggagtggctcgaatcagagccgtgcccaagatatccctgctgttgcatcgtttgaagctgacgtcctgtgtctgtacactgctgccactgttgtgtcctcgctctgcttgctgttgcctcacgccaggccccgtcctgccgtgacacccttcatcctacccttggaaccccaaggccaagttggttcaaactgttggagaacagagttggcctggcatctggaacacacttgtcctcagcttaccatctcctcacaccccagagtggaaaggtgaacacctgcagctgaggcttggaaacgtttcttgtgttgccctgaaaaatctttgagacctcagggaggctctgtctctcttaaaaggtggagaaagatgccattctctccctaaggtctggtgggagtctccccatcttgcatacccttctgcaagccatctatctctgctcactctccaattgacccgcctgggaacaagggatgaggaggagttgggggctggggggaatcctgccagttggtgaagccctgtggcaggaaggtatatgtggacatagagtatacctgattctctttcttcagccactgactgcttgggttgggctgtgaatgataatggaatggctggagtctgctgttgtcagaaggcagggagggtgatgaaggactgacccacatggactgggatgtgtgtcggttatgggcatgactgcacgttcactctcagtgggatctgggcaacatggagttcattgtcctgttgcttgcttacttatttctggcaggaatcagggtggcaataggactagcagcaccctggggtggctttgcctaccatgagttaacgctaaagaacttggctcaaatcctagaatccttagccaccaacggagatcaggcattaaagagaattcaagagttccccagactctgggaaaatgtagttgttgataacagactagcattggattatttactagctgaacaaggtggggtcttgtgcagttattaataaaacctgctgcacatatattaactctggacaggttgaggttaacattcaaaagatctatgagcaagctacctagttacatagatataaccagggcactgcccccaactatatctggtcaaccatcaaaagtgccttcccaagtctcacctgtttttcacctcttctaggacctttgacaactgtcttgttacaaatgtttggtccttgcttctttaacctcttagtaaagtttgtgtattctagattaccacagttccagagacaatgctgggcacaagggcttccagccccaccctgttccactgacacggagaatgaaatcgtcctgncctctgggctccttagatcaggtatccagaaatttttacgtcctgncactggccagggcagggccctacgtgccataaactcagcaggaagtagttacggaaaagcaggactccgcccttctcgaggcccccttaagattaaggaggagtatctaatctctgaagggggaatgaggtaggaggtgggnactcaactctggaagtgggggctcaggcactcagaccaaactgaggcactagcctaaaataggtccaggggcagatgcctagtttccataggacacaccgacctgtgtcaagtcagtttcacgatgggctctggcagcacccagaagttaccaccctcaccctggaaatgtctgcataaactgccccttcatttgcatataattaaaagtggatacaaataccactgcagaactgcctctgagctgctactgtgggcgcacagcctgtagggcagccctgctttgcaaggagcagcgcctctgctgctgctgtgcacagccggccgcttcaataaaagttgctaacaccactggcttgccttgagttccttcctgggcaaagctaagaaccctcccgggctatgcttcaatcttagggctcgcgtgtcctgcatcactgggatcatctcccagtaaactagccacacttacatccatgtgtcagggacatttctggagaaagcagcccaggacactgttgaataaaacacacaatagtctctgtggtcttctccaccccaccccacaccaggcaccctcagcttgattctcctttttaattgcctgtaagcagggaagcacaatgttttcacattctttgtaaggcctttgttctactaaaatctaacctcagagcacaattttaaactagatgaaagagttgctgcgcctgaagcactgcaaacacctcctcaccacacatgtgcactcaaccctggacaccctcactcaccctgacaccctcactcctcaccctggacaccctcactcaccccagacaccgtcactcctcaccctggacacctcactctgcaccctggacaccctcacacaccctggacacgttcactcaccctgacaccctcactcaccctggacaccctcactcctcaccctgacaccctcactcctcaccctggacaccctcactcctcaccctgacaccctcactcctcaccctgggacaccctcagtcaccctgacaccctcactcctcaccctgacaccctcaagtcttcacctccctggctgcagcctgggacacgctttccctaacttctgaaggctcagtcctcctcaagccaatctcatctcaaattgcacctccctcagagaggtcttccataaccgcccttataaagcaggattctttcaccaataccccttccccacatggcactgtctcacagcactcctctaaaagtctgtttacttccttgacaatctgtcttccttataaggggaggttctgtaaaagccaagactctctctgtctagttgactgttgcatacccagggcttagaccaaggccctgacatgcagtaggtgcttaatatgttttgaggcaaggtcttgctctgttgcacatgctgg

SEQ ID NO: 9435 - DNA, 500 bp, Homo sapiens
ttttttttttttttgggcgtgcagggccaactttaatacgggccggcctgtctgggggtcgaggtggccgctccctttgtccttgtggctttccacgggcaggggcggtcccagcgagatcgtctcataaccaaaccagccctgtgcacgagaagtcacgccatgccccacagcctccagtcctggctgctggtggctcggggacccgcagggcagagagggtcccgggtctcgcagttccatgagccccagccgcggggacccccatggacaaacttccggggctgcacctgccggagcagcgtctcccaagcatcggaggtcctttctcagcagggttgaggccttagttgggacagagccgtgagtgggcaaggcgggagtcagggctctcggagtcgtcaattcagcaagaaagcccctggcccgccaccttcaaactggaggtgggtgtctagggtgcggaggcagaggcacagagaggttcagcacatgctggt

SEQ ID NO: 9436 - DNA, 395 bp, Homo sapiens
caaaaccttcaactgtagaagttctagaaagtatagataaggaaattcaagcattggaagaatttagggaaaaaaatcagagattacaaaaattatgggttggaagattaattctgtattcctcagttctctatctgtttacatgcttaattgtatatttgtggtatcttcctgatgaatttacagcaagacttgccatgacactcccattttttgcttttccattgatcatctggagcataagaacagtaattattttcttcttttccaagagaacagaaagaaataatgaagcattggatgatttaaaatcccagaggaaaaaaatacttgaagaagtcatggaaaaagaaacttacaagacggctaaattaattcttgaaaggtttgatccg

SEQ ID NO: 9437 - DNA, 2044 bp, Homo sapiens
actcgtgcgtgaggcgagaggagccggagacgagaccagaggccgaactcgggttctgacaagatggccgggctgccccgcaggatcatcaaggaaacccagcgtttgctggcagaaccagttcctggcatcaaagccgaaccagatgagagcaacgcccgttattttcatgtggtcattgctggccctcaggattccccctttgagggagggactctttaaacttgaactattccttccagaagaatacccaatggcagcccctaaagtacgtttcatgaccaaaatttatcatcctaatgtagacaagttgggaagaatatgtttagatattttgaaagataagtggtccccagcactgcagatccgcacagttctgctatcgatccaggccttgttaagtgctcccaatccagatgatccattagcaaatgatgtagcggagcagttggaagaccaacgaagcccaagccatagaaacagctagagcatggagctgggctatatgccatgaataatatttaaattgatacgatcatcaagtgtgcatcacttctcctgttctgccaagacttcctcctctttgtttgcatttaatggacacagtcttagaaacattacagaataaaaaagcccagacatcttcagtcctttggtgattaaatgcacattagcaaatctatgtcttgtcctgattcactgtcataaagcatgagcagaggctagaagtatcatctggattgttgtgaaaacgtttaaaagcagtggccccctccctgcttttattcatttcccccatcctgggtttaagtataaagcactgtgaatgaaggtagttgtcaggttagctgcaggggtgtgggtgtttttattttattttattttattttatttttgaggggggaggtagtttaattttatgggctcctttcccccttttttggtgatctaattgcattggttaaaagcagctaaccaggtctttagaatatgctctagccaagtctaactttatttagacgctgtagatggacaagcttgattgttggaacccaaaatgggaacattaaacaaacatcacagccctcactaataacattgctgtcaagtgtagattccccccctccaaaaaaaagcttgtgaccattttgtatggcttgtctggaaacttctgtaaatccttatgttttagtaaaatattttttgttattctactttgcctttgtacagtttattttactgtgtttatttcattttcccaatttgacaatcgtattttaaaattgaaactgatggaacattctttcttggtcttcaccatctgacaaattgaatggcaagaggtggattttgccagtttcttttcactgatgcagatttgtgttaagatagtactgaatggagtatttataaactggccctgagcatgcataaagcatcagtatctgacctttttttaaccttctaggaatttgaaataaatgtgtttgtgttgtctgattaggatgatcattggtgtcttgccacaatgtttaaaaattactgtacaggaaagtcacagcaaagatagcagttgtgactgacatgtaggactttcacagttgtgccacatttttgcctaaaatttgggttatgacatttttcttggttcttatctgaaaatttcatctgtaacctttcatgtgtgttaagaaacactgatctgatcatttgggatttgctgaggcatttgtgagtcttccttataaacctgatgagcagatctcaactatctagcttgtgtgtcatcagaaaggtttatccctttgagagtatcaagtactcagttaatgattcttgctttcataactccagtatttgctgtgggagctcgttttattacttaatttggaattcagtagtgttgctgctgtattgacggattctgccctcacaaaactgttactgtcccagctctactccatatctaattacggattcttgttaattttgagtcgagaatgtaggcggtcatgaatgcgtagaggttaaccttcgggttgca

SEQ ID NO: 9438 - DNA, 889 bp, Homo sapiens
tagaagaagacagaaaaaatttagaaaaagcgcatgctgaagaaagggaattatggaagacagaacatgcaaaagatcaagaaaaagtatctcaggaaattcaaaaagctatacaagaacaaagaaaaataagtcaggaaactgttaaggcagcaataatagaagagcagaaacgaagtgaaaaggctgtggaagaggcagtgaaaagaacaagagatgaattgatagagtatataaaagaacagaaaaggctcgatcaagtcatccgccaaagaagcctgtccagtttggaactgttcctctcctgtgcacagaaacagttaagtgctttaatagctacggaaccagttgacattgaataaaaagaacatgacaaacccacactggcattggataaatcatattacatcttcaaaatacacactctgaattataaagatgtgtttgttttctttccaaatcatgtagaattgatttccagttcaaggataaaccaaaacaatatttagaactatcaagtgatctaatttattttcttttggtttcttctttacatttactgttattttattattattagtagtagcagcaacagagtatgatatgacccaaaagccattgtaaagtgccacattaccaaaattaattaagtaaactttatagcctgtgggagtctattatatattattttgcaaaagtagtaaatatattattgtttcatgatgactcttgatgagatgctagaatgtaaccatacatttatcttattttgaggatagaaatagcatggatttcaacatcacttatttatctgtataattggaaataaaacaccgatatgatagagaatcattccggcattacctaacctcttctgcagttggatcta

SEQ ID NO: 9439 - DNA, 1674 bp, Homo sapiens
  misc_feature (1)...(1674): n = a,t,c or g
ttttttttttttttcacagttgcaccttttattcactgtcagtggggaaagaaacacaccacacagcacagggttgagcagtgagggcagtcactgagtgcacagccagaagcagcacatctggaggggatagggggctacactggaactggcctccttcccctgctacccagaccccccacttccccaagcctcctttctactgctgcttagaaggccctgggcctgactggcctccaccaagcaggaagggctatacaccctggcaggcccagtcctgcccccacactctggcaaaggtaaaaagaaaacctcgaaaattccagaaagaaaatcccatatttttctgactttttaattccaaggtttgaattatttcttttttcaagaatgatgaataaaacatgtaagacattcttgaccccacagtgatctctaaagtcagctcaaagcctcacccagggtggatcttcaggaaatatttgttgcttcaatacatttttgtgtaaaaaatatttagtgtcagcttactaccctgcctggagaccccagcttcttctctttcttctctttcccccatcccacgccattccttctctctctgcaggcaagggcaaatttctacctctagagactctgccattgtcaggaaaggatttagtgcctttacttatgaactaacttttncttcacttttgatatacaggtaagttaaataatcctgactacagctgaaaggactaaagtggccatctgaagtagcctttgctgataatttttagagataagaaataagatgctcatcaattagcccaaaaggatgaatgagggtagagtatgtgagaaggcagattctgggaccttgcaattcacagagttgttgcaataagattggaatttaaaggagagtttgaatatatcaatgttttgattgtctgtatatttttgtgtctgtgcaagtcatacataaatctctgccagccttgtgctttgtggcaagtctctctcagctggtgcagggacgggagacctgtgtctcttctcaaggcagggccagtgctctaccacagtgctcctgagcacacagtccctgggacacccaggagtatgcaggagcatgtcctgggccacctgttgttcccttcccatcaagcaaagatggtggtccccagttccctgcccctggcattgtgtgttcacactgctgggctgtctgagaatattgggcctgaggagcaaaaatcacccatgggtatgtgtgtcccagaagcctggagtaatcaaacacgccttcatgggtaggcatgtttctcttagtgaagatgatggtgggtaaagacaatgcaggatgcttcgagggttctgagtcagaggactccccaggacagcacttgagtgttagcacaggtgccagaggcagaacactgagtgcttgaaaatgtggggacttcaaccaagctcctattttttttggaagaccacaatctcagaagctttttagcaggaagcctataaaggatgaatatcaatataacttgccctgctgtcaacctctgcacagcttagtcacagaaatggacagggaagagactctgaaaagaagaaatcctcttagagccttggttcaagtcttagccctgtgtcacctcctgactatgtgatcttgcacaaggg

SEQ ID NO: 9440 - DNA, 481 bp, Homo sapiens
  misc_feature (1)...(481): n = a,t,c or g
tttttttttggtagtcggatttgttatgaatttctctctcccctcacccctcttaaagtatttagctgaagaagctggcagatagagagtgacagacagacaggcagcagtgtgaggccacaggagagtcattcttccggagttatcagtccatccatccatcactggagaagagctttgattgcctggttgtcagtggcttcaaaggcggtcagtccatctgggcctttcacagtcttatcagcaccctttgacagaagcaatttcacacaggaaacatgaccctcataggacaggcagacagaagagggagtaatatggatgtttatctgggagcattaatatctgctcctttcagcaggcaggaaattccggggttttcaagctgccccacattctgctggcataattgaggnggtttccttccaccttttagtgtcccggttgacattttntcccttgggccacntagttttttcac

SEQ ID NO: 9441 - DNA, 611 bp, Homo sapiens
  misc_feature (1)...(611): n = a,t,c or g
agattttgaaacaggaccaaacatatttgatttgcagatttatgtgaaggatgaggttggtgtcacagacctgcaagtcctgactgtccaggtaacagatgtgaacgagccacctcagtttcaaggcaacttggcagaagctgattggtgatctagactacgaaaatccaagtaacctagcagccggcaataaatatacggtgataatccaggttactgtgaacatccttgaagaaaatgatgaaaagccaatttgtactccaaactcttatttcctggccctcccagtggatctgaaagttggcacaaatattcagaatttcaagctgacatgtaccgaccttgattccagccccagatctttccgttattccattggcccaggtaacgtcaacaatcatttcaccttctctcccaatgctggttccaatgtcacacgcctgctgcttacatctcgctttgactatgctggtggggttttgataagatctggggactacaagcttacttgtcttacggtaactggatggacaacttggatgttcttgacaggggaaggaaagcggaggcttcttggttggagacagggaacagtggacantgaggtattt

SEQ ID NO: 9442 - DNA, 1248 bp, Homo sapiens
ctatactcttctggcagtagttggtggcaagcattcgcgtgcctctgtcacaaccatacgtagaaacacattaggtatgtctggaaagctacaaatcccacatccaagcacagtaccgtctgcttcatctgattaacacacacacaagaaagaaaaattacacccacagaaaactgagtatgtattgtagaaatgtagaggaaaaataaaaatattttttcaaatgtaattacttttaatatatgcttgtggaaggtctaatacaatgtatgctgtctctgtaatttttgctgtaaataactggagacggtgagtacactggatttttctatgtctctgtttaaggcataaggactttgtaacaatttttttagggggggaaaatcaacaaagagcaaatatgtacttgcttcctttctgcgtgttatgtacttctcagttttttaatggaaactggttgtaacagtttaagcatcttgacgggtcattggtgttaagtgtatgcttctttttgtaatatgactgagaaagggacagggctgtcaattaaatctgctccaaagaatttgtattgaagattggcctaagacctgcaaactccatctataactagaaaatacgaaaaaggaaaattaaaaaaaaaagttgcctgagttaagtcatctttccttgtagcaaatggctttgtccaaatcctttctgcatggaatagcttaaggaaaacaaactccgctttctgatgaacaagatatttttgtacacatttatttcttgttaataacctgaggtcagaccactcatttgctgaagccataactgaccttcaccaaataaatgttgtaaagaacctaggggagggttggggagagactgagagggaggaaaatccaaggtgttcatggagctatagcaacacaggcaggagccaagttgttggaaactggatgcttttcctgcatcccaaatatggacttttaaaaggctagtattttatgatgatcgatttataatgataaaaagatatttagatttaaatgagacattccaatatttttgaaatccctaacaatgcttccttgcttttaggattgagagaaatgattttcatatacttccaacattcagagatttaatgtttttaccttagctccagcctacgcttgtaaagtgaagagtgattctaagtcccgtgaaaccgtgggctgcctggggcttggctgtgcccactaacctactgcgcctgggggg

SEQ ID NO: 9443 - DNA, 982 bp, Homo sapiens
aagcttggcacgaggctctatgcaggtggggtaggagactgatcaggcctgctgtggggaagacagtatgtatgaacacagccagcaaatgtcatagttccaaccaggatgctttcaggccatctcagctgcttgatggtgagatggttcccttattccttcaggaaaggcttagcattgtggccacataggggaagcagctttgaacaaatcagtcatagcactgccctatagcattagccagtgaccaaattagggacaacgtcttggcacagaattgcttatcaaggaacatttccacaagaaagaaaatattaaggggttatttccacagaagcccaaaacgtcttggaaacacagaggtgaggaggaggaatagtaattgtcaatgagcttttaataccaagatacaccccctgcccccaaagaagagtcctcttttaggggaatcaggaaccttcattgtcctaggaagctggaaagattcttgggaacattttaggcttttactctcaacttgctgttctctttacattccttaagttagactttcgggtgtggcttctctcccaggggtaacatttacttccattttctaggaccgaaccaaaagtctttcttgcaggaatctccccaccgagtgtgggtaaggaagggaagggacaaaaggctttaggatataaatttcatgttacagagcatgtcattgtcaaaggaaatctgtggccctgagattttaagaacataaaatgtgacatttgatatttctccagcccagggaagtaagatggttagcaatggttgccttaatcaaatggtcccatttttaaccccaaaggaagtgcccacagcaagaggtttgtgtgatgcacttatgtcctccggtgaggaaagggggccacatatgaaaggccccttaggtcagatcctgagagtaggcacatttgagtgcagattcctggggccccacctcaaacctact

SEQ ID NO: 9444 - DNA, 383 bp, Homo sapiens
ttttttttttggttttactagtttggaagcagttttaatgaagatggaaatgtttatcaactcaacacaggtacccccaaaatacaaatcaaaatatcatcttcagctgcatagcaaatatgatttaagaatttaacatcattatttgatcacaagcgtaaatatgtcaccataaataaatgtaaattcattgtacaaaaattcccaacaactcttaatacaaatatggtacatttgacagtttctgaaacagattatttttaaaactttttaaaacctaagctttatttttttcctggttattagacacacacaaaaaaaataaaaagaggctggggcagtaatgccaaggaggaaagaatattaaactcattgggtgtttg

SEQ ID NO: 9445 - DNA, 981 bp, Homo sapiens
tttttcagaatattcaactttattttccattgacaaacacgacataaataacacacatttattaaatacacagactagccatgacttgaatgccagcaaaagtctaacgtacttttcatacgctcttttattttttgtctccacagtattgaagaccagcctttaaaacatactagaagatatatttaaatacactgacgataactacccataaaactttacatagaggtgataaaagagacttttccatttaatcaagtatatagagatggatgctgaggaggagaggtgaagaacactatgcttttgatactgatctttacaatatggattaaagtgccaatgatttcagctcctcctaggcacaccatgtaaatagtacttacattcatttgttacaaacagatcaaaataatcagtgcctattttaattggtttgcttaaacaggcttacactatttgtacaaaaacatttgataaggagagcaagaaggcaaagtatttttttctctttcaaggaagagttgggaaggaagagagttcagcagtcaataatggcctgagtgaacttatcatttgctttgacagacaagacccctggccactcagtagtactactgatgctcaagtgttcaaagataaatgcagtcggtcccttcctctctttgcttccagggcctggcacaaaatgatgaaggttaacaggtagaaaatggacaggttttccatcatatctttttctatgttctctgccccacccacatgagtatcctttcaaaagtagaacgttgaagtgtattagtaaatcacacgcatttccctctgcttaacattacaactttgatttctacagacatggaaaactgtatgagaaatctatatttgaattactattaaagtttaatgattggctgtttttgcctagacgtttggcttactttaattacaggatcaaaatattctaattctaaagcatttaac

SEQ ID NO: 9446 - DNA, 823 bp, Homo sapiens
ttactcataagtgaggatgaaatttatttttcaacaaccaatatgccaatatccaacttctaggttttattcaattctaatgtcatgggtttctcctaccccagtcaaaactcctgccaaatgtccacaaaattgacaccaaaatcaacaaacacaaagaaagagagggacagggagagggaaagagaaatagagagtgaggaaggaaggaacgtgacaagagctaccatgcaaaatgaccagaagaactggagttcagtggcacagatcagcaggagcagaggaatgctgcaaaagatgatgctgcatagagtctaacttggagatgcctgtatgatgctggatgaccaagtactaaggtcacaagtgtgttcatggacccataagaaccaggatcttgatccaaacttataagatcttctaaaaagaaaaatacttcatctaaattgaagcaattcctaagtccaacaccagaagagttccttatttgatgtaagttgtgcctaaaactttggctgatacaaagaaacccgtccactaaggcaccctgaggcaatctgacaatgtgttggagagaactttgttgtcagtaccacatcattatgagagtacagagaacggatcacccgcaggggactggcttctttgggcaagcagtcaacaagttcactgcactgtttgtcaaatcccaacaagcgaatcccatagccatgtggggaagaaatcattccgtccatcggggctgaagcaaagttctttgatgtaaccccctgcctacattggcttcttcaatgtaatgtctcacctcgctgttctctacgac

SEQ ID NO: 9447 - DNA, 580 bp, Homo sapiens
ttttttttttttttacaataaacaaaaagatttgtattagaacatatacactcagggaagaaagaggtatcatcatcaaatgtggaatgttgaagaaatagttaaaataaataaagactccaagcacagctgggactggctcaggctggggctcacagaggccactgcacatcagctccaggctgcaggagccaccacctggccatactggcttcctccctgacgcagcacagctgtgcctgggacacagagtcgctctcaagtactggagcagctagcaagctcactccccactctcctcacttatctctgtgacaatgtctatcaggctctggagcccgaagatatagccagcatcctggccctcatgcaccacggtgtcctcgccatacagcctgcaggtggtgtgtgcaaagtcgatcatgcgcacatctacagagctggcgccgatgggtttgtaggcataggcaccagcagactcatcagctgattcctctgacaggtcctccaaatcctcagcatctgagtccaggaccacttcggggcgctccttgccatcataaatgaccagcagggagct

SEQ ID NO: 9448 - DNA, 281 bp, Homo sapiens
  misc_feature (1)...(281): n = a,t,c or g
gtcctctggatatcctgggatggaatcctaatgaaggaaactccagtggtttactgaagccctttgtgctaggcctgaggtgagatagaattgctccatcctatgcccaggaggcctgcgtggactcacagtgcaccaccatcctcagaaatcctctctccctgtaggctgtggtctgaatctttgtgtcttcccaaaattnatatgttgaaatcctaacgccccaggtgatgatattagaagatggggcctttcaggagttgactaaaacttcagggaaa

SEQ ID NO: 9449 - DNA, 3818 bp, Homo sapiens
ctgctcccaaaaatggcggacgcattcggagatgagctgttcagcgtgttcgagggcgactcgaccactgcggcgggaaccaaaaaagacaaggaaaaggacaaggggaaatggaaggggcctccagggtctgcagacaaggcagggaaacgttttgatggtaaattacaatcagaatcaactaataatggaaaaaataagagagatgtagatttcgaaggtacagatgaacccatttttggaaagaagcccaggatagaagagtcaataactgaagacttaagtttggcagacctgatgcccagagtcaaggtacaatcagttgaaactgttgaagggtgtacacatgaggttgcacttcctgcagaagaggattatttaccacttaaaccacgagttggaaaagctgctaaggaatacccgttcattcttgatgcttttcaaagagaggccattcagtgtgttgacaataatcagtctgttctagtatctgcacatacctcagcgggaaaaacagtatgcgccgagtatgccattgcattggccttaagggaaaagcagcgtgtaatatttaccagcccaattaaggctctgagtaaccaaaaataccgtgaaatgtatgaagaatttcaagatgttggtttgatgactggtgatgttactattaatcctacggcatcttgtcttgttatgaccacagagattttgagaagtatgctttacagaggttccgaagttatgagagaagttgcttgggttatatttgatgaaattcattatatgagagattcagaacgtggtgtagtatgggaagaaactattattttgcttcctgataacgtccactatgtctttctttcggctactattccaaatgcccgacagtttgctgaatggatttgccatttacataaacagccttgtcatgttatttacacagattatcggcccactccattgcaacactacatttttccagcagggggagatggcctgcatcttgtggttgatgaaaatggtgacttcagagaagataattttaatactgcaatgcaagtgcttcgagatgcaggtgatttggccaaaggagaccagaaagggcggaaaggaggaacaaaaggaccatcaaatgttttcaaaattgtgaagatgattatggaaagaaatttccaacctgtgattattttcagttttagtaagaaagattgtgaagcctatgcacttcaaatgaccaaattagatttcaacacagatgaagaaaagaagatggttgaagaagtattcagtaatgcaattgattgcttatccgatgaagataaaaaactccctcaggtagaacatgtacttcctcttttgaagaggggaattggtattcaccatggtggtttacttcctattttgaaagaaactatagaaattctcttttctgaaggattgataaaggccttatttgccacggagacctttgctatgggaattaacatgccagctagaactgttttatttacaaatgcccgcaaatttgatgggaaggatttccgatggatttcttctggtgaatacattcagatgtctggtcgtgctggaaggagaggaatggatgatagaggaattgtaattcttatggtagatgaaaagatgagcccaacaattggaaaacaattacttaagggctccgctgatcctctaaatagtgctttccatttgacctacaacatggttttgaacttactacgtgtagaagaaattaatcctgagtacatgttggaaaaatccttctaccagtttcagcattatagagcaattccaggagtagtagagaaggtaaagaattcagaagaacagtataataaaatagtaattcccaatgaagaaagtgtggttatctattataagattagacagcagcttgcccaaattgggtaaagaaattgaagaatatattcacaaaccaaaatactgcttaccttttctacaaccaggtcgtttggtaaaggtaaagaatgaaggagatgactttggctggggagtagtggtgaatttctcaaaaaagtcaaatgttaagcctaactctggtgaactggatcctttgtatgtagtagaagtacttctgcgctgtagcaaagagagcttgaaaaattcagctacagaagctgcaaaaccagctaaacctgatgagaaaggagagatgcaggttgtcccagttttggtgcatctcctgtctgctatcagcagtgttaggctttacattcctaaagaccttcggccggtggacaatagacagagtgttttaaaatcaatacaggaagttcagaaacgttttcctgacggcatccccttattagaccctattgatgatatgggcattcaagatcaagggctgaaaaaagtcattcagaaagtagaagcttttgagcatcgaatgtattctcatccacttcacaatgatccaaatttggaaactgtgtatacgctttgtgaaaaaaaagcacagattgcaatagatattaaatctgcaaagcgagaactgaagaaagcaagaacagtcctacaaatggatgaactcaaatgtcgcaaacgtgttttaagaaggttgggatttgctacttcttctgatgtaatagagatgaaaggacgagtggcttgtgagataagccagtgctgatgagctccttctaactgagatgatgtttaatggccttttcaatgacctttctgcagaacaggcaacagcattattaagctgctttgtgtttcaagagaattctagtgagatgcccaaattaacagaacaattagcaggaccacttcgtcaaatgcaggaatgtgctaaaagaattgcaaaagtttcagcagaagccaaattggaaattgatgaggaaacttatctaagctcatttaaacctcacttaatggatgtagtatatacctgggcaactggagctacatttgcccatatctgcaaaatgacagatgtctttgaaggcagcataattcgttgtatgaggcgcctggaagaattgcttcgacaaatgtgtcaagcagcaaaagccattggaaacactgagctggaaaataaatttgcagaaggaatcaccaaaatcaagagagatattgtgtttgctgccagcctctacttgtagagtcagctaaaggaatgtgagattttaaattattgaccacctgtttgattacagttgactacaaatgcctgcaagtgtggatttggttctcccatacattttaatatgtattatatttaaatcaaacatcattcatagaaagcatattacatacatgtttatacataagcattacatttttttaataaaaatgtatacaggtggggcactgttttggtggaaggcttggagtttttttaatgagtttagagctattagataaccactgagttaaaggtaactatgtacacacaaagtgtgcatccaagaggcatagcagcagcagaagtctttaaaggcttgtacaccaggaagaaagatgcatcctcttgccttgtggcaatcattttccctttagaaaacaggccagcttcacctgggcaccctgctgccttttcaaggctggtgattgctcggatagtgattcccagttgttggtgtttcatgcagagttgtatgagagtcctcctcttttctttctttaaaagaagttctttctttgaagaaatccgatacatatacagcaactaatattgcaaccagagctccctgaatgagtccagtcaacacatcgctccagtggtgtttataatcagaaactcgagaaaggcccacataaatggatacggcaacaag

SEQ ID NO: 9450 - DNA, 200 bp, Homo sapiens
cggaactccaccgtgacttgcaccagggcattgaggcagccagtgacgaagaggatctgcgctggtggcgacagacacccaccgggccaggcaatgccatgaactggccacagttcgaggagtggtccttggacacacagaggacaatcagccggaaagagaagggtggccggagccctgatgaggttaccctgaccagc

SEQ ID NO: 9451 - DNA, 353 bp, Homo sapiens
ttgattaatttttattcacaactgtttcttcaaacaataagaagtaagaaacatcctaatatcctaagccttcaccagatgggactgttgtcaccgtctatctgccagataaccccacaaaatctgagagcacgggtttccaggtaagatcagaatatgggaaaaggaatcaatggtcatgttttggttcactatcacatggttctaccaggacacagaaatctgagcctcaattactgtgattcatcaaatgtttcccttcaggcatcatcccctagagcaggacatctcaagggtaaggtacaggcagatttatacccagagtataggtcaaagatcagggtgagttagcg

SEQ ID NO: 9452 - DNA, 398 bp, Homo sapiens
cccaaggcccctccatatgcctcctcccaattctcctccccaggacccaggggtttcctcactcccacctggggaatggctcccacggggaaacctcttcacttccggttctggcagcgacttctgcggctgcaccaggaatcctgggttttctgagcctggctcccccagattctggtttggggacagggttcacaggctgtgcaggcgagagcagggcactggctggagagcagccgggtgggggagcatcccgggccagccgaggggctgagtgcccccaaagcccacaggtgcaccccttccctgaagcagaggtgaggtttggggggctgagtccccgacagggttgtctcttgggttcccaaactggggcagcacctactccgtgtcagtgg

SEQ ID NO: 9453 - DNA, 1441 bp, Homo sapiens
tttttttctgtttaccatttcagttattactctctacaatttctatgcacaaatggcatcaaatatatgatggcttaaaaatatgtacttaactaattatctaactcttcctccaccaaccccgccttggtttctgagttaattataggatcacgaccttttgattgtagggttacaatttaacacagaattgtaaataaggaaaaaaatgtgattagcccacagttacttgatattggcttgcctcccagcagggcagtgtgctggagggaaacagaaacttctcaatttttttttaactggtctgaattaaattataactacactgagtaagtgatctgaataaacgactttactaacttgagggtgaaagagatggaaaagagccacgtgccccaaccactccccctgctaccgtctgggtggaaaaaagccaagagatctgggaaacctggtatagtttaaaaacaacaagcatcctttattctccttccagtctcagtgtccagaggctacggttaacaggttttcaaagtgcaaatcatttcattcctcaaaagccagaggggaataaaaactgtacatcatctccaatccatattcatcaggagcgccctggggcttgtcatcctgctgcacggggccaggtttcagggcctggcggaaagaggtctgtaggctttgggacttggtgtctggccccttgagatgagattagttctccaataacctgaatgcctcttggggaggcggcagcacggcaggcgtagaatccctctagacagccagatcgggcgtgggtggagtttaaaccccaggatgttgctaacagccacaatgaaagctgggggtcagaggtaagagcctgctgagcaggagtggggatctgcaaagggactaagggggtagaataatacaaaaggccaaagcaataggaacaaaatggaaaattatttctcctggtgtgaaagggcagaagaaaagggagctaggggttagccaatgaatgaagagctcaggacaaagctttccttagggacatcgtggcctcctttcctccacaggagtgaatgcaggacagggggaggaacagacacatgatatctcaataaacccacctggtgtaacatcagcctagtagaagcccacacacagactctgaatctttgcacgaacacgggtcaaggaagacagacatcaaagactattatttgagtatggattggaaaaaagaaggcacctctgagaaacagtacaaaaccaggttgcataaagtgaccaaagctttggtcaaagttttagctgtaagactgccacaaaggtctgggtggacagacactgcgggaacacacagtaaagcacccttccacagcacgagggcagctagctggagacctggacctgccccgaggcttgtagcagcatcctcagccctgtccgc

SEQ ID NO: 9454 - DNA, 569 bp, Homo sapiens
  misc_feature (1)...(569): n = a,t,c or g
ttgtttggtgaagaaagggagcatttagagcagttgatggtggtgtgtcctccgtgttctgaaattccagatgatctgtgttggattcttggcttctaccccatgattctcctcaaagaaattgtgtgtnnnnnnnnnnnnnnnnnnnnnnnnnnnnnnnnnnncacaggagatgcagtgcctgtacaggtgtgttcagtgtgtggatgtcattaacccatagggctatgcaacaaaagacacatttaatagaagtaaaacacacaagaccgctgcctggtctcggggttcagcatgattgtgaccaaacctttttatagaatttccttacctgaaggcacaacactctgaaactttaaagataacagagtattttattccaataggattaaaccagggaattctcggactgtgcatgtggatccactgtggcttcctgttgccaagtaggagggtgtgtatttttgacactgacgttttgtccccttgttccccagcccccagcccatgttatcttgggtgtcgaatgtgtccattccatgcagaaccacagccatttccccaggcag

SEQ ID NO: 9455 - DNA, 2648 bp, Homo sapiens
ggcaaagcgaactctagttggcctagtaagagacctgagagggatcgctttcgctttcaatgccaagaccagcttcatgatgctctttgaatggatatatccatcctatatgccaattctccaacgggcaattgagctctggtaccatgatccagcctgtactacacctgtactcaagttgatggctgaattggttcataataggtcccagcgactccagtttgatgtctcttcccccaatggcatcttactcttccgagaaaccatcaggatgataacaatgtatgggaatcgcatcctgacactaggagaggtcccaaaggatcaggtctatgctctgaagctcaagggcatctccatctgcttctccatgctgaaggctgctctcagtgggagttacgtcaatttcggagtctttcgtctctatggagacgatgccctggacaatgctctgcagaccttcatcaagctgctcctctctattcctcacagtgatctcttggattaccccaagctcagccagtcttattattcactactggaagtcctgacccaggaccatatgaactttattgcaagcctggaacctcacgtcatcatgtatattctctcttccatttctgaaggacttactgcacttgacaccatggtatgcacaggctgctgctcctgcctggaccacattgtgacatacctcttcaagcagctgtcacgtagcaccaagaagaggaccacacccctgaaccagggagagcgaccgctttctgcacatcatgcagcagcatccagagatgatccagcagatgctgtccacggtgctgaacatcatcatctttgaagactgtaggaaccagtggtctatgtcccgaccactacttggcttgatattgcttaatgaaaagtatttttctgacctaagaaacagtattgtgaacagccagccaccggagaagcagcaggccatgcacctgtgttttgagaacctgatggaaggcatcgagcgaaatcttcttacgaaaaacagagacaggttcacccagaacctgtcagcattccgtcgagaagtcaacgactcaatgaagaattccacttatggcgtgaatagcaatgacatgatgagctgacacctccttggactctacctgtacagagcagcgtccctttggtttggcccagaggggcgaacaattgcaagggagagggcctggctgatcctggctcttttctccaggggtgtggggaaaatggcaaaggtcaactagctgcttccccagggaataggggtgtgagtacactcactagggggcagggcgctgctggttcctgggggactgggtgggaagggtggtgggaggagataagagatacaaactgagactccagcctctcctcctggggccacccaagtggggagaacccctagtgtcctgccacaacctgccttgtataaacatgtacattttttcataacattttgaacaaggtttatattgactcaagtttaaaaacaaaaagtgtgactgaaaaatttttacagagtctagtgcaccaatgctgatgtgaggggttgtgtatgcgagtgaagaaaatgtgtattctggtggcctgaagctttactggacaaggatgtgtgagagtgcagagatatatttagtgacacagtagagaggcaaaaaaaaaagctaaaattccaaatgtatattttttcgtattgccctgtcctcacccaggaaatgatccaattcctgttactgtattaacccttgttattagggaactctaaggccatgccaggaacaccgtccctccccttgggaccgtgtaggattctgccctggggtccctaggccccttggcagtgattaaataactccagctaaaaagtgtttgggtgttcttatctccaccctctttcctactttgcttaccctcatcctcagacagatgcctcttgcttttaaaagttggatttaacgacgtgttgtagggttcttggtctgtgtgaaggcagagaccagagagaaggaagtgagcccactgctctcctgggagcaatgtgggtgagtccaccagaggccctgctgtgtgtggccaataaattttagtcttccccagccctcgaggcagtgtgtgtggatgtatgcgtgtggatatttatatatgtaccctgcactcatgaatgtatgaactggaggaagttactacagtggaagggttcttaataacaaggtctacctagcatgaagtatttaacattctcccatcccttaaaaaatatacatttttataaaatgaaaaccataataaatgttttgaatattaaaaaaaataataacctacagaggaaaattaatggagacagctatttgccttgtactttttccacaattgttgctgctagttgtacacatctctagttcagctcttgcccacgggacactcatcaattaggttttatttttatttctttcctctacccccagaaacaagcctgttaattttttttccttctcctctggcgactgtgtgatgaatcctttcttgcgtgatcaggttgcggatagacttgtaagggtgtttgctgcatacagtgtaagcattgtgaccgccaataaacttcaatggtttctactgaaaaaaaaaaaaaa

SEQ ID NO: 9456 - DNA, 389 bp, Homo sapiens
ggacgcatgattttaggtcaaggtatttaattatttttacttaaaataggcatttttggttgggaaagagaaggatgaacaatttgatgtcacctttaagactgatgtttttaattctgcttttgggaccacttgatctagaatgccttgaaaattccagaaagatttaacaacacactgaggtaagcaaaacaagaaaagaaagtaggggtgaggtgatacccagataatgcaaatgcaggatgtattgtctgtgaatttcagcatcaatctgaaaaacatgttttgataatgcctgataattcatcatctcactgattacatgtctttttttctatttgtttataatcttgtgtcttcaaatgtgtggaagatgtgcagacttattt

SEQ ID NO: 9457 - DNA, 397 bp, Homo sapiens
aaaaaataatcaatgactttcctcttccattgttcagaatcagaaatgttctttcgtatttgcttctcttctacaagagattatatttggcttattaaaatataaaccatgtccaaatgattgtatttttatctttaacaaattatgcctgggatttgtttttttacagaaataaggctaaaggcttctgcttcagtaggggtgacatgtttgactcctgtaaaaatgattttgaatgttactcctgtcaaaatgattttattgcaagtaataagtcttgtgggatcagaacaagcttattgtaaacacatgtttttttcccagtgatctacatcatgccaaatgtctgacaactcaaatgttgatgacagcgatggtttttccatggtgaagtttt

SEQ ID NO: 9458 - DNA, 1493 bp, Homo sapiens
ttttttatattttttgaaaatactgttttattaacaccacagtgataaacaactttaagcttatgtttctttatagatcactggctcacacataattcaaaacccacacagaagctaagagtctttacattaaatatattcttcctaaaaatccttactgtatgcatctgtcctcaagcagtaaaatttgattatgcaccattttataattaatatgtcacatttacatagcaaaataatgaaggcacagctaatacaagcaaacttaaaccctttctacttctgagctgggggtaggggcacacacttggattggttcttcaagtatatattttttccaaacattagcttcagtgaagagttctgatgattttcacagctacaccctaaaagctacatgacagaaagacgtcacaaggcgcaaagtacataacgctggatacacatgctttacataatttgctacattctacatctcttcaagtaaattaatatttctaaaacgctaggtaaagtgatttaatacttaaacatatttggggtattttttacgtgtttgtaaatagacagtactaagaaaacacaaacatgagattgtaacataatgaatacatatgttgacagtattttacaggttttacaccctccttcttggaaccatgttgtttctctaaattcaaatactcaaaacatttttcagaacttgaaatggcagttttcctggccttattaacagtagtgtcatgatctccattgcaatcttcctcaatgccatcaatctcctgtgaagtgtaaagctgatgtctgcgttacaaaagcaaagtctcaaagatgacgtttttcttgggttctgccttctctgcactgcgaaatgtcatgagtaaagaaatttaagaattaagcactgagaacgtgttcagtcatggcttgggtgttccatgtgtagcgtatgcctgtgtgatgaatgggtttcaaagtgacgttctttacttcgcatctgctaacaccctttgtaaacctcaatcctcagagaagagaccatgaaaacataattttgggtttaattcagttttctttaacaccttttgatatatttattatgttcaaaatgaaagtcaaatttgaatcgagctggccaggatctaattgctttaatttaatctattttaggaatgtcagaataaattcacattgtattttggtcaaaaacctgagcctttttaagtccatcgatattctgggaaaaacaaaaccaggcttttttcttcgtgggctttctcttcatccatctctgccccccttacttcttggcgtcatcaggcatctcggcgtgggcatcgtcatgtttggcccccgcggcagcctctgccgcagcctcctcctcctcctcgtcttccccctcctcctcgtcatcctcgtactcctcttcctcctcctcctccccctccaaggtccatgcacacccctccatctcgccggtgagctcttggatc

SEQ ID NO: 9459 - DNA, 195 bp, Homo sapiens
tttattttaatctccagtttatttttttaagactaagagcagagtatgaaagtcacagccaaagcacttgaaaaaggcccaggaggataggtgggaccacatagggtgagcagggcaaggtcctgggagatggttcccggctcagggctggaagggagggggcgctgttgttttacggtctccaaaagtgtctgt

SEQ ID NO: 9460 - DNA, 330 bp, Homo sapiens
tttttttttacgtaaatatttatattccttgaaagcaatttttgccaaggtagttcagtttaggaatatgttgttctaaaatatgtcttagaatcctgaaagcatagattttgaaatgtttttttaatgaaaatgaaggtcagagagaataattgccctgaccacatttgcctttcagtaggaggaggctgtgaaatagtaaaattataatcgtttatgccatgataaatacaagattggtaaataaatacattgattggtaaattatgagaatcaaaatgataaaaagagcctgcttttttccctaaccaatatagctatcttaagtat

SEQ ID NO: 9461 - DNA, 670 bp, Homo sapiens
  misc_feature (1)...(670): n = a,t,c or g
ccaagctcttcagcttcaaggtgacgatgccaactccctgcacctccttgccctcctgctgtcagcacagaagcattaccatgacgctctgaacatcatcgacatggccctgagtgaatacccagaaaatttcatactactgttttccaaagtgaagttgcagtcactctgccgaggcccggacgaggcactgctgacttgtaagcacatgctgcagatatggaaatcctgctacaacctcaccaaccccagtgattctggacgtgggagcagcctcttagatagaaccattgctgacagacgacagcttaatacaattactttgccagacttcagcgatcccgagacaggctccgtccatgccacatcggtagcagcctcaagagtggagcaggcactgtcggaagtggcttcgtctctgcagagcagtggcccctaaggcagggccccgctgcacccctgggatgacgctggcacagatctggctccatgcagctgaagtctatatcggcatcgggaagcctgcagaagccacagcctgttacccaagaagcttgccaacctcttcccaatgttcccacaatgtcctctacatggcgnggccagattgctgaggttccggggaagcatggacgagggcgcggcggtggtatgaagaggccttagccat

SEQ ID NO: 9462 - DNA, 841 bp, Homo sapiens
ttttttttttttcttctgtataaaagtatattttatttaaaaacagtgatattgacatgtatgttatagcccttacagaaaaataacacgttttatagtccttttatttgaaattcagtgtaaatcactcttaaactataaattcacagttgttggaggtttttttttactttaaatgatgtgaaagcatttgttccattcaaaggcccctatgcctttgaatgacatattctcagtaacttctttgccagtaactagagtatgtgagactgagtaactataatgtgcatatttcaagaattagcttcccgctgcattataacacatttcctaggaaagcctttgtatttttcatagccttttcacatatccctcatttaagaagtcacagtgttgcagttttactttgtttcagaggggaaggccatcttgttggcataagggggacagaagatataatatactctacactccggcctcttccctacaacctaaaagggagaggagttgaggcagatgggctaggactaggctttttggtaggcacattatagaagactgggtaagaaaggtgggttaggtttttttaaacttcaaactgttaggaaaacgaggcaaaagcaataaccataccatatgttcaaacagaagtaggttaaaatgtagtagttatcccttggtttacataggggattggttccaggaacttccacatatacccaaatccatacgtgagaactcaagtcctgcagttggccctttggaacctgagtatatgaacctgctctataagtgggtttcgtgtttggttaatgatatatttttgactcgtttatagttg

SEQ ID NO: 9463 - DNA, 651 bp, Homo sapiens
  misc_feature (1)...(651): n = a,t,c or g
cagcacctgctttctgcatctggaccctgatcttcaggtgggnttaccagttacttgtagagtgtccctgtgatagttttaggtgtcaacttgacaggattgagggatgcctagatggctggggaagcactgtttctgagaaggaccatgtttttggaggagactgttttatgagtgaatttcaggggacacattcagatcatggcagtggcattataaagagagacacaaaagcttgctctctctctctgccatgtaagactaccacacaaagactgccatctgcaaaccagaagcaggtgggctttcctcagacaccagatctgcctgnaccttgatcttggacttgccagcctcccagaactctaagaaagaaatggtagcatggcttggtctaagttggaaggcctgagaaacaagcacatggtggaactgagttcaaggataaagacttgagaatacctgctcagtggactgagtagggaagatcaaccctcaatgtaggcaggcactatccaatcacctgagggcccagatggaacaaaaaggtggaagaagggtgaattctctcttccagagctgtgacacccttctcatgcccttgtaccacacaactctaggtcctttggcctttggactctgacacttgca

SEQ ID NO: 9464 - DNA, 190 bp, Homo sapiens
gtctggggagtgggtctcacgcactgctcaggttggcacgagggacctcccccatcccaacccagccccaagggtcccagcaggctctcagcatggctgttttgagggtacacaggtggctggagaggggtggggcagttgcatggtgggtggcaaagtgtgcatttagaagctgcttcgtggcgttaag

SEQ ID NO: 9465 - DNA, 521 bp, Homo sapiens
gtccactattttgtttattctttttctcaatagcaaacaaagccttgggtattgatgaaaagtatgtataaaaaaaaatacggcacaaccatcctgttctcttattgagtttatagcttttgaaggaagtcacaatttctaagtcatacctgtacatattttgaagctcacttagttgtagggacccagagctctttttttatggtgatctttgattggtgaagtagccatttcctgggtgacccttaggctcgtgtggttggctgtaaggtgtttatttttgttttgctcctacacttctttacttgactgcgtttccgtatgtattttgggggaagattctgacttcatttagtcttagtcttgagaatactgagttgctggttgcaggccagcaaagggtccaccacagtgcctgcactgcccgcagagctgccctccggaaagcatgcagtataacagctagtgctggaaggaggaaaaccaaataggcctggaggctgaggttgtactgccagctt

SEQ ID NO: 9466 - DNA, 386 bp, Homo sapiens
atttgcttataaatatttataatataaacactcaattgctatctgttttttaggttctcctctctctcccagaacagtggtaacaggaactcttgggggcttctccctgttcttgcagatgtggcaggatgtgttcctggggggctcccatgccagtccacaccctctgtggtgtaagcagggattggtaattaatgagatgctaaaccctccagaagtgagcgctcatgtcccagaaacacatcttccacctcagcagccagtgggaaaactagactttgtgtctgcatatttgttcttaaacacactcttctgcagtctaactctgctgaccactttccagtttgctcatatcagaatttcttcggttctaaggatgcatattt

SEQ ID NO: 9467 - DNA, 306 bp, Homo sapiens
cccacgcgtccgaccataatttagtctcctcaagtgaaaaacaggagtaatgtttcgttgcactttgaaagatctgcttcaaggcataactcgtgtagttgtctggtttcagggatagctgtttgaattgtcattctaaagtaggtcatcaggttcacttattatccgaccttaatctgggataaaggttttggtatttgcccacttctagatagaatgaatgaaaacaacacaagcgttttatgagcactctttatcagaaaggtatttcctggaccagaaatgggcaatagttacaatagttga

SEQ ID NO: 9468 - DNA, 470 bp, Homo sapiens
tggcttggtgctaatccggagactcaaagaaagattactgaagcgtgcagaacagcagggccgaccagacggacaatgtaaaagctacccaaaggagactaatgaacttccaagcagaatgctgctccattggttaaatacttccaggaaaaggggctcatcatgacatttgatgccgaccgcgatgaggatgaggtgttctatgacatcagcatggcagttgacaacaagttatttccaaacaaagaggctgcagcaggttcaagtgaccttgatccttcgatgatattggacactggagagatcattgatacaggatctgattatgaagatcaggtaattaaaatctgaaaatagttctctatttaaatgtttttaagttgaacctttgtaaatgttttatgaaaatttgaattataaaaactcattttgtgaaatatatacagataactaataacatattacatgat

SEQ ID NO: 9469 - DNA, 375 bp, Homo sapiens
ggacgctatgggcgggaaggtgcaggatatcaaggctcgcgagaaagatggcaaggggcggacggcgtctcccatcaactccccagccagaggtactccatctcccaagaggatgccctcaggtcgtgggggacgggaccgcttcaccgctgagtcctacacagttctgggggacacgctgatcgacggcggggagcattactgggaggtgcgctacgagccggacagcaaggcgttcggcgtgggcgtggcctaccgcagcctgggccgcttcgagcaactgggcaagacggccgcctcctggtgcctgcacgtcaacaattggctgcaggtcagcttcacggccaagcacgccaacaaggtcaaggtgctgga

SEQ ID NO: 9470 - DNA, 485 bp, Homo sapiens
gaatgaatgattacatccttaacagaaaacctgggtgtataaataatacagctgaaagaaacagaagtgtacaccttccaacaacatacactcccaaccacttgtgttgtttttggcaacaaccaaaatgccattgcttgcacaaaaagtaaataaatgatcatatgatggcaacattcatcataagagagccagtaggcagtgactgtaagcatcacagccaccaattatgtcattttagaattgtgagcaaattcacaagaacacacagtgcaatttttagctgcatacatttcttctgagctccaactcagcaatatgcaatcttgacatcaaagcattagccaaatatttgaggaaattttcttactaaaataccaagtatttctactaaatgcacttatccttctatatgtttatatattttggtaaaattgatttatcagatacttggtattttagtaaaatatataaacatatagaag

SEQ ID NO: 9471 - DNA, 592 bp, Homo sapiens
ctctctctctttctgtctcttcctcgctccctctctttctctcctccctctgccttcccagtgcataaagtctctgtcgctcccggaacttgttggcaatgcctattttttggctttcccccgcgttctctaaactaactatttaaaggtctgcggtcgcaaatggtttgactaaacgtaggatgggacttaagttgaacggcagatatatttcactgatcctcgcggtgcaaatagcgtatctggtgcaggccgtgagagcagcggggcaagtgcgatgcggtcttcaagggcttttcggactgtttgctcaagctgggcgacagattggccaactacccgcagggcctggacgacaagacgaacatcaagaccgtgttgcacatactgggaggatttccacagctgcacggtcacagcccttacggattgccaggaaggggcgaaagatatgtgggataaactgagaaaagaatccaaaaacctcaacatccaaggcagcttattcgaactctgcggcagcggcaacggggcggcggggtccctgctcccggcgttcccggtgctcctggtgtctctctcggcagcttta

SEQ ID NO: 9472 - DNA, 131 bp, Homo sapiens
ctctgaaggagaaaagcaaagaagctcttttggcctcacaaaagccatttaaatttatagcaagggaggaacagaagcgagcagcccgggaaaagcagctgagagactttcttaagtataaaaaaaaaaaa

SEQ ID NO: 9473 - DNA, 763 bp, Homo sapiens
ccgacatattgcccgcaggagctgcggcggcgaagcggagagcaccggggggaggagatgggaggacgaagaggtcccaacaggacatcttactgtcgaaatccgctctgtgagccgggatcctcggggggctctagtggaagccacacttccagtgcatcggtgaccagtgttcgttcccgcaccaggagcagttctggaacaggcctctccagccctcctctggccacccaaactgttgtgcctctacagcactgcaagatccccgagctgccagtccaggccagcattctgtttgagttgcagctcttcttctgccagctcatagcactcttcgtccacttacatcaacatcttacaagacagtgtggtggtatccactttcccacccacccttccacacctccctgaacttccatctgatcgatttcaatttgctgatggtgaccaccatcgttctgggccgccgcttcattgggtccatcgtgaaggaggcctctcagagggggaaggtctccctctttcgctccatcctgctgttcctcactcgcttcaccgttctcacggcaacaggctggagtctgtgccgatccctcatccacctcttcaggacctactccttcctgaacctcctgttcctctgctatccgtttgggatgtacattccgttcctgcagctgaattgcgacctccgcaagacaagcctcttcaaccacatggcctccatggggccccgggaggcggtcagtggcctggcaaagag

SEQ ID NO: 9474 - DNA, 1518 bp, Homo sapiens
agcagagtttgtatattgttagaatcctttaaaaagttttttgagtctagggccaaacccagtatgaggcattcatatgcccagctgttaagacacagcagtcctaggaagcaatagctttggagactttcagcttccagataggttatatacttaggtaaaatatgttcaacaatgggagcatttttgttggagttaataattatggaccatgttaatccaaaagtatccttggaatatttattatagtagtagacactgttcatcttactagcctagaacttattttaaaatagtttaagtaagtaagtccaagcttaatttgttattgacagaaaagtaatacagcctaatctaatctaagcaaaaatgtaagggaataaagtctacatgcatcaactgaacagccttagaatgaggaactgaatggatatattaatttccatggtaaacttgatactggttttcataatggacactaaggaaaataaagagccatatttatttttgggtcagaggcagtttattttaaatgtgatttcatttacatttataagcagcttttcttgacaggaattttgattaaattgccttcagttctaaaacaaacctctgttgctttcagacttaatgtgctctgtccccaacaaaacatatgaaaatatagtttaaagcacagttttcacagacacagtacaatacattcactatacacagtataacaaaatattcccatccttacctgtttagtaatactgtcacaatgaataagtaaatagaaattggaatttatctttgaaagcattgaaagaaatttaacatgcacaatgactattttatgactgtttagctgttgaactactgatccagcctgcagtttcttgcactagaaagagcgaagctaaataataattgctggcctaaaaaattttttttggtcaattgtaggtagatatgaaatagccaagtggggccttcttatgcaccaactagttgcgtctcatgtctggatcacccttttaaacataggataacactgtatattcaggaccaagaccatacttcagatctgaggaaatttttagagggcagtgtttttataaatactttgaatccctcataatgaaggattttagaacttatgaatatagaggtttactcatctaacaaacagaactgtcatcctttcaaaatgtctgaaaattgaggagggacccctgcttcccagttatatgtgatgtaagacttttcatcaaatgggaacatgggaagaaactttataagcaatttgagtttgttttatgggcagttagctatctcaaagcattttttattgcattattaggcaactggtaaactctcgtgtttaaggaatagcacttgggagaaaagaacactcaaggcatgatggtactgtcggtgaggaaaaacttaaggaatggtccagatgtagattactctaataggtcgtattagtcatgcttttctttgaccacctgctgcaagaagcacttaatt

SEQ ID NO: 9475 - DNA, 369 bp, Homo sapiens
gtgcgccccagtctttctgaaacctgtgatcacacttcgggcactgtcccctctacagtcaatctgtgttttcagaagtggccccaggttcactcgtcttacagcagtcctaaagagccggctgccctttccctaggcttccttgctcttgagggctaaattccagccctcctaccccagtgccacttgggtaaaaatactctgctcctctcacgtttgctaataagcccgggctccgactaccaccgttcgggggaagggagccccttaccgtcattgctgggtccgctccgggaaaacatgtgccggacctgacttgtgcggcggcatctttccggaaatgccgtttttgtttccttctaagggtgt

SEQ ID NO: 9476 - DNA, 469 bp, Homo sapiens
  misc_feature (1)...(469): n = a,t,c or g
aaggtattcaggcatagttcacatcttgtaagtcaccagagaatccacactggagagaaaagatacaaatgtattgaatgtggcaaagcctttgggcggttgttttccctcagcaaacaccaaagaattcattctggcaaaaaaccttataaatgtaatgagtgtgggaaatcttttatttgtcgctcaggcctcactaaacatcgaataagacatactggagagagccttacaactaaactcaatgtgacaaggccttagacgttgtcctagtttctggaatcaccgaataattcctacttactgatataccttgtatatttaccccttctcttgaaatcccnnnnnnnnnnnnnnnnnnnnnnnnnnnnnnnnnnnnnnnnnnnnnnnnnnnnnnnnnnnnnnnnnnnnnnnnnnaactgagaaagatgtagcgtcatccccttggtgctgtcctggcaatagtgac

SEQ ID NO: 9477 - DNA, 80 bp, Homo sapiens
tattataatacttggtgttggggtgttctttctgttttgttttttactttaattttgttttgattctttttttttttttt

SEQ ID NO: 9478 - DNA, 613 bp, Homo sapiens
aaaggaagttgtcatctcttcttattactctaatcctgctggaagctagcttcttagggactaaaaccagaacaaatggaaggtccaaaaatgctaataagaaattagtattttcacataataccaaactgtaaaaaccaggccagcaagtgtcaccaggttcctgaaacaaaccataaatacattatttaacttagtattgttaaattgtataaatatgtgggtaactgtgacagaaattatgcacttataaaaagcagtaagttacatagtgaatgctgttttctgtggataagaagctggaattgtgatttcatttaatcgaaagacgcttactttgaggaaacttgtttgaaatgcaaacgcgatttctctgtggagccttcacggaattgctgcttttcactatgattattgctgcataacaggccacttctgtgtgtaggaagtgcgtgtgcaagtccaaagggaattgaggcctgaatgggtgggttatcccaattaacaaatacaaagttttcagtacattttgttttaagccaggtgcacaagttagagttgctttttgggactggcatttatgtatgtgagaatcaaacctgatatcactctt

SEQ ID NO: 9479 - DNA, 816 bp, Homo sapiens
gtctcctagcaacaagttgtaccatatgaggacggccgctgagccataatggagatatcaatgcctccacctcagatatatgtagaaaaaactctggccattatcaaaccagatattgttgacaaagaggaggagatacaagatattattcttagatccggattcaccattgttcagagaagaaaactacgcctcagccctgagcaatgtagtaacttttatgtggaaaagtatggaaaaatgtttttccccaacttaacagcttacatgagttctggaccacttgtcgccatgatattagctagacataaagccatctcttattggttagaacttttgggaccaaataatagcttagtagcgaaggagacacatccagacagtctgagggcaatttatggcacagatgacctaaggaatgcacttcatgggagtaatgactttgctgctgcggaaagagaaatacgttttatgtttcctgaagtgattgttgagcccattccaattggacaagctgctaaggactatttaaatttacatataatgccaactctgcttgaaggactcacagagctttgtaagcaaaaaccagcagatcctttgatttggctagctgattggctgctgaaaaataatcctaacaaacccaaactttgtcaccatccaattgtagaagaaccttattaaaaaaaaaatcctcgaaagaacaaatcatgaactatcttattataaaaggctgtacttctactgtttgaaaaaattatttctagggtttaagtaactacaagtaaaataaatttatttcttaaaaataaa

SEQ ID NO: 9480 - DNA, 696 bp, Homo sapiens
gaaatacaaaaatgaaaatatttataataggactcgacttggagaaattgctattcttcctgttgtccaaaccataaatctgaggataacctgggcttttctctttcctcttctcctaaccagtttttcaccaagtcctgtgccatttcacctcctaacgtctgtcagctatccttttgcctttacctcaccactattaccctagagaagactttcattatttctcatctggattaccagctcgatctctaatctgcttcagttcatccttcttgctacttctaggctaaacatcaaaaacagatctggtaggggcggggaaatgagggggaagaaccaaaaacgtgatggtgcctcatgctgcttaaaatcttcagtacattgatgttttgatggcggactacataagcggtaaaaattgtgtttttcagaatctttaaaatataagacagtgccatctagtgaataaaaaaattagtttgaaagatatctggagaaatcgcattcataaaacaattggaagtgaaactattaaaacaatagggctttttaaaattaaaaatatttaaaattcaaaagtaattaatagtgttggaagatgtaggtgagaaaatattcctgaaagtagaactgaaagagacaaagagaaaagatgaaagccacagaagataaatacaggggtcaaaaccagactaa

SEQ ID NO: 9481 - DNA, 303 bp, Homo sapiens
  misc_feature (1)...(303): n = a,t,c or g
gtcgcttccctcctgccagacctggcagcctgggtgtcatggagtactacctgatggatgctgcctccttgctgcctgttctggccctcggnctgcagcctggggacatcgtgcttgacctatgtgcagctcctgggggaaagacactagcgttgcttcagactggctgttgccgcaatcttgctgccaatgatctctccccgtcccgaatagccagactacagaagatccttcacagctatgtgcctgaagagatcagggatggaaatcaagttcgagttacctcatgggatggcaggaaat

SEQ ID NO: 9482 - DNA, 755 bp, Homo sapiens
ctcaaaacacctgtatttaaaccttaatatgaaaatcatgcaattaatagttacacaagatgttttcattacaaaatatgtacctatatattgatggactctacatcctatattgtgacatgtaagtcctttaaaaggtgaaaagtatgatttcttaccacttaagtatgattgatatgatccaacaaatttgatcagaagctgtaggtaaatcctcttctgaagccaaaatggtatattaaatataatttattggtacttccattttctcttccttcttacttgcctttaagatcttataaaaaagaaactaaaagttaatatttagttgcctatattatgtaaccttttaactatatataaagtacttttttggtttctttctcaccacttttattcaaaagtacttttaacataccaatacatagtctgtctgatgggagtataaattggacagtaaggttttgtcttaataaaatgaaatttgtttctcatgatatgaatcttgcaggtaagatgtagggtttattgaaaatgtgtgggttaaatgctttcaggtacaccaattctttctactaaattgagctctatttgaagttctttggaatctgtggtgaaaaataattttctggatttcccaaatacattaagggcattaaatggaatattaatccacctttaaagtccttttaggaaaagggacttggtattgggtttttggctgccatagaggggttgaataagtgtatgtatgt

SEQ ID NO: 9483 - DNA, 280 bp, Homo sapiens
cacttattattcagttttttcttttatttattaacagagcatccagtgcaatgtttaatggaagtaataatggcattcttgtcccattcctcactttactgcaatactgctaacattttataatgataacaatgtttgctgtgggtttttggtaaatactttatcaagattattaagtgttctgtttccagttcataatgtattgttgtttgcttttttttaaccatgagtgacagtttaattgattaaatgctttttctgcacctaaaaaaaaaaaaaa

SEQ ID NO: 9484 - DNA, 336 bp, Homo sapiens
catctgttcgcagggtaccctccatgaccagttgtgtctcagagaaggcagatctagtccattcaaggccaggatcccccggaggtcagtacattatttgcccagtgaactgtgggcatatctatactttttgcacttttccaggcaggaaggaggaagtagtactgagaacccactgtcttgggttaaggagcattctctgggctgcttaggggagaagatttctatcccaaggtcctgcagccttggggtaagatgggagcagagaagacagagtgtggggccactgtggaggcagcagggaggggttccttgtggccactgatcggagccctc

SEQ ID NO: 9485 - DNA, 355 bp, Homo sapiens
gttacctttaaaatattaagccatatgaatatatgacctattcagaactaaaattaagtaaaaaatgaaaagactgtgctattattggttgcagtgaaattcagggaagtaaaaactaagtcttatcagcagaataatgtttgaaagatgattcgtgcttattaaagaaatatggcctttcattgttatagtctatattttaatttttttcattctaaaatatgtgggataattcctagtgttgactgagaatatactcttaaataaaatgatacagctgggaggttctcttttaaacacagttcagttgcagctggaacaatgtatttcagtttaggttggctgaatctcaaag

SEQ ID NO: 9486 - DNA, 1233 bp, Homo sapiens
ggaacaagctgggatatgtgagcgttaagctactcacatccttcaaaaaggtgaaacatcttacacgggactggagaaccacagcacatgctttgaagtattcagtggtccttgagttgaatgaggaccaccggaaggtgagggaggaccacccccgtcccactgttccccaacgagaacctccccagcaagatgctcctggtctatgatctctacttgtctcctaagctgtgggctctggccaccccccagaaggaatggaagggtgcaagagaaggtgatggaacacctgctcaagctttttgggacttttggagtcatctcatcagtgcggatcctcaaacctgggagagagctgccccctgacatccggagtcacgcagccgctacagccaagtggggacccaggagtgtgccatcgtggagttcgaggaggaaggtagactgaactgcagcaccagccctgagatcttccgcaagtgtatggattattcctctgacagcagcgtcactccctctggcagcccctgggtccggagcgtcgcaaagccgagatggggacccaggagaaaagccccggtacgagtcccctgctctcccggaagatgcagactgcagatgggctacccgtaggtcgcatggaggttgcccaggggtcctgacaacaccagaggatttcatggccatgagaggagcagggcctgtgtataaataccttctatttttaatacaagctccactgaaaaccaccttcgttttcaaggttctgacaaacacctggcatgacagaatggaattcgttcccctttgagagattttttattcatgtagacctcttaatttatctatctgtaatatacataaatcggtacgccatggtttgaagaccaccttctagttcaggactcctgttcttcccagcatggccactattttgatgatggctgatgtgtgtgagtgtgatggccctgaagggctgtaggacggaggttccctgggggaagtctgttctttggtatggaatttttctctcttctttggtatggaatttttcccttcagtgactgagctgtcctcgataggccatgcaagggcttcctgagagttcaggaaagttctcttgtgcaacagcaagtagctaagcctatagcatggtgtcttgtaggaccaaatcgatgttacctgtcaagtaaataaataataaaacacccaactgggaaaaaaaaaaaaaaa

SEQ ID NO: 9487 - DNA, 1017 bp, Homo sapiens
gatgcagcacaacaaaagagcctgacagaaacggagtcagcccacgccaggccaaaccacaaaaagaagaaagcaggcttagatgggaagcccccttcatagctccctccccaaaaatcccttctacccatatctattgagtgcttgttatgaagaaagagagcagcacaccggccctctgtctgctgggggagactgacgagtgaacagattattccagaaacctgggggtaagcaagatagtggataggggacagagggccaaagcttcctagactgatgattagctgagctgagtgataaaagagaagtcagataattacacaaaaatgagagcggcagcccagcccatgcaaaagcatggccctgaccggaagctaccaggaaggattctgatgtgcctggcctgggtggtgcctgtcccaaagcctgcaagctgggttctggggaagcatcctctaggtgatagagcaggctgtagagcaagccctgttctgagtgaggaggacaggccctgtgtgtgatggccccacctgagccactggcatgggcagtcagttcccaagacggagtccaggacagacaaaaaatgaacagctgaaaagtgcaagtagtgtaggttcaaggaagtggtgtaggaagagggagacggaatgggatctgaggagggctgcacagcacacagtaggcggcacaaaagtctgctcagttaggtcacatgctccagaggcactcactgcaaaagagcctgaagattgaactgaaatatgccatcggctttgctgagtatgaatgccaagaggagcagagagaagtcaagccctctaggtgataggcaggaacgagctgaaagaaggacataaatcttggtttgctcagacgggcctggattatacttacgttaattatgtttagtgcccttttcatgctaagaagtgtcctactttggatgataaattgtacagtcactctaggtttaagtgatactcaggcagtctggcttggaaagtcaagtca

SEQ ID NO: 9488 - DNA, 1076 bp, Homo sapiens
gctctgtcccagatctccacagacttggcctctccatgtgatcgggacacagtggtgctctgctgagttgtgagggcccagatcacagatcccatgtgagaaagagagagtttcagcgtcatccttgaacgcaggatccgggaccttcagacccagggaaagggtgagggagactggggcctggtctgctttcccgggcctgaaagcttccccgaggtttgcagggtcagggaggaggaacggtgggggtgggcagtcactgcctgttccccactgcctgtgttcgcaggagccacgggacagaagacggtggcctctgctgccgggccacgttagtccgcagctcacccgaacagaggacaaccctgaggtgtggcatatgggcacctggcactgggagtcgggggagcacgtccaggcgtggtgcatcctggggcagaacgccatggctcctccccgctctcttggcttctgccctgttggggtctcattcctttctgttccccagtgccccggggcggcattttactgctcagaatttggagggagggagcagtaccttcccggagtccacgcatgtgagttgggtcaagtgcattggacctagggaaagagaaagaaagaataaaagctggagagagagtgaagtgaatgcaagatacaaagtgggatggaagaattaaatccagagttccaggcaatcaaaatgagtgcaggttgaaagaaaacaggtgaattttagtggcatatggatgataaagctgtaaataaaattcttttgatgaaactctccggttacgagacaaagactgtaactgaacaggagctggtgtgactgttaccagacagaggcaactgatgaaaaagccctgtgaaagataggatgtgaggtgagcatgagcttgagctgagagacagacacgacagtatctgaaaagaatacatactctttccatgcatatatggaacatggatggaaactgaccacctactttgtccagaaaagaagtcttaagatatttcaaggaatcagtgtcgttatctgaccgtatcccaatgtcattaaaaaaaatttg

SEQ ID NO: 9489 - DNA, 191 bp, Homo sapiens
gttaaaggaaaaataaggctggaaataataaatgctggcatggatatacagcaactggaactctcattgctgattgaaaagcaaacaaatgctttggaaaacattttgacaatttcatataaagttaaacatacactattaatataactctgaaattcaattcctaggtctttacccaagagataaaaaca

SEQ ID NO: 9490 - DNA, 45 bp, Homo sapiens
ttttaaagcatggtaaacaccatttcccaggatgtaaatccggta

SEQ ID NO: 9491 - DNA, 369 bp, Homo sapiens
taaaacaaaataaattcttaatggcatttgtggaatgtgtttaagagccaaaactgtgaaaatgtaagctttatctttcttttttcctagattatttaaagaggattgtagccacaattcagatgaatgtttacaagccaaataatgatttaagagtgtgctcaataaaaaggccataggtttaagaattaaatggaataatataaattactaggtcaacaagaatatttcatgtatagtacactgtctaaggaatgcagagaaattttacaagaaacccaagactaaatacttcattaagaacactggttactaagtaaatagatggctcatgtaggaaaaagctaatatatgtagatgtaatgtcaa

SEQ ID NO: 9492 - DNA, 1275 bp, Homo sapiens
  misc_feature (1)...(1275): n = a,t,c or g
gtaacaaaatattttattatataaaaccaggttagaaggaatgcaggatatttttaacacaacaatctgtgcttattacacaaaattactttgtggtaaacagacagtattgtaatcccatcaaaagatgaaagaaaaacaaaaacaaaaaccaacaacaattagccatagttctgaatgcacttcaattaagccaaaacagacagctagtgatctttttatatgctctttttacttaagttttaatttgtcctttaaaaaaaaggtgaaacaaaccaagaacaagttctagaaaactgaagcaacctcttatgtatactagatgcttgatttaggaggagtttttaaacgttttcaatgttattatgtagtaaatgacactattatgaagctactagtcattccataagagtcttaaaggactgctctgtgtaacactgtgactgccgtgtgtgcttagacccgtaggttncctcagtggatagcactcaatttattccgtagtgatattgtaacaatactgccattcccttctactggcactgcccaaggtgtgtgtagcacaaacagttctcattacaaaggaccaattcagaactgaaaagctatgcataggacaaggaagatacatagaatggggtggaacacagcattttgtcaagcactgtgcaatattccatatttttccccactatggtagacaaccatttcgtggaagggcagcctattatcccacactgcatctagccttttgtcccattcacttctgtgatccattttaatttccaggccacaagacagtagtgatgctctgaaatgaaagtttgtcttcacaaatatcaaaacaaaatggaggaaaactaagcattggcctcatgttcagtcttcaggatatcacaccacgtcttttcaaaaactaaagagaattcaaaaagggctgatggtaggctttgaacatggggttggctgtttcccagtaaaactggaattcctgtcgttactgtttccttatcaaagaaggggcaagctcttttgccttttaggccagacatagcaaacgctttataattggcatagacataaaggataaaaggaaaataaccgtctgccgatggtccgtacttcttaaaaaacataggtaatagaaaatatacacaagtcagaatgtgaaattaaataatggtttgaacagaaaattcaaacaagactctttccaatttaaagggccaaaccctaccaaagagagggagttgactggcttttaaaaagtattta

SEQ ID NO: 9493 - DNA, 1817 bp, Homo sapiens
  misc_feature (1)...(1817): n = a,t,c or g
caaacattgggaggctgaactggctaccctcaaaggaaataatgccaaactcactgcagccctgctggagtccactgccaatgtgaaacaatggaaacagcaacttgctgcctatcaagaggaagcagaacgtctgcacaagcgggtgactgaacttgaatgtgttagtagccaagcaaatgcagtacatactcataagacagaattaaatcagacaatacaagaactggaagagacactgaaactgaaggaagaggaaatagaaaggttaaaacaagaaatttgataatgccagagaactacaagaaccagagggattctttgactccagaaactaccaggaagttagaaattccggaacaaagaccttggagggacaactgtctgacttagagcaacgtctggagaaaagtcagaatgaacaagaagcttttcgcaataacctgaagacactcttagaaattctggatggaaagatatttgaactaacagaattacgagataacttggccaagctactagaatgcagctaaggaaagtgaaatttcagtgccaattaattaaaagatacactgtctctcttcataggactgtttaggctctgcatcaagattgcacaaaaaaaaaaaaaaaaaaattgaatatcactcctccaggaggaggatcttttgaaattggaattgtatatttcactgtaaattttagaatccagcttgtagctagttggggaaaaaagatgaaaaacttgaactacaaattacctccatgtatattattggccatagttaactagaaagttataaatagacacttaatgcaatcttttttcctgatattagccaatgggagaattaacaatgtctagggtcaccatcccctttttgtgttcaacacagtgaagattatctgctttttaaattaatttatttacgatatctagagcngtgttttgtgcaaaacttagtgatggaagcctgtcttttgttgtaatctgaataatttctcaggatattttttnactgctgagaagcagtgccattaccaattaattcttgccaggagtgagagagagctgtatctttaattgaaatatactataactgggtgtatagagttcttcccttttttgtgctggaagatatttcactctggtgactactctggtacactctggtgttctctaatcttgtctgttgtatagtttacttttccatattgattccatgtatttatgagaagatattgtctcccattttattacacattttaaagccaactaacgaaggcagctgagtccctcagaaatttttctttttaagtttctaataaatttgacacacagtactgaaatacagcagcccgtcattgacaggctggtctagcaatgttaagtatatttacagaatatgcagttacatttatttatatattttgcaagaaatcttttctgaatgatcaatgcatttcaatttacgaataataatggttattggggaactgtttattatagataattttaaggtgtatagctattttaaagggggtccatttacatcaaacagccgatcagaggactctatctaaattgtgatcgtggcagatagagatggagtcatgtactctatctggctctacacatcaatcacatcttgattcaaacctcacaaggcaatattctgaattgttaactaggtatttcaaaacaggaattaaattcaataggctcttctcagtgaacaggttttaatgttgttttgatgtaattttaaaagacttttagcaaacatgcatttctttatatgatatatttcttttac

SEQ ID NO: 9494 - DNA, 234 bp, Homo sapiens
  misc_feature (1)...(234): n = a,t,c or g
atgtaaaagaactgattgaaagaaaaaggccgttaaagatgggggtattaaatgctcccctggaaatgctttcctacgtcgaatagctcagctccctagcccttacttgagagcatccttctcttcagcttctcccagaacagatggatgtggccttcccaggtattagcacaacttataaaagaatctttatgaagaaattaaactaggttgggcatggtngctcacacctat

SEQ ID NO: 9495 - DNA, 863 bp, Homo sapiens
ttttttttatggggaaattttcttcatttttaatttacagcagaaagaatataaagcattcagaaaacattttccatattttaagggcaattcaaaacattttgcatggtttccagcagctgagttcttcaacagatccattgattcaatgatgctttacatgcacaattacaaaaataaaacttacaaaaaaagaagacatctagactagttttacatgcaagtctcagggaccccccattgggcgccaactactgtgtggaactgccataagcgaccgtgcagccagagaggggttcgtattattgtctttatttcggtttcacacagtacagctgatttcgaatgggtaacaatagcaattaaatcttcaggagatagaataagattagctattaattttataatgaaatcctactcctggcacttgggaattcagattatccaagaaagctgcgcttacctatcatcttatattcgaaattaagattcataaccaagaaaaagcggtcagaaatgcttcgtttcagtggaagtgcatttttgcctcgcctaggattcacagttgtactggtaggttacactggtaggctttaaacctacttcctatcccctccatgagaaccctcttaattctatggaagtctctaccatctgtcattttctaacgtattcagctaataatgtaacatgtgaaacattaaaaaaaaaatgtgagggttaaagcaaatccactgaggtcattactctggttaaaacatcagttatttgtaccataataaatggaataaagatatctaaattcagtattaatagaggatattctgaaagagctggctttcaccttctattcccatttatga

SEQ ID NO: 9496 - DNA, 2068 bp, Homo sapiens
attgagggatctcatctgggcgaacaagaagagaaagctgtgaattgtactgtatcatgtacattcctgatttaatactttacagaacattttattcagatatcaatttgttacataaacatttcagcaatgatacaaagataactgataaaatatattacattcaatgaggttttctttacaaatgctctacttgaggtctgtgtcttaaagatggcatgacacctaagtacaagacatcaactgaatgaggattttaaaaaatggtatataagcataggacaagggctatgtttgtttgtttttcaaaagtgctttgaagataacagcctttaggtttgagttatttcacttttcataatttttaagtagcttatatataatggtggtaccataggattttcttttttcaaatgactgtcggcagaaacagtgggcactgactcaccttttgagttttagcagagaattatttatttctttacaatgcactttctaacccattgtagctatattagcattatcttttaaaaaagacatgcttttgtatttaaatattgtaggatttaagtgtctttctcaaaatagcttattcctttctgaaagaaaatgagggaaatactctgaattattaggagacttaaacccaatatttaaatatgctattttataacactgcatcagttttaggagttgcatctctcctgctggctcttttatatttgagcaagatcagtgtagaatatgtgtttagaaacttgtctgttgtctcagtttagtgaaaaggaggtgctgcatgtgcctgaattaaaaccaagaaatttttccaagccaaatgcagccttagtgatgagagatttaattctccattgtcaccttttagcttttatgattgcttagttttttctgaaggatgtctgcattgtaaaactatggactaaaacctaaaaaacagaatcctcaaaaactttgctgtatgtgttttaacattttagagaacagtatgttgaataactaaggtatgtaacttgaataggaaaaatgtccatcaaatgcaccttggaaaatcacagtaggtagaaggctgtgttaaccgtttgtgtcttattaacatccttaagttaattttgaatttttgacagttttgagggaaaagacctatggaacctaatgtgaagtatttcgtatgttaactggtgttgagttgaagatttttactgtgtataagcagatatcatttgaatgataaaaatgtcattaacctgctgtcttaagatgttcacacaaatatggagagtaattctacaatataaaaatatttattttaatactgagtttcagttaagtcataaacagtgttaaaactcttgggaaggtgtaggggttttttgtttgtcatttttaaaattgaaactgtgtcatacagtgtttcacgtctctgaaattgggattataatagcactattttgatgtagctctaccgatactatgtggtaatgctattttgttttactaacaagctctggaatatttagcagtcattttcactggcacaagagccttttgtatgttattcaatttaaacttttaaaccaaaaattttatggtccagtgtctttggcaaaaagatgctggagggaatgtaacatacaattaatatgtggttatatatatatataaaaagacacaaattgccatgttatggttctgccttgaaacagcacaatgaagtgtatcagtatattctgtgattatgaaacttatatgttgtgttgttttgtgtcttctgttgcctgtcctttgggcccagatgtgggccagttaaatgcagttatcatctcattaaatacagatgcagataaaatatctttagtgctgcaacattttacctaactttttgtatgttttcatgactgtgtgttattttccaaagctgttcctacctcaccatgaggctttatggattgttatgtattataaatgttctatatgagacagactactgtgtttcttctcatttattaaaagttaagtagaaaaataaactaattttaatatctaaaaaaaa

SEQ ID NO: 9497 - DNA, 1060 bp, Homo sapiens
tttttttttttttactaaaacagaaagactttcaggaaaatgtcatttaatgatttcagctatacattacatatacaactctgtagcctagcaacaatcattgctacaccatcattaactttaaatattttgcttggtgagctattctcaaatgtagcacattttaagattttgccatcattatgactgtggaatcattgtttggttttcataggaaacagatctgtcacagtatgaagctttgtttattttaagaaactggtacacaattacatttccacttacaagagaacgccacagatataactaaaggcaggcttcgatggctccacaaaggttgcgtgcgggaccaaccccacacctcctgcttccccgtcgcaccgccctggccaggttcacatggtttcatttccagagatgctttgctcttcgcagttaggtagttttaattccttcaaaggcacacaacttccatcttttttccagcgtggctcccacacccgtgaattcctgtttgaacatgcgtggcagcctcatcaaaagcatttctatttcatttgcagatatcttggagtccagctgctgcatgtatgaccaaagatattctatgttggctccaaaaggatggacgtgaagaaacgttgatatgatacctattagcagagcttctttctctgattttaagccttggcttcttttctcaatattgttctctcggtcttggttgactaatgcaactgtcaacacattgatttcatttgaatcctcatggctgtggccattggtctcgaccaattccttggtaccttttaattgttcctgcaggacttttagtaacgcttgtgtatgggactgctcttcctttgcttgttccaattctgactttttgttgtttaactccccctggatggttagcaattgctgctgcatgccttgcatggtttgctgcagaaactgcagttgctggtccttggtgaggttttcttctgttcggaaaagctgttctttttcttgtttcagcagctccacctcattcctgtaggcatccagctgccagcgg

SEQ ID NO: 9498 - DNA, 932 bp, Homo sapiens
aaatcctaaggctgctgacacacccagataactggtagctatagttatgccctgcctaagattggggtgtttggggcttggctttcgttagactcccttggtccttattttccccaaaaaagaaacctcccaggttatgggcaccttatttagtcctaatcatctggcaggatttgcagggtaattgcccagaactagaatattgatccagatttctatattaaccatcccttttgctgcttctgagctgcagccagagattgctggttggttcacaggaataagcagtgttagtttaaaatgtgggccaaaacttaaaaacaactaataaaactagaatttaatgacaaatatataagtcttgaaacataatttctctccagttctcatttttgttaaaaataaatcatgataggactgagttgtttgcaaaataaactttagtcttatacttggcctgattatttgcataaagtacagcaagaataattatttttcacatatgcttttaaaattggctctgatggaattctgttccataaggaatatcagaaaagactttttaaagtcaagcccagcaatgggtttgtaccctccaatacctatgagttgggtaaattcctctcttcttgaggtcccaagataacttggggctcctggacctgttagaaagtgacattctttacttaccacagatcagaaaccctgtacagggactgtgtagacaaggtatgaggccagtttctccttttttttggctctgcaagtcaagcttgattccttaaagggaagcacacccttctatcaaagccttggtaaaataaccagtttctccaattgtgtcctgttgcaaaagaaaatggattcttgttgcacttatgcaaataactacattgccataagttaagaatactcagaagtagtttccaaat

SEQ ID NO: 9499 - DNA, 698 bp, Homo sapiens
  misc_feature (1)...(698): n = a,t,c or g
aaggggggggggtctcaagtaggaggcctccccatcacccccaccccagccccccaccacccccggcctaagcagctaccatggcccaggtggccggcgcggcgttgtcccaggcgggttggtatctttcagatgaaggcattgaagcttgcacaagctctccagacaaagtcaatgtaaatgacatcatcctgattgctctcaatatctgagaacaattggcaagaaattcctccccagtgacatcaatagtggaaaggtagaaaaagctcgaaggtccatgtgttttgcaaattcaaaaaattcgcaatgttgctggcaccaaaggataatgaagaatctcaggctgcaccaaggatgctgcgattacagatgactgatggtcatataagttgcacagcagtagaatttagttatatgtcaaaaataagcctgaacacaccacctggaactaaagttaagctctcaggcattgttgacataaaaaatggattcctgctcttgaatgactctaacaccacagttcttggtggtgaagtggaacaccttattgagaaatgggagttacagagaagcttatcaaaacacnntagaagcaatattggaactgaaggtggaccaccgccttttgngccttttggacagaagtgtgtatctcatgtccaagtggatagcananaacttgatcgaagaaaaac

SEQ ID NO: 9500 - DNA, 772 bp, Homo sapiens
  misc_feature (1)...(772): n = a,t,c or g
caaatacatgagcaaaatggagtaaaagataataatcatctgagacatcctcctcgaaatgataccaggcagccaagaaatgaaaaaccgcctcgttttcaaagagactcccaaaattcaaagtcagttttagaaggcagtggattacctagaaatagaggttctgaaagaccaagtacttcttcagtatctgaagtatgggctgaagacagaatcaaatgtgatagaccgtattctagatatgacagaactaaagatacttcatatcctttaggttctcagcatagtgatggtgcttttaaaaaaagagataactctatgcaaagcagatcaggaaaaggtccctcctttgcagaggcaaaagaaaatccacttcctcaaggatctgtagattataataatcaaaaacgtggaaaaagagaaagccaaacatctattcctgattatttttatgacaggaaatcacaaacaataaataatgaagctttcagtggtataaaaattgaaaaacattttaatgtaaatactgattatcagaatccagttcgaagtaatagtttcattggtgttccaatggagaagtagaaatgccactgaaaggaagacgaataggacctattaagccagcaggacctgtcacagctgtccctgngatgataaatattttcnatagtgggcccnaacgaagatctgggccnantaagccnnaannaatnctnnancatcnattcctatggagnttccaaaatggggaaccnnggnatnaanggtt

SEQ ID NO: 9501 - DNA, 629 bp, Homo sapiens
ttttttttttttttagaaggctgaaccagacgacctttaataacttttatcagttgagactgtgagattcaatgactccatgacacttgcagattcagcttcagatttcagccactttacgggaaaaagagacacatcgaaaacttgatcctgggacttgcaaccccaccgtggcacttctccaagaaatggatggttttcaccttcctccccttttcctgcctcttgccagggttctccactgagtgaactcaaccagaagccaaaggacatggaaacccattgatgtccctcccaggacaaggtggatgaacagaaattgatcttgaggaatgtcctggaggaatcgcttggcaatcttcagacgagaaatgctcatggtaaattgtggatttcttctttagctcctttgggggatgttacggataccatgcctccatggccagaccatattgtttttttctcaattaatgtcaccaagtgtatcaatggattgtttttggctatcctgtgtcctgttccaagatgaccctgcttgaaatgatggaaatgaatccctgatgacattttgatgcaaactttctctgactcccagactagaagagaccaaaggatgctaccaaaatcag

SEQ ID NO: 9502 - DNA, 2101 bp, Homo sapiens
  misc_feature (1)...(2101): n = a,t,c or g
cggacgcgtgggcggacgcgtgggccgagttggagtacgagtctgtgctgagtgtgaagccagacgtcagcgtgtaccggattccgccccgggcctccaaccgcggttacagggcctctgactggaaattagaccagcctgattggactggtcgcctccgaatcacttcaaaagggaagactgcctatatcaaactcgaggataaagtttcaggggagctctttgctcaggcaccagtagaacaatatcctggtattgctgtggagacggtgacagattctagccgctactttgtaatccggatccaggatggtactgggcgcagtgctttcattggcattggcttcacagatcggggagatgccttcgactttaatgtctccttgcaggatcacttcaagtgggtaaagcaggaatctgagatttccaaggaatctcaagaaatggatgctcgtcctaagttggatctgggcttcaaggaaggacaaaccatcaagttgtgtatcgggaacattacaaacaagaaaggaggtgcttctaagcccaggactgcaaggggtgggggtctgagcttactcccacccccgccatgaggcaaagtcactattcccccaccatcctcctcagttgccatcagcaatcatgtcaccccaccatccattccgaaatctaaccatggaggcagtgatgcagatatccttttagatttggattctcctgctcctgtcacgacaccagcaccaactccagtttctgtaagcaatgacttgtggggagacttcagcactgcctccagctctgttccaaaccaggcaccacagccatccaactgggtccagttctgaatggcattggcaggacattaaggacagacttgaggaataaaaatgaccttgagggcaccaatctgtgagggaagttaggaacccatttcctccccagaaccagaatgactggacaatctttttcatagcttctccatcacattcaagctggtttatgtcactcccctgtgttgttacttgtacagccaagaaagtatctgttatctcctgcgtagtaccaaggtaggggactagtggatcttatcatagttttggctgactatgcagggcttaaaaggccagcgtctgtttgaggggggaatgacctctaacatctgtaaaaatttgttctcatcttttaatttctttaacttatttcaaaatcatgtcatgacccttgtgtgcctctttgtgaagccctatttagcaatttcaggggagtcaaaaaccttgcaacttccttctccactaacccaggactaaaaatggacaggctgacctcagtgtttacaaattcagaattttgataggggtagatatggagaaagacctatttcctgggtctctgctgtgtagtctccttcaggcttattgtgctcagtgaacatccagtgctgggtgcagctccatcaccctcttgtgtgtttacatgtctctttctatgataagagggttgtgttggtggcacctccactactcttttctgtttgttgagtttgaattgtgtaacatctttgatcagtgggtgtatctgtaatgaaggaggttcaagaggctgtgctttccaagtgatagtctataggagtgtttaatttcttgcagctccatctggttgctgcatttgaagcatggcattaatttgtatttgccctgttctttgacctaaagttgaagggtttagagtttttaacctgatctgtagagcagagaggttgaaagcacttaactcttgtttagtatcctcattgccttgctgcctgggtatctggcccctttccataaacatttcttttcagttcatgtagttctttaatagaaagctgctattatgtatattgtcatttgtgaaggaagttggagagtcacagctttactgtgacaggttttgcccaaggctttgatacctgtcacccagggtatcttaaaagcaagttgttctcccactactttccttttccctctggccctgccattccctaattacaaaggctgtggaaaaaagttcctgcatccntaggtggaatggggtaactttcccaatttgggttcctaaacga

SEQ ID NO: 9503 - DNA, 598 bp, Homo sapiens
gggtacacattgcacagtctgagaaaaagccaccacgtgagaatggccataagcagataagtagcagttcaactggatgtctctcttctccaaatgctacagtacaaagccctaagcatgagtggaaaatcgttgcttcagaaaagacttcaaataacacttacttgtgcctggctgtgctggatggtatattctgtgtcatttttcttcatgggagaaacagcccacagagctcaccaacaagtactccaaaactaagtaagagtttaagctttgagatgcaacaagatgagctaatcgaaaagcccatgtctcctatgcagtacgcacgatctggtctgggaacagcagagatgaatggcaaactcatagctgcaggtggctataacagagaggaatgtcttcgaacagtcgaatgctataatccacatacagatcactggtcctttcttgctcccatgagaacaccaagagcccgatttcaaatggctgtactcatgggccagctctatgtggtaggtggatcaaatggccactcagatgacctgagttggtggagagatgtatgattcaaacatagatgactggattcctgttc

SEQ ID NO: 9504 - DNA, 1488 bp, Homo sapiens
cttcaattctcatttaatattttacctccaactgcagggcagacaattttctgacttgcttttctctaggtggttcattttgaaaggggacagaaatataactaaatgcttccaggagaaaaattccaagagttacaatctggacttggtacctaaatatcattttttaaattcttgatgcctatttggactagaggtaaacatactttcagattggcctgtttttgtcggtaaggcatacagccttcagaagccaacatttttaatcaaaaacttataaaacatgatgatcattgtgaaaattctgagttgaaggttagtttaagataagctaacaataacagtctgtgttttctctaaaataatctgagttttttggaactctttatttaaatatgtgtgtttttcagtattcaaataagatcaggaagccaattttctatgtatgaatatgctttaacctaggatttcagtccactctgactgactttctaaactttaacttgggtttttacagtgactatgcattagtgctgactctttggtataagccataaaatattttccttcctatcaatttatctgaactttggtcttttcactaaattgtacagtattctacttctgtttaaaacggggagatgagaaagggaatactatctaaccaataacttgaacaaaaacactaaactaagcatttaatagaaatgctttttattgaggaggtattatccagagttcatgcttagaacaaatgcatctttgcgtatcctagacttaacaattcatcagtttctgagaccacagaatcaggttttccgtagtagataaagactctctggtgcttcaaattctgttcaagtgttttgactcatcagcttctactctttctattactgcctttgcctggcttgttttgtctctttgcaactgattttgcaaaaaaaaattgtaggctttaaaataacagggtctaaggtattttaaatgtgcctatttcacagctctcttgggtcacaaaaacatgctatttttattggaacttcaaaccaaatccccactgagtgtgtactggttcctgcaggtagcagtctcctattatctcctgtttagcaccaaaagagctaatattattggaaactgaccttttaaaggccactggcagtaggatttaaaaagcagcccactgctcagtttccaggctcagcttcctccttctgtcacttgtgtaagttggcactaccttgtgcctctcagattgctgaagtgctgctggtaagcatgtgcatgctctgcctttcttgtgaaagttttcaatcagcgatatcagcacttacagtaagaagtaaaagtagtgcacagcaaagctaatttgcctttgcctggggtgttcagcttgaaagaataaagctcatttggtttagttaaatgtcttactctactgtgcctatgcttttagctgcgttactaagcaagggaaaaataaca

SEQ ID NO: 9505 - DNA, 828 bp, Homo sapiens
ttttttttttttttatagtcctaataaaattttattgagaactagtaagtcaaatactttacagaacatagaaatacatatgatcccagcctttcccattaaatgacaacataacattggggtagtttccctgaatatcccaaacagtttgctttataattagagaaacagttcgtctacagctcaatagtagagaaaacacaggaatgaggtgctcttacttagcggaagcagaaatgaaattggaattcagtgtaaataataaaggactacagatgagttctagcagccaaaggagtatacatgtaaatagtcactcttcacattttctatttctaaagtagctagtaaaaggcagggcatcgtaagatcagacaaaaattaacctgaggacatagtagcagagtatgtctctcaattcagttatttaggaaatgttaataaagaaagtaaccctagatccacttttacctaaaactctacctaccatgaaggtttttgatgccaaataattggaactgacatcaaagatgaaaagagagccacatgactcaggattaaagactgaccaactccgggccacaccgccgtccatggtatctatggaaataggataaatgtttaactttttacatgatgaaaagttaactatttgcaatttctaaattactatagaaacagaaacatgtgacaggataaatgaacactgcttgatgacctttgacaacctttgaaggttttattacctagtccctgtatagagataagagatgatggtattgagttttctaggaaccaacttctgggaaagatttttaaagaagaaaa

SEQ ID NO: 9506 - DNA, 563 bp, Homo sapiens
  misc_feature (1)...(563): n = a,t,c or g
gatgagcagtgggtggaggtagagcgcacagaggtgcttcgctcctgttccagccctgtcttctcccgggtgctggcccttgagtatttttttgaggagaagcagcccctgcagttccacgtgttcgatgccgaggacggagccaccagcccccgaaatgataccttcctcggctctacggagtgcaccttgggccagattgtgtcacaaaccaaggtcactaagccattattgctgaagaatgggaagactgcgggcaagtccaccatcacgatcgtggccgaggaggtatcaggcacaaacgactatgtgcaacttcaccttcagagcctacaagctggacaacaaggatctgttcagcaagtctgaccctttcatggaaatctataagaccaacgaggaccaaagtgatcagctggtctggagaactgaggtggtgaagaacaaccttgaaccccagctgggagccgttccgcctgtccctgcattncctatgcagcttgtgatgttcaccgacctcttcaagttcctggtgtatgactatgactccatgggaagcatga

SEQ ID NO: 9507 - DNA, 257 bp, Homo sapiens
cctcactcaacagtcatgggtgtagaagctggtttcagcttggggctgttacaaactccctacataagccatgtagctgcaatccagggttcctcccaccctacggctttagcggtgggttctctggccctcttgataacaaatactccagtctaatggctatattaatgctgctcagaggctattaactcaaatccttgatgtgtttcatttacaattatgtggattatttattttaggagctttttttttttttt

SEQ ID NO: 9508 - DNA, 151 bp, Homo sapiens
atcttaatgaacaggatcccgattgaggaaagtctttaaaatttatggggctgattcttctgccgattcttggtaccatcaaggtttccccgagtttcatctctccgcctctccttgcaacccctttgccatgttaacagcacccaaagca

SEQ ID NO: 9509 - DNA, 1154 bp, Homo sapiens
tggaagaggagctggtgagaagacagcgaaatggcgcctccggcccccggcccggccgtccggcggctccggggaggtagacgagctgttcgacgtaaagaacgccttctacatcggcagctaccagcagtgcataaacgaggcgcagcgggttgaagctatcaagcccagagagagacgtggagagggacgtcttcctgtatagagcgtacctgggcgcagaggaagttcggtgtggtcctgggatgagatcaagccctccttcggcccctgagctccagggccgtgccgcatgtttgcttgactaccttcgcccacgagagtcggaggggacagcattcgtgggcccgagcttggaccgagagatgagcaggagcttggacgtgaccaacaccaccttccttgctcatggccgcctccatctatctccacgaccagaacccggatgccgccctgcgtgcgctgcaccagggggacagcctggagtgcacagccatgacagtgcagatcctgctgaagctggaccgcctggacctcgcccggaaggagctgaagagaatgcaggacctggacgaggatgccaccctcacccagctcgccactgcctgggtcagcctggccacgggtggtgagaagctgcaggatgcctactacatcttccaggagatggctgacaagtgctcgcccaccctgctgctgctcaatgggcaggcggcctgccacatggcccagggccgctgggaggccgctgagggcctgctgcaggaggcgctagacaaggatagtggctacccagagacgctggtcaacctcatcgtcctgtcccagcacctgggcaagccccctgaggtgacaaaccgatacctgtcccagctgaaggatgcccacaggtcccatcccttcatcaaggagtaccaggccaaggagaacgactttgacaggctggtgctacagtacgctcccagcgcctgaggctggcccagagctgtcaggaccatgaagccaggacagaggccaggagccagccctgcagccctccccacccggcatccacctgcatcccctctgggggcaggagcccacccccagcacccccatctgttaataaatatctcaactccagggtgttccacctgaaaaaaaaaaaaaaaaaa

SEQ ID NO: 9510 - DNA, 508 bp, Homo sapiens
  misc_feature (1)...(508): n = a,t,c or g
gaacagtttttgtttgttttttttgccgtgtgtgctccatagtggaggcgctattttccaattgatgagaatgacaaacatatatannnnnnnnnnnnnnnnnnnnnnnnnnnnnnnnnnacagggggcttgaaccttactcacccaagagcttcttcacggaatgtggtagaaaaccaagttgtaacgacactgtaacctacctgatgcctgttcgcgcccgccgtgagctgcgcactggccgtggccaccattcacctctgtaatttaatccgtttctcttggattgtctggacgtgcccgatggttctttcttttgctcagtggagttggaggttttgtgtttggttttctcattcttgtcttgttttgtgtgggtggattttcaccgaccaatgatatcgtcttctgacggtcaccttctttccacttcactggagtccagtattctgtaccacatcacgcaacgtgttatcttgtggtgtaaataaagactgcgttacttgcc

SEQ ID NO: 9511 - DNA, 536 bp, Homo sapiens
tttttttttttttttttttgcaatgaaaaccctttaatgttgggctttctttaaataaaacagaaaggttgcagctttcccatggtggctgtaaggcaagaacagcagtgagggcgggcgtgttctatcgggcagtgctgcagcccttgactctggctcaaggtgggcttcctggaggcagcggcaaggaggcagttctggatgtgcaggcacagatgtaggggaacaggcaagcgggcacagggccctgagctgacaagcagtgacccctgcacccagctagatggggcaccccctctctgggagctgagggcatcagctggagcctcaggctgggaccagccccaactttgccttggtgactctgggccattccaggcctcagtttccccagctgtaaggtgaggcattaggcaggagggggtggccccagccagtgtcctagtagcctggtgtctccattagggagacctgagaagctgccaggagaggctctgctagcgcaaggcagggccggcccagcacggacgcgtggg

SEQ ID NO: 9512 - DNA, 1612 bp, Homo sapiens
  misc_feature (1)...(1612): n = a,t,c or g
gagagaggaagcttgaagccaatatggagtccgtcagttgctccgctgctgctgtcaggaccggagacatggagtcccagcgggacctgagcctggtgcctgagcggcttcagagacgcgaacaagaacggcagctggaagttgaaaggcggaaacaaaagcggcagaaccaggaggtagagaaggagaacagccactttttcgtcgccacctttgctcgggagcgagcggccgtggaagagcttctggagcgcgcggagtcggtcgagcggctggaggaggcggcctctcggctccaggggctgcagaaactaatcaacgactcagtttttttcctagccgcttacgacctgcggcaggggacaagaggcgctggcgcggctgcaggcggccttggccgagcggcgcccgggggctgcagcccaagaagcgtttcgctttcaagacccggggaaaggatgctgcttcgtctaccaaagtagacgcggctcctggcatccccccgggcatttnaaagcatacaggactccccgctgcccaagaaggcggaaggagacctcggccccagctgggtctgcggtttctccaacctggagtcccaagtcttggagaagagagccagcgagttgcaccagcgcgacgttcttttgaccgaactgagcaactgcacggtcagactgtatggaaatcccaacaccctgcggctaaccaaggcccacagctgcaagctgcctctgcggtccggtgtctacctctgttttcctggaggactgcagtgactgcgtgctgggcagtggcctgccaacagctccgcatacacagtacgaaagacacccgcatcttcctgcaggtgaccagcagggccatcgtggaggactgcagtgggatccagttcgccccttacacctggagctacccggagatcgacaaggacttcgagagctctggtttagataggagcaaaaataactggaacgatgttgacgattttaactggctggcccgggatatggcctccccaaactggagtattcttcctgaagaggagcgaaatatccagtgggactaagcagttgtcactctgttcttcactcctaccaaatactttccacgttggactttcccccttattgggtctcgaagtttacttattgtcacactgtgtatgttttcagcattttaaggctagagattgtaatgggctcctacttgtaatttccattaaattcgtaacaggtataacactaaagcatttttgctattttcgtcatgcctttgagactgagtcttactccggtcccccagcgtgggtggcgcgctgggattacaggcgccgccaccacgcgaacnnnnnnnnnnnnnnnnnnnnnnnnnnnnnnnnnnnnnnnnnnnnnnnnnnnnnnnnnnctgacctcaggtgatcccacacgcttcagcttcccaaagtgctggcattagcatgcgtgagccacgcgacgccagggctttatttatttatttttaccacaatagtttgaagcagtaagggggaaggagggtgattatattgctttgtaatggtttgtgatacttgaaacatcacggtgcataataaagtaggtctgcagtaaat

SEQ ID NO: 9513 - DNA, 461 bp, Homo sapiens
tttttttttttttgggttttgtcagttcacatttatagcatcagtttaataattcagaagctgcattcactatgcatagaattatttacagactaatatgagcaactctacatggacatacggtaagctctatctggtcagttgccagtcattgtaaactggctaatgggtccctttgcctatcacctgcaccctccttttcatgactcacagcttgtggccgtgtcctccgcttagccataggaccacaggactggtcaatgtgacatgggactgggaaacgtaatgactcttaattatctcaggttgaaggtgcgttacagaaagatggcagggcttccaaagaaacatcttcctccactggctacatgtcagcacatttggaaccaacagtttttacaaatggcctttctataccctatggaaatttttttttacagttcttagggtgctttcacggg

SEQ ID NO: 9514 - DNA, 174 bp, Homo sapiens
ggttctcctgccaccaagatgtgttctccttactccatctcctccccaaacacgctccattgtatatattcttctgattggccagcaaatgaaattcttgcctagaaattaagcccgaagctgtttgtatatttgaggtgtattattttacgtctctgggtccagtcttttctg

SEQ ID NO: 9515 - DNA, 889 bp, Homo sapiens
ggatttaatcttccatacactgagtgctacgatcctgtaacaggagaatggaagtctttggctaagcttccagaatttaccaaatcagagtatgcagtctgtgctctaaggaatgacattcttgtttcaggtggaagaatcaacagccgtgatgtctggatttataactcacagttaaatatttggatcagagttgcctctctcaataaaggcagatggcgtcacaaaatggctgtcctccttggtaaagtatatgttgtcggtggctatgatgggcaaaacagacttagcagcgtagaatgttatgattccttttcaaatcgatggactgaagttgctccccttaaggaagccgtgagttctcctgcagtgactagctgtgtaggcaaactgtttgtgattggtggaggacctgatgataatacttgttctgataaggttcaatcttatgatccagaaaccaattcttggctacttcgtgcagctatcccaattgccaaaaggtgtataacagctgtatcccctaaacaaccctgatcctatgttgcccggtggacctgacccaaggcaatatacctgttacgatcccagttgaagattactggatgcaccgtacagaatacattcagccgtcaggaaaactgtggtatgtctgtgtgtaatggtaaaatatatatccctggggcggaagacgggaaaatggagaagccacagacactattctctgttatgatcctgcaacaagtatcatcacaggggtagccgcaatgcccaggccagtgtcctatcatggctgtgtgactattcatagatacaatgagaaatgctttaaactctgaagacaggatacctcaccgaagaagccacactgatccaagatgggaggttt

SEQ ID NO: 9516 - DNA, 384 bp, Homo sapiens
taaaagcaatataaagattagaatggttttggactaggtagtggaataaaaagttaagttggtagttgcattaaaaaggtcaaacatggggaataattggtagaatgttgtgtatataatatatattgttacgggtgcaataaatattcaggggaaacagagctgctgaaagagaatgaatgcttagaaggaatgttgccttaaaggtttttctaaaactttttaggtaaaggacaaattctgggaggacgaaagataataagtaggactagttacatagagacttaggatgtccatagtctttcaagaaattgcccaacctttgcgagaaggtgttatggtaatatattgatgttgggttaaagcaaattttttcagataggg

SEQ ID NO: 9517 - DNA, 317 bp, Homo sapiens
caaccctcctgtattattgtggcagaaaaactgtgctgttaacgtagttggcaacaagatgcctttggaaacttaatagtaggtcaatgtgtttatggaatattctgaactcctaggaaattttgttctatattttaaagcattatttggttttcattagtggaaaacataattagctcaggcttatcaggaactcagatgagtcatattttttcttggatacacctgagacattaaactcaattttttaaaactaacacaccattctttagtgcagtgaaattcaaaagttataaattggcattgggcaagttttt

SEQ ID NO: 9518 - DNA, 254 bp, Homo sapiens
ggaacgttgtaaagtgcagtcctccactttagtgtcttctctggaggcggcgtcctctgaagttaaaatacagacccatattgtgcaacaggaaaaccaccttctcaaagatgaactggagaaaatgaaacagctgcacagatgtcccgatctctctggacttccagcaaaaaatctctagtgttctaagctacaacggaaaaactgctgaaagaaaaggaagctctgagtgagggattaaatagctgtggtcg

SEQ ID NO: 9519 - DNA, 138 bp, Homo sapiens
atgagtatttaataattattaattagtaattaatagcatgtctaaaaaactgtgtacataccttaagttaaaatacgtcagtgctaaaaaatgctaatgaatatctgagccttaccaagtcataatctttttgctggt

SEQ ID NO: 9520 - DNA, 603 bp, Homo sapiens
tctaagggattttattgtttgttttagaagcttatcacagccttctttcatgattttgcagtttagacttgatacaaggaaaaattcagcttggggatggttaagagtgtttatagcagattctgacataggagagaaaacaaattctcatccaagaaggtagctagtaaaatatagggaaggtgagccatattcctatgcagcatcaatttattgacaatcaggtatttctctttaacagtttggtcttcttagttcaagaataaagggtatcatctttaataataagcattccccaaaaattgaagaggcagtcacacacttaagtgtgtggctttagaaaagcgcatgcctaatttaaagatatacaggaagagaaaagtaggagttaagttggatgttgttagaagtgggatgttagtattaccttcaggaacagatccccatggcatgtcacaggccttaattatatacctggctttcttattgtctccactttatcatgaggacaaggtcttggtttcatgggaggaacttctccattgaaataaatgtctgccatgtcagcaccgtttgttccctcagttttaatataatggacca

SEQ ID NO: 9521 - DNA, 341 bp, Homo sapiens
cccatatggaaaatgaaatagataattagcaaacatatacctgggaaatgtaggatgtgtttgagcttttatataaatataggatgggtctaagaagttcccttataaaaatgggaaatagaggtatacaatttatcaataattccttatgcctaaattactaaccttccttgggaggacatgtaaagcagcagatttcataatgctttggtggttattttcctcctctccgctaaaatacacaatttctaacctagtatggtacactgtttacacacacatatataaagatgtccccacaactaaaaactttaatgtttcaacttcatcacaaattttta

SEQ ID NO: 9522 - DNA, 1430 bp, Homo sapiens
tttttttttttttacatttcaaaaaattttcctctttatttaaacataaaacgcatttacaacatgcaagttaacttaaaattaaacggtgtcttcccaaaccaagtatttgtgaatgtatcttcaagcactgaaaataaaccaacatattccacaggtagactcagactctcttctgtcacctcatgtcaaatggagttaagcacaaactgagagttacgcacagtagttttcttaagttaggcaaataatttaattaatcgccatgaataaatattctctttatttcattgagtttctcttctgaaccatctatcaatgccattcagaggaacgttaatatatccagtcaaaaagacactgcaaattgaaatgtgtcaatatcctagatgatcagaaattttcatttttaagagtaagtgctgtgtttaatgacctaccatagcaaaaagcagttcactgaaaacaaatttatgaaattcttggtacactttatgaaagtctgaaattataaatagaaaagaaccatcaagatactttttaaaaacctaacattgtatattctgaaccacatgctaattaaaattcgttgttcattacacagcaccaatacccatgatacatcttacaagaacaaaactaacatatttggaaaaaagagaaaaaaaaattctgcttcatttacgaatgttgccaaaggaggcaagttttcaactgaaaacaaaacataaaggtctatgtggatgcagccaaatgtttctccatttagaaaatcatcataaaaggtggcagcactttttttgcttgttaactatattacttataactggctgcaccaacatttcatctcaatttttggagtgtttcttctgatcaatcctaaaagcaacacaatcattttagaggttgcagactacaacagcaaagatttttgactattaaaaaaataaataaataaatttatattttaaatcaaaattattacaaaagtggaaattacaatagttacggaaatagaaaaataagccaattatgatctgagtcttctgactatggctccaaatttaatacaaatatctgtgtataaaacttttgcaaaaagttaattctgccagcaagatcctaacacagaactttccaagtttctctgctaaccttaaatccccattctctgtgaatttctgctaacacagttgcagtcaccgcccccctaccactgatgaagcaaatagtgaaatctctttccctattacttttacagtttcctaaaataagctgttgacttactttaatcatctgaggaaaaagtggcaaaaatacgtatacacttagtactgattacaaaattatcggctatggccaagaaaataatttatctaatgattattagtgacttgcaaacaatttactatttctagactaaagaaata

SEQ ID NO: 9523 - DNA, 503 bp, Homo sapiens
ctgtcatccccatgattgtctgtgcttcactaatttccataaccaagctggagtggaatccaagagaaaaggattatgtatatcacgtagtgagtgcgatctgtgaatggacagtggcctttggttttattttctacttcctaactttcatccaagatttccagagtgtcaccctaaggatatccacagaaatcaatggtgatatttgaagaaagaagaattcagtctcactcagtgaatgtcgcaggccatttctaaaagtgctacagaggacagacagggttttgaggccaccctgattattgggatgcatctgcagcacatccaggacttgaatttcattacgagttcctaatagttgtatttctaaagatgtgtttcctagagaatgtacagccttatgacactgtagtgatgtttttataattttctaagtagatttttttatattaacaaattcatatacagaaaaaataaggtgttacaaaaaatggagagctctt

SEQ ID NO: 9524 - DNA, 1521 bp, Homo sapiens
gccccaggccactcctcatgcagcagtgtgctggggcgacacgtcgtctcccctctcttaagcacccgcttcctcaccacccccactgttgggcctatagtagcaggttagtgagtacctagggcggctcaactcctcccacagcaccaacccagcatggtcccactgaagtcctactacgccctcccctccccagccttttccagaaaccatactgggctcagatcagagctccgaagcggtcaaagtgagctgagcaggacaggcccagcctttctccactgccacgtccctcatgcacatcactcatctcctgctgcaggccaaggccaaaattgggctagtcctggccagggaaatcagaagctcttcttgggtgagattgagcctcctgttgctccctggagttccggaggctgggctgcagcccactcagcttgcgggcaaaatacgtgctctcctctctccttgtcagctgagcaaacccagggaatagccctcctctccccaggaaacttctctgaaatcttagacttagccagtcttaggcctacggatgccacacaaaggttgttcagggagaagggggtgcaggaggcagagggtgccccgcagggagctggtggctccagccccactagagctcctaaagatcacacagcagctgctcctgacagggatgctcatgcccagaaagcaagcccaggagaggaaggcagagtgtgacagagcagagccagggccaggcgcaccaggagaggcgtttctggggctccagagaagtgccacgggaggcagaagtccagaactgcccatatagatgcccttctacatcctggagcccaaatcagtcatgtgggtgggaagttccccagggcagtggtcacatcgtgagaattagcaggaaaggcggggcctttcttgtcatagctatttctgaggatgaaatgggagacatatgcccagcacctgatgtaagtttatataatgtaatattatgtacctaccactaagaaatacatgaaccgtgccatgaggacagtaagtgttcataaagcaacatgaagcaagaaacagtgcagggtgcccagtgcacacactagagagaaattgtgaacattaaggacaaggagaattggtgtctttctaaaacatacttatttaaaaacacatacccacttactaatgtggaattacacagtttgtaacaagaaaacagtctctcccattctctagtactgctcccctacccagcagtcacttccagttcattcagctatttttaaaatgtgcttatatgactcttgcttgatatatcaatcttagacattacctgttgactccctgttgtcatacatgaggctttagctctcttttgtcagcaaccctcccccatccctagttattaggttaaaaaatactcagattactatttctattactatgtgaaagttaactgcggagccaagagttggactataattaaattaccttccttgtaacacaaaaaaaaaaaaaaaa

SEQ ID NO: 9525 - DNA, 989 bp, Homo sapiens
tttttttttggtacaatgggggaaaaatgcggcattatttcttcatagtggttgtgtgtgggggatcgttaccaccaaaatcataataatcatttaaagtatattttaaagttagtctcgcaagattgttatggcatttttaaatttctgtagtttaagcattttcattttgtcatatcttttaacaaattactatttcaagtagttcctatccagaatatttacaggtaatttagcataggagcaaatttgaagctaacttcaaacaagaaaaggaagttcaatagccagagagctaagtataagataaaaaaacaatatggtaattttaaacagcatcttgctacagatttccaatccaataaataccaggaatgaaggacttttgccccaaagaagtatttcacatgaattctgaactttggatatggaaacttatagaaaaactgaagaccctgagacacatgcaagtaagagtcttctggcaaaaatacaatttaattttccagtttctctcctcccaaaaactccagaagatacctttagtaggcacagagtttaaatgtcatattcagaatttacagagcacagcagcagcagcaaataattacatacctattattcagaatggatagttttccattatagaattagttcctggtttgtcataatagacttgtagaatctgccaagttttattatgacaaactaattgacctagcagttgagtctgaaagatctggaagctctgccggcatccgtatcattcacatcggtagaagtaattatgtctaactggtgaaatagcattaatgaaactcaaaacaaattttcactgagtacatttcagagtgcacactatagtcaaagagtaatgttattaatatctacaccaaaaagaaacatatggtgattccagagatcacagagtctcaagttatcaggtaacttcaaatttcccaggggttagtttacaaatggtttgcagg

SEQ ID NO: 9526 - DNA, 266 bp, Homo sapiens
accgcagatgacaagtattcctctgtcttaatcatccccggaacaggagccaagcagctggggaacactcccacagctgaaagcccacaggaattactccagctagccagtcctgtgctgtaggctctgctctgccttgcttttcccttggaaaccccagtaaaggctctggcttagagctcccccttggtcctgcccctgctgcctctgacagatgctggtgcttttctcatgtgtccttccttgtgggccgtgcctcctgtttc

SEQ ID NO: 9527 - DNA, 387 bp, Homo sapiens
  misc_feature (1)...(387): n = a,t,c or g
gagatataaaattaccgagatttaactgaaggcagctgtcaaactctgtaaaagaactgatattcttcagaggagtgcaaattctatgtcaaagacacaaaacagattcttattgcttaataatctcccacagttcaatagtgacaganattggtttcctttttgccccctacccctactgtcttatttctacaattttctctacagttaccagttttgggatgactgattctggtgtttactatatgatcacttgatcaatggagacctgcccatcctgcttctgnactatcgtgatgtcatagtagagctgctttagatgaatccgaagtactcactcctttctccaatttcttcttatcggtttaagaaaacagtaacttattt

SEQ ID NO: 9528 - DNA, 412 bp, Homo sapiens
actctcgacccagcagcctcgtctcctccagcccccagagaagcacgagctctgatgctgatggagagcgccagtttaacctaaatggcaacagcgtccccacagccacacagaccctgatgaccatgtatcggcggcggtctcccgaggagttcaacccgaaattggccaaagagtttctgaaagagcaagcctggaagattcactttgctgagtatgggcaagggatctgcatgtaccgcacagagaaaacgcgggagctggtgttgaagggcatcccggagagcatgcgtggggagctctggctgctgctgtcaggtgccatcaatgagaaggccacacatcctgggtactatgaagacctagtggagaagtccatggggaagtataatctcgccacggaggagattga

SEQ ID NO: 9529 - DNA, 413 bp, Homo sapiens
gtaattttaaaatatattcttatactatatgggatccttgaacttatgaataatatattttcacttgctttgaaagttgatttaattgactgactaaatgaaaatgcctacccactcatataacatacctcaggtctattttaccttacactgaatgttcttaatatgatttggtacctaaagtaattgaaaaaaatgcagtttcctttaatccttgactataagttatactatgttgcgtacatggcaaatcctgcaaatatagattaaaaattaaattagcccattgaaatcctttataattctgtcattttcccaaggaagaatagcattgtacatatgcaatctttattttattctttattgcttatcagagtgagtggatgaaaacatttgtaaggctgcaacataat

SEQ ID NO: 9530 - DNA, 767 bp, Homo sapiens
tggaccagaacaataaaatacataagacatcgtttctatatggtcatatactatatagaataaagaattgttatgtaaattattaaatgagtatacagacctttacataaaaactaaggtacctcagtggaatctgctacagtgcttccccctccctacccctccattttgtttataaccttttagctatctaaataatacgtattccatactcaggatagctggttagctaggcaaaagaattaacatttgtgatatttacttgcaaactttactgaagccatattcattatcttccttgtcaccaaggctgttgaccttaaataaacattaagttgattttgcacaacactgtatttgtgtgtgtgcatgtgcctgtttttgtgtgtgtatgtttgtgggaaataattatgtttgtttccgcatatattcatttttaatgcattctgtaacttttctcgagtggtggtcattgagggtagggaagattttattttttaagttgtcgttaaggtatttcattagtgttcctgagtgtaaaacagttttttcccaaatacttatggcagataagagcatttttgtaaataataaactagcaccgtttgggtaaatttgcattattttttggacaggttcattgtcatgtaaaacaaatatctcaaaattcattttacatttagcaaaggtgcaacatttgtttttggagtttgagagatattttccttgtcttccatcattcaataaatactaaaattgataaccac

SEQ ID NO: 9531 - DNA, 936 bp, Homo sapiens
aattttttttttttttttttttgagttaaatacaggctttttttttttaatctgtaattgatttacatttgattttaagaagacactgtttacatcaggtcaccacaaagcagatttacatacaaccttcaattgcggaaaaacaaagtttctttttgatccaaacacaaagaaaaacttctttgtgtttttttttaatgatcttttccttgatcataaaaaaaagtaaaaaatgcagtacttttagaaggtaaagctagtaagtttacagaagtgcaaaacaccaaaacacttgaagcaaaaactttttttttttttttaagaaaaaggtatgacttcttgttttctgttcttggcataaattttaattctttccagtggaaccaaaacctcctgaacccctttcggtgtcatccaaggcttgaacttcttctatttctggataaaaaatccgttcgcaaatgagctgtgcaattcgatcaccttttttgacttcaaacttttctttgccaaaattaaacagtacaacaccaacatttcctctataatcttcatctatgacaccagctcctacatcaataaagtgttttgcagccaagcctgaccgtggagccactcttccataacacccagaagggagcgctatctgaatgtccgttttcacaacagctttctccataggtggtattgtgtaatcataggcactgtacaggtcgtagcccgcggcgcgcgcggagccccgggtgggggcgcgtggcgtgctcggagagccgggcaaagcggagctgccatgccgcccacctccgcaggccgggcccgcttactgggtgaaatggcgggtgtctcttcagagcagggcatgcagagccagaaggcgagcgaggagaccaccgggggaagaggagagcgcacgatgaggtcgccgcagggagcgcg

SEQ ID NO: 9532 - DNA, 222 bp, Homo sapiens
tcaaggtggagcccactgaggtgaaggaaggagctgtgagggacacctgcatcctgctgcagaaatgtctgccccccgccttgtcccaccgcagctccatctcacagttgaagaagcagaagcaaagcaacctgtcctggaccatgcagcctggtcctctgtttccagagccagaggtctttgtgctctgaaacaaagacagtgaccccattaacccactgg

SEQ ID NO: 9533 - DNA, 500 bp, Homo sapiens
tcccgatccggtggctgtcatagccgagggctgcctgccaccttcctttatcatttgccctgttggggttcagggtgcatccttagcccaggacctgctcttccagcatcatgggttttttcctaaagatctcaacggctcccttgggctccataaaatatttcttttttaaaaaagcagactcctttcatgcattgggatgaacggccctcttgtctgggtgctgggctacagcaaacaaatgtgtttgaatcccagtattccagagattcctggcggtgggctgtctagaagagggcgaggctggatctcacggtttttaaactgtatttttacccctttgggaacccatacctgtgccctggagtctttcatgaggcacgtgggtcctctgcatcctcactctcccccctagcccaggtgcagccccgggaggggtgccctgaccccgccttaaacaaccaactttcccaccgaatcccatctggcggggggggggg

SEQ ID NO: 9534 - DNA, 178 bp, Homo sapiens
gtcagctctagaggcaccctgcatcatgcccaccagggtgatccccctgggatggaccatctcgggatatgaggcctcggaggctggggttgagatttggtcctgaagagcttatagccagattgccacattcaagtgtaagtccaggaaaggggcaggcggcagtgcacagggattt

SEQ ID NO: 9535 - DNA, 232 bp, Homo sapiens
ccgtgatggcaaagtggacatcgtctatggcaactggaatggcccccaccgcctctatctgcaaatgagcacccatgggaaggtccgcttccgggacatcgcctcacccaagttctccatgccctcccctgtccgcacggtcatcaccgccgactttgacaatgaccaggagctggagatcttcttcaacaacattgcctaccgcagctcctcagccaaccgctcttcgcgt

SEQ ID NO: 9536 - DNA, 707 bp, Homo sapiens
gacaaaacttagaactaaatcgacatacttttaaaaaatatgactgccaaatttaacagtggattttgttataagtttgtgctataacaaatgtgcttctttctcctcaatctatttttatattattggcaaaatatatattttataattttgtactgtacaatatatatttttgctacattatttttctactgctaatgcagattataagtaacaacatagatttattttggcaataaaatgctttcattttaataacatcccagaaaatattgtaaggcatatgaaaaatagtatgcaacgatatagcgttaatgatcccgcctctttattacatcccttatgcatacagaattcacactgatttcagttaaaagtcaaagtggcatgcaagtagggcaagggtggcccctacataaatatagacatagccatttgttgagaaatttaagtgttcaaaacataaccaagaacacttatcaggtattgaaaagctagaggccagccacttctggttcttagttccccttgtaactccttataattttcaaatgaggaagtatcagtgtattctcccaaaccactctaaattcattaggtaacattttctaccatccttctggcaaacattttacatacatcatgagggaacaaaaggaaaggtttcatatataactacgggctcccccaaaccaattggctactca

SEQ ID NO: 9537 - DNA, 409 bp, Homo sapiens
attcttttgtcagtttggctttctaaaaatctctttttagattatttctcctgttgaacatagtaaaactattgaatttctcttaagaattcctaataggtcaatagatttaccctccagtgatatctatattatttctttctcgtctcatcaaaatgatgacaggtaaactatatttttccttaaacacctattacagttaaattatgcaaatcattaaataaaaatcatacaacttttggaaagttagttcaacatgaactaaaatggcatgctatttggaaatttagtttgagataaactaaagtgtgttgatgccagaatgttcagcttcagtaaatataataagctcttgtgccttgtatgcactatttaaaaaaagttttttttatttgagtccagtataatt

SEQ ID NO: 9538 - DNA, 253 bp, Homo sapiens
attgggacattaattaagacactggtttcttagtaaagcacagtaacttggatcagattcctttgtaacccgaaacacttaaacatgtattagtaataccaatatatttagattttatatttttataatttagcttctatgcattacagaagttgaattaagaaatttaagtcatcaccatatttttgttttctttaccacttgggaaaataatcctctttgaggcagtaacactatgtatgtactgttaata

SEQ ID NO: 9539 - DNA, 334 bp, Homo sapiens
cagaaatgttgatggatgaaggcacatctgatgaaaaggggcacatggaagagaaattgtccctacttccaagaaagaaagcacatcttgggagttcagacaatgttgctactatgtcaagtgaagaacgatctgatggtggttttccaaactctgtgatagctgaattttccgaaggaaccggtctctgagaatttttctcctaatactacttccctccattggaagaccagggtgaggagggggtatctgagccccaggaaacatctactgcttcttcctccagagttcttttgatagaggttgaacttgaagacgtgccattttcacagat

SEQ ID NO: 9540 - DNA, 607 bp, Homo sapiens
gattaagtttctggagttttgttttgacttctgaggtgctaaaaaataccatgtaaattctccctaccagctagaagggtagcaagacgttgtagagtgcttatcagagagtaccatttacttcaattgatcaatataaatatatctttttttttcatcttaatgagtttctcataaagacacatcttggggcataccaaccttcatattcattcagtgtatccattggtgttaatattaacaatttcaactaaaaacaacaaacataatttttctaagtgtttcgagctgtgagatgtcaatttctacaatttagtttctagacatgctgtatatttaataaactttatgtaaactttaaaatattggcactggcatttatgaaaaaagctttctttgcctactgcagctatctaacattttatgaaactgacgcatgtccttcattattgaggctaaaagctcttgttcagattgcttgaggtttgaaaaagaggtgtgctagctttgcttagtttatttcttatttttggtatacatatacatatatataacattagaatgtgtgtactggaaatgctatgataggtattttgtgttaatccaa

SEQ ID NO: 9541 - DNA, 682 bp, Homo sapiens
  misc_feature (1)...(682): n = a,t,c or g
ttttttttttttgagattaaataatttattaccattgctaagatgaacacatatacttaatactcaattttatgcagaactttaaaaaaatagttttaatacagtatcaaaatttacacaagtttattttgtcaaaagaccagtgtcccttgtattagcttctgcaggctctgctgcagggcacaaaagcttattttaaatgtcttcagagggtaggaatacaacaatttaaggatgaaagctttcctaggaaagaaggtgtaaatatagcaagcaattttcttttatagagtaataacattttaaaatataacatttaaaaggggagcttaaattgtaacccaattatgataattagagagataattctatagtaaattaattcataaatattttctgaaaatagatgatttttcatcacagtaacatttttgaaagtataacaaaattccttcacagtctcctactagtgacaattaactcgttatgtaatgagcccatctaaaacaacaacaacagagaatatctgccatgaatcaaatctcagaaatttagaacctatccaaaaactgggaattgttgcatttctacttttataatcttaaactaccataaaaacgtagcattcggtcacaggcctcttgcacattcatacaagaaactatcnttgcatttggattaa

SEQ ID NO: 9542 - DNA, 505 bp, Homo sapiens
gatgtagggctttggctctttattttctttttacagtttattccacaagtaaaagacttcacaaagcactatggctctgactattccccgaatgagctgctgaggatggagctggctattctggacagactgcactgggacctctatattgggacgccgctggacttcttgactatagtgagtaaggaggtgtttacagagtctaccctaaactcgtttgtgcctttggaacagctgtttacaacatgggatggcaaagcacaggcgtgcacaccactgtgcacatgcaccacagtgaggtgacgcacaaggctcatgacatacggaagagtgaaaaggtatcttaaatccaacacagttccaccagactcccacttctaaaggacattaaattaactttacaaagatttttagacggcactattatggtgagtttctcttttaaatacacactggcaaaaatatttaactttccattctatgaatactgtacataaatatctgt

SEQ ID NO: 9543 - DNA, 406 bp, Homo sapiens
cttttgttcaagctgcatcttcacattgaatgaaagcattcagacgggtgactgctgctgtccacaactgtgggcggaagtgtgccttttcccagtttctcgtccaggaggttgcatagcaaatactcaagtcactgggatatatgctttccaaatgctggcccccatagcacctttccccatgtctttctaccaagcctcttatgtttaatctgtgcagggaagacaagagtagaccatattctctgtgtgctgtgcatgtcctgggtgtcactcattgcctcttatctgtcgccattcttaatataagtcagctttaatagttgactctggaataatggcaaaacccagcttgcttccagaatggcctaggaccctcctcctcctgccagtttttttttttttt

SEQ ID NO: 9544 - DNA, 2305 bp, Homo sapiens
ttttttttttttttatagaaaaaatatacactttattttcaactagaaaggtgcaaacatgtaacttttggtcacactctcaacaaataaactgtccgaaaaacagtcatatcaaagtagaaacaaatgcttccaggtgaaaaaaactgatcagctatatagagtcactcagtttttaataaaggccatttgttcattaaaagtgaggctaccacatttcctacctagaaatcagcctgccaaggacactgatgcctcccctttgcaaacaatctgttttggacggactgtcattctatctgagcagaatttccatataagtatccatttcatgctttgaacgatcagacaagctttacattctacctatggtgttcagaaattgaggctaacattgaaatatcaaagcattaaaaacaaaaataaaaaggcacaaacaactttaaattaacttagataactgtacatatatatatatatacacacacacacacacacacaatatttacaatataaattttaaaaaatctggcttgttacaggcaaattcacttgccacaagctgtccagtctaatcgacaggattccgattcctgaacagtgtcattcgaatcagaatgtcagagctgagtctgctgttctgacttaaggaacaacttgactcagtctcttgatggctggagaatgcacatcctagctgtcactggggctacaggcaggtcagtgagcacgctaaaattttcccttctcaattacacttcaaatagcaggcatattactcgtataagatgctatctgatgataccaacctttccgctggtaccctcccactgctcctaaagccacaccttaatatacattctggtgctgtgtaactaatgtagttccactgtcaagtcttaacattcttcaaaccagtgtctggggaagatagactatttgtttgacatggcacaatgttttgaattgggtggggaatcttttccccccagttagaaaaacagatttaaataacttgtgctactgaaatcatttttacggaaaaatgagatgtgaatcagttcaagttccagtctaatgagttaatgtctctcactctctggcttcatgccatgtctccgtacatcttcctgtagtacagcgattcaaagatgtcattgtcctccgggacagttgtaatggcaggccacaggtcttgatgaacatcatgttcttcttcatgacctcgcccgtcagggcacttgaactccaccggcagggtggtggttctgtggggggtgcagcatcggccgtcggtacatactccacagaatttagctcggtatgtcttcatgctggtgcagccagaaagctcaaacttgataggcttggagattttgggagtacggatgcactttttgcccttcttaatgttctcttccaggtcagcttcgcaaggcctgaccatgcacaggcgggctctgcttctctagcctgcaggaggcgttgtcattggtaacccgggtggagatgcccatcccacaggtcttggaacaggcgctccactctgtggtctggaccaggcagttggctctaatcatagttgggtctgggccaaacgtgtcttccagtcggtaagccgcgagggcaggcccaaccacggtttggtccttgggctcgtcacacacccactcctcgcagcatttcccgggcagcttgaccctcctcgggaaggggcagtcagggctgggcagacgaacgtccatgctgcacaggggcatgcagcccaccgccccgtccagggcacgtgcactggtacttgcagctgctctggaaggactctccgctgcggtacaccgtaccaccgaagatgcagggagcaccatctttggcggtgcacacgccgatcttgcggttggccggggagccgaagtcacagaagaggcccttgtgcgggtcgcaggggtcgcgctcggtgcacagctcgcccagctgcttggcgcagacgcggcagcagccgcagccgtccagcacgaggctcacgcccgccgggcagcgcggcgccggctcgtccgggcaccggcacggcccgctgcagttctggccgacggccggccggctgcagagggcgaggaggaccacgaaggcgacgcggacggggcccatactggcggcggtcatggttggcactgcgggcggagcggagggcgcggtggcggcgagcggggagcgcggggcctggagcgctggcggtggtcggaggtggggaccgggacgcgccgggctgtcgtctcggggctgtcggccgggcggctccgtcactgga

SEQ ID NO: 9545 - DNA, 686 bp, Homo sapiens
  misc_feature (1)...(686): n = a,t,c or g
aataaaatgtttataactctactgtctatgttacaggtcttttccaagaaattttgtaattaattaaatcttacagtactttctagatggcagatagctctggatggtgctcaatgcaatgaaaacaggtaaaagcaaggccagcaggcaggcagctgttgtagccagagggaattgcttctattacatcaaaattctgaactatgtctatattatattttaaaagcttcttaaaaattgctaaacataagcacaacaaaatcaatgaatgcatgtacaagttttaacattttaattgctgaatatctttaagtgaacatcagtattttctggctatgaaatgcaaaaataacacatttacttaaatacagttaacacctaaaatttaggtagttgtaatgagttgtaataaacaacatacttgtaatagaatttacagaattagaaaaaattttttaaactagaatactctgaaaattttccaagacattgtacattataaaatacatatttaacaataatattagtagtgtattcatggggaccaggacannnnnnnnnnnnnnnnnnnnnnnnnnnnnnnnnnnnnnnnnnnnnnnnnnnnnnntcaccagaattctgagacaagcctggacaaaagagtgagatcccaactctacaagcaaatttcaaaattagctgggcat

SEQ ID NO: 9546 - DNA, 199 bp, Homo sapiens
ttggaaaggagtagaacatgcagcataagaaactgctgcagagtggtgcgaggagtacattttcagagcaggtgcagtacatcttccggctctatgaatcattatgtgagaaagcaggataacattaggtaacctgagcctcctgtgtggtattagaaagtataccgtcaccttttcacatcactggagtgtaaaattt

SEQ ID NO: 9547 - DNA, 407 bp, Homo sapiens
attcggcacaggctgaaaccagaagactggatcaaggggttcccactggctcctccagcaagacctcgtctttgcttgtcctgctcagatgctggtcatcctgggcatgtccccagtgtggactctggactgggaagggggcaggcccttttggacctgcagttggcctcagcagaaggccttgccttgtgtatgtgactccatatcccgggagcagttgacctttgccaaacactttacagttctggaggaggaggtaacatagatgcctgggcctgatggtggggccatacccatgtgtcgcctctcactctggcagcctcagaggccccttgctgctggctcccatctccctcccatttgcagaccaggaaggaagagcaagctgtacaaagggaagcagagcc

SEQ ID NO: 9548 - DNA, 1216 bp, Homo sapiens
ttatttgtccataatattttaatacttttccactttaaatactggttttaattctgtgattgtaacatggaagatccaactttattgtgtttaaaaaacatcatcaggatcataaagctattatagaagttactctacacactcccaaggtactttaaaatgattatgttttgagtctgtagatgaaccatgacaaaatccaaatacatcgtctgtacaactcggactaaatactggtgaaaagtgtttaattggacaaataactgataagcttaaagataaccagcacaatttcacaagagaaccagctcagccccaactaaaaatttcttaatagcaattgacactgaagttgtattaagtgtataaattagttgatgaaactgaacaaatagaaaacccattcctccttttccttattttgccttcttacacctcccttgcagatataaccctcctttggtttagctacccctgtggcaattccaaaccaagtactgcagtgatcatcctctacctcaaaaccaggagtcctgaattccaactgaaacactgtactctcttgtcctgtacagtgggccagtcagggacaaaatccccacatcaccaatatatttcaagtttctaacatagcacaaaagagtaactgagtagaaaagagagtaaagggtagttttttttcttttagtttgggggaagacaaatatctgtagatgagaaaacatgaatattcaggatgtaggaatcagcttaatgaaaataattgtagagggtctaaatgttgtccagaaggccagtacctctccaaattctgacctcttttggactctttccacattccccaatttatttctcaatctgattgggtgggattaactctagtgaggtacaagtgcagttatctaaaggtaaaatgttatcttttcttcttttaatacaaatattttagtgtaatccttttatttacagaatcaattgcaaaagtatatcatcacatttagtccaaatgcaactaatgataattagatttagatattgctttgtaaacttgccatacttctgtaaaataaagctatccaattcagttatgaaagagttaactgtctgtgttcatgatagttaccagaaatggcaaacagagaaacatttatagtgcgcatatagaatttttttgaagattcttatcagcggctatggtgaataaacctgccctccc

SEQ ID NO: 9549 - DNA, 91 bp, Homo sapiens
aaccaatgcagggacttttcaaaagtcagtgtgtttttgaaaatagaacaaccccttgtagtgatctgaggtggctctgttttttttactg

SEQ ID NO: 9550 - DNA, 374 bp, Homo sapiens
tgatggtccattcgctttattgggtgcgtgtagtgttgtcatgacatctcctaaggaactggggggcacgtttgacactcatgaggtcagaacaggtctggtgggcggggggggggggggtccccagggtggtgaatacccacagcacacccccccaccaaaagagaaaacggggagaggagcctggcaggccagactctgatccccatggtccacacagggaaacccccaacagcggcctcggcccacacggccagagccgaggggctggcaggcctggccacctcccattgcccgatcagcctgttttagggtgtcatctggcccctcttcacaactgacaactgtggatgggggtgaattttaaaaaaagg

SEQ ID NO: 9551 - DNA, 235 bp, Homo sapiens
agtcccccctgcccagtaacagtcctattagtgtttaatttcagagtttgtgtctggtagacctctacctgattcagatttggttttgttgtttcaaccatagttagagacaaattctcatgtactttcagaaatcaatatctgcagccactgttacttttaattgacattaagagacacttcataggttcccacaattcagtatgggataggctttttaaaaagcacatacaga

SEQ ID NO: 9552 - DNA, 391 bp, Homo sapiens
cccacgcgtccggtcacagggcagtaaggcctcacagcaggcaccccagggcggggcagcaagcaggcaggaggggcctccccgggtggccttctagggaggatgtaccctggctgcccagcagcagccctgcttggccgtgtccctgccacaagcaggcaggacacaggagggatggcactgcccacggagccctgggctcatggcaccttctgcagagtgagccgggagcagagagcctcttttccccactctgtgaggccgggcattttcctcagccctgccctaacccccaccattcctgtgatgggcccaggtgctagacgggccttgtccttgccgaggaaacccatgcaggctgggtcccaagcctctcatgcagtttcatttt

SEQ ID NO: 9553 - DNA, 385 bp, Homo sapiens
ggaccttctcgttttacagccttgaaggttatgtccagagtcatagcctgggtcccacacccccgcgtcacctgtgcctgtcctaggggccagtcagtgtgcgtgaggctccaccctgcctgggctttggctcacctaaggcgaggagggtggtgaactggggtgccccactgggccgggtctgggagccctcagggccagggtgcagaggccgcagccactccccttctagggtctgggcggtgggggcatgagaaggcggagacccaggccacttcacccagtaactgtcctcagctgtgcgcttaactggcgagatctccgctctacttggagacagtctggggtgtctggagaatcctcccccacttctgcttaccccagg

SEQ ID NO: 9554 - DNA, 542 bp, Homo sapiens
aacctgtctgctgaggtggagcaggctacaaggcgccaggtgcagggcatgcagagctcccagcagagaaaccgagagcgtgtcctggcccagcttcttggcatggtctgcgacgtcaggccccaggtccaccccaactaccggatttctgcctagggccaccgtagggcctgactccttctgccagttccctccctcaaagaaatcctccaatcaaaatcacctcccaccataatccctgtcttctttccatcccctagaaatcctgggaggcaggatccaataattttcctgtgacacttataaatatcctgctcacatctgaatctccttgttgttctttaaccctcactgggactttgtaaacttccaagtcattctcacctaaaccctctgtgaaatttgtaatatggggaagtaggaatgtggaaaacatcctgacttcagtgtctggccgatgtgggtccctctcttgaccctgtcacttgctggctgtgaaaccaggacaagctacttaacttggtagcctcggatgtcctcct

SEQ ID NO: 9555 - DNA, 537 bp, Homo sapiens
tgtttttgtttttttttaatgagttttgacgcatgttgttttgattgctattgttgtacatgagaaattcagcattaaagaacactgaagcggtaaggtcactgtggaagaggaagcgtttatactgtaaaagaaggttagatttgcacagtctactgggtaggtattgtaaataataatttttaaaacttgcacaaatcaaaacaaacacaaacaaaattgtattttatcctgttggtgttaagaggtgtttcacttgctgagatttcctgtacattgcaaacaaatacagaatgcaaaccctcaaagctgtattatctggtgtgtttgtcctgtatttacagttgtttttgactatgcaggagctatcagtgctagagtgagcatgcttcaaaactgtacatgaagccaatatatttttggataagtaaaactgtctgaaagtacatctgtcatggcaggctttaaagagagtgcatgaaaactgatcagtcattggagaagttaccaccacacacaaaggacaggttttaagtt

SEQ ID NO: 9556 - DNA, 395 bp, Homo sapiens
cggacgcgtgggctgatgttttcctcatggttagagtggggttatagatttttaggaagaataccagaggtgaaggtccttctcactgcatcatgtcaggagttacatgctatcagcttgatggtgtattaactttggacacttggttaaggtagtgtgtgttggttttttgctgctgaaaattactgttattttccctttccatacttctgttctttggaaaacagtcactaagtccagtcatgggaggtggtgggtgggaaagattacattcaaccccctgggaagtgggaatatccatatgtagtatttggaatttttctatatggaaaatttgtttctccctcccaccctaatttgtttacatcagtatggactcatgtatattttgtatt

SEQ ID NO: 9557 - DNA, 1399 bp, Homo sapiens
tcggccgcatcttttttttttttttttttttgaaaggaaagtataatttatatgtacaaccaataaacctgatacagaagaggggatcaggacagaccaggagtgggtgtgaagagagactgggaaaggggcagcaagaaagtgaaggggcagcaaagaggaagtggggggttcgccatgcaaactgccactctccccggcccctcctgggaggggggatgtgcccacatttccctagcctgccctccactattttgctctggtcccaacgacaaggtagctcccaagaccctgactaggtcccctgcctgacttatacaaatttagtctgtatccaggccttgaggagggagggtagtagaagtcttccaggaacctgagccccagagctgggcttccaccacatctggcccattgtattctctcccacccttctaggttacctgggtccctagaacaggttggggagctcctctttggcttgagggagtatcacccaaccattactctttttgtaggggtggtccttggtccctagggaggggggaacattcccaacacaagatgccggtacacaggaggtaactgagccagtgaacggcacctttattctgaggctgaacagcagttgacttcctccctcataactgctccaccctccacgtggggagaggtaggggacggtaacatgcagccacccctcctcgtcccttcctccctcccagggctcattttcatccctctctaaagtccccctcctctcttcaaagctctcttccccacaaaagttcctaaaggccaggcaaggctgattctccacttccacatgagacagagctgattctgcagggaaacggctggggaggctccacctctttcctccccacaaccatttactgggaagttgtgtatacttggcagtgtgggaggaaggtacttggaagaccctgccagccatctcccacccagacttcttctcaccagcacagtcttcaaggcttggtgggaaaggtgtgtgggagtggagaaagacaaagggcccttcttgaagagaggagctgcagagaggggcaaaggggttcctagcccagtgatggccaacggggtggggaaggtggagggctggcagcaggccccagcgcttgagctgggggtcggcctcggggacggggcctgggtgaagggcaggcctgggatccagtcagtcgtctatacagatcacctacccggctcggggctccttccgatccagcccgtctgacaccaatgcccccaccatttccttctccttcttcacaagcactggaggccgttggtggcggctgtgatgaaggaccctgcaggcatctggctgtaattggcgcctgcggcggccagggactacgggtgcggcgctgaa

SEQ ID NO: 9558 - DNA, 364 bp, Homo sapiens
  misc_feature (1)...(364): n = a,t,c or g
ggcagtggcatcagcgatggcggctgcgtcggggtcggttctgcagcgctgtatcgtgtcgccggcagggaggcatagccgcctctctgatcttcctgcatggctcaggtgattctggacaaggattaagaatgtggatcaagcaggttttaaatcaagatttaacattccaacacataaaaattatttatccaacagctcctcccaggaggattctctatgggaggatgcatggcaatgcatttagcatatagaaatcatcaagatgtggcaggagtatttgctctttctagttttctgaataaagcatctgctgtttaccaggctcttcanaagagtaatggngacttcctgaattattcag

SEQ ID NO: 9559 - DNA, 202 bp, Homo sapiens
aatagtttaatttcttgattgatttacttttcttcaaaaatgctgtattggagttctgaatgtctctggttgtttgcacacagataactgcaaagaggttgtcattactggttacacgcaagccgaggccagatctcttacttaatgacttgggggaaggcacaaaacatgagagaaaggtaactgcccagccagggtttgc

SEQ ID NO: 9560 - DNA, 367 bp, Homo sapiens
caaagagcagcttgtctttgcagctttgttagctcttaaacttccagattaactgtgtagccatttcagtagcactaaaagattaactctagtgttcatgtgtccttcttttcaaatatcaggtaacttgaataaggattatgtgccccacccttactctcattcctgcttcctcttggactcaaacagggtatgagtatgaagattttgcctttagttcctgaactgaacctgcttgctatccctttcctccccaccactaccttattccttctctgcctccaaattgccactttgttttgaggcttccttccctaccttattattctgaaggaagtagagatcttgcttctgaaacccctcctaa

SEQ ID NO: 9561 - DNA, 351 bp, Homo sapiens
cccacgcgtccgcagatggtaccactgtcctatggaatactgaaaatggacagatgctggcagtgatggaacagcctagtggcagccctgtgagggtttgccagttttccccagactccacgtgtttggcatcaggggcagctgatggaactgtggttttgtggaatgcacagtcatacaaattatatagatgtggtagtgttaaagatggctccttggcggcatgtgcattttctcctaatggaagcttctttgtcactggctcctcatgtggtgatttaacagtgtgggatgataaaatgaggtgtctgcatagtgaaaaagcacatgatcttggaattacctgctgcg

SEQ ID NO: 9562 - DNA, 174 bp, Homo sapiens
gatcaggctctgggacccctgcctggggggtggccttcatgcaccagccacttccgcaggtgctgactcccgcactccctggcattttttgcggacaagggcttgggatggaccctcagccccatggtacgccctgcccagtttccagttgccctgtccacttacctaggaagc

SEQ ID NO: 9563 - DNA, 353 bp, Homo sapiens
ctggctcagaacttgcagaatcacccaaatgtcagtgataggccaaattgaaacgtattatcaaagctctcaggtccactgaatcatcctaagagactggatagttccctggttctaagagccatcctcagatcaggaagtgccagctgcacccctctctgctcctcaacgtcagccacttgtgattagttgagtgtgaattgggcttcagacctgacctgtgagtgaccagttccatcaacccatccttcatcttagttaaagacccctgttggcctgacctcccaagaagacagtccggtgaagagcctggaacatctaaggcccagcctgtcacaaaaaaatgcagggat

SEQ ID NO: 9564 - DNA, 195 bp, Homo sapiens
gtgcagcgcatccccgaggccagcctcaacttccagaaggtgccgcccggctcgctgaactctcgggactttgaccagaacatgaacgacagctgtgaggacgccctggccaacaagacgcggcctcggaaccgagaggaggcacggtgcccactaccgccacggagctgggtgtggggaaggctggggcggggc

SEQ ID NO: 9565 - DNA, 750 bp, Homo sapiens
gcaaagtaactcttatgaaataatggacccttttggtaattatcttccaaactctcaaaataactgcattaaaaagtacttactttgcccatgaacacagcaaacaaatacaaaaacaaagatttggaactgctaaaaatatcaaggacaggatgcagacaattacgatgtcaagttatttatactgttagtagttaatgtaaagacatacactaaaactactccaagaatgggacaaatacgtggatttgtaaaattttttttttaagactgatgacatgggggatttcgctggttctcataacccagcatctatttgggggtatcagtggggcctggaggcagtgggagaaaacaaacttcacagggcagatgctgctgggaccaggaaaaaggcttcatgccctaaggtcctcactgtcgtacagcccagtgcaaagtatcattcattcatgacagatgcatgacgacatgaaagtcaatatacacagttaacccattttgacacattcattcctcagcattttttcaatacaattcatctgaaattatactaagacataaaacagacctgcttttgtacatccattactgatatgtctcccagggtcaggcagaaggaaccagaatgactgtcacacaactgctaattgtcgagacctgagacggactcacccatgagtgctcctgcatgccaggtactgcttgtcgactcgtgcacactggactcaaagacttttgaaaactgct

SEQ ID NO: 9566 - DNA, 202 bp, Homo sapiens
agccgagagcccaggaggcgcctctgagtcagaccaagatggtggccatgaaagcccaccaaagaagaaggccgtggcctgggtgtctgccaagaaccccgctcccatgaggaagaagaagaaggtgagcttgggccctgtctcctacgtcttggttgactcagaaggtggcaggaagaagccggtgatgccaaagaaaggg

SEQ ID NO: 9567 - DNA, 553 bp, Homo sapiens
ctttgattagattattttattacaacattttttccattaccagtcatttcctgtgcacagttacattcataaaacctgctcccccctcctttgtttgtttgtgaatgtaaaagtgaggcaaagtctctttccgtgtggctgtggctcgttaggtctgaaagggatggatgaataactaagcaccacactggacgggtttttcctagtcccctgcaccagtaaccctttgctataatgaggacacaaagagcctcgcatcaggccgctacccttcttcataactcaaaagcgtcacagtggcaatagcctctagtgctatttgtctttagtgcagttgtgacacttcggcatgatccataatttggcagctatttaccgtgacatttcccttcagtgcagccataacattcagtgaagccattatttggttccatttaccatataaattgtattgttgtgcatgcatgctaagcagctacattaggtacctgaaaatgagtaaatcctggtaaaatagatactaacagctattcagcagtaggaattccctggc

SEQ ID NO: 9568 - DNA, 645 bp, Homo sapiens
attttgacatagtgatcatttaatgaaaaaactcaccaaaatgtctccatttgaattgtattgataatgtgggacatatgtgtgattcaatatatacatatacccatatgtatatacagaaaattatttttaatactttcctactggataatgaaattttaaaattggaaattttgtgagtgtttttcttgtccaatagagcctaattgtttccttttttagtgatttaacaatctcttgagggctgcacctttaaattcccagattgtcaatagacatgtacagtatatgggataaggtggacacaagtgcacatataaataaaatcttcttaagacttttaactattcatttacagtaggagagtatgtagaaatcatcatccacaagtcataattaggttgtgtgcctactgtagttttttccatttctgtattatataaacatttgcatattaaaatttgatttttcccagagacaagtattatatactgtatctatatttaaatcaaactgtggtaatatatttctcagaaaataatgttggggactatagcctgaacatgtggacttgaagcgacatggaggaggaggttgatcccattgtgtataagttaatatgtgataactattgaatcttgtaca

SEQ ID NO: 9569 - DNA, 375 bp, Homo sapiens
gccacccctgggcctctttctggagtgggtcatggtcgcgtggaatagcatctcaagtgagtccatcgtccaagggttcaagaagtgccatatctccagcaacttggaggaggaagacgatgtcctgtgggaaatcgagagtgagttgccaggaggaggagaaccaccaaaagattgtgacaccgaaagcatggctgagagcaactgaagggaaagggaaaggtaaccactcaggagtagatactcagtgcctttgctgacatgtctgtgttctacaaacaccttctctccattatttttctgtttttaagttcccttagagcctacagtgcagtagtgtagatcaggggtccccaacccccaggtcacggacca

SEQ ID NO: 9570 - DNA, 328 bp, Homo sapiens
acctgtgctgcagcggctctctcaggccgtgggtcgtcgctgcagctgccgggaaagaaggaaacgacgactccgggggcgaacttggcacacagggaggaagggaaaggatgcatggtcatggaggctatgattctaattttagtgatgatgaacactgtggagaatccagcaaaaggaaaaaaagggacaagttgaagatgacttactgctccaaaaaccatttcagaaagaaaaacatggaaaggtggcccataaacaagttgcagcagaattgctggatagggaagaagcaagaaatagaaggtttcatcttcatagctatggg

SEQ ID NO: 9571 - DNA, 131 bp, Homo sapiens
attggctatatgtagcatgaacaattctccattttctgcaaatgggtttttcaggacagttttataattctgagtttgctttttcttattccctagacagtttgtactcagggaatacaaattgattttta

SEQ ID NO: 9572 - DNA, 501 bp, Homo sapiens
aaattttagtgaatattttatttggacattttaaagtttagctttgtaaccagaaggtatgaaggtgaacatttattcataatcattgaaatctaaccaagtcctattgcagtttatttgtgggtagaatggttggaagtagcatgctcaagacatttaaaattttgaaaaaaaagtcatgcatctgattgatcaccatatatgctcccagagcacagctcctccgtaatcctgctcttcagtgctagcattgttgattccttggatcctgtattttccttcctcttctcacttgatcccttacttatgtctgtcaaggactgaaacgcagtggaaggtgcagggaatttttgtaggaattgtttggcttaatagtccatcagcctcctgatggttcccagagtcatgccctcgtctcaggtgaagctgtggaagtgtttgatggaaacagctggtccctctggtcgttttgtgaagttctactccaagtgggagttgggt

SEQ ID NO: 9573 - DNA, 530 bp, Homo sapiens
ttttttttttcagaaacagataaacagtatatttattaaatgagttaagacaaataaactttacaaatagacaaataataaaaggctcagtggctaaaatagatggtaagcatcattgaaagaaatcaacaccatcacggtatctcagttggcttacacgtgtaaaaagaaattttcaaagagcaatttcacagaaatgaagccagtttttttcttataaacaaatcaccaattcttggttcaaaactgacatctgttatgaaaattaccatatcacatatttgtaagatgacaaggagtaactcatcttcaaagtgcaagtaagtctatttacaaccacaaaaaaggcaatgatgaggagaaaaggatttttaaaaaatatacaaagattaaaaacatttgggatgcaaaattaaacaattttttggttagaggataaaagagaaaaagtgattgaattacagatttcagctattccatactatataatgggatccaagatctttaacagcttgcttgcctttttttcc

SEQ ID NO: 9574 - DNA, 229 bp, Homo sapiens
agcagggggcagcagcaccatgaatatcctccagccaactgaccctgccgcacccccagagggcacgatgcccattcccagcctccctgagcacaaccgctgtcctgatgctctgaaagggatgatatttggctttttacttactggcctgggggccagaagcagggctcacgcctagagtcccagcactctgggaggccgactgggcgaatatcttgagaccacgtgc

SEQ ID NO: 9575 - DNA, 441 bp, Homo sapiens
ttttatttcgaattaactatatatttatcaaagaggaactggcagcaagggtttggagaatatttttaggtaccaaatagcatagtgaggattcaaccaaaagatgaatttataagcagcagtgcccatcacctaagtgttttaactaacaggttttaaaaacattttatttacacaaaatatcagggctggataccttttaaagaggaggctcaagtatcgggctgtcatttccaatagatctgaccttttcttcagatacataagcattattttctctgtttaggtccaaggaaaaacaaaaggtaaaggaaataaagggaatatacataaggcaaacatttctctttttttttttgcattatatcttaccaattaattaaattgtggcctttgttattataaatgtaatgattcattaaactatattatgtaatataa

SEQ ID NO: 9576 - DNA, 325 bp, Homo sapiens
ggacacaaaatatgttatttattgtcaatttctgcaaagacacatttaagcaacaaaatatacatttgtcaaccttttagaatttgttttgtacattaacaaatacaatgtgctaccatagcaataaattaaatgtacattatttacattacataggcagttgggatctacgaatcacctcctcactaagaggaaagaaagcaaagtcgtcgtcacatggagcatcacttccaagccacagttcttaggttcgaccacacaggggaatctgcacactcacacgccagcagtccccgagctggagtgtccaagggtaacacccaaa

SEQ ID NO: 9577 - DNA, 116 bp, Homo sapiens
tgtgtttccagttgtcttgatattgaaaagtgtaataaacttcaaccttcccaaatctccaataggtgagcatgaagtttgaaaataaacttcctaatttttaaaaaaaaaaaaaa

SEQ ID NO: 9578 - DNA, 594 bp, Homo sapiens
attttttttttttttcatttttttttattacatttggacctttaagaaacatataccatcagatataccactattcagtaaaaatctattctagtttttgggaagcttatgtgtcacaaactatcttgcttctagtctccaagactttactaagtttatcaaaaaggtgggctctggtctatgggatcctgagccttgaggtttggatgttctgattattgtaaaacaatttcaagtggattaacttaattcccagctgtttttcttctggaatgggctaatcagtttgaattatctagtccattacaagaatattaaattccttgagctttgtgatctattctgtctttggaaaacctggtaaaaaagtaattttttttctatacaataaggatggatttaccagaacatacccagtattaatcataacaaaaagcagtatagataatgtatatgtgctgtgttcactttaataaccacttcataagtaactactctaactatggggactatttctggatcagtaagatccaagtgtagttagttacacactacactcagcttaacacaactcttggtatctgacattgatta

SEQ ID NO: 9579 - DNA, 416 bp, Homo sapiens
agccatagaccccttgctcgggcctcactcaaggccaaactccatacacattcagaactagtcaaagaagcacttcctgggcacggtctccagctctcccgcctccagtgtgggccggctcctgcagggtccgagggctgtatctctaccagcctggtgaggctggagggagcaccaggacctgctgtctgctgtcagcccctcctggtgctggtgccctgatgctgtgccttgtcacccattgagctgcaagagggaccaagagggggccacgcagccagccagatgcctggccctgtgctggggcagacaacactgcagagcccagggagcctggcgctaggacgtgcgtccttgtgacactggcctgtctgaactcacctggcctgggaagcaccgtctgcccgggcccaagc

SEQ ID NO: 9580 - DNA, 1937 bp, Homo sapiens
tgaaaattgcctttctgtgtttattcaaactgaaaagctgagaccaagagcaaggaaggtaaaaagttaacaggcaaacattttctcttagaaaaggtgataaaatcataagtatttggaattagaacccttgcacagcactgaacctgggaaagagatttaaactctgaatttatctttgataacagggattgattttaaaatgtacatgtattaaattacatttgtaatttaaggtctgtttgctgttgctgattttattcttgatcagtagtttgcatttcagaaagcctttcattttgctttaattttagcaaagcgggttataatgaatgacttccccaatatcttgcttgaacttacaggtgattaacttggatgagttttgggaagttaaagggaaggaaacactgttatcattttttcctgtttgggaagagcttagaaactggaaatactagatttgggagaagggcagagttacttgataagggactgatgtttgtgcagtaacttgggagtgtggtttctttttgaatctttaattaaaacctgggattatatatccctgataaatattcacacttgaaccatagttacctgtaaaatgcaaaaaatcttaatactgttattctttgcactttttcttaatcattttttatatatatgcatatatatatgtgtgtgtgtgtgttgcttatgttgttttgtacagatgtgggccaccattgcaacaaaatacattctttttgctctaaaatatttatgaagaaaatacttaaatgttatgtatatggtggtaataagggaaaaatcaagtattataaacaagaatgaaggtttttgtaaagatttctgttcagcgttttgcaaggtaaaattttaggcaagttttccctgaagttatgtgtatgtgagtattctcattcttcccaacttgcctttgaagagtgaaataccattattatcaagtagactactgttcagcttttattcctgccctgctgtttatcccttaagaatgagtttcttagacttttccaatatgtgattttttttcccatttagaatggtgattttaaatgtgtgagtgcatgtactatcttatctcagatatttgcacccccaatctgcccccaactcccaaaagctagaacactgccaactgatctgttataggtcctttagaaacacataattaacacttaaggttgggtgctgctaattctttgcaaaaatccaaatattgttaagggaccagggagatgccactaccccttgattttccatctaaaaatatacatgtttatgtaaacaaatctttccatatccatagtgacttttcaagtatttaagcctaaagattttgatctcacatttttatacctgtttaaattgctcacagttattacatacacatcagccatcaactaaagttgtactttaaaaatttactacaatatgtacatttctaagtcaaacacttgtgacttttgctttaattccatgaatgttcctgcctccttgatatttgtatttattctttttttctctagagtagaggtataattgtgtgatatttcagaaatacagataaatgattcaaaaagtcacagttaaggagaatcatgtttctttgatcatgaataactgattagtaagtcttgcctatattttcctgatagcatatgacaaatgtttctaaggtaacaagatgagaacagataaagattgtgtggtgttttggatttggagagaaatattttaatttttaaatgcagttacaaattataatgtattcatatttgtactttctgttaaaatgcatgattgcagaattgtttagattttgtgtttattcttgatgaaaagctttgtttgttcttgtttttaagtttgcactcaaatcttaagaaataaatccacccatgttatca

SEQ ID NO: 9581 - DNA, 359 bp, Homo sapiens
cttttcccatttacagactggaaactggtcctttaccagaaagataaaagcaagtattttctctacagtgcagggaagatgttgaaggtttttaaatttttttaaaaggtacacaaagattaatttataaaactttaccacaattgaccaagcaatcaggcctggaggaacctgttgtctccagtagcatcttccacaccaacactaggagtctcaaagaagacaggttgatgtctcttcagcaccctctgaagacaattctcatgactcttgatagagagcatcctaaaatcacaattgttaaaattattttcctattctgtgttgtaagacttcgtaagccagtcacttgaaattct

SEQ ID NO: 9582 - DNA, 690 bp, Homo sapiens
cccacgcgtccggtttaacatgaaaatgaaaaaagaaaaaaatgaaaaacaaaaacaaaagaagccttcctctcacctcattttgtaaatgaaaaatccctaattcagtgaattcacctagtcactgcaaatgtatctgaatagtgcttggtgtgcttgccagtctgatcatccactcattctactaacatctttttgcacccactctgtcaagctctagcctagacctttagtgtgccatgcagtcacaggtctgaaaagcagcatcatccaaaccttacttaatctctaaaatctcagctggtggacagctcatgattagttcagcccacttcctcccccttagttgagtttgcagcaggacgcaggagataagcacttccaagcaagtctgatttatatatcaaactcggtctccatcccaggccagctgaccctcagagccagcaatgctctgtgcttcctccctgcgtcacggcttgggcaagagctgcctctgctgagcagtgtgtgtgatggagacggaggccgctgaaggccgagtgcttgcaggcttgtgaactgccatcgaacacaatccaaactctggaaatgttcctgaccacctaagccctcaacaacgtaatgcctgtatgtgctgtttttcagtaaactccttgttcatgtcaataaagtatccctgaaaaccac

SEQ ID NO: 9583 - DNA, 180 bp, Homo sapiens
tgaattttcaaattacattctaggtttgcagcctctgggagcgtccagcgtcacattattattcactcaggagaaaaaccacacttgtgtgacatctgtggtcgagggtttagtaacttcagtaatttgaaggagcacaaaaagacacacacggctgataaagtcttcacctgtgatgag

SEQ ID NO: 9584 - DNA, 569 bp, Homo sapiens
  misc_feature (1)...(569): n = a,t,c or g
ccctgatggtcccatccccactccagggatcacgtgacttggcaaaccaagatgggggatgatacccccagagcctggctccaaggcctcctgaagaggccatccttgcaacagaggaagggaaggcaggaaggccggttctgctcaaatgggaccccaggagaccaaagccctgagccgtgaatccagctcttccacttactactgtatggtgccaggcaaactgcacaacctggagtttttagtaaggttcctttgggatgcttgtcagcagcgaatacaatgtctgttcaacgtttgtcatcagctctcacctgggagaagccttgttactgtggggaaagggaaccaagtgaagggaacggacatccgattgagagcctgccatgttgccagggaccatttttaggtgtttttgcnttcctantttcatcntattcccacaaccacntaacnttatnttccnttttacagagaattcaagggacagggaccaagtttgaattggaaccccaagcagatttttttttcttgaggttnccattgcccngggaganggaagggatttt

SEQ ID NO: 9585 - DNA, 401 bp, Homo sapiens
ttttgttttgaaacaggtctttattcactagagattttaattactggaatccccaaaacagtatgatgagacttcagtatattactttccaggggtaggggataggggaaaatctatatttttgtacagtttattttttaataccataaagccttaggacaaaaggggtggttagctctgcttttagaattaactgagatgatttttaccagtgtgattttcatatctgtgttggattacttgttacatcagtcatgatgatatttggttggcaaagagttcgcttgatttttttctgtcaaagtatcttttaatattttggtaaacactcttccatgaggcctcatcttgtgaagttgaaattacagcattatttttattagagaaaacaagtgaaaatg

SEQ ID NO: 9586 - DNA, 804 bp, Homo sapiens
  misc_feature (1)...(804): n = a,t,c or g
gcagttagtcgcgatctagaactagtcggaatcttgtgacaatgaagagcttaattcttctccagggaagaacagctccacaatgctctattcaagacagagctctgccagtcacctctttactctgacagtccttagtaaccacgcgaatgagaaagtggagatgctactaggagctgagacgcagagcgagcgagcccgctggataactgccctgggacaccagcagcgggaagccgcctgcagaccgaacctcactgaccccaggtggaaatcgttaggtcatttactgctaagcagccagatgaactctccctgcaggtggctgacgtcgtcctcatctatcaacgtgtcagcgatggctggtatgagggggaacgactacgagatggagaaagaggctggtttcctatggaatgtgccaaggagataacatgtcaagctacaattgataagaatgtggagagaatgggacgcttgctaggactggagaccaacgtgtagtctctcagatggtcttttgttactgcaagatttgcacgacacttaccgggctggttggttctgggctagttttattgttaattttgtcacagcctatttaattaaaagaacgaaaacacttgcctttaagcttgccaggttgttctgctctctcatgagaagagcttgggatacagtgagtttgcacagcttcagtttttacctaaccacacacttggcagacctcctgaggtacacagaataggctgagcagtttcanttcagggatcaggtcatctctggttcctcctagttttcacc

SEQ ID NO: 9587 - DNA, 768 bp, Homo sapiens
tttgtttgttttgttttttgttttttgaaaaattattgcagtacaattactcctatttggaatttagtaaggagcaaacagcacaggagtgtgggcggtccgaatgggtccgggagctggccgcaggagtgccggaggaagcgcagaagtctggaacagtgttgctgctggagcagttcgaagactgaagggggaactcactgccactgctgctgcggctgctgcagctgctagaggatttggtagaattcgtggagccaatggctttgaaggttcttttgaaaatactaattttacccccagtggatgtgctgtcttctgtagtttgttgtaaggactgtatttaggtttcgggggcttcccagcagctctgtctttgtgccttctactgctaatgtgctgtttaagttgcgtttccgagttgacgtgcacatcacagatttcacagtgaaatgttttattttggaggcctgtgtttcctttattaacaggtcctttgcctttcactcctgccctaggaaaggctttgatagtgccacttccattccgggcttctaacatggttttgtgcttagtaccactgttgtgccctccagctgcgaggcagagttgacagcaaccttgcatagcgaacagtaaagaagccgttttgccttttcttcctcggtctcagtagaaggacatgagctattgccagtggctgtcgttgggcttttttccactttagaggtgatctcagttgtcataacactgcttttgcggatttcg

SEQ ID NO: 9588 - DNA, 164 bp, Homo sapiens
ctggctgctcaccccaagctctttctgctggagaacgccaagctggccggcctggctgcggacaagttcccccacccggctccctatccccataaggagcgcttgccggcgccgctggagcaggtactgaaggaaaactcggccctgactgccgagcgcggagg

SEQ ID NO: 9589 - DNA, 603 bp, Homo sapiens
ttttttttttcatcgatcaattcttccattactttcttttaattcaaacatgcatacacaaagaaaggtttctgtcctttaattttttaacagaatatacagagccacacaatacgatttcaatttcaaattatgggagatcatattcaaatatgcttaggtttgacaagttgctgttacaatactgagaactttcatgaaaacggtatttaacaatttttaagataatcaaatatctttttgctacgtgggccaacgcattaatactaacttgtttaaaaatgcagtcttttagacttcaaattattataaaacaatatcaagatcatatagatatacttcctgattactcaaaactcgttccattctgatggaggctgaaggtaaatgttattatacattagaacatttcatgaaaccacttctcctttgcacttacctgtaaaagtcaaaaattaaaccacaatttcctaagacataactatttctagaatacattggtgtaatcataaaagactacaagtaaattatcatttttatactaacactttttaccacaatttcctaagacataactatttctagaatacattggtgtaatca

SEQ ID NO: 9590 - DNA, 188 bp, Homo sapiens
gttatctcagtgccgctttgtttcccaccccagtcggacagcccttcctcagcgccctttaacccttgcagatcggatggagaaagctgccagcacgttctagggatgggggcagattgaggagcgggagggagtagtctttgtctaactttataccagtaccaaactatgttaatttaatgtagttt

SEQ ID NO: 9591 - DNA, 224 bp, Homo sapiens
gtttattagaggcttaaatgatacttctttaagcatccagtttttattttattaaaaaatcttagtgtttctttacaggttagttttgtattcttttttaatattttaagacattgccttcctatttaataatgtgctattcgtataataatctgtttttattacatagacatttgtgttatttaataaagtatattgtgttatatccctaaaaaaaaaaaaaa

SEQ ID NO: 9592 - DNA, 454 bp, Homo sapiens
agaggagaatggatttatagagaacatcatctaaatccaacttgaccattgtgtggccacacttgctagattgctatagtctaaatctagcattgtagaaagacgggggagcttggagctgcacaaacccaggtctggaactggctccttaccttggaaggtgaatgatcctgccaggactcttagcctccctgggtctcaatttctttatctgtttcatgggaatgaggatctctgctgggtggttgggtgatgtgggggctgtgtgaaaacagcttgtcaatacaagccaaaatagaaatatttctccacagagtatgaaggtcaaatgagagaatacatttaaattaaatggaaaattaaaatggtaaaaaatgcaaagctgtattgaaagttccgagcttctctataaggagctttttgactatgtaagaatcctgtactcgttccccct

SEQ ID NO: 9593 - DNA, 694 bp, Homo sapiens
ttttttttttttttattttcatatatgtatatatttattatgtcacaaatagctacatactggataagccagaaagatgaggaaacatgtttgcatctcacactagtgcagagattctgaaaaagaccccacttggaataccaaaccacacattagattgttctgttcccaattgtgtgccaaagtgcactctgaactgttttggtaaagccgaccgtggagtcatatgaggctgaataacttgggagaatgtaagtctgcaaaataaacctaggactggattgatcctcaggccacttggccaggtgaatgtctcgggagtgaatatgagacaagcttcctgaaaaggcttatatgacttaaagaactttttgtttaagtgtttggtcccaaataaactattaagatatataaagtaattcactgctcaaaaattaccgtcagataaatattaagggatgatacactttaaaggagaatttgtatccacataaatccttacattcatggtcacaactttcctaatctcaaattgttctaggtcactgctatcagtctagttctgtcctctatttcttaatttaataccaatacttttaaatttttaaaatatgctgctttaggtagatttaaaatatatcctatcctccactttctaaccttcctgaaatatactgttcaataacaaatcctt

SEQ ID NO: 9594 - DNA, 412 bp, Homo sapiens
ttttttttttcaactaatttttatagttacatcagcctgggctaattatacagaaaatttatacaaatacacacaaaaccaaaaataccaaaccaagcaacaacaaaaaaacaacccccaaacccaaaaactctcattccataaggtgacaaattttacttctgagaggtagtacaaccaaccaaatgaatactgtacgtgcattaactgaggcacttaagatcacccaacctttttaatttataaccaaatctctcctcttcaggatttcagtgctcatgaacaagtattatattagattaatggtctcaatttattctgacaaaatcttactttgaagttttaggtcatttagaccttaaaggttacaaaaataaagtatttctatctcaggcaagtatttaaatttctt

SEQ ID NO: 9595 - DNA, 350 bp, Homo sapiens
gccaggaaaatatcatgactttatttgctacactgacagcagcactgaggggagctgggggctgccacccctacgcgggatggtccaaggtaggggacagtagtcaacgcttccccagggtgggggtggtctcgggggaggagtgtagacagtcgccaacctcagggatgtgggaggtggtggcggtggtgttgctggagaggggtccagttggtggctcagaggcagggagttccagtgtctggggtgcccgtgggcctgcactacctcagggggccggcgggcagcggcggccagggctgctcggccagctctcgttccagctgcttgaagcgcttcttggaggcccg

SEQ ID NO: 9596 - DNA, 845 bp, Homo sapiens
  misc_feature (1)...(845): n = a,t,c or g
gcgccatccaggtttgtgtttattcgatacaggcccagaacccagccctccttcagagaagtggccgagctgggggaacagaataaataaaggccgccgaggtgtgatggggactggacgggccggtctggggcgaggcaagggtgcccaggaggcattgaccccaacctcagctgtccacggctggccccactcccagcaggctccgggggcagtgtgagcgccacaaggagcagggctcggactcctgccacctccaagtcctttcttttccttcctgccctccctctccttcctaaggcaggtccagagaacaagctctccctctggccggggagccggaagggagggagggtggaggggccagtgtccaggtcccaggccatgaccctggtgcctgtcctgggcaggaagcggtntccgctgtggcaggacagaggagcagggaggcaggcgcccaagccagcaggcctttatgcgtcgcccccttgcgcgggggccccgccccgctcccaggcttcgtctcccacgcacctgcccccgaacaacaagcgggggactcaggagtcacaccagcttccacccttgtccaagggcccagcagcccctcgtgtatccctggacggctccccagctgccgtgtcttcctcctcctcctcctcctccccatctgtgaactcctcctggttgaggccataggccaatgtggtgtgcgccaggtctacctcgatggggaagacgtcggcatcccgcagcactgcgtagcagtcgttgtagtacttggacatggtggacacgaggcgctgcagctggaacacgatgtcctggactggggtgggaggtcg

SEQ ID NO: 9597 - DNA, 277 bp, Homo sapiens
  misc_feature (1)...(277): n = a,t,c or g
cccacgcgtccgaatcaggaaaggtaccctaatcgttcaacaggcaatcatctttgggggaatggggcattttgggtagggtaaagtgtgggtnggacggtccttattattatttttgaggacagtgtcttgctctgtctcccngggcttggnagggtcagtgggcacaaatctcaggctcactcttaaccctgcacctcccggggttcgagtgattctccatctcaggnctcccccagtaggtnttgaacttaagggctgttgccaccacggcggg

SEQ ID NO: 9598 - DNA, 272 bp, Homo sapiens
gcaatgtggtgacagcaagtacatccatccagctcctggatgaacggaaatctcctgtggtggcagctgtaggcattcagatgaaacttgaatttttccaaaggaagttctggactgccagcagacagtgtgcttccctggatggcaaatgctccatcagctgtgatgatgagactgtgaattgttacctcatagacaataatggatttattttggtgtctgaagactacacacagactggagacttttttggtgagatcgagggagctgtg

SEQ ID NO: 9599 - DNA, 362 bp, Homo sapiens
  misc_feature (1)...(362): n = a,t,c or g
agtgtcctatgcaggtgcatccttttttatcttttatactgcatgtttactctgtgtattttctgtgtttagactcataaatacttaacatttggntacaatttcctacagtgttcagtacaacaacatgttgtatggtttatagcctagtagcaatagactgtaccatatagtctagatgtgttgnagctataccatctagatttgtgtaagttcacttgggtgatgtttggtaccatgaggaaatcacctacaacacgtttctcagaacatatacccatgattaagcaatctctgcctgtaaaatgctccagaaaattcacaccatgatataaattcatcacacacgatataaaagttaa

SEQ ID NO: 9600 - DNA, 475 bp, Homo sapiens
tgcgccgctgcgggagccacaggaagtgaagagcttccgccgggagaccgcggctgcaggaacggaggcggaaggggccctgcggcgacgacgtcgtcgacgggggtggccgtgggagctgagcacggagaagactccctctctcggaagccggatcccgagccgggcaggatggatcaccaccagccggggactgggcgctaccaggtgcttcttaatgaagaggataactcagaatcatcggctatagagcagccacctacttcaaacccagcaccgcagattgtgcaggctgcgtcttcagcaccagcacttgaaactgactcttcccctccaccatatagtagtattactgtggaagtacctacaacttcagatacagaagtttacggtgagttttatcccgtgccacctccctatagcgttgctacctctcttcctacatacgatgaagctgagaaggctaaagctgctg

SEQ ID NO: 9601 - DNA, 2685 bp, Homo sapiens
gacacacaagtgtgtgagtgtgagtgtgagagatggggcggggggtgtgtctgtaggtgtctctgggcctgtgtgtgggtggggttatgtgagggtatgaagagctgtcttcccctgagagtttcctcagaacccacagtgagaggggagggctcctggggcagagaagttccttaggttttctttggaatgaaattcctccttccccccatctctgagtagaggaagcccaccaatctgccctttgcagtgtgcagggtggaaggtaagaggttggtgtggagttggggctgccatagggtctgcagcctgctggggctaagcggtggaggaaggctctgtcactccaggcatatgtttccccatctctgtctggggctacagaatagggtggcagaagtgtcaccctgtgggtgtctccctcgggggctcttcccctagacctccccctcacttacataaagctcccttgaagcaagaaagagggtcccagggctgcaaaactggaagcacagcctcggggatggggagggaaagacggtgctatatccagttcctgctctctgctcatgggtggctgtgacaaccctggcctcacttgattcatctctggttttcttgccaccctctgggagtccccatcccattttcatcctgagcccaaccaggccctgccattggcctcttgtcccttggcacacttgtacccacaggtgaggggcaggacctgaaggtattggcctgttcaacaatcagtcatcatgggtgtttttgtcaactgcttgttaattgatttggggatgtttgccccgaatgagaggttgaggaaaagactgtgggtggggaggccctgcctgacccatcccttttcctttctggccccagcctaggtggaggcaagtggaatatcttatattgggcgatttgggggctcggggaggcagagaatctcttgggagtcttgggtggcgctggtgcattctgtttcctcttgatctcaaagcacaatgtggatttggggaccaaaggtcaggggacacatccccttagaggacctgagtttgggagagtggtgagtggaagggaggagcagcaagaagcagcctgttttcactcagcttaattctccttcccagataaggcaagccagtcatggaatcttgctgcaggccctccctctactcttcctgtcctaaaaataggggccgttttcttacacacccccagagagaggagggactgtcacactggtgctgagtgaccgggggctgctgggcgtctgttctttaccaaaaccatccatccctagaagagcacagagccctgaggggctgggctgggctgggctgagcccctggtcttctctacagttcacagaggtctttcagctcatttaatcccaggaaagaggcatcaaagctagaatgtgaatataacttttgtggaccaatactaagaataacaagaagcccagtggtgaggaaagtgcgttctcccagcactgcctcctgttttctccctctcatgtccctccagggaaaatgactttattgcttaatttctgcctttcccccctcacacatgcacttttgggcctttttttatagctggaaaaaacaaaataccaccctacaaacctgtatttaaaaagaaacagaaatgaccacgtgaaatttgcctctgtccaaacatttcatccgtgtgtatgtgtatgtgtgtgagtgtgtgaagccgccagttcatctttttatatggggttgttgtctcattttggtctgttttggtcccctccctcgtgggcttgtgctcgggatcaaacctttctggcctgttatgattctgaacatttgacttgaaccacaagtgaggggaccaaaacagaccaaaatgagacaacaaccccatataaaaagatgaactggcggcttcacacactcacacacatacacatacacacggatgaaatgtttggacagaggcaaatttcacgtggtcatttctgtttctttttaaatacaggtttgtagggtggtattttgttttttccagctataaaaaaaggcccaaaagtgcatgtgtgaggggggaaaggcagaaattaagcaataaagtcattttccctggagggacatgagagggagaaaacaggaggcagtgctgggagaacgcactttcctcaccactgggcttcttgttattcttagtattggtccacaaaagttatattcacattctagctttgatgcctctttcctgggattaaatgagctgaaagacctctgtgaactgtagagaagaccagtgtgacagtccctcctctctctgggggtgtgtaagaaaacggcccctatttttaggacaggaagagtagagggagggccctgcagcaaagattccatgactggcttgccttatctgggaaggagaattaagctgagtgaaaacaggctgcttcttgctgctcctcccttccactcaccactctccccaaactcaggtcctctaaggggatgaactggcggcttcacacactcacacacatacacatacacacgggatgaaatgtttggacagaggcaaatttcacgtggtcatttctgtttctttttaaatacaggtttgtagggtggtattttgttttttccagctataaaaaaaggcccaaaagtgcatgtgtgagggggg

SEQ ID NO: 9602 - DNA, 735 bp, Homo sapiens
ttttttttctgttttcattgacccatctatgcaatatgaggcacaaaaaatgttctactaatacacacatgtaaaacgtgttgttcatcttatgtttatctaaatatatttacatatttacagatttcaatattcacttcctacaactttctataaaccactggccttcttgggtttcactattatttggtattcatatgtttgctgtgaaacaaatgtctcctctccacgaggttttaccttgcttcttgtcatttgaaagtaaaaattcagcccccgtcactctaagacatctcctgctatcatccatatcccaagatattttaagacagtgatttggctctgggtttgtgggcacaggcaggttgtttccactttaggagccaatttggtcataagtaggaagagaaataacatctgatggagaaaaaaaattccctctctgttcccatttggatgtgtttcttgcctgagactttgcagatcataaatgatgcaaatgcacaatataatgcaggttagtcaaatatgagacagttgtatacaaacatattcagcattaacaacatggagatatttacttggccgggttttccattttcacataaaaatggcctcatattcggatgcgaattcaggggcgttgtcattgacatccagcactttaatagcaacaggtactcgtgatatctgactgtggttcctaatttcagtagcaatgattgttatggtgtg

SEQ ID NO: 9603 - DNA, 505 bp, Homo sapiens
tttttaccaggcgatacagactatttgtttattatgaaactaactggtaaagcagagtaaatcccattctatattatagcactacaaacatccttagtcattccttcatttgttcattcattcattcatgcattcagtgagtatttcttaagctcctacagtgtaccaggaggcactctgttcattgtggcattacaaagataaagattaaggcacgtactctgccctcaaggagctcccaatctaattgtgcagagagatgtgaaaatgaagcatgaaactccatcgtgaggagcgccgagaacaaaagtctgctcgaagtgaggcagaagtatggattcattccaccacaggtcccatgggaaaggtatgtggcatttctcctcctcttcagaataatgaatgcttgacatagctttcatcactgtctttcagttccagtgttacaagggggatcccagcactacagtgagtcgcagtgaacccagaaatgattagcattctc

SEQ ID NO: 9604 - DNA, 1426 bp, Homo sapiens
ctctattttggtccaatttgtatctagtggctgagaaattaaataattctaaagtatgaagttacctatctgaaaatgtacttacagagtatcattttaaaatggatgtctctttaaaaattttgttacttttaccaacaatgtaatataatttatgtatattttattaataatagtgaattccttaaaatttgttctatgtacttatatttaatttgatttaatggttactgcccagatattgagaaatggttcaaatattgagtgtgtttcaatatattatctggcttatttcaacatgagtaatatgagcaaaataagttaaaacctgcgtctgatcaattttcctcatgactagaactaaaacagtaaatttggacaatattaagcctcaaataatcatctccaaactccttctaacactttttaaatcagattggaagacatggacaaatcaggttcatgtgttgcatctttatgtcctttgccaatatccaagatcatcacatatggtagatattcacatggagtttcaaattcagaatagattaccattaccttcctgcccttacacatcctactccttatttaaaagttctatttgtgacttttcatttcctgaaagtttaaaaatacaatttgagaatgtttataatacattctctcctgtcttttcacggttacgtctgttattgctgaaatacaccacattttctttgttctggtcaaggttaactcaatatctgtgtgaaagagaactactaacaacgttacaatagaggctagatttgaaaaaaaaaatctatagatctaattgatacaattgtagaacaaaatgtcaaaataatgttttaagtataagagaagatggaccaaggagagagagatcatttgaaaatctaattgtagcttttctaggctcacattcatgtactacttttagcacccttatgggcctgtgctcgccccctggacagttgagctttgggattatcttcctcttcaattttccctctattgacccgagtgtctccctctgcttctacagatttatagtactccttggctcttttgagtctccacttttactcactgtctctgggatttttaagatccttttcttctcttataaatcatcctcttaatgaaaattagcctaacaaaagtttggagactggaatcctactttgagccactgacttgaaataactcttttggcaagttgcctgacatcctgtcttaccaaggtggcatatttgcatttttactgcttaaaacattttttttttttttaccatctttatccaaatttatcatattgatggtaggactaacaggctttttagaagctgggctttaactttgagtctcaagctacaatgccggttgggcagcctggtcttcccacgtgagggtttaactttgt

SEQ ID NO: 9605 - DNA, 737 bp, Homo sapiens
aaataagtgagccacatggcaacctagtaattcttcaatgaacttcaatatcccattacaatgaggcattgtggttttatactatggggttgctgtaaatggagtttcactgcagctggttgctgaaaataatgatgtgtccatggctcttccagacaacataagtatggatgtcaggggtggggagccgggggaactgaagccacagcacttgactttgtaagtattccaaatgcctctactacagtccagtagtctacacttgcagaggctgaatgcttcagctttcgggctttaaactgttagtgtagagattttactgtagagtggtacaggcttgctatgtgccttataacagaaatcactgcaattcagggaagtttggggtgaagatgcgagtgaacatctgagccatgacagtaagctctgcctttggaaaggagagctcccacttcacggccacaacgcagcacacagaagagcacagagccgtgaggtggagacaagctctgaacacacgtgacgcccgcccgtctgtgcacctgccaaggcccagagcccacatgctgttctgcacgattaccagaacacagccgttggaactgggctcacagcacctttgctgcatatattcttctcatctctccacaactacttgatcagtgttcatagcacttaaaaaatttaggtccctacagataaggccagagtctcctccatggttctggcacttagat

SEQ ID NO: 9606 - DNA, 311 bp, Homo sapiens
tttagataaaggtgatcacattttcaacaaccatattattaccagtactgtttcaaatcagacaagagaaaacagcatcagtgccaaaatgaaaggaactccagtgactcaacaagtgatcatatcagggcaggcaaagtgagggtggagctcatttggtttcttcaacttcagtataatgaggcttagacaaagtcttcaaaccaaaaatgtatcaagtattacagttcacacatagcaaagttttcaaacagaataatcctgtattcagatttatatcagattgtagaagctcaagtgcagacgtccca

SEQ ID NO: 9607 - DNA, 848 bp, Homo sapiens
gttgaaactcactttatttaaaaaaaaaagtcatgaacaataaattacaatcattttccccttttataaattcttcataaaatatatttgacaattttaacagaaaatttcaaaagttgctttcatttcttaagtgctgatgacttattttttgaccattttgtcatgctggtgaattactttgtagctgctacaatagtttgattgataacaatttacaattaaaaacaacaacaacgaagagaaaaaacagaccagcagaaagaactattctgtgtgctatttatctgacacttaacacttacttcatcataatgacaaagtatcccttagcaccaaaaaatctacaggaaccccatctttctaagtgacaactagtgcaaaataacattctaggaactaactgtacaaccccatattttcactggccacagctgcctataagctcatttgaaatatttggtcttttttcaattaagacaaatctcaaaaaacaccataaatcatggcaaaagactctatgaggaacaattgcttattgagtacctattatgggcaaggcactgtgtacgaagttttgctttcatttttcctctagcaaatatccaggtatttccaaatatcactaaccatcttttcttactcctggctgaaaagcgctttgctaaatgccattttttaattgtcattttatcaacaaacctttatggctgagccacacagtaggtacttaataaatacctctgactgaaagaacaaagacaaagaatttactatcattttgcttggctattttagaatacaaggacttgataaaattccagaagaaacttcctgatcacctcata

SEQ ID NO: 9608 - DNA, 709 bp, Homo sapiens
ctgaactttccttagcccaagggacccagtgacagttgtcttccgtttgtcagatgatcagtctctactgattatcttgctgcttaaaggcctgctcaccaatctttctttcacaccgtgtggtccgtgttactggtatacccagtatgttctcactgaagacatggactttatatgttcaagtgcaggaattggaaagttggacttgttttctatgatccaaaacagccctataagaaggttggaaaaggaggaactatatagcagcctttgctattttctgctaccatttcttttcctctgaagcggccatgacattccctttggcaactaacgtagaaactcaacagaacattttcctttcctagagtcaccttttagatgataatggacaactatagacttgctcattgttcagactgattgcccctcacctgaatccactctctgtattcatgctcttggcaatttctttgactttcttttaagggcagaagcattttagttaattgtagataaagaatagttttcttcctcttctccttgggccagttaataattggtccatggctacactgcaacttccgtccagtgctgtgatgcccatgacacctgcaaaataagttctgcctggggcattttgtaggatattaacaggtgaattcccgactcctttgggttgaatgacagttctcaatccttcctatgg

SEQ ID NO: 9609 - DNA, 575 bp, Homo sapiens
ttttttttttttttgagcttggcaaaccttttttattttgtgataaaaatgctttcatataaatttcatcttaactacctttagaatgaaacggaaaagtaaaaacaaagtgtgcattttccttactacgtttagtcaggaatatgcggtcattttattggttactgggtttctcatacaaacagatataatatcacttttaagagaaatgtacacaaggaagtaaccatagtaccacttattagtgggggcctctgggtacataaatgtgtcctcccaaatagtcatcatacattcaatgtattggttagggccaaaatccctaaaccacctctcaacaaaacattacacctttggttctttattatgcaaaaattacaaattggcaaattcaataagaggatgcaatggatttgagcatcacagccaattgcttatactaaaatattttaattctcagactctctttccctcatacctttcccttccccacctcacataagaaaatgatgcttaaaacaaaacagaggaagcaaataaacaaacaaaaaaacctatccccaaaggcgggcaga

SEQ ID NO: 9610 - DNA, 614 bp, Homo sapiens
gcatcgtcgggtgtccctcaccccacctggggaacctctgtcttcaggtcaccccttttcaggggcctgggttgctcatgtcacaagccacttttaaggcccgtgtcaacctgtgtccctgtgtcctcagggcctgtgttacttcgtgccccacttctgcccagaacactgacctgttagctggctccctcctgcacaccccagagcctcctcccagggcagaaagggtggcccatccagggaaccaacgagtacctcacttagtgaccccagcatccaggctggcgtcgcgggtgctgggcgggaggggctctggcctgggtcctcagccctggcttgacgcgggcgtcccaaggccacgtggctggccacgaaggtccccgtgccagacagccccagccgcatcccggcctcctccggaggcaccttctcctggtactcggcccagagcctgcgcataaagccactttgccactttgcagccctcatctcatgttctttgtagcggaccgagtgggtttgctataggcctcgtctgactttgtcttgcgtcttttctctgtggactcttgaggacgcctgagccccagccctgcccctgaccagcctccccc

SEQ ID NO: 9611 - DNA, 1051 bp, Homo sapiens
gaagaacttctgaggcgtagaaaagtccaccgagaagttatatttaagtacttggcaacacaggggattgttatacctccagctactgaaaaacacaatcttattcagcatgcaaaagattactggcaaaagcaaccacaactgaaattgaaggaaacgccagagccagttacaaagacagaggacatccacctatttcaacagcaggtgaaagaagataaaaaagctgaaaaagttgattttcgtcgcctaggagaagaattctgtcattggttctttggacttcttaattctcagaatccttttctaggaccacctcaagatgaatggggaccacagcacttctggcatgatgtgaagcttaggttttattacaacacatcagaacaaaatgttatggactaccatggagcagaaatcgtgagccttcgttttgctgtcactagtaaaagaagaatttctttttctcagccccaacctagattcacatggactgaaatgtgcatcttctcctcatggggctggttatggttgggagttgctgggactgtccatcgagggaaacacttgtttggggcatttttggaacaaatttttggactcatccgctgcccttttgtggagaatacttggaaaatcaaatttatcaacctgaaaattatgggagagagttcccttgctcctggaacattaccgaaaccatctgttaaatttgaacaaagtgatctagaggccttttataatgtaatcactgtatgtggtaccaatgaagtacgacataatgtaaagcaggcttcggatagtggaactggggaccaagtttgaggtagtggaaatgagacattgctgaacaaaagagaactgggtttacctgaccctctaaagcgctaagtactgtcagcctgaaaaaaatcttctatacagaaactcttccaaatactatatcagtaatgtctgaatgatttcagatgtgaaaattgacatattttagttgaaatacctttctggactacagacttacatatcatgtgaatacttacctatttctacc

SEQ ID NO: 9612 - DNA, 1700 bp, Homo sapiens
gttaaggctgagcactggaaccgctgccacaagctcatcatccgacacttagcttctgatgccatcattaatgagaactatgactacctgaaggggttcttggaagacctggcacctccagagcgcacgagcctaattcaggattgggaaacatctgggcttgtttacctggactatattagagtcattgaaatgctccgccatatacagcaggtggattgctcaggtaatgacctggagcagttacacatcaaagtgacttcactgtgcagtcggatagagcagattcagtgttacagtgctaaagatcgcctggctcagtcagacatggccaaacgtgtagccaacctgctgcgcgtggtgctgagtctgcatcatcctcctgatagaacctccgactcaacaccagaccctcagcgagtccctttgcgcctcttggctccccacattggccggcttcccatgcctgaggactatgccatggacgaactgcgcagccttacccagtcctatctgcgagaactggctgttgggagcctgtgagccccaggcactttgcatcacagtcacatgcccattcacaccacacagaggttccctgccttgtttggattggcactgtttgccattctctgggttggctgtggcatctaccctccctccctgctgccagaagcagcatcctccacttgttcagggcttttcttaatactgaacgtagcataagggcttctggaacccagaagaggagacagtttaccatcctcaagatcattcagtgtttttcctttaaaaaaatggtcaataaagctcctttggcagaatcccccaaagaaccagggtattctttttccatccctagccattctggatcttgtgaccctccatgccaaccagcttccctactcctaccctggcccttttatactaggactccttaggaggagtgagacaggtgataatggatccttaacagatgaactatccacagaaggaagagggatccgtctcttaagtaattggttagttaacactgaattttggaggcaaaggagggttggcctgagttaggaaacaaaatgggatctttctgacacacttagggcagaagtgaatgcctgtgcacggagggattgatcttcagggctgtttttgttcctgcctttagagttccatgaacaccatacctttgctactactatgtgcaggaacccttggtcacatgtgacatgtctgtgggaagctcccagagtttggtttggtccctggttttcagtcttgctgagactctgtctggatttgcctgcagagtttggataaaaaatggcaggttgggtaaccctccctgttcatcccatgttagctccaaagcatttcccaccctccatctaccccttccagaagcaaaaacaaaccatgactgaggcaggcatggagttgggcgttaggggcaggcagagggcctttgctacactgctgacagctatagggagccccaggtaatggcatgagatagctggtgttagggctatctcaggcaatatggccacacctgggtctttatgcatgaagataatgtaaaggtttttattaaaaaatatatatatgtataaataaatgatctagatattttcctctttttctgaagctactttcttaaaaaataaataaaatgtttatagcattcctggtaaaaaaaa

SEQ ID NO: 9613 - DNA, 401 bp, Homo sapiens
gggtgattttagcaatatgctacacttaaaagagttggggctaaataatatgcctgagctgatttccatcgatagtcttgctgtggataacctgccagatttaagaaaaatagaagctactaacaaccctagattgtcttacattcaccccaatgcatttttcagactccccaagctggaatcactcatgctgaacagcaatgctctcagtgccctgtaccatggtaccattgagtctctgccaaacctcaaggaaatcagcatacacagtaaccccatcaggtgtgactgtgtcatccgttggatgaacatgaacaaaaccaacattcgattcatggagccagattcactgttttgcgtggacccacctgaattccaaggtcagaatgttcggcaagtgc

SEQ ID NO: 9614 - DNA, 1112 bp, Homo sapiens
ctcttctagaacactggactctgacagcacctccactgctggaaagaatagttaaatctgtcatgcaacaggaaaacaaaacactaagctattttggaacaactgttctacacagaagagagcttctcttaatttaaaaaaaaaaaaaaatcccaaataggcatttttaggcattaaccaaaaaagagaatccaaatgaaatattatacttgatgttcaattttaatagcatcttgataaaggtatgcttcctttcatttgaatacatttctgcacatgtatgttataaaatccaggaaacagccaaaccacaagttaactcttaacaatgaatatacatagttaaccctatagtaagcagcccctttgaaaagcactgatgcacccaacagttatatgggatcatttcataaagaggcaacacaaagttttaccatcactaatacccagtacctacagttcactttaatgttctggaacacaataatgtaaaaggcaagtttcttttgaaaatggcttaaactcaagcagttctcttgctgaacatcaaactttattattccaggaaactaagatttagataagaaaaaaatgaaataccaaccctaatttaaattacttaagtattcaagtctataaaagtaggaggttagaggtctgtggtcaatttgcaattaggttttagatagttggtatgaaactgtaaacttcgtatccagaccactgaaaaatggtttagaatggtggtcattttaataaggtaacacttcttaataattaagaaaaacatttatggaacaaaattctgtgaaagatatttgggtctctagttatgatataaattcttagaaatttaaagcaaatactcattaaggcaaagctgacatttctcaagaataatgaaaattggatcagtattttgttaaaatgaaatctgttataaaattgcttctggaaagcttgtcagtgagtccagcatccagattctttaatagtagggtcagcagaattgtagctaattttagcattattgaaaaatatatttctgattggctcaggaaattaatgggtcctggacttgggagggaaaagctagtttgagaaatcaatca

SEQ ID NO: 9615 - DNA, 518 bp, Homo sapiens
gttacctaaacttcaaatgtgctttttgtttgtgaggtaattaaattgcttctacagtggaggcttacaaaattattgtgacaactattttgaagctgaaaggatagtttttctattgctaagtcatttgaaaaagtgaccattttcccagtgaaatgaagtggaagttagtaggagaatcataaattaaatatattattttgttaataaaaaggcaaagtagtaggtactttttaaaccctcccaaccagccctttctcaatattcatcaaatctaaaacatttagggggcaaaattctaacatgttcatggtatcttgcaaatagtgaaagctttattctgaaggattataaactagttttcttcattttaactagcactattttgtggaaattagaaacctcttttatttctcttcccaaaagtaatacttattataagggctgtaggtatcaggttaagggatacaggataaattaaagttcacttatatccttcttaccaatgtctgggggtt

SEQ ID NO: 9616 - DNA, 2063 bp, Homo sapiens
  misc_feature (1)...(2063): n = a,t,c or g
tcaggaacctcacactctttattgctcttcactgtgcccacatccacaaaggacttaaaagtgatgtctgtaagcaggttttccacagcatgggtctgccagacagagcaggtgcaggattagtcatgactccaagccaggcaaggtgattaagaaaagctaaatttatattaaattatcataaagtcctaaaatactgaacatagtggttaaataactccagaaagtccaatctctccagtgagtaacgttaaaaccattacacatgagcatgggagaatcgcttccattagtttaggacagagagattttgctttttacagagtaaatcagtgctcaaatagatacttcctcaaaatatgtccctttctacattctgaacagcccaagtgcaataaggatccttccccctttccaatcaagaaaatgccacttttctacttgctcttcctccccagacatgagtctaaggacccaaagtgctcactcctttactgcttgttaagtgtaatgtggggaggctcagaactgggcgtgacgctactgagagcaagggctcaagggcctggtatctctctctagcagtcttagaactgactagaaaagaattgatcttgtcctttttcactttggtagctgatttctcaataccagtaaccacaggagaagtttcaactcaggaaacttcccctagaaattctcccctccattcccagcccctgttgttctctcctgccacttctaattcctgggggagaagaggtctgggtctgccatgggctaggagggcctcatcagtggtgctctctaccttcctactccttacccacctctttgtatttttatttattcagccctcccaccacaggactttggagattgctggtgccacaaggcttggtcagaaaaagcaaattaggcaaaaaaacaaacaaaaaaaccccacgaagaacagctagggagacgttttagggcaaaaataagtctcaatttccctgataccaggctgagacacgtgccctttgtgtgaatgagcatgaaccaagtgatggcatcccacatggaaactaagcccctcagctgaggggacagctggaagaggaacatcaccaccccgttagccacaggcttgctgtccactaacttagatccctgagcacttgagaaagaacataggaagttcaacaggaagtttgaccctcatggatacttctctttaggccctgggtttcccaagtctccaacctgatcgttctttctgaccatttatgacaacttctggtttttctttgaaagcttgtttctaggtctcttccccagaatcccaggacatgagggagagaggggtcaggaggtataccatatttggtctaggcagagcttcttagacttttcagagactcagcccccaaggcctaacattcactcaaccactggctcacaacctggttaatttgagcaaagacttaggaaaggtacttggccagtggtggcaccaggagggaattcctattagccagtagccttgtgataggggaccccanttatctgaatgtagaaacagctccagacattctaggaggaggaagaacagcctgagccaccccccatctcaccagtatctgctgctgaaaaaggcagtgtctcttagggcaagaataatgtccactgccagcaatggaccagacacccagatccaactaccccccaaagctttttcatgttaccaacacacttgaggctggaggtttcccagatgcccatacctgctgggctgattcttccttcttctctcagcctctatccttcatccctgtctttacccacacccccatgtcccagcccctgatgggcaagttctctcagagaagcagtcatgctggctgtgatggggcagagcgcagtcctgggtcatcagctgcatcagccactgagaagcaggcactgagggtactggggaaaggggaggtggagctctacgctggtgaggaatcacgaataagcagtttcaggggggcccaggatggagtacaagatgtgaggttcatggtaaaatccaggtc

SEQ ID NO: 9617 - DNA, 640 bp, Homo sapiens
gttaaaacatataaggcataagtgattgtacaggtgtgactcccttttctaggagagaaaatagctttatttgaaaactccaaaagctacttaatcttaccagaggtttttaataggggaactgggtttacttacaatgaaagcatattttcattctgctatagaaaaacatatccctgctcattcagtaaatctaagattggaatgctttctagaactatgcaatatttgaataatttctagaaatgtctaagaaacaaccttttttattttaaatcatcacttacaaacgtagtctgagactgcaaactagttttcacttgactaatccatcattataggattagttaccatttgctctatataatctattgaagaaactattgttattccatattttggattaattttactaggcaacaaatttttattttagtagcattgcatttaccttaaatatgtaaaaatgaagttgtaacaggatcaaatatggaaatggcaatggtaactctgcctagaacatagttgaatgtccttggttgtcggtaagatgcaaagatctatacaaattttatcataggtcaaaattatttctaaatatacaaacagtttcaactatttcttcctccctaaaactaaa

SEQ ID NO: 9618 - DNA, 986 bp, Homo sapiens
gagcctccaaggaaatgcctttagaagcactcctctctcaaaattgccattttctctaccatgtcccccagacacagttgggttttgttgatttatggcagtcttctaaacaaagccatccttaattttacatactgtattgtaactatccaaagatagtattggcagtcataaatttataacttctggcctttgtttaattccagtaaaataacagcaatgacaatgagatcgtcagtattattttcacatttccctgagaggacctggcacaatattttaaatttaattatttggcagtagtcactgtttttgacaaccaatgaaatagcgtctaaatatcttgtatattttttagcatcaaaatgttttggtttccactgctgacaggtgcttgttgtttagcctaatgtggatatttaaattgttaacataccaaacacacatggtaatagtttgggacaaaataactagtaaaatgttgatttctcggctatttcactgactgcggcatgtcctcgtgtcttctctgattttgtggtacatgaatgaatgcatttatctttttagtgacttactagttacgaacttgaattatcacctctttgtcatacttaagtatcatttacataaagtgtaaaagattttttcacttttgaatctttacctacttgctttcacattaagaatttgaacttttgagttttttccaggtctatatataatagattacatttattttgtaaagaaaatagtaatttaaagttttgccattttaaggtgacaatatttgggacagtataaatattatagaccaagggcccccttgctgtctgctttagcaggtagtgacattaattgacttatagttttgtgtaaatgaacaaactgcttttgacaagaaatttattctgtcctagtttcctgcgtggtaaatcatagaaagattcaagttcatttgggttaaatgtgctaataggatgtag

SEQ ID NO: 9619 - DNA, 1052 bp, Homo sapiens
  misc_feature (1)...(1052): n = a,t,c or g
aagcttggcacgaggtttagatcagctggcagatgtgtttgtgggctacagccaagtttttcaggactaagaaggagaaaaataagtagaacttcttgggacaggagatctagggtactccagaaccagggaaatgagaaacaagaggggaattttaagaaagagagggaagatcatctatgaggttggagatgaaaggtgttggagatggtgaggcacaagtcaaaagactcactcgaagggcaggaactctgcttatttgtccatattcccagagtttgtcatgaggtctggcccacgtgggcagttcactcggccactatgtatcactgtggctgccatggtggatggaggctggacaggacctgtggtgatcggcagtctttctggaggactcaccagggaggggtctcagggtgggcatctcctttcaccttcctgtgcatgtcactgcactgttcttcttccctccctgaacagcacacacactgcatccttagtttcaggggtctgaaaacaaatgctacgaccaccttgctttggtggcttttctgaacaggcattgtgagaagagatgttctggccaggtgaaagtggactttatttttaggtaggtttttcagtttagaaaggtttcctttgcttatcccttgaggacttctgtgctgctgcttctcctccatcttgctagttaacagaacaggggcagaagtgacaccaatgctctcggccatgcctgccttgggaagcactaccgggccccactgtttagaatcttagatggaaatgtacacaaggcattgacacacgcctgcgggagtgacccagtgcttccctcccatgggactcagggtcagcgtgggaaggcagctggcagggacagggagccccgcccgcaaggtgggactgagccttcacttccacacaaaaccagagtcccattttgccccagagcggttcggttttccttcccctttcctttccggttcaattgcagcctggacaattntttttgaccagacctggcaacattttcaaaacacaaacccagt

SEQ ID NO: 9620 - DNA, 340 bp, Homo sapiens
gataaatactgtaattccaacctacattagaaggtctaagtgtaggtgatgtgccattccataatggcttccagactagggtgaattttatgttctgtactgtactgtgatgtagctttcttctgtaacagttatgttttaaaattaagtgagttttttttttgccttagcaaagggtggtgtttgaaaaaaaaaatgtgtagcccctttttaacctagtgttcattcaaaaaaaaattgatgcaaatctttattcactttcactggtgcacactgaaattttacttgaacagttctcataataaagcacttgtcttttgctctttaaaaaaaaaaaaaa

SEQ ID NO: 9621 - DNA, 56 bp, Homo sapiens
aactgacttccaactgcaggcagaaggaagcagtggtcattgctggaggttaaaac

SEQ ID NO: 9622 - DNA, 1029 bp, Homo sapiens
ttttttttttcagagtgcctggcatgtagctgcatttattacaagcatcacatacattatctcagtaggtgctttgactcacagggagatgttaataataattcctcaaaagcgccctgtttacacgagaagcctgaggttcagcgagggtaagcagcaggaccacctggtcatctgtatgactcagaggcactgagcctgggaaacagacccagtccccgccccagggagcactgaccctccccagtccccgccgggccctgcaggagggcagggtgagagagttgcagacggggaaacccccacggcacgcaggctctgagtctgtttatgaacgcgattcttggttggtgaggctgactcatttgaagttgcgaggcagtggacttgaacttctcagacgatttccccaactgagtagtgacagaccttctagctctgtgggcccggcctttaagaggttgtctgggctatgccagcgagccaggcaccttgagctccatccaaaccgttctctctttggatgaatgagtcggctctcaggtggacttggcaggattagagtcacagctgaggcttgactggttccttacagccaccagctctagacacattttgaaaagcgagatctggatttttatccgaagctggtgccattctaattcaacctctgccactgctggttaagagatgctgaggatccagggaaggatgaggctgcctcacttacagaaggagagagctgtccccgtcctctgttggggccgcctgcacggtcctgtgaatggcagaggctggtcctaggcgtgcgagatgccagggcctgagcagtatccacacccccacgccgctctctggaggcgagaagagcgtgtgcttgcctctctcaaggccccagagctaggggtgggcaggagccaggccacagaggctgggggttcctgagtcactcatggtgcatgtccccatcccctcgcagcctccaccagaagtgttgccacaagaaaacagtgtggacccagtttcctg

SEQ ID NO: 9623 - DNA, 1459 bp, Homo sapiens
  misc_feature (1)...(1459): n = a,t,c or g
agcagctggtgcggaaggcggccagcctgttgctaccttctctccaatgaaggcaccatctcactgccttgccagacattttaccaagtctgccatgaaacagtaggaaagtttatccagtatggcattcttacagtggcagagcacgatgaccaggaagatatcagtcctagtcttgctgagcagcagtgggacaagaagcttcctgaacctttgtcttggagaagtgatgaagaagatgaagacagtgactttggggaggaacagcgagattgctacctgaaggtgagccaatccaaggagcaccagcagtttatcaccttcttacagagactccttgggcctttgctggaggcctacagctctgctgccatctttgttcacaacttcagtggtcctgttccagaacctgagtatctgcaaaagttgcacaaatacctaataaccagaacagaaagaaatgttgcagtatatgctgagagtgccacatattgtcttgtgaagaatgctgtgaaaatgtttaaggatattggggttttcaaggagaccaaacaaaagagagtgtctgttttagaactgagcagcacttttctacctcaatgcaaccgacaaaaacttctagaatatattctgagttttgtggtgctgtaggtaacgtgtggcactgctggcaaatgaaggtcatgagatgagttccttgtaggtaccagcttctggctcaagagttgaaggtgccgtcgcagggtcaggcctgccctgtcccgaagtgatctcctggaagacaagtgccttctccctccatggatctgtgatcttcccagctctgcatcaacacagcagcctgcagataacacttggggggacctcagcctctattcgcaactcataatccgtagactacaagatgaaatctcaataaattatttttgagtttattaaagattgacattttaagtacaacttttaaggactaattactgtgatggacacagaaatgtagctgtgttctggaactgaatcttacatggtatacttagtgctgctgggtaatttgttggtatattatctggttagtggttaatgcttcctttaaaaataattgagtcatccattcactctttttcagttttatctgtcaatagtagctacatttttaatggggagcaccttttatcccaaagtgctttattaaattgagtgggacttgatattatatccacacccaggtatcactgtggctgtcctttgctgttcaggttttaggaaatgttttttaaggagctatgtggaaaacagacaatattagtttaggtcgggaactgagatattgtaatcaatagtaacatcaggaattaatttggctggcaaantcanggaaacttggcaaaaaacggggttgaaggctttgccaaataacaagtgcattgagtttcaatgccacantntttanaacctccgt

SEQ ID NO: 9624 - DNA, 456 bp, Homo sapiens
  misc_feature (1)...(456): n = a,t,c or g
ttttttttttactgattacaagtgctttaatccaggaatgaaaaggaagaggagttctgattgggtggacccttctcttggagagaaggcaaagctgccaggcagaaggtgggagggggaggaagaggagagaggaagctcccttgacaggcataaaacgtccctgtgattgcggacaagtggctactctcaggccacattcagccgaggctgggtgaggctggtcgggaagagggagacggaggtggaagcgggttcaagttttgacgggtggtcacctcagaaagggctccttctgtttagcaaaactccccaatccttcgcctggcttgccaggagaacagcttgcttgaaaaagcaaaggctgtcatcctgtaattaaatctgagacccccccccatgtgacgttgagatgaagccattttacataacgcgattaaaattaagntgttgaag

SEQ ID NO: 9625 - DNA, 426 bp, Homo sapiens
aaagtaatttagggttcccaaacctacctgacattggaactccacagggaacttcaacaaatacgcttctgtctcctagagaccatgattgaaattttctgcaaataaggcctgaactttggaatttgtaaaagatcctcgggtgattttaacatgcagagaagcttgggaaccactgctgtaatatcagagtcagccaagggactcagaagactcccccactcaggctgaacaatctgtgttccacaaacactgctctaccaagtctgctatgatgtaattctgactcgtggatgtgatggacctaagatgtgcacagctttttggtttttctttttttaaaaaaaatctaaacttaagagttactactcataatgatctcccttacaccccctccacctatcacaccccatcaaaaaaaaaaaa

SEQ ID NO: 9626 - DNA, 413 bp, Homo sapiens
atttgagtttaacatgacactgaggagtagtctgatattactcagagagggtgatacaactctgaacttgttggcccttatcagatataatttaaatttcccctggaaagggaaataagcacttggaatcaaggcaaagagccaaatccagcagattatcaagatggtcggtgggaggaaagtctgatggtttccgctgctaagcgtgggagatactgacctactctcattcacttacttttgtacatagatgtagactgtgagctgccaaaatagagaacaattcttactttctgtcagcagcttatcagaattccctgacctccaaaaatgatgaacacaagtccggaccctgttcttattgactggtgattgatacaagctggcttagctcttgttttttgacttgcttt

SEQ ID NO: 9627 - DNA, 646 bp, Homo sapiens
ctgggttctggaggccctgggaccgcggaagaggcttcagacgctgcagcgatgcctcgcccacggcgggtcagtcagctcctggatctatgcctttggtgcttcatgaagaatattttccagatatctcacagacattaagcctttgcctcccaacataaaagacagactgattaaaataatgagtatgcagggacagataacagattcaaatataagtgagattttacatcctgaagtccaaactctagatctacggagctgcgatatatcagatgctgctctcctgcacctgtctaactgtagaaaactgaagaaattaaatttaaatgcttcaaaagggaaccgaggtttctgtaacttcagaaggaataaaagctgtggcttcatcttgttcatacctacacgaagcttctttgaaaagatgctgcaatctcactgacgaaggagtcgttgctcttgcactcaattgccagctgctaaagaccatcgatttaggtggctgcttaagtattactgatgtgtccctacatgcattaggaaaaactgcccatttttggcagtgtgttcgactttttcagcttactcaggtatctggacagtggtgtgattgcacttgttagtggaccttgtgcggagaaattag

SEQ ID NO: 9628 - DNA, 465 bp, Homo sapiens
ttttttttttgacttggttaaatattcagtattaaattttattgaatttgtctttagaaaaatttcatagttagaacaggccttacccattttgcacatatatacatatgcaccacctttgcagtggcaacatatatatccacactataaacataccacatttataaatcttgtaaggacaagaaatggagttgaataagtaccccccaacatatacaagaaagttagcatacttaccccgtttttcactacatcagaggcaaaataagaaatcttttaagaaaatctcaagactggctcatggcaaaatgaatatgctaaatttgggggttggtttaagcgtggtatgtgtcaggtaattttgtgattaccaaaaagttttcacttgaaaactaagacctttgctgtttatttcacaatgtgaaatcaataaacctgaggatacaaaaaaaagtcgacgcggcc

SEQ ID NO: 9629 - DNA, 624 bp, Homo sapiens
ccattccaggttccagcatgccttgcctctgcttgctcgggctgcctacgcactagctacatacacctctagcttcatgtttcatgttggagtgtggggagaaaactgggttcttagcattagagagggaagtggcaggtggcagatacaagcttagctctgacctgggtgcacctcagctctgtgtccttttttttccctgacctgaagctgaccccagcagaagtcccccagccaacccctccacccaacaacccccccaccctccccatcctgcccccagccatagtgggagctgggaggattgcagcatctagtgccttccaaggctgttcctggagcgctgcttgtaaacccaagccaagctttgtcccacgtagggagaatggaaggtgactgcaatgtcccttgtcctttggctccatctccccattctgtggttctttgggggttcctgcttccctcaaactgaacactctcctgtccaatcacctgatggcttaattattgcctggaattgcccggcctccgatgctggaatcaaagattgccttccgaagtatttttgttaagatggcaataaaaagaaatcaatctcactctttgaacacaaaaaaaaaaaaa

SEQ ID NO: 9630 - DNA, 711 bp, Homo sapiens
atttcattttatccacattcaagataatatgtacagttaaggaaggggctatttaatattcttgcactcctaaacactagtaaaagttaaataaaacacagacgaagaacagaatattaacaattatcatattgtgccaaatttttaatgaaagtatgctgagtactatttgtgggctaaagaaacaaggcaaaggtaaaaaaggaaatcctgctaacaagtgctgatgatcaaatgaatttagttgtgtttttccataacttaaaaaagacaggagggagaggattttagcagaaatctatttaggtaatactgaatcatgacattccagcagcttttatgaaaaactaatgtataaagtagtattttggtactagtgcagtggaaattggtttttctttgtctaactatggacagcaagtgaggcacttaactttaaaatagaaaaatagggtatatttaagaagacattcaaaatcattcagaaaagataattagcactattgaaaaaaagttagaaattccatttttatttaacatgcattcaatgttacacatgtttcactaaggaaaatccttctgaaagtaagattactcttttatttataagaaacagaaaatatttccttttcaagggattctggatttctaagaataaaatccaagtcgtctcaacctgagtgctacgtatttataaactgagaaaaatgc

SEQ ID NO: 9631 - DNA, 82 bp, Homo sapiens
atcattttgtatgccataatatatatgatttatgaattatagtaatattaataaaagtgttaaagcttaaaaaaaaaaaaaa

SEQ ID NO: 9632 - DNA, 696 bp, Homo sapiens
  misc_feature (1)...(696): n = a,t,c or g
aactgtgctttatttagggctaagctggagaaagcgtcatccaatagttacagaaggttacaaggagttttagggagttgagtgtgaaaagagcagttgtactgaactgcagctgtnnnnnnnnnnnnnnnnnnnnnnnnnnnnnnnnnnnnnnnnnnnnnnnacatctggacatcctaaaaggaggagtcaagagaaaaaaagaaaatgaaaaacaacaacaacaacaaaattgacagaaagaaaggaaaggcaggaggcctagaggaactggaaatttgttcttctaaagggaaactggtaggtctgagaacccccggcctccagatgacctggacatcaatgagaaggaatcaaggcagaatgcacaagcaatcttcccaagggtgcaaataaattataataaatatgttatactttaaaatatatgtgttcttaaataattcagtgttttttctgattctgagttttttaagcaatgtctttaactgctctaaagtcatttaccaaagataaatatcgtgctttcattaaatagttttccttgtttttttctctatcattacaattaaaagtcctacaaaatatgcaaatttatttacaaaaaaaacagaagcccggcatccatttaaacatccctgtttttcaaaattccttgtaaacagtttcagaaattcttcaaagattgtttatttt

SEQ ID NO: 9633 - DNA, 412 bp, Homo sapiens
gcaagcaacagaaaaatcaaacaaaaatggcctaagccaagaagagaaatgattatttcacattccaagaagtttgggagtcgagtggttaaacggctaattaatctagagctcaacagtatcacccaggacccattttcactatggtggctaaagctctgcacccttcaggcttgcaccatggcagcagcagtgacagtaaagacacccttacaccacaatgctccatgaccaggggagagggtctcctctctcctgcccctttctggaggctccaccgaagatttctcttcacattccgtttctcattcctgaagcagttgctgggcaacaggggatggacttaccgcaatgggtacagagcaactaagattcaccactagcagatctgcattgtaagaaaaatgagaag

SEQ ID NO: 9634 - DNA, 1239 bp, Homo sapiens
  misc_feature (1)...(1239): n = a,t,c or g
ttttttttttttctcagagaaaatgtagctttattatgacataggagagactacaaagcactgggggggaggaggagtgacacagctcctcaaaatggaaggggaaaggaagagtaaacatcttggtaaataaagtctccaaccacagcacagtcattggaatttttttcttcatttttattttcaaacttacagtaaacaaaacaatcacttaaattgtcaaaagaacagcaattttacacaatgaagagcatacacaccaagccaaaatacaatagcactcaggtctatatgttgcagtggtgctggcgctggagggaatgcccagggaggctgcagtgctcaccacgaagcccaggtccacggagggagccaaggtccacagagggccccggggccagagggaggccgcccacactcccagcacattcacctgcctcaaagcactcccttcaggcatctgaagagggaaaggccatgtgtcttcctgggaggcactgaaaggccagccagcatctccaaaatgcaggccattttaacactgctgtgaatgtgctgggggtcaccaagggggccccttagtggtcagatgcactttgtcacaatgtacacctacatggggtgattactaggcaacgggaggtttcctgaatttcacagccagatggggagctaaaagaaattcctgaacccaacgcgtaaatattttgttctgacaaagtaaattcacaagaacacatcaaacacaagacctaatgcaaggggcagtgcccagggccgccgccgccctcctgtgagcagctcttcagcagcaggcatcaggtaactgcttagaacggcaatgcccacagtggaataagggggacttaacttggatacgaaagttcagaataatgcccaccaaaaatccatgtgactccatctctcttcccagttcttaatgttctcagaacagcagccacccctgaatgcaagtggagacaggaaggggacttaggggttggccggcgggaggggaggcagggtctggccaaacccaggcagctgccagaaagccttctgcactccgcaagacacccccagtaaactggggcgtcccaaggtggcaagccttcatgaaggcactgcccaggctcacaatcctgtgggccaacttcagtcaactctcctttccattagatttgttcctaattaaaagaccactcataggccaggtgcgcgtgncacgcctataatccc

SEQ ID NO: 9635 - DNA, 784 bp, Homo sapiens
aagacaccagggtgcagcctggtgcatggtccggggcttggcctccctatggggcgtggggggctgtggtacatgcagaggcggcggctgtcccagcagcctggccaggagataccgtggagaaggcacgtgtttgagttggcatcactgtccccagacgccctccctcgggtagagccgcctgtcctaggagaagctgtactccagatgcagtgggtgacaccctgggtcactcagccacaccccggcccctcagcctctgctgtccctggccgcacatagagccctgtcctgctgtgtctgccgggcacaccccggtcaattagccacaatggctcggcccagcgccttcccgaggtctgtgggggtccgggcggaggtggggtcagtgccgtgcgtgtttgatccagtttctgatcatccacttctgccccgagcacctctgtaccaccagccggagcccaaagttggcatctttggacatctccacctccaggcagcggcccgtggcccggctcacaatggggccactctgggtgaagtcccacagccgctgtgttggccgcgccacatcctcacacttcttcagggtgggcatgcggcccgtgccgtcatccaccagacacttggagtcaggcaagaaggctgtggagcccagaggccccagctgcagcaggccgtcagcgctgtaccgcaccagctgggaggacatcccgtggcaggggtagaggatcgcccggtcgccgtcctccgctccctggtccagacagtaggcactggcttt

SEQ ID NO: 9636 - DNA, 755 bp, Homo sapiens
ttttttttttcacgcatggaatctggtgtttattacactcgggggagagaggaggtcactcggtccagcggtggccgcagtgtggggctgtgcacacgtagtaaaggcgcatggcgtcctcggcccgcgcactgtgtgactggaagaacacagcctccttgtggccgcacttttggcacgggtggtcctcggtccgcggcaacgtggggtcctgggacacgtcggcgataatctgggtcagttcgtccacttcgtgcgtgatcttgttgacatagatgcagctgttgtcggcctcctgctggtaatcacagttccggcacgcgtagagcagaatgcggttctccttgtcttccttggggtacagcatgttgttacattcctggcagaagcgaatacccacgaagcccggctcgtaagtcccgtcgggctccatggcgacgcgcagcccgcgcagccctcccagccttccgcgcttgctccgccgcgctacaggtcgcgggaggggccaggcctaggtgcttcgccaaaagagggcggagctgcgcacacgtgctggctccccgccgcctcgggctcggctctctccgcgcagaggtttcatggcttgcttcaatcttttgatatcttagagtaattgcttccaatttttgggcatcgccgcctcagtttacagaatagtatggatctggtgccagagccgggaaaacgatgcgcatcgtaaaccgcaaaacactgagcatccaggacagaagcca

SEQ ID NO: 9637 - DNA, 835 bp, Homo sapiens
tttttttacaagacagagaaatctactttaatattcacatgtaaaagttacacatcacaagagattggacagtagcttagcgtaacatagctatagtgaaaatcatttttataaaaaaataatctagatgcggtcatcagaatttttggtctgcttaagttaatgtttgaagatcgacttttatccctgcttgaaggatttgccattatgccttttttttctcccactgttgcctattaattctttggaggaaggaaagcagaaagtgttcatttccaagagtttgtcctttggtagcaagcagagaacatttttttcatttccatgatttaaataatctgtacagacatgaaacttagtgacattaagctttagtgtaaaatgaagagtaataagcaattttttttcactttgataaaacagcagatttcgtaaactccttaaggatccaagcatttcctcatcccatatgcaaaatcattcagaatccattttgacctcagttgaaaaacaaaaacaaacacttactctgtatatattacactataaaaccctgtacttaaaaactgataaggtgtattttcaacatgtatgcttcaaatacaaagatttcaatctacatttaaaaaaacacatttgaatggactcagaacaagtttaatttgtgattaaacatctcatgcaatcatgcaagaccactagctataactgttacttccgagtctatactgggcaaaacaaaagcaaattaagagccaggccaaacagaaaagacattcaagatatcaagagctctgtaattgagctgaaaaatgattttcccctgcgtgccgaa

SEQ ID NO: 9638 - DNA, 1312 bp, Homo sapiens
ggaaagggctacccctgcaaaacatgtaagatagtgctgaactccatagaacagtaccaagctcatgtcagcggcttcaaacacaagaaccagtcaccaaaaacagtggcatcatccctgggccagattccaatgcaaaggcaacccattcagaaagactcaaccaccttggaagactagaggtgattctgcccagcatcccatattgggccagccatgagccagcttcccgtgactgctcagcccttggctgccctcttgctcgttgttctcaccaggaaagtacacgggcctgaggcaggattgggccacagacagcctctcattggtccgggctaattcactcctgctgctcccctttggcaggggtcctgtaggtcatgacaggggaggcaagggtattgagagactcggggtctcgcggggttgtagttttgaagggtggctttccccatttcccaacccctctgggccttaggtgctgaggcccctgccacctgtttttcctctaaaggtcagttttgggccagttcttgcaactaaagagcagagatctctctgggccctagacatttccagcaaaacctggaactttcatgccaaacctggggcagggcaggaaacagaggaaatggctgcaacatgggagcttggagctaatacgacactctgccttcccccagaaggtgcaggctttcctgagtcttagaccagatatggccagttgcgcaggtttctgccaactgtgaagtatcctcctggagcagtgacacaatcttggcggagcattgctacccccgctgccccctccacagttcctgaatggtgctaaggatctgcagcagttggcaacgagctggggctgggggcggcctccatgtccactgagatcataggacactccaatggggatgggacctttcccctcctccatcagaggtgctctgaccctaggttacacgggaaagtgccccacatgcaagtctccctgagggttctgcccctaaaggcagactgcctcatgcccgctagctgtgaggttcattgcttaccctcggccctactagccctctctttcccccttgtggcagcgggaccatttgcccagtttgctgtggtgctagccttccccatcatccaccgggtgatttctgggtcccaggggaaagaaagagagagctgatgcaggtttctacagtgaggaacaggcgtttcccaggccccacacccagatttctctatctttgcttgtgttttatggcctggggactgagtccacacgggatagatttttccttgtaaccttgagacg

SEQ ID NO: 9639 - DNA, 632 bp, Homo sapiens
ttttttttataagttgaaaacattttatttcaattctatccttgggaggcagcataaataatcacagaagaccacaaaggtcaatggggaaggaaaaaaaaaagctccagaaatgtgggaggaggagatgagtgctgacactgtctagctgtggggtacggggtgaggaggccctactgtagctggctgggaggatggaggttcataaaggaaaggcccagctcacctggaggggcttgggtagccctggcctctgtggatgggattttccgtagggcggccatgggaaaagcaggtatggagtataatgcatctagtagatcctagctaatgaaagaaaagagtggacacccatttcttgatttccagatctcaccccaaactgtgactcttctgagaacagtgtttataaactctttgtgcgtagtgggaaatgaaaggaggaaaaaagaaggaataaaagaaaatgtgtacaagatcaaatgaaatgtggcatctcagagttgcgtgaccttgggccacttctctcggtttcctcatctgcagaagggagtagacgtgaggctcgatgagatcctatgtgtactaggactgcagaaactttaaagtgctatacggatgcgagtgctgtg

SEQ ID NO: 9640 - DNA, 984 bp, Homo sapiens
tttttttttacaatgttagtttctggaattttattatttttaatacatacatttcacaaacagaaaccctctaaaaccacacacaattccacaaccaaatgtttcaattttatcaacattctttaactatttacactgtctttcctcaacaaaagtgcaatccaagacatcttgacaagaaatctttactgacaagaatttatttttgagctggttttaatggagcccatccattatattttctttcaattacccggaatattcagtgaacaggacatagagatgaactgggttaggcagcatcctattataggaaataaaacactaaacaagaacactttctcctcacttccttcccaacctccaatgaaagttactcaacagctgctaccaggacacaaaacagaaaagcaaactggagttcctgacctagacacaggagaacagactgtgtattaagcatcagtcttgcaggactaaacaaaagacttagcaaattagttctggtgctctaataaggtacatatctgtcttatctgttagttttagagttcaaatacctaataagattctttttagatgagttaattttcccccaacatatatgaaaataacttttactcagaaaatgaacttcttgaacaaaacctagaagttaaagggcatttaaggaaagctcctctgtaactagaatgggataattcacccaactccccaacttcatggcaccatgtctatcttttaaagtataaacccattatatcaactgcttcaaatgtaacaagagaatgaagaggtgagatggcctgaagagaaaacaatcaatcagaaattgtcctctcactaaagcagatcattgtatctgctcaaggtataaaactcttaaaaataaataattaaaaaatattaagaatagacgaaaaatcactttgaaattattagtcactcttaagactgcttcattttactgaacactattcatca

SEQ ID NO: 9641 - DNA, 654 bp, Homo sapiens
tttaaaattatgaatgctcttttattaaataattatgacacaaatgacagccaaaatatttattattggttaatataccacttaaaatctctgacctaaaacaaatttttgagccactggaaaagtgaactttctcacagaaatatttaatgttgtcaaaagaatactctgttttaacaataactccattaatttattactttaaaagatgcacagtgctgcttttacacattaaaatttcagtgacatcaacaacataactatatgttaatattttgaactaacatttcaaatgtagactgaccacatgtttgatttaaagcttaaagaatcaatgttcccttttgtgaagatggcttttgttgtcattagattctactgattttttaggaatagagctgctccacactgaatccactggtcttggttgccccgacatggaacatcaatattggtaaccacacgatccctttcagcacttgtgtaaacaggcaaagagatgcactcatccggagaatatggaccacatgcatcctgtggaatccagcccataaaacaagggagcactgatgacacgctgggagaatcaagctgattttcagaaagttgatttccatcaaaactacatccttctagtaacaagccactgatctt

SEQ ID NO: 9642 - DNA, 837 bp, Homo sapiens
ttttttcgtttatacaatgagcctgtgtttagcaacactcagcttcgttttattattgcgttttatgaagttgccaagacaactgaggccaagtaacagaaccttgactttatgcgccatgaaaatttaataaagaattttgaaaggctttttagaggcaggagctgcagtctcttaaaggcagagctcagcacagagcggagggggctggagcacgtggggcctctcaccagacctccaggagcctccgctgtcaggggcgtggaggtgggcagacgtatttcctggcatccgtcttgtttccgcacgtcgagacccttccttttctcgacagacatgtattaagacacttcccaggtgccaagtcccgcacccggttctttacatacattacgacgtgatccccactatctaggcaaggagcagggatcagagaggtaaagtcactggcccgtggtcatttaggcagagcgcaacagatagaacaaagtgcatatgaaggtctgactgcaaagccctcgcttttccagaacagttcacggcctcctctgggattctcagccctcgctttccccattctgatgcaacaggttctgaagggaaaatagtcctgcggtctgcgaggggcttgggggagcagtcagtgttctgtggcccaagactgggtcctggttggaatcttagcaaacaccttcatgttggaggacatgtttcccgtgagcctcttggtgagcacaagacactaccgcagggctgcaaagagccctctgcactccgctctctaaataacactcggaagccaatcaccagaaatgagaaaaacatcgtaattttgcc

SEQ ID NO: 9643 - DNA, 640 bp, Homo sapiens
cagcctgcacatggttggcacggccaaagtcccggtttaggggctcaatgggctgattgatgcgcttcccatagacagaagacgtcagcactccaaccggcctctcctgttcctcttcgttaacatgaagtcccaggctttttgcatgttctctgtcatctcggtgcaacttctgatcataatctaggcgcctcttaaaaatacaatcatagagggaaataattcctgtctttcccatgcagcagcccctgcttcactcactgatcactccttcgcgagaccattagtgactgagcacctagcgcatggtgtgtcaggagctggagattgagccttgaacggagcaggccttgtccacaggaagcttacagtctggagaagacacatgaaagacgcgaagaagccaaatgacttgccgaggctccagggcagcgctgtccaatagaaacatgatgagagccacgtgtgtcgtttcttatttgactcagaggaactgactgcttccgttttcccagaattctatcaaatatctttcaagtgttccacatgtacccaagcgacgcacattcctcacataggagggaagggcaagggaaaggtgggcaggagatcctttcaatcccagactgttgaaggaagg

SEQ ID NO: 9644 - DNA, 469 bp, Homo sapiens
ttttttttttttctacctaggtaaccttcaatttattctctgttgttatatcttatttttctttctcacatttgcacttatgattttttagggtccaaaactccttcctaaatatcaagtgaagtcatttcttaccccatgctgttccctggagacccctgtggattctcagctttatagatatgtgaagattgggctgactaaccttttaggagcaagattatattttgctccaaaagtgttgacaccctattgttatacaataggtaagtagtgtaaggagttttgttgttttaaacctaaggcatcctgttcgattttgggaggatatatggggacttaggaaggcaataggaaggttctctgggaaatgcaaaatgggaatgggtccccttccctgaagggcaagttggggggttaggcaggcagagcccgttggaggtccaagactgttccgggggttttaagg

SEQ ID NO: 9645 - DNA, 1080 bp, Homo sapiens
ttttttttgcacttcgcccacacaggacagtggagccccacctggtcagttccacttccgggctcccatgcacttgcccaaggcggcctctttgggacggggatggtttgaggaaacacttttaaagaaaaaaggaagacattgaaaggttttagtttcttccctatctgcatgtcctctcatatagaaagcccagaattaggggctagaactccagggagagggtctccccgactcatctcttgctgacggtcaccaggatgcagaaatagggagatggttagtgggggccaaagatgccccctcccaggccttcgtggttccctcctccgccccctgcaatctttggaggagtcagtgcctcactccagcagtgagtgcctactgtatgcaggtagtcagccaggcaaagagagactaacggtctcatgggggaaccctcttgcgggaggccaggtagctgggagcgaagcgttccggctgcccttgctgctgggtggagtggagagggagacttctttttgttggttttaatttaaaaacacaaaggcctaaagaaatacgtatcttataatttttttaatttttgagacgttcatttaatgaattgtgcacgaatgaattctatatatataaaatatacatatatagctctatatttggggaggggcactgtctcttttttctctcatttttaaaatgaagtgttgttgcctttgtatgtggttcaaccatccagctcccagctggctaaactttgcctccagtggtcaaagatgggaaaagagtggggttggcaggagatggaaaacggaggtgccgccccagcatggggggcaggtcccccagtccaccctgcccctccccctgtggagaagacgcttagttgggggtgtgggtttgggctccattctggattcggcggttccgggggaggggtgggtctgtgccgattactctgtcttgtacgtttgttctgctgctcttcaatattgtatcaacgccaggaaaggggggtgaaaagcctcttttaccccccaaataaattgtcacattccgaagctgaaaaaaaaaaaaaaa

SEQ ID NO: 9646 - DNA, 1479 bp, Homo sapiens
ttttttacttgtttttaccatatattccaggggttatgtgtgtggaggggttgtttttacatttatacagtttacattgcttgacccataagtaacacttgtaagattaatagggccatagttttaaagagtacttacatagccccaccatgcatacagagccttttttaatattggaaaaaaaaatcaaaaaaagttgaattttccatcactaggcaatgtaaatttgaccatctacatttataaaccctgactaaaatataagcaatcagttcatccataaattctgggttccctggcaaatctagcactgcagcgtaacaaacggcttacaattcagggatataaaaatatcagctttaaaatctgaactgtacagtatatacattaatatttgcaccgttaaattaggaatacacttaagtctatgaaatactaagttataaatagcaatgttttttgttttttttttcaatctgtagctggcgctgatacaatacaatgtttacctggccaaagagggttcgaggggacaagctggcctcacaataagatgcacagtgttagctaggtcatcgtgacaggcatggcctcacaccaagacggactatcaagacctgagccgacctgacttacataaatgacaaacactagtgctttacaaaggtggctggagttctccattcttctaaaatcaacatccaatccccttcagtcagcatcttcagtattcccttgaggactggaaaaccaaagcagctacgtccatctgtaacgcacccgcaccggacaggcacgagatgtcacgtccacctggcaccatccaaagagggtaaattggagaaatcacacctttcaaatgttaatctgacactgtaaacagcagttgagttctcatttacatgggcaaagaaagcactttaagctattttcacaactttcctacggaagaaaaggaaacgattcagacggttaatggctaagttttaaacaaatgctctgcatcactacttggttaagaaataatacaatttttgcccttgtgtccctttttcttcttggattttgttgtcctctgaccaaactgaggggtgggaagtgcagatggtggactagaaaggtcatctgtatagtaggcaaatctctgtggccggggttgagggattggttgtccaagaaaatatccttcttcttccgagtcggaagaggaggaggaggaagaacaccaggaatcatcatcctcgccgtagagtcccagaaaccgattcattcctgggttctgcaggccataatcggaagtggcatgggcgtactgtccgtagagatcagcattctggatgtatgcttggatctcccgggcacttttattctgtataaatttctcatagttatcgggggtgtacagccgcagtctgtccttgggagagtattttctttctgtaacaagattcagggcattgtcggagcgggactttctac

SEQ ID NO: 9647 - DNA, 749 bp, Homo sapiens
cccgaaacccccggctcccaaatccaagatgttgagttaaaaattttatcccaaatctatccccatttgtagcacatctcatcccataaacactcttagaaaaaaatgtcaggggcttgctagttctcttgacaaggctatttctaccaaactcttcacgtgggccttattcaacacttcagcaaagaagatggcacaagtggaaatgaaacagggtagccacaaactggggattcctaagctagagtgtgtaagctttaggcatgtcaaataattccttctcttgctaggtagctggtaagctgaatgcagccctgaggtgtctcaggatgtgtttttgcttgttttgtagaattctctagtggcaatacagtcagtagtagcataaacacatcctgagacacctcagggctgcattcagcttaccagctacctagcaagagaaggaattatttgacatgcctaaagcttacacactctagcttaggaatccccagtttgtggctaccctgtttcatttccacttgtgccatcttctttgctgaagtgttgaataaggcccacgtgaagagtttggtagaaatagccttgtcaagagaactagcaagcccctgacatttttttctaagagtgtttatgggatgagatgtgctacaaatgggatagatttggataaaattttaactcaacatcttgatttggagcctggggtttcgggaaggtgttgaggaatctatagaagtccaaat

SEQ ID NO: 9648 - DNA, 506 bp, Homo sapiens
attcggacagaaaacatcagaaggaaaaccttcatatggcccaatgtcaaagattccatctggtgtcattttccttgtaccagaagtatttaatttggcatttctcatgtgcctgctagctgactaatttctttcagcatctgtttacgaaatatatagctaaaatagaaatatttgggaagaggaaaacctgaagatcagtaatctaaattaacagcaaaatataatcaaagaaaacaaaagaagaaaaataataaagatctcaactgagatcctcccattgtcagattttgacctaggaccatcttggaaagggattcttctgtgattcagaggtgaagcccttacagtgaggtttcttactaagcgattcattggagaatatgcttctaattttgaatctatctataagaagcacttgtgtttggaaaggaaacaactaaatctagaaatatatgacccttgttctcaaacacagaaagcaaattctccctcacaagtgagct

SEQ ID NO: 9649 - DNA, 427 bp, Homo sapiens
tttactgtgaattacttttattgaaaaaaaatgttcactaaaaaggctgaatacatccctctacatgaatacacagctcagaagaggggaaatggaggtggggaggcatccaagtcataaagggtagaaaatgaatgcaagcttcttagaactcttcccaggaacacaggcaatgcttgcagtttcctgggtacccaatgggcagggaagatcaggaagagatccatgggacataaggaagttaggttactgcgcatagctcccaggagattgtcccctccatttctcccactcattcttttggctgtgggagtgttccctctaagctgatccactaccagcagctggaacactcccctaaaaagctagcttggcttcctgggcagccagttcttcaggagcaaggctgttaagttcttgaagctgt

SEQ ID NO: 9650 - DNA, 1233 bp, Homo sapiens
gccggggaagtcatgcctcgcttcacggaggcaatagctagccggtgtctgtgggaggttatgtttatttgagacttctccatcgggatcgcctggtgtcaccaagtgtccactggtactgaggtttgctgcctgccttcttgccatgtctaacgaagtagaaacaagtgcaaccaatggtcagcccgaccaacaggccgcaccaaaagcaccctcaaagaaggaaaaaaagaaaggccctgaaaagacagatgaatatctcctagcaaggttcaaaggcgatggcgtaaaatataaggccaagctgattggcattgatgatgtgccagatgcaagaggggataaaatgagccaagactctatgatgaaactaaagggaatggcggcacgtggtcggtctcagggacaacacaaacaaaggatctgggtcaacatttccctttctgggataaaaataattgatgagaaaactggggtaatagagcatgaacatccagtaaataagatttctttcattgcccgtgatgtgacagacaaccgggcatttggttacgtgtgtggaggagaaggccagcatcagttttttaccataaaaaccgggcaacaggctgaaccattagttgttgatcttaaagacctttttcaagttatctataatgtaaagaaaaaggaagaagaaaagaaaaagatagaggaagccagcaaagcagttgagaatgggagtgaggccctaatgattctagatgaccaaactaacaaactgaaatcgggtgttgaccagatggatttgtttggggacatgtctacacctcctgacctaaatagtccaacagaaagcaaagatatcctgttagtggatctaaactctgaaatcgacaccaatcagaattctttaagagaaaatccattcttaacaaacggcatcacctcctgttctcttcctcgaccaacgcctcaggcatccttcttgcctgaaaatgccttttctgccaatctcaacttctttcccacccctaatcctgatcctttccgtgacgatcctttcacacagccagaccaatcgacaccttcttcgtttgattctctcaaatctccagatcagaagaaagagaattcgagtagctcgtctactccgctgagtaatgggcccctgaatggtgatgttgactactttggtcagcaatttgaccagatctctaaccggactggcaaacaggaagctcaggcaggccc

SEQ ID NO: 9651 - DNA, 345 bp, Homo sapiens
attttcatttaaataatctttataacaacttttgatgtctgagtggattcccatacagtcatctattgtaagactttctgattccgtttttttcctttggtcattatgaatagggcttatgtaaataattgcatggtagcttttgattggaagtaacatcaaagtagttgtcaaaatacttaggaatgttatttttggattgtaaggtgagacttgtttagctttggaaaaaaatgcctcaacttgtaataggggaggaaaaataattttctgtttttggaattcttagatgggatgctctgtaaaaactgacagattaaaatagaaaaacagaaaagttgaaaa

SEQ ID NO: 9652 - DNA, 883 bp, Homo sapiens
tctatggaactcagaatcctggctacatttgaggacaggaatatgttgagcctgattttcctggtgtgtgtaaaatatttcctaggaataaattaggcactttttagaagcaatgttaaatcattcaggttttattttctgccctgaagcagaaatttaaaaaatgatattgggacctggaaggtttaatatagttcacagtgcctgaattacacctgctccgaaaactagctttgtatttcttatgactttgcataagaactgttcatctttggatcttgagcaccttacagataaaactttttatggcatctctttcatggacagtgattgatcttttcacaatgtatgtagcctctagaattttgtacatatgtttgctctttttttgtacagactatttagttgttgagaaaacaggggcgtttcctaatttggtctttatcctgcgacaacactttcagcagactagcctctccttatctcacagatcacaagcacccctagatagtgtgatcctgtcagatagcatttatgcaaaaatctatgaagttaaaagatcgtagaagccaaatgaaatgtacatatctactgactgatgacaagggaatttcattaggaagaaggtaaagaaacatcgttgagtagcctaccttgatttctgtcaagttcataaccagcttcatattttaaaggcttcaggtttgaaattaagtcaactgcatgcagctttgctgataaatgaataattctctttgatgccatttatgagaaaagacttcaatatctgttgcctgtcatatttaagaaaaattactgtttctactctctgtatctgattttaaaagaaaaaactattcatacctggcttccaggtaattga

SEQ ID NO: 9653 - DNA, 549 bp, Homo sapiens
tttttttttgacttggctatcaatatatttattattagcatgacatattatgaaaaattattttccaaagacttagccagtaacactacaaaaatagaaagcccgttaattcctgtgaatttatctgtgtgtgtccatgtccagtaattatttcactgtctgtctgaagtactaacaatactaaatccaatgctcggcgccacgcctcaatctttggtgtaacaacgtcataaactctcggaatctgctccagtttatttgaaatgtctgaattaaaaattctactatttagtttactatattcattcaagatgtaagatgaaggagagccagagtctgtggcattttgcagatgatgttgaatgtatgtgctggcttcaaattctgatgagtaattggcagtgttatataggagagttgaaaggtatttctgccatccatttgccaggaatttaagcacagttggtctgtatattgccagagatgaagccagccaagaggaagtattatgcagccaccctgagcaggcatggttttcttttttcagag

SEQ ID NO: 9654 - DNA, 517 bp, Homo sapiens
  misc_feature (1)...(517): n = a,t,c or g
ggcttctgacccaaatacatcactgatcgccggttccgccccttccagtttgggtcagctaaggttttgggctatatacttcggagtggattgagcccccaagaccaagaggaatgtgagcgcctagctacccctgagctccagtacaaggacaagctggatgtcaagcagttcccccctaccgtctcactgcccctcaagacttcaaggccactctccccataaacatcagactacagatttaggtggaagagcagccatgtttgaagggcacatgtgatgagtggggggcagcaagatgccatttctgcatctcccagaagggatgagtctttgtcccgatgcaagccccctcttcgctgggctcccagcagtgcttccctcctccaccctccactcattttgttctttccccccaacttttttttttttgaaacggnnttttggtttngcccccangnnngaangnnagggnnnnnannngggttaatngaacctttggcnnccaggntnaagg

SEQ ID NO: 9655 - DNA, 1830 bp, Homo sapiens
actgccagggaggtgatgagcacaccagtgacctgcctgaggcggcgtgagaaggtcggcgtcattgtggacgtgctgagcgacacggcgtccaatcacaacggcttccccgtggtggagcatgccgatgacacccagcctgcccggctccagggcctgatcctgcgctcccagctcatcgttctcctaaagcacaaggtgtttgtggagcggtccaacctgggcctggtacagcggcgcctgaggctgaaggacttccgagacgcctacccgcgcttcccacccatccagtccatccacgtgtcccaggacgagcgggagtgcaccatggacctctccgagttcatgaacccctccccctacacggtgccccagggaggcgtcgctcccacgggtgttcaagctgttccggggccctgggcctgcggcacctggtggtggtggacaaccgcaatcaggttgtcgggttggtgaccaggaaggacctcgccaggtaccgcctgggaaagagaggcttggaggagctctcgctggcccagacgtgaggcccagccctgcccataatgggcactggcgctggcaccccggcccttctgcatttcctcccggagtcactggtttctcggcccaaaccatgctccccagcagtggcaatggcgagcaccctgcagctgggcgggcaggcggcaggcgcggaactgaccctctcgcgggactgaccctgttgtgggcagtggtctccccccttggcgcctccttgcgcaggcccagcctccactctcctcgtctaggtttctttacctccagggatcagctgtgtgtgtgtgacctccctaccgggctatcggcctcttgggagccagcggcagggccgcgaacctgcgtgcctgtgcccgtgtgcgtgagacagagcccttgcccctgctgctgccccgagggctgccctgccctggaagggcccctctgcctccacaccagtggagtcttcgagacttgggagctgcttggcctcattttcagccatgagcagacggcctgtggtccctggggcctgaggcacggactcgtagcaccagggtttggaggctgcgaccgccccggagagcagcttcacactggcgccacagaggagccccacgtgcactccccggcctgcatccggcttgggtacacaggcccagaggactggggtgactcacgggccctgtgctgtgatgttgagagctgagaaaaacctccaaggccctgagccccatgcccagccctgccttggtcccccaatccccagagcttggagtctgggccccacacccagccctgccttggtccctgagcctcagagcgtggaattgctgccctgtggacactggctgggaaggcaggtcttcccctagcacatggggacccccggcctcgagggtgacctccctaccttgcccctgccagccaccaagcgcaggtgcagcgggggccagactcctgccggcctcagaggacacctggcccagcacaggcagctagaagggccggtgggcaccggggccgggaagcccccacctcaccacctgagggcccctgggaggctcctctggcctggctgggctgggtctggggccgccacaggcccctcacggggcggcagaggcaacttcagtgtccctgttagagcaacacgggtccctccgtggggggctgggtgcggccccctgccgtgtatttcctccccagggagtggggcctccccgggagctgacgccaccaccctgcttagccctcacagggccccaaggtgtccgagtgtgttgggtctgaacgcgaaataaagaaatc

SEQ ID NO: 9656 - DNA, 686 bp, Homo sapiens
gctgggcctttgcttgtttattttgtttcccgactcttctcttggggttcagagccgctgaggggtggggtgagtccaggcaaggagtgaaggtcagggggaggtgcggaccacataaacagcgtcactgcacgcatcaccacaggcggcacgatgaacgaggaccacatatgccaagcacggcacaaaaggaggccacgtcagtcacagacacagacaccacagcaaaggtggggaagcggagaccactggccttccgtgtgcaaaggattctgggaagatgggtggagtttgcatatttaaagacagctgtcagaggcaggaaactggggagggggtccctgggggaaccgaggggtcctggaagtgggaggggctcccaaggtattgaatgaggttaggggagctggtgaagggaaatccttgtggggcctaggtgttgggtggcatttgaagatgtggatcttcagagggatggaagatccatgggaaggggctcaacagtaggggtttcttgaggatttggaaaattatgatgggaaataggtgtgctggagagatttgggacccaaaaatagggttttccaggaacttcagggctccaggaagggattctgcaatgggttgcctggtatttgggcacttaccaggaaggaaaacgcctctggggaaaccggggcggaggt

SEQ ID NO: 9657 - DNA, 444 bp, Homo sapiens
aggaatttaacatttaagtttttagttagaacagcattaagtagcaaataaaaaacacagccataacaagttgagaaagacactatggaagaaaggaaaaacattacattttagtacctgtaaaggtaatgttttcctgctgtttgcacaaaagcctcacatcttcattttgtactggatcctgcactgagtggagtcagtcctgctcttccctgctcactccttctgaggcaggtcttgagcctttccttatcataacccccttcctttgatagccttttgagaactcccacttgattgccacagatttgagtgacaccgctgacctcctggttcctccgctgcttcacttgtggaatccagggctggatttagaaatgctgtgattcgggggatctcaagtactaaaaaaggggtatctgctgcagtggaagatgacataac

SEQ ID NO: 9658 - DNA, 1331 bp, Homo sapiens
  misc_feature (1)...(1331): n = a,t,c or g
ggccggataatggcgggcgctgcagaagatgcgcgagctcttttccgggctggggtctgcgcggccctggaggcctggccggccttgcagatcgctgtggagaatggcttcgggggtgtgcacagccaggagaaggccaagtggctggggggtgcagtggaggattacttcatgcgcaatgctgacttggagctagatgaggtggaagacttccttggagagctgttgaccaacgagtttgatacagttgtggaagacgggagtctgccccaggtgagccagcaactgcagaccatgttccaccacttccagaggggtgatggggctgctctgagggagatggcctcctgcatcactcagagaaaatgcaaggtcacagccactgcacttaagacagctagagagactgatgaggatgaagatgatgtggacagtgtggaagagatggaggtcacagctacgaatgatggggctgctacagatggggtctgcccccagcctgaaccctctgatccagacgctcagactattaaggaagaggatatagtggaagatggctggaccattgtccggagaaaaaaatgagtggggatgattggaaatggctttgggcccttatttgntgttctaagagttgtctgtaggggtttntttgaggaggattgaagacctgtggactggttaccccatctccaccctctcccctgttcctctgtctggctccctccagggcaaggaaaacctagggtccttggtcttgggggtggggggacctttcccagcatatccccctgggcctttagttaacatccaagtgacgaagccggntcccccagtacagtgtcttttgggtgcggtcattgtgaggaaggggatgagtgagtgtgggtgtggctggaggaggagctagatgccggtggacagtgggcaggtggatttggggaggagaggatcagcagcagcagcagtactcagtgatagggggctggctgggtcaggaatggtgagatgaacatgcaagtggaagagagaatagttgaaaatgtgaatgaaagtagctctggagcctctcccttaccccaccccacacacacgcaacagctctgtacccctgcccagaacttggaacctcccaggaatgctgccttccttcagcccagcctccagtcctgggttccctcaggaattcgaaagaccttggctaggtggtgagcttggaagagctgggctttgttttctgtctcctctaacctctttccttactccttatcccatcccatttgagttcaggggtgaggcttaagatcttaataaataataccttactgctt

SEQ ID NO: 9659 - DNA, 756 bp, Homo sapiens
actctttgtgaaacttcacaatgttcgggaggacattgtgaatgatattacagctgaacacatttctatttggccatcttccattcccaacctccagtctgtggactttgaagctgtggcaatcacagtgaaagagctagttcgatatacactcagtataaatccaaataaccattcttggttaattatccaggcagatatttactttgcaacgaatcagtattcagcagctcttcactattacctccaggcaggagctgtgtgttctgacttctttaacaaggctgtgccccctgatgtttatacagaccaggtaataaaacgaatgataaaatgttgttctttgctgaattgccacacacaggtggccattttatgtcagttcctcagagaaattgactacaaaacagcgtttaaatctctgcaagaacaaaacagtcatgatgctatggactcctactacgactacatatgggatgttaccattttggaatacttgacttatcttcatcataaaagaggagaaacagataaaagacaaattgcaatcaaagccatcggccagacagagttgaatgcaagcaatccagaagaagtgttacagctggcagcgcagagaaggaaaaaaaagtttctccaagcaatggcaaaactttacttttaagcagttaaatttttttaacttttattttttaaacaatgggctaaaaataaacagtattaaaaggttaagtttatataatacatatgtaaaaa

SEQ ID NO: 9660 - DNA, 366 bp, Homo sapiens
cggaagcatacagtctgcggggacaaggactgaacggggtagtgggagccaggtccctggttcccttcacgcccccacccccagcctcagctctgtctgggtggaacgaatgtctgctaatgaactaaacaaacaggtctcttaatcttatcatggagctgacccagagactggcacagatatccaaagtatcataattggcaggtcagaattaaaactacatacatcatggtgactttatagctgaggcaaagtggagctcaagtgttactttcccagtaagcaaatcataatgaagtatcatgctggtgactaatttaactaacattgtccagggaattgctgtttgtccaggagagaagagtt

SEQ ID NO: 9661 - DNA, 409 bp, Homo sapiens
gtctagctcagagagataagatacaatataaatcagactgtttcagtagaaaccagtattaacgtatggtgatttcttaaaaaaattaatgtcaaccactcaccttttgcattgagaatgtttttaccttttcacaactgcaggggttactgaaaggtttttcattccaagttttatttatttattaattttaaatcatccacagtgactcagctcatggtctcgttgttggaaacactaggagttttcaggacagtctcttcatgtgggtgttttcattacagttcatttacactgttgtaaaataaggtactgaagcaaaaggaggactgatctcctttactgattggtctaaattcaaaagtgaattggttaaaatcgtgtcattaaaattttttaactgtcaaaa

SEQ ID NO: 9662 - DNA, 1462 bp, Homo sapiens
  misc_feature (1)...(1462): n = a,t,c or g
ttttaggaaaagttttttccatttaatactagactttcaaggattgagatgccaagctttgtatgcaattacatccaatgttaaaattggtaatacataatttacaaagattaacatcaaaacaatcatctatttagatatgcttttgtaaaaaggaaatatattagcagcatttatattttccgcaatcacacagcctacagacatgcagactaactctgtatctatttgcagtgatgtagtgctttgccccgcatttcaaacaccaaaacccgcccggggagctggggggttctttttatttcgttattataaaataactgaaaaataaaaaaaggcattaatttctacaccactaagaaaaaacaagtttttgcacttacctaacatttgattgtctaaaaaacatttcagtttttttttagtctttcaacaaaagaaagataaaatgacagagcgtagtgtcttttgcttctgttctcgcattttacaaactttttttttctttttcatcttttttaaaattttagtgtttaacactataaaggaaacattgaattttaatctctttcttgtcattttctcgcatttgactaaaaggagacccccaaagtgcccctagtcccacctccctcccacccactccctgcaatgaaaaacaaaagaaaccactcaaacgggcttggacatgcgatttttccagctccacatgtgagtatcttatacccaggtctcttagtaatgtacagtgcttctctacagtaagaaaatactccaaactattttcttaattctcttttttctttaataaaatatttattttgctttttctctgctcaaggggatcattggcatcccctctctcttttgttttttcctcaagaatgacacagaaaggggaaaaaggaaaaaatatttaatggaatggaaggtggtcaatgtgtctacctaaacgagtcagagcatcgtcaccataaggggaaatgtacaattaggacagcattggtccaatattagaaaaaagtaatggggacatgtttactattgtattgcttaccaatcacacagcaggtgtgtgtgtgtgtgtgtatatatatacacacacacacacattantatattataccacacacatacacacatatatataccacacacacaccacaacttggcacatttaaaaaccatcttttctcttataagaacatctaaaacatatatgcatatgtatgtctgaaaagacaacaaagctttttaaattttatttttaaagagacagtatagtctgttaacttctggtcaagagagtaggaaggaaggagacaccctggatatacctcctgatgtcattcaggagggtgagggaagatgggctaggggtgaagagaaatatactgtctctttaagaaagggacattgaaaactgtacaattaagaaaacaagagtagtgttttcaattga

SEQ ID NO: 9663 - DNA, 676 bp, Homo sapiens
gctggcttccctccttcagacattgacatgagatcttaagcaaacagtcccaaacctcttaggggtgaaaaaagaaacatgccacttgattaggagagagacagcagtgtttgaactacagcatctttacactatcttgtgttttgtgctacgtataccagcttccaaaattagcatctcattgagccagagaagacaaggagatctccctctgggcatctggctttgctgcgtctctagagggttaggataccaggccgagttcaggccactgctagctttctcatactcccacaggctagaccagagatgccaagtcccaacagcactgagctgtgtgcactgtgccagggacaggagggtttgtgaactgcctgtcagggtacctgttagcccctgacaactcagtggggtgaagttttggaggtcagagtctggctttcgtaggctctttaggacagcacctaccacttggttctccagcgtagactcctggggagcagccaactgcaggccattgccatccagtggggagatgggttagggaggaggacgggctgactcctctcctgtaataaagctgacaagagttctaggagggttctgcttctctagtaactaggacaggtgatacggcatttgcttgccacattaaggggaaattggtgtccatttg

SEQ ID NO: 9664 - DNA, 734 bp, Homo sapiens
  misc_feature (1)...(734): n = a,t,c or g
cgagactagcctcagtagatccttattaacacttaagtgaattcaaagctcttcctgaaactgggatttgcctcgctaaccctctctgcaccctgagcaacgaagttggggataattggcttcaggaacttgaactcatttgtcccggagcctccagtcagacacacctcgtactggtagctctgggacagggtcccggtgccgctcacgtccaccatctgccctggaaaggggccctcgggcaccgagcagcgacccaccgaggccgccctgctcctcctgcacagccgcaccgccacgaacaggagcaccgagaggaggaagagcgaagacaccgaggccaacgccaccaccaggtagacggtgagcaagtcggcctgggcctgggccggtgccgcctccgggagcagcaggtagggctgggagaagccgtccaccaggagcacgtgcagcgtggcggtggccgagcgaggaggctcgccattgtccttgaccagcaccaccagcctctgcttggctgcgtcgcgctcgctcagcagcctggcggtgcgcacctcgccattgtgcgcccacacaccgaacagcccgggccaactcgctcactgtctacctggtggtggcgttggcctcggtgtcgtcgctcttcctcttttcggtgctcctgttcgtggcggtgcggctgtgcatgaagaacatggcggncctcgggtgggccgttgctctatgcctgaagg

SEQ ID NO: 9665 - DNA, 406 bp, Homo sapiens
gatactttaagttatcatggaaactctggtgaagttggctgctacgtggcttctcgacccctgaccaaggacagcaattattttgaggtgtctattgtggacagtggagtccggggcaccattgctgtggggctggtccctcagtactacagcttggatcaccagcctggctggttgcctgactctgtagcctaccatgctgatgatggcaagctgtacaatggccgagccaagggccgccagtttgggtcaaagtgcaactccggggaccggattggctgtggcattgagcctgtgtcctttgatgtgcagaccgcccagatcttcttcaccaaaaatgggaagcgggtgggctctaccatcatgcccatgtccccagatggactgttcccagcagtgggcatgc

SEQ ID NO: 9666 - DNA, 621 bp, Homo sapiens
cccacgcgtccggagggaagacagagcagtgcatggttatggatactggacaaggatatttggaaaggttgacgatgtgtcacactgtgtaagggaatcgcatggagatgggcattccgaactgttaatggggacatgggactccagttgtctctgatcacttgtgtggattttcctggcgtagaacgacagaagccgctagtaagtcgccaagacctacagcaggaattctgcaccaaagggcataaaatcttgttattttaatttgcatctgggagaatgtctgagcaaggagacctgaatcaggcaatagcagaggaaggagggactgagcaggagacggccactccagagaacggcattgttaaatcagaaagtctggatgaagaggagaaactggaactgcagaggcggctggaggctcagaatcaagaaagaagaaaatccaagtcaggagcaggaaaaggtaaactgactcgcagtcttgctgtctgtgaggaatcttctgccagaccaggaggtgaaagtcttcaggatcaggaatcaattcatttacagctttccagtttttccagcctgcaagaggaggataaatctaggaaagatgactctgaaagagaa

SEQ ID NO: 9667 - DNA, 1497 bp, Homo sapiens
  misc_feature (1)...(1497): n = a,t,c or g
gcgcaggaggaagtgcgccgcgcgggacccggaggaccggtatccccagcccactgggctacgcagctattccaatcaagttctctgaaaagcaacaggcttctcactacctctatgtgagagcacacggcgttcgacaaggcaccaagtccacctggcctcagaagaggactctttttgtcctcaatgtgcccccatactgcacagaggagagcctgtcccgcctcctgtccacctgtggcctcgtccagtctgtagagttgcaggagaagccggacctggctgagagcccaaaggagtcaaggtcgaagttttttcatccaaagccagttccgggtttccaggtagcctacgtggtgttccagaagccaagtggggtgtcagcggccttggccctgaagggccccctgctggtgtccacagagagccaccctgtgaagagtggcattcacaagtggatcagtgactacgcagactctgtgcccgaccctgaggccctgagggtggaagtggacacgttcatggaggcatatgaccagaagatcgctgaggaagaagctaaggccaaggnggaggagggggtccctgacgaggagggctgggtgaaggtgacccgccggggccggcggcctgtgctcccccggactgaggcagccagcttgcgggtgctggagagggagagacggaagcgcagccgaaaagagctgctcaacttctacgcctggcagcatcgagagagcaagatggagcatctagcgcagctgcgcaagaagttcgaggaggacaagcagaggatcgagctgctgcgggcccagcgcaaattccgaccgtactgagctgtgagagccgcagtgaatggctggaggtgcagggccaggaggaggcgaggcagggcctgcagcggtctctgagaggccgagctctggccaacgggccccaggttgaaggccaccgcgtccaacagccccatcagagtccacacaggccaggagggaaggaccaggccacccctcgggtcttgtgcttcagcagtcctggggacccaggcgtgccgagaggaggacttgtccttcctgcttcttgcctccacaccctcctctccaggaccctggatgaatccgttctgtgcttccttttccctcaatgcaaaagcccttgctggcaacgaaaaagcctcaaaagcagtgagaatacaagaaccttttattttccatccagttgggcagcagggaaaggctaggtgggcccagcctgcccttccttcctccagctggctggagattattagccaggagacagcagccctggaacccagactctgtctcccccttgaggtcacagatgttgaagttggaatctcgctccttcccctgactaccatcctaggctgggcctcaagactagtgaggccttgtccccaccatccctggccttgttgtggggctcaggaactcagagtcccagtgttgagtctgggagcactaggtcttcatagtt

SEQ ID NO: 9668 - DNA, 2387 bp, Homo sapiens
aattactcaggtgaacaagctactttttatcagagaacacctaaaaacacgttcaagagggtttgggaactatacatttaatcctatgacaaactaagttggttctgtcttcacctgttttggtgaggttgtgtaagagttggtgtttgctcaggaagagatttaagcatgcttgcttacccagactcagagaagtctccctgttctgtcctagctatgttcctgtgttgtgtgcattcgtcttttccagagcaaaccgcccagagtagaagatggattggggcacgctgcagacgatcctggggggtgtgaacaaacactccaccagcattggaaagatctggctcaccgtcctcttcatttttcgcattatgatcctcgttgtggctgcaaaggaggtgtggggagatgagcaggccgactttgtctgcaacaccctgcagccaggctgcaagaacgtgtgctacgatcactacttccccatctcccacatccggctatgggccctgcagctgatcttcgtgtccagcccagcgctcctagtggccatgcacgtggcctaccggagacatgagaagaagaggaagttcatcaagggggagataaagagtgaatttaaggacatcgaggagatcaaaacccagaaggtccgcatcgaaggctccctgtggtggacctacacaagcagcatcttcttccgggtcatcttcgaagccgccttcatgtacgtcttctatgtcatgtacgacggcttctccatgcagcggctggtgaagtgcaacgcctggccttgtcccaacactgtggactgctttgtgtcccggcccacggagaagactgtctttcacagtgttcatgattgcagtgtctggaatttgcatcctgctgaatgtcactgaattgtgttatttgctaattagatattgttctgggaagtcaaaaaagccagtttaacgcattgcccagttgttagattaagaaatagacagcatgagagggatgaggcaacccgtgctcagctgtcaaggctcagtcgccagcatttcccaacacaaagattctgaccttaaatgcaaccatttgaaacccctgtaggcctcaggtgaaactccagatgccacaatggagctctgctcccctaaagcctcaaaacaaaggcctaattctatgcctgtcttaattttctttcacttaagttagttccactgagaccccaggctgttaggggttattggtgtaaggtactttcatattttaaacagaggatatcggcatttgtttctttctctgaggacaagagaaaaaagccaggttccacagaggacacagagaaggtttgggtgtcctcctggggttctttttgccaactttccccacgttaaaggtgaacattggttctttcatttgctttggaagttttaatctctaacagtggacaaagttaccagtgccttaaactctgttacactttttggaagtgaaaactttgtagtatgataggttattttgatgtaaagatgttctggataccattatatgttccccctgtttcagaggctcagattgtaatatgtaaatggtatgtcattcgctactatgatttaatttgaaatatggtcttttggttatgaatactttgcagcacagctgagagaggctgtctgttgtattcattgtggtcatagcacctaacaacattgtagcctcaatcgagtgagacagactagaagttcctagttggcttatgatagcaaatggcctcatgtcaaatattagatgtaattttgtgtaagaaatacagactggatgtaccaccaactactacctgtaatgacaggcctgtccaacacatctcccttttccatgctgtggtagccagcatcggaaagaacgctgatttaaagaggtgagcttgggaattttattgacacagtaccatttaatggggagacaaaaatgggggccaggggagggagaagtttctgtcgttaaaaacgagtttggaaagactggactctaaattctgttgattaaagatgagctttgtctaccttcaaaagtttgtttggcttacccccttcagcctccaattttttaagtgaaaatataactaataacatgtgaaaagaatagaagctaaggtttagataaatattgagcagatctataggaagattgaacctgaatattgccattatgcttgacatggtttccaaaaaatggtactccacatacttcagtgagggtaagtattttcctgttgtcaagaatagcattgtaaaagcattttgtaataataaagaatagctttaatgatatgcttgtaactaaaataattttgtaatgtatcaaatacatttaaaacattaaaatataatctctataat

SEQ ID NO: 9669 - DNA, 476 bp, Homo sapiens
agaggatagcaactgaaaacggagctcccatgccgctggggaaactcatcatctccagacaggaagaccgaggcaaaatgagggaccttttcacaccccattttagatggacaactttgctgctgtggtttatatggttttccaatgcattctcttactacgggttagttctactcaccacagaactcttccaggcaggagatgtctgcggcatctccagtcggaagaaggctgtagaggcaaaatgcagcctggcctgcgagtacctgagtgaggaggattacatggacttgctgtggaccaccctctctgagtttccaggtgtccttgtgactctgtggattattgaccgcctggggcgcaagaagaccatggccctgtgctttgtcatcttctccttctgcagcctcctgctgtttatctgtgttggaagaaatgtgctcactctgttactcttcattgcaagagcgtttatt

SEQ ID NO: 9670 - DNA, 950 bp, Homo sapiens
gcatttatatcctgttaagcattaatagctaatcactgggacttgaattctgatggcagatagtctcttgcttagtgagatggagttaactattttttagtaggaagtgagaacagctgattttcatgccacgtttcatagccccacttttggtagactaccaccacgcttcttcgcgtaagagttggcatcttgggaatgaatgcccagccgctcgtgggttggtgcaaagaagtataaacatatatcactaaggaaaaagaaagtttgtcttgcccttctgacacagtgtgtgcacttcaggcaatttttggaaaatataaaaaattccaaattctgcctttcagcagcatcaattgctaggaacatttcattcatttccctgtaatattaatgttctttaagcataatcactaattataagttgtatcctatttttttccagcttaatttctgtggtttattgaaaaccaagtataaatgtgactaaaagcattttgctttgtttttatagttaactttcttaaggttatggacattttataatgtaacatttgattggccctggccctcttgacaattcccttctagttatgcatatcctcctgttgccacatttcttgttttaaaactcagtttcttgttttccagttgttgctatgtataacacccatcttgaaagagagtatataggaagttattcagataacttttgtagtagtgatattcaactatagcagtaccttaactcatgatgagcttaggaacataaaagataattgttgcttgaatagcacccccagagatactgacctaattggtctggggtggagatctggcatggtagtttttttcaagctccaatcatcggccagacagttgctttatgtaggtttttaaatgccaaaggcagatatgaagtagatttaattaagacttgctttagcaat

SEQ ID NO: 9671 - DNA, 595 bp, Homo sapiens
ttttggaacttaatgtcagtaacctcactctctctctcaccaccaccacacatggtattatttttccctcagggttcttaagtgcctatagtacataacaatttttgttctttgtagaattataaacagtatcaagaatttagaccacaaagtcaattataaaaaactcttgctttaatcattaaatcttaaaggaccattagaaaaggccagtcacattctgttctccagtcttgtaggttacataagccatttccataaattctatagccttcttcttagagtaacacacactcttgtttaggaatgttcatgttggttttgttcacggactgagattgttagtgggcaggagtttacttcttctcaattttctgggagataaagggggaaagcagtcttcaaaaatttaagaccaaaaatcttaaagacatttcacaaataatagtactccatgtaaagtggaatcaaaggcatcacaaaattgccatacttactgtttgtgaggagtcaatatttgacttggaccaggacacaaactatgtccttcatatggtagatcactaggatcagaccatctagatcccactttctc

SEQ ID NO: 9672 - DNA, 6574 bp, Homo sapiens
gaattccagagggccgcctttcggcagaacacacctcttctttggtgccttctctgcatatcaccacactgggtcaagagcaagccatcctttctggggcggttcccgcatcaccatcaactgggacagccgactttccctccatacttactttcctccagcccacagagaatcatgcctccccatctcctgtgccagaaatgcccactcttccagcagagggcagtgatgggtcccctcctgcaactagagacttgctcctctcaagcaaagttcctaatcttctttccacatcttggacatttccccggtggaaaaaggacagtgtgacagccattttagggaagaatgaagaggcaaatgtgacgattcctctccagggctttccaaggaaagaggttttgagtcttcacactgtaaatggatttgtctctgatttcagcaccggtagtgtctcatctcccatcattacagcaccaaggacgaatcccctttcttcaggaccacctctaccttccatactctccatacaagccacccagactgttttcccatctctcttggctttttccagcaccaagccagaggtttatgcagctgctgtggaccattctgggttgccagcttcagctcccaaacaggtgagagcatcgccctcctccatggatgtatatgattccttaacaataggagacatgaaaaagccagcaaccacagatgttttctggagttctctttcagcagaaactggatctctttccacagaatcaataatatctggcttgcagcagcaaacaaattatgatttaaatggacacacaattagcaccacaagttgggaaactcatttagctccaacagctcctcccaatggtttaacttcagctgccgatgccataaaatctcaggatttcaaagatactgctgggcattcagtgactgcagaagggtttagtattcaggatctagtcctcggtacaagcattgagcagcctgtgcaacagtcagacatgaccatggttggaagccatatagacctctggcccacaagcaataacaaccattccagagacttccaaacagctgaagttgcatattactcacccacaactcgacattccgtgtctcatcctcagctacagttgcccaaccagccagcacatcctcttttgctaacctcaccaggaccaacttctacaggtagcttgcaggaaatgctttcagatggaacagatacaggttctgaaatttccagtgacatcaattcatcacctgagagaaatgcttccacaccattccagaacatcttgggatatcactctgctgctgaatcttctatatcgaccagtgtctttcccaggacctcctccagagtgctgcgggcttctcagcaccccaagaaatggacagcggacacagtatcatctaaggtacagccaacagcagcagctgccgtcacattgtttctgaggaaatcaagtccacctgcactgtctgcagccctggttgctaagggcaccagcagcagccctttggccgtggcctcaggaccagctaagagcagttcgatgactactcttgctaaaaatgtcacaaacaaggccgcatctggcccaaagaggacaccaggggcagtccatacagccttcccattcacaccaacctacatgtatgcaagaacaggacataccacgagcacacatacagccattgcaaggaaacatggacactgcctctggcctgttgtctacaacttacctcccccaggaaaaccacaagccatgcacaccggcctcccaaaccccaccaacctggagatgcccagagcatccacgccacgcccactgacagtcacggccgcgctgacatccattacagcctcagtgaaggccacccggttgccaccattgcgagcagaaaacacagatgctgtccttcctgctgcatcggctgcagtggtcacgactggcaaaatggcatccaacctggagtgtcagatgtccagtaagctcctggtgaagacagttctctttctcacccaaaggagagtgcagatcagtgaatccttgaagttcagtatcgccaaagggctcacacaggcattgcggaaggctttccaccagaacgatgtctcagctcacgtggacattctggaatattctcataatgtcacagttggttattatgctaccaaagggaagttggtgtatttgcctgctgtggtgatcgaaatgctgggtgtgtatggagtcagcaacgtcactgcagacctgaagcaacacaccccacacttacagtctgtggcagtacttgcctccccatggaatccccagcctgcaggctacttccagctaaaaacagtgctgcagtttgtgagccaagcggacaacatacagtcctgcaagtttgctcagacaatggaacagaggctgcagaaggcattccaggatgccgagaggaaagtcctgaataccaaaagcaacttgacaattcagattgtgagcacgtccaatgcctcccaggcagtcaccttggtgtacgtcgtgggcaatcagagcacattcctcaacggcaccgtcgccagcagcctcctcagccagctctcggctgagctggtgggattctacctcacctatccgccgctaaccattgctgaaccactggaatatcccaaccttgacatatcagaaacaaccagagactattgggtaattacagtgctgcagggtgtggacaattcgctggtgggcctgcacaaccagagctttgcccgggtcatggagcagcgcctggcccagctattcatgatgtcccagcaacaaggccggcggtttaaacgggccaccaccctgggaagctacactgtgcagatggtgaagatgcagcgtgtcccaggcccgaaggacccagcggagctgacttactataccctgtacaacgggaagcctttgttggggaccgtagctgccaagatcctgagcaccattgattcccaaaggatggccttgacccttcatcacgttgtccttctgcaagctgaccccgtggtgaagaacccgcccaataacctgtggatcatcgctgcagtgctggcgcccattgccgtggtcacggtcatcatcatcatcatcactgccgtgctctgcaggaagaacaagaacgacttcaagcctgacaccatgataaacctgccgcagagagcaaagcctgtgcaaggctttgattatgccaagcaacacctgggccagcaaggggcagatgaggaggtcatccctgtgactcaggagacagtggttctcccactgcccattagagatgctcctcaggaaagagacgtcgctcaggatggaagcaccatcaagaccgccaaatccactgaaaccaggaagagcaggtcgcccagtgagaatggctctgtcatcagcaacgaatcagggaagcccagctcagggagacgctcaccccagaatgtaatggcacagcagaaagtgacaaaggaggaggcaaggaagagaaatgtgccagcgagtgacgaagaggagggagcggttctatttgacaactccagcaaggtggccgctgaaccctttgacacatcttctgggtctgtgcagctcattgccataaaacccacagccctccccatggtgccccccacctcggacaggagccaggagtcatcggcagtcctcaacggcgaggtgaacaaagccctgaagcagaagtcagacatcgagcactatcggaacaagctgcgcctcaaagccaagaggaagggatattacgacttccctgcagtggagacgagcaagggtctgaccgaaagaaagaagatgtatgaaaaagccccgaaggaaatggagcatgttttggatccagattcagaactctgtgctccattcaccgagtctaaaaacaggcaacagatgaagaactctgtctacagaagccggcagtctctgaacagcccgagtccaggggaaaccgagatggaccttctggtgactcgggagcgaccccggcgtggaatccgcaacagcggatacgatactgagcctgaaatcatagaggaaaccaacattgacagagttcctgagccccggggctattccaggtctcgacaggtgaaaggccactcggagacctccacactgagctcccagccatccatcgacgaggtcaggcagcagatgcacatgctgctggaggaggccttcagcctggcatccgcgggccacgcaggccagagccggcaccaagaggcctacggctcagcccagcacctgccctattcggaggtggtgaccagcgctccggggaccatgacgcggcccagggccggggtgcagtgggtgccgacctaccgcccagaaatgtatcagtacagtctgccccggccggcttacaggttttcccagcttcctgagatggtcatgggctcaccgcctccacccgtacctccccggactggtcctgtggctgtcgcttctctcaggcgatccacctcagacatcggcagcaagaccagaatggccgagtctacagggcccgagccggcccagctgcacgacagcgcctccttcacgcagatgtccagaggccctgtgtccgtgacgcagttggatcagtcggctttaaattactcaggtaatacggtgccagcagtgttcgccatcccagctgccaacagacctggcttcaccggctacttcatcccaacgcctccctcatcctataggaaccaggcctggatgtcctatgcaggagagaatgagctcccgagccagtgggcagattcggtgcccctcccagggtacatcgaggcctacccccgatcacggtacccccagagctctccctccaggcttcctcgtcagtacagccagccagccaacctgcaccccagcctggagcaggccccggcgccctccacagcggcctcgcagcagagcctggcagaaaacgacccgtctgacgctcccctgaccaacatctccactgcggcccttgtgaaggccatccgggaggaggtggccaagctggccaaaaaacagacagacatgtttgagttccaggtctaacgccttagccccgtgggactctggacttccaaactctgaggactcagcctttgggtttcccatgcctacgtgttaggacttgagacatagcaatgggtgagtctttctcaccctccatttctgaaaaggtgaactatggggcttctgggaacaggaaactcttgaacgactagattcttggctcatccaactgattgtgggtcaagtccctggcttggggccttatgtttgatactctctcatgtcaaatgtttgaactttgggcatgtgccctatggaagcttagtcacaagaggcactagctaatctacagattcctatccaatgccacattttaataaatcaccggaagcgggagaatgtagctcttatcttcggtgacctctgcatgttaactctgtttctgtgttaaaggcaatgcaggagtgtggattaagcaccagactgtattctcattcaaccatgaccgtgcgcattaaaatcagtttgtaagggagacactgactccagccaagaaacctgagccccttttttttaggttcatattcaaagtcaaatgaactggatgaaagtcagtaccaatggctgtgcctataaatagacctgattctttgtttccctcgtcaattaaacaaaggccaagaaagagagaagatgagagggaatggtggatttgcgttgacagattttttaaaaggtgttgccattttggaaataaaagtcccctacaagttaggatctaactgaaagagaatcggtgctaagagcttttaggatcctacaaaagaaacacagttatttgtgaaggtttttctttgccttgttttgaaggtggcctgagaatggagcttctctttttcttgggataatagatacatcaacttttacaagaaaatctctgtctcttcaacaatgatgtccagtgtgtgctgctgagtggtacaaaaggaaatagtacttgattcctgttagaaacaggagtggtagaaccacagtcttcccagggccgcagcctctgtttatagaagcttctgaatgtaggaaaagctgttgaatttcatttaaatgtaaataaccttttaaaaagcgtatggagttagccagttccccctagttaatgggacataggaagacatttgctgaaatggtagggtggccactttgtgaccatgatgttgcaagttgccctccctggcatggtgagttggcttccagagctgtgggtagaggacatcgcctcacggcacttgaggcaccagccgctgcctacccatcaatgcaagcaaaacagcttactgactttgtgtagcagggagattggggactctggttccctcgccaagtgtggcaagcctggtgcaagtgttggggggcttacttgggtatctgttgggagaattgaggtcctgtcctgcttttcacccatgacccatctagcttcagcctgtatccattttcttctgagcccatcttccattgtcctcaacgagttt

SEQ ID NO: 9673 - DNA, 760 bp, Homo sapiens
cttcccggcgcaccggcgggcgaggccaatggaaaggagactgaggggagtcccggcagtgagcccgaggccctgggacctggagcccgcgctggcctctccccagcggagcctgcacgttacggagaccatcacatgtgggcgtggtcagtgcccaggaccgcaccgctgctcatcttgtcccttttcaattcccttctggttcatgatgcataaagcgctaggccctagaactccagaaacagcacagctggggcggggacccagccttgccctccacccgaggctctgggacaaggcgggaggttcgggggccttccggcaggtgaacgcagggctggagagtatttggtgccagatgaggtgaaagcttatagaagggcctgaggggctcggctgcctcatcccctggcgggggaggctgggagctgggcctcctgcgtggggtgggactcgcaggggccgggtctccgtgactggggcaacgctcgtcctgcagagggagccgacgacctcttttctgcagaaaagctccagcaggcgctgccttcacccacggatctgcccaggctgaaggcacacgctcaatgccccacgtgccttctccaggaggaacgaagcagggtttgagggttgggtggatggagctcagaaggaaaccccagccccaccacggatgacaccatccctcccgtcccatccccagcatgggcaaaggccagcctttctggcagaaggagctgtcctcaactcagggccg

SEQ ID NO: 9674 - DNA, 284 bp, Homo sapiens
gtttctgatgttcagattgtcccaaatttggccaggtggagcccttcaagtatctcttatgtccttttgacattcactctctagtctttggacacttgattgccttctaacacaagatatctcaagttggccttgcattttcaatgccccaggcctggaatgaaacctttttccaagaatccctggctccttttaataggtagctatttagaaaccaagatctgggcactagggattctcactgctcccggagtgtcactggcaattctttccaaccattcaag

SEQ ID NO: 9675 - DNA, 727 bp, Homo sapiens
  misc_feature (1)...(727): n = a,t,c or g
gaccagatatatttatcatggtatgtttcgatgggatgactgacacaggaaatctgttaaagtcttaaaatggaatgagaatgttgttttaaaagaaaatagcaaaacaacaaaaaagcaaaccttaaaatgtgaagaaagtgtgaattttagttttgtcacagttaactgtgtcaaagagaattaaaaaaaaaaacttcagattttgtttacatattttactacatttttgctggtataattccttacccacctatgtacatactgctttaagaaatgtttttttcctgtttatttctgtttggtttatattctggttgtctttttctttttgtaaagaggaancaatgtncagaaaancaataaactggttgtatggccatagctatccgaaaagcaagagacaaagcaagacaaatattcacacaaaaatgaagtgtgtcctctggagggtcatatatacaatttcttttgtacagatgaaaatcaatcagctgcttagatttagaaatctactcttgctggtctttgtaagttgcatgaatatttgactttgaaaaaatatcttaacgacatggggcaaaaagtgcaatctaaatggtagcctttactaatgtgtgtggaaagaggtgttcctcattatctaatatttcaatgtgttaagagtttaatttttttgttatcattaaaaaagacaggattataaagagatatcaaagcacgtttt

SEQ ID NO: 9676 - DNA, 1773 bp, Homo sapiens
  misc_feature (1)...(1773): n = a,t,c or g
gagttaaccgtagtatacctattatgattatagtaaacagactagtgggtagtaatgctaaattaccatcacagttatgtgccatctccccaccccattttttttttttttttttttgatcagcaaagaaatacaggagaccagtctccnagtggtgctgtacttgttatgagtggggcagcagcacagtgtgtggcatttacatggtacccaggctccacagagtaccaagatgttgccctctgggaccacacttagctcagagaatatggggtccttacttgtattctgttatcagctgattttgaaacatataataatgattttcttgttcccttctttaactagctgcctttagattttgataatcacagtcttaaaatactagggaaagaagtgggatgggaattgtaggcatagatttcatatcaagggcatttcaagacagaatttttatttcctgtagtaggcttgctggagcaaaggaaatgtgctgctaaaaatcaacttatgccattttaaaattagataaaatatggagtgccatcctgctaggtgagtacagaccagaagaaaatttagttgggaaaatacttgtttttccaaattccggtgttttattacaatcaaagaagaggaaagcaaggtattttttcacctcagattctaatatattctagatttgtttctgttttatagatttaattcaatacctccacatagatgtttttatattacatgaatttaataataaactaaacttttttttgtctcccgttattgaaaagtaccaaagcttctttctgttgtgtttgattttactataggggttttgctttttctagagatacttttcatttaacagcttttgttaagtgtcaggctgcactttgctccatataattattgttttcagatttcaacttgtatgtgtttgtctcttaaagcattggtgaaatcacatattttatattcagcataaaggagaataaattccagaaaacacatattctgaaaatggagtgtttgttccctgccatttttcacacctctcttaattttagttctgtttagttgagaggctgtgattttactcttgcctgtgaacctcatgcatgaaagcagcacattaaattgtaaaaatacaaacagatcgtgtgatcattcaaggagccagacatgaggtcctgcacgagggtgttgggaggacaccacagattcatctcagacagtgatcaggactgaggatggagttaaatcactcagcccctgggtggggtggggtggttcaaatggatgactgatctcctgagtacactgaagccacaggctggtggccatgttctctgaattgggtgcagaagacaagggcagagtggctgcggccccctattacctttgtagcagccacatcagaaagcagaagaaaacagtatttctgaaggcattgtttgaggttgatctcagcactgaacgatttcaagccctacgcaccagaacagaaggagggtggaggaagtgatcagagggaacgagctgtaggtttgcagaaatgtgtgaaaccaaaatgatcactgcctacttgtgattcaaatcttcagagttttcctagttcttctagaaatacatgtcaggtttgttttgttcatccttttctgtcagcatggatcaagcccctaaaatgtggtaagtgttgtcagagcagggcaatatctctactctcaagtatgaggggaatagaaacaaagcagcagttttagccagggtattgct

SEQ ID NO: 9677 - DNA, 226 bp, Homo sapiens
ttttttttttttttcttggcaggcattttgtttataatttttacaatcaataatagaatgtccctgttttacataatatatatttatatatattttatgtatatatatttatatattcgatatctatatttcaatagaaagagacataaaaaagaccttttcaaatgagggcatgacacgcaacactcggacactcttatttacaatataggaggatgtactttct

SEQ ID NO: 9678 - DNA, 435 bp, Homo sapiens
  misc_feature (1)...(435): n = a,t,c or g
tcataacaacataagataatgtttattttatcgggggtatctatggtacagttaatttcacggttgtgtaaatatccacttggagactatttgccttgggatattncccctgtcatttatgagtctctgcaggtgtacaaaaaaaccccaatctactgtaaatggcagtttaattgttagaaatgactgtttttgcaccacttgtaaaaaggtatttagcgattgcatttgctgtttgttgttttattttgctttatatatgacttgcagaggataaccataaaatggggtaattctctctggaaggttgaaataatcaccatgactgtaaatgaggggcacaattttggactctggcgccaaactgagtcataggccagtagcattacgtgtatctggtgccaccttgctgtttagatacaaatcataccgtct

SEQ ID NO: 9679 - DNA, 380 bp, Homo sapiens
aagcctttcagtttgtagtatgttgctacagctgcattaggaaactaatacatgcatgattgtaggacatggataaggaagtagggatgttcaagggtatttcaggaaatcaaccatatagtgcagattagtatggaacttgtgagactaagaagggctggtgatcccaaaggtcttgcttgcagaatcaatgagcagaatgtagtgagattgagggcttaagacagttgaatggatataaggttgtggtcaaaagggtgagaccatcatttaggatgtcaggaattaagtagtttcaggtaataataaagtccaagtgatatccatcagagtgaaaagtggaatggaaaagaaaataatggcatttaaagagtcaaaaa

SEQ ID NO: 9680 - DNA, 635 bp, Homo sapiens
  misc_feature (1)...(635): n = a,t,c or g
tttttttttttgccgcatgagattattttattaaaaaactcaaaggaagcagagtgtggagcggtatctgtcctgcgtgacgtctcacatcggagttggctcagaccctggctgtgcatccatcagaaagtgcaaggcccaggccatgagctggggaggaagcctggcagcttggacccgagcacagagggacgtgcagggtggctcatactcatactggaaggcagaaccatcacgatgcctctttggggggttcccagacagagcagggctcctgggggctcccctgggtagctccggtcctgggaaaaggcggccgattcttgcagggcaaccctacaaactccttgaactccaggctaggtttctggggcctggtcacaagagcctggtgtgggactggggacatggctaccggggtgagagactgggagtgcagctctggagtggggagctgggggtacggctggcgtgtggggacctgggggtcagggtggcaggggctgagcagatggctggtgagggctgggagcctgcttctctgccctgggtctggagcagccaaggacagggcaggcagaaggctgatgctggtacacttcctcgatgaatgtgncgggtaagcggggttcctt

SEQ ID NO: 9681 - DNA, 464 bp, Homo sapiens
  misc_feature (1)...(464): n = a,t,c or g
ccagatctatctcattttcttattccacaggatgagggaaactgtgccaggttacaaatgttattaactctagagaatcctgaaacaaccctgtcttattgtttcctaaaattggtacaggtcctgcgtttactggtttaggataaaaaaaataagggggggtggtggtggtaatgaacatgatcttcgtggtgagaacaggggacagtaagatacaaacattttttggcatatgaaagtttattactacagtgttttcaccattaatatttatgatcttggtctttccttcttgcctttgtatagggccaaaagagaaacattgggctactttgacaaccttaaagcggactccaggaatatcaccaacagcatgaccttttgcgaccaaatccagcaaccagaacttcatcattttccnccaataaagttcaagcaaccggcattggggtacaaaggctgtg

SEQ ID NO: 9682 - DNA, 393 bp, Homo sapiens
ccaacttcctgatgtttttctttaatattttggaactgttcaagacagaatggagcctacatatatggtgttccactagtatgttgaaaatgtcatatcatggagaatggagacaccttccaggtgtctgttaaacccatcttctctgtgtacttctggcatcttttttggtaggatcatttggcagggggtagagtacctgtacttttggcaccattgaaaccagctctggcccacttgtttgaatagctatcagactcagcgtctctatatgctttatatacagttgagagaaccagtgtttaatgctcttgaaattgtatcttccatgcttcagaccagatgcatttaacaaaatggatatattccagctgtagttgcccagtgtttact

SEQ ID NO: 9683 - DNA, 363 bp, Homo sapiens
caaatttttttctgatttgcgttctggagatcctgcatacagactcagttgtggttcacaaattgcgttcccaataaaaatgaagaaagcgcagagttttaaaaaacaaatatttttagcataaactattgaaagggaagcactggggggacctcagcttcatttatcagtctttcatctactccttgcagcaagagctcataccctttccctatgtgttttttgtttattcatttattcatgtatttgttttttctgcagcttttaaaatattaagggttgtttgtaagataaggttgttaccaacttgggtggaggtaggagtacggttgctctttgtaaaatggcaaatgtacatgcagg

SEQ ID NO: 9684 - DNA, 888 bp, Homo sapiens
tttttttttttttttttttcataacattaatatttattgctttatatgaatactgtattgaaagcccaagcattcagtttacacacagaaattatacaattatataccgcttcacaaaggcagtgaacacattacattctacaaaatctactttacagaaatttaaaaactttaaatatcaaaaggtacagctgaagaaacaggtataaatttggcagccagtaattttgacagggaagttacagcttgcatgactttaaatatgtaaatttgaaaatactgaatttcgagtaatcattgtgctttgtgttgatctgaaaaatataacactggctgtcgaagaagcatgttcaaaaatatttaattcacttcaaaatgtcatacaaattatggtggtttctatgcacccctaaagcttcagtcatttagctcaggtacatactaaagtaatatattaattcttccagtacagtggtgtttcataccattgacatttgcataccctagaataatttagaaagacatgtgtaatattcacaatgttcagaaaagcaagcaaaaggtcaaggaacctgcttggttcttctgagatggtctcatatcagcttcataaacattcattctacaaaatagtaagctaacatttgaacacaatttccaagataaagcatattttctcataaataatgaagtctttttctcaggcacctcagaagtatacaaaagaatttgagtttgaacagatctcttggaatgtgtttaacctggtatttcaacagacttaagatttccagggtttcacaagggccagattttatttcaattactcagaagagaaagaaaatgtcttctgaaagaggtgaactcaatcattaccaatagaaaaag

SEQ ID NO: 9685 - DNA, 559 bp, Homo sapiens
  misc_feature (1)...(559): n = a,t,c or g
ctttttagcagcaacatacaagccggccatattagagagatggaaataaagcttccttaatgttgtatatgtctttgaagtacatccgtgcatttttttttagcatccaaccattcctcccttgtagttctcgccccctcaaatcaccctctcccgtagcccacccgactaacatctcagtctctgaaaatgcacagagatgcctggctacctcgccctgccttcagcctcacggggctcagtctctttttctctttggtgccaccaggacggagcatggaggtcacagtacctgccaccctcaacgtcctcaatggctctgacgcccgcctgccctgcaccttcaactcctgctacacagtgaaccacaaacagttctccctgaactggacttaccaggagtgcaacaactgctctgaggagatgttcctccagttccgcatgaagatcattaacctgaaagctggagcggttttaagaccgcgttgganttcttcagggaaccccagcaagtaacgatgtgttcggtgatgctgagaaacgttgcagccggagatta

SEQ ID NO: 9686 - DNA, 427 bp, Homo sapiens
atttaacatttggatgctaaatgataatgaaaattgctaaaggttctttaatatggttcaaatctataagacttttttcttttaggtaatactcagagggtcattctgctgcttgttatgaatcatagattacattcatgtcagattgatcaatatgtatgttttatgatttaacagcaaaaacctcttcaaactgaaaatttgaaagaaaggtttcaatagaaaaattatatatatatttatacatatatatgtgtgtgtgttactctcacagttcaactactgttgaactcaatcttttaatttatagttatacgtaggctatgtatgtgtccaattgtatacctagaatacttacttaaaacttagtttacaactctttttaagatgagaactaaggcaattttgatatgattcatggtctatt

SEQ ID NO: 9687 - DNA, 465 bp, Homo sapiens
aattacatatatacttcccctagtgactatgataatcaagggggcagatagcagaggaaaataagttaacatgaaatttgacaaattttattactttgccaaaattagcaaaacaaaaatactcaccttcccctgctcaccccgcaactttttataaatattcaattcagctacaaaacaaaatactggacccacttctttcagaagagatgaagataccttatatgccctaaagttaataccagcagtcatattttatcagatgtaaatctggatgtaagctcttaatgttatactaaggcagtttcttaggctgtgacacttctttgtggtacttgttttgtgtgaaaggtaaattttggggagaaaacaatgtgaaaaacagaacttgttctgttgtttttggcatactgtttatgttagatacactgtgttacaatacaatattacgaagaaaaaaaaaaa

SEQ ID NO: 9688 - DNA, 639 bp, Homo sapiens
  misc_feature (1)...(639): n = a,t,c or g
cacctatgtgagaagatgagtcactggtttcaggccagcacagagatttgccagaagcatgtgagggcaattcacttcaaaccatatttattgagcaccaactatatgcccggncactatgcaaggtgctacaggacccaaagaggaaatgacaaggattctgcccacaaggcactcacaatcactagaagcagatcttgagatggagaataagttcctgttatgaatctatccatcctaaaaggaagaaaaaaatagcggcaagccacatacaattactttatactctagttatgaaattgggcatatttagaggtggcaaatgttgattatccagtctatattttacttaaagtgttgtaatatgtcatacaaggaaaaaataagctgttcgaatcttcatgcatgagggagaaggcaatgaaaattcctccctccatttccaaacccaaatccttataattacattcaggaatcttttatagcccaaggacacaaaataaaagacaataggatgataacttcagtccatttattttggatctaaagagatgcatgcactaaacttgaagcattctaagttattgaaatatttacatcattgtacatgaatgtggaggaaattttcttcctatcttg

SEQ ID NO: 9689 - DNA, 761 bp, Homo sapiens
caactgcttgcaattagatcctaaggcaataaaagaataaggagatttggaaaaccattgtctgtaatctctgaagaaaagtggacattaggggagtcagttgaaaagcaaagctatcaccattttctaaagaggaaaaaggtgaacctcacaaactatagaccaaaaaaataggacatcgagagaaagaatatgaagctagcataggttcacaaagaatgagtcaaatcaaacaacatgcattttttatttataaagcatgacttgttcattgtcaattcatgttagcttaatcattaggcattaatgccatcactgcaatgcatatgtcagcaataaataatcaaagaccaggcttccatcattctgtttaatatcttcaagtaatgcttaagtttgcaaatgctcttttaacacattctccatatgcagcctgcccagcactgcacacaatagacctgttacttccccctcacgagcactcctaatatttcatgtgctcatccaattgacttctcccactggtgcctcatattgaatttgtagaatcacacctgctcctttttcaaaactcttctgagttttttcttaaataattcactgaccccaaagttgtcagatatttgaagactactcgcacaattttaatattataaatgtataatgtaaatgtaattaagatttgtataatgtacgatgtactttggtaaataaaagtatgctgtgaataaatacgtatgatacaattcaaaaaaaaaaaa

SEQ ID NO: 9690 - DNA, 516 bp, Homo sapiens
tgccaatggtcttgatttttattatttttcacatgggcagcagaagatggagttgtcccatccttgctccccttgcattgaatgtgccttgggtcttaaaaccccggagtgtcattggagccccctcctcttgctcctagtgtaggagggacaaggaggaaagcactgtgagtatgtgtgttggaggggaggggtcccagctccctgagccagggctcagcacccctcagcagctccctgaggccctctctctgtgagacttttgacagacagcaggacagaaacatatagcagagaaagacataggcagactaggagacaggctacacacacacacagagaagctggccccttcctttggcatggttcaccctagccctggggataggatctaagggtagcgtatgggacctgagctttgggcttgcccgagagagagatggggctacttgaattcttgagaccccaaactccgagaccaaagaagttctctctcctgcctaacctggacccaca

SEQ ID NO: 9691 - DNA, 402 bp, Homo sapiens
  misc_feature (1)...(402): n = a,t,c or g
cgcaggtccaggcggtgcagcttgggcggcccagcggatcgtgccgcggcggccgagcgcagctacaggagggtgtccagaagccacaagccatggctgtggggaacatcaacgagctgcccgagaacatcctgctggagctgttcacgcacgtgcccgcccgccagctgctgctgaactgccgcctggtctgcagcctctggcgggacctcatcgacctcgtgaccctctggaaacgcaagtgcctgcgagagggcttcatcactgaggactgggaccagcccgtggccgactggaaaatcttctaacttcctacggagcctgcacaggaacctcctgcacaacccgtgcgctgaagaggggttcgagttctggagcctggatgtgaatggangcgatgaa

SEQ ID NO: 9692 - DNA, 650 bp, Homo sapiens
  misc_feature (1)...(650): n = a,t,c or g
aaggatttgcttcttagaagctcatgtggttgttgcaggantcantntgngnnangncantgtgtgattnttcgtgcctgtatgagcatgactatatttnggggagtgggtgatatggtttatctgagagcatttatctgtaaatatgtttgtcctgattgagggacacgatctgtgttccactctatagcaacatgactctagcaatgtgactttcggttccaaatctgtatcagtcagctactgctgtgtaacaaatgaccacaaatgtagcaaccagnnnnnnnnnnnnnnnnnnnnnnnnnnnnnnnnnnnnnnnnnnnnnnnnnnnnnnnnnnnnnnnnnnnnnnntacttgggatctcaggaggctgcaatcaaagcattcgccagggcagaggtctcatctgaaggcctgatcggggaaggatttgcttcttagaagctcatgtggttgttgcagcattcagttccttgctgttgcaagactgaaggcctcagttcctcgctgggctgttggctggaagctgccctttgttctgtaccatgtgggtctctccacagcgggggttcggagcatgggcagctaagttagtgagggaaggtgagatggaggtttttggtcttattgggtgtgaggaagcaacgtgt

SEQ ID NO: 9693 - DNA, 742 bp, Homo sapiens
  misc_feature (1)...(742): n = a,t,c or g
tgggacttcttggctgaggtcagcaaaggcatcacccagtgcatgctgggtctgcagcaggctgtagaggtgggctgtcagtgcccggcccagctgcaggacactctcatacttgcgcttcgtctcacgcagcaactcaatctgcagctctagctccaggtccacagtccgtgagcctcgaccaaatcgttctgataacagttgctttgtgcaacttataggtgttgatgccccatttcttgacgatgtcaaacttttctccagcaatgccccgagccacctcatctccagggccagaaggagtggtgctgtgagatggatggcggccagaccctaaaggattaagttntctgacaccagcctctcttagatacaccagacacctctgtggccccacccatacttctcttcgagcacatgaaattgacttccctgaaggagatgctagagacaactggatgctcctgcttactaggaggaactcggactttgcgcggtgagaaccaaatcctgatatacatatggcctccttgggggttagaggaggggtttgcggggagttgttggtgtacaggggcagaggaaacagaagaaaatacactgagtttgggggcagcaggagtcaaggatggtgggtcatgataacaagaaacctggttgcattcccatgtggaatcttagtgtgagattcagggctgtttgttcctctaaactttagaatctaaaaattctgagaagcttc

SEQ ID NO: 9694 - DNA, 407 bp, Homo sapiens
cggacgcgtgggatgtccaagaactgtgtgcctatggaatttgaggagtatttactgcgtatgttccagcagactttctacctcctgcagaaaatcaccaaggataacaatgcccacacagtgaagagcaggctagaagagctcgatgagagctatatcgagaagtttactgactttcttcggctctttgtgagtgttcacctaagaagaatcgagtcttactcccagttccctgtggtggagtttttgacacttttgttcaagtacacatttcatcagcctactcatgaaggttacttctcttgtttggatatctggacgctgtttttggactatctgacaagtaaaattaaaagtcgtcttggagacaaggaagcagttctcaacaggtacgaagatgccctggg

SEQ ID NO: 9695 - DNA, 1030 bp, Homo sapiens
  misc_feature (1)...(1030): n = a,t,c or g
ttttgttttttagactgggcacaccttttatttggctgcatgcagtagggcgaagtcaggagaacactgctatctttccagcaggacaagaggcaagttccaagggtggttggctgggagacagaggtcttgggaatggcagttctaggggtggggtgggggcttggaatgctctccaagccagagggggccgggcctggatttgggaggtggacaggggattcttcaaaccccctaccatactcatccagggctcatgtgtccagctgtcagagcaggtcccaatcctgctccccatctaccctgggacatcctgtacaggattccctcagtcctctggggaaccttaaccccacctgggtacccatctagcttctggggctccactgaacagtgagggacagttncacacccgacctgggaccccaccccaccngggtactgttccatttcagttcccggcctgagcctctgggccaaagccacctcttctgagcaggcaggcagagcgagagactgggagcagcagacaggggcagagcacggcccatgagcccaccctccacttcccagattggtcagagttacatggtcacctccctgcacctgcaccatcagggcagctgcaagcttgccagttgtcttgcctgtccctgctccgagggtcaaagaacacaggtagaatggtcccaggaggggaagggagagacagatccaggctggcctccaagctcgactttctgaggggcccaggggaacatgctgcacctcccacatctcaggtgctccgtctctgaaaggggcacacgcaggcttccccggccatcattcaggtcaagacctttcggggagagctggcccgaccccagcatgcgagggctgcccacactgagaggctccacaaagaagaggctgctaggggcaagggttagaggtctggggacacctggcctccacctccccatcccaagcccagcccttttctgacagcagttgtttaccagtcagggttcagcagatggggctcagg

SEQ ID NO: 9696 - DNA, 499 bp, Homo sapiens
cgcatattttttttttttttttttttttattttatcattttaataccggaaatgccagaccaatcaacagggaggacagaccagacacaaatgcctgtgctcacaacacggatgggaggatcatcacggctcagggcacacatgcatttccttagaaacaggcagacaaagagagcataaataccacacaacagccaggctcagggggctgcgggccacagagggctgcgcttcaaaggcagtcagaggcattaaatacgggacctacacaatacactccacttcaccatacataatttatatattaaaagaaaggggaccacagtatctatacgtgcaagcaaagcttaaacggcacgacaagcctgtgtttctctgcaactgtccaggggccgctcgctcagaactgactggcactgctggggtaccactgcagcaggcggacgatggaggggtcgctatttgcacctctgatgaattcttccaaggacagtttgcc

SEQ ID NO: 9697 - DNA, 958 bp, Homo sapiens
cgaagatccccagcgctgcgggctcggagagcagtcctaacggcgcctcgtacgctagtgtcctcccttttcagtccgcgtccctccctgggccgggctggcactcttgccttccccgtccctcatggcgctgctccgacgcccgacggtgtccagtgatttggagaatattgacacaggagttaattctaaagttaagagtcatgtgactattaggcgaactgttttagaagaaattggaaatagagttacaaccagagcagcacaagtagctaagaaagctcagaacaccaaagttccagttcaacccaccaaaacaacaaatgtcaacaaacaactgaaacctactgcttctgtcaaaccagtacagatggaaaagttggctccaaagggtccttctcccacacctgaggatgtctccatgaaggaagagaatctctgcccaagctttttctgatgccttgctctgcaaaatcgaggacattgataacgaagattgggagaaccctcagctctgcagtgactacgttaaggatatctatcagtatctcaggcagctggaggttttgcagtccataaacccacatttcttagatggaagagatataaatggacgcatgcgtgccatcctagtggattggctggtacaagtccactccaagtttaggcttctgcaggagactctgtacatgtgcgttggcattatggatcgatttttacaggttcagccagtttcccggaagaagcttcagttagttgggattactgctctgctcttggcttccaagtatgaggagatgttttctccaaatattgaagactttgtttacatcacagacaatgcttataccagttcccaaatccgagaaatggaaactctaattttgaaagaattgaaatttgagttgggtcgacccttgccactacacttcttaaggcgagcatcaaaagccgggga

SEQ ID NO: 9698 - DNA, 353 bp, Homo sapiens
tctccctaaatgcttgggcagcatcagctttcagtagctgtgccccatgggaggcacattaagctagtggcaagttgagactgcagacctcagcttaatatcagttgttgcccaagacagatctcaccccacatcttccatgacaggcctaacaacaaggcactttgcccttaatcctctactactggcctgcccttcattttggggccaactgtaacagctcattttgagatagtagctgatcatttttctgatcagttaactttgtcttatttaaggcaaaatggagaatataatgttgggaaataagtgtgttgattaaaagaaagtatccccttctaccatcttccatt

SEQ ID NO: 9699 - DNA, 397 bp, Homo sapiens
gtttgatcaaaatattttaataaagattctttctgacatagatacacatacaaatggtcgtacatagctgtcatagtctgattgacctatttaatatatatatcattctttacacatccaaaacccgccaacagatccatcacagctcccaactcaccatccaacctgacaaactgaatttgtattatctgcaaggagtggaaaatagcaggactccatttttaaaaaagattttcttgattttcatagggcggaaaggcagtcaaacagccatgcaaaactaaaactgaaagctcactttgggtaaatagcttcttgttcttccttagttttctttctttttaaattttatttttttagaaaaataacaaaggatttcacaccataggcaaatcaa

SEQ ID NO: 9700 - DNA, 133 bp, Homo sapiens
gttacctactggttgcatttttggttttggttttgcatttttttcttcccacaaacactggctactctttgtcctaccccctccaccatgatgaaccatgtggaaactatttaaatcaattaatggctttctc

SEQ ID NO: 9701 - DNA, 435 bp, Homo sapiens
tttttttttttaacttgactgtttttactgaaaagacgaaatgcaagtataaagcgagggtatcttcagcaaagggcaggctgtggggcaggccgtctgtctgagtgggagctgcagctgatgtggacacgggcctccgtggagcctcaattttattacatttgagtaggaatgactttgtgttataacatcaaagaaagaatctgaatatgagggaactgcagaaattaaactttcagtctaattctcagaatgccagagtaagatgaaccctttacagtaatagtgaaataattcgggctcattttcagtagaaactcaagctgcttcaatatggaaatacaattttgacaatacaaaaaaagaaagaaaagcaggggtgaggccccacacttaagaggaagaggccatcgcagcatctgtgccctgggcttg

SEQ ID NO: 9702 - DNA, 389 bp, Homo sapiens
cttcttcattcagatttgaatggcttattaaattagcaccaaatatcagtgggactgtagaaggtaaccgaacactagtaccattgactctcgttgaataactttatatttccataatcctgaattgtgtagatagttttctagctctcgggtccctttattgctttttaaaatagggtttgaaacatgccacaggaaggttgctctccaaaaatacacagtgcagtgcaagaaaatgctatctcattggcctactctcctatgaattgctaaagtgcccacttcacatatgtgtttaaacctttataaaccagtatttcacttttaaaaagacaaggcatctctacccattaactctgcaagccactccacttgcaccattccgcttg

SEQ ID NO: 9703 - DNA, 388 bp, Homo sapiens
cctgaatgaaacaaccaacaataagaacgagaaggagcttgtgctaaacacagaaggaatcaacctcccagagctattcaagtatgcagaggtcctggatctgcgccgcctctactccaacgacatccacgccatagccaacacgtatggcattgaggccgcgctgcgggtgatcgagaaggagatcaaggatgtgtttgccgtgtatggcatcgcggtcgaccctcgccatctctccctggttgctgattatatgtgcttcgagggtgtttacaagccactgaatcgctttgggatccaggtcaaactcttccccgctacagcagatgacatttgaaaccagcttccagtttctgaagcaagccaccatgctgggatcccacgatga

SEQ ID NO: 9704 - DNA, 1433 bp, Homo sapiens
gaattataaactaactttaattacatcaacaggaagaatttcaaactatgttgtaattcttattttaaagtttaaatctaattaatatattctgactaacataatcatccaaagataaaagtatttgtgatggcaaatggacagaacaatcatttaggtagcatctaggaatattgctacaattactttacataaatagaaatccacgtctttattagtaatgtgccacacatcttagagtaaaaatttacataagataggcttataaatatacataaatctcaaaattaatcacaaacattaggtacacaattgttataaaacaaatataacctatcaatgtctatgtaaaggcatagtttttacaaaatagtattttgtagacagtctcaaaaaagtatattaatactcctggagccagattgttccagcatatcagcatgtctgtggaaataaggcatccggagaagctgcattcactcttccccatgccagggccttctatgtgatgaaacaggtaggattctagtgacctgggtgaatgctacacccactgcagcaccccattaccttagagaatcaattactctccagaagaatccaaccaaatggctatcatcctaatatgcaaatatccaggggaaaactgaacacattaatcaagcagcagtgtgttttatgttaaaaatcccaaatagcttgatgaatccattacattttgagttgccagacatacttaaaatcacactagcctagccactattttcatgaagaggaacttatatgcaagtcttttattaaatataaaaacaaagaaatctaccttgaaactaaataactggatacttgaataactgaataaggaacctaattaaatacaaaacctgtataggttgcatccaacatgcccagttactcagctaacactagtcttggtttccttaactaacagtatagaaaagtcacattcaacagtggtactttatatgttcttaacaattcatataatgttgaatggaggaggaaaggcttagtaaaacatcccaggaatcctttctacaaactacattgctataaactcaagcatagttttgcctgtaatatgcataatgttctacctcttgggttttaaagtaggcaagagatcagaaacagaaacaaccttgacaaagaccttcaaatgctcatggtgtgtatattcaggcctttgtgtataaacacacaccatcatgtatgtacaaatatacacatgctcctcaaagttacaagagggttatgtctcagtaaacccatcaattgtaagttgaaaatatcataagtcaaaacaattatgggacataaccccattgtaagttgtaggaatgtatcaaatgtatatcactttcatatcatcgtaagtttgaaaactcttaagttgaaccatccaaattcgg

SEQ ID NO: 9705 - DNA, 433 bp, Homo sapiens
aactttttaaaaagttttatttcaagaactttgttttttactggtatttcaaaaaaacgtgggtcaaagtacaaaaaaaagtcagttgaataacagcacaggtttagaaatcacagcagcagaagcaatgtacagacagcacagaaaaaacaacccaatgtatgcaattctgttcagtttctttgcttattttaagtattttttttgcctcctgtacaaaatacataaaagcatgccatgagatcagaaaaagaaaagagtttaacaaatggttacaagaaatagactctgtacaagaggagataatgtttcttcccctaccccccacccactacccccgcttcctctcttcttggctctgctttaggttaaattattctgaagacagtttcacatccaagtcagcctgggtcacctttggccaccctcaagt

SEQ ID NO: 9706 - DNA, 745 bp, Homo sapiens
aacatagatttacactttattttaaatttgcatcctgagataataaaattttatctgacaagtgaacaatgacagaagcagcagtgaaagtttcggagaggcaggtatccttcattttggcacagctgtatatagattgagtttttccagggaagtcattcctggactcaagggagaaaaaatgaattcattccacaggctatgtaacaatgcaagatgcatgaaagttcttagtttggatgaacatatccgctattattcttttctggtaaagctgtcccaacaggaatcctctgacaaaaagttgaaatcctaggcttctccaccagatatttttatcaatgcccactctctagttacctggatatcctgttcttgcagccagattcatatttgtatgtggttagtccaaggagggcaaattcgctcgtagattatatactttcaaacacttgttacttgtttcaaagtccaggcattaaaacaattttacactatttgcgtactagaaaaaatggaaaataaaaagtcgagataaaaacaaagaaataaaagaacatttgagaaattattgccttgattcatcatgttgaatttatacacagaactactttaagagtcagaaattgatatttagtccaatgctagaatatgacattataacattttccacatttgtaatcctatatgtgtgtgtatgtatgagcaacatgtacacacctaaataaattaggccagtgatatt

SEQ ID NO: 9707 - DNA, 653 bp, Homo sapiens
cggtggggagcttggagccctccgctcacctagaggagccctgggacacgcactggaaagtattctaggggcttcctgccttatccttctgtttgttcatacacttagtgaaagcagatcctgtactaggatgtgaggatatctgtcacctgcgtggtccattccataaacaccagattccatttcagttgccacacattttggggctagacttccctaaacaacatgccattgtgaaataatgcatatatttgtatttttaaatttccctgaaaatttaatctattctgttccatatgaagtctgtttcactaccttaaaaaatagatactccactagaggctgtgcttaattcaaatccatgtgtgtgcctggcattacatgtgtgaacacgtgtttctgttgtgtgtgtcatgcacatctgtgtgttgcatagcataagccaaatgaaaatcatttgttcatgggattcatatgaggaacaaaattaaatttgaatacagtcagataactgccacgcagggcatttggggaaccatccccgaatgccctgatgtgatttccctcagaaaatccttgttattagaggagaaggtctgggcaggggcagcagcatctcagacatcaagtcaactttatcatctactacatca

SEQ ID NO: 9708 - DNA, 396 bp, Homo sapiens
tggagttcccgttcgatgtggacgcgctgttcccggagcggatcacggtgctggaccagcacctgaggcccccagcccgccgacccggaaccacaacgccggcccgtgttgatctacagcagcaaattatgaccattatagatgaactgggcaaggcttctgccaaggcccagaatctttccgctcctatcactagtgcatcaaggatgcagagtaaccgccatgttgtttatattctcaaagacagttcagcccgaccggctggaaaaggagccattattggtttcatcaaagttggatacaagaagctctttgtactggatgatcgtgaggctcataatgaggtagaaccactttgcatcctggacttttacatccatgaagtctgtgcaacgc

SEQ ID NO: 9709 - DNA, 3999 bp, Homo sapiens
ggatccgcgggacagatgaggaaggggcttaagtcactgcagccagagggatggaggtggactgatgggagggcttctccggtggggttagaagggaaaagtagggaaagagaagtgtaaggtagatggcagaggcagagacatggaaagacagactctagggttcctgatgatatctatctcggccaacacaaaagggagggtacagtggtgggggcacccaagctagggtgtgagtaccctaagtgtattcttctgagatgtaggccattcactaactcttggaacagctacagtttcacagtaggaagacccccccagattcactgcccctcccttagtaaagcctctgagaccttcctgaacattcccttctgtctttgccctctgttccttccagagactatgtgcccaggcagatggattcctcccgggcctgagaggaactgcaggaattctcctgcctcttacccgtaaaaccccaacttctctagccctagggcaggaagtcccaaacaatttctacccctttttctgcaattctcattggggtgagaggaggcccaggaggagagagagctgggctcagcttctttttgagctgctggagccctctgtgaggaggccctctttgctggcttctcaggagagtgtggctaggttctgcctgcctatgggaagagggggccagggtgtgtggagcaagatggtgcggtgctggtgccttgggacctgggggaatgggacagctggtcggctcagagacggcctactttactcacagctggaatttagtggggagaagcagctcaactccaatcctggaggattagggagattaaagtgagagaagagagagatgtcccagagaccaagagctcccaggtcagccctctggctcctggcacccccactgctgcggtgggcacccccactcctcacagtgctgcatagcgacctcttccaggccttgctggacatcctggactattatgtggcttccctctcagagagtgcagaaataccgctaccaagatgaagacacgccccctctggagcacagcccggcccacctccccaaccaggccaattctcccccagtgattgtcaacacagataccctagaagccccaggatatgagttgcaggtgaacgggaccgagggggagatggaatacgaggaaatcacattggaaaggggtaactcaggtctgggcttcagcatcgcaggtggcactgacaacccacacatcggtgacgacccatccattttcatcaccaagatcattcctggtggggctgcggcccaggatggccgcctcagggtcaacgacagcatcctgtttgtaaatgaagtggacgtgcgcgaggtgacccactcagcggcggtggaagccctcaaagaggcaggctccatcgttcgcctctatgtcatgcgccggaagcccccggctgagaaggtcatggagatcaagctcatcaaggggcctaaaggtcttggcttcagcatcgcagggggcgtagggaaccagcacatcccaggagataatagcatctatgtaacaaagatcatcgaagggggtgctgcccacaaggatgggaggttgcagattggagacaagatcctggcggtcaacagtgtggggctagaggacgtcatgcatgaagatgctgtggcagccctgaagaacacgtatgatgttgtctacctaaaggtggccaagcccagcaatgcctacctgagtgacagctatgctcccccagacatcacaacctcttattcccagcacctggacaatgagatcagtcacagcagctacctgggcaccgactaccccacagccatgacccccacttcccctcggcgctactctccagtggccaaggacctgctcggggaggaagacattccccgagaaccgaggcgaattgtgatccaccggggctccacgggcctgggcttcaacatcgtgggtggcgaggacggtgaaggcatcttcatctcctttatcctggccgggggccctgcagacctcagtggggagctgcggaagggggaccagatcctgtcggtcaacggtgtggacctccgaaatgccagccatgagcaggctgccattgccctgaagaatgcgggtcagacggtcacgatcatcgctcagtataaaccagaagagtacagccgattcgaggccaagatccacgaccttcgggaacagctcatgaacagcagcctgggctcagggactgcgtccttgcggagcaaccccaaaaggggtttctacatcagggccctgtttgattacgacaagaccaaggactgcggcttcctgagccagggccctgagcttccgctttggggatgtgctgcatgtcatcgatgctagtgatgaggagtggtggcaggcacggcgggtccactctgacagtgagaccgacgacattgggttcatccccagcaaacggcgggttgagcgacgagagtggtcaaggttaaaggccaaggactggggctccagctctggatcgcagggtcgagaagactcggttctgagctacgagacagtgacgcagatggaagtgcactatgctcgccccatcatcatccttgggcccaccaaggaccgcgccaacgatgatcttctctccgagttccccgacaagtttggatcctgtgttccccatacgacacggcccaagcgggagtatgagatagatggccgggattaccactttgtgtcgtcccgggagaaaatggagaaggacattcaggcgcacaagttcattgaggccggccagtacaacagccacctctatgggaccagcgtccagtccgtgcgagaggtggcagagcaggggaagcactgcatcctcgatgtctcggccaatgccgtgcggcggctgcaggcggcccacctgcaccccatcgccatcttcatccgcccccgctccctggagaatgtgctagagattaacaagcggatcacagaggagcaagcccgcaaagccttcgacagagccaccaaggttggagcaggagtttcacagagtgcttctcagccatcgtggagggtgacagctttgaggagatctaccacaaggtgaagcgtgtcatcgaggacctctcaggcccctacatctgggttccagcccgagagagactctgattcctgccctggcttggcctggactcgccctgcctccatcacctgggcccttggtctggactgaattgcccaagcccttggctccccccggcctccctcccaccccttcttatttatttcctttctaactggatccagcctgttggaggggggacactccctctgcatggtatccccgcaccccagaactgggctcctgaacgccaggaacctggggtctgggggggagctgggctccttgttccgagcccttgctccttaggatccccgcccccacctgcccccaatgcacacacagacccaccgggggccacctgccctcccccatcctctcccacacacattccagaagtcagggccccctcgaggagcacccgctgcagggatgcagggccacaggcctccgctctctcctaaggcagggtctggggtcacccctgccctcatcgtaattccccatgttaccttgatttctcatttattttttccactttttttcttctcaaaggtggttttttggggggagaagcaggggactccgcagcgggcccctgccttccacatgcccccaccatttttctttgccggtttgcatgagtggaaggtctaaatgtggcttttttttttttttttcctgggaatttttttggggaaaagggagggatgggtctagggagtgggaaatgcgggagggagggtggggggcaggggtcgggggtcgggtgtccgggagccagggaagactggaaatgctgccgccttctgcaatttatttatttttttcttttgagagagtgaaaggaagagacagatacttgaaaaaaaaaaaaaa

SEQ ID NO: 9710 - DNA, 547 bp, Homo sapiens
ctgtgacagccgcggcaggaagcaggcgggcgctccccggccacaggcctgttgttctcggaagggagaaagcaggacatttccccacgtaactcccagctctgggcctagagtgcgtgcatggcgaagtccccggagaactctaccctggaggagattctggggcagtatcaacggagtctccggggtgagttgctccaaacctctgtccctagccccgaggtgcccagggcctagtgggcgggagcagaccaggtgcgtttcctaacacctgggttctgccccgtccacgctacagaggagcaagatggatgttgctgtggtcttgaggaggatgaaatagtttgatttagtttttacagttaagcaacgatgtttcctcagattcccgtagttacctcaatcaactccttgatcttaacttggcatctttctcaaccggcgacagcagaaactcttggatagctctatgccatttttgttcagttcccatacgttgctatttaatccaataaaagtctgattcacagtttttacacatttaaaa

SEQ ID NO: 9711 - DNA, 415 bp, Homo sapiens
atctgctgaacgttgtgcatctgggggcgcccgtgcagcaggaacactctccccatcacaattcctctgggcacagtggagagccatgagtgggggctgtcctgggggctgcgctatggtgagtgagcccacgccaggagccagttcagcccagcctcattcttctcctgcttctttgctttccaagttctagttcataagcaaccagcacagtacctggaatgtaagaggcgcttggcttataaaagagagaagaaaggaacccctttcaccacgagggacgtcaggcccagctctctgtcccgggcattcatcttttttccggcaattagcttcagctctaatgacctgctgtctgctttatgttgcacctatgatttccagattgtaaagtttgtgggcaaatgtattaacg

SEQ ID NO: 9712 - DNA, 566 bp, Homo sapiens
  misc_feature (1)...(566): n = a,t,c or g
cccacgcgtccgcagcaaagctccatctgtcggcagaggagaagggggaggaggcacggccgaggcaaacgagcggacgcctcgtcgccgggtgccggtatcaccccgctgcaacgccttccagcaaaagccaccgcggcccgggttgcagcagccggacggatgccaaggccacacggcagccacgggggcagccgtcgcagtcgccgtcccacacgggctgcggacaccaagggttgctaatgaagtgattgagaagaaacagtgaacatcctcatttcacagataagacaacatggatcagccttttactgtgaattctctgaaaaagttagctgctatgcctgaccatacagatgtttccctaagcccagaagagcgagtccgtgccctaagcaagcttggttgtaatatcaccatcagtgaagacatcactccacgacgttactttaggtcctggagtagagatggagaggatgcgnctgtgtatttggaagaaggaatttggaaatgctttgtctttataataattttacctttttgtgaaanttcctaccangagttcc

SEQ ID NO: 9713 - DNA, 503 bp, Homo sapiens
cattcacacataaaaaaatcacatcacaaaagggaagagtttacttcttgtttcaggatgtttttagatttttgaggtgcttaaatagctattcgtatttttaaggtgtctcatccagaaaaaatttaatgtgcctgtaaatgttccatagaatcacaagcattaaagagttgttttatttttacataacccattaaatgtacatgtatatatgtatatatgtatatgtgcgtgtatatacatatatatgtatacacacatgcacacacagagatatacacataccattacattgtcattcacagtcccagcagcatgactatcacatttttgataagtgtcctttggcataaaataaaaatatcctatcagtcctttctaagaagcctgaattgaccaaaaaacatccccaccaccactttataaagttgattctgctttatcctgcagtattgtttagccatcttctgctcttggtaaggttgacatagtatatgtcattt

SEQ ID NO: 9714 - DNA, 201 bp, Homo sapiens
ctcatctagcccatcgtgggtcagcaccctcatcaagtgcctgcctatcttctgcctctggctcttccttctggcccatggcctgggattcctgctggcccaccccagcgccacccgcatctttgtggggcttgtcttctctgctgtaggtgacgccttcctcatctggcaggaccaaggatacttcgtgcatggtctgct

SEQ ID NO: 9715 - DNA, 257 bp, Homo sapiens
  misc_feature (1)...(257): n = a,t,c or g
ctggacaatgtcaccttctcctttaagcagctggacgagaactatgtggccaacaccaacgtcttctaccacattgagggcagccggcaggcgcttgaaggtcatcttctacctcgacagctaccacttctccaagctgccctcccgcctggagggtggggccagcctgaggctgcacacagcgctgttcacgaaagtgctggagaacgtggaggggctgccttctncaggcagccaggccgcggaggaatttgcac

SEQ ID NO: 9716 - DNA, 545 bp, Homo sapiens
  misc_feature (1)...(545): n = a,t,c or g
cgcattgttaacaaaatttctttatcagaaactataatttaatatttaagtatctaatttacatgtgacaaggtatcatattcaaaaaattaaatgcaactggaaaactattaaccactaaaaacaataccaaacacaacccaaacatttataggaaagcaatagctagaatttgaattggaaaaaatgtttcatcatatttggctcattaaacaaagcatccattatagcttggaaaagagcatctcttctaattcatcaaacgtttactctttatagcatgaataacatttaaagatagtttcattaactgtatatgcacacttgtgtatatatattgtgagacatacactcgtgtgttcatttaaagatattgtatctactgataactggctgaactttgggaaggtgctgaaatccacatttctatatgtcctttgacccatttaataatgtctttttaaaaacagaaattacataaaatactctgttttttattaactgaatattttcttaagcatnataatagacaatgaaagaattgc

SEQ ID NO: 9717 - DNA, 851 bp, Homo sapiens
  misc_feature (1)...(851): n = a,t,c or g
tttttttttttttttgctcttctgcaattcggtgttttattctttccaaatctcaggcttatgcacaagatggaagagcactgttaaaataaaaaaatggacctaaagtggcttggctgacgtggctagcgggccactgagccgcggggtcccgggtcccaccctgctgtggggggagtccctgggccctggggctccttggcactgtgtgacctgtgtgcaccccaggtgaccaggcgccgggacccctgcagggcagagcaacagggcaggggttggccctgcggggagagtgtctccagctgccgcgcacccgcaacagcccgttgtcccctcccgggccagctggtcttgcagccgtcctggcagagctgggggcagagcccgcagtcttgttcccagaggtctggagttgccgcaggtggtgttgcggtgcctctgtgcctgatgacccaggccggggctacctggctccggcaccacactcagagaatctgctcggtgctggaggccgagatgtccaggagccgccaggccgcgtaggggttgagctcgtcctggtctcggcagagcgcccacacgtacagcatccgcagcaccttgtccgggtcaccctccaccacctcgcctttggggttcctgaccaccatcaccagctgtgcctggaaggtgatgatcagcaccggcccctgctccatcatcttgcccatggccaggtcgacgttgtcaatgtctaggatgcgagaatggaactggagacccagtgccttggcctgctggatggggtggncagctggctgtaagtagcttcatagcaccagtctttgagaatgtcaagctctccagaaatg

SEQ ID NO: 9718 - DNA, 1264 bp, Homo sapiens
agctctgcagcccacatgtgctgaccacagagctggtgtctggcttccccctggaccaggccgaaggtcagccaggagattcggaacgagatctgctacaacatcctggttctgtgcctgagggagctgtttgagttccacttcatgcaaacagaccccaactggtccaacttcttctatgacccccagcagcacaaggtggctcttttggattttggggcaacgcgggaatatgacagatccttcaccgacctctacattcagatcatcagggctgctgccgacagggacagggagactgtgcgggcgaaatccatagagatgaagttcctcaccggctacgaggtcaaggtcatggaagacgcccacttggatgccatcctcatcctgggggaggccttcgcctctgaatgagccttttgattttggcactcagagcaccaccgagaagatccacaacctgattcccgtcatgctgaggcaccgtctcgtccccccacccgaggaaacctactccctgcacaggaagatggggggctccttcctcatctgctccaagctgaaggcccgcttcccctgcaaggccatgttcgaggaggcctacagcaactactgcaagaggcaggcccagcagtagggctgcgggccacgcccaggccggctccgcgggaactctctccctcagacaggccaaaaaccagtagcgaggtcgtggtgatgctctttttaactcctttgcccaataaggggggtggctgcctggagccccgtagccagcgctttccacggtttctgttgctaaatggttgtagggtgagaagtgcaagaatgaagatgaagccccactgctcggtcagtctgcctccgtgtgtcctctgaaataagcagatgaagatgaaagggcaactttgttttcttctttttcctgatgtgaatgttaagcagaagggagagagtccttactcccttccaatctctgttcagtgcaaaacccagaaacatgaacagatacgattgtgggatttttatcatctgtgtagtaggtgtgtgtatgtgtttctagagtgagatttgtgttttctgcccttttcctctccagccgatgggctggagctgggagaggtgctgagctaacagtgccaacaagtgctccttaagcctgcgaggcccaggcctgtggggctggttctcacctttgacagctgaatgttcctaaagaactgctgccccacagtgagggtgggagcagcggaacagggaatgc

SEQ ID NO: 9719 - DNA, 220 bp, Homo sapiens
gcgtctggagattaaccgagccccaagctttggaactgatcagaaaatagactatgatgtaaaaaggggagtgctgctaaatgcgttgaagctactaaacataaggaccagtgacaaaagaagaaacttggccaaacaaaaagctgaggctcaaaggaggctctatggtcaaaattcaattaaaaggctcttaccaggctcctcagactgggaacagcag

SEQ ID NO: 9720 - DNA, 414 bp, Homo sapiens
  misc_feature (1)...(414): n = a,t,c or g
ctcgtgcnatttcggcagngttggaaacgtgggctttctccaaaccaaggcctgagtttcctgtaagggtcctctgtttttgattcacccaaaagtctgcaaacccccagcatctctgctctggccagccctgatctgaagcctgtgtctactaagagggatgcccagtgccccactgggcaggacgggaagcctagcctgggccccctctgtgcacacagttcaggcctgcccagcttcttatgggcaagccaccatcccactctcgtctccctgagctgtctggttctgcggacccaggaagggccaggctggggccctgcttgtgtttatcctcggctgctgtcttcccagcaggccccaggcaaggaggcttcccaactgctgctgctaccgggttctccacagatccct

SEQ ID NO: 9721 - DNA, 1147 bp, Homo sapiens
actgaatggaagagtcaacagcagaaactgggatcagggagtaaaaagcatattatgggacaaaacagatacatgatgtgcaaaacactgtctgcaatttaaatgtgatgtgatggaatttgggagccattacaaatctgatttaaagagaaggaactggcccaatgatgcccaagcaggaggactcctgcttctgtggtcacttatccagagaagctgacaactagtgagagcaagagttggtttcatctggcatttcccccactatctctggtggcattgtcctagggcagtgaatgcctcaaaaggcaggcagcattaaagagaacacaatggatggatgagatccaagagcgaaccccaaataaatgagagtttactacatattaaaaggtacaactttagtttataaaaaattttactataaagattttcataccttttctaataggagcttggatctttttcaagtccatctgcttttccctcctttcatcaaaactgatttttaaagtaacaaactaggttagcaaaatgtaaatattttcagaaggaaaaagtgctgcaggagccatcagatttgtataaaggaatacagctccctctatatatgttattattttggacagctacacaatcaaggaagaatatacatgtgtgtatatacatacgtatatatagatatacgtatatatttgtgtatacatattttttttttcaagaagagctgtcttgctagtatgctcagttttctgagaggcctcagcaggtcataaatttaggtttgccatgggcaaactacttggtcccaacatgaaatatgacaatcaatttggcataaaagaggcacacgggaacatctgatggactaagaaataactattattaatgcaactacaaatatgaatatcttattacacaaacaggaagaattacgtatttttacagggtattggtgagcagtcaaaaagcgtggcaaattacctagaagttttaaaagttttaagtgatcaaatatttgcatcaaatataattccacccaataaagaactttgtatttaaatgtttttactaaaagcacaaaattaacctttgctctcctgtaggtaccccacctttgtccatacagaagatgcatgtgcctatc

SEQ ID NO: 9722 - DNA, 454 bp, Homo sapiens
gccacaagctgatggttactagaactaggtgtctgaagtttaaaattctacacgataaaatatcctaaaaaatttgtgtcacagaatttcaatagcaattaaattcaggaaaagatattcaaatgtcttaatagcaattaccagataataaaaagttattgtaaaagaaaacctttgtgttacagattttcactgaattcagacttataaagaattatgcaaatgtatgtaagagtaattattgattaatagattaacagtatttaggaaaaccctatgatgtcataaaagttaatggaaactgtatacgattacagtaagtaataaaattatgtcataaatctttccatactaaaattgttgttttcaaagaagtgaacttcattgttaacattgcgggcacaaagagtttcatcttctgaccaggatggacacctatgtcaatgaaaaaaaa

SEQ ID NO: 9723 - DNA, 429 bp, Homo sapiens
ccaactatgggcagttcagtaatggggacacagatggaacgtgatagggacaatctgcttttggtatgcagggtaatcctttctttaacccacagaactttgcacagccaccaactactatgaccaatagcagttcagctagcaatgatttaaaagatctttttgggtgaggtgtcttacttctattttgaaggattatttcagtttcaatcatgggtgagctgatttacatctttatatagttggcttggaggaagtacttctatgggaaagtgaacagttctgtgacaggaaacatctctgtccatgccagcatagtagttgtatggacttctaaccagttgagttttttaaagcattgaggattttttcctcttaccaactcctcttcagggttttaaaagacccagccccttcccaatctcaaag

SEQ ID NO: 9724 - DNA, 225 bp, Homo sapiens
cgcttggctatcaagctcatgaccaacctgggcgctgggtcgaggggccttcctgggctggggatacgggcttctcggatgagcggcacggggacgtagtggtggtgcggcccatgcgggaccacaccctgaaggaggtcgctttctacaaccgcctgttctccgttccttctgtctttcaaaccagccattggacaccaagggcccctggaaaaggccagcatc

SEQ ID NO: 9725 - DNA, 85 bp, Homo sapiens
ctcggccagaaatttaaggagttttaaaggttagcattgaaaagattactttccagaaatcgagaccaccacagttccacaattg

SEQ ID NO: 9726 - DNA, 729 bp, Homo sapiens
tttttttttactgtgaaattctaaaatcatatttattcaccaattcacagaaagtgtcataacgaccaccaacatgaatcagtttgtaggcatttacaagccacagctgaaaataaaaatctgtctgtgttgaataggcatttaacaaattacttgaaaactgcaagaatcataattattataaatttaaagtttgtgattcaaacatgggtaagatcacagtcatggggagaagcccaacagattcctgtgatgatccttattttcttcctatatctttatatacatagagactctcagcgcccctcactctgtgtcagtctgaattggatatgacagctcagttaggcctgagagaggattctatgaaaaggagtggggaggggaaaggacattttctctgaccctctgtggcctgggcaaccttgttgactgagaagacagtgcgctcttctgaaattagattcaattttctataaattcatacagtcccttcctaatgagatactcccaaagtctgcattgtttcacactcatacacaatagtatatttatcaaataaacacattttctagactaaaaagattcattctttgaggcagcttgaagagctcagaagtctgatacatgtcaggtacacactggtccaccgctggagcaaagccatccactgtgggagacaccggccagactggcagtaatggcccagacagtagcagtgattgaagg

SEQ ID NO: 9727 - DNA, 2541 bp, Homo sapiens
  misc_feature (1)...(2541): n = a,t,c or g
ggaaggtttaaagaagaagccgcaaagcgcagggaaggcctcccggcacgggtgggggaaagcggccggtgcagcgcggggacaggcactcgggctggcactggctgctagggatgtcgtcctggataaggtggcatggacccgccatggcgcggctctggggcttctgctggctggttgtgggcttctggagggccgctttcgcctgtcccacgtcctgcaaatgcagtgcctctcggatctggtgcagcgacccttctcctggcatcgtggcatttccgagattggagcctaacagtgtagatcctgagaacatcaccgaaattttcatcgcaaaccagaaaaggttagaaatcatcaacgaagatgatgttgaagcttatgtgggactgagaaatctgacaattgtggattctggattaaaatttgtggctcataaagcatttctgaaaaacagcaacctgcagcacatcaattttacccgaaacaaactgacgagtttgtctaggaaacatttccgtcaccttgacttgtctgaactgatcctggtgggcaatccatttacatgctcctgtgacattatgtggatcaagactctccaagaggctaaatccagtccagacactcaggatttgtactgcctgaatgaaagcagcaagaatattcccctggcaaacctgcagatacccaattgtggtttgccatctgcaaatctggccgcacctaacctcactgtggaggaaggaaagtctatcacattatcctgtagtgtggcaggtgatccggttcctaatatgtattgggatgttggtaacctggtttccaaacatatgaatgaaacaagccacacacagggctccttaaggataactaacatttcatccgatgacagtgggaagcagatctcttgtgtggcggaaaatcttgtaggagaagatcaagattctgtcaacctcactgtgcattttgcaccaactatcacatttctcgaatctccaacctcagaccaccactggtggcattccattcactgtgaaaggcaacccaaaaccagcgcttcagtggttctataacggggcaatattgaatgagtccaaatacatctgtactaaaatacatgttaccaatcacacggagtaccacgggttgcctccagctgggntattcccactcacatgaacaatggggactacactctaatagccaagaatgagtatgggaaggatgagaaacagatttctgctcacttcatgggctggcctggaattgacgatggtgcaaacccaaattatcctgatgtaatttatgaagattatggaactgcagcgaatgacatcggggacaccacgaacagaagtaatgaaatcccttccacagacgtcactgataaaaccggtcgggaacatctctcggtctatgctgtggtggtgattgcgtctgtggtgggattttgccttttggtaatgctgtttctgcttaagttggcaagacactccaagtttggcatgaaaggttttgttttgtttcataagatcccactggatgggtagctgaaataaaggaaaagacagagaaaggggctgtggtgcttgttggttgatgctgccatgtaagctggactcctgggactgctgttggcttatcccgggaagtgctgcttatctggggttttctggtagatgtgggcggtgtttggaggctgtactatatgaagcctgcatatactgtgagctgtgattggggaacaccaatgcagaggtaactctcaggcagctaagcagcacctcaagaaaacatgttaaattaatgcttctcttcttacagtagttcaaatacaaaactgaaatgaaatcccattggattgtacttctcttctgaaaagtgtgctttttgaccctactggacatttattgacttaattgcttctgtttattaaaattgacctgcaaagttaaaaaaaaattaaagttgagaacaggtataagtgcacactgaatagtctaatctacatgtaacacatattttagtgtgattttctatactctaatcagcactgaattcagagggtttgactttttcatctataacacagtgactaaaagagttaagggtatatatatcatcactttgggacttggtagtattattaaaaggttatttccttcactgtcaataaaagtccaaatgtttagcttaggtctgagagtcaaacaatgttaaggattgtcttaaagttccttagccagcaaaacaaaacaaaacaaaacaaacaaatgaaaaacgtttaaaaagaagaagaagaagaaaaacaagaacaagcagcaacagctgttttgttggggctatagatttaagttaggcatagtcaatttcagaataactaagagtggaatatatgcatatggtgaaattataaccttgcccttttttatttgccctctgcgatccacctgctttttagaagtctgccgagtgagaaggccacagtatctcatggctgtttgcattacagaactgcagcttttctactctgaaaaggcc

SEQ ID NO: 9728 - DNA, 1029 bp, Homo sapiens
  misc_feature (1)...(1029): n = a,t,c or g
agtacactgtgcactcttctaggtgtaagggtatgcaactttggatcttaaaattctgtacacatacacactttatatatatgtatgtatgtatgaaaacatgaaattagtttgtcaaatatgtgtgtgtttagtattttagcttagtgcaactatttccacattatttattaaattgatctaagacactttcttgttgacaccttgaatattaatgttcaagggtgcaatgtgtattcctttagattgttaaagcttaattactatgatttgtagtaaattaacttttaaaatgtatttgagcccttctgtagtgtcgtaggggctcttacagggtggggaaaggattttaattttccagttgctaattggaacagtatgggcctcatttatatattttgatttataggagtttgtgtctgggtcccaggaacatctactggggatgactgttaggcagcttgtgatgatgttttttaaaaaacctaagtaacttggggagacagagcatttcaaacccatatagacacctatcatacctgtatatcccctaatacatggaacataaatttcatttcagctttatgcattaatgtattgaagaggcaggctttttttccagtaataatactgtacatctaaggttgctattcagtaaaactaatagaagagataattattgaataccttggaatatgtagtgagaagaggccaaatttttcatgtttgtgagcatgtctttcagatactcgctaatggagaaattcactttagacctctagaccccaaaaccaagttaggcaagtgacaaaaagtaaattattaatagtctgtaaagtgggatgctggtcttacaaagctcctattcacatggaaccctatgggttaattaggaaaggaacttgactgttctccaggaaaagggggatggggaaattattaactatggtatccttctttttcctggtaatttgggtccacaggattagggtntttccagtttaggtcttattcccagtcttnggggtc

SEQ ID NO: 9729 - DNA, 899 bp, Homo sapiens
cttacaaacaacacactttttgctcctgagaagatggtaaactgatcaactatacataagcagcttggttagaaaaagtgtccttaacaaggcttgcacagaaatctggaggcagtatcacctaacgaccaaacctggaccacccaaaaagccgaagaccccttcaagaccatcagccttagcatattgctatcactgcgcgcaaaaaggccattatggacacgaatgtccagaaagagaagtgtatgacccgtctccagtatctccattcatctgctactatgatgacaaatatgaaattcaggagagagaaaagagactaaaacaaaaaataaaagtactcaagaaaaatggggttatcccagagccatccaagctaccttatataaaagcagcaaattgagaacccccaccatgatattaggaaggggccgtgcctcatggaaaagcaacaggtggcctcaagaaaataaagaaacacaaaaagaaatgaagaacaagaatagaaactgggagaagcacaggaaggctgacagacatcgtgaagtggatgaggattttcccaggggccccaaaacctactcttctcctggcagttttaaaacccagaagccttctaagccctttcaccgttcatcacattaccacacgtcaagagaagacaagtctcccaaggaaggcaagaggggcaagcagaagaaaaaggagaggtgctgggaagatgatgacaatgataacttatttcttattaagcagagaaaaaaaaagtcttaagccgtcaggcagcctctgatgtggcttttcattgttcatttggcctttgtgtctataaccttctggcactgtgtttattatctatgattaaataaagtgagtttttggttttgtttttttaaaaa

SEQ ID NO: 9730 - DNA, 383 bp, Homo sapiens
gcagggagtgtctctgcactatggaaactttccctcttctagagcggattgggagttgcctgtattatgcctgaaccctccttgaactcatggtcctggggaaggcgtcttggaaccagaaacagcaacaggaaaggagcctccctctgaagggtaggatgccggcctgaggccttccctcttggctctcccagggcctgggctaccccgaggccccagcagctgctgctgtggctgtacttgcttttaatatttcccatacatggctgttgtccaagttaagtcaccaaatggtgctagaggggatggcagagagcagcttgtccagctcctctccatgacccggttaacacacgagttaaacaggcctagagcttgtctgg

SEQ ID NO: 9731 - DNA, 2653 bp, Homo sapiens
tcagaattttgactttaaagtctctttctccagcagcaaatcagcatatctatgttgaagttccttttctctttcttgttgtcgctgaacgtcttcttttagacactctagcctccggggaatagcagaatcttcatgtttcttgagttcttcaaaagtgcgtaactccaagtgagcctgttcaatttggtcccataagtcattcaactgtttcatgagccccatagcacgagactggtaacccccaagcaaaattttcatcttcttttccatctttgcagccctcttggcttctgtcgtcatgtgacccctgtttatctcgagcctcttttcaagtgattcaattctgtcctttttactagccagattggcccgtgtgtagcggctctgcccaggaagatataaaacttgactgtagcattcttcccacacctggttataagcttcacttgagagctctccatggctcattccttgtttaaccacttccatctcctgcaccaaaacatcctgggcctttttcagctcttctttggagaacttttcataaggattatgttccagataggtaatgtgctctgaattattggtaccaaaccctacagttttgccttttttatttccagatggttcataagggtgatgtagaaggtcataatgaagcattgtgatcatttcttttttgattagttcttcacttttctgtaaatctgttaaaggcggttctacatttaagggtcttagaatagtttcatttacttctgatggtcttggcagatctttctggacagctttatgcattcgtttcatttcctttacacgctctgcatctcgtatggcctgctttcgagcatccacatcagcagcatcttcaatgtaagtatcatctatttcacgttcttccagctccttctcggcattttctggtagaacaatttcaaaatcattcttaggggcaggaaggcccaacaaccctaaacggagatgttctcgggattctctttccatctgcttcacgtaagagggatcactatagtctgccattccatcctcgggattaatgtttaacttgtctcgaagaggagttctacccggagtagagttaataactggtttgggagttgttccactccggggagtcagcccttcagctccattagaaggagtcctgaatggagtagagagaactgtgtttggagtctgtacaacttgtcgctgtggagttacacctgagaagtcactctcatgcaatggggtattaagtccacctttcaatggggtgtccacattggtgagggccatgaggttctgggcttcctgcagaattctgtcctgggaagctggtgttcgtggtgttctaagagcaacgctgttgttggtgacattgtactcagacaaaagtgtaactggaagcagaatttgttatgccagattcctcggcagtttgacgtgcaatttcactcgccttggcctacttttacaacttcctggagttctgcatctgcaaatctgcaggggcaggaagtactagtttgcttctctttttagtaaattcagaaacaccactagtttgaagaatagctgatggtaaatcagattcttttttccttttcaaatgctgtttgtctttttttctatctcttccttctttttcagatcttagctccccatcaagatcctgttgtcttaatttcctgaaatctgcgtcaagagcttggtagttttcctcagaagtatcataaaaaccaagggcaggctttttttcaaatgggatttcggcattataatcaactcctctcttcctttttcttttcttctgaatttctatgccagctgctcgaagttctcttcttttttggagggcagcaagacgtcttgcttcttccaattgtttctctcttgctttcctcttggccttctttccctgagtattagccaagcgggctctggcttcagaaagcatctcaagttcatcctcatccatatcaattggatcaggccgcgctggttttgtttctggatttggatctatttctccaggtttaagttttcgtggatcatctgttgtttcctcttcattgtctctttgggcagctttatccagaagaaattcatagtgttctaagcactgggccgctgttcttccaatgattggagcaatggtcctccactgagttggcatcaacttggccaagtgcaagagtttttcctcttcttctctggaccattctgtcttcttaatgcttggatccagccattcataccatctggctttgcactgctttgctgattttctatgcagcaatgaggcaatcctagaccactgatttttcccatatttcattaccgctgctttcagaatttcatcctcggtattcctccatacgccccccttgatcataattcgaggcatcttggcggcagggtgtctcggcaagcagccgagaggagcttcagagaagtagtaacagcgattgggccaccggactcaaagccgccacttcctccaagcgcgaccttctgctttgaagatctgcgcaagcgcaaggtaggagggggcgcagaatagcaagtctcgcgagatattgggtggctgaaagggaaaaagtgtcttgtggaagctcagctgcaggaagactaacacaaaaccatc

SEQ ID NO: 9732 - DNA, 839 bp, Homo sapiens
tgaaagacaacaagagtcccctgcacctcgtccagatgccacctgtgattgtcgagacggcccgttcccaccagcggtcttctagcgagtcctacacacagagctttcagagccggaagcccttcttttcatggtggtagctccagaggcaggcagaggaaatattgtcagagactggtgggaggaagcctggggagtggggtgcaggaaaagccagagaagccggtggagagcagcacctttaagagccctctctctctgcttgccaccctgctcagagctttccacccacagggagaagcacaatcaggaacagtgagtgctcctcgcccttctgatgtgggggaggctggagctccatgcacgtagtccagatgcctgggaaggaacatctcccttccagcatctgctggtagcaggctgggacagtcccttccttccccgaaaccctgctctattgcaattccctattatattctgcatcagaaaaacaaacaaaacaaaaacaactttaaatgcttgtagcagaaccccgggtcatctcatgtcagaaacctttaatccaggcctaaatttgcatagacctgacattcagctgccttgcagttgcttcctcccatgagccaaggtggtgtcagagggcaactggatgactcgcagtaccacagcactgggacagacagaagccacacctttcttttgggtttttgccaagcctcctccatctcccatcagtgctgtgggctggctgcaagctcgaaacagttctcctggaagggaggtttttgctttacccccgccagcacttccgcacacaatcatagagaacctctctggct

SEQ ID NO: 9733 - DNA, 807 bp, Homo sapiens
tttttttttttttttagcattttatgacttttattttacatgtcgccaacgtttgtacaacatacagtggctacatctaaaactttgagcatttttttatggcgcaaagagacagaaaggttaatgacacacttaactgttacagtgactttgggtagagccctaaagacagcacacgctccagagggcgggctgagtgttgttcacacttgggtcctgaatcgctgttgtaaggtacagagacacactttaactggggaatggggtccccacacagtgatcgccccacgggagggtgacagaatatgccaggaattgtcttggacatgggccccagtcaccacaatcagatggcttatttgaaacaaacaaaaaaaacccttgattacgacacaccaaagctgttccaatttgtaaaaaactgtagttagttattacattgcaatgaaatctctttaccaaatcttgggccagtgttttacctggatagtgcttacattataaatattggtttttgcccttagtgctaacataagaaaaatcagttccttgtatactcaataacagagcttggaccagccaatgctggtctatcactcatggctataatgcagccgcacaagaattgttcaccatggaatgttttataaacctgttcatattccagagagacaaagactcaaaactacaagtgcaaagttgggtagagagagctgccagaaacactagctcattaggcatagaggccacagcaaatcaaattgttccacaaactcattcttcacacaaacatttaaaacactatgc

SEQ ID NO: 9734 - DNA, 1294 bp, Homo sapiens
  misc_feature (1)...(1294): n = a,t,c or g
tttttttttttgtgtaaaaaggcttcttttattttaataagtaaaaatggctaagcttccaaaagttcttaaataggatttcagagggaagaaaattcgagagaccagcgagccaggcaggtgagcgagcagcagaatcccccacccgctggctgcctctgccagccataaacacagcacggccccgtggcgggaggccatgcgcctccgcacaccccccagctgcgggaaccctccttgaaggagaggggcggggagggctgccattggtgccaccaacccaccccagtccccatggttcttgggtctgcccagaggctcctcgcccaccccctaaggagggggctggccagctctgcaagctgaggagaggggccgagaaagcctgggtgagaggcccaccctcctccacactcccgccctcctcacggggcccagttcgctgatggcccaggcctgccaggaagagcagccacccccgcctttccgcccatgcaatttgcactcagagccacagccgagagacaccgtttccttctgaacatgtttctcatctttgaggggagacagggcagaagaagagcctccactctcgcctctacctccgggggtcctggcgctgcagcagggacaggccagtgagggcccagcttcaggcccagcggggtcacatccgtcacacaggcagtggccgcgacttccctagagactctgcagccccagccgtcaggccgagggctgcagcattctccggatggatccagggcggctactggtcccagagctgggggctgagtgggcccgtgncgagggctgtggcgtctgacaagccggctcccactctagatgctcctggcttgaccaggacccaagctctgccctgcgtacgccaggccccagctccacagagcgcaccctctcagcaaacttgagggaatagagcgtctcgctagtgttcttctccacgggggacacctgtaccaccatgagggtcttgctgtcaccactaagcgaatcctgcagcaggtaggtgagcttggagttgcggaagggcacgttggctggtcgggagcgcagctgagcaaatgacgtcccccagagctgacagcacttagttgatgtgctgcgcctccgcaggcggctccctcggcccccgacttgcccacgcgctccgagccagccaagtccaccaggtgttagcncacccgtggtgcggaggcctgtgctgcagtccacgcctcgcaccgtcacgatgagcagcgcgtgcgagcgggagctgtgctcgttcaggttg

SEQ ID NO: 9735 - DNA, 464 bp, Homo sapiens
  misc_feature (1)...(464): n = a,t,c or g
ggttgcctcgtggcacaaaataattgccagagctccagccttcacctcctcattctgagggaaagtcagaggccagcgctggctaggtgtctcctggaagtcttcccaggaagcctcgaaacccttctttttatatcccactggccagaacagagcgaaatggccataccttgctgcaggggaggctgggaaatgtggctgtccagatggatgagattctgttacaggcataaggggagcggggggcttaggcagtgattctctaagtgtctccatccatttcacagatgaggaaacggaggccccaagagaggcagtgantcaccaggggggcccacggcaggggacttgaggcaccaggagccagggtttttcacctggaaccccttaattttcccttgctgnttgatgttgcagttttcagatttttgcaaattccgttgcacccctttgggcttttgaac

SEQ ID NO: 9736 - DNA, 378 bp, Homo sapiens
gtgatggtttggaatataacaagccagttaggcgtataagcttatagtggctaatatgaggatgaaatccgtactcttgtgacacaagtcttcagcggagatgggggatgataggcccaaatagaaagaaaagtggcagacattaagctttgactaacagacaacataactgagagacatggtgtgttgggtggaagggatcctgtagtagatacttgcttgcatgtagatgggtacaaagacaccataaggaaattctgaatgtaatacaaaggcttatttttcctgttgatttatctttttcacacataaaagatgaagaaaaaaataatctgaaatgtaaatcctaaagtgatctgtctagattcttattttttg

SEQ ID NO: 9737 - DNA, 529 bp, Homo sapiens
cttggcctcttacccgcacttctggcagaattacggatccagatcaggagatttgaggagctgctgccccaagtgtgttggctggtgatggagaatttcaaggaacaccactggaaaaagtttttcacctctgtgaaggagatccgaggacagttcgaggaacagcagaagcggctggagaaaagaaaggacaaaaatgcccagaagctccatctaaatcttggacaccccgtacatttccaagaaatggagtctctacacttaagtgaagaggaaaggcaggaagagctggacagcatgattaggatgaacaaggagaagctggaggaatgtaccagaaggaatggccaggttttcataaccaacttggccaccttcaccgagaagttcctacttgcagttggatgaaggtggtcaccatttgaccgatgtccaggttgcaaggatggagccccccaaacagaaattatcaatgctcatacgaaggaaactcgctgggctctccctgaaggaagagagtgagaaaccc

SEQ ID NO: 9738 - DNA, 477 bp, Homo sapiens
cggggtggggagaggcgggtaccgtcactagggcggcggggtgctgttggcgttggcaacggccccctgggacatggtcaggcagctgcagcttcttcgctcaactcctatggggctcagggttcctcccttgcctcctatggtaaccagccatcctcttacggcgcccaggctgcctcttcctatggggttcgtgcagctgcttcttcctacaacacccagggagcagcttcctccttaggctcctacggggctcaggcagcctcctatggggcccagtctgcagcctcctcactagcttatggagcccaggcagcttcatataatgcccagccctcggcctcttacaatgcccagtctgccccatatgctgcacagcaggctgcttcctactcttcccaacctgctgcctatgtggcacagcacgccacagctgctgcctatgccagccagccagcagcctacgccgacaaagca

SEQ ID NO: 9739 - DNA, 384 bp, Homo sapiens
tgaaatacttgttccactagacagtaaggtttcaagaccaaccaaatttgttgtttcgcccaagaacctgaagaaagatcttgctgaacgttggagccttcctgagattgttgggattccacaccaattatccaaacctcagcgtcagaaacagactttgccagatgattatttgagtatggacacactgtatcccggcagcctacctccagaactccgggtgaacgcagatgagcctccagggcctcctgagcaagttggactttctcaattccatctagagcccaaaagtcataatccagagacccttgaagacatccagtcctcttcactccaacaagaagccccagcacagcttccacagctccttgaggaagaaccttc

SEQ ID NO: 9740 - DNA, 1078 bp, Homo sapiens
cttcaacatggccgaagcaagtagcgccaatctaggcagcggctgtgaggaaaaaaggcatgaggggtcgtcttcggaatctgtgccacccggcactaccatttcgagggtgaagctcctcgacaccatggtggacacttttcttcagaagctggtcgccgccggcagctaccagagattcactgactgctataagtgcttctaccagttgcagcctgcgattgacacagcgaatctatgacaagtttatagctcagttgcagacatctatccgggaggaaatctctgacatcaaagaggaggggaacctaggaagctgtcttgaatgccttggataaaattgtggaagaaggcaaagtccgcaaagagccagcctggcgccccagcgggatcccagagaaggatctgcacagtgttatggcaccctacttcctgcagcaacgggacaccctgcggcgccatgtgcagaaacaggaggccgagaaccagcagctggcagatgccgtcctggcagggcggaggcaggtggaggagctgcagctacaggtccaggcccagcagcaggcctggcaggctctacacagagaacagagggagctggttgctgtgctgagggagcctgagtgaggagaccgccagccccagaagcagagggcagtcaaggtcaagagcctgtggtccagcatgcctggcctgggcgggctacctctgagaacggctgaaatggtgcccagtccatcagcagtgatggaatttgctggaggactaggccagagcaagcctcactgccactgtgcctttggggcacccttggggttggacatacaccccctttagattcctctgtttcttctacctggataattcttggccatgttctctcttctctaggttcaggtcagctctgcccctccgcccccctcctgctggttccccagcccttttccctggccctggcttggagaatctgttttcaatctccactgattgcccccttgctggccagcccaggggcctttaccatgttctctccacatccgtaaataaacttccttcactacactgtaaaaaaaaaaaa

SEQ ID NO: 9741 - DNA, 490 bp, Homo sapiens
atgaaccctttaactaaggtgaagctgatcaacgagctgaatgaacgagaggtccagcttggggtggccgataaggtgtcctggcactccgagtacaaggacagcgcctggatcttcctgggagggcttccttatgaactgactgaaggggacatcatctgtgtgttctcacaatatggggagattgttaacattaatctcgtgcgggacaagaaaactgggaaatccaaaggattctgtttcctctgctatgaagaccagaggagcacaattctggccgtcgacaattttaatgggatcaagatcaaaggaagaactatccgagtggatcatgtgtctcaactatcgggctcctaaggactcagaagacatagatgatgtgacccgacaactccaggagaagggctctggggctcgtcccccctcaccaactttgtctgagagctctgaagatgaaaaacccacaaaaaagcacaaaaaagacaaaaag

SEQ ID NO: 9742 - DNA, 1400 bp, Homo sapiens
tgcggccgcaaggagaccgacatgcgggaggcggcgtcactgcgacagacgccggcatgaagcaggcggtgcagttcatccacaaggactccgccgacctgctgcccctggacggcctcaagaagctgggctcgtccaaggacatgcaacctcataatattctgcagaggcgcctcatggaaaccaacctgtctaagctccgaagcggtccccgtgtcccttgggcctctaagacgaacaaactcaatcaggctaagtctgaggggctaaagaagtctgaggaggatgacatgattttggtttcttgccagtgtgctgggaaaggatgtgaaagccttggttgacacaggctgcctatataatctcatctctttggcctgtgtggacagattgggactcaaggagcatgtcaaatcccacaagcatgaaggagaaaagctttctctaccccggcatctcaaagtagtgggccagattgagcacctagtgatcacactgggctccctccgcctggactgcccagcagctgtggttgatgacaatgagaaaaacttgtcccttggtctacagactctccgatctctgaagtgcatcataaacttggataagcaccggctgatcatggggaagacagacaaggaagaaatcccttttgtggagacagtctctttgaatgaagacaacacttcagaagcataactacagcctgcagcatgtctgcacgtgtgcatgcatacacaccgggttgacagattgagaaaactgggtttgaaccaaatgccgtagtgacttgctgtggaccaagtccttccatctaatagaagctccaggggctccttcccattcagacctctctagactatagtctatgcttagagatcttgtctggttatggccattgttttttactactttgatcacttaacttatagaccttttttgacactgccagtctcacttgtggcctatttctctgcttcttccaggaatttgcttttattagtcaagtataggggctgccaggttctgtgtctccatagatatatgtgcttcttttcctatagctaaatgtataataaacaggaacctgacctttacctcctttcagctgtttcaaacaggtgcccaggatacctatgtcttagaattagagtttcttcaaattgattcattgatttctcaagtatggattatgtgaaagagcccagggacattatccattacagtttaactctttcatttaaaggtccagagaggcaagtgaattgtctaagttcatatattaggtcagtgactgaagggaccaagaacgcagacctgatttccaagccaagactcccatgctgcctcatttgtattcaagcctttaacagggagggcaaagaggtgagaatgtgtta

SEQ ID NO: 9743 - DNA, 3280 bp, Homo sapiens
gtgttggcagacagcagcctcgggccaaacaagtgtgcaatgtggaggtgggccttcagacccaggagaggccacctgccatggcggccaagcacagcagcagcggacactgtgttcagaactttcctccatccctagcttcaaaacccagcctggtccagcagaaaccgaccgcgtatgtgaggccaatggacggccaagatcaggcccctgatgagtctcctaagctgaagtcgtcttcggaaaccagcgtgcactgcacatcatacaggggagtccctgccagcaagccggagcctgccagagccaaggccaagctctccaagttcagcatccccaagcagggggaggagagtagatctggagaaaccaacagctgtgttgaagaaataatccgggagatgacctggcttccaccactttctgctattcaagcacctggcaaagtggaaccaaccaaatttccatttccaaataaggactctcagcttgtatcctctggacacaataatccaaagaaaggtgatgcagagccagagagtccagacaatggcacatcgaatacatcaatgctggaagatgaccttaagctaagcagtgatgaagaggagaatgaacagcaggcagctcagagaacggctctccgcgctctctctgacagcgccgtggtccagcagcccaactgcagaacctcggtgccttccagcaagggcagcagcagcagcagcagcagcggcacgagcagctcctccagcgactcagagagcagctccggatctgactcggagaccgagagcagctccagcgagagtgagggcagcaagcccccccacttctccagccccgaggctgaaccggcatcctctaacaagtggcagctggataaatggctaaacaaagttaatccccacaagcctcctattctgatccaaaatgaaagccacgggtcagagagcaatcagtactacaacccggtgaaagaggacgtccaggactgtgggaaagtccccgacgtttgccagcccagcctgagagagaaggagatcaagagcacttgcaaggaggagcaaaggccaaggacagccaacaaggcccctgggagtaaaggcgtgaagcagaagtccccgcccgcggccgtggccgtggcggtgagcgcagccgccccgccacccgcagtgccctgtgcgcccgcggagaacgcgcccgcgcctgcccggaggtccgcgggcaagaagcccaccaggcgcaccgagaggacctcagccggggacggcgccaactgccaccggcccgaggagcccgcggccgcggacgcgctggggacgagcgtggtggtccccccggagcccaccaaaaccaggccctgtggcaacaacagagcgagccaccgcaaggagctgcgctcctccgtgacctgcgagaagcgccgcacgcgggggctaagcaggatcgtccccaaatccaaggagttcattgagacagagtcgtcatcttcatcctcctcctcggactccgacctggagtccgagcaggaggagtaccctctgtccaaagcacagaccgtggctgcctctgcctcctccgggaatgatcagaggctgaaggaggccgctgccaacgggggcagtggtcctagggcccctgtaggctccatcaacgccaggaccaccagtgacatcgccaaggagctggaggagcagttctacacactggtcccctttggccggaacgaacttctctcccctctaaaggacagtgatgagatcaggtctctctgggtcaaaatcgacctgaccctcctgtccaggatcccagaacacctgccccaggagccaggggtattgagcgcccctgccaccaaggactctgagagcgcaccgcccagccacacctcggacacacctgcagaaaaggctttgccaaaatccaagaggaaacgcaagtgtgacaacgaagacgactacagggagatcaagaagtcccagggagagaaagacagctcttcaagactggccacctccaccagtaatactttgtctgcaaaccactgcaacatgaacatcaacagtgtggcaataccaataaataaaaatgaaaaaatgcttcggtcgcccatctcacccctctctgatgcatctaaacacaaatacaccagcgaggacttaacttcttccagccgacctaatggcaacagtttgtttacttcagcctcttccagcaaaaagcctaaggccgacagccagctgcagcctcacggcggagacctcacgaaagcagctcacaacaattctgaaaacattcccctccacaagtcacggccgcagacgaagccgtggtctccaggctccaacggccacagggactgcaagaggcagaaacttgtcttcgatgatatgcctcgcagtgccgattattttatgcaagaagctaaacgaatgaagcataaagcagatgcaatggtggaaaagtttggaaaggctttgaactatgctgaagcagcattgtcgtttatcgagtgtggaaatgcaatggaacaaggccccatggaatccaaatctccttattacctgatgtattcagaaacagtagagctcatcaggtatgctatgagactaaaaacccactcaggccccaatgccacaccagaagacaaacaactggctgcattatgttaccgatgcctggccctcctgtactggcggatgtttcgactcaaaagggaccacgctgtaaagtattcaaaagcactaatcgactatttcaagaactcatctaaagccgcccaagccccatctccgtggggggccagtggaaagagcactggaaccccatcccccatttctcccaacccctttcccggcagctccgtggggtctcagggcagcctctccaacgccagcgccctgtccccgtcgaccatcgtcagcatcccacagcgcatccaccagatggcggccaaccacgtcagcatcaccaacagcatcctgcacagctacgactactgggagatggccgacaacctggccaaggaaaaccgagaattcttcaacgacctggatctgctcatggggccggtcaccctgcacagcagcatggagcacctggtccagtactcccaacagggcctgcactggctgcggaacagcgcccacctgtcatagggacctcaccctggggccagagtgggctctggtctccacagatggctcaacgtttttggacactgtgctactgaaactcccagccacagcatttatagactgcggtgaacatttcctca

SEQ ID NO: 9744 - DNA, 356 bp, Homo sapiens
  misc_feature (1)...(356): n = a,t,c or g
cggacgcgtgggtgtgaatatagcacctttttccataaaaggtgctatattcacaggttccagggatatagcaccttttatggaaaaaggaactttttgtgattaagaatcttgagatagggagatttatcttggattatcctggtggacccagtatcatcacaagtttccttataagatggaggcaagaacgttagagtcagagaaatatgtaaatatagaagcagaggcnnnnnnnnnnnnnnnnnnnnnnnnnnnnnnnnnnnnnnnnnnnnnnnnnnnnnnnnnnnnnnnnnnnnnnnnnnnnnnnnnnnnnnnnnnnnnnnnnnnnnnngtttctacaaaaaaaaaaaaaa

SEQ ID NO: 9745 - DNA, 960 bp, Homo sapiens
tttttttttttatttattgaatgcgtttattttaacaaccaaaaaattctaacagcctaacaatgcacataagttaaaaattaattatcacttagtgataacaaagatagttgatttacatggaaaaaagaacatttacaatatgttaatccttattcacattgttgataccgcaataaaacacaatttgtttttttcatttcacaaaaaaaaaaaaaaaggcgggaaattgtgctttgtcaagaggcactacaagagaaagtttcttcttccaaatagatattatatgacagatattgaataaatagacatatatgcattgtaattcgcaaagatctggcaagaccacaggctaaaatgcccacagattcacttagaaccactgcaaacttggcagtgaaattaaaaaataaaaggcaagacttagcattgaggaatacctaataaatttttggttgaagtgtaaaagataccaaatgcggatgccatcgatagatgaaccaccttgtaagagcttggcaaaatcagtttccattacgtgtacagagtgaccttcagcaacagtgtaagaagacaatttggaaagagtaactcggagatcaggaagcagcaaccatggactttctgattaaagctgcagcatactacagaaataggaaggatggggccagggctaactgcaaacaaccatccttttgcaaaggtatatgacgcttatgtcaagataatttttaaacatcattatttgaaaaagtacaggaaaatgtccctttaaaaacttcagaacttacaatatacagggagaagacatgttgcaatacaagctaattctagctgctcagtaacctctggagtttttaaagggacattttcctgtactttttccaaataatgatgtttaaaattatcttggacataggcgtcctatacccttggcaaaggggtgggtgttttgcagtt

SEQ ID NO: 9746 - DNA, 603 bp, Homo sapiens
gcgacctacctgaggatgatcaagcggagttcgatgcggtaagaatgtgtgctgccacagactcctccggactctgacctttctcccctagacaggtccttccctttctcgggggagctacagcaataagcgggtatgccaaccccagcctgggtggtatataggttgcagggcttgcaaagaccttgctgggcttgcagccaccaatgagcaatggcaggagggagagtcaagtcagcggaattacagctaacaacatctgtttgcaaagccctgattcttgggccttttaaataaaattgaaatatctcaaaacaggtttggagctagtgacttaggcccctgggttctaacccatggaaatgaatcatgaagcctgggcacttgtaataaactgctaccaagaactagactttgaaatatggagaaatactttttccatatgaatatccagtatccattgggcaaggaattaagaaagtgattccaagattttagagcaaaacaaattttaggaaggaatgtaaatatttcacatcagcggatgttagactttggttgcatttttagatccccggattctttagggttggggtaattagg

SEQ ID NO: 9747 - DNA, 340 bp, Homo sapiens
cgtcgacatccttttgtacttgatgctggaagctcttggagaaaaagcttaaacatttcaccagaaatcttaattgagcagcagtcatatcgccacagctttgtgagtacacagctaacagatgcgtcgagacctgagatgtgctcgtttttattcctcctctcccagattggctccagcagaaaagtccctcgtgcacaggcagctcttgtgccggcactacttgaaaacatggctactttctaagctacaaaccattagaaaataactcaaaaagatggcagaggcaaatccacagaaggggggctgccctccacacacacacgcccgtcacccacac

SEQ ID NO: 9748 - DNA, 607 bp, Homo sapiens
gtgacctcagtcacatgccatggtggctatgtgtataccacagggcgtgatggagcctactaccagctgtttgtacgagacggccagctccagccagtcctaaggcagaagtcctgtcgaggcatgaactggctagctgggctccgtatagtgcccgatgggagcatggttatcctgggtttccatgccaatgagtttgtggtgtggaaccctcggtcacacgagaagctgcacatcgtcaactgtggtggagggcaccgttcgtgggcattctctgatactgaggcggccatggcctttgcttacctcaaggatggggatgtcatgctgtacagggctctgggtggctgcacccggccacacgtgattctccgggagggtctgcatggccgtgagatcacttgtgtaaagcgtgtgggcaccattaccctggggcctgaatatggagtgcccagcttcatgcagcctgatgacctggagcctggcagtgaggggcccgacttgactgacattgtgatcacatgtagtgaggacactactgtctgtgtcctagcactccctacaaacagctgtgagtgcgtgggctgagcctgtggttgtgtcgacg

SEQ ID NO: 9749 - DNA, 807 bp, Homo sapiens
aggtaagatcctccggccgagtggtgtctctttctactccaattatatggcgcagggggcatgaaccccagtccttcattcgcagaaaccaagacctcatctgcagcttcttcacttggttttcagaccacagccttccagagtccgacaaaattgctgagattattaaagaggatctgtggccaaatccactgcaatactacctgttgcgtgaaggagtccgtagagcccgacgtcgcccgctaagggagcctgtagagatccccagggccctttgggtatccagtctggttaacatttgcccttggggaatactcctgcacaaggtctcctaccaccttctgctggacctgtgcttgggcatcagcaatgagtatgccttctattgtgctttgtttttgctgacttttctgcaccctgtttcctttggatattcagttctctcaacctcaagattgagacggtggtgggtatgcttctccacttccatatgaccttcatgctgttctggaatatcacatgctacgaggtcatccttcacactacttgtaagccaagcaaatgatactgtagattgtactgcctttatctgcactgcttggaccctgtttattcccagggcctctgaactggttgctgtcacttggatttctagctttgggagcctgttccacctactcagctctgcattgagcagtatgggcacatgccctgtggacagttactggacgttaatgaactcagaggagaaaagcagtgagccacttgttctgtgtgatttatggtacttcattgctcttcctccac

SEQ ID NO: 9750 - DNA, 966 bp, Homo sapiens
  misc_feature (1)...(966): n = a,t,c or g
ccaaatcagttcctgaatataaaggaggaaatgatgaggatgtactgaggcaacggggaagtatagaaacatccaagacaaaagccaagggatgcaaaggcagagacacaggtgctttttggtgacccagtggatatggcaaccagtgtaactgccatacaagaaaccctaggagcaaacccacaccactcattctcagctaagagattttacacaggcaaacgtgtcttaaaccatctataaatcagttattttatatgacagtcaaaaccttagaaaccttaggatcattatatctattttctgcctattaattgctgtgaggtttgatttgaccaatctgggcaatttattcatcagcttcccttgaagtgcaccagaaaatagaagaaaggtgtgtggagacttagggtattttattacatgttttcatagtcttaaatagtgattaaatttctctagaaagaagttaacagctcattagaaaagttttaacctgtgaaataagtatttttctcaacattctttaaagtttttatataagttaacactaggtaaacattctgcatactagaagtcagtttattacaaatacatgtcaaaaataaagattatacaaggcaccaaactactagatttggcattaaaacaaatgtttatttctaatcacaacaaaattataatgaataaatgttcttgctttgtatggaaatacaattctttattaaagttaacagaaaggaacttgattcgtttgtaccagtaaaagagagaaacacacaggttaaatatcttcttgtggggttaaggggtagaacctatctngccttcactctcaagataacgactcaaattaagctttttgagcaccactcttgtggggacacacatacgctggtctaggantgaaatcttcgtggtctcaattctaggatctactatgccagtttctctctggctttaggc

SEQ ID NO: 9751 - DNA, 1123 bp, Homo sapiens
attaaaaactgcccattgtaacttatttcaggttaaattaaaccaaggagtctgattgcaggaagggaagagcatgtaagaaataagtttttttaaagtgttattttgtataaatgggaagaaagattcaattaagttattaacatttgggacctggataattatatcagagtatgtcagtccaataaattatttaactaattaaaaaatagttgcaaagcatttgagctgtggttgaggaagtggtgtaaaagtgcatccattaggaatgatgcactttcattaggatggactcgtgtctgattagaatgtcagttgatcagctagatttgtgtccacactaccaggtttcacaccccctttccatctgtttgatacagtattatagatataaatatatatatatttctctgtggccatttgtgatacttcctcatatacttgaatattatacttctttattcacagtatctgtgtctcctgcaccctttggtgttgcaattttagatatgtgaaagtagatgttagcagggttctctccctatttaaaaaaaatacattaaaaaagacaaaaaattttagcatgaagttgctttctgtaacaactcaaagccgtaaccctgttttagtgccagatacaagtctctcccgtgatgctagacaaaaaattatttttctttgctttcaccaacatggagtttgtgggggtgggtccagttatacatgaaagggtttacagattgttggtttaagattatggatttatctcatttttaatcacaggatagtttggggtttattcctattattattcatgaaaccgacttaagattttttctttatttttctttttttttccatttgctaaagttgaaagttgaaactaactataatagtttgaaacatgttttctcatttttccaaatagtatctgtttattaaattctctaatagaagatgtttgtctttcttacccaaagtaaagatcccctgatcagaaagaaaaaatacaatactttgggaagctatagctataaaacacttgagacacagatatctaaatcagtttttttccaagactccaacattgcactctgtaaagtaacacactgtgatctagtat

SEQ ID NO: 9752 - DNA, 654 bp, Homo sapiens
ttttttttttttagcagttaggtgacaagcaattttattttgcaaaacaatcactatacagcaacaaatacatttgcaaatttgattgaaaaacatgaactaactacaaccagccattgaagaaatgcctttctatggtaacaggctctagaattatcagaagaaagaaaccccccacagatttgtaacagtgtgttggaacctcggaatcccagcatacagagtatactttttgttgatttttttttctttttgctaaagttgaagtagatttttatgattgacattttattttctgagtttgaaaataagctttttcctgcagagagtcttggccttcacctacacacccaagctaaaaatcctaggtgtaaaaaaactcaaaacatcaatgcttattttagcacgtcaatctttgaaggaatgcttaaaatttccttaccaagccatgaatctactttatctctagtatttagaccatgagtagtttattttccttattgtggcttgaaaaatagaagaaaactgtaattgcagctatgtcaaaatcaaccacattcaggttatttccttaataaaatactgatggaatgttatatattggctgattattccacgcttgctgtgcacatcttgagaaataaacaagtgact

SEQ ID NO: 9753 - DNA, 765 bp, Homo sapiens
  misc_feature (1)...(765): n = a,t,c or g
tttttttttttttgcttctttttcaaatattttattaatctgtttggccaaacaggtaatggaaactgagaataataatttgctaaaaagttcaggtcatgaatgcccctttcccccaggaaacagaagactccatggttacagaatgcaccattgggttatgacaacgtttcaaaataatgtttccatttcatatgtaacaatgtaaacttcaaaaatagtaaactctaacccctgaccctctttacagatctatcacagatagaattttctggcagacctaaattgtgtaagtaaacagcctggtgcttaaaagtttcataaaaaggtttacagatttcagtaaataatttttcagtcttggtcaggaagtaaaagcagccagcaattcccctcctgcacaatgtaccttatatgggtattgtacaccgcgggccacgctctgtatacactggccatcagctctgtcatttttttgtacacagacatacacatatatagagagttttatttgtttctaaagatttttacatctaaattataagacggcgccaagtgacgtatcacgtcacctcgcttcacataggtaaagacgaaaattctgtagaaggcactgtgatttctcttgcatgatcttacacagacacgtgagagcaggccagccggggcttggacttatcttgtccttcctggtacctggcacagacctgtcctctgacagtttttgatgntcatcatccagttctgccgggcctcttcacatcc

SEQ ID NO: 9754 - DNA, 397 bp, Homo sapiens
  misc_feature (1)...(397): n = a,t,c or g
tttttgtagaaattgccaggaactgattttctgcccttccttcctaacagacaagccttccagccctccctgacacagctcttccctatctcctactctctggtcatcaagcttttagagatgccctggccttctctagttgccccagctgtatttttttctcctctgggaatgcgttgattccagagcctgactgggaataaatctcagctcctccatttagcagttatgggattcaagtactcttactcccagggactcagtttctgcacctgtaaaatggagatttaccacctttcgttccagcattactgatattgtttggctctgtgtccctacccaaatcccatctcgaaaattaatccctatagtcccacctgttgagggtccnggtggg

SEQ ID NO: 9755 - DNA, 415 bp, Homo sapiens
gacagctgtcttccacagcctctgatgtggacctggtactgaggagcaagactgtccagttctcctccacatctcccatcccagaatcaggatctgggactggcagggtcccctcctgtgtctcatctcttgcagcagcagctgctgaactccagccatcaacacggtgggaggcagcgggggcttcagccatgtcctagctccccgccctaaaaggagggcagtgagggaccaggcactatttcctccgaggttactttttacccagatggacaccttgcctgtttcacgccccaaggcaggtaattgcccctaaaccctttcccaccagggtagctttgggcactgcagctctggacttttctggccctcctgagatgacctgatggagctgatgctttctctcctaatccct

SEQ ID NO: 9756 - DNA, 502 bp, Homo sapiens
tcaatgaacaattcgacttaatttagacaatgtttatttcatatgtttactgctacattccatcaagaaatttcttgttttgatgttatgacaatttagcaagtaaaaaacacatttctttgaaaaaaatacttctaagctcaggctcttaacatataaatataatgcacaaaataaatatactgcaaaaaaccacccacctacaaattgctgtatgcatcatttctgaaacatgaaatacttataaaagcgtaactctacattgcttttattttcagctctaagtaacagaaaaacttactttgtaaagtgctagatcttaggctcaagggcatgtggtgtctgctacaactactcaactctgctggggtagtgcaaagacagccacaggtcaaacataaataggtgttttttgtttgtattcatgttttcaaaactttatttatggacactgaaatttgaatatcatataattttcatgtgtcacaatattctttgattc

SEQ ID NO: 9757 - DNA, 400 bp, Homo sapiens
ggtttttaatgtcttgtggaaatttgcagaggggcaggtgtgtggtaaacgggtaatgcatgggaaataatgagaagcagctcacagagtttaaactattttcttgtccccaccaccttccaagaacctgcgagggtagtaatcatcttgtcccctttttcatgttcagcactttaatttttttgccttactttcatgtgcaatgagaattacttaagaattggtaacgcatgtagccttttttagtaaccttggaagctgtagaaattctaaggaatcatgaaccttgcctggacatttgccacctaaacgatcagtgtggtgctgcgttctggccagtaaattccatgtttttggctatatctcatccaaactgagcagtttctgtgtatatataaaa

SEQ ID NO: 9758 - DNA, 407 bp, Homo sapiens
tgaatataaagaggaggaggaagaccaagacatacagggagaaatcagtcatcctgatggaaaggtggaaaaggtttataagaatgggtgccgtgttatactgtttcccaatggaactcgaaaggaagtgagtgcagatgggaagaccatcactgtcactttctttaatggtgacgtgaagcaggtcatgccagaccaaagagtgatctactactatgcagctgcccagaccactcacacgacatacccggagggactggaagtcttacatttctcaagtggacaaatagaaaaacattacccagatggaagaaaagaaatcacgtttcctgaccagactgttaaaaacttatttcctgatggacaagaagaaagcattttcccagatggtcaattgtcagagtaca

SEQ ID NO: 9759 - DNA, 156 bp, Homo sapiens
cccacgcgtccgtaaactactactaactaatctacggacattcaaattttgccagttttcccgatgatgtcctttgtctggtccagggtcccatattgcattttgttgtggtgtttccttcatctctgtcagcctgtgacagtttcttggtcttta

SEQ ID NO: 9760 - DNA, 1124 bp, Homo sapiens
  misc_feature (1)...(1124): n = a,t,c or g
tagtctatacctgccagattaaattttcttccagaaatattttaataaaaattggccatttccaagtaacacccactgcatgcccatcaataaaagagaaccataacaaaatagaaaatttaccatatggctatgattttaagaaaaaaaaaaatgcggacacgagcacatgagcaaagtccaatattaaagtaacattccttcttacgggctatgattaggaatctgattagataccagaataaaaatacaaatgctgaactatttaggtcaaagaacctctatagaagcatctgtcttcaaaggcattccagtttgagactcaattttagaataaggcataacaaatatgttaacaaaagacatacacaaagtgatgaaagagggattctataattccccacatactctgaacctaataaaacaaatctagattttttttttaaacaattgccaagactgaaatcaaagataaatagaaggcacaacagttttgctctggttgttatctgggttttgggaatttttttgctttttgtttttttacaaatacaaattaaacatgaaaaaactacttcaaaaaaactaacagttcaagaaaagcctatcagttgcattctagacatttaaaacctattatcacaatttaaatttcaatggtaaaaacagttaggttttagaattgttttgtgatcctttatcaaaaaaaaattctattccttttattcagtttttaaacataccagtgagaatcaaaattgtcaaattttccaatggcaatttctccacaccagaaggtagtcatgactctcaaagaagaaacaatttgggtttttcctgccttcaaaatattatcaaatcctgtatttcttacaggcttttcaaacacgtagaaaataagaaatattccaatgaatgaaacgtaccaaatgtcagtaatacgcaagacacattcctttggggaaatggctgttaggaaaaaaatccagtctgtacatgcaaaataagcaaggaaattcagtctttctttcttcttcttcttgaaaaatccgttactcctaanatatcattccaccaaaattggaagtgaaagactaaaagggtcaggaaaggggaaggagagg

SEQ ID NO: 9761 - DNA, 494 bp, Homo sapiens
tttttttctcttgttcagcaaatttcattggattaacagcggctgggttatagtagctaggaacagctattcctgtctctgccaaagctttagcttgcagggctgccatctgagctgccatggctatctgaggtgttacttgtgttcctgatgccaacagggcagcaacattgagaacagaacctccagtagctgcagctgctgcagctatttcttgttgtttttgtttttcaaccatttccttttctcgctgttcttgtaatttctttgccctttccaaccttctagctaaagcttcctgtgcatccattgctgtgtttctgcctctgaagggaggtggacttggagtccggcttaaacttctgctaaatcttctcggcttttcaattctcttctttctatctcgactcctactccttggtcctactcctgcttctagtcctatgcctgtgtcttgaatcttggagcgggaacgagacctgattccgccggtt

SEQ ID NO: 9762 - DNA, 412 bp, Homo sapiens
ttgaaatttttattctttttattttgcagtgaaagaacacgaaatatcttttcaaaatggtaaagtgatcactttcaatgaatgatgtaataggaaaagagaattaaacactgtaattatggcttacacaattacacagaacaatatgtgcaaacttttgaaaatactgtgactaacacttcaccgacaaacaataacctcaatataactaagtttcattatttatcacagttacataaaatacaagagcctatgaacaagctgttattaacaataaatgtagttttgcctgaaattcttatctatatgcaggcctcttaagcatccaagttttaaattctactgcattgttattgcaaaatgaagcaggcacaacaaaattaaatccactagctaaaggacccggcacgag

SEQ ID NO: 9763 - DNA, 403 bp, Homo sapiens
gttctttacaggatgtcttgcttcatcgtaaacctaaactgggacaggaactgggccggggccagtatggtgtggtatacctgtgtgacaactggggaggacacttcccttgtgccctcaaatcagttgtccctccagatgagaagcactggaatgatctggctttggaatttcactatatgaggtctctgccgaagcatgagcgattggtggatctccatggttcagtcattgactacaactatggtggtggctccagcattgctgtgctcctcattatggagcggctacaccgggatctctacacagggctgaaggctgggctgaccctggagacacgtttgcagatagcactagatgtggtggagggaatccgcttcctgcacagccagggacttgtcca

SEQ ID NO: 9764 - DNA, 532 bp, Homo sapiens
tttttttttgggagaacaatggctttattcagatgttggtgcctctgcccctctggtgcccccgatccccacaaggggccgcgaggcgggcaggtcacagcaggttgaagtcccctttgtgctgttccagccactggtccagcgtcagggccttggggttgagtctcagggtcagctcgatgtcacggtcgggtctcagggcatagaaacggaacatgttggccaggtcccgggcaccgacagagccaagcttttcgtagtcctcaggagtcatcttggcatcgtgcacgaccttgcgggtgtgcttggtgagcagggcagcgtactcctcggccgtgtgcctgcaagtgctcagcccgatgttctggccgacgtatttttctggcatcttcaaaaggctgagcaccacaggacccaggtcagacacggacatgccatccatgggaacgtcacctgtgggcaagctcagcaagtagctctttccgtctggggctttctggggcaagaagtgggagaggaggttctcaaaata

SEQ ID NO: 9765 - DNA, 673 bp, Homo sapiens
cccacgcgtccgagtagtgatgccatgtatcctccaggttaagaaatggtatcactactgtgaaggtgagtggttgcggggtaaaaaaaaagaaagaatggcatcacataccagctcctgtaatatcataatcctatcaagtacggatttgcaaaaattttcactttagatatgaggtaattaatatgttttctccacaccctgtcctcacttatcaggtaaaaagaattttactcctttaagattaaaaaacaagcatgccttcattaaaagagattaaaagaaaaaaatcatcacgtcttcttgatttataagtggcccctaagtcttttattctactgcatttacaaactgttcttcttgaagtttcagtttaaagtcctctctgattccttccagtaactctggtttaaaaataacatccagtgcccgtcattgccagagctttggccgtccgcagagtgtagaactgagcttcctgtgacccagcagcttcagtgtactgttcagtatgattcaaggcattagatccaatgtgaaaatatggatgaattccagggaaccacaaaactaacatttccaaaatccgtagatcctgaagggccattcaacattgtatcttctgaaatgaactctattcctagctttcttccattttccatataggctttcc

SEQ ID NO: 9766 - DNA, 1196 bp, Homo sapiens
cgtggtttccggaacttcgcccgcgtctctgggcttttgctctgtcaggctggtggcgttttggtgtcttcgtttgttatggccgctgctgtcgctatggagacagatgatgctggaaatcgacttcggtttcagttggagttggaatttgtgcaatgtttagccaacccaaattaccttaattttcttgcccaaagaggttacttcaaagacaaagcttttgttaattatcttaaatacttgctttactggaaagacccagaatatgccaagtatctaaagtaccctcagtgtttacacatgttagagctgctccaatatgaacacttccgaaaggagctggtgaatgctcagtgtgcgaaatttattgatgaacagcagattctacattggcagcactattcccggaagcggatgcgccttcagcaagccttggcagagcagcaacagcaaaataacacatcgggaaaatgaaaaactggatacaaacgaggcacttaatacatgtatataatgtatttcttttgtacagtgaagacaaaaaaaatgaaaactcttcctatctacctttattatggtagcccctagaacctttagtgtgctttttcatccaactttttattgttaatagactatttctgttaaacctgaattgttctttgatttccctgtggatttgtaaggtgtttttcttttttacgcatttagcataatcagctgattaagaatggaaaagttaggtgctttagaccaaataaggcactggggcatggggtaggggtgggccaccaagtatactgaattctaaggctagctgttcctgacatatagtagggcaagaccatctcctggaaccttactgtctcagatcaactactctaccactctactctaagatgtagtgagagtagcggagtcactgacctctttaaatcataggacaggaactgcataaaggttcttgaattctgcaggacaggaaataactgtattacctgctttgcaaggtggctttaagaatcactgaatcactgtggcctcacttgacctagtcatggcaggacaactagtggttagttactaactggactcttgactttagaacaaacatgaggagcctcaaatacttgtgttcatttgggaaagctaccattgatttgggaggtaccacaaaccaggtgctatgttaagtgctt

SEQ ID NO: 9767 - DNA, 1144 bp, Homo sapiens
  misc_feature (1)...(1144): n = a,t,c or g
gaaagaacagtttcagtattgagatggctcaggagaggctctttgatttttaaagttttggggtggggggttgtgtgtggtttctttcttttgaattttaatttaggtgttttgggtttttttcctttaaagagaatagtgttcacaaaatttgagctgctctttggcttttgctataagggaaacagagtgggcctggctgatttgaataaatgtttctttcctctccaccatctcacattttgcttttaagtgaacactttttccccattgagcatcttgaacatactttttttccaaataaattactcatccttaaagtttactccactttgacaaaagatacgcccttctccctgcacataaagcaggttgtagaacgtggcattcttgggcaagtaggtagactttacccagtctctttccttttttgctgatgtgtgnnnnnnnnnnnnnnnnnnnnnnnnnnnnnnnnnnnnnnnnnnnnnnnnnnnnnnnnnnnnnnnnnnnnnnnnnnnnnnnnttgaggcatttgtttggaaaaaatcgttgagatgcccaagaacctgggataattctttactttttttgaaataaaggaaaggaaattcagactcttacattgctctctgtaactcttcaattctaaaatgttttgttttttaaaccatgttctgatggggaagttgatttgtaagtgtggacagcttggacattgctgctgagctgtggatagagatgatgcctccattcctagagggctaataacagcatttagcatattgtttacacatatatttttatgtcaaaaaaaaaaacaaaaacctttcaaacagagcattgtgatattgtcaaagagaaaaacaaatcctgaagatacatggaaatgtaacctagtttagggtgggtatttttctgaagatacatcaatacctgaccttttttaaaaaaataattttaaaacagcatactgtgaggaagaacagtattgacatacccacatcccagcatgtgtacccctgccagttcttttagggatttttcctccaaagagatttggatttggttttggtaaaaggggttaaattgtgcttccaggcaagaactttgccttatcataaacaggaaatgaaaaagggaaggg

SEQ ID NO: 9768 - DNA, 744 bp, Homo sapiens
atgacaacttccatatcagagtcataaacttttagtcccctcaacttttttacaagacagacattataatttatgtaacatgttcgtctgcttattagaagttaacctagcactgagatttatataaaaggttacatttattgcttattaaaactttactgtactttcacagattcttcagaggcatggctaacccaacaagactaaaatatccccaacaagactaaaatatctaataatcaaacattaatcaggaagtgttttattgagagcagtggtttaaagcatagggaataatccagtataaaactgatttgaggcatattacttcccaattagtaatatgtagaatgcaagtaatttattttttaaagttgatatgaaataaataataggtaagaattttgaccatgacccagcaaatcagtaactgagctttttatagaatggaaggtgatgatcagagacagaaaccatagaataaatttttattctttaagagcacattagtttactttcttctcctaaaaatgaatctgagctgtccttcaatttaagcatatatatgtgtcaagcaccctctattctgatataaatttcctagtctcaatttatgcctagaaatttctttcaactttgaagtgggtctgtttagtttatatctcactgattgattgatttagaattttcttctattttaagatattaacctttaaatctctacctatgacaaattcgtacgtc

SEQ ID NO: 9769 - DNA, 538 bp, Homo sapiens
aaccgcgccgtctgtccctggcaagccagcggcggtttaaaggaggtggcgggaagcctgtgtgtgcttcaaatcgtcaccctcatggtcgctccggtttttcacgactgaaaacaacatagcaaaataagccaagatgtctgtggatccaatgacctacgaggcccagttctttggcttcacgccacaaacgtgcatgcttcggatctacattgcatttcaagactacctatttgaagtgatgcaggccgttgaacaggttattctgaagaagctggatggcatcccagactgtgacattagcccagtgcagattcgcaaatgcacagagaagtttctttgcttcatgaaaggacattttgataacctttttagcaaaatggagcaactgtttttgcagctgattttacgtattccctcaaacatcttgcttcctgaagataaatgtaaggagacaccttatagtgaggaagattttcagcatctccagaaagaaattgaacagttacaggagaagtacaagactggattatgtact

SEQ ID NO: 9770 - DNA, 944 bp, Homo sapiens
  misc_feature (1)...(944): n = a,t,c or g
cctggagctaaagtacctnctgcagaagcaggatagccgcattgaggtacactccatcttcatcagcaatgacatgcggctgggcagctggtttgacccttcctggaggaagcgcatgctgctcaccctgaagagcaacaagtacaagcctgggctggtgcacgtgatgttggccttgtccttgcagatctgtctcaccaagaacagcaccctggagcctgtcatggccatctacgtcaacccctttggggggcagccactctgagagctggttcatgcctgtgaatgagggcagctttcctgactgggaaaggactaacgtggatgcagctgcccagtgccaaaactggactatcaccttggggaataggtggaagactttctttgagacagttcatgtttacctacggagccgaatcaagtccctggatgacagctccaatgagacaatctactatgagcccctgggagatgactgatccctctaagaatttgggttacatgaaaattaacaccttggcaggtctttggctacagctgccctttgacccagattgctatccgggacttaattctccagttggactacccatatactcaaggttcccaggactctgcactcttgcagctcattgagctcagggaccgggtgaaccagctttctccacctggcaaagtccgacttgaccttttctcctgcttgctccggcatcggcttaagctggccaacaatgaggtgggcaggatccagtcctccctgagggctttcaattctaagctgccaaaccctgtggaatatgagaccggcaaactctgtagctaatgggcggcccacttcagcactggggcaaggaggggatccatgaatttgggggttacaaagattattttaaggccctnaccttagtgccaacaggggttgttgctnccacgagactttcagc

SEQ ID NO: 9771 - DNA, 637 bp, Homo sapiens
tttttttttttttattaaaccagataaatgtttacttagatgttcaggtggttggagcagattaacaaggaaaacaatcacaaaataaatagttttgttttgtttttgttatttttttttaaaaaagaacatttcctacacattgtctctctctaacttgacagagcttctttcttcgacagagagatgctgttggaaaggagctctgaagggaccacaatgggaactgggaacaatccagggccctgaaacttggtggggggaggaggcagcagagggaggagtaagggaggggagcaaggaggccgctgcctcgcccttggcgctggttcctgttggttgtacttcttgtgtttcccagtcagcgtctgggagggcacagaggaggcagcatacaaaagtaagaaccaatgtcaggattcacaaaacaacaacattttaagaaatctggttaaaaagaatacaaaagtgactccacagaggggaaggaagagctccgacccctcccattgttgtcccctcttgctttcttgaatgacaagaatcacttttaggatttttgtttgtttcatggttcagctggttctttttcttaatctcttccttggctcctttctttcaatttaaaaccaatcac

SEQ ID NO: 9772 - DNA, 1275 bp, Homo sapiens
ttttaaaatacaaagaaaattttatttgtatatcaaagactctaagaaatgatgacataaggttaacagagttgatgtcaagacaaataggtttgaagttatagatgataaatcactttgtcttactgaaccttcccttgattacgttagagagcatccctggtatgctcccagttgaatcttaagcatgatgtgtgtccgggtgatataatcgtaattcctttctgttaatcctcgttctctctcttttttttctttttcttctttttctctggactagcaattgctgtgctggtacatggttcttcctcagaaagtggttcttccttaatgtgtttctttttaccccttttcttcttcttcttcacagatgtttcttcttcttctgccactttttcttcttcctcttcttcaactttaactttaatcttggcttttttggctttcttttcagtaatttcatcctctttatctacctgttctattttgcgttttttagaacaggttggaagtgtggagtcaccagaaggatcgtaagtcttcacttcacttttgtgttcatatttttctgtttttgctaatgcttttcctgttccacttatttttcttatccctctgtcttccaaagttctcaacctggcctctaatttggctctgttctcaactcccattgcagaacttgaatcctcaccaaaagcatcataacggatagccaaaacggttttggctgccagcattcgagaaatctttcctttgtgtttgggacttgtctggcccacgagtgaagcatgataaatgagaccatacttaggggtatcccgtctagatttgagggctctgaaaagtgccttttcagctccaagaatctgaacggtagaagctgcatgcttggcccaaatttaaaagagaacctgcatgagcaataagccgtgctcccaactaattccccaaccatgactgtaacattgggtgcaatggccatcattcgatttttgtagaaattcatagagctgggttcgatattcagagatttcaatcacctgggtgcaaagatgcagaatattgcaaatatcttcttctgaaacctctgttcccattgatatctctgcagctgctttcacttctgcttcaacttcttctggcagcaactcagaaagcttggcagaggcatagttcttcctatcgccaactttctgtaaacacttgcagtatggttaaattatctgaaataatttttcctaattcagggaaatgccagccataccattctctaca

SEQ ID NO: 9773 - DNA, 965 bp, Homo sapiens
tgagggttcattcacaatgatttattggctgcccctccacaccgagctgaggtggacaagcaagaggatgaaacctccccaggacccacctaactcccaggcatcacaggaacaaggcaattttccaacagcctggcaacgtctgggactccaacgaggtctgggcccaaacctcacctgagactggccacgcccgtcccatgcacccacccctctcagacatcctggtgacctaggctgagatgagggtgaccaggagggacccttcagctataatatcatccacctcgctcacactgaagcaggctcctggcccgcccagcagcagcacaaggctgaccacagagcaggtaagcatctgtatgtttgttcaatggctgaatgagtgccagtggactccagcctgagggagacctgatacatccaggtcccaactgtgcacactcagagccccttgatagagctggatcgtggaaccccaaccagctgtttccatttcttttggtttagggggagcctgagacgaacagatcacaagcctttcacgccatctgatctctcaagcctgccctagacgtgtctactgagggcttcctttgtgccagggaacttgtgcgtttctctgatccacacacacgaatgatctaaaatgcaaagccatttgcaatcataatttccaactgtcctggtctcccctcctgactgcacgaggctaggagcatgtgagccttttttaactgcacgttcgcatcggcccttccgtacagaggggggccaagggtctccactatacagatggggagcgccaagctcagaggaggaaggcaacttgtccagggacgcccagcaagagtcgggactttctggccacgtgaaaatgtctagccactgaggagcgtggtaagaagagactttgaaatggcagcacctggctcacaggtacttagaaaatgtccatcaaatga

SEQ ID NO: 9774 - DNA, 248 bp, Homo sapiens
  misc_feature (1)...(248): n = a,t,c or g
caagaggtgaagttcttgtttattgttgcagcaactcttatacagacattagcgttcagttaaataaaggaagatagatagcacagtaaatacatcacaaccccaaactggatgactgtggccacgggacggagganngnangnagggagggaccagtgaccagactgtcaaggaagtacattcagtgggtgtgcggtgtccacattccaggctcacgtgtagatatatttaatttatatatttataa

SEQ ID NO: 9775 - DNA, 1618 bp, Homo sapiens
cgactttttttttttttttttgtactaaaattactttattacagttgatttttttaaacatttcctttgctatgatacaaaggatacttacaaacaaaatattacatatgaccttgttttcgctcttatgttctgacaacttggtaacagcttttaatgcacaatctatacaattaatacaggttatatatgaactataaggtatgctgaaccagaagaatactgacaatatactgtacaataagccttaccagttagtgctgtggaccatttataccaaaaggaaaatgcacatctgtacagtcacctttaccagctggtgctgacagagagggagaggcttcttccccaatgcaacccttgataagcctccactgtgagcgtctgtttggtccaaaaatcgagaggacaatgtgtatttaaaattagttattgggtaaagtggtagaacatcacactttcgacacgatactctctcaaaaaagtatcagtcccagttttaaaagacccacaagttctttgtcccactatgaaaaaccctacgggcttcagggggtttgggagatgagaagatgaaggctgccaaaaaaggaggcaagaaaccaagccaaaatctagggtcttgcaaaatcatcatttttcccttcaccaaagggaactagaaatgtacaaattcattgatgaacctcaatgatagcatatcagttagctgataaccctcattttatctggacccctgacttgttggaataactaaaatacattgtggataacagataccacttttagaaaagaacctcttgcttaattaacatattccctttagccaccacagctggtcctgggctactacaggtgtgcattcatcgctcaatggtctactcagaaatgataaggttacagctttttttctttttttttttaaataaaaaagcaattgactgaagcattttctttttttaggtaaatagcaaaaataaaaataaaaaccaaccctggcatttgcacaaataatgcaaatggagtgatatggcctttaaggaaggagttagtagaaaggaagagggaagtgaagaaaatccagagaaaatgatgtactaatttctttcttttaaaaaatttctacatgtgcaaaaaaatcatgctgtttgaggaaaacaaagggaaatgagtacataaaactaaaaacataaatatgtttggggtgactggtaaaagtagaaaccaacctgggttacaaaaaggattatacattcaagatgctcttaaacccagtgggataacttatgttaaaactgtgttaatagttacgttaaaaatctcaagtttgtttttaaatcttcacaatacaagcaaagctgttttaaaatatacactatacatatttctcatagtctcttcaacctcattaatgcgcattaggctttttcatatactaaaacaagggggttctgaaagcgaaattgctcatagtaacccatccattattttaaatggttgtcttaagttttaagtgggctaaaaaactttagcagacttacataaatagaatttagcaacacaagtgttaattaaaaaaactctaaagcatttacaaattatcagattggaacagtcc

SEQ ID NO: 9776 - DNA, 386 bp, Homo sapiens
  misc_feature (1)...(386): n = a,t,c or g
gttcttccacaaggtgtgtgagtcagcagaagacactgtcttggacttggtagactattgccaccgcagactgaccctgctggtggcccagagtggctgtggaggcccccctgagggggagggatcccaggacagcaaccccatgcaggagctgcataagcaggcaaagctgatggaatttgagattgcactgaaggccctctcagtactacgctacatcacagactgtgtggacagcctctctctcagcaccttgagccgtatgcttagcacacacaacctgccctgctcctggnggaactgctggagcatagtccctggagccggcggtaangaggcngctgcagcagttcnangcagcncgttgncatactgtgccccttaaa

SEQ ID NO: 9777 - DNA, 938 bp, Homo sapiens
ttttttttttggtttcatttttcttttatttttttaaaaaagcccctaaattctatggcttcaagggagcatcagagaaacgtaaatgccatttctgtacacttggtaaagcaaaaactagactcacagccaccgccctgggcacggccccaagctgctccactctgcccggcagcctccagggcaccccactggggaaccgcccgccagtccagggccgcccccaggcccctgcaatatacctgcagggctgggccgggggctttaaggcgttttgtctccggctgcttgccgggtgtcggagcagagaggcaggaagctccgtgcccacgcgccccacgcggcagggctgagggccgagcagggtgacaccaaccggtcctcccacctcgggttccaggcgccggggcgcagcctccgggagcaagtgcgtcgagaagcacccgcctggcagcgcccacccgccccttgccagggccaggcctgggaagagactgcagcagccgtgcccgcggcgcccgagctttggtgcagcattttggttggggagccggcttcagccacggccccacccctgccttcccctttggtttcggggaggcctgggcacggcctcacccctggcaacaatgcctgtccccctcccaggagggcctgggcaagacagctccacagcacccctccaggccgggcctgccctcccctcgagaaaacggcctttggatcgagggagacaagctggactttatgacgctaacgggggcggctggcggggcggggccatgccggggggcctccaggatcacactactcacttcagcaaagaaacggaggggcaggagtggggtagggcgggcctctgttttttttttcctcttttccttgttttaaatagttaatgctcttggaggggaggactagacacaggtgtagaaatt

SEQ ID NO: 9778 - DNA, 494 bp, Homo sapiens
gtacagctgaaggtagttgctggaaaccatgacattggcttccattatgagatgaacacatacaaagtagaacgctttgagaaagtgttcagctctgaaagactgttttcttggaaaggcattaactttgtgatggtcaacagcgtggcgctgaacggggatggctgtggcatctgctctgaaacagaagcagagctcattgaagtttctcacagactgaactgctcccgagagcattatcctctgtatcggagaagtgatgctaactgttctggggaagacgctgctcctgcagaggaaagggacatcccatttaaggagaactatgacgtgctttcacggggaggcatcacaaaagctgctgtggtggctccagccgcggcctggttctcagtggccacacgcacagcgcctgcgaggtgcaccacgggggccgagtcccgagctcagcgtcccatctttcagttggaggaacagaaacaaccccagtttca

SEQ ID NO: 9779 - DNA, 1526 bp, Homo sapiens
  misc_feature (1)...(1526): n = a,t,c or g
gtctggcagtgttgcgcgtcacaagagagccngtatataanttaaaatagtcaagacaacactgaccttgcacttgtacataactatacagtagtgtccagaatgttcagacattcggagtgtacataaaacagaaaaaatcttcatgtatttttattaaatataacaatgtctgagtttcacctaagatgtttttgtgccatatgctggatatccaggttctcgccaggccccaatacatgaataacaaacccaagaaacgcatccccattgtgtgatgtgttcagatgcatctggcaccaattaggtatttcttaaaacaggactcatctgtcagagtgcacatgaaaaatcaggcagggaatcgaaacgacagcgctggaggagactcaggaagcagaggcgtccctgccgctgcccttggccctgcaagcacatcatgaccctttctggcagcctcttggtgctctgggtagtgagggatgaccagtcttgtcctgagaaatgtttctnttagtctttaagttcaaagactaacctgtagcaatcagactttccaaaagggggttctccattttttgtagttttgtctaaatttttaatgaccatttcctggaatcagtttattatactgaaaactgggggtgggagtagggagctagtttgttgataaatagttcccatttccccgtggagaatttgacataccctggactcctgtgtgcctcctgccatccctgcacacagcctggggagaagcctgtgcctccccgtgtggagagaaggcaaccccagatcccctgagctaccccggaggaaaggcagtcctgggacagaagactgtcagcagaaggaaagtactggactacccgtgggtaagtcctgccattcaagactggagacacctgggaaataaaaagagcagggcactgctggtgggaagaggcattttaccttccagtgcaaatcctgctcctttgatttaatggggtgtaattggggccaggggctggattcacttccttgggagatggtggtgttttcatgaacatctttgatccttccatttcatttattcatccatccattcaacaagtatttgctaaacactaacttaagctaatgcttagggtagtgactgagatgtaaaaatagattttagaattaaaacaaaatccaagtcctcacacccctgtcatcccaggagatctttccttgtggtggtttctgtgagaattggccatcctgaggacacagccaggacggcagaggcctcctggctcagggcatgccctgccctaccttctgaaatgtttaccccattgaccaaacttggctccagccattggcggttggtttctagatagccagggcccaccaagagatattggccccttggatgagagtcaaacaccctgcctacaagggagatgtttttgaaatgggagagggaaaattgggcacctcatctttttaaagggcagttatgggatttgattttcagttaantgatttgtgcacaaaac

SEQ ID NO: 9780 - DNA, 446 bp, Homo sapiens
cagcggaaggacttggtccgtaactcaaggctgttgtatgcaaactactcttctagtggttaatgcacttgacatgtacagtatgtttcccatgccgttgtgattttgacatgtacagtatgttttcatgccgttgtgaattttgttgttcaacccaacttgagatggtttcaggaatggctgcaatctcaaaagctcaatgtactgcccaagaggcaccttgtgcaatattcccatccctgaatttagcattgtacaggaagattttcttttcactcaactgagttagcattgtctttgtggtagcattatcttagacattaaatttgaagtaacatatatcctgtagtaacatagacccaaagttactatagtcaaccaagtctttcaaaggataaaagatccattttattatctttaactgtatctattttgaatgtaaattt

SEQ ID NO: 9781 - DNA, 514 bp, Homo sapiens
gctgaacgaggagggtcagtgccgggtccagcacctgtggttccagtccattttcgatatgctcgagcacttccgggtgcaccccatccctttggagtcgggaggctccagtgatgttgtccttgtcagctatgtcccatcctcccagcgacagcagggccgggagcaggctgggagccatgcgggggtgtgcgagggagatggatgccaccccgatgcctcctgcaccctcatgcccttcggagcgagtgactgtgtaaccgaccacctcccatgacccaccccagccccctgaacccccttcatgggacagatcccccacagcctggggcagaagaggcgtcgagggcgccagaagtggcggcagcagcagccgcagcagccaaagagaggcaagagaaagagaaagccgggcggtggaggggtcccggaagagctggtccccgtggttgagctggtccccgtggttgaattggaagaggccattagcccaggttcagaggcccagggcgct

SEQ ID NO: 9782 - DNA, 453 bp, Homo sapiens
ttttttttttttttatagaaccgagataaacctttttatttatttatgcttctccattttgtttaaaacaacaacaacaaccaccttaatgtaactgacagcccttccccctcaccctgcctcgggctgggggtagttaatggggaaatggcccccagggtggggctgaccagaagagcccctcaaggagctcatggagcccaaatcccctgccctggggaggggacctgtagtgtgtgacgggagcctctcccgagcctctgcttgtaccatcaaagatgcccttggccaacaagggtcaggaagcatgggggagggatttcggcctcctctgtccctacccagcccaatctcacgagcagggctggggggtttaaaaagggtggagcgggtggggttggctcacacgaaggagtactggttgttaatggccctggggtggccccttcctct

SEQ ID NO: 9783 - DNA, 412 bp, Homo sapiens
ctcatttattaataaggtcactccaacatttcaccactgggaagatttgatggacaaaaagtttggtcttacgttttcaaagtccttgctggatgcttaggggcttttgatagaggtatccgaagagctatagaggatatttctcaaggatgccccgaatcaaaaaatgaagctgaaggggcagatgacttacaaattctggagacctgaaaatggagtgctgctgtaacaaatactaaaacatgggaatgactttggactcaggactcagacagtaaataaaagctggaaggtctttgaggcgagttttagtgaagttccgaagagacttactggaagcttgaagatctttggatagagcgtcagtgagggcttaaatgaaaatgaagaaaaccatattggaaaatggaag

SEQ ID NO: 9784 - DNA, 536 bp, Homo sapiens
ttttagtagagaaattatatttattgaggaataaattttataacaagttgtattatcacaaatctctaaaaataacaacgcagtttttaaactcgtattttgtgagttggagcctggcaacaaaacaacaataacaacaaacaacaacaataaataaaaaaccacttaacacagacatttctaggctgaaaaagagaagaagttgccaagtgcggggttttttttcaatcatgtttggaaataagttccaacttacagaataagttgcaagaatcagactgtctcaaagaaaacacatataccttttgctcagattattgttaaattttacctcatttactttatcaattgctctttctctatttatgtgtatcagattattgttaaatgttaccttatttgccttatcaattgctctctttatgtatgtttgtgtgtactgttgcacatgcaaatgcacacaaatatatgtttctgaattttttgagagtagattgcatacattatggcccgttacctcaaaatactttattgtg

SEQ ID NO: 9785 - DNA, 815 bp, Homo sapiens
  misc_feature (1)...(815): n = a,t,c or g
gtcaaggatcaaggtcccatggtctcagcacctgtcaaggatcaaggtcccatagtcccagcacctgtcaagggtgaaggtcccatagtcccagcacctgtcaaggatgaaggtcccatggtctcagcacctatcaaggatcaagatcccatggtcccagagcatccgaagatgaanagtgccatggccacagcacccataaagaatcaaggttccatggtctctgagcctgtaaagaatcaaggtttaagtggtctcagggccagtcaaggatcaagatgttgtagtcccagagcatgcaaaggttcacgattctgcagttgtggcacctgtaaagaatcaaggtcctgtggtccccgagtccgtgaagaatcaagaccccattctcccagtactagttaaggatcaaggccccacagtcctacagcctccaaagaatcaaggtcgtatagtccctgaacctctgaagaatcaagttcctatagtcccagtgcctctgaaggatcaagatcctctggtgccagtaccagcaaaggaccaaggtcctgcagtccctgaacctctgaagactcaaggtcccagggaccctcagctacctactgtctcacctctaccccgagtcatgatcccaactgccccccatacggaatacattgagagctccccttgacactcaccccttgacacaccaatgaaggagctgacagtgagagtgctcccctcccaggggcagtgaagacacatatttaatctgcatgaaacatgtacagtagtcttgctggaatctaataaaaatggtccctctggctcaaaaa

SEQ ID NO: 9786 - DNA, 1458 bp, Homo sapiens
ggatccatttgtctcgggctgctggctttctgccatttcctcctctccacccttatttggaggccctgacagctgagccacaaacaaaccaggggagctgggcaccagccaagcgtcaccctctgtttcccgcacgggtaccagcgtcgaggagaaagaatcctgaggcacggcggtgagataaccaaggactcttttttactcttctcacacctctgaagtgggagcctcttgagtcaaatcagtaagaatgcggctcttgcagctgagggtctggggggctgttggggctgcccaaggcagagaggggctgtgacaagccctgcgggatgataactttaaaagggccactcctgctggcttctcacttggcagctttatcacgccaagtgacagatcgggagggttctgtctctcctgcgtgcttggagagctggggggctataaaaagaggcggcactgggcagctgggagacagggacagacgtaggccaagagaggggaaccagagaggaaccagaggggagagacagagcagcaagcagtggattgctccttgacgacgccagcatgagctccttctccaccaccaccgtgagcttcctccttttactggcattccagctcctaggtcagaccagagctaatcccatgtacaatgccgtgtccaacgcagacctgatggatttcaaggtagggccaggaaagcgggtgcagtctggggccagggggctttctgatgctgtgctcattcctctcgatttcttccaagtcagtgaggttcatcccttcccctgtatttccctcccctaaagaatttgctggaccatttggaagaaaagatgcctttagaagatgaggtcgtgcccccacaagtgctcagtgagccgaatgaagaaagcgggctgctctcagcccctcccctgaggtgcctccctggaccggggaagtcagcccagcccagagagatggaggtgccctcgggcggggcccctgggactcctctgatcgatctgccctcctaaaaagcaagctgagggcgctgctcactgcccctcggagcctgcggagatccagctgcttcgggggcaggatggacaggattggagcccagagcggactgggctgtaacagcttccggtactgaagataacagccagggaggacaagcagggctgggcctagggacagactgcaagaggctcctgtcccctggggtctctgctgcatttgtgtcatcttgttgccatggagttgtgatcatcccatctaagctgcagcttcctgtcaacacttctcacatcttatgctaactgtagataaagtggtttgatggtgacttcctcgcctctcccaccccatgcattaaattttaaggtagaacctcacctgttactgaaagtggtttgaaagtgaataaacttcagcaccatggacagaagacaaaaaaaaaaaaaa

SEQ ID NO: 9787 - DNA, 718 bp, Homo sapiens
  misc_feature (1)...(718): n = a,t,c or g
ttctgcccagcatcccaggcctgaacagccttggaaggacccgtccctagagggggctctggtgcctcccttaggtgggccttgagctggtttttaaccaaacatccttccaaactcgggctgcgacctgcttcctgagttttctgtatttccaaggagccctccgaccagggagaggctggtggagtaaggtccagcggtattcgggggtcctctgtcacctcgccctgaaaacagcagctcccatcaccttcactgggtcccgatggagccgtctcagaggccgaggggcctctgtgtgggggtggnacgcaggggctctcagagcaagggccacaaagccgatggcacagatgtgcccctgggcctggcccgtcacccacatgtggtgccctgggccagggcgtgcgggcgccagagccttccctacacagcctaagagcaggggcaagactcggcccctcactcaccctgggaggcctgcctgggctacatggacacctgggtctctttctacccccattcaccatggaccaggggcctccatttcctgggggctcttgcggcatgtgatttgggggtccctgggacattctcccgtcagctccaccttgagccaagtgtcctgttccctgcggcccttggccttccagggtcctggccaggcaggggtcaggcaccccatactcttccgtgtggcacaggtgtccacccaccc

SEQ ID NO: 9788 - DNA, 559 bp, Homo sapiens
cattgcatgggttaatgacatagtatctttaaactacacaaaagtggaacagctttgttcaggagcggcctattgccaattcatggacatgctcttccctggctgcattagtttgaagaaagtaaaatttcaagcaaagctggaacatgaatatattcacaattttaaacttctgcaagcatcatttaagcgaatgaacgttgataaggtaattccagtggagaagctagtgaaaggacgtttccaggacaacctggattttattcaatggtttaagaaattctatgatgctaactacgatgggaaggagtatgatcctgtagaggcacgacaagggcaagatgcaattcctcctcctgaccctggtgaacagatcttcaacctgccaaaaaagtctcaccatgcaaactcccccacagcaggtgcagctaaatcaagtccagcagctaaaccaggatccacaccttctcgaccctcatcagccaaaagggcttcttccagtggctcagcatccaaatccgataaagatttagaaacgcaggtccatacagcttaatga

SEQ ID NO: 9789 - DNA, 384 bp, Homo sapiens
cttcatagttccatagttagtcctattctttagtaaatataaagactattaaaagcttctatgaggtgcactatgtgcgtctctggggtcagtcttgtgcttgacacagcgaaagctcattttagttcagtgtgaaaaaccagacctcaccaattcatcacaactaactccatcggaagcagaggattgctcctcatctgacttctcctgtgtgagacctgattctcagtcagaggctgatgccggaactgagaccatcagccatagagagatccttccagaatatggtgtcattaaccccgcagttcactactgcgctttgccatgattcaggactggaactcttgtcatcgactttaaagatcctgaaaaggcaatctgaat

SEQ ID NO: 9790 - DNA, 774 bp, Homo sapiens
ttttttttttggcatgagagatgcaacaggctttattgttgcagcaacactaacatatacgccccattccctgctgaggcctgtccccacctcaccccttggttgtcgatggtgtggaacattggggtgaggggcaaaatgcctaagcagagctggagggaggcaaatgggactggtgagggtcgggatcacctgggaccaggggtccaacagtcaggatacccgactccatccacacaggggcatggaacacttgggttctgagttcaagatttggcaatgtcttgacctgggttggaaggtagggtggggtctggaaaagctttggtccagggttcaagatttgagagtgccttgctccaggccccagtttggggatgagcatggagaagggtggatgggagtgtctctgggttcacaatttgaaattggccatggatgctctggcctgaagccccagttttggggctggatgtaggtggctcttggtcctaggttcaaggctggggaagactcttgtccctaggtaatgggggctgggtgtgagggatatcttagtttggggctggcgtgggggtagggcggtcacagatgtcctgttttgtttgggcagggggctctaggctcctgttttaagtgctgggaaagggctctgggtcccaattatgggctgggggtggggtggtattctccaggtcctgggtacagatcccaggggcctaggatccagcctcctgctcttgtcccagtgcctctagtagcaggcccattggc

SEQ ID NO: 9791 - DNA, 391 bp, Homo sapiens
tgtatctttattgtcagtaagtgtggaaaaaaacccgacttgtatgtgtattcacagtttgataggcatattttgaagtcattgttttccatcaatattaagtatcatccatttctatgttctctagcaaaagaaaattcttagtgtgatacagctttactctttgtttgactttgtacaaggtccacaaaaggaggaggctcaaaagattggacactttaccctgacattcagcacattcattttatctttcgataaagataaccagaaatcatttgcctcttgtttattatcatgttgaaaacacaacagtatagttccttttgtcccttacattggaaaaggtattttaaatttagccttgccgattatttatagttaggaatttact

SEQ ID NO: 9792 - DNA, 398 bp, Homo sapiens
taaaaaatttaaagcatcaaacaacctcaagatctcgtcaggaataatgaacaaggcattttgcgttcacatcggttagcaacttgcatcccagttcacgcgggggagggtgatggtcgatatttctgtgtgtgtgagaatccagcacaattattttgcccgttttcccaagagaaagaagccagggggaggggcagaggatggacggagggggctcggctgcagtacgttttggttcagcgattgtgtttccttgaaacacatttagataaattctgctcgaaatcttaattgctggggaattgggaaacccgtgacctgccctggtctttgtccttcatccatggcctggtccagggtcccaccactggggtcttcccttcctcctccctcctctg

SEQ ID NO: 9793 - DNA, 415 bp, Homo sapiens
atttgagggcagaaagtagaaatggagtattttcaattctcctttattaacaatgatacaggcattcatcagcatagataattaaatgaaattaagtattccagatttcttccctctccaaatcatggcttatatctaatttcactaacaaggaggtaaagatttacatctaggaaaggctagaatattgaaaaagaagtccaggggagagcaggtaccaaatctagtgaagtacagtaaactgcttgggaccagcaaactaggtagcatatgggataatattaggagacaactgcttaaccaagaaaatgaaaatacaagttctattgagagaaggaggcaaactggtaatgtctctgaattcacaaaccatatattgtattaatgtaatataattaatgtataattgtattaa

SEQ ID NO: 9794 - DNA, 468 bp, Homo sapiens
  misc_feature (1)...(468): n = a,t,c or g
ggcctgggtcctgccctcccatggggtgactcatgacccctccagccaggactctcctacatgtggcccccataggcctctgtggctgcaaggcggtcagttgctgcttgtcccagcaggtggccttgatctctccatgccccaccttaagtggtaagcatgtttaattatcaaaggccccatttgtcaggggtgagagaaaagtcaaaagataaattggggccttgtaaaaggcaggggtaaaatgtctcaggcaagcaaaagattgtccccttctgcatatgggtaaaactgagacgtccccgtgagcccgaggctgggaagtnggtgtttgcctttcaagggttaatccctctttgttccaaggcagaagcattttgggcattcccagttgaagagctcaggccctcagggaagttttttgttgaatgggattggcccagcattaggcccagtttttggaaaatt

SEQ ID NO: 9795 - DNA, 930 bp, Homo sapiens
tttgattagaaatacttaaaggatatttgttttaatatcaaggtacaatgattgaaaaaaaacttttccatattttttaggaattattaggatctggaaataaaactgccctaatcaaggtaatcaataacattctacctttttaagttttaaaaaagaagtttcatatccacatgagatgatttatattatgcatatacaaaagtattttgtatgtgagcttgctacaccaagaggctacagtgacatgtgtgacaatcatttccttgaaactctgctaaaatatgcatttgaccaaacaaaaggccttctgcagctaggacaagcaatcacatattatacagaatgcttagaaccaagattcagatcttaatgagacttattgaaaagttctctgccccataatgaggcacccctttaaaaatatggtctgagtagagacataaaagatatacatttaaactgtgatggtaaaataaccaaaaaaagaaaaattatagttcaaaaaaaggaacaattctttgaaaaaacatacatagaaacagtcaaactatgaacacctttacacattcacaacatctgcactaatgcatagaagttcaaaacctagaaggcattttctcccccatcccttctctgaaactgattcagaggtcactgtgtgaagaacttacttcagtcctgattgtaaatgtcatgaaattattttctacacagatagcaaatttagttttatataggactgcaagcatacatcatctagggattacccagtaaaccacaaatattttatccattcccctaagatacaggtaacatatggttgtggtacatcccaggcagatgtcatttaaagcacgcaaggggaggtgctagcaaaaaaatactcatttgccaaagtaacaggttaacccttccaatatgatgtac

SEQ ID NO: 9796 - DNA, 768 bp, Homo sapiens
actacagatacatccttttagcaaaagactggaattttatcctttcaacttcaagaactttggaaatgcaagctttttgttattaccaactttttgtttctcattactgaagaaaattggaggaaaatcttcatactgaattcttctgttgcctttttcttacagaatgactgaaaatttgaaagaaaagcctataaaagtgcacatacgcaactgtgttctctgttttcctagaaaaccaaaatcaaactgagatttcaagtcgtactatggaacacctttctgtttaattcccaaagtgacatcttctcacaggtagtatgttagtaaaattttgcaattcgctggtcacacagctcccggatgaagataacagttggtagaccaaaaggtgacctcgcttagtatattgaaaacacacaccacacatcacacacagaactgaatcataccacgtgctgcctatgggacttcagttactgtttcctgagttactgtttatccgctggcaatggtgtgatttgtctggatcagatccgtgctattccccaacccacctccagataatgtgagaaaatagccatgtcagtatgtaggaactctgatggtgctcagatttgtgtgttcaatcaatgggcttaaatcagcaaaatattatgcctaaagtaaatctgttcttaacaagggctctaccactgcattttcacatgtaccttcagggggttatctttttttttttcccctcctattttaatcagcaaaatccat

SEQ ID NO: 9797 - DNA, 581 bp, Homo sapiens
aaaagggcaggatttagtgcttttcttttattccccaactacacattcactaccaggttttccctcaccccccaccccccagaaaaaggcattgcacacacgggtgaaatgtgaagtactagaactgctatttattatcaaactacttcatgtgcttactatgtaatagtgccagaagtctgaggttcatgcttccctcaccttattaaaggatgttgcaaaattccatttttatatggaataaattgttaatattagctagttaagaaaaccatgcatgagtcattgcatgcaaaacatgggtatagtcaaagtgagacagtcatcaatccaaaaaagcaccagaaaaaaaagttaacacttagattaagcctgacccaaatctgctgttgtactgttagcacaaatgaagtcaccattctgtaacaatgattagcagaatgataccgagacagtacctgaagaaaagccatgcaaagccaaaggaaaaaaagatatgctaagagtatatgacaaggggcataccactacacatcctgtaaacagctgctttaaacagcatgttatgattgaccaaaggg

SEQ ID NO: 9798 - DNA, 532 bp, Homo sapiens
ctcagcacttgagtgcaccaaacgagtgaatgctgaactcatttgcatcccttcatgtttctgtttgtggattataaggatgatgaaatgtgaaagtctcccaacactctgagggtggtgaacgattgccacccgtttgattttaatgtgctgctgcatgagactgcattgttgctaatggccagtgtacccagatgtgaagtgtggtaggctggttcatatgtggaggtgggtgtgtgaagctagacacgaaggtccctaaggttctgaagagacttgaactgtggaaatgctcttagcaggcatcccgaacccctgcttcggtgctgttttgaggagtaggatcttggagttcagaccaactatgactatcatttccttcactatctagaaaaacgctattctactttggaagagaatagtagttattttcaagtctcctgacagtcactgggagtacaaggtttgctaatgtgctctctggacgttattaatggccagtattagttgctgctgtattactgactcgctt

SEQ ID NO: 9799 - DNA, 446 bp, Homo sapiens
aaaacaatttcaaatacttttaaaccgtcttctcctggtaaaaagcctggtggaatgaaggcaggaacatttgatccttacccatcacattctgctgacccttatgtggctaaattggcaaatatttctggcaaagatgataagattttccacccaccaagtggaccaaaaagcagaccagttgaaagtataatgactttgaatgtcagaagggcactaaattcaaagaactacaagacttcttcagtaccatcctattagcaactggaagacaagtagctttctagatattaactatgagtaattcactatcaagagctaattattagaaaaaatataagatgttaaggtgcagatagctcaagcagttaaaagaaattctgcaactctaaaatactataccttattataataataatacaagataaatagtattaacaaataac

SEQ ID NO: 9800 - DNA, 1605 bp, Homo sapiens
  misc_feature (1)...(1605): n = a,t,c or g
ttccgagatagaaaacacacagtgaagtttaatcaggaacccaacctccggtcctctgctacaaccacggaaacggctccaaacttgaggggggggcccccaacgcctgcttttggcccaaagctctgccttccagccctcctcatacccactggccacctaggaccaggaaaggggggtagagccctgagaattctgggtctggggtcaccagctcccacacctgtgctccccggccccacacacatgatgcccaggggtgggcaatccctgacagcggtggccggcacttggggagctcctgctcagccacctggccacggcccaccctgggggtccgggcaggagccaggggcagtgcatgggcagcataagggccccgctgcagatcgactgccttcagaaacaaaaagtctcggcgcaaaggcgttcccggagtggcagcctggcctgcaccccagctgtgctgcccctgcagagccccagcagcgagccacacccaggtcaggggagggggcttgggtaccaggggcctcactggctcttcacccagnaccctgtagagtgagaagctgaggactgcggccacggcggccccgacaacccccagcagcccccggagccagaaggaagagggatgcagctctgcctggaccaaatgtccacgggaaggcggccatggtggcgagctgggtgaagatggtggtgctgggctcggctgggccagcacaggagaacggcacgggagcgggtagccggtgcttgcggcaaaactcggccggtgatgggccagacaccgccgaacaccttcgggcaaggtcggcccttggaggaaaacaaagaggcagggggtctgcccgtcccatgtaatggtgcttgtagacgctggcacaatgtgcaaaggactttgggtcactgccatcaaacatcaagcaggcaacgtcacaggtggcgtccagcgatgtggccagcagaccatctgtgcccacctcacagaggatcaagtacttctcctgtccattgacctgcaccgtgtcgatggcgtagccgggaggctgctccctcgtgtcctggtgccccaggccgcggccgagaaaggcctgcaggaaggcagacttgcccactccacgggcccctaccaccttgcacaaggagggactccgctgcgtctgtcccttctcctggtccagcctcttctcacgagtgactgtgatggcatgggcctggtcctgctcacagagggtggggtagcccaggtagcctaggtgtccaaggcagctccggacgtccaggtaggtcaccagggtccactggcagaggtatccgtgcaggggcaaccggccggcctctgtgcggactgtgcgtgggagctcggggccccagggcgctgctgggaacacactgaaaaggctttgcagctccacgggcgagagggcgccgtcgcggtcctggtcgtgcttctcaaacactctctgcacaaactggtagccaaggtggttgagctccgtgctgcagccggggggcacgtggatcagaggggagagatagtccgcagtcagctccagggcatcgctgtagccgaagcgccgcaggatggtccaggtg

SEQ ID NO: 9801 - DNA, 99 bp, Homo sapiens
ttttcagaaaagtggactctctctccgaagacatctccttgacccagtctatttatgacaagaagcttgtgttaatcgagaaaaatctccagggcctgg

SEQ ID NO: 9802 - DNA, 431 bp, Homo sapiens
cctaaatcttgagtagtgtacggtaatgacgcttcttcctatatccactcttattatgttaaaacaaatgtatttgcgagtattggcattttagactttaaaaatgctgtatgatttcagatgaactctgctgtttagaagtaaccacagaaaagcaaagtcagtgtacactctgagtgaaaggaaatgtaatgtggataaaggcccgccacctcctcacattggtctatctactggcagctgatacgtttaactcatttccttgagcttatacaaaacatagaaaagcaaactgttaaagtagtcaataattatttgtctcagatcccagattctatgatccctgcttaaaagaaaatgttcactgcatgtaggttgatttcttatgttttgtagactcattgttatttttcaatccccaaaagtcttgg

SEQ ID NO: 9803 - DNA, 225 bp, Homo sapiens
ctcgaggaatctgcagtggagctcatgaaagaccagcatttacgaggtttcttctcagactccacatcattcaatattttgatggatatgttatttatcaaaggcaaatataaaagtgctttgcaagtattgatagagatgaaaaaccaagatgtgaagttcaccaaagatacctatgttcttgcttttgcaatttgctacaaactgaatagccctgagtctttc

SEQ ID NO: 9804 - DNA, 397 bp, Homo sapiens
cctgccccagttcctccggaagtccacccaggggatctcctactctctgttcgcgctggtgatgctggggaacacgctgtatgggctgagcgtgctgctcaaaaaccccgaggagggccagagcgagggcagctacctgctgcaccacctgccctggcttgtgggcagcctgggcgtgctgctgctcgacaccatcatctccatccagttcctgggtgtacaggcgcagcaccgccgcctcggagcttgagcccctccttccccagctgaccagaaccagggttgagcgcaggaggacagggcaccaccggattgccacaccaggcaggaggaggtgtggacagtgatggtacggcggccctgcatcagcctgcgggtggctctggatcctccgtgg

SEQ ID NO: 9805 - DNA, 553 bp, Homo sapiens
tgaatgataagattaccacttttcagatcattaactttacatataagaaaaattccctgagtaagccattgctgggggaaaaattataaacttttcatgtcatgatactttatttatttccataaaaacttaacatcacttcttgatattttctaattgagagctctttattgaaaaatagcaactttctaaattaagagctccttattgaaaatagcagtttgtgcacacaatagcataacattcttttctgtattttgaggaattaaggaaaataaatgtttttaaagatatatgccaatagtgatatttaacacattaaaggtgtggatggtatttttgaagtgtcttaggaaggaaagccaatgtggatattggcaggggtcactgtgggaaatgtgtatcagtgaccgtttagttgtaaatgcacaaaagagaaagaatgtcagccttagaggattatcctgcttttcccaattttagaaccaggaagtttttactgaaatggctttgtggaacttacttacaagctaagtaaccttcccagtagttt

SEQ ID NO: 9806 - DNA, 495 bp, Homo sapiens
gtcagaaacgggtccagatgaggatgaggctgaggctggatggggtgactgacagtctggatcattgaaactgattgggtggttggtcagaaacgggtccagatgaggatgaggctggatggggtgactgacagtctggatcattgaaactgattgggtggtcagaaactggtccagatgaggatgtggctggatggggtgactgacagtctggatcattgaaactgattgggtggtcagaaactggtccagatgaggatgtggctggatggggtgactgacagtctggatcattgaaactgattgggtggtgagaaatgggtccagatgaggatgaggctggatggggtgactgacagtctggatcattgaaactgattgggtggtgagaaatgggtccagatgaggatgaggctggatggggtgactgacagtctggatcattgaaactggtccactatgacgcagcaggggcagtttggcagaacatcctct

SEQ ID NO: 9807 - DNA, 353 bp, Homo sapiens
aagtctttaacatgcagccaagtccatctacctcaagcttgagttctactcactcggcttcacctaatgtgacaagttctgctccatcgagtgccagagcttctcctttgttgtctgacaaacacaaacattcccgagaaaactcttgcctgtcaccaagagagagaccatgcagtgccatctatccaacacctgtggagccttcgcagaggatgctgtttaatcatattggagacggggccttgccacgcagtgacccaaatctctctgcacctgaaaaagctgtgaaccccacccctagcagctggagcctggacagtgggaaggaagccaagaacatgtcggatagtggg

SEQ ID NO: 9808 - DNA, 463 bp, Homo sapiens
gaaagggggccaaacagctctgaaatttccaaaatggctagagggagagtccagtttctgagctctgtacccaaattaaaatcctgatgttcaggttaatccaagcaacacgcattgggtttaaaaccagcaccgaggcccagtgggggaatcacagacatcaccaagtctcgtcttctttccttcctgtgagttgaaaccaaacaggcctctcgctcactcctcccagcccagtaatgctgaggagttcagttgtgaggaaagaaggctggagctgtgagattcgcttttccctaggctgttccgcgtgggttaccttattcaccctgggagcacttggtattccagacccctggacatgaggaatgcaggttcacactgtaaagagtttgtggaaaggtttcagtcttaactggggttccttagctggaagccagggctggaagttacaggcctgaccttc

SEQ ID NO: 9809 - DNA, 726 bp, Homo sapiens
gcttgcgacctcttaattaaagatctttttttttttttttttttggtgagcgcgcggcacctttattaaaccacgggataacggctgcccgcagcctccggatcggtgggcgcttgcggaaggggacccggctcagggcccagggctgggactcagccactctgacaggttggagacctcctgcagccacagcacgtcctccaggcggcttccgaggctcgccctgcccggcgccagggccctgccgtgagcctcgcggtgctcccttcctctaggagtgaggggggccgcggtggcttccgggcggcgcggggcggcctctgacgggctcggggccctggcagagcgcagagctcgcatctcctctatgcgggggctgcccctcttgagcctcttgttttctgcttgcccgctggtatctgctaggagctccaggctgctgttatcaggtgcgtcctcagtgccctgggctgagtcctttttttctagggttagctgcttcacctcacatgagcagtggtgaagaaattggtgttgggtgatctcacgaaatactttgtgcagtttggtcctgaactcttgtgtgtcagctgcttgaagggtctggagacacatctttcggaagctgctcctagtgcttccagtcagaatactcatgatggagttcacagccactgagagtgaggcctgtagtttctgctgagccttggcagcctggtgatgttg

SEQ ID NO: 9810 - DNA, 392 bp, Homo sapiens
catttgacccgcccccttctcgctcataatgacacccagctcctttgagaggatcagagcccattgcacaagaagagccgctgccaaccatccttgtcctccgattgcaaaatgacaccccagtaatctagaacattctcaagcccctttaactcagatgtcaagccaccgggcaaaccccgtcaatacctcccaccaaggaatgagatatgtggacctcactgctcccccaacccagcgtcaggctgggacatgccaacgctgttccgggttggaacagcagaggctcagaaactggctctgaaataggcagacctagcaagaggaagatacagggtatcgggcgtttgagtgtttcagaagtcattcgggaagataaatccagtgcgctg

SEQ ID NO: 9811 - DNA, 595 bp, Homo sapiens
  misc_feature (1)...(595): n = a,t,c or g
agagaagggatactcccgcccaagggccaccgagccgagagaagcccgggccagggctttcttcgcgtatgtgggaatgcaggcgcgagccctttggggggcacagtccatacgggagctgaggccgaagccggagcactaactgtgctgtccaggggatcgagacggcactagagggctggactccttactgcctcagtttccccagcactacctttgttgaggaaacggagatggggatactggccgaacgcgcgcctgctgagacacagtgcaactgtatttagacgccccgcacctccccaaatctgatcgaggctccttttttcaagcacccgctatctctcagccctttaaaatccggccctgcctttcgagtctcttcgggcgttccattgggaaagattcgggggctccagctcccttctctagaatgaactgctctgactgccgcccggcttttacccgagctttaactgcgnaggcgaaaggngcagncaacccggtaaaacgggaaggagttgggttgttgacggncgttggggggttcaagggncgagaagcttgttaaccattgatttnaagggganttagg

SEQ ID NO: 9812 - DNA, 268 bp, Homo sapiens
tccttataaacctgtcagcacgcatgagggtgtctgtgttcagggaaatgaatgactaataccattatttgagtcttatgtgaagacaacactattctaacacgagagataatatacatggtactgtttattcaactggggaaaaataaaactttgagcatttcccttggaactcgagatcagatcataactcatttgcctagaggcagcagaaatctgatcctgctactggagcttaaaataacaagtaaagaaaagtgttagaaac

SEQ ID NO: 9813 - DNA, 790 bp, Homo sapiens
  misc_feature (1)...(790): n = a,t,c or g
tagcagatccaggagctgtgagcctggggctctgtgggcactggggctgcttctgaaagctggggctgcttctttgctttcctttgcttcctcatcagctgaggcccatctcgctccacaagaggcattttttccaggatggcagccctcatgtggtcgtatttccggaagagtgtgtcatactccacagcccgctgctgcagctccacgtccaagcagctcccgtagatggacaccacctggcggatgcggttgttgtccccacagaggcgagtgctgagcttcatgagggctgtgagggcatatcctcgagtggctggcagggacatgtgggactgcagcaccttttccagcaatgccagcacttcctcttcgtccacctgaaggggctcaatctcctcgcagttccctgccagcaggaggtccccatactccccaatgcaccaggctgccacctgcaccagtggttgctgggaaatgtcttctgccagggcattgtagaggcggcgcacagagtaggcatgtagctcctgggcccccccaatcagctgggtcaggttggccactgcatcatcccgcacatgggtgcccgccgttgtcagcacatgcaggatggtgtctatgtgccagcgtttggttggagcaaacctctctgcagccagcaggatcctgaggcacagtcagcccgtaggtcaggagagccttcctgaatcctctgacctcggnctcaggctttagcggagagacagcatgataggcctggagttcttcaagaggcctcgttccgaat

SEQ ID NO: 9814 - DNA, 963 bp, Homo sapiens
tgtttgtggtaaagtgaaatgtaaacgacataggccttctttgctacttgaaaactaccagccatggctagacctgaaaatttcttccaaggttgatgcatctctctcagaggttcttgaattagtgttggaaaactttgtttatccgtggtacagggatgtgacagatgatgaatcctttgttgatgaactgagaataacattacgtttttttgcatctgtcttaataagaaggattcacaaggtggatattccatctatttataaccaagaaactattaaaagcagcaatgaagcatatagaagtgatagttaaagccagacagaaagtaaaaaatacagagtttttacagcaagctgctttagaagaatatggtccagagcttcatgttgctttgagaagtcgaagagatgaattgcactatttaaggaaacttactgaactgctttttccttatattttgcctcctaaagcaacagactgcagatctctgaccttacttataagagagattctgtctggctctgtgttccttccttctttggatttcctagctgatccagatactgtgaatcatttgcttatcatcttcatagatgacagtccacctgaaaaagcaactgaaccggcttctcctttggttccattcttgcagaaatttgcagaacctagaaataaaaagccatctgtgctgaagttagaattgaagcaaatcagagagcaacaagatcttttatttcgttttatgaactttctgaaacaagaaggcgcagtgcacgtgttgcacgttttgtttgactgtggaggaatttaatgatagaattttacgaccagaattatcaaatggatgaaatgctgtctcttcatgaagaattgcagaagatttataaaacatactgtttggatgaaagtattgaccaaattagatttgatcccttcattggtagaagagattccaagaa

SEQ ID NO: 9815 - DNA, 652 bp, Homo sapiens
ttttttttttttttttcacttttaatcattaagtttgtgttagtctttattaaaaacaaaaaataactaaaatttcagacagcgatgtacataatatatataagaatatacccaaaaaagtaaatttctaccaccctcgcacagcagaaatttcaatgggttattctataccaaatccaagtgtttacatccaagatgtcacagaggtaacttccttttgtaccttattgagctctggaaacagttcctgtatcacaatgtccaataaaacataagtcagctgcttgttgagtactggttgctgtaagccatcaaacagaagtctgatgctttcatacttggtttcttcaccaatacacttgactaacagatctggaatgtaattcatcatttcttcaaaagtctgttttgctcctttttgcttatcttggagagagcgaggttcagtgttttcacagaatatagcatctctgagaagtgttatgagtgagaccaaacggtgctcctgaaatagctgttctagtttacactgaagatagtaatcagtatacatttccagggtgtttttaaagaggattcgagttcccattaagagatgatgaagccagtcaggaacctggaaaactacccgtcctacatacatcaggtaatc

SEQ ID NO: 9816 - DNA, 445 bp, Homo sapiens
gctgcttcagatcatgtttattgtggggccagggggtagggatcctcgggtgagagggctggctggccggggtaagttgctctggacgtgctggcggggagcagtcctggtggcgggatggcgggggcacttctgggtcccagggtgcacgggatccgggcagtgctcagggtggcaagaggcggcgtgcaggcacctggggcgccggggtctctaggcgtttcacacgcagcagcgcccccagcacgccctcagggggcagctcagagcccacatcgtggtcggcggcacggcggaggcggcgcggggctgccaccccctcggagtccgcgcttcccgcaagaatccgtcccagcaagtacctcaacagctcggggtccacgtcgggtgtctcgtcgcctgcctcctcagcatccgggcccgcggggccgtcgtcgtagaccgg

SEQ ID NO: 9817 - DNA, 245 bp, Homo sapiens
gaaaatctaattgtaaatatgaaactttttaaatctgattttcttctaatatcattctaggctatgtagaaagcaattatttacaaatttgcatagttgagactcccagtgttttcctttatttatttgaaaaagaaaggcctaaactgtcaggtagccaagtttttttaagaccttaaaagttaggggaacacaactggtagtgttaccatgcatggcactgattgtagtatgtctttggagct

SEQ ID NO: 9818 - DNA, 947 bp, Homo sapiens
  misc_feature (1)...(947): n = a,t,c or g
cctcatttgtgtccggagctcaggagttcccaaagccactcagtcgcaccaagtttccgtcttttggaattggggaaggagtttctttctttcttttcttttttcttgagccagttttaatcgctttgaataaatactcccttaagtagttaaatataggaggagaaagaatacatcggttgttaaagcaggagaggaagagagacctgccctgtagcgtgactcctctagaaaaaaaaaaaaaaagccggagtattttactaagcccctaaaatgtcgagatttgtacaagatcttagcaaagcaatgtctcaagatggtgcttctcagttccaagaagtcattcggcaagagctagaattatctgtgaagaaggaactagaaaaaatactcaccacagcatcatcacatgaatttgagcacaccaaaaaagacctggatggatttcggaagctatttcatagatttttgcaagaaaaggggccttctgtggattggggaaaaatccagagaccccctgaagattcgattcaaccctatgaaaagataaaggccaggggcttgcctgataatatatcttccgtgttgaacaaactagtggtggtgaaactcaatggtggtttgggaaccagcatgggctgcaaaggccctaaaagtctgattggtgtgaggaatgagaatacctttctggatctgactgttcagcaaattgaacatttgaataaaacctacaatacagatgttcctcttgttttaatgaactcttttaacacggatgaagataccaaaaaatactacagaagtacaatcattgtcgtgtgaaaatctacactttcaatcaaaggcagggtncccgagggatttaataaaggaatcttttactttcctgttggccaaagggacgtgtctttacttcaggggggnaaatacaggagcttgggtaccct

SEQ ID NO: 9819 - DNA, 261 bp, Homo sapiens
ctggctgcaggagttcagtcagcgtggtgggaaatattattaaaattatagaaagaagcacaccttcttggaaggccgggaggttttgcaaaagcttcaggaaaggatttggctgaaggcagctgaattctctcagagtaggttacaaggaagtgtaagggaattgatctagataagttagtttacttaggcctcagaactggcctttaatcatccacatgtaggactgttctggcagcgggggttgggggggaaccgtgt

SEQ ID NO: 9820 - DNA, 764 bp, Homo sapiens
ccagacacaagagtgcatattatttcatttatttgaagttggaaaaacaggcaaaataaatcctatgctgttgaattaatagaccacccttgggatagtggtatagtaactggaagagaacatgcatggggcttctggagtactggtgatgttccaactcttaatttcatactagtttttgcatcgtattcacggtgtgaaaaatcacacctgtacacaatttgtgtgattttctgtatgtaaattatacttcaataaaaaatttaccaaaaagcaaacaaacagcaagtgagatatcactacacacgtattaaaaagcctaaaattaaaagagaaatcaatcaataccaagtgccagcaaggatgtggagcaacagaaatgttcatttacagatagtgagaatataaattagtataatcacttcagaaaaatggttggcagcctctatatctaaaggtgaatatgcacatattctatgaaccagtaattccaccccattacatacccatcacaaatgtacacatgcgtgttctcaaaagacatgtacaggaatgttcatagtagtattatcccaaactgaaaataatccaaacgtctttcagtgctgttggagcttattaaagtcaattacagctcagaattgcagtgaagttaacttccttgggggcatccctcaatcaattggaaacaggagccagcggataaatatttcagcctcctgttcagtcagacaattctgggaagcattatatatccaacctcc

SEQ ID NO: 9821 - DNA, 426 bp, Homo sapiens
  misc_feature (1)...(426): n = a,t,c or g
tttttttgcaagtccagagcagttttaatgggggtggaggctgtacaaagggcaaggcccactgaagcgggggaaagccaggccgtgctgcccccggcccaggtatggggccttggcatggacgcccttcctccacctccagcaagagaaagagtaagcccttggggaggaaggaggggaaaccagctcagccccaaatcctggtctctgtccaagccaggccccaggacagagggggactgatggtgtcagggtgggggtggtctcagcagaaagcagaaacggcatcaggcctctcccacacaaaaaaaaagcatcaaaagttcaggggcgctagcccctcccgcccccgcccaccctgtacgaaaaagtgcaaaacattatcacaaaaaggggctctcnggaggtgcccctagcctaggctcc

SEQ ID NO: 9822 - DNA, 348 bp, Homo sapiens
tttatcttctcacatctttattatgtattttataatcctagctcaaaaatcactcttgtacttttagatcacaaatttgcctttaagtaacacataatacacttaaggcagatttgccttacaggtggcctcagcttctaaacaccactacactgctttatataaaaaacaaaaatcacatagaagagaatctagtgacatctttcttggtattttaaacttaaaaactgcataataaattgagttcccataaaatttcgcccttgagataggaaacaaacactactactattttatagttgcctttatctgacttgattgatgcagttataatagtattaataacat

SEQ ID NO: 9823 - DNA, 301 bp, Homo sapiens
gtaagaatcgtttggtctcctgccgtgcccggaatcccagtcagaagttccagcctgccactgttctctgatgccatgccagcaccaactcaactgttttttcctctcatccgtaactgtgaactgagcaggatctatggcactgcatgttactgccaccacaaacatctctgttgttcctcatcgtacattcctcagagtcgactgagatacacacctcatccagcatatgctaccttttgcaggccaaaggagaactggtggcagtacacccaaggaaggagatatgcttccacaccac

SEQ ID NO: 9824 - DNA, 1702 bp, Homo sapiens
taaaatgtgaaaggagttctttttaatacccagggtaatacaatatccaagatataacattaagtgataaaaaacaaagtgtatgacagtatagatgacatcctacttatattttttgaagccccgcagattttatatgtatgtttgtgctttacatgcctagagtatctctggcagtgtgtgtaagaaatggatcaaaacagttgcctccagggagaggtaatgggtgccggagaagagagggaggcttaggttttccactagatacctatttgcgctttttaaattttgcaccatgtatgtattaagcattaaaaataactgagtttaaattaacagaaaagaaaagaaaacccagtgagcctatgaagtgttgattctcattttggtttcttttttcttttttttaaagatgaagattaagtttgttttatttattcttgattcctcttttgcctttcaaagtcatggtcatatattaagtaggagattccaggttctaaagtaaaatatcgaactgagatgacagcattagaaaaccaggcccaggacctgggattctgggctgagacaaagaactcaatcccaaaacacaattttctgataaattagaactgttatttaaaaactttcctagtgttccaatgtattttcatactgtatatatgtaaaatacaaaaggagcactcttagtaaggatacttgtacatttgtaacttgaatataagaaaaagagaccaaaaaagagacaaaattcataaagcaaagcatgtttaaatgaatgcattcctcttacttcatcctgcttcagtattgctcaagaaaatgaagcaattatttatcttgatttgctaccaggaatttttttaaaagccaaaaggaaatattccactatttagtgtttcctaataaaaaataaaatttcactaattatgtaaaaaagaattgtattcttttacatagatcaacacaaaacagtacattgcctttgtatgttaaatgctcattatgctgagtgacaattctaagagcaaagacatgtagttatctaaattttatgggtcctcaattactgcagatagacagtacagtaagagacagtacagtaagaaataaaaaggctgaaaggaatgttttggacattataggaggcctaactttgggtggtgtagatacagatcaaaatgaattctcaaaccagagatgggctttgtggaatgggcctaaagtagtgacaaggtagtcacagacttctggaggagggtacttgggctggtgtctacctggcatatttaggaacattccataacgagatgtaatatcagcacaattgattatttagcccaaggtctcagtcagttgatggctacaagtgttaagtaccacaagccccacctctatctctgtatgtttagagtgcaaatattttccccatgcttctcgtcccctagtcactgcccacccccctccgcccttccctattcttacaggacttagcaggctggcacactagagctctgtctttcaaagtcaagttcacatagaggagatacaagtaaccacaagcccttgagtaacccacgcaaagaaactgcttggctttggtctaaatgacttacatttttcctcgcttgaattagccggtaattacatgtgggcagacttagccagaatagtctaaatgatcaattagaaggcaaac

SEQ ID NO: 9825 - DNA, 887 bp, Homo sapiens
  misc_feature (1)...(887): n = a,t,c or g
ccttctctcccctccctcatgagtctatccacgcagttcttaacatacattccaaactgctgcggggtttcctctccacacccacgaggccaaacccgcatcattacagtccaactcttcttagacactaatcactttctaaaagaagtgagttctccagggaagaaaaatcaacttagccagtgaaaagggttaaacttaagtctattatttgttgccctcaatcaaaagatatgtatagaaaagtcatttaaattatttatttctacaagctaattgaatccaggagcagctttaattattaacactaacggaagagaaaagaagtatttccaagggctcaaatggaagctgtactcagtccggtggaggcagggggaggtaaagtttctcacactcaagtcgtcttcatagtttactgtccttttccaaacaaaagctaataacgccatacgcatccacacactccctcctgggatgaacctaagtctcgtccccactgtcaccccaagggccagttatcaaaaactgttccttctctgccctcaaagactgaaggccgcaggcttggttctggcctctgctcaggaatctgattgctcttaaagtgctcttacaagattccgtcgatgtttgctccctctgtcttatctctccttccagtattttcagacgggacaagctctgactcaggccacccaggcaccgggcagccttccttgggtggccagtggaaatctcttcccagtagggtgcttcagggttctttcaccctcttcgttggcaggcagcccctctgggcccgaggattgtatttttttagtntggttcaagaacagagggggcngggggagggtnggaggaaggggaggntaccttccngggaa

SEQ ID NO: 9826 - DNA, 638 bp, Homo sapiens
ggggttaagggaaaatgagacttggaattgtagcttttatccaagttttgagtataaatagggttttgttttgttttttttaacctaaaaactgaaatgccatatagaaaaacagcattgtttttacagtttgtagtaagtaactttttaaagattttatcaaaaagaattttgtctatagtgagtaaaagaagttctaataatggtcctaatcactgcatttttaaaaaacaaagttcaacacaaatgacatttgttttaaactttagtagataaaaggtgaaccatgtgacatgggcatttttgtaagtcaaaaacaaatttcacatatggtaaacctaatattcacagtgtgttccctcacttgtaatctctgaatacaaatatactagcttttctaaagggaatcatttttttaaaagtagtgccactgacaagatgctacagtgaagattatccattcttaggatatttattttcagtgaacattttctgcacaaaggtagtgttgcactgggacacaagccttttaacagataaccagttgaaatcaaacactgcctccacaccgagttctgttgtgtatttgatagtaaattgatttaaaaataaaagtggtttttgttagaaaaaaaaaa

SEQ ID NO: 9827 - DNA, 407 bp, Homo sapiens
ggaagaattcgcggcctcctgccgtggctggggtcatggttcggctgcgcatgtccagaagcatttcccttcctgcgaccatcccggcgcccctaggggaggaagccaggacagcagcttccgctgtctccacagcagacacgggacggattccacagacgggagcctcattcgtaccatgccaaacgcattcactcggggcagtattaaccgttctagaaagccactgttttatagcaaaacaggaaaggaaaagctaccagttttttattcagaatttttctcagatatataggattatagcttttatatgcctttttatattctgaaattataacaaaagatactttctaacagtagtatttttagaatggcagctataaagttaactcctggggcacaagtaa

SEQ ID NO: 9828 - DNA, 565 bp, Homo sapiens
ctgacatggaggatgatttcatgtgcgatgatgaggaggactacgacctggaatactctgaagatagtaactccgagccaaatgtggatttggaaaatcagtactataattccaaagcattaaaagaagatgacccaaaagcggcattaagcagtttccaaaaggttttggaacttgaaggtgaaaaaggagaatggggatttaaagcactgaaacaaatgattaagattaacttcaagttgacaaactttccagaaatgatgaatagatataagcagctattgacctatattccggagtgcagtcacaagaaattattctgaaaaatccattaattctattcttgattatatctctacttctaaacagatggatttactgcaggaattctatgaaacaacactggaagctttgaaagatgctaagaatgatagactgtggtttaagacaaacacaaagcttggaaaattatatttagaaccgagaggaatatgggaaagcttcaaaaaattttacgccagttacacagttattagaaatatatgccttggaaattccaaatgtt

SEQ ID NO: 9829 - DNA, 979 bp, Homo sapiens
ttttttttttttttacaatttctgagctgcactgtttattttgctgcttgaaacctaagtgacagtatgccactataattatggggtttcgtctaaacctttactacactgcaggtacagaaatatacggacacatttttagagaattgacattttgcaaaatgcagcaaacattttaatttatacatgagaaaaggaagtgttcaaaagggtatgcatttcaagttattgcaggttatttgtgagagaatttctgcaggtaaaacatgtttaaatttaaccaacagtagcgtgtcagtgtatttaaaatcatgacaaaaatcttctctctggtcatgttgcccatgacaaattactatgatgttgtacgtttagggcaagatgtcaatacagcataaatcccatggtattttggttttcttctggagattaaagctgtttttcttgggataaatgcagcagcaaaacacaaaccagttgatcaaaaaagcacttctgccataactccaataattttcaggacacatcaaccgacagtagttttgccattcccagttcttttaaggattacatctctgcactgttgccttaaggacgtctgtaaaagcttgttctctgttaagccagtttactgactacagcctggttgagagaatttagttggttggtccatttatctagtgcagtatatcgtgcaccacccctcttctgatgatccagttcaaggagttggttgacttgatcaattcggccatgaatagtgttatccaatatgcactgcaccagcaagctctccacatcagctacatctatgtttaactccttagaaataaaaggaatatgtattcttgtgtaaggcttaattaattttataagcacttgtgttctgatgtttcgcaaaagctcttcaatgtgttctcttatgaaaggatcatccatgatgttgctgtgatttgtttttagaatcttttcaaattca

SEQ ID NO: 9830 - DNA, 510 bp, Homo sapiens
gttatttctctgtcataaaattgtaaatagcattttttaagtcaaaattacatttaaaacagtggattgttctacaaatatatatgtgtatatatacatatgcttctgaaataaggatatattatatgagtttttatttgatttgtggtctttagtcataggtaatcaaaaataaagagatttgaatgcaaaactttatacattaatgtacatttctaatgatggtacaaattgccactttataataaaaaagaaacaggtgggaataataatcaaagcacgtgttccttcagtactttggtgatttttaatcccccttgtgatgcacaggaaattattttttagttacaaaaagttatcttaggaaatctatacttccccaatacagatttcatgataagtcatatcaaattgagaatttgtggtgaaagaataggaaaaggatgctagatgctgatctttctttttcaggatttttcctggagcccaagttaaaaattcaatacttaa

SEQ ID NO: 9831 - DNA, 1018 bp, Homo sapiens
  misc_feature (1)...(1018): n = a,t,c or g
gtgtgatggtacagaaatacagtcacatattatattaatatatatagatggataggaaaaacctacagccataggtattgtccaataactgattctagaggtagaactatagagtatacatttccttttttcttgctttgatgatatttttatacaattttatatgctataaaattttcaaaaatatatttgctattttcatttgtagagcttggttaggtttttatcagctcttgtgcccactgtacaaccagattcccctcatctaatttaaatgtcttccctttttcaaactctcctttatgttttcctttttttttcctcccatttttctacccttcacaaattccttcttttgcttctgtccagggnaacccattctgcttgcggtatcattttagcacgtacaaacacaaaataatgggaaaaataaaagcaccttgttccatgcaattcgtatgggaaagttttgggtgtcaaaggtcgctggggatanatggggaggcagaaatagcttgggaaaaggaagcaggaaaaaaggaaatctttatgggaaatcaattacccaaagcaaggcccagtcacctagaggtgaatatgatgttgttattgtcctcccttagtgtacagcacagtttttgctctcacagggtttttctctttaggatgcgtacacccctatgcattaaatacatagcatcctaaagacaccctactcaccatgagtctgtagggtctttccctgatgaagggcactgggccatatatgaatggaaaactcaactcatctcctcagctttaggatgttgctgctgttcagctgggatttgtgaggaaatatctgggattactatccaaggaacatttagcaagactcaaaagagagaggcaaggcggaaccaaaacccaaacctcaaccaatgacttagctgaataaacaattctttggaggaataaggaaggtattttctggatgtattctgagaatgctcttccaaaggggaagatggtaataatg

SEQ ID NO: 9832 - DNA, 49 bp, Homo sapiens
taactccgttaaaaaataaacgtatacattctgtgaaaaaaaaaaaaaa

SEQ ID NO: 9833 - DNA, 1107 bp, Homo sapiens
ccacgggcaatcctatctgctcgccctcctgcaggtgggggcctcacatatctgtgacttcgggtccctgtccccacccttgtgcactcacatgaaagccttgcacactcacctccaccttcacaggccatttgcacacgctcctgcaccctctccccgtccataccgctccgctcagctgactctcatgttctctcgtctcacatttgcactctctccttcccacattctgtgctcagctcactcagtggtcagcgtttcctgcacactttacctctcatgtgcgtttcccggcctgatgttgtggtggtgtgcggcgtgctcactctctccctcatgaacacccacccacctcgtttccgcagcccctgcgtgctgctccagaggtgggtgggaggtgagctgggggctccttgggccctcatcggtcatggtctcgtcccattccacaccatttgtttctctgtctccccatcctactccaaggatgccggcatcaccctgagggctccccctttgggaatggggtagtgaggccccagacttcacccccagcccactgctaaaatctgttttctgacagatgggttttggggagtcgcctgctgcactacatggagaaagggactcccattggcccttcccttttctcctaacagtccctttggtctggtctgtcctgggctgtctgtgtgtgtgccattctctgggacttcaagagccccctgagccagtcctcccttcccaagcctccctttgggcctccctaaactccaacctaggctgccagggaccggagtcagctggttcaaggccatcggggagtctgcctccaagtctacccttcccttcccggactccctcctgtcccctcctttcctccctccttccttccactctccttccttttgcttccctgccctttccccctcctcaggttcttccctccttctcactggtttttccaccttcctccttcccttcttccctggctcctaggctgtgatatatatttttgtattatctctttcttcttcttgtggtgatcatcttgaattactgtgggatgtaagtttcaaaattttcaaataaagcctttgcaagata

SEQ ID NO: 9834 - DNA, 1574 bp, Homo sapiens
  misc_feature (1)...(1574): n = a,t,c or g
taaaaatatttatttaaaaaaatacaactgctgtccatatctagttgcacatatatctattaacatatatgtatacttttagacttgtagtaaatttgctacagtgcttttgtaaagccagcctgcattatacaaagcaaattcctctgtcagttcttacataaaatagatttttaaaaatgtatatctttcctaaaagatgcatatcaccattatagaatttaacaaaatttttgcataaaacctgggaagtgatagaaaaaatgatcacctgattggtcagagcaaccccttactatgtctggagatgcactgagtatcaactacacattttttttttcaagcagcatattattataaagccctcaaagtgcttttgcatcctttcgctcacctctctacactctataaagtttctctgccgtatacagatagaattcaagactctagctacaatcatcctaatcaatcttagagcaatatccctttgtttcccaacaggtaagtcagactgcttagctaggagatgtggcagcttccctccagctgtttcatcaactaacatgaagtttaataaatgttagcagtgaccattttaattgcttttttaggaaaaagaaaaaaaaaaggtgcttttaatactttgaaggtgctttttaggtctccctaatgtaaattatgctgaaatcaactaagacgagctattattaacactttaacagttatccattcctctgggtaggtgtgcacttacattatatgtaagtatctctacaaagtgttagatactggatatgagatacagatttcaataaaacaagggaaaaaataagcaatgaagtaactgtcttctcagttgagctgacaggtttgaagaaagcactcttgacatgttcttactaccacatatcccaaactaagacatacacataaaataacatatctctcctgtgttaacactgatggagacgcactgcaatagtcccatggcagacatatgcttttcttctgaattacagattggcttaatgaaaattaagagtttattattaagcatcttttaatttttaagtgatgttcatacttgacggttcagaaactgccactgccactgtggttaaatcacttggtgtatggaatttaaaataatctaacctagagctatttcccattaatcaaactcatccctaattgtctcttaggaaggtcttctttaaagaagatcgagtagggctcatgaaaaattattggtttgttcttcaaaatgcatagttacatccccttattttttagccaatttgattatttggtaaagcaagggcataattttaagaaactaattttaatcaaaaatttttacttgcctcaaactaaagctaaccagtagcaaaatgactggactgaatttcatatttaatcttccctgcccacaaagataaatgaaactgctcaaaggcaaaaataaagaaatataattgtgattagaaaagatccagggccaaaacaaataaataggcctcaaggaataaaaaattaattgnattcgtttcttttctatctttacatatacgcat

SEQ ID NO: 9835 - DNA, 648 bp, Homo sapiens
tttttttttgtatttgaatataatggagcaaaaaaaaaatgctcttttattaatctgatatacactaaatatctttgcagctgttacatgaatgttagttatctggcatataaatgtatacacaattccaagtttgatagatttatgctgtacacgagccatcccacatggagcatgccctttcacaaggatacggcatggctgtctcgggatatttgtcaaaacacatttggtcaaacattttggcaattggaaatcagacacagaggagcatacaggaaagatgagttcacaacaggaccagctgtacttaagatgaaaactccaaaacctgaaacagaatttacacatgcagcacacgtatatacagtacaataggggtaactggaacattcatagcaggagatcttacacagcattaaaaacaggaagaataaaaaaggaaaacaaagccaaacaatccaaacaccaaaaccgacaggaccattgccaagatctcattaaaatagacagtggatagtacgtttagcatatgttcaaaatggaagttcacctgaaagagaaaactcttctatcatgtcttttttaatatacactttcttagcatccatgcagttatgtatcctcatcctgatccggacgcgtggg

SEQ ID NO: 9836 - DNA, 790 bp, Homo sapiens
  misc_feature (1)...(790): n = a,t,c or g
gcgagccaaaggattcttggctccaagcctggtcctggctgttagtttggaactcatgcacccagatgctaactcgccctcagaatgcagaggggatgaaacactgaccagacaattcaatctgtatatgggtgagtccagggctcagtctgcattgcgcggaaaatgaaggtgaaggtggaggtgggacctgatggtctcgtcccggatagggttgaagaagtgggagaaaaggaatcaaaatcgtggatgggataagattgtgcgcgaatgctctctgggagcggatcgtggccgacgagggcccgaagatgctgccttgtgatcgcaggtgtgagtggaagctgtgagataaactggaggggaagacgaatggcaggagggtgaagaggaaactgaattactgtgcaaacacccgccactcaaatccgggtggttactgcagagtgaataacgataggtactatttcgtgtaaggcaaagtcctttgaaagggctcctagagcgtcaaggcctccacctgatgaatgaatgagtcaggcaggcccagctccacttcacggatgggaaaactgaggtacgaggcctcgctgaaagatgcgaggcagagcggagaaccagaagcaccacttctctcaggctgatgctctaatctcggctccccccgcccctacaatggcgtagacggcctccgccgnccgactcacacacaccctcccccgggaacggcaagtctcctcgggttccaaggacagggtcaaaagacaagagggcccgaggcgcttcccgc

SEQ ID NO: 9837 - DNA, 789 bp, Homo sapiens
tggcaggatagagttttaacaagcgcatcaagcagtaataatttgtggtcttgtgctaaattctcacacaatgatctttgcaagcatcccagcagccatcacagctctactttcacattgcatggggacacagcacagagcagcagccttgaaaggactgcaaagaggtgtgaattccaaacattctcttaagtcctaacatttctgttcttcattttgtgtgacagaagcccatggaaacaaggcgatgacggcgcttgagggtgaccagacctcctcaatcattccatcagccacccaggactcaacagcagaacctcagaggactcagctgaaagaggttttcactcgagcactaaccacagagaaatgggaagtgccatcctgctgtcatacgcagccgatggctgggtaggactaaatgcccttctgtggtgagatgaaccaagacggcagatgggggaataacatcagtgagagagagattacgaatggatccttgtattgcagatcaaactgggttgtctcttctcaaaccacccaggcagtttctgaatgtcccaagataggggtaggagaaaagaaaaaaaagacaaaacaggagacggtgggtaagaaaacctaaaaggcacaatgaggcaaaggcctaagatggaggctggctttgggatctgaaatccggccacaatcctccttgttttacctcaagtccaagaattgtcaaaaagaaaacccagaagggctattcattctaaattttaaaatcttttcttcctggcctaccaaaaa

SEQ ID NO: 9838 - DNA, 379 bp, Homo sapiens
ggtttatatattaaactaataaaaaggtacagggtaaattatatacatatatgttaggaatgtatatataccttagattaaagaaaaaaaaatgactcacattcctgtaatataaaggtcccattgcctagttgaaaaagtgaccctcttttcctctgtacatagtgaagccccgtatgtatggagttttaatctgtacagaaagaaatgtattattcattggtctttctgctgctggaaagataatagaatagctgattcttacaacaactgtatgatcagggatgagttagagtatttcttttgtctttgctcaaagcccatacatatataaatatatataaagattattaataaattcaacaaaaaataaaaaaaa

SEQ ID NO: 9839 - DNA, 267 bp, Homo sapiens
ccgcgtcgacgattttggaaaggttctctggcgttaattgccatacaaacgagtgctctttctcttaggtaagtgatgtggagagtattatattgctgttccttgcctataaaataaccagattacaaaagtattaaatataaaataaaattacaggagtcagaagtgtgagacttatttctataatgtaacaaataatggattctaccttattactgtaacttcaaagttttattaaaagttgtctaaaggttaaaaaaaaaaaaa

SEQ ID NO: 9840 - DNA, 1032 bp, Homo sapiens
gcccacatgtgctggtggatccactcccatggatccactcacatgctgcaggcatgcagtagactcacccacagcccactctctggacaccaatcctgggaggtgggagctggaatggggagcaatgagaggagggagtgagactgttggcttaggaagggtggtacctctccctgcatcatacccaggaacttccagctccaaaatattggggtacagctcaccacccccccactccgccaacccattcctacctcctctagtgcagggacccaagttagatgatgagaaaatgccaaacaaagggaggcaaggacagagaaggtacctgcaggacccacaaggcccatactggcccccatctgaacccacctctcccacccagatcaacatccccccaacccctgtgcccccatcatctggaccccagagccagccctcccactaccaccaccaccaccccggggctccttggctcacctttctagaacatgggtacctcctctttttgggggctcatttagactgctgcctttgctgctgacttgcagtgtgactcgggcccattgttcaatctctgtggccctgagacaccagggaaaatctccccccccacaggacatactagttccctggcaggcaagggcttccaactgaggcagtgcatgtgtggcagagagaggcaggaagctggcagtggcagcttctgtgtctagggaggggtgtggctccctccttccctgtctgggaggttggagggaagaatctaggccttagcttgccctcctgccacccttccccttgtagatactgccttaacactccctcctctctcagctgtggctgccacccagccaggtttctccgtgctcactaatttatttccaggaaggtgtgtggaagacatgagccgtgtataatattttttttaacattttcattgcagtattgaccatcatccttggttgtgtatcgtgtaacacaaataatgatattaaaagcatcaaacaagccaaaaaaaaaaaaaaataa

SEQ ID NO: 9841 - DNA, 846 bp, Homo sapiens
  misc_feature (1)...(846): n = a,t,c or g
aaagcaggttttactgcttttccagacacaaggctgctaaaccaattaagaaaataattaatttctttcaagcaactaaaaaatatatggtaatttaaaggtgtctgcttatttggttgaacaatttaattgggaaagtttgtcatcatttgaaaaaggaaatataaaaggaacaaccatatagccaacctgtggtcttggcagaaacaacgtctctagcaatagtaccaaagtaagtaatggagtcttttttttggcaggtctgcagtaaaagataacattttcttttcttagtcctcctgctctcaacccccatattttgcctttgaatacgtgggttttagtatatatagcccaaaatggtaactgtctccagaacagcaaccacattgaattcttgtgacttaggaaagcttcttatagttgctgacattaattgcaagaaataactatatactactttgagaagtaaacatgtcaaaaaaaacaaagtttcagatatgggacaaaatttaaaaattcagtaacatttataaacagaattgaatgaaaagagttacagaccaacttaaacatcaattcgtgtcagtaaactgacttttgggggtaatgatcattgttttgtatctcaaaagtattgagtttagaaatcagttgtatgatactacctttgtatgtctgtcttttcccgtgtatttttaaataactggtgatctataatttaataaaatttttcgttggtgtaatattatttcaaaagccctcctaatttagtcatcaaaattaaaatgacattttcaagtnttttttaagcaactgaattcgtaaaattaaagtaacaaaaag

SEQ ID NO: 9842 - DNA, 1332 bp, Homo sapiens
gctcccggcggcgtgtgcagccgagtattcaggacgacccggctgcccggcttagcgcctttggagctccgcgctgaaggggccttgctccgcacaggcacggcacgcaagcttttggggtgcccagtggctctgttttcaagtcacagccggcccgcaggttgcgatcctttccacatctcacttgggccgctagaaaatagaagaggcttcgtgacggagttatcagagacattgagaggcaaattcggaaaaaagaaaacattcgtcttttgggagaacagattattttgactgagcaacttgaagcagaaagagagaagatgttattggcaaaaggatctcaaaaatcatgacttgaatgtgaaatatctgttggacagacaacacgagtttgtgtgtgtgtgttgatggagagtagcttagtagtatcttcatctttttttttggtcactgtccttttaaacttgatgcgataaaggaccgtgggtcatataagttactgctttcagggtcccttatatctgaataaaggagtgtgggcagacactttttggaagagtctgtctgggtgatcctggtagaagccccattagggtcactgtccagtgcttagggttgttactgagaagcacctgccgagcttgtgagaaggaagggatggatagtagcatccacctgagtagtctgatcagtcggcatgatgacgaagccacgagaacatcgacctcagaaggactggaggaaggtgaagtggagggagagacgctcctgatcgtcgaatccgaggatcaggcatcagtggacttatcgcacgaccagagtggggattccctcaacagtgatgaaggagacgtgtcttggatggaggagcagctgtcctacttctgtgacaagtgccaaaaatggataccagccagtcagctgagggaacagctcagttaccttaagggtgataatttttttaggtttacttgttcggattgctcagcagatggcaaggagcagtatgaaaggctgaagctgacatggcagcaagtcgtcatgttggcaatgtacaacttgtctctggaaggaagtggacgtcaaggttatttcaggtggaaagaagatatctgtgcttttattgagaaacattggacttttttactagggaataggaaaaagacgtctacctggtggagcaccgtggcaggttgcctcagcgtgggaagtcccatgtacttccgttcaggtgctcaggaatttggagagccaggatggtggaaacttgttcataacaagcccccaacgatgaaacctgaaggagagaagttgtctgcctctactttg

SEQ ID NO: 9843 - DNA, 742 bp, Homo sapiens
ttccatgtgttaataccatcatcaccatttaatttttaacataaactttacaatatgtacaattttatttggataatacacttacgtgtgaattgtagaaatcaagcatgtatattatatacatgtgtacacaagcagttgtattcacaggataagtgcatttgatcatctctgatctatatcaagtggcaagctgacctcatctgatacaattagatatgaacacagtacaatgtatagggattgaatgggaaacagtaactgcatattgggagaacttttcaagtatagaccccacagcacttttcaaccctgtttcaccaaaaagagatggggtatctggaaaggtctaattttgtctccagtgaaaataaacagtacttttggaaggaaaattgcctttacatagaacccttcactcattaaatatcaagcaacacatttagcttccacctactcaaacttctttttctttgagtccaatcatgtctactatagccatggttaatacaaacaggctccatttcagaaacaacgcatgtccccttttcaaggattcatgcacaacagctatgcacaaagaaacagtacaggaatgtgcataatgttaacgaatatatccagctcctctgtaaggtatttagagttctcaaattagtgtttatttaggtcttaaaccgcaagggatttcagtacaaggtacttatttatatgacaactgattattaaagctgcacttttt

SEQ ID NO: 9844 - DNA, 224 bp, Homo sapiens
cataaaagtgccactagcacgtctgtagttctctataaagtaagaatttttctgactagtttttcaacagaataaatgccatctacctataggatcaacaaagcttaaacgtgggcaaagcagaaacaaagtaagggcatgtgtgtacttatttttcaaaccaaaggtacaaaagtctattgaaagatttactctggaatacaaaaaaacctagttctaacagt

SEQ ID NO: 9845 - DNA, 394 bp, Homo sapiens
  misc_feature (1)...(394): n = a,t,c or g
gtgggtgatggatttgtaggagctcatggaattgagccccaaatcaagttgtgacaagattggttccttctgagggctgtgagagagaatctgttccaggcttctcnnnnnnnnnnnnnnnnnnnnnnnnnnnnnnnnnnnnnnnnnnnnnnnnnnnnnnnnnnntgcagtctctgccttcatgttctctgtacaatttttcnnnnnnnnnnnnnnnnnnnnnnnnnnnnnnnnnnnnnnnnnnnnnnnnnnnnnnnnnnnnnnnnnnnnnnnnnnnnnnnnnnnnnnnnnnnnnnnnnnnnnnnnnnnnnnnnnnnnnnnnnnnnnngtcagcccttcagcatatgaatttatgggagaaggggtagggacaccacagattataatacctaga

SEQ ID NO: 9846 - DNA, 2094 bp, Homo sapiens
gaattccctgcgacgactatcttcccctggggccatggactcggacgccagcctggtgtccagccgcccgtcgtcgccagagcccgatgacctttttctgccggcccggagtaagggcagcagcggcagcgccttcactgggggcaccgtgtcctcgtccaccccgagtgactgcccgccggagctgagcgccgagctgcgcggcgctatgggctctgcgggcgcgcatcctggggacaagctaggaggcagtggcttcaagtcgtcctcgtccagcacctcgtcgtctacgtcgtcggcggctgcgtcgtccaccaagaaggacaagaagcaaatgacagagccggagctgcagcagctgcgtctcaagatcaacagccgcgagcgcaagcgcatgcacgacctcaacatcgccatggatggcctccgcgaggtcatgccgtacgcacacggcccttcggtgcgcaagctttccaagatcgccacgctgctgctggcgcgcaactacatcctcatgctcaccaactcgctggaggagatgaagcgactggtgagcgagatctacgggggccaccacgctggcttccacccgtcggcctgcggcggcctggcgcactccgcgcccctgcccgccgccaccgcgcacccggcagcagcagcgcacgccgcacatcaccccgcggtgcaccaccccatcctgccgcccgccgccgcagcggctgctgccgccgctgcagccgcggctgtgtccagcgcctctctgcccggatccgggctgccgtcggtcggctccatccgtccaccgcacggcctactcaagtctccgtctgctgccgcggccgccccgctggggggcgggggcggcggcagtggggcgagcgggggcttccagcactggggcggcatgccctgcccctgcagcatgtgccaggtgccgccgccgcaccaccacgtgtcggctatgggcgccggcagcctgccgcgcctcacctccgacgccaagtgagccgactggcgccggcgcgttctggcgacaggggagccaggggccgcggggaagcgaggactggcctgcgctgggctcgggagctctgtcgcgaggaggggcgcaggaccatggactgggggtggggcatggtggggattccagcatctgcgaacccaagcaatgggggcgcccacagagcagtggggagtgaggggatgttctctccgggacctgatcgagcgctgtctggctttaacctgagctggtccagtagacatcgttttatgaaaaggtaccgctgtgtgcattcctcactagaactcatccgacccccgaccaccacctccgggaaaagattctaaaaacttctttccctgagagcgtggcctgacttgcagactcggcttgggcagcacttcggggggggagggggtgttatgggagggggacacattggggccttgctcctcttcctcctttcttggcgggtgggagactccgggtagccgcactgcagaagcaacagcccgaccgcgccctccagggttcgtccctgggcccaaggccaggggccacaagttagttgggaagccggcgtttcggtattcagaaggcgctgatggtcatatccaatctcaatatctgggtcaatccacaccctcttagaactgtggccgttcctccctgtctctcgttgatttgggagaatatggttttctaataaatctgtggatgttccttcttcaacagtatgagcaagtttatagacattcagagtagaaccacttgtggattggaataacccaaaactgccgatttcaggggcgggtgcattgtagttattattttaaaatagaaactaccccaccgactcatctttccttctctaagcacaaagtgatttggttattttggtacctgagaacgtaacagaattaaaaggcagttgcctgtggaaacagtttgggttatttgggggttctgttggctttttaaaattttcttttttggatgtgtaaatttatcaatgatgaggtaagtgcgcaatgcctaaggctgtttgctcacgtgactgcccagccccatcggagtctaagccggaattc

SEQ ID NO: 9847 - DNA, 962 bp, Homo sapiens
tgaaagtcttctggttcctaactggatacagattagattattttaaatgagaaaaagtgcaccgtagttacccgatcaagattggactgcctgtgtccctggcatgaattaaagaacctccatagttgcttgttcccttctgaaggtgtttcctatggcccacgagaattataaagcaatcactttttaagtctatcagtcaaccttaatagctctcaagagtttcgattatcaagctttaaagtgataacatatcaagatgactattaaaaaataaacatctctgaaagtgtcctttcctccataaggctttaaacaatttgcaaattcttaattgggagtatgtcccaatcattctattaaactatttacagctctaccctacttctagattcagcaaacagagctactagttagagtattttgagagccaaaatagtaagagacttctgtaatggttgagatttctgcactgaccttaattagggtacccgccatagggctaccaaagtttttagtgagggctggggaggtggagcataagtaacattttttttctgcagaaggtgatggctttgtagaacactataaaatttttcaggaaaacatacagcaaattttcttatccagtgggaacagcctatttgacaaggaatgatatacaagtttgattcacctttgagcactcttagagagtttacagaagaggcgtaactggttacaaaacaaaagttacgccttcactatccagttcttaaagtttatccacatcctacaaatcttatgttcatgtaggtcaggttaaagtaagctccaaacttatggccttcagaagcatctcctgtttaacacacctgaaattactctaacttaatacatttgtattctctaagaaataatgctgactgctgtcaccacagcatcactgatctctcagtggctgttaaaatataaacaagtgg

SEQ ID NO: 9848 - DNA, 663 bp, Homo sapiens
gcgaccgcggcttcagctagaagcagcacctgctcaagcaccagcgcgtgcaccgcggacgccctgcgtgcagccccaaggaggaggcgcgctagtggaactggacctcagcggacccgtggtggtgcgggggcatgtttgcggggtgtgtgtggggagtgggggtggccaggattgctggctcttagaaccccttagagcgggaccggtggattccttaaggctctgaagggctgagaacagttctagaagcgtcccaaagggtgctgggaaaggtcccagcgtgggttgagggaggagggaagatccgagttcctcaccgcgggccgggatgtgaccaccctcttcagaggttggaccccaggcttcaagcaccgagtgaggggtctgttggggacgctgggagagtctctggtgtgaagtggcttaggtctggactggtcagctgtggcaccagccggtcctgcccacgcttcaggatggccgggggctgcccctgtgggagagttgccaagactcggcgataccaaggatggaagccagaggctgtggcgagggagagccaagcatattcccagcaccagggccactgctggcacgtcgtagacatccaataaatatttttggaaggaaaaaaaaaaaaaaaaaaacctcatgccgaat

SEQ ID NO: 9849 - DNA, 605 bp, Homo sapiens
cattgatttcactaagcgttatgttctagtttgctttggtattattattagaaatacctggtgattaatttgagctaagtattcttctctaccctcattcccagcattatcacccgcttttaccacttccaaggggtggaagcattctccacaatgcatttttttcatgccagagaaaaatctagaaaaaaatgaataaaacgaagaaattctttccccttggtatctgtagctaacttgcctaagtgttctttcccacagtttaagtcttcagtccatagttcataagcaaaggggtgtagcgagctctgatcttgccagaagagagaataagtgagctaccccacggtggacattctggccatctgaaatgagtcgatgcatgtggcttttgtctaaaggctacaaataaaatgtaaccactttcttctttgagtagttgatatagcaaatagttgaaacagaagttttgattggcaaatcaggatgtggtagatactttaacaaagagtagaactattaccagttttatgtgttgctgtttgtatctctttcacagttttgataatatcacatcctggaaagtgaaacagaaaattattatt

SEQ ID NO: 9850 - DNA, 305 bp, Homo sapiens
gttgtgaccacatgtgtgccaggccccatgctgcgtgttttactataatcacaaaactactacttttataggtgagaaaactaagactaagagaggcgaggataaaaaatgtgcccaaggccacaaagcacaaggatagagtcagaatttgaagccagcttttccaaagtctaaatcttgctcccttccctgtaccttgcaaactttcatccctcagtggataccagggctgaggaaactgatttgtaacacgttcctgtcacagagttttggctctacatttaagacataaaacttggcctggc

SEQ ID NO: 9851 - DNA, 730 bp, Homo sapiens
agcagatccatttatattctcacatacaaccggatggatagccattccttttcttaatttgattcctgccaacaccctaaccgtcatgacttcaccttttaccatgggtggcttattaaaaacattttcctggacgaagacagttccctccccaagcggaattcgagtgccatctcttaaggtgatgcatttttaattcccactgcacaagccagggcatcacaatgaccatattcaccactcgttgtcaggggtacaccttttggaaggcagcgtgggctaatgtgaatggtactagtctgagtcagatccagttcaaatccaggtaacttaaagcttgtgtgacccagggacactttacttcaacttgttaaaccttaattttgtcacctataaatgtgatacataaacaaacttgaatgtgtcgcacttaaccacatgcctggctttccataggttcctttcctcttgcttcccccactgtgagcaacacaagcatcgccttcttgtgatcatggctcagtgccaagggataaaagctggcagacagcgctttacagctgggaaaaagagctgctgggggcagggctggcggtagctcaagcatgctgtggttcaggctaatgactggaaggtcccatccatccttgagatgtatgacgctatgtccagatctagcgaacgtatttgcctaggaaaattcctggaggagagactgcctcagacaacg

SEQ ID NO: 9852 - DNA, 407 bp, Homo sapiens
cccacgcgtccgcgtaccatatatggcttgaaatcggtagatcattagctagaatttgagaatcctacgacatacggaggttctacagaactaagaatgtaactgtccttaacagggactctccttcagtaaggcgttccactttgtccaaggaaaaggactggcgttacagtagacacctcatagcgcaggagtagaggggagggtgcttcagcattaatattctgcgattttaaaggacttccggaaatgaggggggcgtctcaataatggatttgggcaagtcgtttctttgtgtgtttttctattcctcaagcttaagcaaaaccttaggctcaccgtaaaatcatcctttccacctcttttcagtagcagtgccttcaggtttcatttcctccttcctctgc

SEQ ID NO: 9853 - DNA, 651 bp, Homo sapiens
tttttttttttgagcattccaaatttattccttttaagtaaacctatagccactacatatgtccctgacaattagaacagaaaacaaaaaaaggacaaatagaaatactttccattctgtctatatagtagtagttttgggggtatagatagtaaacactagtcaagaatactcgtctaaatatgttggtaaaatgtagtcatcatttggcatgtgttttgctttggtatataatgaagttgagctatcccatctttcttctctatggaatatagtcacacaaacaaaaaagatgaatctcactagaggtgggtctttatcagaaatatgccccaatctagttaggtaatagaaagaaaatcattttctcctcctaggcctaagattcttcatgtaaaaattataagactgaataaagatcacttctaagtttctataattcatgtagatatatcaatttatacatcatgatgtagacagacagcaaggctatactttctggctccatgatgctaggcttggccacatgacttgcttaaagcacgtatgatacatgcatcttttaagagaaaaccgaagtgtatttcatctctttctctctctgctaaaacaatcacaatgtcccaaaagagatcccttccttcacctttg

SEQ ID NO: 9854 - DNA, 359 bp, Homo sapiens
atagaacccagcctactctagaatttcagcagtgacattggagaatatttttaatttgctgcagtactatgtcatattattagtatgaatctcatttcccaaagggtttgtattctgctaaaaggagatgccaatgttgaatgaagtctgaaactctagtatgtgcatagtttgacgtgcagcatgcacaccaggccttaagatgggaatgtagcttaatgattttctgtttcccataccatttctaatcttttgtgtaattttctcttaactgattgctctgatattgtaaacacaatagatgtagctctatcatgtctagcataatttaaaaaatcagtgtttttaggatttgggga

SEQ ID NO: 9855 - DNA, 925 bp, Homo sapiens
  misc_feature (1)...(925): n = a,t,c or g
ttttttttttttttcaaatgagttggtttaatttcaggtgatacaaagtttagggtagaacaaggaccaaagaacagactctggcaagattctgagctggttttactttaaattcacagttatggtaggaatgacttagtgaaaacaactaaagagatgatgagccactgtaagatttttctttttttacaaaagtttattcttaaatgtacaacagctccaagacaacacttaattccagctatacgtggcaaaagatgttatggcagggaatagagaggtttaaatacagatgaaataaagggtcaccatctcctcaggcacaaggaacagcttactttttgccagatttcttaattccacctgtggccaagggccccttccccgcggccttcgcttttagctcctcgagtttcttctgctcctctttttgtttctgcttgaaagccttatcttcctcgtccatctccttggcctgcttcttgggctgtttcagtggcttcttcttgccaccttcgcggccggacatggcgcctgccgccgcttccccagaccctgccactggacgataacttcttttagatcagcacctttttgttgccagtctggactcacaagtgatgggacacattcgaaccagggctagagaaaatggattttatccatctaggaagggtgggctgagcctttaccattagatccagttttacttcattgccaagtcattctcttttggatgtaaagtttatttttcaaacagacatacatttatatctaaaaataaactggcactagtgatgccaattgcctaatgtaaaagaaaggtcaagaattttaaagggtctcggagagtaaagatacctctgagagtaagtggaggtttctttttgagtcagagtctcgctctgngcccaggctccatctc

SEQ ID NO: 9856 - DNA, 642 bp, Homo sapiens
aagaggacttcctgaagccccctgagaggattttccacaagatttacatccagaggcacgacaatgtgagcatcctgtttgctgacatcgtgggtttcacgggcttggcatcccagtgcacagcccaggagctggtgaaactcctcaatgagctcttcggcaagttcgatgaattagccacggagaaccactgtcgccgcatcaagattctcggggactgctactactgcgtgtcgggcctcacccagcccaagactgaccatgcccactgctgtgtggagatgggactcgacatgattgataccatcacatctgtggctgaagccaccgaggtggatctgaacatgcgtgtgggtctgcacacgggcagggtcctctgtggtgtcctgggcttgcgcaagtggcagtacgacgtgtggtccaatgatgtgaccttggccaatgtcatggaagccgctggcctgccagggaaggttcatatcacaaagacgaccctagcgtgcttgaatggggactacgaggtagaaccgggttacggacatgagaggaacagtttcttgaaaactcataacatcgaaaccttttttattgtgccatcccatcgccgaaagatatttccaggcctgattctctcagattggt

SEQ ID NO: 9857 - DNA, 499 bp, Homo sapiens
caatgagattaatgcttttgttgtactgagcagagggagtcaaattttgtctctgaattccactaggtttttaacaaagttaggacattgctcttcagcctgtccttctgactcagtttcacagaccaacattcaaaatttgaaaggcttaaattctccagttcttattgggaagtcaaaagatccatcctgtgttgcaaaagtttctgaagaggggaaacctgtgatagggactcagaaaatggagttacatgtgaggtggaggtcagacacaggcaaatgtgtagatgcttcaccgctggttgtaatacccacttttgataagtcatctacaactgtgtacattggttcccattctcatagaatgaaggcagttgacttttactctgggaaggtaaaatgggaacagattttgggagatcgaattgaatcctcagcatgtgtatctaagtgtggaaactttattgtggtgggtaagtttttgaatttgaggtttgtg

SEQ ID NO: 9858 - DNA, 968 bp, Homo sapiens
  misc_feature (1)...(968): n = a,t,c or g
ggttcctggaagagacacctattacctaggctcctgggggaagtgacagcccgtggatctggcctacgnctctcgggcctctgtggctcagagcgtctgggccacactgtctgggaagagcctggagagtcaccgccgagggatgaggacgcgccagcccgggggaacgcgccagctgctttcgcggccccaagcgcgcagtgcccagcagccgcgccgagcctgacacgctgtcctctcccctcgcgcacagggctctgcgagtgacccggcggcgagctccgtgctgcatggaacggctgcagaagcaaccacttacctcccccgggagcgtgagcccctcccgagattccagtgtgcctggctctccctccagcatcgtggccaagatggacaatcaggtgctgggctacaaggacctggctgccatccccaaggacaaggccatcctggacatcgagcggcccgacctcatgatctacgagcctcacttcacttattccctcttggaacacgtggaagctgcctcgccagcngcgagcgctcgctgtcacccaaatccacatcccccccaccatccccagaggtgtgggcggacagccggtcgcctggaatcatcttctcaggcctcggcccccagaaccactggaaccccccggaccagcctgccccatttccaccaccctgagacctcccgcccagattccaacatctacaagaagcctcccatctataagcagagagagtccgtgggaggcagccctcagaccaagcacctcatcgaggatctcatcatcgagtcatccaagtttcctgcagcccagcccccagaccccaaccagccagccaaaatcgaaaccgactactggccatgccccccgtctctggctgttgtggagacagaatggaggaagcggaaggcgtctcggaggggagcagaggaagaggaggaggaggaagatgacgac

SEQ ID NO: 9859 - DNA, 2062 bp, Homo sapiens
  misc_feature (1)...(2062): n = a,t,c or g
gaattccgggggagagagagaaagagaggagagagaagaaacgggaggaggggataaggaaattaaaccctttaagtcaatgcatattgtggtgacaccggcacaggcgccctcacggtggagtcggccagggctgtgcgttcccaaaatatgaccaggggtgcttggatgtgtcggcagtatgacgacggcttaaaaatctggttggcagcaccccgagagaacgagaaaccgttcatcgattccgagagggctcagaaatggcgactgtctctggcatctctcttgtttttcacagtcctgctctctgatcacttgtggttctgcgccgaggccaagctgacccgggcccgggacaaggagcaccagcagcagcagcggcagcagcagcagcagcagcagcagcagaggcagcggcagcagcagcagcagcagcggcggcagcaggagccctcctggcccgcgctcctggcgagcatgggggagtcctcgcccgccgcccaggcacacagactcctctccgcctcctcgtcccccaccctgcccccctccccgggagacggcggcggcggcggcggcaagggcaaccgaggcaaagacgaccggggcaaggctctttttctaggaaactctgccaagcccgtgtggcgcctggagacttgttacccccagggcgcgtcctcgggccagtgcttcacggtggagaatgcggacgcggtgtgcgccaggaactggagtcggggggcggccggggggggacgggcaggaggtgaggagcaagcatcccactccgctctggaacttgtcggatttttacctttcgttttgtaattcctacacactttgggagttgttctcggggttgtccagtcccaacactttgaactgcagtctggatgtggtgctcaaggaaggcggcgagatgaccacttgcaggcagtgcgtcgaggcttaccaggactatgaccaccatgctcaggagaaatacgaagagtttgaaagcgtgctccacaaatatttacagtcggaggagtactcggtgaaatcctgtcctgaagactgtaagattgtctacaaagcctggctctgttcccagtattttgaagtcacacagtttaactgcagaaagacaattccttgcaagcaatactgtttggaggttcagacgaggtgtccatttatattgcccgacaatgatgaagtcatctacggaggcctctccagtttcatctgtacagggctttatgaaacctttctaaccaatgatgaaccagaatgctgtgacgtcaggagagaagaaaaatcanataacccatccaaagggaccgtagagaaaagtggctcctgtcacaggacatcgctcacagtgtcatcagcaacaagactgtgcaacagcagactcaagctgtgtgttcttgtactgattctcttacacacagtgctcacagcctcggcagcacagaacacagccggactgagctttggaggcatcaacacgctggaagaaaactcaaccaatgaggagtaacggaaggacgagtgtcaccacagcagcagctggcccgccgtgaaaaatggcaactgctgtctcatgtaacagaaactgggtgcttttaccctcgaattacttattgcaaggcctttagggtaaaatttaaacagatgggcctgaatccaaacaaggacacaaccacagctttttattgactaaaaggctggaaagtgactttaaatttctcacaccattttatacactgtgttttaatgtttggaggttttatttgctttcgttttggtttgggtttatttgtttgtttattttttgcacttgttaatacaggatttattttgggggatggtttctcagaggtaaactaagtcttttcactgtctctatctctctatatatttctagtcattgtgtgtgttcatcagatagttctgtctttatgtcctgtcagcttctattagaggaatgattgctatgacctcatggtatagcaaaaaacaacaacaaaaaaagaataaaaaataaaaaagacaaaaaaaagaaaaggaattc

SEQ ID NO: 9860 - DNA, 1351 bp, Homo sapiens
atcagcttcccgccggagtatccgttcaagcctcccatgatcaaattcacaaccaagatctaccaccccaacgtggacgagaacggacagatttgcctgcccatcatcagcattgagaactggaagccttgcaccaagacttgccaagtcctggaggccctcaatgtgctggtgaatagaccgaatatcagggagcccctgcggatggacctctctgactttaatggcttaagcaagaacatggtttccgtggctccccctggactgaatgctggaggatatatacttcacagtctgaggcctggtcccaggaactggcaatctaacaggatggcaagtggttttgaaacatatagattttcaggatggaagtttgattcttcagattgtgactcatccgtggaaaataaatggtttagcacctaaatctgtatattcccatcagtggcttggctgactcagttgtaaatagggtaccctccatctgtctcccacccatatgctccactgtccccaggccctcagtgcctgagccctagggggattcgagttggctgctggattcatttcctgcaagcaggcctgcaaggtgacctgtctctctaagatggagagctggagaactggcctgtaactgcaaacttaaactcccttggctctggggaatgtaaagggtgtgggaagggtgcacctgtggccaggtgaacctgggagtgagtccatacacaacacacacactcatagctcccttccctccaccacacacacacacaaactaatgactaacaacctaagaagggaaaaatgaatggggaatgggccacagggggctctggcctcagtccatgaggtgtgtccgtccgctatgccgaggatccagtgcacagagggtcagaacatgagttaggagggccggtccactccgaatcggagggtgaactcttcggcattctttctgaacagctccggattctgtgtcagcaggtcagcgaggtccatccgcaggggctccctgatattcggtctattcaccagcacattgagggcctccaggacttggcaagtcttggtgcaaggcttccagttctcacgtgctgatgatgggcaggccaaatctgtccgttctcgtcccacgttggggtggtagatcttggttgtgaatttgatcatgggaggcttgaacggatactccggcgggaagctgatgccgcaggttgaaggctttcaggtggtagggaggttggtcgggtaggaggagagcgtgccacaccaggacattggcatcatcgctggacacggttccgcaggtatggggaggcttcttctgaagatcctccagctccttcaccac

SEQ ID NO: 9861 - DNA, 305 bp, Homo sapiens
cgtcgacatagcttatagtgatttaggatactacattatcaataaactgcaccatgtggacgagtcggtggggagcaagacgagaagggccttcctgtacctcgccgcctttcctttcatggacgcaatggcatggacccatgctggcattctcttaaaacacaaatacagtttcctggtgggatgtgcctcaatctcagatgtcatagctcaggttgtttttgtagccattttgcttcacagtcacctgtaatgccgggagcccctgctcatcccgatcctctccttgtacatgggcgcacttg

SEQ ID NO: 9862 - DNA, 2097 bp, Homo sapiens
ttggctctaattctggccacacagagaatcagtcggcctattgtcaacctctttgtttcccgggaccttggtggcagttctgcagccacagaggcagtggcgattttgacagccacataccctgtggtcacatgccatacggctggttgacggaaatccgtgctgtgtatcctgctttcgacaagaataaccccagcaacaaactggtgagcacgagcaacacagtcacggcagcccacatcaagaagttcaccttcgtctgcatggctctgtcactcacgctctgtttcgtgatgttttggacacccaacgtgtctgagaaaatcttgatagacatcatcggagtggactttggcctttgcagaactctgtgttgttcctttgcggatcttctccttcttcccagttccagtcacagtgagggcgcatctcaccgggtggctgatgacactgaagaaaaccttcgtccttgcccccagctctgtgctgcggatcatcgtcctcatcgcccagcctcgtgggtcctaccctacctgggggtgcacggtgcgaccctggggcgtggggttcccttctggcgggctttgtgggagaatccaccatgggtcgcccatcgctacgtgctatgtctaccggaagcagaaaaagaagatggagaatgagtcggccacggagggggaagactctgccatgacagacatgcctccgacagaggaggtgacagacatcgtggaaatgagagaggagaatgaataaggcacgggacgccatgggcactgcagggacagtcagtcaggatgacacttcggcatcatctcttccctctcccatcgtattttgttcccttttttttgttttgttttggtaatgaaagaggccttgatttaaaggtttcgtgtcaattctctagcatactgggtatgctcacactgacggggggacctagtgaatggtctttactgttgctatgtaaaaacaaacgaaacaactgacttcatacccctgcctcacgaaaacccaaaagacacagctgcctcacggttgacgttgtgtcctcctcccctgggacaatctcctcttggaaccaaaggactgcagctgtgccatcgcgcctcggtcaccctgcacagcaggccacagactctcctgtcccccttcatcgctcttaagaatcaacaggttaaaactcggcttcctttgatttgcttcccagtcacatggccgtacaaagagatgggagccccggctggcctcttaaatttcccttccgccacggagttcgaaaccatctactccacacatgcaggaggcgggtggcacgctgcagcccggagtccccgttcacactgaggaacggagacctgtgaccacagcaggctgacagatggacagaatctcccgtagaaaggtttggtttgaaatgccccgggggcagcaaactgacatggttgaatgatagcatttcactctgcgttctcctagatctgagcaagctgtcagttctcacccccaccgtgtatatacatgagctaacttttttaaattgtcacaaaagcgcatctccagattccagaccctgccgcatgacttttcctgaaggcttgcttttccctcgcctttcctgaaggtcgcattagagcgagtcacatggagcatcctaactttgcattttagtttttacagtgaactgaagctttaagtaagtctcatccagcattctaatgccaggttgctgtagggtaacttttgaagtagatatattacctggttctgctatcccttagtcataactctgcggtacaggtaattgagaatgtactacggtacttccctcccacaccatacgataaaagcaagacatttttataacgataccagagtcactatgtgggtcctccctgaaaataacgcattcgaaatccatgcagtgcagtatatttttctaagttttggaaagcaggttttttcctttaaaaaaattatagacacggttcactaaattgatttagtcagaattcctagactgaaagaacctaaacaaaaaaatattttaaagatataaatatatgctgtatatgttatgtaatttattttagc

SEQ ID NO: 9863 - DNA, 500 bp, Homo sapiens
ggcagttctggtgatttctttattctttataaacacctttttctacagtacaattcagagaataaatagaggcacacggctataacttccaccacaatctgctgttgaagagacattcaatgtgaggctagggagctagaggtgggggacgtatttgggtaccagggtaacgggaggcctacgtaataaactgcagagatcccatcagtaaggtctgattgcggcctgacggtcaaggctcatgatagaagagctacagtgagccaaatgctcctttagttccccacagtcctagagtaggtccaattctaccaaaaccccaggggttcgggtgagtctgatttattggtccactgggaagaaactgtgtcagcccaagccatccgtatgaattcagttcactccatggtagtgcctgaagtggcctaaatattctacccttttccctggagttagtcacaaatacaagtaataagattactgtttacatgagttttttt

SEQ ID NO: 9864 - DNA, 689 bp, Homo sapiens
ggagtctgaggctcagtgtgagaaagcactggcagttttctagtagagtcaggtcctgggctcctctcctcacccactgtgtcccgaactgaggccagctgtgatcggcaaattgcttatctctaggtagtttaaagaaaacgtaagagtttggggggtggtgggagaataactgtagaaagaccctaaactcttctctcccccagcaaattatcttgtataatgtttaaaaacccaaaggccagatctccccttttaacgtgaatcagaaggaggatggcaattggaccaagggcagagtggccacacttgaaacacattataaaatgggaatatatttcagggaaccccacccccacacttccactccacctcacacctgttggtcctgctttgtgggtgattgattgatacccaaggactgcaccacctttaaattcctgcaatttatgctgcaaccaacatcctagtgtttgctctctccgggaagaggccaggtgggggagaacatacggtccagagcctgagatcgcctggctggggtgcaggcaagcaggaacccagtctagatagaatgcagtgttctctaaagctatggatggtttcagtgaaatgtctgtgtctgacaatcgtcacgcaagagtacttactgtcttcccttgtacatacattgtctgtgtttagctttt

SEQ ID NO: 9865 - DNA, 1564 bp, Homo sapiens
gcatttggagagaaagaactctggcctgattcctttctctcccacaaatgtcctttattcataaaacaggaataataattcctgtatctcccaactacatggaagctgcagccctcacagaagaagatgatctgagaaattctttgatttcctcagtacagttatacccatgcatcataatactttaagcctggaaggattcttaaaaataatgcaacagtcaaacctaattttacagagaaactgacatgaaatcacgcagctaatcatgataaagctgggtggaaaacttatcttgatgggcagtacaggaagatgcagtagaccttaagatgtcctgaaagtttcttatctcaggggaaactcccaggtaggctttatgtcagggacacagaaaaatgctccctgaaagtcaaaatattcgggctagacagacaaattcctgtaagtgtggtttgtctgggaaccacagatgtcactaatcctggtttgctccagagttctttttgttcactcctaccccccatcaccatttgattgatctccttaccctgtaatttccccttcttgtcgcttacctgcagtatctttcccacccaggcatgccttattctttctaaaggaaagtatgaatggagaggggaaagcttgggaaactgatagatttccttggatgccaaaacacctccatagcctgtctgcccggccctatgtggaaacagcattgagtttcaagtcctttatgcctccacccagggatagccacttggaatccacatggcaattgtgaaacaagcaggaaatgcgtaattgtcagaattttgtggggaaaggactagggaataaggaaaacaaagatcttccttgtgttttagagctgtcagctagaggagcacctgcttgagtctgatgccatctaatggtcccagaagaaactgggttttgaacctagagttccatggactcttaggaattagactactactactactaagcattcactggtgcttactatgtgctattgctgtgccaagtatctgaaacctgtcttctttaccttattttttcaagataaattctatgtggcaggtattactatctcaattctaagagtgagaaaatggagttttagaaacatttactaacttgcctgggtcaccatagctaaggaagaggtggacttgccccagctttgccataaaactcctcaaaagagttgcctatactccctgattccacttatcttcctactatcctctttttaaaatatattatttatttatttaaataagcaatatatgaatgtggtttgaaattcaaaagacacaaagaagtatatagaggaaagcctcactctcaatccttctcaaggtttgctaattcctcttgcataggcaatccgttcttccagctttgtgtttatctttccagagaagtttactgtgtattaagcaaatatgtatatctttattcttgctcagtattttcgcaaacagcagctgtctaagttcactgttctgaactttattttttaaattaaaaatatatggctatgtagtaaaaa

SEQ ID NO: 9866 - DNA, 1014 bp, Homo sapiens
attacttaggtgtgattatttattaaagaacatttacaacactgtaagttttattcagttcaaatatcacatattagatatacaataccaattaattgaaatgaacagtacaagaatacatgaagtaaatatcataacatttaagtttcgtctcacttaggcaacaagaaatgctgagtagtattattacatattcaaaccagacttaaacttcagaaacagaaggccagatgagtgacctgtatcacaggatatgacaacacatcacctatctccaaacaagaaaaagcatgattattaagtttatctacaccagcttatttattcaaatttgctcttcttattaaacagaaaaaaaatacacattcaattcctaattggtaaaatcatttcacaactctaaaattaagatgctaatgacaccactctccactagcatgaaagaacaatatatgaatagagtacacagctttccaacctattaacaggttcttattttcagaattgagtgggaaattgtgtgtggggtaaacagcatgagagagaagtcggtcactggttgaactgttcacagtacaaaaaggtgacaaaactatgaaagtgaaaatactatggtaaataacgaaggccccaatgcaatttttgaaaatgatccctgaaaagcaaaaggttagagatactcatgttgcaaactccatcttcatccttcaaaggtcacatgcgccaaccagccgagactcatgacagtaaacttcctcagggttctctattatgatcagggccaatccttcacctcgagggctgtcgtagtaccccgggagcctcacatgactctctcagcccctccctgctctgagtgactgagagaacttccttagctgcagggctgcaggcaggtgcttctgctcctgagctcctaaacacaccaaggggtgcttgaaggtccaggcccgcccctctctagaggaaaaacctactcatttgagactacaaacctcttctagaagctgtaac

SEQ ID NO: 9867 - DNA, 347 bp, Homo sapiens
cccacgcgtccgcgggcttcgaggtcagctggtccgcagggaagcctttggcttccccaccggcaatggagcggttgacgttgcctctcggcggcgcggcggcggtggacgagtacctggagtaccggagaattgttggtgaggatgatggagggaaactttttactcctgaagaatatgaagaatacaaaagaaaagttttacctctgcgcttacaaaacagattatttgtgagctggcggtcaccaacagggatggattgtaaacttgtgggcccagagacactgtgtttttgtacacataggtataaacaacataaaactgacttggaagcgattcctcagcag

SEQ ID NO: 9868 - DNA, 405 bp, Homo sapiens
actaacaacatttgtatccctggggagcttggtagaaatatagacctaggagaacccctgccccaccccaacctacagaatcagaatcttcctttgggtaggatccccaggtgatctacatgcacaataaggtttgagaaatacccccactctttgctcattaaacctgcagactctgttcaggtgtgcttcccccaagccacactcctccggggcttggctgggagcatgctgggtgcagacatcggtaacctcttagcttaatgtaccaaaattgcatgcataaagatctgggatcaagactgtcagattctcaggggcagaagcaagtcttatcctctgcaaatcctgcatgtctgcctggcactgaatagttcccggcaattttgaaccaattaatcatca

SEQ ID NO: 9869 - DNA, 118 bp, Homo sapiens
atacccttggaaccaagaactgtttccctgtactctggcagttagctaatgccatcacatttgaaccttgcatttaccttttatagccagtgaatctctgtctgctgtatcttaaaga

SEQ ID NO: 9870 - DNA, 1243 bp, Homo sapiens
gcctgcctgaccgaccttcagcagggctgtggctaccatgttctctcgcgcgggtgtcgctgggctgtcggcctggaccttgcagccgcaatggattcaagttcgaaatatggcaactttgaaagatatcaccaggagactaaagtccatcaaaaacatccagaaaattaccaagtctatgaaaatggtagcggcagcaaaatatgcccgagctgagagagaggctgaaaccagctccgaatatatggattgggatctttagctctgtatgaaaaagctgatatcaaggggcctgaagacaagaagaaacacctccttattggtgtgtcctcagatcgaggactgtgtggtgctattcattcctccattgctaaacagatgaaaagcgaggtttgttacactaaccagcagctgggaaagaagttatgcttgtggaaatgtgacaacatcagatgcatactttatagtactcattctgacccagtttctgggtggcattcaaagaacgtgggaagaaagcccccccacttttggagatgcgtcagtcattgccctttgaattactaaattctggatatgaatttgatgaaggctccatcatctttaataaattcaggtctgtcatctcctataagacagaagaaaagcccatcttttcccttaataccgttgcaagtgctgacagcatgagtatctatgacgatattgatgctgacgtgctgcaaaattaccaagaatacaatctggccaacatcatctactactctctgaaggagtccaccactagtgagcagagtgccaggatgacagccatggacaatgccagcaagaatgcttctgagatgattgacaaattgacattgacattcaaccgtacccgccaagctgtcatcacaaaagagttgattgaaattatctctggtgctgcagctctggattaatgaaaatcaagttccatcctcagacaagaggtaaagaaggaaaattcagccagttgattttgtttttagcttactgctgcctttgtccgaagaaactgttcctccattatttgaattactgaagacagcaagatatttgtaaattatcttaaaataaacaacttaaaataaaatcattgtttttcttatatataagaacaatagatatagtttttgaaatgagatgatactaaaacatttaaaaatattaatatgctactattaaaattttttagtagaagacaatttaaaaaaaaaaaaaa

SEQ ID NO: 9871 - DNA, 393 bp, Homo sapiens
tattaaatagctgtaattattaagttattatttttataattagttgttaaatttcattttacacccactcaaatttaacaaagaatctttagcccctttaaattttagaattaaattaaatttttaaagttttacttctaaaatgagattgtgactggcaattgtttatagtgaaactttttaaattaatctttgtactcctcttatcagtgcttgctacccaagagaatgtcccaaaatgatttgttttacccatgggaaaattcttactattcaacaaactctcagttggccccctacagcagtctggtgttgaagtttctttgaacgaactaaatatactcattttatgtaaaggtatccaatttgattttgaaaccaaaatagaaaatg

SEQ ID NO: 9872 - DNA, 895 bp, Homo sapiens
tttttttttaagaaaagcttgtccaagggcattcaaatttaatggcttttatataatacttggtgtagtgcctcgtggctgcctctgtgagccagaaataaaggaagctcatggattccccaaaaatgaaatgccactttttccctcatcatggatgactttgttaagatgaaccccttttacaggaaaggggttacacaggctgctgataccagtctagagagggcacccaccagccaaggctgtgttctaacttaggtgtcataccatcggccagaagaaccatgtagccatagaggctgtgaagctaactagtttatctgtaatttggtcctagttgtttcacttattttatgtcgttttttttttttcttagataaatctgttcagataagctccttatgaatccttcagatcgatgttcttgaggaaaacagtcaagctaaacagcaatgatgacttttatggtaaaggatgagctgatcactagctaagctacttagtcaccatcctgggagatgagctcacaggcaccaaggctttgcttcctgtggcctgctagttacagtgaaccagctccatggattgacaagggtacacaggatgacagcagagcaaaggagtttgccaagtatttgttctgtcattaagtattcaaaagaacatatatttttcttcatggaacataactttctaagaatgaaatttggggacttgaatgattcaaggtcaaatattaaacattagctccttcaccaatacctgtcattgtcattagaaaggaaggcctcttgtttacgctactgtgattcacagtgtcctttgtcggtcaagaggccccctctgtggcttggctttagctgtcagatggaagcctcaaacttttgcactttag

SEQ ID NO: 9873 - DNA, 2360 bp, Homo sapiens
ttttcaggtggaggggagtttaatggcggcagactcacagccctttcccctgggggccaactccccacaacagagcagggctgggccagcagaagacgttaaaacccaaatcccgacaggaggcacagacctgcacatgcgccacacccacacacatactcaggggactgacaggacacatgggacacagacccgcccctgcctgtggccaaagtcctgtccaaggcaatggcgctaggctgcgcctcagttcatccgagtccctccccagctcactggtccaggccaagggatgggagaggctttgagtctagaccttgtacagcgtctgcagcagactgtggcgggcgaaggagcaggattccagggcgctgttgggcttggtcacgaacgccagcagcaggggtgcaagggcccttggggaaatagtcctgctgcaccatgtggttcagcgccatcagggggccgtacaggttggcaatggccttgaccttgtcttcactcttgagcagacccatgtgcacgaacagcccggtgaggaaggtgttggaggtgaacgacgaggagttgaaaggcctctggcatcagggcatctactgcatccctgcactgccatccctcacgtaagctcctccttgaacacagatgacacctttaggaaggcagagaccaccttctcggggtcagacgtgtcagtctgctgggctatcagcacggagctcttgggccctaggcgcagcagcttctctggagagggaaaagccaggaaggtggagacgtctgcaggaggtggggaggacagcacgggagctggctccccagtgttagggtccagaatcttccgtgagggcgtggctgacttctctccctgccctcgctgctgaggctcttcttcctcctcctcctcctcttcttcctcctcttcctcatcttcctcctcctcttcttctgcttcctcttcttcctcttctccttcctcctcctcctcctcgtcctcgtcatcactgagggacgccagcaccttggccatgttgaagccctccagcacctcctgaagctgttcacagccttcttctcccagggtgttgccattcaggtccagcttctccagctcagctttgtctgccatggcctcagcaacagccagggcagcatccctcttgatttcacagaatgacaagttcagctcctttagcttgggcaggccgccgcggatggcatctgcaatggcaactgcacccttggagcgcaccaggcagtccccaaaattaatcacctccacctgccgcaaggtcttcaaggtctcggccatggccacggcgcccttctcagtgaaggtgttgtcattcaggttgatgacccgcagcagggggttgacagcgaaagcctgggccagggcagtgatgccagggtggttgatcccattctgtggcatgtggacctcctccagggtcccgatgaccctaaaagcttctgccaaggcagtggcgccatcattctccagacggtttctgccagccacaaagaccttcagggccagaggcttgccttgggcactggatttccggtgacattcggtcagagctgcagccaggatcttgccgccgccaatgcccatgccacagttgttgagcttgagttcctgcagggtgaagcaggctgagctcttgagcagggcctcgaagccttgcacaccgtcgggcccgaatgcgttgtcgcttaagtccagctccaccagctgagccccagctgtgatgagtccttcccctagtgagatcagggctggtgggatctcggtccgcagccttcccgtgaacatgtcactccagtggcagcgcttcaactccgacttcttctctaaggccttggcgatgaccctggctgcttccacgcccactgtgttgccttccagacgcagagcctccaagctgtcaaagtcttcaatctctttaatcacatctttagcatcttctgcagtgttgagtttgaggctcttgcctttgaaactcagctgtcccccggccacctgagtcttggcaagtgtctctgccagcttggcaatgtcttccgaggccatgttgactaggctggtgggctcccctggagatctgcagacgtaaaacgacgcccgccgcgtggggggaatcgagcgcgcgcctccgccctctggggcggggacggatttagggtccgggtcaggccggggtcgccacctccggatccagcggtccagatgtccagccggctagtctgttagctctctcgagctcccggcctcacgcgcttccagcaccacctgctctccgcaccacggcggatgatggcggaggaggaggattttgaaagccggcagtttcttt

SEQ ID NO: 9874 - DNA, 116 bp, Homo sapiens
aaagtgactaagacttcttatttctgaaaacaaacccaaaaccggaactgagaatgaatattaacaaaataaacccacgaaaagtttttggtgttctctgccaaaaaaaaaaaaaa

SEQ ID NO: 9875 - DNA, 748 bp, Homo sapiens
taaagaaatggtagaaaatttgataatctgaatcaccagcattcaaacaaatatttcggcaataaagtttacaaaatctggatttttacaaccttttctattgatgttttgtagaaataagacagggtactaatttttatactggtttttagaaaaatatttatattgttggtgctcaaatcaccaatttctagctagatcattttgcagccttcttttcagtgtttaataacaaagtttttcctaatggcccttcttttagtaaactggacatgttattccactacaaaaaccacaagttatctggccttttagatctttttggaatcggacctggttgagtaaggacctcttaaaagggaaaaataaattttgccgtcagcttcttcataacgttttcaaggaaattctaggcaatcattcctgtcaccaaagaactaaaattttggttgactggaactagtgagctgtgtccatggtgtgtcatgaaggatgtaccccagagagtaacatgagccactgggcagatcccagggaccagtacttgctgcaggatctagtctgtaatagtcttggccatggctctgctgaaagcaagccattcagtttcttgtttgtacctaaaacaccaaaaaagaaacactcaaatccagctgctttgtcaattgtcagttctgactccttttgctgtggccttatccgtactatattgtgggtagagtaacttctcagaagaaaaaggaaatgt

SEQ ID NO: 9876 - DNA, 109 bp, Homo sapiens
gtctcccctgtttctcagcggcctagatgcctcttggtctggctgaatatcttctatgaagatcacttccccgtccatcagggagacaattcctggagatccgtgtcag

SEQ ID NO: 9877 - DNA, 522 bp, Homo sapiens
  misc_feature (1)...(522): n = a,t,c or g
acacaggcagcaccagggcggccggagacaggccccccagtgcccccggccgtgcaccggaggtgggaccttcagggccacccttgccctcgggcctgcgagacccagagtgcaggcccgtggacaaggacagaaaggtctgcagggagccactggcagacggcccagctcctgcagatgcacctcgggagccctgctcagcccaggacccgcacccccaggtctccactgccagcagcaccctgggcccccactcgccagagccactgggggtctgcaggaaccccccgcccccctgctccccaatgctggaggccagcgatgatgaggccctgttggtctgttgaccgctgggctcgctggtgaccgccacagccccgctttgtaaccagggaatacacagtcatttctaccctgcctctgcgtcctttntnatggagaggccctccggggaccccagcggaggggctggcccctaagccagctggctgcactggtgggcgggagctgtgggactgaacg

SEQ ID NO: 9878 - DNA, 469 bp, Homo sapiens
gtttatttttgcctctgaatgcaaaacaggtttccgtcatttatacaaaattacatctattttaaaggaaagcaaatataaacgatccagtggtgggctgcctgctccaagtgatttcaagtgtcctatcaaagaggagatagcaattaccagtggtgaatgggaagttcttggccggcatggatctaatatccaagttgatgaagtcagaaggctggtatattttgaaggcaccaaagactcccctttagagcatcacctgtacgtagtcagttacgtaaatcctggagaggtgacaaggctgactgaccgtggctactcacattcttgctgcatcagtcagcactgtgacttctttataagtaagtatagtaaccagaagaatccacactgtgtgtccctttacaagctatcaagtcctgaagatgacccaacttgcaaaacacaggaatttcgggccaccattttg

SEQ ID NO: 9879 - DNA, 954 bp, Homo sapiens
  misc_feature (1)...(954): n = a,t,c or g
caacccagtaatgacatagtttaaattttaaaatgagagttctgttttgctgtatttctcctgctagcctagctttgtattttatcatcagcttcagtatatacttgtatatatatacctggattcaaatggttcttcatacaacttaatgatcagaaagaatgctgctgtaaacaccccactcaagattgctgctggaatttctacccaaagctgtctgagagtttatctttacctcagtgcaggcttaaataatggtgctaatactggtagatatatactgtgaagcctgggttcacattcatgctagaaaatgattttggggaaatcttttataggagaggttacatggatttttctctttccacatatctaggaagggacttgcctcaaagaagaatgttgcagcaaacaggatatactctagctgggtgccccaaaggttcttgcaaaaccatgaatcttgcttttagcagtaaagggccagacactttggagcattgaaaggccttagcccctgctccccaactacgtgccatgctgggtagtgtgtatcctgtacatctgtgtgccagggtggggcagactgtgccaatgctcaccaaacactagaatctgctcttacacctctagcatgtatctcgttgtagcagagttgtgcactttctcagcattgtgtagtgttttctaattgcatctaaaaacttatcaaaagtgattgtgaaaacagtgtcttaggaagtataaacagaaatggccaatatttatgtcctgtngattcaagcccaaaggttattaaattccaacttttcacaggggaattaggcactgcttaattcttactttatgggttttaaatnttaaaggggagattcaccggcagcccttaatttcccgttnggtcgggtccatttgccggccggtcttggttccnggaccntttaaatngggtgg

SEQ ID NO: 9880 - DNA, 481 bp, Homo sapiens
agaaaattgaagctgaagaaaacaatgatattaacattgaaactgacaacgacagtgatttttctgccagcatgggcagtgggagtgtttctttctgtggtatgtccatggactggaacgatgtccttgcagatttattgaaagctcggtgagtctttggcgcccaaaataccatccctggggggacattgtagaagaagaacctgctagacctccagggcatggaattcacatgcatgaaaaactttcttcaccctctcggtaaaagaacaattgcagaatctaagaagaaacatgaagaaaaacaaatgaaagcacagcagctaagggaaaagttacgcgaagagaaaacattgaagcttcagaaattgttagaaaggggttgatttagtaagaagaaccttatcagatgccaccaccttgatattggacttccagtctccagaactattatacgataaataaagttctttttttaata

SEQ ID NO: 9881 - DNA, 2484 bp, Homo sapiens
  misc_feature (1)...(2484): n = a,t,c or g
gaattccttataatcctagaggacaaggcattatagaatgggcacatcaaacattacaacgaatgttgaaaagacaaaaagggggtataggaggccaactaccacctcaatcaaaactacatttagccttatttactttaaaatttttgactcctggtacggatggtaagactccagcagaaagacattggcaagtgttagaggaaaagaggaaagtttatctgaaagtgttacggaaatccccagaagaaggacaatggaaaggcccggtggatttactgacatggggaagagggtatgcttgtgtgtttacaggagattgacaagccatgtgggtgccctcaaggtgcttgcaaccctggaatgggagactggagaaacatggggtggccaaccatgggcccagtccctccggtatgagccatgagtcagctgagcctgagtgcaaagatggagagaaggccgactggagtcacgacacagtcttaatgttacatttgtaaagaatatcaccactcaatttgtggtttgtgtttttaatccttatgtctttttggcagctcagaaggaccagctccaggtaaacaatacccagttgacctgtaaatcttgccagttatatcactgcattaatcatagcacattgcgaacacataatatctcgactttgatgattttaggttgcatccctgggctagggattcctgttaatctgtccgaggcttgggctgccacacctgctttgcattttgtgaaacttcttctacttcaggttactcattgtgcccgtagagccttaggcatgataatttttgctatcgtttccttggtcacactaataacttctgttgtgatgtcctctgtaactttgcatagttctgttcaaacggctcagtacgtagagaattggacacgtacagccaaccaagcgaggctacttcagaataaaattaacactgagttacaaactgaagtggcaatgttgaaatccatggttctgtggttaggggaacaagtataaagcttgcagttgcagcggcaattgcgctgtcattttaatcacactcgtatttgtgtaaccaacttagaatataacaaaagtgagtatccgtgggaccttgtgaaagcccatttgcaaggagctttcacatccaacatcacctttgatattagtgaattacaaaacaaaattcttgatttaaataggcacactcaagaatttcagccttctttagaagactggactgaattccaggaaggcctggagagcctcaacccttggacctatctaaagtcccacagtaacatcttatatgtagttcttggagtaatgttgttttgtctctgtcttctgtttatagtctgtaaaatcggatggaccgccaatcggagaatgagagctgcccagcctggtcttacattctttcaattaattcataaacacggggatatgcagggagccgaaggcccatgggacgtgaccaactcagcattcnnnnnnnnnnnnnnnnnnnnnnnnnnnnnnnnnnntancatgaatacaggatgtgagcaaactcacgactgtgcctgccgccagaaggtttgctgagggcaatcgcttcctgacgccaagctctttgaagttatctactggaacatctagagaatgcagtcttgcaagcctactctggaccaaccaactgacctcttcttccaccccccttctcactatcgcttttctctaataaatacagagggccgtgtaaagctcagggcccttgtccactagaggcaaggtgcccccggaccccttcttccaaatatactcttttgtctcttgtcttttattcctgcgttcacccccctttgtttagtccacctaggtccgtgcaggttacaaatggcaaccagaacagggactccaagcacgcccaactagcagcatccaaacatgggacttcaaggacgtgaatgaagaaggtctgctggagcagaggaactgaaattgacaaggcgaaaggggaccctgggaagagtctgccggcagcagatataagtctgtaaaatcggatggaccaccaattggagaatgagagcctcccagcccagccttacattctttcaattaatacataaacagaaagggggatatgcagggagccaaaggcctgtnnnnnnnnnnnnnnnnnnnnnnnnnnnnnnnnnnnnnnnnnnnnnnnnnnnnnnnnntatcatgaatacaggatgtgagcaaactcaggactgctcctgccaacataaggtttgctggaggcaatcactccctggcaccgaggttatctactgcgacatctagagaatgcagtcttgcaagcctactctgaactgagcagccgaccccttcttccacccccccccaccctcctatctcttttgcctaataaatacggagggctgtgtaaagctcagggcccttgtccactagaggtaaggtgctccctgaccccttctcccaaatataaa

SEQ ID NO: 9882 - DNA, 760 bp, Homo sapiens
aattgctctgcttttccactaaaactccatcttagtgaattttaaattatccagagatgtcaaactgccaaataaaaatatttcagtagtctttgcatcagcttaccttgtaccagaaacatttccaatttactatcaaattatagtaactgagcctgtgtgaagtatctcatcattttcgaaaggaacaccttgtgtgatgccagtgagcatttctaaaaagggtgtgaggtagaggtaaaaataaggtgagagaccatttcagaatgcactgttgctcaaaaaggtgatctggttctttcttcagagatttctacggggatagaaaatcgggagtctgccctcattaatctgtgactccacctcttgcatcaaatcaatatctatttgttgagcacttattgattaagaccttgcatatgtctgtccattttgatttgagatacaactttttgtgtgggttgaatgacaaatcactccaaacaaaactgggcacagagaatcagctaggagaccagttattcagggtccatttctcttggatgtaaaggagtcctgggtaaaatgtggctgtaacctaaaccaactagtccttgtgatttgtttctgccctctgtgtttcctgttgtcaaatgctaagtgtgtgttttgcagtcatgaactaaagcacaaaaagatgcatgagacattgtagtcatatgtctggtgtgacactttggagcaaaaaccttgcagtggtaaataaaaaatttccaacggg

SEQ ID NO: 9883 - DNA, 240 bp, Homo sapiens
aaaaaacagacaaatgcagtgagcttttgctctctaaagagcagcttcaaagggatatacaagaaaggaatgaagaaatagagaaactggagttcagagtaagagaactggagcaggcgcttcttgtgagtgcagatacttttcaaaaggtagaggaccgaaaacactttggagctgtagaagctaaaccagaattgtccctagaagtacaattgcaggctgaacgagatgccatagaca

SEQ ID NO: 9884 - DNA, 201 bp, Homo sapiens
tttgttacatattttggatatagacttataaatgaggagcatttgtaactttctaaaataatggctgcatctttgttttccaccaacaattaacatggggtttcacttttattgcatcgtcaacagatttgatgtttttaaaaatatttgtagtggtcctcctaatgggtgtgaggtgattttgtttgtcagtggtttttt

SEQ ID NO: 9885 - DNA, 207 bp, Homo sapiens
tagaaagccaatttacctactttggtatttggtaaaatttttcacttctgttgttattttatgactatcctcttcatgtaatttatttgaaatagctgtacaacttatatttagaaagtataaatgactgaagtgatatttttaattaaacataggggaaagaagaaaagtttccgaatgatgatgttggtattgaaattggttaag

SEQ ID NO: 9886 - DNA, 741 bp, Homo sapiens
ttgtttttttacttttactttgaaaggaaagtttattatttcccaatgttctttacattttcatttggaaatatcattcctgacagaaatagatacattataccttcgaaagcagaaagatcttaattaattaaaacagtttacatttaccttagcattaggtctggctggctaatttcaaaggattaaaaattgcacctatttgggccaactggggtcctgaataattatccagggtaaaagtataatatttcatactttatacattttgcttcatcacacatttactttccacacagtgttcaacttcacatttaaaaagcaaattagtctttaattccctaatgaatataatagtcttgatttgattgaagtttcaaatggaaaataaaactatgcggagttttcaataactggcttagcccaataaatgttgccaatagaagtttaaacacttgtttaaacagtttgcaaagtattatttcctttattctcttcaaaacaacacagacacacataaagtcacacattacaggcatctgaactggtaaaatgttacagattagtggcatgcaggtattttacatttttaagtgcaatgaaaaatgctgcttattcattttgcttgaatggatgaaaacaactaaaataaatgcttaattaaaatataactattccatgtatataagggtttttgtttttaaaccaaagtggcagagataagaattttaggtcagaata

SEQ ID NO: 9887 - DNA, 554 bp, Homo sapiens
tggaaattaaaataattgattttggatttgcacggctaaagccaccggataatcagcccctgaagactccatgcttcacccttcattatgccgccccagagctcttgaatcagaacggctacgatgagtcctgtgacctgtggagcttgggcgtcattttgtacacaatgttgtcaggacaggttcccttccaatctcatgaccgaagtttgacgtgtaccagcgcggtggaaatcatgaagaaaattaaaaagggagatttctcctttgaaggagaagcctggaagaatgtatcccaagaggctaaagatttgatccaaggacttctcacagtagatccaaacaaaaggcttaaaatgtctggcttgaggtacaatgaatggctacaagatggaagtcagctgtcctccaatcctctgatgactccggatattctaggatcttccggagctgccgtgcatacctgtgtgaaagcaaccttccacgcctttaacaaatacaagagagaggggttttgccttcagaatgttgataaggcccctttggctaagaga

SEQ ID NO: 9888 - DNA, 656 bp, Homo sapiens
ccactcccgagaatattcccatctgtattttgtgctgatgttcctgcatccagttgttctcggtcatacttttgaccacttgtgactggagttcagtggccctggcaggcttgtcctgctcttgaccattccactgactaactttggtgttttgtttccaagttaagtgattcctcctttttttttgttcaatgttaaatttaaaaataacaatgtgtatgggtcctcccatgtgtaatatggtaacatgtaacttgcagtgtttgccagctttcaaagcaggctttgtgaaaatgtaatacaaacagcagtgaatgggactcaaatgttgtgcttcctataaacagctccgctctttcagggaaggatggtaacaaactagaaggacaaatatgtaccgtatttataacgtattaaaactcttttaagtagcttaaggtattgtgcaatggcctagccctagtagaaatgggggaaaagcattgctgtggaccattgttaaagtgacaggagttgtagggttacccctttgacaagcttccatagtcttcagacacgcacattgatggcatccctacagtcttcttcacttgaactttgtaaaactgcatatggacctgtaatcaacttttgatatttcttaataaaggcgttga

SEQ ID NO: 9889 - DNA, 429 bp, Homo sapiens
ttttttttttttagtagcacattaaaacacatttattttccttttcagctatctcaaaagtactgtgacttgaattagtcaaatattaaaaacgagtttttttataatgaatgctaatgaaatactattactgacattatatataatgcatggctgaaaatagataatatatatgaaaatacagaacataaatatactgaataaataagaccttgacattttacgaccaagaatataatgccaatattattaaaaggataatataatcaatataaccacaagcagaggaaatcacatttgatattatttcaatgcttaaatatacattttttaaagttgcttggtacctagtcattccttgacaattgccaaaaagccatgaataaggaagaggaatccacaaagaactgggatctcatcttcagaatg

SEQ ID NO: 9890 - DNA, 404 bp, Homo sapiens
gtctccttatttcctctttaccatttttggaggggaagctattttttttccttgatctttcccagtgatatggattgaatctggttggtcatttccaccaggaatcagaggcagctgttaccaggtttcggccttccagttgatccctccactgtccaggctgtctcaggaggaggtgaatcagagctagtctgtcacctttccaatctaagccgaagccacaggtgcctgacaggttcccttctaacaactatttgaccaagagaggcaatcagggggttgtatacttgcactggattcgccagagaagggaaaatttaattagtgaaaaaggaaagaacactaggaaacatttgagaacctgcctctatcccagaatgtgctggagatttgacactcaaatc

SEQ ID NO: 9891 - DNA, 564 bp, Homo sapiens
ttttttttttttcaacctgacctgaggcatcaattcaggcacagtataactctgaccagtaagcggaagctaacccaaatgctttccagggctgaggggacatcatgagagttgtggtcatgtacagaagcacagtcccaggggcacaggtggtacccctgtaaacaaagaatttgcaatattagggcacctcaagcaggacatccattaggctgtacaggtgaacagacctcctaccaggggaactcctgcccaagtgtttccagtcccatctgaaaagttcccagagtccttggcttccaagggactgcctgaaggcagtgagtcccaaacagttttgcttgttcaggatacaagttgatccatctcatgagcatggatgacatttgtgggagatcttcatggaaagcatagaagctagacccactctgttgtcagtctgaactcaaagcactcacagcacatggaaaggcagcactgggaattttccttcagcaagaggaggcttccagggatcaagcctccccacgtgccaggctttaattattttctccaatgtcgacc

SEQ ID NO: 9892 - DNA, 395 bp, Homo sapiens
tcatgttctacttgcttgacctgagcttcaagttttgaaatcattcttttcaaatcagaaatctgagtatatgcatcaagcaatttattctcagttgtatttaatgcatcctttactctcctgtgttcttttccaagggactccatactctcctaaaagatcttgaaacattttgttctcttgttttagttgagcttctttatcatctgagagtttgtaagcattctcaaatgcttcttctaaatcttgcagtctagattttagtcgaatgatggtattgtctttttctttactgcttgttctcatttcttcaattcgttcctgcaaaattttggaagcactgctggctgcactgaagcgttctctcaaatcattcacttcaacccacgcgtccg

SEQ ID NO: 9893 - DNA, 949 bp, Homo sapiens
tcttttttttctttttttagaaaaaagaaagacaaaacagcaataaacaccttagctctttaatgagcaaagatcatgtttcttagcattggactaatagtcattatccagattatctttatttcacacaatgaccagtgacatggccaagatgtacaaagttggttccatcaagtagtatacaattttttgtataataatctttcattcttgaaaaagagtaactgaaaagaaaggtttctgttactgcagttagtttgtcagagaaagttctttgcattatcttataaactatcaaaattgctagtcatctgaaaaaatgtaaaaaaaaaatcacataactttagtctaatagaaatatagtacaggtgagagagaaagtatttatcaggatgtgctctttaagtccatctcatttgtttttcaatataaatgtacatctgattacatatacaaacatttggaaaggtctgtgatatactgttactggtaaacaacagggggatgaagagtttcctgtggtctgagaatattcgtttaaaatcacacatatgtgtaagaaagactaaaatcctccagatgttgactctcctaggttctgtatctacgttgtactctactgagattgcgtgagtaaattcccagtgaatgaacctcagtgagaaaggataagtgatgtaaagagggatataactttataatgaattgttattagtaaacattttgtcatgcagcatgagtaaatcaaagaactcagaacttataatcagagtggtaatacgggggcatcctcatatcatgaaagactgttgcaagtaactctttggacacacttcaccttaccaaaaggaacaaaatacagagtaacaaaaaaacacagcaacttatagatcctgtaccacatgtccaattagggttatatttctataaattatctagatgggattga

SEQ ID NO: 9894 - DNA, 689 bp, Homo sapiens
atgtaagttaccatatagcgctgagtggagaggcacatactattggagaattgcttatcaaaccttgtgcaaaagatgtagtgatgcggatgtttgatgaacaaaataggtaaaaaatagtgggggggtggggttggggggtggggtagagagggtgtggggggtgggggagcagctgacattgaagaagagcttgtttgtagactgaaaatttgcgatgggttttcactgcaactagatgaatcagctgatgtttcaggacttgctgtgctgcttgtgtttgttcgttataggtttaataagtctattgaggaagacctactcctgtgtgaatctttgcaaagtaatgctaccggtgaagaaatattcaactgtatcaacagttttatgcagaaacatgaaattgaatgggaaaaatgtgttgatgtttgtagtgatgcttctagggcagtggatgggaaaattgccgaagctgtcaccttaataaaatatgtggctcccgaaagcaccagtagtcactgcctattatacagacatgcactggcagttaaaataatgcctacatctctaaaaaatgtgctagaccaggcagtacaaatcatcaattatattaaagctcgaccacatcaatccagactattaaaaattttatgtgaggaaatgggtgctcagcacacagcacttcttct

SEQ ID NO: 9895 - DNA, 1864 bp, Homo sapiens
gctctgtagcacccaggagcggggaagcgaagtgcgagagaccccggaccccagcgctgtctcttcccgccgcccgaaccaccatgacccacttcaacaagggcccttcctatgggctctcggccgaagtcaagaacaagattgcttccaagtatgatcatcaggcagaagaagatcttcgcaattggatagaagaggtgacaggcatgagcattggccccaacttccagctgggcttaaaggatggcatcatcctctgcgaacttataaacaagctacagccaggctcagtgaagaaggtcaacgagtcctcactgaactggcctcagttggagaatattggcaactttattaaagctattcaggcttatggtatgaagccacatgacatattcgaagcaaatgatctttttgagaatggaaacatgacccaggttcagactactctggtggctctagcaggtctggctaaaacaaaaggattccatacaaccattgacattggagttaagtatgcagaaaaacaaacaagacgttttgatgaaggaaaattaaaagcctggccaaagtgtaattggtctgcagatgggaaccaacaaatgtgccagccaggcaggtatgacagcttacgggactaggaggcatctttatgatcccaaaatgcaaactgacaaaccttttgaccagaccacaattagtctgcagatgggcactaataaaggagccagccagggcagggatgttagcaccaggtaccagaagagacatctatgatcagaagctaacattacagccggtggacaactcgacaatttccctacagatgggtaccaacaaagttgcttcccagaaaggaatgagtgtgtatgggcttgggcggcaagtatatgatcccaaatactgtgctgctcctacagaacctgtcattcacaacggaagccaaggaacaggaacaaatggttcggaaatcagtgatagtgattatcaggcagaataccctgatgagtatcatggcgagtaccaggatgactaccccagagattaccaatatagcgaccaaggcattgattattagatccacacagaaggagctcagtatttagtcctttgtttttattcagtgagaaccaagctagccttgagtaatttttatcttgtcttcctaaaacactattaagcttattgtacttttaagaaaaattgccttacgtacattcctttttcctttttctgcctcttccctcaatagttgccttttagtgctgtaatagttaaatcctacagcataatcaataactcgcatatgaagtaaaaaggaatactgtgaaaggggagtactcttgtacagccagttcttttatgcaaaaatctatgcatttttacaatcttatattaaactggtattttcaaacaataggaaacttttttttttttttttttacagtttagtgtatctggtttctacatggaagactaaactcatgcttattgctaaatgtggtctttgccaactaaatttaagatgcagcattttagaaatttacatatcaatgtttctacagtattgtttgctaatttttaaataaagtcatgatcagtgtgcatttgtgattatatgtgtactcattctcttacctagcgaacaagatcttttcagagtggtgtttctaaaagagcatgtacaaaagtggcctgtggacatttaggcctgggtgatgcatttgctcttcctgtttgtgccaatgtatcaatgtagagttgctctgttttcttcaactgtatttattgctgcatttctcagcataaacttatcccattgtattttttataaataaatattttttttgaactttcaaaaaaaaaa

SEQ ID NO: 9896 - DNA, 1338 bp, Homo sapiens
cattggagtcaagatggaggagtacgcgcgagagccttgcccatggcgaattgtggatgactgtggtggggcctttacgatgggtaccattggtggtggtatctttcaagcaatcaaaggttttcgcaattctccagtgggagtaaaccacagactacgagggagtttgacagctattaaaaccagggctccacagttaggaggtaggctttgcagtttggggagggctgttttccatgattgactgtagtatggttcaagtcagaggaaagggaagatccctggaactccatcacaagtggtgccttaacgggagccatactggcagcaagaaatggaccagtggcccatggttgggtcagccgcaatgggtggcattctcctagctttaattgaaggagctggtatcttgttgacaagatttgcctctgcacagtttcccaatggtcctcagtttgcagaagacccctcccagttgccttcaactcagttaccttcctcaccttttggagactatcgacaatatcagtaggacttctttcctaggatttctttaacagaacgagttgtggttcgagaaggatttcagaagatcaagttacagtctgtttttaaaaccataggtgggacagctatggccaataggctataaagagacatttagcacttttttctatttaaaggaacaagcggggaagggtgctaaaagataatacgtttatttattcacacttgaattgcatttgtgatcaaaataaatgtttaaatcgctaaaggaaaatacagtaagtgcttgaaagatgaaggaccaaaaggccaaaaaacagtgaaatatgatcatcatctccttgcggacttctctgcctggttttgtgtgttctgttattcaaacaataaaaagctggtggaacttactctttcttttaagataagttgtagacttcgatgtttcatgctcatgtacttcaaataatgcatgttttatagttagtccctcatcacttgaagtgacttctgagaattatgcagagtcaacatggatcatttcacagtgagatgctttatggattgaaggatatggtaaaatgtttatagtttactttgaaagtaaaatatactatgtcttggttttgaggatattggatacaaaactctcttcctttagggctactgagtcttgattcctgatcatcagaaatttcaccagaaacaacttgcttccaatatacccaattctatatgaagaattcatggagagtgtactggcactggaagagtttagtgtttcttgtatgcttgaaaataaagtatgtactgttttgaatgtgaaaaaaaaaa

SEQ ID NO: 9897 - DNA, 857 bp, Homo sapiens
caaaacttctgaatactatgtttttttttcaccttttaatcactttccccaccccaaatataatattttttaaaaagtatattttaatgtcagattctagccaggcccctatctacctctagagtgaaacaattccttaaaatagactcaagttattttcatgccctagaaatatacttttggctttgcaggaaaagggatgatgccctattgtactttagaatgggctcttaaccagggggcccatgaaccactacaatattgtaaactttagggagatatgtatgttatatacgcattttcctgggtaaataagtccctaggattcatcagtctcaaaacgcctgtgaccccaaaaggttaagaagcattgctaaaatgattttgtgtcattcactgtacctaattaggatataactaattttgttccgcagctacccgatctcttacatcaatctaacttactttagatagtaccatacaaatgcacgttactaaatagtcttatactggatcaggaggactatgtaaaagaaaaagaaaaactctaaacaacttttctaaacatttagtttaatgagaaaaccattagttgaaaactgggttttggagcaatgaaaagaaatgaagggttgggttttctagtgaagaaacattgcattaattcttctcagttgtttctatgctgaagaatcagtaacttattaatttccttgctggaaaaatcaaattatctgaagcagcaaaggttcattcttgttggtttatgtgacacaataagttcttataaatttacagcccacgtaccaaggaaagactttccctatgggctttttaaaaccaattaaagagtaaat

SEQ ID NO: 9898 - DNA, 648 bp, Homo sapiens
ttttttttttcctctcacaagacctttagttgagagaacatgcacagctgcctgccctgaaagccccaggcgtcccattcaggaagaggcaaccagaacagaccgacggccccaccacagtcgtgcgcgggctcctctgcgatggctggcagcacagctcactcagcacacctgtatcatcatcgacgtcaccatgttatcaaaggccctgctggactggatgcggtcccccgggttgtagaaggggttgcacatcacgtctgtgtaggagttgtgtagcttccggaacatgctgcgaatttcgttgtctcgaagggctgtgttggaggaatctaccaccatgacaaacttcaccttggagttggtgacgtagccgtataccttgtagtcctccgtggggtagagcaggcccaggtacagctccctctggtcgaccagggccttccccattgcggagatcttctcatccaccacgtccagagatgtgtgcaccatgtagtggaacttcagctcgttctccgtaggggtgctgcgaatgtagagggggtaattctccttggcaatcaccgcgatgcacaccgccatcttgggaggctcggcgccaggcaccgcgtcacgtgacccgccgctggtcaccctcgtgccgaa

SEQ ID NO: 9899 - DNA, 246 bp, Homo sapiens
tgcacgctcggagcagggtcccggccgggagccgctggtgggggcggggagtccgggagccgcaatccagaagcgtcgtgggccatgtatatttcatcaaacggactttgggtgcgtcgcgtctcactgccatcagtgctatgtgcagtgacatttctgacttgagtggaggaatgcgcgaaggaaacccgggcgaaattggtattagaggatcttcttggcgccaatgctaattgtcctgattta

SEQ ID NO: 9900 - DNA, 674 bp, Homo sapiens
agtgtccttagggtttcaagaattttaatgcctagcagctgagtaacaggcattagttctgatagatagtgaaggggagaaagtgccacctgttgtgagatcacctctccagggcagcagctgccttgttatcaccagcaaccttagccctggtcagtaatatttctgctaagaaaggttttgaagcatggcctccaatgactttcataagcccttggaggcaggactgtgtctcatccatctttgtatcttcagtaccatcttgtaaggtgccttgtacatagtaggtgcttaatgaacaaatgttgcttgaatttagctgtcgtccagccccacagagttatgctccatttgccaccatgtgatatttttgagaaacaatagtgatttggatgccagctctatgtgactttgggcaagactctccatctatcttgtcttcatttcatctgtaaaatgaagtgagtagattcaatgctccctaaggtcccttccagctccaatacttgacaagcttgtgattctaaatcgtttccgttgcctctgaacatgggtgagtaatgcctccactgcagctgtttctctccaggaggctttgttcagaggagatctgactattgcacagccagttttttcttcctcttcagcagttctttactgtcttcagaatggtt

SEQ ID NO: 9901 - DNA, 891 bp, Homo sapiens
gttataaagcatccactaatcttcaggatcaacttgagaagacaggggaaaacaaaggatggagtggtccaaagcctgggtttcctgaaccaacaaataatactccaaaaggaattcttcatttgtctcctgatgtttatcaagagatggaagccagccgccacaaagtaatctctggcactactctaggctatttgtcacccaaagatatgaaccaaccttcaagctctttcttcagtatatctcccacatcgaatagttcagctacaattgccagggaactccttatgaatggaacatcttctacagctgaagccataggtttaaaaggaagttctcctactcccccttgttctccagtacaaccttcaaaacaactggaatatttagcaaggattcaaggctttcaggttcactactgtgatagacaaagtggcaaagagtgtgtgacctgtctgacattagcccctgtgcagatgactttccatgctattggaagctccattgaagccagccatgatcaggtataatatgccactgccattttgctgtgttatggcccagctcggaaatggaaggccatcaaaatgaaagctgcatgtgcgcacatgcagctttgctttccttaatacattatctgctagcaccatctgctagacttgaaaaatcaaaattgtttgcgttgggaaattgatatcatagtagatttaaattattttagacttcttgtttgcagttcattattattttaaatatggaattattttatatgaaaaatagttgtcccacaggttatttttatctttaatagttatatatgagaggaagggtcaacaaaacaatatagataacactggagtctcgctggtagtatactcatttggttctggt

SEQ ID NO: 9902 - DNA, 2362 bp, Homo sapiens
  misc_feature (1)...(2362): n = a,t,c or g
ggggccagttcatggggtcccccttggggccccacaccccgtctctcaccaagagttactgattttgctcatccacttccctacacatctatgggtatcacacccaagactacccaccaagctcatacagggaaccacacccaacacttagacatgcgaacaagcagccccagcgagggtctccttggcttcaacctcctagtgtctgttggcatctcttttcatgggggggagggaagataaagtgaatgcccagagctgcctttttcttttcttttaaaaatttaagaagttttctttgtggggctgggaaggggccggggtcagggagagtcttttttttttttttttttaaatactaaattggaacatttaattccatattaatacaaggggtttgaactggacatcctaatgatgcaattacgtcatcacccagctgattccgggtggttggcaaactcatcgtgtctgtcctgagaggctccacaatgcccacccgcatcgccattctgtagtcttcagggtcagctgttgataaaggggcaggcttgcgttattggcctagattttgctgcagattaaatccttagaggattctcttctcttttaccatttttctgccgtgctctcactctctctttctctctctagctttttaattcatgaatattttcgtgtctgtctctctctctctctgtgtttcctccagcccttggcctcggagacggtgttttccccccttgccccattatcttttcacctcccaggtctaccatttcatggtggtcgttgggtccgcctaaaggatttgagcgtttgccattgcaagcatagtgctgtgtcatcctggtccatgtaggactggtgctaaccagcttgccatcatgaggatgtgtgctagagtgtgggnaccctggccaagtgcaggaatggggccatgccgtctcacccacagttatcacacgtggnaacccgaagacagggcccagaagctttagaggtatgaggctgcagaaccggagagattttcctctgtgcagtgctctctggctaaagtcacggtcaaacctaaacaccgagcctcattaacccaagtgaaccaaccaaagtcaccagttcagaagtggctaagctaataggagtctgacccgagggtcctgctgcttcctggttaagtatcttttgagattctagaacacatgggagctttttattttcggggaaaaaccgtatttttttccttgtccaattatttctaaagacacactacatagaaagaggccctataaactcaaaaagtcattgggaaacttaaagtctattctactttgccaagaggagaaatgtgttttatgaacgatagatcacatcagaactcctgtggggaggaaaccttataaattaaacacatggcccccttagagaccacaggcgatgtctgtctccatccttccctctccttttctgtcacctttccccctagctggctcctttggacctacccctgtccttgctgacttgtgttgcattgtattccaaacgtgtttacaggttctcttaagcaatgttgtatttgcaggcttttctgaataccaaatctgctttttgtaaagcgtaaaaacatcacaaagtaggtcattccatcaccacccttgtctctctacacattttgcctttggggatctggttggggttttgggttttttgttgttgttgtttatttgttattttaaaggtaaattgcacttttaaaaaaataattggttgacttaatatatttgctttttttctcacctgcacttagaggaaatttgaacaagttggaaaaaaacaatttttgtttcaattctaagaaacacttgcagctctagtattcacttgagtcttcctgtttttcctgtaccgggtcatggtaatttttggttgttttggttgttttcttaaaaaacaagttaaaacctgacgatttctgcaggctgtgtaagcatgtttacctgttggcttgctttgtgtgtctgttaaatgaatgtcatatgtaaatgctaaaataaatcgacagtgtctcagaactgaataactgcagtgacttgatgctctaaaacagtgtaggatttaagaatagatggtttttaatcctggaaattgtgattgtgacccatgagtggaggaactttcagttctaaagctgataaagtgtgtagccagaagagtacttttttttttgtaaccactgtcttgatggcaaaataattatggtaaaaaacaagtctcgtgtttattattccttaagaactctgtgttatattaccatggaacgcctaataaagcaaaatgtggttgtttcaaaaaaaaaaaaaaa

SEQ ID NO: 9903 - DNA, 439 bp, Homo sapiens
ttggttttggacatataagtttaattacctgctagattatcagatggaaatatgtggtaaatggatggaaacaaggtacataaacttaggaggcagaaatttttaaactttagggttagacattcaccagattggacaatttttaacatttaaaataaaactttttgtcataaaaaacaaatgtattaaaactagtttccagaactgcccaaatgactttttaaacatgacttaaatgtcgttttgacaaatctatccaaaatactaattttccttttagaacttagtttataatttatatattaaagtgcccttaattgatattcatcgggataccttcctctgagccctaatggttttgggaggccctaagcggtggatcacctgagggtcaggagttcgagaccagcctgggccaacgtgggtggaaacccagtct

SEQ ID NO: 9904 - DNA, 267 bp, Homo sapiens
tttttttttgtctcacaatttattaggcagccaaataatatacttctggaaatgcgtgcatcttacttctcccattctattaatactaatattttctcaggggagaaatgtgtccaagatgctctgaaaccacatactgcttaagagagcactgcatgtgctcaagccctgtttattgacaaaacatttaacttccaaagcaaactacagctgttagttaactttaaaaacatgccatgatttaaaaaaaatatttggtattgtttt

SEQ ID NO: 9905 - DNA, 660 bp, Homo sapiens
tttttttttttttagcaaaataataacgtttttatttctaaagtaaatattttagtcaaagttgcatcagaaatcaagtatttctttgacattttcaagaggttttagttattaactacaattatagttgtattatatagtaacacattgttttaaaatatattataaaccttttctttttcctctttaatttatatgaaatataaaattaagaattttgtaacacgattcatattggaaacatttaaaatgttgtgagctactcttatacagaaaatgctgtggaatcacataaaacattctaatgattgaaagtgccaggcacaatgcttggcacatgttagatacttcataaatgttcgttcacacattctctcatttactcatgcactcattcaaaaaactccaggcttaaggagaaactgcattataaatgagaatggcaaacacaatcttttatcaacaaatttggagttttgacaaagactttggcaatggagagtggagaagatgagaggatgatgattaatatttcaaactgcttggttaaaatctagcaagtatagccctgagttgctctatatgacatcatagaggatcagggtcaatactccataaaaagaatgcatttcccttcgatacccaggttttattttacat

SEQ ID NO: 9906 - DNA, 578 bp, Homo sapiens
tttgaacctgaatgcagagaataaatactttattaactgattacagttgaaagtcacaaacaaaaaagggggtatattaaggcaaagccatatatatatatatatatgtatagacaaatccaaagattgttacttctttacattttaataacctctgcatttttcttttacacatttaggcagtgtgctttcttttctcctcagttaaagcaacaccttggccaatatttctaaatcatattttgatgacaacttacaggatcagtgattgagacaatgactagtgtatcaaacgctatctgatagttttcttagcatattccgtgtgtggtggtacatttattgtggtgtgcaaaatctgacaactgacgatttttctctgtcagcaaaactaacaaatttttaaaaatgattttaatagttataactaaaataagcttagacttccaagtcagtcaaatgcccaaactgcatgttttctgccggttccccaaatccttttacatgttttaaatagcctttagaatatgatcgatcacatggctgtatttcagatctaaaagttttgagattttcaa

SEQ ID NO: 9907 - DNA, 556 bp, Homo sapiens
gtagcagtgtcagcgtattttttcttctcatcctggagcgtattcaagatcttcccaacacaagaaaattaataaaaaatttatatataggcagcagcaaaagagccatgttcaaaatagtcattatgggctcaaatagaaagaagacttttaagttttaatccagtttatctgttgagttctgtgagctactgacctcctgagactggcactgtgtaagttttagttgcctaccctagctcttttctcgtacaatttttgccaataccaagtttcaatttgtttttacaaaacattattcaagccactagaattatcaaatatggcgctatagcagagtaaatactctgattaagagaccggtactagctaactccaagagatcgttagcagcatcagtccacaaacacttagtggcccacaatatatagagagatagaaaaggtagttatagcttacagtgacaatgtagtattttagacctgtgccttcgtgcctatttgcattaaatacatgcttcaagttatagtcgacgcggccgttaatttagtagtag

SEQ ID NO: 9908 - DNA, 986 bp, Homo sapiens
  misc_feature (1)...(986): n = a,t,c or g
cacccgggcagtggcggagtccggagccgcaggctggatccactttatctnagacgaggcgcctgcggcgacggcggaaaacaccaaaggcacccgggggcggggcgacccgatgtggcggggaggagtaggagagaccaggattggcgggagcggtccaagggagtcaagccggggagggcgaaaaggactttcagcctccatgctctgagacaactgtggaagggatggaaaccctattttcttttctccaagaccatggttggtctgcttccctcactcgggctccttgacagtcttctagaagagagaaggaggaaaagaagcagttcctgatgttacaaatgaacaaggatctcccagccttagtctttgagaaaagatggctgaaagagaggaactctccaagtcattccgcaaacaaatgcccatttaaacatcatccttgtcttgtgaagaaaacaggaagaatgtcatgtaccatgtggatcaccttcagttcaaagttgcagcaaagtgaagaaagaaactactggaagccacccagcaatgcactgtttagtcatcaattaggagcccatgggaggataatagggagactgggtggaggctcagtgtgtaataatctcttgtctaatgtatgtgtgtcactgccatgttgtatgaacaatagtgagggctcacatttacttaacacttgtgtgcgcaaatctgggtttttcttcctttccagaactatgactcgatcataaaatctgttttgtttgcatgcatgcccaaaacaaccctgtaagtagaacattgtcattatctctgttttagagatgaggaaacaggctcagagaagctcagaaatttgttcaagatcgcacagctagtaaatggcagaagtaggattgtgaacccagggaatctccagagcctctgtgtaaccatgatgttatattttttttcctctttaaaaacaaaatttaaaaccttaaaaa

SEQ ID NO: 9909 - DNA, 1059 bp, Homo sapiens
tttttttttaagagtgtctacaaatttttattttgtttcataccaatttaaaaataaatacatattttattgatactaatacatattattagtttaataaatattctagttttacatattggttcacaaaagaattatataaacttcttaaaaataaaatctatactatagcttttattgaactgcaagagatgaattttaatatttaactatacatgtaaaatccgtaaaaacaatacaataatttaaaaattatagttccaacttcctgttttttgaaattattctgatgtttcttctacactcaagtcccaaccttctctacttctagaagttgaataagaaagacatggaagatacagcaggcaggcaacacaggttctaggggaaacctgatcaagcccttagcttctctagttctgttgatttctctacagggtagggatcactacagtcccatttaattaaaagaaactggatttaaaacacctgattctaaggacggtggtacactcttgagaaaagagttaaagcttttatttgtatgaaaggcaattactcagccctaaaagctcaacagacaattaagggcttaaattatacaatgttttcccatcttctccagatacaacctcaattacatagttttttagcttgagatattaattgaattcagcatgattgttgataaaatgccctttggttagaaaaggaggaggagagagaagggaggggaaggaaaaaaattctattaactaggagatgttgtacagatagaaatctacaatttcaaatatatccaacctgaatgaacactgaaataaaaagatttttaagatttacaagctccctagtactttagcaatttatcttatagattagttaactacagaatactagattctcattatttttttttgagtactgttttaaactttaagggttaactaagagttatcaacacaaactaatatttcatgcaaaagtatcacttttataataatctttttcttgtatgaaactaatttccttaaaaaatagctactatatactgaaaac

SEQ ID NO: 9910 - DNA, 403 bp, Homo sapiens
cggacgcgtgggctctaccgaaaccgggtgcctctgaatgagattgtaatccgggctctcgacctggtgaccgtggtggtgccacctgccctgcctgctgccatgactgtgtgcacgctctacgcccagagccgactgcggagacagggcattttctgcatccacccactgcgcatcaacctggggggcaagctgcagctggtgtgtttcgacaagacgggcaccctcactgaggacggcttagacgtgatgggggtggtgcccctgaaggggcaggcattcctgcccctggtcccagagcctcgccgcctgcctgtggggcccctgctccgagcactggccacctgccatgccctcagccggctccaggacacccccgtgggcgaccccatggacttgaaga

SEQ ID NO: 9911 - DNA, 3139 bp, Homo sapiens
gtgggctcgtcggagccgcgggcggtcagcaggaatttgaccctctagggcatgaatactgtgctgttcagttctgagctgtgctagcaatacccttcaaaggaagagcaatggctgcagcagcagcttctcacctgaacctggatgccctccgggaagtgctagaatgccccatctgcatggagtccatcacagaagagcagctgcgtcccaagcttctgcactgtggccataccatctgccgccagtgcctgggagaagctattggccagtagcatcaatggtgtccgctgtcccttttgcagcaagattacccgcataaccagcttgacccagctgacagacaatctgacagtgctaaagatcattgatacagctggggttcagcgaggctgtggggctgctcatgtgtcggtcctgtgggcggcgtctgccccggcaattctgccggagctgtggtttggtgttatgtgagccctgccgggaggcagaccatcagcctcctggccactgtacactccctgtcaaagaagcagctgaggagcggcgtcgggactttggagagaagttaactcgtctgcgggaacttatgggggagctgcagcggcggaaggcagccttggaaggtgtctccaaggaccttcaggcaaggtataaagcagttctccaggagtatgggcatgaggagcgcagggtccaggatgagctggctcgctctcggaagttcttcacaggctctttggctgaagttgagaagtccaatagtcaagtggtagaggagcagagttacctgcttaacattgcagaggtgcaggctgtgtctcgctgtgactacttcctggccaagatcaagcaggcagatgtagcactactggaggagacagctgatgaggaggagccagagctcactgccagcttgcctcgggagctcaccctgcaagatgtggagctccttaaggtaggtcatgttggccccctccaaattggacaagctgttaagaagccccggacagttaacgtggaagattcctgggccatggaggccacagcgtctgctgcctctacctctgttacttttagagagatggacatgagcccggaggaagtggttgccagccctagggcctcacctgctaaacagcggggtcctgaggcagcctccaatatccagcagtgcctctttctcaagaagatgggggccaaaggcagcactccaggaatgttcaatcttccagtcagtctctacgtgaccagtcaaggtgaagtactagtcgctgaccgtggtaactatcgtatacaagtctttacccgcaaaggctttttgaaggaaatccgccgcagccccagtggcattgatagctttgtgctaagcttccttggggcagatctacccaacctcactcctctctcagtggcaatgaactgccaggggctgattggtgtgactgacagctatgataactccctcaaggtatataccttggatggccactgcgtggcctgtcacaggagccagctgagcaaaccatggggtatcacagccttgccatctggccagtttgtagtaaccgatgtggaaggtggaaagctttggtgtttcacagttgatcgaggatcaggggtggtcaaatacagctgcctatgtagtgctgtgcggcccaaatttgtcacctgtgatgctgagggcaccgtctacttcacccagggcttaggcctcaatctggagaatcggcagaatgagcaccacctggagggtggcttttccattggctctgtaggccctgatgggcagctgggtcgccagattagccacttcttctcggagaatgaggatttccgctgcattgctgggcatgtgtgtggatgctcgtggtgatctcatcgtggctgacagtagtcgcaaggaaattctccattttcctaagggcgggggctatagtgtccttattcgagagggacttacctgtccggtgggcatagccctaactcctaagggggcagctgctggtcttggactgttgggatcattgcatcaagatctacagctaccatctgagaagatattccaccccataggggatgagaaattatcagtttcttctggttcccaagccaacttcccttcccttagttcttggttgttagtggcacatgcagaatagactcagcctatgtcctgattccagctgggtagttctagaactttagaagctccatcttttaatgtttttatttgttatgtccccctcccggcttcccacctaaatttagagctttaaaagatgcactgcccaaataggacacacgatggtgttagctgaagtttgattagcaattaggcacttccaaggctttagtagagagagccactttagccctttgtgccatgtttgaaatttgcccttgtattaaatccttgattttttcccatttggctttgatgcccttgatccattgtttccttcctactataatgtgcttcatctgtgacactttctcttgaactctgattggattcactggtgcatgcttcagtgggatctggctccacctttcagtgacatttaagacatcatattcccgtaacatttatggtctcagtctgatcgtctttaccagtatgaaagtcattcatttagtgctaccaaaggggatacacaagccctttaggaagcagtacctctcgcctggaggatctgtgccatcttggattgagaattgcagatgtgacagaatggattgaccctagttggttggtattgatgacttcagcctggaaattgcttgccttttaaagaagcatatatgggttggaattatgccaaagcataggaagctgggaataagcaaacaaatgctgatatagtcagcaaatttggatagtctctagggctcatcatttttcatactacctctctcttctggcctgtgtctaaggaattgtacaacataggccagggccaacaaagtggagaggtggacacattttcatgttcattactaaaacaaacagcaaaactattggtttgttattctgtgttttcctcaagtcagtacatactatttggtttcaggatttctttccatttctctatcaagcattaaataattgagaactgtttcttcataaaaaaaaaaa

SEQ ID NO: 9912 - DNA, 846 bp, Homo sapiens
gtggccagcgttttgaaactgaaaatctagtggttgaacatatgtctagctgcttagatcagatatgtttaagagtgccatcatggaagaaaatgaaagagatcacagacgaaagcatttttgtaatctgtgtggaaaaggattttatcagcggtgtcacttaagagaacactatactgttcatactaaggaaaaacagtttgtttgtcaaacatgtggaaagcagtttttaagagagcgtcagttgcgactgcacaatgatatgcacaaaggcatggccaggtatgtctgttccatttgtgatcaaggaaacttcagaaaacatgaccatgtacggcatatgatttctcatttatctgctggtgagactatatgccaggtctgctttcagatattcccaaataatgaacagttggagcagcacatggatgttcatctgtatacatgtggaatatgtggagcaaaatttaatttgaggaaagatatgagatcacattataatgccaagcatttgaaaagaacctgagtgattttctactgtactaatgtttagatgatagcagataaaacaccaaagcaaaggatatgagctatttaggaattgattatataagatgatttgttagaaacaaatttcaaggcccttttaactttaatatttttgtttaggattttaagtatctacatttaggtattaaatgtttatcatttttgttgtttcttaatagaattatttgtttttagtttttcttagctatgattaaaatttttaaatgtagactacaagtggttgttacccattcaatgactattaaactttagtttttcatcaaaaaaaaaaaaaaa

SEQ ID NO: 9913 - DNA, 981 bp, Homo sapiens
ttttttttcactgaaaaacataccactttaataagacaaaactgcaaattaaatcaatagaaattaggtagatccatttattttttaaatacaagtataattttggaaggggtatttgacaaattcagcattaactgccaactctatagacatgttttaacaaaaagcaaaacaaaacaaaacaaaaaaacaaaacaaggcatttactcttggccctttcagtacaggcgaagtgttctattgcatcacaagtgctagtgatgcagtaacagatccaagggcataatattaaatatgtttttttccaactgcgatttagttgaaaaataacataatacaaacatatattaatggctatcaagaccagcagtgatctgcagaatacctagaggcctacctaattagaaggttgaaacttagtaaaaccgtattaaagtcagtgtttttattcttagattaacaatgacagagtgagatatctttgattacaattttataaggtgtggtggggaattgagaggagacagatattggggaagactggcagtgtgtgctgagttagagttgggaatgtggctcaaattagtcaatattgattaggatattgttttagaaaattttaaatgtgtcctaaattgtggcatattgaaaacgatattaaggaacaatgactcattagccctaaatacaatttaatgagtgccatcaatgggcttaagaaataagcagggatgggggatagagaggcaaaatgaggtgaaagagaaaatggaaagtggaaaatatgtttgaacattggagaatgtgaaaaggccaccaaactgctttagttatcactcagaagtgctcttcccattggctacctgcttctgatcacccaaacaccaattttagagcagaggagcagtaatcccctttatctgcaatttcactttctgtagtttgttacctgaggcaaccttggtccaaaaatattatgtg

SEQ ID NO: 9914 - DNA, 434 bp, Homo sapiens
tctcctcgcccgcactgtttcatgctggaagtcggctcccggccggcgctcatcgagcgccatgtggagcaccgggtccgcgcgggcgacacgctgcagggcatcgcgctcaagtacggtgtcacgatggaacagattaaaagggccaataaactgtttaccaatgattgtatatttctgaagaaaactttgaacatcccagttatatcagagaagcctttgttgtttaatggacttaactccattgattctccagaaaatgaaactgctgataacagtttttctcaggaagaggagccagtggtggccggggaagacctccctcctcccagtcctcaagaatctgatgttcagcctgtgcagcctgaggaagtgtcagccagagatttcctgcagagacttgacttgcagattaagttatcaacacaggcagc

SEQ ID NO: 9915 - DNA, 366 bp, Homo sapiens
ggcacgagcccgcacgccccaccgtctggttgtgtgcgctcctgcccgggctctggcctcagcttccccgaccataaaacgaccacgcaaatccagagcaacttcatcattgtcatacatccaggttcaacaactttaaggattggtcgagccacagacactcttcctgccagcattcctcacgtcattgcccgaagacacaaacaacaagggcagcccctatacaaggacagttggctcctaagggagggactaaataaaccagaaagtaatgaacaaagacaaaatggccttaaaatggtggttcaagcaatatggtctaaaaagatgtccaatggtacaagacgcattcctgtgtcccttgaa

SEQ ID NO: 9916 - DNA, 1130 bp, Homo sapiens
atcggctctaccgcctgaagctggaggagctgaccaaacttcagaacaattgcaccagctccatcacgcggcagaagaagcggctccaggagctggccctcgccctgaagaaatgcaaaccctccctcccagcagaggccgagggggccgcacaggagctggagaaccagatgaaagagcgccaaggcctcttctttgacatggaggcctatttgcctaagaagaatggattgtacctgagcctggttctggggaacgtcaacgtcacgctcctgagcaagcaggctaagtttgcctacaaggacgagtatgagaagttcaagctctacctcaccatcatcctcatcctcatctccttcacttgccgcttcctgctcaactccagggtgacagatgctgccttcaacttcctgctggtctggtactactgcaccctgaccatccgggagagcatcctcatcaacaacggctcccggatcaaaggctggtgggtgttccatcactacgtgtccaccttcctgtcgggagtcatgctgacgtggcccgacggtctcatgtaccagaaattccggaaccaattcctctccttttccatgtaccagagcttcgtgcagtttctccagtactactaccagagcggctgcctctaccgcctgcgggcgctgggcgagcggcacaccatggacctcactgtggagggcttccagtcctggatgtggcggggcctcaccttcctgctgccttttcttttctttggacacttctggcagctttttaacgcgctgacgttgttcaacctggcccaggaccctcagtgcaaggagtggcaggtgcttatgtgcggctttcccttcctcctccttttcctcggcaatttcttcaccaccctgagggttgtgcaccacaagtttcacagtcagcggcacgggagcaagaaggattgaggctgggccttcccctgccggcccagaggggcttctgtcctgtgtgttgtgggaggggatgggaggcgcccctcgagtgtgcgtgtatcagggggtctcttctattctcccttgggttttatgggcgctgtgggccctgaaggaagacctgggcccagtgccctcaataaagagaggcccagaggt

SEQ ID NO: 9917 - DNA, 698 bp, Homo sapiens
gagttcttctgaccacagagagaattgctagatgaagtaaaagagaaactcatacctaaacacaaacctgtctaagaaaatcaaaattatttattgtgaaggaataagaattttaagcacatctctttgaccaaagggggaaagtgaaggcattttcaaacaataacatttaagcagtcccagaaagaattatatactcctcaattttaatcatccacttctactcaagtcctcccagtaaaaatcacaaccttccacccaaaagatctacaaaagctgatggcaggagtcaataaaattaaatatgaatgcatgctgttaatggcttagtcatctttactaaaatcttgctactcagatgagggtttcccccacatgctatccattttcactttccaattccaggaattgttccaaaaaccctacagagccatggtaggccttcagttgtttactaatgcttttcattctttcatgccaaagaatatgtatgggtactaggattaagaaaaaaagactgccggagtaatgccccttttagcctaatgtcctaattatgatgtctcattagagagtttgacaacattgttcattacctgcttgaataaatcaaacagtacattcaatggcaatactcctgtattatacaattcatcagttcttcatacgtttttcagataatgagctaatttctggcc

SEQ ID NO: 9918 - DNA, 243 bp, Homo sapiens
aagctatagtttgttttcaaaaaggagaaacaaaatagttttttactggattaaaaatgcttattttagaatcctcccctttttgaggctttttggtaataattgtttttttccagcccaggtgtggttttgtttgtttttttctatgtttgtggggttttttttcatctgtacaagaaattttggttatgcactactactttttgtattctagacagttttcaaaagttggcagattttttt

SEQ ID NO: 9919 - DNA, 661 bp, Homo sapiens
tttttttgagagtctgcaggtttccttttaatcaaggctctactgaaggtgttttgtggggctaaaagcccccaaaacatgaaatggacatgtaacaccacctggatcccccatagcaggccagaccactctggcgagcactgctggtctgcccaaatctgggtaatcagactgggtattcattggctgcatttcaaagcacagcactgctttcagccaggatgaagtgggagtgaacccagctgctagcagagctgccactccaggctgagagccaagtaccagccactgccagtgaagactggcccctttactgaagggagttgttcagagtccagccaccggccctggggagggagagaagtcagggtattctgctcggggatggtcagggctccgcagctccatcgccagcatcctttggaaagccgcctctggcggagacagccggctgggggggcgctccaggtttggctgagacgttcccgccaccagccggctccgggcgccggcggcccagctgccgtaacatctcctcgcaggctgcgatggtgtccaggagctgccgctgccgctgctccaccgcgtccagcagctgctgggcgcgctcctcccggggcggctgtgggggtgcctcccgccgagccccagccccgccttc

SEQ ID NO: 9920 - DNA, 400 bp, Homo sapiens
aagtattttggcccttcaatttggaggagggcaaaagttggaagtaagaagttttattttaagtactttcagtgctcaaaaaaatgcaatcactgtgttgtatataatagttcataggttgatcactcataataattgactctaaggcttttattaagaaaacagcagaaagattaaatcttgaatcaagtctggggggaaatgggccactgcaggatggagttttagagtagtaatgaaattctacctaggaatgcaaaattgggtatatgaattacatagcatgttgttgggattttttttaatgtgcagaagatcaaagctacttggaaggagtgcctataatttgccagtagccacagattaagattatatcttatatatcagcagattagcttta

SEQ ID NO: 9921 - DNA, 723 bp, Homo sapiens
atttagggggaccttgatagagaactttataaacttctttctctttaataaagacttgtcttacaccgtgctgccattaaaggcagctgttctagagtttcagtcacctaagtacacccacaaaacaatatgaatatggagatcttcctttacccctcaactttaatttgcccagttatacctcagtgttgtagcagtactgtgatacctggcacagtgctttgatcttacgatgccctctgtactgacctgaaggagacctaagagtcctttccctttttgagtttgaatcatagccttgatgtggtctcttgttttatgtccttgttcctaatgtaaaagtgcttaactgcttcttggttgtattgggtagcattgggataagattttaactgggtattcttgaattgcttttacaataaaccaattttataatctttaaatttatcaactttttacatttgtgttattttcagtcagggcttcttagatctacttatggttgatggagcacattgatttggagtttcagatcttccaaagcactatttgttgtaataacttttctaaatatagtgcctttaaaggaaaaatgaacacagggaagtgactttgctacaaataatgttgctgtgttaagtattcatattaaatacatgccttctatatggaacatggcagaaagactgaaaaataacagtaattaattgtgtaattcagaat

SEQ ID NO: 9922 - DNA, 3820 bp, Homo sapiens
ccggccctggccccggtgccccgcaactcctgtatcacctgcccccagtgtcaccgcagcctcatcctggatgaccgggggctccgcggcttccccaagaatcgcgtactggaaggggtaattgaccgctaccagcagagcaaagccgcggccctcaagtgccagctctgcgagaaggcgcccaaggaagccaccgtcatgtgcgaacagtgcgatgtcttctactgcgatccgtgccgcctgcgctgccacccgccccgggggcccctagccaagcaccgcctggtgcccccggcccagggtcgtgtgagccggaggctgagcccacgcaaggtctccacctgcacagaccacgagctggagaaccacagcatgtactgcgtgcaatgcaagatgcccgtgtgctaccagtgcttggaggagggcaaacactccagccacgaagtcaaggctctgggggccatgtggaaactacataagagccagctctcccaggcgctgaacggactgtcagacagggccaaagaagccaaggagtttctggtacagctgcgcaacatggtccagcagatccaggagaacagtgtggagtttgaagcctgtctggtggcccaatgtgatgccctcatcgatgccctcaacagaagaaaagcccagctgctggcccgcgtcaacaaggagcatgagcacaagctgaaggtggttcgagatcagatctctcactgcacagtgaaattgcgccagaccacaggtctcatggagtactgcttggaggtgattaaggaaaatgatcctagtggttttttgcagatttctgacgccctcataagaagagtgcacctgactgaggatcagtggggtaaaggcacactcactccaaggatgaccacggactttgacttgagtctggacaacagccctctgctgcaatccatccaccagctggatttcgtgcaagtgaaagcttcctctccagtcccagcaacccctatcctacagctggaggaatgttgtacccacaacaacagcgctacgttgtcctggaaacagccacctctgtccacggtgcccgccgatggatacattctggagctggatgatggcaacggtggtcaattccgggaggtgtatgtggggaaggagacaatgtgcactgtggatggtcttcacttcaacagcacatacaacgctcgggtcaaggccttcaacaaaacaggagtcagcccgtacagcaagaccctggtcctccaaacgtctgaggtggcctggtttgctttcgaccctggctcggcgcactcggacatcatcctctccaatgacaacctgacagtgacctgtagtagctatgatgaccgggtggtgctagggaagactggcttctccaagggcatccactactgggagctcacggtagatcgctatgacaaccaccctgatcctgcctttggtgtggctcgcatggacgtgatgaaggatgtgatgttaggaaaagacgacaaagcttgggcaatgtatgtggacaataaccggagctggttcatgcacaacaactcgcacaccaacagaactgagggagggatcacaaaaggggccacaattggggtcctcctcgacttcaatagaaaaaacttgacatttttttatcaacgatgaacaacaaggtcccatagcatttgataacgtggagggcctcttcttccctgcggtcagcctgaacaggaacgtgcaggtcacgctgcacaccgggctcccagtccccgacttctactccagcagagcatcaatagcctaaggatgtgccgtggaggcgccagctgcctgttcttacctccgcctgcgagagccacagcaaggagctcagccagccgtggtggggtgcagagttggcaggagtgggagaaggaggagagaaaagctggtcctctgcagtctttacacccacagctctgcccttttccctttcaacctctcctccgctgtcatgcctgcttccgcttccatgtccaacaattctaaccaacaaaggacctagacagcccaccaagtcacttggttcccactcccagattttgcttttatttaacttaattttttatgtaggtgagttatattttctttcttttctgatcaggttattggtgacttactggactggcaccgccaggagaaaattctcctgctaactttttttcttaagctttctgtcaaacaatgaggttgtagggggaggtagggaagaatgagctgaatttgtagcatacagcttacctgctagaatgttcttaccctcttacctctcctgtagcgttagctctggcagagctaagctttgggagaatgaatctatcactgagaagttttactactcattgaagcacaaaaatatccgctacacaggttcacatcagggtaggatcgttaggatggctctataattaggataggccagaaccctggccactgtataaaattggaaagtctctaagacacaggcaaaccaggggacttaatgatttggttcgtttatttaataaaagcttttaattgagaacctactattgaccaggcactgttcaagacactagaacattatgttctagacactgtggggacacagtgggtgaacagacaggcatggtctctgcccttcggagcttatattccagtaggagaaaaagcaaaaataaaataattataaatggtcatatgtactagaaaggaaatgggcaagggtcaaagagactcatgggcaagatctttcaggcttcctagaatgatgctaaaaatccacacattctggccatagcaccagaaatgtaccaactcaatgccttttcagctgcactatttaattatggtacctgctgccactcatcacagagcccttcttggtagaaatgatgtcagcattcttatttgctgatgctgctatgataccacgccttaaaaattgacagttgaaaaaaaaaagagtgaccagagggcaaaggacccattctcagtaatgggagatcttgagttgcagtccacagcattcacattctcaggataaacatgcttgtctccatatatactatctgtgcctgttatgaatgaaaaatccatccactctgctgccattcacagcctaatcttctggagtagtccaaacaatgtttggaaaaacatgggactgtatgtcattactatgactgatagcagaataataatgcatcttacttctatatagagatagacttacataggttacccttgaaattcattagtttgtcataaagttttaggaaaggtaggacccggaaagaagttctaattagttgtctaaatatttttcagtgagccaagaaattcaccatgaaaaaacaagaataacaaatagaagggaagagataggatgggaaagctaacaaattaaagttttggcaaaaaggaatatatgtaaatagctaattatttacttttgtgcttactttatttagattatttctatcagttacaatctttttctagttaagtgtacctaatttatggaatgggtgctatcctgtttatgtgtgtcttggtttttcttggctacagaaaaactgttgcagggcaacactagtttgatatttgatttactctccaatgagactcaatggctgggccgtggtagactcatagttcctcttgttctttattaaattcatcctgctaattagatttctagtgacttgtaacatgtagtttacactgaattgcaattacagatgcatacaactactatactagaaaaaattgtcatttctgatgtgccaataaatgatttttatgagagaat

SEQ ID NO: 9923 - DNA, 422 bp, Homo sapiens
tttttctttaaatttggatgtctctacaccactcctgatttgtaggactaaatagatctatttattccaatgcaaattgtgtaacatttatttcttccttgatttttaaaaatactttagtattcttaactatgtatgtgccttctcttacactgagttcttttttgctcctttcagctgctcacacaatcctgtctgttggagtcatagctgctaattccatattatttctctacacaccttgaacatttagtgtattactggtacccttctgtgttctaggaaacaaatgaattgcaaactggacttgtaacaggatcatacatagagcaacaaattagctactggctttgtaagataggtaagttaggaatttcacagtcatgtctccaaattttcatgggcagagtttaaaaaacaat

SEQ ID NO: 9924 - DNA, 390 bp, Homo sapiens
aaagaagactttttcctaaaagctctcctgatcctagcttttagaatagaaattgacgtcatttttagcagattatatgaccattcacatcctttaaactttgaggctgatttaaaatatcccacttcctgtttaggagggggaggggctcatattgcaaaaaaattaaaaaattctgctttttaaagagtgatctacagtaaagcctgattaactggaatctagctaactggaaacctcagctgcatgctcttgctcccttccatttttagcaaaaaagaaacaaagaaaaaaaatcacatcagaaatgtaaaatggtttttcttccagggtagtttgcattgtctcacttagtctccatcctcctgcaacttccacatctatgaggac

SEQ ID NO: 9925 - DNA, 343 bp, Homo sapiens
gaggaggcggaggagctgctcttggaggggaagaaggcgctgcaactcgcccgcgagccgcgcctgggcctggacttaggatggaacccttccggagaagtctgtacgcagggcctcatagacgtcccacccgagccgacccgagacatcctcgctttaaagagccttccccggggcttggcccttggcccctcactcgccaaggaacagcgcttgggggtctggtgtgtcggggaccccctgcagcccggcctgctgtgggggccgctggaagaggagtctgcctccaaggagaagggcgagggagtaaagccacggcaggaggagaacctgtcattaggcc

SEQ ID NO: 9926 - DNA, 217 bp, Homo sapiens
tgaaaataagttgtggtgtttttgtgaacctggggtcctaaacacagcttccaaagtctttttatgttagggggtacataaatgcaattgcagtgtctgtaatgaaatgctaatcccatcgcacacacaaaggatctcctaaatgatgagcaagcataacttctgtcagtttactcaagaaaataggtttttggcaacgattagaaaaaacaattcg

SEQ ID NO: 9927 - DNA, 500 bp, Homo sapiens
tttttttttttttttagtgttcttttttctttatttaagtttacgaaatacatgcttatagaaaattaaaacattatagaaatatgtaaagccacccatgaaagttcttccataattctgcttcctaacaaagccactgttagtaatgtggtgttacttatattttagagcatcaagttgtccacaaaaatgcttgcacaacttttttttttacccaagtttagaaatcttgccctaataatccagacattcctcactctcttaacgaatacttagaaacaaattgcataaaggtaccatctattaaaccagtcccttactgacagggcatttgggctagttttaagtattaaagaacaaaggtgcaatgactttgccttgtgtacacttgtcagatcattcccattaggcagtttcctaggaatgaacttagtaggccaaaaggttcaaagtttcaataaatcccagaaaactacattcctaaaggctgtgacaattat

SEQ ID NO: 9928 - DNA, 427 bp, Homo sapiens
  misc_feature (1)...(427): n = a,t,c or g
attgccgcagcaaaggggagcagattgcgctgaacgtggacggggcctgcgccgacgagaccaccagtaacacatcccgttatgccgctgcactctacaggcaaggtgagctccacctgacacctttacatggcatcctgcagctgcggcccagcttctcctacctggataaggctgacgccaagcaccgggagagggaggcggccaacgaggcaggggactcttcacaggatgaggcggaagacgatgttaagcagatcacggtgcggttctcccggccggagtcagagcaggcccgccagcgccgtgtgcagtcctatgagttcctgcagaagaagcacgcagaggagccctgggtccacctgcattactatggcctgagggacaagtccgctctgancatgaacgtccagnacctgctgtgccg

SEQ ID NO: 9929 - DNA, 451 bp, Homo sapiens
tttttttttttttttaagtctagtgatctggcagaaagaattcaatagggataatatgttatagggtcaaaagtatctataaatattatgaagttgtatcagatagacaaatgatgtgttattatccctattttagagtattctgtaaaaaaaaggttaaacatctttcatttcaaattgtaatgtaactgtaacgtgaacaccactaatggccagaaattatctcaggcatcatgagactccctctctgtcacctctgagattagcactaagctttatccagcttgctggtggggacatttttacagtccacttagacaacttagcttcactaataattttaggatcttttattaggaaaataaaaatctaggcctcatatttctccaaggcactattttttgggggggtcttagggctgtttttcaggtcgggtggatactgcccctgg

SEQ ID NO: 9930 - DNA, 307 bp, Homo sapiens
agtaataactgaaataaaatcaggaatgtgcaaaattgtttcttcatacctcactttctgaagacacttctttgcattctgctgcctggcatttacacagcagactcaggacaaagggacaaatggagtgagtgaggtgggcaggagctttagaagagatgaagcaaagagagttagttttttattcaggaagatgtagagactcttaaaggagaggaaatttccgtaacaaacacctctggtttaatggaagccaaatgatttatttgactactggtcaatcatttttaaaaaaaaaagagaaaga

SEQ ID NO: 9931 - DNA, 1221 bp, Homo sapiens
agacaggaaactggaattttttaaagtgccaaaacatatagaaatgtttgaatgcatgggtcttatctaacttatctcttctggacccatgtttaaatacagttttatttcatgaagagaaatgaaaacccctacactgatatctgttttctatgggactgattctgaaattcttaactattaagaatattttaatagcagcatgacatttagcagtaatccattaagggcagtacctctaacaaggacgccttccagcttcagctatgttacttacgtttgatgctacttaaagtaatgaatgacgttttaaggaatccctaaccctactattcagaaaaggtgtttgtttaaagagccttctcttgtgtgttacggcatggaactttggtctgtaggtgttaaatggaacctctccatgtgtatatagtatttccttgtataaagcactttactacctaccacttgtgttgtgaacgtttggtgactgctgttgaaagaaggaaaagggtgtgtgagaaagcctactgaagcagcagcactgccactacatgtggacaaaagtgaacatataaaagaagttgtgctatttaactctgaatacttggagaaactaggtgaagatgcaaccagaaaggagaatatgtatgcgtgaagtctcagctttgagctggaggctagattccaagatgacagccatgatgaaactttttaaaaaactaaaccagaagagactttaaaataagagaaagaaatcataaatgtagacatatgcttggctaaaggggaaatggactttaaattttaaagagctcatttgcaatgcacttgtatacacttcaaaaattattgtagacacagaatttgttatatttttgtgcttagtatttaaacctgaacattgaaacagttttcctccttgtctttcttaacagtaatagtcattatatttacctgttttttaacacaatgtatgtgatagtcaaaaaatcacagtttttcattattattcatcttctgtacccacgcataaccactatacatagtttcttttgtacttgaatatacaaaacatgaacacagtgccatatgaataatttcacatacagaacctttttttctctgaagtcctgtggacttgcaaatatatatatatattgctttgttaatttgtttttatatttcatatatgtaataaaggaatatgatctgaaaaaaaaa

SEQ ID NO: 9932 - DNA, 404 bp, Homo sapiens
actaacaaggcactaaacatgattttctcatacaaaatcgagagccataaagtggcttaccacagtcctatttcaataaagatgaatactcgacatctggcaagtagtgtgtgcctgacagtgtccccactgtgctatgctcatttaaccctcagaaacaatctcatgttacagattttacagaagttgttgggacagagaaggtaagtaaacccccccaaggtcacatgactgctaagggtggggccatagtttgatcccaggtagtctgaattccccaattgcttaagcatgattatcagaaagtatagcagtctgttttcacactgatataaagaaacacctgaggttgggtaatttttacaggaaagaggcttaattgactcagtttcacatggctgggg

SEQ ID NO: 9933 - DNA, 821 bp, Homo sapiens
  misc_feature (1)...(821): n = a,t,c or g
gtctcgatctcctgacctcgtgattgaaattctgaccctgaagagcgtacttctgtaagtagaaagacgtttgctcttaacatatagtctgcacaattcaatatgaacgttttatttccaacaagtatgtagttcactgttccatgacttgtgcataacaatatgaattatctactatgaaaatatagtttattagaatatttttaagatggtacagctccatcttaccaatgatataaccaatgtctaataatcacaagttaaaaaaaaagacaataaatagaaccaatgttaatacattactggccttcaacattttcaaactaacagtttctcttaagtttagtctatggcataagtcagtacacccattaagtctagggactactatatcttctatatcccctttctcatataaacatggaaataacacagaagggtaaggtttgggattccatttgaacagcagaagaccactaggtacgtggctcatgcctgtaatcccaacaccctgggaggcaaagacagggatcgcttgagccccaggagtttgactgagaccagcctgaacaacaaagggagacccccgtctcttcgaaaatgnnnnnnnnnnnnnnnnnnnnnnnnnnnnnnnnnnnnnnnnnnnnnnnnnnnnnnnnnnnnnnnnnnnnnnnnnnnnnnnnnnnnnnnnnnnnnnnnnnnnnnnnnnnnnnnnnnnnnnnnnnnnnnnnnnnnnnnntgtctgagacagaaaaaaaacacaaaatcctgtctcagaaacaaaaaaacaagaccaaaaaagctagactgggcacganttg

SEQ ID NO: 9934 - DNA, 115 bp, Homo sapiens
  misc_feature (1)...(115): n = a,t,c or g
ccaccctccccgaggatgcgtgtggtgtgggactatccccatgagctgaccactacttgatttttctttgggtgggccgtaacagcctttgatttgtggggctctgccacngttt

SEQ ID NO: 9935 - DNA, 772 bp, Homo sapiens
ctcatctgcacctgggcccggccgggcaaggcgttcacagacgaggagaccgaggcccagacaggggaaggaagttggcccaggtcacccagcaagtcagtggtagagggcatctcctcccaaccaggcaactccccgagtggcacagtggtgtgaagccatggatatcgggcccccccaaccccatgcccccagcctcctagccataaccctccctgctgacctcacagatcaacgtattaacaagactaaccatgatggatggactgctccagtccccccacctgcacaaaatttgggggccccccagactgggcccggacacgggcgatgtaatagcccttgtggcctcagccttgtcccccacccactgccaagtacaatgacctcttcctctgaaacatcagtgttaccctcatccctgtccccagcatgtgactggtcactcctggggagacactccccgcccctgccacaagagccccaggtctgcagtgtgcccctcagttgagtgggcagggccgggggtggtccagccctcgcccggcccccaccccagctgcccttgctattgtctgtgcttttgaagagtgttaaattatggaagcccctcaggttcctccctgtcccgcaggacctcttatttatactaaagttccctgtttttttcaggggggtttgttccctttgggaggagatgatgtaggaggactgtgtgtgtaatttgttgggtttaagggagttccgtttttccccagaggaggagttgaag

SEQ ID NO: 9936 - DNA, 630 bp, Homo sapiens
acactctgtggatcacagagtgtaacaatggacctaaatggactatagtatattggatgttaaatccatatatgatgtatattttgtaaaattgggaaaatcactaccttgtaaaatagtttatttgtatcatcaatattatttctgttacttgaatagtagatattcatcatcatgcttttgcacttgaatttgcaactgaatggattttaaaaaataattctttaatgggatcatgagcatgaaatgggatcctgcatcacttgttttaactatttattttgccatgtttacattttgtatcttgtaaaaataaatccaactttgtgtctaaaaagttaaagattcatagctaggaaatgaaattcttgtaatttttttctaaaggaactgtaaagttttcacttggttcattttgtttcacaatttgactagatggactttttggtaaatactttagtggcatttcactgtcaaatatgaagttcaaggcaaaatagtattttctattactgtgcaggggaaagggatggatcgatacatgcaaatttaatgtagtaactcacttttccatatattttgaatgtatatttctatttatgataccaatttataaaaaataattacaca

SEQ ID NO: 9937 - DNA, 1585 bp, Homo sapiens
acataatttctggagccctgtaccaacgtgtggccacatattctgtcaggaaccctgtgtgatcatggtctggatctgcaacacgggccaggccaaagtcacagatcttgagatcacaggtggtgttgagcagcaggcaggcaggcaatcggtccgagtggctgtcggctcttcagctctccgctcggcgtcttccttcctctcccggtcagcgtcggcggctgcaccggcggcgggcagtcctgcgggaggggcgacaagagctgaggcgcggccgccgagcgtcgagctcagcgcggcggaggcggcggcggcccggcagccaacatggcggcggcggcggcggcgggcgcgggcccggagatggtccgcgggcaggtgttcgacgtggggccgcgctacaccaacctctcgtacatcggcgagggcgcctacggcatggtgtgctctgcttatgataatgtcaacaaagttcgagtagctatcaagaaaatcagcccctttgagcaccagacctactgccagagaaccctgagggagataaaaatcttactgcgcttcagacatgagaacatcattggaatcaatgacattattcgagcaccaaccatcgagcaaatgaaagatgtatatatagtacaggacctcatggaaacagatctttacaagctcttgaagacacaacacctcagcaatgaccatatctgctattttctctaccagatcctcagagggttaaaatatatccattcagctaacgttctgcaccgtgacctcaagccttccaacctgctgctcaacaccacctgtgatctcaagatctgtgactttggcctggcccgtgttgcagatccagaccatgatcacacagggttcctgacagaatatgtggccacacgttggtacagggctccagaaattatgttgaattccaagggctacaccaagtccattgatatttggtctgtaggctgcattctggcagaaatgctttccaacaggcccatctttccagggaagcattatcttgaccagctgaaccacattttgggtattcttgatccccatcacaagaagacctgaattgtataataaatttaaaagctaggaactatttgctttctcttccacacaaaaataaggtgccatggaacaggctgttcccaaatgctgactccaaagctctggacttattggacaaaatgttgacattcaacccacacaagaggattgaagtagaacaggctctggcccacccatatctggagcagtattacgacccgagtgacgagcccatcgccgaagcaccattcaagttcgacatggaattggatgacttgcctaaggaaaagctcaaagaactaatttttgaagagactgctagattccagccaggatacagatcttaaatttgtcaggtacctggagtttaatacagtgagctctagcaagggaggcgctgccttttgtttctagaatattatgttcctcaaggtccattattttgtattcttttccaagctccttattggaaggtatttttttaaatttagaattaaaaattatttagaaagttaaaaaaaaa

SEQ ID NO: 9938 - DNA, 537 bp, Homo sapiens
ggcttctcattctcttcctctgttggctaacatgcctgggaatgttgagcactaagttgagttgctttccattttcatcccattttttcttaaccatcattttgtgtttttggttttttctgtttagccttaaagaagaataatatcactaaatttccaaatgttcactcgagggtaaggatttcttctagcacaccggtggtgaaggatacacagagctggcaagcatcactttttacttagcttcctcctctctctgtatgcagatcaatggttttcaatctatggctgagggtaatactggtgagaatctgaccagggagtttttgtacctcacattccaatgatgcagggattgagcctctctgttggactctttctcggcctgcttttaagttctaagtgtgatggcttgggcaagggtatttgctgatgattgtatttgctttgagtgttggggctgtccttcccttacccctgtcttgggcctttgagttactcagttaaacccattttgatcctgaagcgactgaaagc

SEQ ID NO: 9939 - DNA, 456 bp, Homo sapiens
atcaatgtaaaaatggagatattacatgtgtgtatatataatacataaaattaataatataggaataatgaataatatatattatatgtaaaatatgtattttttataccaagtttttaaaatctgaggaatatttcacacttacagcacatgttaatttggactaatcacacatttcaagtgctcagtagacatagtggatagtgaagacctaaagtaccttttttaactctgtgcttacattgtagacagagtcttatttcagaggtgggtactatgaaatcacagactgttggcagatgtttgagtacaatgactttaatttcactcttgactaatgctaatgtcattttcattcccaggaagcctgtcttgctacagtttggtggagggtcaagaaagatgattcagaagtatgtcttttaagagtcttggtgacacgcacagagcccagtg

SEQ ID NO: 9940 - DNA, 311 bp, Homo sapiens
gacattttagaaaacaccaaagtgatttaaaatatatgtggggaaaaaaacttgctgcactctagtaacaatgttttaatcatgttgtttgttaaatatttaaaagttattgttcaatttttgctagactatcttaaatcatgatagtgttgggaagggggtatcaaaatataaaattgttagtttgtgtatataaacaatgcacattaaaacaattgaattgcttccagcatacaacaaactaccttaaaattatgttcaaaatctattaaatatatttccatggctaatgtcgagtatatgttttcatc

SEQ ID NO: 9941 - DNA, 743 bp, Homo sapiens
ttttttttttgaattaagtatttcatgtttttatttcaaaagaaaaaaggataccaagaagcagaagaatgaagcagttaaaacccagcaaagctgcaaagtaggaaagaaagctgagggagagattgatccgatttcaacgatgtggcccacttaatgcaaacacaggggtctgatgctgcaaacctaagtcacatgagtccagtgacttcagcaggtccactgatccaccacagtgacagggccaggccccttcctgctgaatcctaactttacacattctagacacatgtcatgcacatacaggttacactttatggttacatgaaattgcatgcaattcacacagagaatcattttgaaggcactgtattttgcagcaggagctgctactttctggcaagtccttcctaggttggctcacaagtggtcctcctttttatttattcctatatgaaactttggtccaaaaatcagggtgcgggtctgatcctaccctcccagcttgttttagtttcatgtctcaccttctcttccacgttcccttcttaaacggtagatgtcaagcttagaagatgtttcctgacaatgagatcctgtttaattcagattttcaaacaacttgagtcaagcaagcaggagcttatagtatgttgatttaaaacaagttgttaccagtttcccttacccttgaagttcggcaaggcccattaattcacaaattccatgataagatacatgag

SEQ ID NO: 9942 - DNA, 2291 bp, Homo sapiens
cggtaactaccccggctgcgcacagctcggcgctccttcccgctccctcacacaccggcctcagcccgcaccggcagtagaagatggtgaaagaaacaacttactacgatgttttgggggtcaaacccaatgctactcaggaagaattgaaaaaggcttataggaaactggccttgaagtaccatcctgataagaacccaaatgaaggagagaagtttaaacagatttctcaagcttacgaagttctctctgatgcaaagaaaagggaattatatgacaaaggaggagaacaggcaattaaagagggtggagcaggtggcggttttggctcccccatggacatctttgatatgttttttggaggaggaggaaggatgcagagagaaaggagaggtaaaaatgttgtacatcagctctcaggtaaccctagaagacttatataatggtgcaacaagaaaactgggctctgccaaaagaatgtgatttgtgacaaatgtgaaggtagaggaggtaagaaaggagcagtagagtgctgtcccaattgccgaggtactggaatgcaaataagaattcatcagataggacctggaatggttcagcaaattcagtctgtgtgcatggagtgccagggccatggggagcggatcagtcctaaagatagatgtaaaagctgcaacggaaggaagatagttcgagagaagaaaattttagaagttcatattgacaaaggcatgaaagatggccagaagataacattccatggtgaaggagaccaagaaccaggactggagccaggcgatattatcattgtgttagatcagaaggaccatgctgtttttactcgacgaggagaagaccttttcatgtgtatggacatacagctcgttgaagcactgtgtggcttccagaagccaatatctactcttgacaaccgaaccatcgtcatcacctctcatccaggtcagattgtcaagcatggagatatcaagtgtgtactaaatgaaggcatgcccaatttatcgtagaccatatgaaaagggtcgcctaatcatcgaatttaaggtaaactttcctgagaatggctttctctctcctgataaactgtctttgctggaaaaactcctacccgagaggaaggaagtggaagagactgatgagatggaccaagtagaactggtggactttgatccaaatcaggaaagacggcgccactacaatggagaagcatatgaggatgatgaacatcatcccagaggtggtgttcagtgtcagacctcttaatggccagtgaataacactcactgctggcatttaatgtgcagtagtgaatgagtgaaggactgtaatcataatatgctcactacttgctcttgtttttgttttaataaactatagtagtgttataaaaagttaaatgaagaataaacgcaaatataaaagctctgattttgccctgtatgtatgatgacttcagtgtgcaagatgaagtttaatacctgtaaaaacctacaaagaagttcccctagcatttctaggccaaaccttgtaattgacttcagctatgtacgtggacaagcttagactgaaatgctaggtatatgtattggcttcagtgtatgacccttcattgttaagctatgaaagtaaaactctgtatttaactggcaatgaggaaaaaaaaattttgtagagaagtgttggtctgtatagttctttatattaagtgggattcattgtaatgcctctgcatttattctgttgcctcagctgttacttgaagatggcgtaatatataatttatcctgtggtatcagtgataaaaatgatacctttctgtaggaggggtttatcataatatgctgcttcttgaaggcttgcacttccagaattgtgtttccttctgctgtgccattcatatatatatacatatatatatataatcttgaccagtcctggtcatttgctcccctccttgtctgtggaccatgataagcccaagtagtgacttcagagctgggtaacagaaattaaagtgaaaagacctttacgtggagaatttgcatgcgtaatataggaaggtgttctttaggtatgttacaggattactttaaaccatttgactttcgctccaaagttatgttggtagtatagcaaattatgatgaatagctttaattgtatgtttaaaagtctcatatgttcacatgcttaaatctgggtatcagaatttaagcaattcttgaaatgtattgtctccttaatatactaattacaaagcaaaaaaagtcgacg

SEQ ID NO: 9943 - DNA, 664 bp, Homo sapiens
ttttttttttttttttcattttcatatcaattggcagaaattatctttattagaaaaatgaaattttcctgtatttacatttttacaccatatgaccgggcacttctgttgcctcaggagttatatacatatcagtttgcacacgaatttcaatccccattccttaaaacagttgataacacattgaacaaaattaaaagacatactacaagaagacaaccatagtatatacttcctctatcatagaaaggtgttaagcaaacatataattttgtagctatgcttggaaatatttaatacacttattagcacttcctcatgcagtggattaaaacatggacaggatttaaactgctgcagttgatcagtgaacattaattcccaaatgaagaccattgcttagagcagacagcttgctttcagctccaccatacaagacatcaagtcagttctgatgtgggttttggattctgtttgaatgtagctgtgaatagaaaccctctgcatatggagttcaatcctagccttgttgggttaaaaatggactcagacataaacctggatagctgcttaattcaataactttcttgcaggcaatgaccagcttgtgtattatgcaacaagtcatattattaatacgtgagtgaaaaatgaatcatttatc

SEQ ID NO: 9944 - DNA, 1605 bp, Homo sapiens
atattagttcccaggcggccgtcgccgttccagcagcggcacgcagcgcagcgggcggacatgttgtgaggcggcggcgcgggtgtctgaaggatggtttggccgaggcggcggcaacggctgctggcggcggcggcacggcacgggcctcgggctctatagagccagagcccgctgggtacccgcccggtaccgcggcgaggccagtgcccctggatcttgcctctgctccgacgccgttggggaccagttaggcgacagccccgcccctctgaggagacacgaaggtggttccccagccgctcaaatttccggaccaccgcgctttcccctcctcagcctgggctgtgctctctctagaatcctcgggcccccactttcttcccaaactcatcctaaatctctcacacacgcgagtgttcccagccctcaagccagctgctcctccgttcattttctgcaccctcttcgcaaagcaccccccgggatcactctccgagggcgactttttgagaaatctcggtggagttagtggaccagagctggggaagtttaaaaagccggggcccgagaaaacagaaggtacaatgggtttcccgtttggcaacgcagaaggttctaacaatccccgaagtgctatcaataaatggtcaaagagactcttccaatgtccggtggccaagcatgctccaaactggtggtaaatgctgaactgaattcattcaccttatatcttctgaagccaatgagatttgtaacaaatcggaaaagaagaccatctcaccagagcatgtcatacaagcactagaaagtttgggatttggctcttacatcagtgaagtaaaagaagtcttgcaagagtgtaaaacagtagcattaaaaagaagaaaggccagttctcgtttggaaaaccttggcattcctgaagaagagttattgagacagcaacaagaattatttggcaaaagctagacagcaacaagcagaattggcccaacaggaatggcttcaaatgcagcaagctgcccaacaagccccagcttgctgctgcctcagccagtgcatctaatcaggcgggatcttctcaggatgaagaagatgatgatgatatctgaaattcaccagctgagtttctatttcttctataaatgtttttccctgcacaacaaaaacagtgaaagaaatgcttatctgtaattttgtatgcatcttggtggacttgtcattggtattctagggatgtctgctattaagtttcatctattgtgtgctatacatgtaaaaactgtctctttgaactattgaaaatttaaggttcagtataatatcaattttgaatttttaatggtgtttatgaaattttagatagcagcgagtccttcgtttgatcaataaacagtgttacagataacttcaagtttataaaaatacagtgaaatttctacaaagctctaaatctgcatttgcatttcctctgcccttttaactaaactaaaacttgtgaattttaaattattaaggggggggggtgctgtgtgaatcagtagacattggattgggttggtgaaagagttccagttctgtagtatctggaatttgtctttt

SEQ ID NO: 9945 - DNA, 3296 bp, Homo sapiens
ggggggggtttcggtcccgccgccgccggccccgctgcgcgctctgctcttcgcagctccccggacccgcagccatggccgacatcaagacgggcatcttcgccaagaacgtccagaagcgactcaaccgcgcgcaggaaaaggtcctccaaaagctggggaaagctgatgagacaaaagacgaacagttcgaagaatatgtccagaacttcaaacggcaagaagcagagggtaccagacttcagcgagaactccgaggatatttagcagcaatcaaaggcatgcaggaggcctccatgaagctcacagagtcgctgcatgaagtctatgagcctgactggtatgggcgggaagatgtgaaaatggttggtgagaaatgtgatgtgctgtgggaagacttccatcaaaaactcgtggatgggtccttgctaacactggatacctacctggggcaatttcctgacataaagaatcgcatcgccaagcgcagcaggaagctagtggactatgacagtgcccgccaccatctggaagctctgcagagctccaagaggaaggatgagagtcgaatctctaaggcagaagaagaatttcagaaagcacagaaagtgtttgaagagtttaacgttgacttacaagaagagttaccatcattatggtcaagacgagttggattttatgttaatactttcaaaaacgtctccagccttgaagccaagtttcataaggaaattgcggtgctttgccacaaactgtatgaagtgatgacaaaactgggtgaccaggcacggccgacaaggccttcaccatccaaggagcgcccagtgattcgggtcctctccgcattgcaaagacaccatcaccgcctgaggagccttcacccctcccgagcccgacagcaagtccaaatcatacattagcacctgcgtctcccgcaccagcacggcctcggtcaccttcacagacaaggaaagggcctcctgtcccacctctacctaaagtcaccccgacaaaggaactgcagcaggagaacatcatcagtttctttgaggacaactttgttccagaaatcagtgtgacaacaccttcccagaatgaagtccctgaggtgaagaaagaggagactttgctggatctggactttgatcctttcaagcccgaggtgacacctgcaggttctgctggagtgacccactcacccatgtctcagacattgccctgggacctatggacgacaagcactgatttggtacagccggcttctggtggttcatttaatggattcacacagccccaggatacttcattattcacaatgcagacagaccagagtatgatctgcaacttggctgaatctgaacaggctccacccacagagccaaaagcagaggagcctctggctgctgtcacacctgccgttggtctggaccttggaatggacactcgggctgaggagccagtggaggaggcagtgatcatacctggagctgatgctgatgcagctgttggaaccttggtgtcagcagctgagggggccccaggagaggaagcagaggcggagaaggccactgtccctgccggggaaggagtaagtttagaggaggccaaaattggaactgaaaccactgagggtgcagagagtgcccaacctgaagcagaggagctcgaagcaacagtgcctcaggagaaggtcattccttcggtggtcatagagcctgcctccaaccatgaagaggaaggagaaaacgaaataactataggtgcagagcccaaggagaccaccgaggacgcggctcctccgggccccaccagcgagacacctgagctggctacggagcagaagcctatccaggaccctcagcccacaccttctgcaccagccatgggggctgctgaccagctagcatctgccaagggaggcctctcaggaattgcctcctggctttctctacaaggtggaaacactgcatgattttgaggcagcaaattctgatgaacttaccttacaaaggggtgatgtggtgctggtggtcccctcagattcagaagctgatcaggatgcaggctggctggtgggagtgaaggaatcagactggcttcagtacagagaccttgccacctacaaaggcctctttccagagaacttcacccgacgcttagattagggcaacaagtactgcaagaaggagctcagttacggggtttttaaaccttcatgaaaacctgaagagttcacttttgttattatgctcttaatgatttacagactgatgccagacaaaccttgggaagatgtatcaatggagcatgtgtgcaaaaaaatgtaagaggaaaaaaagtaaattaaggaaaaaatcctcactcattcccatgttgtcaataacaggtttgtttgtgctttgtccaagctgtggagactcttgtacttgatcccctcccaccaattctaaagtagctttctccagatcagactttaatttctctgcatcaggtgtatcgtattgagtggctgccctgcagaagatgtgatgaattatcctgtagtacaagattatcttattcccctgcccaggtgtgagcacgtgctctcgctccctttcaggtttactatgtttaaaactaaactgctgcaaaagttctcaatgttcttttccaacacatctatatatatatggacacacagtcacgcaagctagttcccatgactcctggatctatgtgtatgcagaaggctacatatacatagttgcttctttcctttccattgtagctctttgcctctcaattgtcattgatacatgcattgctcttattctgtctggcattacaattgcagttttgcctaatggcaaaaaccagccatcccattgccaaaagagtcaacagtatctgtgtttgtactgtgcagttttcaggatgagatgacagatagcacgactacactgaggcaccctcagagaaggcagggcctgatttatctagctgtccagccgctgtggctggaggtaggctagttgggatgggcagctaagcagtcttctcttctgcctttatgagattgggtagaaagatggggcatattcatctacccccaaaagaacactataaaaacagctcctctatatttccacctctttctatttatgcaactcatcttcacagattgttctaaagtaaaatagatggtgtatgctgtatccacaaatcatctgtaacaattatgttttcagtgctgtgtcattccaaataaacctttggtaatcttcaacgattaccctaattcaaaaaaaaaaaaa

SEQ ID NO: 9946 - DNA, 622 bp, Homo sapiens
tttttttttttttttaaggaatgaagaacaaacaatttaatctctatattatcatattatcagtcaattaatacagttggactttcaaactataactgttggtagtaaaataatctgatcacatttcatacagcaattaaaaataacagaaacagagtctcacctatacaatcagagcatctcctgatatgaacaacagttaagcccacatacattttaaagatgctacccagactacaatctatctcaaaagcaaccatggcataatgcattttataaaatgcctacctaaaaatacattgtattttgtaatgtttattaccaatgtgggaggcatttctagcctaaacactataaccaaactattcaacagtaagccggtagtagtcttacaataagaaatttcacatatacttgttattataaatagcattttatgttcattatttcagccatctctcaaactaagacaattttcaacagttaccagaagacactgagctagagtcaacagaccagatatctagttccagctctgcctctacctacctgtgagacacggggaaagttctcttaaccttcgtaaggcctcagatttctcaaccatagaacaaaggggctg

SEQ ID NO: 9947 - DNA, 1213 bp, Homo sapiens
cctcagatttttatttttgcacattcttgtgacatttcccattgtagggaacaggagtttagcaaaatcagcttcttagatgatgtcattctaaatatacatcttaaacaaacaatatcaaaaccaccagtaggaaactgaaaaacactcagtgagtactgttttgtctcagtaacaataaatacaaaaagactggttgtgttccggccccatccaaccacgaagttgatttctcttgtgtgcagagtgactgattttaaaggacatggagcttgtcacaatgtcacaatgtcacagtgtgaagggcacactcactcccgcgtgattcacatttagcaaccaacaatagctcatgagtccatacttgtaaatacttttggcagaatacttcttgaaacttgcagatgataattaagatccaagatatttcccaaagtaaatagaagtgggtcataatattaattacctgttcacatcagcttccatttacaagtcatgagcccagacactgggcatcaaactgagcccacttagactcctcaccaccagtctgtcctgtcatcagacaggaggctgtcaccttgaccaaattctcaccagtcaatcatctatccaaaaaccattacctgttacagctaaaacaaaatcagcacatctctgtctgtattagaaacgacaaaaccttacaaagcagtcacctccataccagtctgacaatcactagttcatttggcagatggacaacaaaggtttaaacttgccattccaaatcaactttctttccctatctgattcatggtgtttttaaaatagtatcttgaaaagctgtgctgcatttctcctccacttatcaatgaagaaaacgtgctctccagaaactacctgcggtagccactcccaggacctggggagacgtgcaccctgggggtctgagggcctccaggtgaatctgagagggaagaccctccagtgctgtcgttgtagcctggctgagggtggtgctagctcagactgttattccccagtgcgccacagtcagtgcgatgatgctgtgttactggaaatacagctgagacagcattatgtgaaagaagctagcctgaactaaaaaaaatgcgctgctagcgaaactctttttatatatgatgctacactttacagacagaaactttaaaacaatactgacgtgtaaaataaaatgaatccaatgaag

SEQ ID NO: 9948 - DNA, 689 bp, Homo sapiens
cctacagaaatatgtgtttatatgtgcaccaggaatcatgtataaaaatgtttatcacagcattattcacaatatacaaagactgaaatcaattccagtgtttatcagcagcatgctgcctgtattatggtacagtcctacaataagcattaacaaaactgaatgtactataaagattaaaacaaattacagctacacaagcaacacggatgaatcttaaaacaatgttgaacaaaagaagccacatacccaaaaatatttactctcattctattagtaaaagttcaaaatcagggaaaacagaataactacttatttagggatctaatcatagatggtaaaactataaagacaagcaaaggaatgagtaccacacatcatgagacaatgatttatctccaaagtgctgggggcagtgaaggagatgtgatctaggaggggttcccaaggggctcctgaggtactgacttgaaaacgttctcttttctaacttggtgttgacacaggtgctcctgctcaccttcatattttttttaagtatacatctgtgtatcatgaacaattcttatctcaaaatttaaaaatgaagtacacattataacagcattacaatcatgaacacatgtgctatgttctctgggagacaaagagaaactatttaccctactttccagaaaagcctcgtgccg

SEQ ID NO: 9949 - DNA, 137 bp, Homo sapiens
  misc_feature (1)...(137): n = a,t,c or g
cttcaccgaagaatggcttaaagggttaaagatgaaaaatatagggtacggaagggatgtcagatctgaatgatagttgatttatactgtgtaactttcaaaagtagctactcaatgtgagcatttccactancccg

SEQ ID NO: 9950 - DNA, 241 bp, Homo sapiens
gtcggggtccgagttgaagagcaaaaccaagtgaaggaaacttcactaagttcagggtgacaagggaggaagtacagagactgcactttaaattccggatgacagacctatcaggactgagtggacctttgagtgacaagatgggggtgttccaaagagaccatggcagcctgcagctaggactttaattgaactattggcatggctcaatccattgacctgttttggttcctgatgaagt

SEQ ID NO: 9951 - DNA, 577 bp, Homo sapiens
acaaagtttctctaaggtttaatttatatttatgttttttgtatattcaccacccaaacacacagtcttctacttagtccggtctgtattaggtttcgtctgtttttgttctgccttggtttgctgtagcactttctgccgtgagcgtaactcacttccttgtaggagtttcctgaggctgccgtaacaatcgccacaaacctggtgacttaaataacaaatatttattttctcgtagctctggaagccggaagtccaaaaccaataacttggcagggctgtgctccctctgggagaatctcggggaagcctccttgctacatgttccgcttctggggacttctggtggtggtttccctggagggccaaggcctcccgggcgggcccgtgcattcgggggaacacctccaaagagctctgagtcacaaagccttgggaaactttattttattctttctaggacattatcagtagtcccgaggagacatcaattacaaaacaagaaaaaggaaggaagagaaaaatacaggtttggcctggtttaatgttgcaatgggaggatccatttccttaccct

SEQ ID NO: 9952 - DNA, 457 bp, Homo sapiens
tttttttttttttttggctgattcctttctttattattttttccgaaaaagggtttttgtagcaaaaacaggccgtgagatcccttgctcctgtcttgcatagctttattgggaaactgggggaggggcatcaccccccagcctttatcagagaagaggaggtgtatcttttccagagatttggaggaggattacctcctgggaaggagttgaagggtgggtgaggaatctgcttcttcagaacagcatggagactcctgggctgctagtctggagatttggagcaaggatcttgacagagggctgtcaaagtgtgatcttgtcttgctctggacaaatgtgtcattgggagggatccgatgggttccaaggtgcacaaaacagacccccagggtcattcctcaggtggttttacacagcctgtggctaaagcaactgctgttttcccagcactttt

SEQ ID NO: 9953 - DNA, 828 bp, Homo sapiens
acacaggacacagcagctttctttggaaatctcccaggtgaggattcacatcccaaaataaaattcagaagccaggtggcctgtgctccccatgggtgacctctggaggcagtggaccaagatgcagcaaggagaggatgcagaacagcttcttgcagaagcacctgctccggcatccagcgctgcctggaggcaggaaggagaggcagggcaggacacgctggtctgagatgagggggagccccacgggccccagggcaggctagaggaggcacaggccctgccacggccaactcaggtcagccagcctgaggctgtggcctccaaagggtctgggcgcaccccccaggtcgcaggtgtctgaggccagccaacctgcagagcactcgcggcgtgggtgggctgagtggaggtgcctgggagctgcctaaattcagaagcctccactgccatggagactgcctggctgtgtcctctcagccaggtgccgtgttggccttggctaggacccagagccacactgcagcctccgccgactccctccttccgggcctgctctagtgaggagtgcctaagccaggacccagaaactcagagttgatggtgagaggaggccgcctgagtcaggacacctggcttcttgaaaagttcgctctgccagaaaccacctagggaccacgttagctgccttccttgagctccccaggagtcggtttccacatctgtgaggtggagggctggtgtggaggtgctcatggggtgcggtgcttgggagacagccaggcccagggtggctgctgcttcctgctaagtgggggaggtgagaca

SEQ ID NO: 9954 - DNA, 398 bp, Homo sapiens
tgtttaaaagcttggcagctacgagtatttgaggtacataggggcgggcacagaaccagcctcctgaattccatttactctggtttgggggtggaacaaagatgatccagtgcagggtctgagctagaacctagcaggtggccagaaccattttagggtttcacctcagcatttcggcagaaatcagctctctccgtgagtcagggcaccttaggctttgctgtatatccctttgttaagccagcagctagactcctagattgaattcttttaagaaatggggagaatgagcttttttattgactgccagtgttgtctgtattggatgatagcaaaaagtgtagttggacaggttgcccactagatggagtgagaagtaccagactcctttttttctt

SEQ ID NO: 9955 - DNA, 418 bp, Homo sapiens
agcaagtaaaaaaataccctaacaaacctgatgtgggtgggaggggcatgtcagtaagtggtgtgttcaatgtgtttgtttcatatgggccctttccaggagtttgcaaaccttgtcatacccatatgcaaaactgtgttccccttgccattaaacccagtgaagtttgggttctcttttgtgcctatccaatccagttgtaaaatcagagctgcttatatattctactggaataactgcatcttccactcagtcactacaaaaaagcatagtttcagtttgcatgaatttttttttttttcttcaatggttgtgcagataaggatccatttctgggatagaattgtattttttaagtcatttttttttcttgaaatggatatgtacaaataaaataaatggaagacagaaaaaaaaa

SEQ ID NO: 9956 - DNA, 1066 bp, Homo sapiens
ttttttgctttcttgattttatttcaaaagtacacaaggtcacaaaactagagcaagttgtttttcttaacaaattttgttcttacaaatttcaaaatctgcaccattggatatataagccagaaatcgtacatacaaaatctgaaactgacactgtcagttctatactttgcacacgtgaagtgtcagaatattttcttcagtagtacaggtgtatttatcactaaaattcacaattagggaaaagaataagtgaatcaatgaattgtggttctcttaaaacttgtgtcattaaataagttagcagaaaacacaaagttctgttttgatggagcttttagtctcgatgaccaaaaccaaacccaactgatatgtactatattcttaaattataaaataagataaattataaaagttaaccataatgaataagaggctggggttatctgctataagataaatgatcagccttccctaaagataaataaactgaaccacaattcacaaatgtgtttattattcttccctgcttctataacatttataaaaggaatttgtgctcagttgtggtctattttagtgttaaaataggtaaatgagtaagaaatcctattgcagaacatgatgcctttattgctggaatatccaaaggcattcaaaatattaaaacttgcccagaacatttacactactaaacacaggaatgttataaagatatatgtacatatatatatataatatataatgtcacaagccactaagaagttaaaattgtgccaacattttctacaaactactctttatgtgacacatcaaagcattaaccacataaaatatgaactttttctgttcacactggaataaggcatctgaaagccctaaacactgctgaagtgaaaattagaagaaaaaactcaacattcacataacatcaaatgtacatgctgcacgcacacaaaagacactgagaatatttttaagaagccacacatcacagaatttgatagtcaacttcatgcaatgagttccttttatatttcatcaaaaggtttacttgcccctttac

SEQ ID NO: 9957 - DNA, 733 bp, Homo sapiens
ggcctgagaacctcaagcagggagaagagcttgaagttgttcagaaggaagtcgcagagatgctgaagggcagaattctagtggggcacgctctgcataatgacctaaaggtactatttcttgatcatccaaaaaagaagattcgggacacacagaaatataaacctttcaagagtcaagtaaagagtggaaggccgtctctgagactactttcagagaagatccttgggctccaggtccagcaggcggagcactgtttcaattcaggatgcccaggcagcaatgaggctgtacgtcatggtgaagaaggagtgggagagcatggcccgagacaggcgccccctgctgactgctccagaccactgcagtgacgacgcctagcagtcctgccctgctgctgctgcccgccccgctacagaggcaatgtgaccagtcacagggacagatcacatctccccagagtggcaactctggtgaaaccttttcagaatcatggcagaggggcgtggcgtggtgctactgagaaggtcctccttcctcttgactttgtggtctgaaacctggtcttactgtccatgtgtgtttgggcccggatggtcagggtggggagcagggacggccatgggcacgcctggccacgctttaccgactgctgaccccctgggccaggtgaggttgggctgtgggccgccagtccatacggtgctgtcactgcccatcttcggtgacaccc

SEQ ID NO: 9958 - DNA, 1118 bp, Homo sapiens
  misc_feature (1)...(1118): n = a,t,c or g
tttgtggggaaacaaattattttcaaaaacaatttacatagttataccatcctcatatcatctacactgaggtaaacagatagacaagtacaaaatctgaataacatttgctgtatttaaagacaaagatgcccttattggctcttcaaagggcaggtgaggatttacattgatccaattcttatggtcttatctactcatcctttggagccagtaataatctgtatataggatctggttaagccaactgtctccattcctccatccatccatccacccacccaatagttctttgtgtgaggcactgtgctggatcatgaagccatcaagatgagtaaaattagattctcacccattaataagtttacagaacagtaggagaaacagtcaagcaactacagtgatgtcatataatacaggcataaacaaagtactatggtagccccttactgcctggaggaatgaatgaaaggagtcagaaagaaggtgatgtttgagctgaaacttgaagctaaatgggaaacattcccagggaaatgaatcttcagctcctaatctaaaggatagcaaattttgttcctattttaatgagaggaaattaaaattcagagagaatgcttacacctagtagggcctcacagtgacaaggcaaaaccatagtacgactcagaaatctggactgcctattgctagattcacagactaagaacctaagaacacggnccctgtgcattgctagtactcaaaaaaaaaaaaaaaaaaatccaactttaaacatctgccttattcccatggaaatgatcttgccagggcatgctcaacttctctaagaaggtcattagaccttaaacttttgtggaaaggagtttaaaaagccaaatacatttctgacaaatggaatgtctgataattatgtgactgaatctcacatttactaattctgaaactagttaataccaaatagttcttaaaagacaaaggaagagaggtgatttctctgtggaaaggttgggcctaagggtcaaggatggttctaagtcatcagactacagagttttaatctaaacatttttcttcattttttactatgttagaaagagcaccctgagatattaaac

SEQ ID NO: 9959 - DNA, 461 bp, Homo sapiens
ttttttttttttttagcaaaatgggtgcttttattttcacagacatgtctatgcaatacactcagtcacaagagagagcttcttaagcctgaccataatttaaactctgaaaggtgagtgagcctgttaagagacctccacccttctagtaacctatatcccttgatatgggaaggatatcttagttctccctagccccttgcttaggattaagtgagagacttcagctttggtgtaaagctgtcagctgccctaatcaaggacaatacacaaaaattagactccttataagaataagggattaaatggaggaagatctagaagtgggtgggaacaaaagagcagaacttgagcctgcatcttgcagaaaattgtccaaagacaactggcagagttcactccataggggaaaggcatgttagtgtgtagggtagagaaacttggacaaggaaggatggcct

SEQ ID NO: 9960 - DNA, 2050 bp, Homo sapiens
gaataaaatgaacaattcagttcctcagtcacatgagctgtgtgtcaaatgcacaacagccgtatgtggctcgtggcccctgtaccggacactcccatccctgcagagttactggacagtgctgatctagggattctgttacaaaatccatgaaagtgttcagcacaatgccgggcccatataaacgtcagtagttgttgttattataattagtcttgacccaacggcaaattcactttgagaccttagataaatcactctacctctctgagcctggtttccttgccctaaaaggatggcaaggggctgggcatggtggccactgaggatgagaggctagcagggagcggtgagggagagcggctggatttcttacgggatcggcacgtgcgatttttccagcgctgcctccaggttttgccggagcgctattcttcactcgagacaagcaggttgacaattgcattttttgcactctccgggctggatatgttggattccttagatgtggtgaacaaagatgatataatagagtggatttattccctgcaggtccttcccacagaagacagatcaaatctaaatcgctgtggtttccgaggctcttcatacctgggtattccgttcaatccatcaaaggctcctggaacagctcatccttatgatagtggccacattgcaatgacctacactggcctctcatgcttagttattcttggagacgacttaagccgagtaaataaagaagcttgcttagcgggcttgagagcccttcagctggaagatgggagtttttgtgcagtacctgaaggcagtgaaaatgacatgcgatttgtgtactgtgcttcctgtatttgctatatgctcaacaactggtcaggcatggatatgaaaaaagccatcacctatattagaaggagtatgtcctatgacaatggactggcacagggagctggacttgaatctcatggaggatcaactttttgtggcattgcctcactatgtctgatgggtaaactagaagaagttttttcagaaaaagaattgaacaggataaagaggtggtgtataatgaggcaacaaaatggttatcatggaagacctaataagcctgtagacacctgttattctttttgggtgggagcaactctgaagcttctaaaaattttccaatacactaactttgagaaaaatagaaattacatcttatcaactcaagatcgccttgtagggggatttgccaagtggccagacagtcatccagatgctttgcatgcatactttgggatctgtggcctgtcactaatggaggaaagtggaatttgtaaagttcatcctgctctgaatgtaagcacacggacttctgaacgccttctagatctccatcaaagctggaaaaccaaggactctaaacaatgctcagagaatgtacatatctccacatgactgattttagattgggagggtgggggggatttgtagcataactgtagctcaagtttaaaagccatgtataaccaagtgtgctctttttttaaaaggtagagtcttacaatcaaatctcctgctgatttcactttgggatatggtcttgagccagtaatctttatactgggtttcaagaaaatctttgttgaagtttgaaccacaactttgtcgtggttcttaaatgtttatactgtatttctaagaagttgtttgaggcaaattaactgtatgtgtgtaggttatctttttaaaaactcttcagtgcaaattgtatcttattataaaatggacacaaattttcaagtttacacttcatatagcattgataatcttcaggtgaacacttagtgatcatttaaaaagctcactgctgatcgtagaaaatttgctttaattaattaagtatctgggattattctttgaaaacagatgaccataattttttttaaagaagagtgacttattttgtcttattcttaagtaaagtgtgccaattaaacctgtgtggcctatataaatgaagttaataacttcatagtaagaataaataggtttaactaag

SEQ ID NO: 9961 - DNA, 452 bp, Homo sapiens
  misc_feature (1)...(452): n = a,t,c or g
aattctcagatgccttatggacctcttcaagaatgtggttagccaattgattcaacttttataggtttatatgctctcatgtaaacctatttgttncccgagatcagncgagatcgggcccgttccagggtggtatggccgtagacaacctatttgttaaaaacccttggaaacacatcttttagtagaggttcttatttacttataaagattaataatcaaattactacaattaatatccatttagccttttcagtagtctaaatatttggtaactccctagccatctataacactagttcaaaacaaggctaattcataacctgtcttaaaaatgtttgaagtggtatcaagagcattgtttatgcatgttgtgatactatttgtggaactgtttaatgagctatttcaaactgctagaagaaaatgaaataaaaatggaaaaatactgt

SEQ ID NO: 9962 - DNA, 332 bp, Homo sapiens
ggatagaattttctgactattaatttttcttccatgaaattttattatgcctttggcactttctgccactcttacagcatatcacaagatatctgtttagcagaagattatgtagttactttaattttaatataaaagtagcttgtgatacattaccaagagatctctgattctttagtaagtttgaggaacacctattctacagagatgataggtacttagaaatgaagactttaaagtacattttaatctaatataggccagtaattgggggaaggggctttgagcagtacaattttaagatgattttgagggttgtatttctttatcat

SEQ ID NO: 9963 - DNA, 785 bp, Homo sapiens
cctaattccctgttataattaaatcaaagcctcattaggttagagggtgtggaagggcatgacccagtgggaggtgggaatctcaccaataaaaggccctcatgtgccccttccgcacaagacctgagcgcccagtggaagcagctggaggacagaggagcttccagcagaagaggtgagcccatgcctgtgtgtgtgtttttcctccttagatgcctagaaatgggggttatgccttgggggatgaatgagagaaattcgtaattaatgaattcaacaaaggctgtctgagtgctgcctcagagttgaataccaaattgactgccaccactcctagactggagatctggggatccagggtgactggttttcaactctgaggcagcactcagacagcctttgttgaattcattaattacgaatttctctcattcatcccccaaggcataacccccatttctaggcatctaaggaggaaaaacacacacacaggcatgggctcacctcttctgctggaagctcctctgtcctccagctgcttccactgggcgctcaggtcttgtgcggaaggggcacatgagggcgttttattggtgagattcccacctcccactgggtcatgcccttccacaccctctaacctaatgaggctttgatttaattataacagggaattaggtttttactggtgatatatctccagttaattgtaactttagtaaatccttcatcctgacagtgtatttttctctcatatgagataagattaaatcgctctatataaa

SEQ ID NO: 9964 - DNA, 539 bp, Homo sapiens
attttaagccacttgtttggtgttatggattttaagaatcagttggtgttagaatttttaataacacagagaaagccattgaatatggaactcaaattatctaaggtttacccagaagtcaaaatcacctggccctctgtaaatttctctttgtgttcctaggcccacaaagtctttggtctgaagactcagagcttaaattgcattggtcctgttaatctttgtcaaaaaggaagtttgggcggcagtttcagggtagtgttgagaagataactcctggtcccattttattctttcctcatttgttcagtgctcatggccatctacaaccttccttgattctattctgcctaagcctcttatttccacatctataagtatagtgctacataataattacaacctttaagaaaatggagagttttcattaaagggcccctgcaaatctatgatgctagatgacagattctaccagaaggccagagtattaatagcacccgtgataactgtaataagaatatgtctcgtttttttttaaa

SEQ ID NO: 9965 - DNA, 980 bp, Homo sapiens
ttttttttttttcacataatcaatcattttactaaatacaagcatattttcattcacatacagctaaataaagcatttttcacatttcattacagtgcacaacaaagtgaggaaaagtatacagtacattttattctgaaatatgagacaatctaatccaacatgcagttgtggtctttgttacaagttagtttatcttttctttacctatgtagtaaaatagcttctaaagctttatccttagtattatattaacacctgattcttttcacacttattttctaaaacccacttattgcagtgacaatggtactgaattctactaaaatgatttttaaattttctagaacttatttaagcaattaagctcagccacctctgctggatttatgctgaatatttttaaacctgccagaaaatgccaggagtgggaatactgtacatataataaattttagtgaagaaaattgtagggaagttttgtttctttccttttttgaactgacagaatccagtcgactctcatttacccactggataatcttgctttcagaatcttctaaacataattcagtatagcagttgatgaaattttgtgttaatgaaatttgccatgttttgtttgtcttttacaaccacgaaggtggcaatttaattaccccacctaagccagctcttgtgaaatgaatatagagaagatgatcagttcacttgtagttaatgctgtgaactgatccaaagtggtttgctcatccaacttggggcacaggtggcagaatagtcttccataattttcatgatttggtttctttattctggctaaagcaaattcccaaagtttcagattcggtcacattcatactgaagttcaatattatatctcaaagcgatttgccattcttaggccttcctatcacgatggatatgagaaacctgactctagtcagaatagtttttttttttaattgtgaaaagtatgg

SEQ ID NO: 9966 - DNA, 843 bp, Homo sapiens
aagaaaagggaacaaaccctgaagggctaagctattcaacattgcctggaaatgtcatttccaaagtcatcatccagcaacccacaggtttgcacatgcccatgagtatgaatgagcttagcaatccatgtttgaaaaaagaaaatagtgaattgcggagaactgtgtacttatgtacggatgataatttgagaggggctgacatggacatagtccatcctcaagaaagaatgatggaaagtgactatattgtgatgcccagaagttctgtaaataaccagccttcaatgaaagaagaaagcaaaatgaatattggcatggaaaccttgccacatgaaaggctattgcactacaaagtaaaccctgaattcaatatgaatccccctgtaatggaccagttcaatatgaacttagagcaacatctcgcaccccagggaacatatgcagaatttgccctttgaacctcgcacagctgtgaagaatttcatggcctctgagttggatgataatgcaggactatcaagaagtgaaactggatcaacgatatcaatgagttctttagagagaagaaaatcacgatattcagaccttgactttgagaaggtcatgcatacaaggaagaggcatatggaactatttcaagaactaaatcagaaatttcaaactttgggacagatttcgggatataccaaatacaagcagtatggaaaaccccgcaccaaacaagaatccatgggacactttcaaaaaccccagtgaatacccgcattacaccacaatcaatgtcttagacacagaggcaaaggatgctttggaactgaggccagcagagtgggagaagtg

SEQ ID NO: 9967 - DNA, 1808 bp, Homo sapiens
  misc_feature (1)...(1808): n = a,t,c or g
ttttgcaaaancaaactgtcattttaccttaaaggaccatgcttaacgtcaaaaatggacacctgtacattcaataaaaagttaatttaaacatacatagtctagatcattctagagttatacaaacattctggggccacatatgtatctaattttctttcaaaaaaacttttttttttataaaagtgatgtattgagataattttaaaaagtatctgacaattatgaatggtccccagttttacaaaatgtgatttccaggatacgaaactgaaaaaaagtcaactcttcagagagtgttttatattgtacaaacaagttttgtagaaaaatgatccagcaaatgcttgagttaagaatatttatattttttccaattctttacacttttattaacacacttacaaaaaataacattcaaacactgagaaaattaaataactttggaagcagagctcattgttttctgcttacatataagtgacaattctgggctgttggcacaaaataatcaacattcataaaacccttactactatatatcaaacataagttaaaatcataggcactagtttatcaaatccacatttcttctgtaagactaaccacagtaaatccttagattttcccaaacagaaaaattgcaatatacaaaggctttctagtaaaaaggcaatttttctctttaagaaactaaaagtcaacagtctgtggtagtacaacagcaggtaaaataatactttaccaaactcagatcaaaaatatgttttaacaagtgatgaaatattttaataaaaaaaaatagacatttttttctgatgcagccatttaaaaacaaagttaaataacctgaatactccttttgaaactgattatctaacttaaaaaatgtaatatgtttcataataggtaaaattccttttaattattagattgcagcatatatattttttgaaatgttgcactgaaaactgagacttgttctgttttgtacgtggtttttaaaagagacagtagctacttctttcttttacttacttagacatgagatacccccctcccaaaagaagatgctttatcttcctctgaaaagcaacattttttagttcattatcatgtagaattctggcgccatcctttcctgacccaccccatcaccctcaaattcaaggataaagtttcttccttgcattatacaccaaatacatagtactggcagtttaaatctccagctgcttgtgctaaatgaatgactctccactggtcaagctgacagactaccatggtgtcagtcatgacagaatgggaggtcctggttttaagtttttatcatcaacctatcaaccttaatgctgtccagaatatcaagccttcctatttctctctcccaatttcttttgccaacttacggaatgtctttgattaacaggaaatgaacttatgttcaaatctctaaaagcttttagatgacctaagtgacaatatcttagagctgttcaaattaagtatttaaaaacagacctcataataaaaaatgagaggcctgctacagaagcaagttttactctggtaaaagtctgataaaattgaaatagccgatttcaaggatatattaagagccattagagagcaagtatcaggttagagtcatacgtagtagggttttttttttaccaaaaatgcaaaaattgatgtaaggcagaatctaagtcaaaaggaaaagaattttcaatagatgttttatacagttactcagtttaaagtggatcaacttaagtaggatttagcaggctatattttcctaccac

SEQ ID NO: 9968 - DNA, 848 bp, Homo sapiens
gaaatttaaaatgctagctgctcaagagttttcagtagaatatttaagaactaattttctgcagcttttagtttggaaaaaatattttaaaaacaaaatttgtgaaacctatagacgatgttttaatgtaccttcagctctctaaactgtgtgcttctactagtgtgtgctcttttcactgtagacactatcacgagacccagattaatttctgtggttgttacagaataagtctaatcaaggagaagtttctgtttgacgtttgagtgccggctttctgagtagagttaggaaaaccacgtaacgtagcatatgatgtataatagagtatacccgttacttaaaaagaagtctgaaatgttcgttttgtggaaaagaaactagttaaatttactattcctaacccgaatgaaattagcctttgccttattctgtgcatgggtaagtaacttatttctgcactgttttgttgaactttgtggaaacattctttcgagtttgtttttgtcattttcgtaacagtcgtcgaactaggcctcaaaaacatacgtaacgaaaaggcctagcgaggcaaattctgattgatttgaatctatatttttctttaaaaagtcaagggttctatattgtgagtaaattaaatttacatttgagttgtttgttgctaagaggtagtaaatgtaagagagtactggttccttcagtagtgagtatttctcatagtgcagctttatttatctccaggatgtttttgtggctgtatttgattgatatgtgcttcttctgattcttgctaatttccaaccatattgaataaatgtgatcaagtcaaaaaaaaaaaaaaaaaa

SEQ ID NO: 9969 - DNA, 845 bp, Homo sapiens
ttttttttttttttaggcaaaataaatactttattgttttaatatatatatattttagaaatcagcctttgtgtgatatttcaaacatttataagccttttagagattctttcaaagaacactgttaacaactcaaccacttttgattaaaatatcacacacaaagaaacacaataggagttgaaaaaattataaatgctagaagaaaaattctaataacatttgggtggttactttacacatttatttaacacatataaaaccaaatggggaaaccattttccttttttttcataaaaacaaagttttcactggttaaaactgaactaaaatcattttatgtatgaggagaacaaatctaaattacttccattttgaaaaaacaaacaccagcttattcatttctattcattcaagtcataggccccattatttggatgatactctatttagtctagaagacagaaaaagaaacatctccatctaataaagaagtctggacaatgcaaaaagtaaaagtacatagtgtttaacataaggcacatttccacaagaaaaatactacataagcaatgataaaattacatttgtcttgggtaaagcaacaaggccttacggtggtagtaccattagtagttgtaggtaacctcattaaattctatcctaccgccattagtaacctccgcaggaattaagaggcattatattttttacaacagaacagtttttcctcttggaagtgacattaattaacagccgtgggggggaaaatcattggatgcttcagctccgaaaaaatgatccgtattgcccgtaaatacctctggggtcagggtttaagatgt

SEQ ID NO: 9970 - DNA, 341 bp, Homo sapiens
gcacataatgcctactgtaccaaacttttattgcctttaaatttagttgtaattttattgataaaatttaaatctagtgtctttatttcttctgttacaatagtgttgcttgtgtaagcaggttagagtgcacagtgtccccaattgttcctggcactgcaaaaccaaattaaacaattccacaaagaattctgacatcaatgtgttttcctcagtcaggtctatttcaagattctagaagttccttttgtaaaacttgcctttaaaactcttcctcctaatgccatcagatctcttaacattggctcactgtgggatctttcctcttaggttgaatttct

SEQ ID NO: 9971 - DNA, 216 bp, Homo sapiens
gtagccttcagttagccctttcagcttttttccccatcttgtgccgggccttcctgggtttcagtacttggatgtagggctgcagttatgtcagtggtgggtagattgaccaggaattaaggtctagggtccagcccatgtgagacttgactcactgatctacctttaggcatgtcttccttccagtctcatcctttttaaatttttttttttttt

SEQ ID NO: 9972 - DNA, 3445 bp, Homo sapiens
  misc_feature (1)...(3445): n = a,t,c or g
ggcggaagcacgatctccggcagcggcctgggaactcttagctgagcaggcgagagcatcatggataccgacttatatgatgagtttgggaattatattggaccagagcttgattctgatgaagatgatgatgaattgggtagagagaccaaagatcttgatgagatggatgatgatgacgacgacgatgacgtaggagatcatgacgatgaccaccctgggatggaggtggtgctgcatgaggacaagaagtactacccaacagccgaggaggtgtatggtcctgaggtggagaccatagttcaagaggaagacactcagcctctcacagaacccattattaagccagtgaaaaccaagaaattcactctgatggagcagacattacctgttacggtgtatgagatggatttcttggcggatctgatggataactcagagctcatcagaaatgtgaccctttgtggacatctccaccatggcaagacatgttttgtggattgtttaattgaacagactcacccggaaatcagaaagcgctatgaccaagatctgtgctatactgacatcctcttcacagagcaagagagaggtgtaggcatcaaaagcactcctgtgacagtggtcttgccagacaccaaaggaaaatcttatctcttcaatatcatggacactccaggacatgtgaatttctctgatgaggtcacagctggcttgcgcatctcagatggagtggtccttttcattgatgctgctgagggggtgatgctgaacacagagcggctgatcaagcatgcggtgcaggagaggctggcagtcactgtgtgcatcaacaagattgaccggctgatcctggagctgaagctgcctccaactgatgcttattacaagctgcgccacattgtggatgaggtcaatggattaataagcatgtattccactgatgagaacctgatcctttccccactcctgggtaacgtctgcttctccagctcccagtacagcatctgcttcacgctgggctcctttgccaagatctatgccgacacctttggtgacattaattaccaagaatttgctaaaagactctggggtgacatctacttcaaccctaagacgcgaaagttcaccaaaaaggccccaactagcagctcccagagaagtttcgtggagtttatcttggagcctctttataagatcctcgcccaggttgtaggtgacgtggacaccagcctcccacggaccctagacgagcttggcatccacctgacgaaggaggagctgaagctgaacatccgccccttgctcaggctggtctgcaaaaagttctttggcgagttcacaggctttgtggacatgtgtgtgcagcatatcccttctccaaaggtgggcgccaagcccaagattgagcacacctacaccggtggtgtggactccgacctcggcgaggctatgagtgactgtgaccctgatggccccctgatgtgccacactactaagatgtacagcacagatgatggagtccagtttcacgcctttggccgggtgctgagtggcaccattcatgctgggcagcctgtgaaggtactgggggagaactacaccctggaggatgaggaagactcccagatatgcaccgtgggccgcctttggatctctgtggccaggtaccacatcgaggtgaaccgtgttcctgctggcaactgggttctgattgaaggtgttgatcaaccaattgtgaagacagcaaccataaccgaaccccgaggcaatgaggaggctcagattttccgacccttgaagttcaataccacatctgttatcaagattgctgtggagccagtcaacccctcagagctgcccaagatgcttgatggcctgcgcaaggtcaacaagagctatccatccctcaccaccaaggtggaggagtctggcgagcatgtgatcctgggcactggggagctctacctggactgtgtgatgcatgatttgcggaagatgtactcagagatagacatcaaggtggctgacccagttgtcacgttttgtgagacggtggtggaaacatcctccctcaagtgctttgctgaaacgcctaataagaagaacaagatcaccatgattgctgagcctcttgagaagggcctggcagaggacatagagaatgaggtggtccagattacgtggaacaggaagaagctgggagagttcttccagaccaagtacgattgggatctgctggctgcccgttccatctgggcttttggccctgatgcgactggccccaacattctggtggatgatactctgccctctgaggtggacaaggctcttcttggttcagtgaaggacagcatcgttcaaggtttccagtggggaaccagggagggccccctctgtgatgaattgattcggaatgtcaagtttaagatcctggatgcggtggttgccccagnagcccctgcaccggggcgggggccagatcatccccacagccaggagagtcgtctactctgccttcctcatggctactcctcgtctgatggagccttactactttgtagaggtccaggcccctgcagattgcgtctctgcagtttataccgtcctggccaggcgcagggggcacgtgactcaggatgcacccatcccagcttcccttctgtacaccatcaaagcttttatcccggccatcgactcttttgcttttgagactgatctccggactcacacccagggacaagccttttctctgtctgtcttccaccactggcagattgtgcctggtgatcccctggacaagagcattgtcatccgccccttggagccacagccagctcctcacctggcccgggaattcatgatcaaaacccgccgtaggaagggcctcagtgaagatgtgagcatcagcaaattcttcgatgatcctatgttgctggaacttgccaaacaggatgttgtgctcaattaccccatgtgagtgcgtggactcctgggagctcctgctccctacagtgggctgcaactcctgtacttgaagctgagacctcatatgacgtggccttcgtgttgtcagagagtgtctggaagctgctgttgccatcttgaacaactcaccaacctccaacccagagccccagtgagagaggagcatttggcctcctgcttccttctgtggcctctgccgggctccattcccaaggaaaagagaggagcttgggctcacagaaagagaaggggatgaaaccccaaggggccctatctttgggatttacatggaattttattttctacaagtttgaccttagccatggtttgcaagtgaacagaacattctgacctctgtcttgctctgctcctttcatcctcgtctcccctgccccgtctggtgcttacattctgaatatatgtcatctcccaagaggcttcactgcctctgcttcca

SEQ ID NO: 9973 - DNA, 131 bp, Homo sapiens
acttgctggatccacactaacatctttgctaataatctcattgtttcttccaactgattcctaacactatatcccacatcttctttctagtcttttatctagaatatgcaacctaaaataaaaatggtggc

SEQ ID NO: 9974 - DNA, 202 bp, Homo sapiens
gaagcctgcaataaagaagcagagaagattgagtcccttatcaactctgacagcccgactttggcgtcccatgtccctctctctgccctcatcatttcccaggtacaggtctccagcagtgtgccatcggcggtgtcagggccaggccttcttgccactccctcctccttcccctcagcttgggccttgccttgcacttgct

SEQ ID NO: 9975 - DNA, 462 bp, Homo sapiens
tttttttttttttgctatcaaaattgttttattatattgaattaccaatgacaataaattacaaaaaacaatgttttagacattgctgagtctaacaaaataggctgaagtttgatctttgtgaaaggacttgaaaccattgttttttcccacaaaaaatccccatcaccagcactgcattcgaattttcttgaaaattgtttcctgagtttattcatggtagtatgtgcttaaggacaacaggttgttagtctatttgagcaaacctgatgttttctctaagaaaaacaaattcaatatcctcccccttcaagaacaataaaaccccaaactgtgctatcattaaatactaccaaaaaccattaactagaaaaacacaatgcaaaatcattattcaagaacccattagaaaccacagtattctaaagtcttatagaaaagatgtgtttttactagttaagc

SEQ ID NO: 9976 - DNA, 658 bp, Homo sapiens
ccaacatccctggggagctaggaggagcagaggaccaacacatgaggctgagaggcattctgcttggtgaatttttgaggcagaggctgcccccaccacacaactcactgtcaggggaccttatcctgctcagagagctgctctagaacttaatttacatgactcgttcaggcagacagagttcactgtcttgtattccacagtgtgacagtggtggccccatccctggcaactgagggccgtggcgggtcggggggaggccatcttaaggaagagcaggcagctagcgttccagctttgggaactctggctggaaaaggtggttcacagacgagttctggggcctcaggcggcccgtcatatagacctttccacaggggagggcagaagcaacaggcgggtcccaggagaccccagcaggtcctccaccgtccagccttcacagcaccgggcagaatttacacagagaggatcagtctccaagccaaagtcaggtggaggcatggtggtggtggtagagaaacgctgggctggcttccagctagaagccaggctggaggcaggaaggctcagtcgtctgtttcctgcttgatgttctcgacggagacaggcagctctggacttgaagccttgtcgggcgaggcacgtctagatgctc

SEQ ID NO: 9977 - DNA, 1078 bp, Homo sapiens
gattctcctcgaatacctcctgccggcgcggagacaccggggcgggggtcctgccgcaactacctcccttcctcctctcccccgcccccggagccttcatccttcccttccccccccacctcgaggggcgggcctggttcccgggacaccatgtcggactctgaggaggagagccaggaccggcaactgaaaatcgtcgtgctgggggacggcgcctccgggaagacctccttaactacgtgttttgctcaagaaacttttgggaaacagtacaaacaaactataggactggatttctttttgagaaggataacattgccaggaaacttgaatgttacccttcaaatttgggatataggagggcagacaataggaggcaaaatgttggataaatatatctatggagcacagggagtcctcttggtatatgatattacaaattatcaaagctttgagaatttagaagattggtatactgtgggtgaaggaaagtgaggcgagggagtcaggaaactcagccactggttgccttggtaggcaatgaaaattgatttggagcatatgcgaacaataaaacctgaaaaacacttacggttttgccaggaaaatggttttaatagccactttgtttcagccaaggcaagagactctgtcttcctgtgttttcaaaaagttgttgctgaaatccttggaatcaaattaaacaaagcagaaatagaacagtcacagagggtggtaaaggcagatattgtaaactacaaccaggaacctatggcaagagctgttaacccttctagaagctctgtgtgtgcagttgggtgagctcatttttccattgtgttgatagttttggctgcccttcacctctgggtgtgtctgagaacttctaagaacttgttttatcagtgaccatctctgtagttcagttaacactttcctccgaacttgcttcatctttaagtgttcctcccaaccgcaggcatgtacttgggttcaaaagaattcaactttgggaccacacactttgcattcaaactggaagtctcattctctggaattagactgtttcattgaaaaa

SEQ ID NO: 9978 - DNA, 417 bp, Homo sapiens
  misc_feature (1)...(417): n = a,t,c or g
gcccagcaatctgttttaacaagccctacaggtgattctgatcatgcttcataaagttagagatcatggccttccactgttcccttcttaggcatgggtctccagctagctttcctaacctacatctgcccagagagctgcagctgatttctgcctttcacttcccatcctcccagcccctcctttaaccacgttcatgcctttaatgaatccagccatacaagaaatgttatttatgtttattcaaagaacaaactatgtgccgggtttcttgaacaagcactttatctagtcattatctgatgaaagttatgaacttcctgcccagagaagtgtacattatgtatgttcatgtagattgngttcatcgtgtttgcctggagccaatccattgaaagtccatagatttcaggtgaa

SEQ ID NO: 9979 - DNA, 416 bp, Homo sapiens
  misc_feature (1)...(416): n = a,t,c or g
aagggtaactgtgggagcattgtcattttcatccatcacaaaaagcgagactgtagctgtggcagatctgggaggatctcccccatccacagccttgactctgaaagtgtatgtggtctgatgttcccggtcaaaagacattgtggagtaaatggtccccgtgtcattttcaatagaaaaaatgttattgttctcctctatgtacaggctcatctctgcattccgccccttgtcagcatccatcacggtgaccatccccacagggctgttgggctgcaagttttctttcacataaaaggtgaagacgtcctgcataaacttagggtcattgtcatttttatcagccacctgcacaatcaccgtagtgcttgccctgcagagggnggggatgcctttgtntttgggcgttaacttta

SEQ ID NO: 9980 - DNA, 91 bp, Homo sapiens
cgcgcaaagccagatgagcctggtgagcatgtgcaaggacctgagctctcccagccccgtcggagccgcgcatggagtggaaggtcgatcc

SEQ ID NO: 9981 - DNA, 1144 bp, Homo sapiens
tttttttttttttttaatggtaaactgaatttatttcctcttggaaaacaattccagtaatctccaggttcagactgcagagtaaacattaataacagtaacatacaggttagttcaactgattcaagaatttggctgcgtgaaatcattaaggaaaaccttgaacactcaaagcttcaaatgtatccagggaaaaaaaaattctttgacagtctacataacaacctattgcatatattagtgatgctaccctgtcacattggcaagggctttaccaaatatatatataccgggccttatccagctgtgggggttctgttctgtgagaacatctcttcatggtttgcaagaatcttcagcaataaaaaatagtcttggatttaagcgctgatatacctaaagagaaattctaggcttaagtgtaaagaaaaggaagtccaaccatagtctcatgtataacagttgtttttaatctttcttccttaaaaatactttatcttaagccattttggtcatagtcttttttttttttttaatcttgcctgaatagggcccaagtccacttgtctttataagaccattttagtatcagacgacataatacatgtgcaacactttatatacaaggggtctatccggtgcgcaaaagttcaaacacatgaacatccaacagtttgataatacaagttttatggtacaatacaatgtttctgaataatatacattaacaatgaaagtttcgtgcaaagagtaaaacatgttccctttttgtgccacaaaatcaattctccttgagagactgtacttgcactaactgctgtgttgggtcattgtatgattctgcagctctgtttggaagaaaaacttctgtggacattgtgtacagtcatagatcttgtcttcttgtccatgggcagagaaaatatgctgctgcaacttgtttgcttgaacaaatactgtaaagcagactggacacttgaaggtgcctcccatcccttcgaagctgtgctctatcaggtggcactggagtttggcaggagagtccaaggtctggctgcagagtttgcattcatggttcagtccttcatcaatccagtgaattggccacatgaacccgaatatccccttcattgtagaaaaccat

SEQ ID NO: 9982 - DNA, 497 bp, Homo sapiens
tgagaacctgagacccactcttccattgcatcctgtaggacccagtggaacctgacagagcccataggattccctcttctactttcttagacagcagggatgtcagggtctcaaactgcctaacactttgtagcttttcttaacacaaaagcaccccttctctcctaacttgggctctgaatactttcccaacaggaagtctgatctgttgccagacttcttggttagatggctcatacatttatctagagaagcacactcttgcttgctgtcaaactttagaacaccatggaaggtctaagggcatcctgtgccagggaaactttttaaggaattttatctatgggataaaccccatattccctctagtgtctactggtggctctaatactggctttgtgctgcctgccacacttgccctttgagcctgcgaatggccgctagtgagcaagctctgcttcagagcagtctagttaggtagaacagggattaccagt

SEQ ID NO: 9983 - DNA, 473 bp, Homo sapiens
  misc_feature (1)...(473): n = a,t,c or g
ttttttttttttttagtgtccctaacatttatttcaggtggtgactaggagggttgaggtgtagatatacttcctctcttctcgtggagccttactgaagacaggatcgccgttcttgtgtttatcagctgagaagggcagtctcgccatcttaaagacctgccctccagccccttcaaacgccacacttcccaggaagcactctctccataagtgttcagagaaccctgaccagagaagctcccgcacttcttatatgaactccgattgtgctgagggggaggggaggagtacacaaagcaggaggtgggtggggaggctggggtcacacagcccagggaggggcaaccacccgggcgaggtgctccgtcagcacaggtttccctcctccctcccttccccccagtaacaccagggttntgaccgggaccngtcccaccgtagagtttcagcggcatcaagtccaaggacag

SEQ ID NO: 9984 - DNA, 482 bp, Homo sapiens
tttttttttttttttacatattccaaattccaacaatttaaaggtgggtcataatcaatgcagtaaataaatgtttttacaaatagagttctttttaaatgataaaaatattacactggacccaaaattccatacaaacattaatacatgatttctcatccattttgactaaatataggattactgaaaatgtgctgtagaaaggccactctcctgtacagttgtgcaaagtctgcaaaacgatagtgattcaatggtggtttcaaaagcaaagaaaaagatccccgctgtggagtttttactttctcctctacagcaaaaatattcactggcatatatctgaactcttaaagatgaaagtacattcactgagctgtacaggcaacagtataaagctgattagaagtagattttaggatatagaatagtaaaggaggttccctttctcctcctgaaaaaaaacagcaaattgtgacttgtac

SEQ ID NO: 9985 - DNA, 319 bp, Homo sapiens
atgcattatgtgtaaatcagcttcatgctgtttaaaaatttattctctgaaatttatagaccatgtagaattgatttgtgatgtgatgctttaatttattgcaagaaaattagtatggcttcaaactgccacaggtaggcatgtaacaatggctgttcagctgtactgatccaaaatggagaaaactgatgatacaagggccaaacatcttatgaaatgcaactatttatagacttgttttgctatagggaggctggtgaacacgctgaatacgaattacctcagttctgcagctttctatgtctttttaatgcattct

SEQ ID NO: 9986 - DNA, 521 bp, Homo sapiens
tttttttgaggaaagaagtaacttagaatctaatctttattaacctgggatatcacagaaaatacttgggcctgccacttgtatttctttgtcctcaatactgaacactagacacatttgaaaccttcctcagaaggaaacaaaccaactggttatgcctgggtggtggcatggaagatgcccattgttgcccaatttgctaataagtattttgaaattagaaatgaaacatgaggtccaagcctgtccagttccctacccaacccattcctcctccctggaaaaaagaaacccgtatcatcttccaaatttctgattcatcactgccacttaaaaatgaaccgttttgaattttaaaatgtgaataactcaagtatcttttcttttgagatgcccggcctgagcactaacttcaggcattgctgaatgcagtgaagaaaccagagtggtgtctgctgcctcctgatcttttacagctgacagcacagcctatttctaaatactactagtttgtgaggcag

SEQ ID NO: 9987 - DNA, 319 bp, Homo sapiens
gagaaggcccattgttaaaacgggcaagtttaagaaaatgtttggatggggcgattttcattccaacatcaaaacagtgaagctgaacctgttgataactgggaaaattgtagatcatggcaatgggacatttagtgtttatttcaggcataattcaactggtcaagggaatgtatctgtcagcttggtaccccctacaaaaatcgtggaatttgacttggcacaacaaaccgtgattgatgccaaagattccaagtcttttaattgtcgcattgaatatgaaaaggttgacaaggctaccaagaacacactctgcaac

SEQ ID NO: 9988 - DNA, 1670 bp, Homo sapiens
  misc_feature (1)...(1670): n = a,t,c or g
caaagccccaaatccctagagtgctttctggtctcactttggtaccaaggaagcctcacatagtggtactgcatagtcccactataagtcaagttgcagtttaaggtggtctcagccaattgttacaagctacagaatatatacatgcatctatgtacagagccttgcagagaaacacaaaattttgaggctagacccatgatcaccaccaactataattgcacaaggtcttgttatattgatctctcctcgaactcaactaacgatatcttgaaaacaaagacccttcggtgtccatctacagtaaaccccaccattaccttctagttggcataaaaacaagaaccacaaaaacttgaaaaatctgaaacagaggaacagaagggccaagaggccagctttctggcgtttcttcaactttattcaacattagacttaccttatttctttcagtgtgtagggacaagatgtactgnnnnnnnnnnnnnnnnnnnnnnnnnnnnnnnnnnnnnnnnnnnnnnnnnnnnaccttcctatccattggcaagttaacctccatctggtttatttggccatgctatgctttcttcccattcccctgctgtctattctaagcccccagactcaagcctctagactcttggatgaaacagtgagaagaaaacattttctgacttacccttttggaatctcctccattattacccaggctttgctttaagttgcactttaaatcacactgtcctattaatgcgatctggcatcttctcccacaagccccctacagggaacaactaccccctaccttaactctaaatggttctttagactatagtctgtctcctctgacctgaaatcctcttttaggcaatagggccgagctttagaagcagccaggtctggtgagaaatggggcccccatacccaactgtgggacttgggaatatcagcagagtagtaggcacagttgtaaaaaggggagatttcggtaggcacaggtgtaaaaaggggagatttcagaagacgggcgaaacaactgatgggggaagatacctggggtgagaagatgagaaagaaatgatgctgagggacctagtgaaatcaatgaaactcttgagtcttgcttaggctcgcaaacaagaagtggggaggcttgggaaattaggatatgacatatatgaaaggtttatctaagaagaaagaaacagagataatatatatatagaaagatgtatatagatgtatatatgcccaaatatattgaatgtacagaaaggaaatattcagagactttagcattgggggcagatatccttggccctggttatggggtaggacacccagattttcagacttacaatcagtggtcctggtttcaacatggaagtgagatagctgatgaaggatttcaagtctggaaatgggaaagggaggggtagaagttccttttcagaaataaagaggcattcatgaaggcttttgttgaatcctatgctactgataggaccaggaagagaggaactcggaggacaatagggaggggaagtcttggaaaatctaccacttacactgtgtgtccccatccccagcagcgtcctgccactgtagcgcctttttaaaataaataaaataaaataaagcaccattttgtttccctttcaaaaaaaaaa

SEQ ID NO: 9989 - DNA, 351 bp, Homo sapiens
  misc_feature (1)...(351): n = a,t,c or g
gttttatatatcctttgttatttttgttctctcctattgtttatcattaaggtttggcggtttactgtagtgctaagatttgattcccttctctttctcctttgtgtatctgctctctaccagtgactttcatactcctgcatgttttcctggtagtgaatactgtcttttcaaaatgtaaaactctctcaagatgtataactttctcaatttttgtctaggaaagactatttcacccccatttctgaaggatggctttgatggacacagtattctttcttggctggcaattttctgctttaagcactttaattctatcattccattctctcctaggctgnaaaganttct

SEQ ID NO: 9990 - DNA, 1300 bp, Homo sapiens
agtggtgctttttaaatttatttttaactgtttctcatatgtagcaacccctcctcccctcctgggcatgtttacacaggctctgctctgggggctggcctggctgtgaggtttctggggaggcagagaggcagggactttggggccttagtcaccatccatggtatcacctcatctcacttcctgtgagggacagggcctggctgatgtgatcccagctccccccagttcaggactgtctttcagctcctttgcccctggaggtgggggctgctggctgaggaggggtcaaggtgagttcaagaaagctacctgtggaaaatggaccaggttgggggggtgattgcaaagtctccccaaagcctggctcctcatgctcagtgccaggggcagaacactggggagccaggtatagagagccttcctgtcataactgccagtcctcttcctccaaggcctctgcatattctcatgttcccctcacccatcatgccagccacccctatccctcttctagcagggccaagatggggacagcagcagccctctggccttgggatgtgatgataaagcaagcctagggccagggtttggggagcagagagagccaagaagttgaccacgtgtgatttccagcccttcccactgggacttgacttcccaggtcaaggagtccgtctcattctggctggtcgagtgaccagaggcctgtgtgaatgtgtgcacctgcttttcctgcctgggaatgttttctggctcagctgcagcaacatctgttgagcccagtgtctgccctgtgtcccctgggctcgctccaagtgcaggaacatacatgcagggcccaacatgatgatggtgtgaagggcaggaaacagtcctctgaaggagtggggaggtgggcagtctgcccccgccaggtaccatcgcctcctgccagcttccttagaccaggcagggctgccatggtgctagctgcaagtccatcagtattgaccgtctcgctccatcttggtcctccggagtcccaagtttccttttcatcaaatctgacaagagagaagaaacatgggtgtgctgtcgcacagcggcctggtggtgatggacctccccgctccctcaagctctggatggctgcagtgttgtactagactttgttcaggctgttctcatctcagtattgccccttcctttcactttcacacttcatctcattcctgttgtcactttccccgaaacgaataaagtctccccagctcctgctgtgtaggctgggcagaaaccacaacaaaaaaaaaaaaaa

SEQ ID NO: 9991 - DNA, 857 bp, Homo sapiens
  misc_feature (1)...(857): n = a,t,c or g
gattgagaatcatataatacaggagcttaaacacctatgcgcgatgataaagagggtactattagagcgcttggaaaataccaggaagttgagagagttaacagaagggcgcacgctggattggccacaaaatcgaattactgaagtaagtncaaaacgacaaattgtcacagaatacagagaaaaggggaaaagaaattaagaggagaaaaagagagatctagagggccggtccaggagatacaatctatgcataataggaatacctgaaactgaggacagagcaagtggagctgaaacaataaaggatctacttgaaaaaattttccagaattgaagaacgaactagatctacaaatggaaaaggctcataggatacctttaaagtttaatgaaaagaaagcagcatctagacatatccgggtgacgtttttgaatttcaaagacgaaacattttacaagcatccagtcagagaaagcaggttacttacaaaggggcaaaagtcaggctgacctcagatttttctcctgcaattctaaatgccagaagacagtggaacaatatctagagtgttaagggaaaataattttgagccaagaattatatactctgccaagttatcatttctttacaaaggaaacctggaagacattcttagatatacaggggttaggaaagtatatcaaccaagaactttccctgaaaattttgctgaaggatttacctgcagctaacagagaacctgaattaaaataagaatagggaggcaattgtatgaaagaactgatggtatgcattaaaactagttaaggagcattaagtttaaattgttatgtatagggcattaaaactaaat

SEQ ID NO: 9992 - DNA, 788 bp, Homo sapiens
gtgctggcgtcttttcactcctgatgtaatcagagccatggcctctatcaatgaaaggcctgtaatatttgcattaagtaatcctacagcacaggcagagtgcacggctgaagaagcatatacacttacagagggcaggtgtttgtttgccagtggcagtccatttgggccagtgaaacttacagatgggcgagtctttacaccaggtcaaggaaacaatgtttatatttttccaggtgtggctttagctgttattctctgtaacacccggcatattagtgacagtgttttcctagaagctgcaaaggccctgacaagccaattgacagatgaagagctagcccaagggagactttacccaccgcttgctaatattcaggaagtttctattaacattgctattaaagttacagaatacctatatgctaataaaatggctttccgatacccagaacctgaagacaaggccaaatatgttaaagaaagaacatggcggagtgaatatgattccctgctgccagatgtgtatgaatggccagaatctgcatcaagccctcctgtgataacagaatagaagcactcccctgataaatactttctgtgctccagggaaccccttttttcagacaagaagagataatgtcttcagttttatggtgttttctgtgttttgttctccctgaccactttggttgatgtattttttccatgcgtctccacatctgttggggtagacgtgttgattgattgcattgcccaccagcaccctacaatcagatagttgtgat

SEQ ID NO: 9993 - DNA, 365 bp, Homo sapiens
gccttacaacttttctttagaaccacattattggtcataatccttgttactgtcatgaggattgttgcatgggttaaacacaaacacagactagcaatgcacttgaacaaacctggtggtctttggaaataaatcaccattagatttcacctggttatgctgcatcccataagttccaaatgaatcacctgcttatcctattaacgaagcatttaattcacacacaaatgcttgaatttcccctgtataaatgtagtcatgcgattcaacttttctaataagatttgtgaatgctgcatcatgatgaaaatgtggattaactgtgggttgcatgcctgttgttcatacttcagtgatggtcacac

SEQ ID NO: 9994 - DNA, 356 bp, Homo sapiens
taaatagcagtattttttttttaagaataaattgtaaggagcaaataaggcagaatgcagcttctaccctcaggtcaattttatggtatatgaaaatgccagtaatatttgtgccacttgccaactcgggggaggaggggcttttcccttactggatacttttgttatagtttgactatgtcattatgttgtttagagagcctccacaatgagaagttgccactgcaggggctaactcgccttcaggaaataatcaggaatgattcaagggtcaaaccactttcatcccttaaaatataggggactaatatttctttttcttttttttaaaaaaaacatttcttctgtggcttaga

SEQ ID NO: 9995 - DNA, 741 bp, Homo sapiens
tttgtaaattttatattggtgtattttaccacaatgaatacatttggaaaaataactattgattttcagagctttttggatttcagaattctagaaatgggatctcagaccaatacttggatataggggctaaccttttaatcctaatgcagttttaaaaataaggtactcaagttttctgtgccttactttcttctatcaaacaaagtatggcatacatcttcaaattagacaataaaatgttcaaattgttacctcctctgttgagtttttttattattcagataacttatcaagaatggttgaacagattatccaaactaattttggtatccaacgggtacgtctctggaaagaatcccttgggttggcactgagcactctgacttttctccgtgatcatgatcttcagcagtaccatgaagacagcagaactcaaagttcaaggaattttcatttttcaaccaatcttcttctgtcttttctccactgacatcttccattgcaagtagatcatctttagtgtcttccagtcaaggggaaccacatagtcatcaggcaacaaggattccattggaacgcctggagatccaaaaagctttactaattgaaaggcaaacccttgtgataatggtagctcaagggaacggtagtcagtgcttgttaagtcttggctgtcctcagctggtaattccttaggttcttcccatcttttcagctttctatcaaacctttcattta

SEQ ID NO: 9996 - DNA, 1097 bp, Homo sapiens
tttttttttttacattgggaatatatttatgcaaattttattgaaatttattgtaaataaagattttctcagtggtctagaaaatcagcttgaatgtcattcagcatttattgaagaaggatgacatcccttccacttattgcacaaacttggtagctttgagacaaatacagtagcacagtccgtttgaagatttgtccaaaaaattagtccatattttagtggctcagtgtcaagagttccctccctgtgcccccactgttgcttctgcagtgatacgaaggatgaatgcttaatttcttattagtcagaaaacttgaatgcaacagttgggcattcaaaaataatccagagaggtcataacctacttagccatttgagtgtggctctggtgtctgctaaaaaaagtagctattgaaaaatcagaacagtgagagctatgatgtggttcactcattctagaagcattttcattttcctcccgaaaacccccccagtgcctcaccgagccccggaccttcacccaacacggctgccacgctcaaatgggcctgattcaaactcccaggtacgtccctggcaccagggagtaggataagaaaacctccagaagtgaaactgatgaggaagtgacatttaatcacttcaaaaccgaaacttcactggcaagggtcaaaaccccaggccaaggctgacaatcgagcgctggtcagttccaggggtcaggctcggaacctgaaaatgcagatcctagctgttgctgcgtccctcaggtgtggaggaaggaaaaacagcctaggtgtatgtgctggctgtggtgagagtcgaggtagaaagcctggaagttctgaaacgtgaggggatggatcacacgccccagccttttctcactcaccaaagcaaacttttacccccttcttccagtcggcacctttggaacttgttctccctcctaggcctggtttcagtggcccccaccacgctcaaatgggcctgattcaaactcccaggtacgtccctggcaccagggagtaggataagaaaacctccagaagtgaaactgatgaggaagtgacatttaatcacttcaaaaccga

SEQ ID NO: 9997 - DNA, 524 bp, Homo sapiens
gatattgacaccaaatggagtggcttctcagcctcataatgtcttaagtaagtgcttaatttggaatagagaaaccagtatattttaaaaaagaaaaatattctttgtagcaactgtaaattctcccattataacagtgaacagagctccaggtaataacgcataggcatgtcaggttgcatctgtatatttgactacattagtattagtgacatcaggtggatataaaagaaaacccttggaaagagaactgccttagccatgatttcgttagtagacctatttatgattcaattgcaattttcagataggatgtgaacatggaatttcattgaaaatagtttaattttttatataaaaggttttgtatataatgtgtgtcagtgactattttcaaaatcattttcatcaagacaccttttttctaaaataggcattgcatacacatatgcacacgtatgtgcacgtgccacacattttttgtataatgttgggtttgattataaaagtgttgtcaaatgttt

SEQ ID NO: 9998 - DNA, 444 bp, Homo sapiens
  misc_feature (1)...(444): n = a,t,c or g
gccaggatctccggtgactggagccgtcggacaaaatggcgctcgcataggcttccgaggccaggcccagtcgtgcgctctgaggcaggccgggacaaaggcggcgtgcggggaggcggcgtggcccgngntggggctggtgttgtcgcttcccttcgtgctgcagctgtgcgagtcctgaagatacattcagcgtggttttggttatgaacaggattcggattcacgtcttgccaaccaatcgggggaggatcactccagtgcccaggtctcaggaacctctgtcttgtgcattcactcatcgtccatgctctcaccctcgtctggaggggcaggagttttgcattaagcatatccttgaagacaagaatgcacccttcaagcagtgtagttatatatcgacgaaggaatggaaaaagatgtcccaatgctgccccaaaggca

SEQ ID NO: 9999 - DNA, 664 bp, Homo sapiens
tttattagtcacttgtgactgtttaaagttaattgatccacagacacaagttacaaggctcacgtttccattaccttgtgtagttttgtatgctacacaccaggaaaataagcgcctttttggatttgttcttcggacatcaagcgggagaagtgaaagtaatctgtcatcagtctgctatatatttgagtcaaacaatgagggggaaaagatatgtgattctgttggactggcaaaacagatagctttgcatgctgaactggatcgtagggcatcagaaaaacaaaaagaaatagagagagtaaaagagaagcaacagaaagaactcaataaacaaaaacagattgaaaaggacttggaagaacaaagtcggttgatagctgcttccagtagaccaaaccaagccagtagtgaggggcagtttgttgtccttagcagtagccagtcagaagagagtgatttgggagaaggaggaaagaagagagaatcagaagcataagcttatacttttggtagatattcccccttggaatttgacagtttctatggtgaaatggcagaaggtaacaactatgttgaaatatcaaggaggagattaagctttatatttgcttatttgttgtagctacattttaaaaaaaagattgaacttgatgaaaaaaaa

SEQ ID NO: 10000 - DNA, 1052 bp, Homo sapiens
tctggggaaaatggctgcgtcttcgagtggtgagaaggagaaggagcggctgggaggcggttttggagtggcgggtggtaacagcacacgagagcggctgctgtctgcgcttgaggacttggaggtcctgtctagggaacttatagaaatgctggcaatttcaagaaaccaaaagttgttacaggctggagaggaaaaccaggtcctggagttgttaattcaccgagatggggaatttcaagaactaatgaaattggcacttaatcagggaaaaattcatcatgaaatgcaagttttagaaaaagaagtagagaagagagacagtgatattcagcagctacaaaaacagctaaaggaagcagaacaaatactggcaacagctgtttaccaagcgaaggagaaactcaagtcaatagaaaaagcaagaaaaggtgctatctcctctgaagaaataattaagtatgcacataggatcagtgcaagtaatgctgtatgtgctccactgaccctggggttccaggggacccccgggaggaccctacccaactgatttagagatgagaagtgggttactgggtcagatgaacaatccttccactaatggcgtgaatggccatttaccagggagatgcacttgcagcaggaagattgccagatgtccttgctccacagtatccatggcagtcaaatgacatgtcgatgaatatgttaccaccaaatcatagtagtgactttttgttggaacctcctgggcataataaagaaaatgaagatgatgtagagattatgtcaacggactcctcaagcagtagtagtgagtctgattgaaaaaccttaaaagacaatatacagaattgaatactgtagaattctgtttctttaacagtagcagggaaatgtaaactacaggtgacaaaaaatacccaggtaaacactggctttggtagaattgtgcagtcattaaaagtcaaaattttttgactttctttttaaagccaaagaccatagttttagttttaagccactaggtagatatttaggggaatagtcaa

SEQ ID NO: 10001 - DNA, 482 bp, Homo sapiens
ctgtactttctttaaaaaaaaaaaaaaaacttgtctgagatttgaaggaaaatgtgcttatttggaatttccataaaaagagtatcctttttatacacttaatagtgactttacaaaataaaagttatattctcagttgtttaaaatcactaacctatgataaccacacctcaatttgaaagtagatttaaaattattccctgacaggttatttaatatggagccataaggagggaacccagtacacaattattttttatttgggaatcagggaatagttcccaaatatacaggatttattgataagattttttttcttcccttcatatatccattcaaactcaatggaaagttattaaataaccattagaaaagctcagtagacttatttgagaaattaagccttgtgcaggatgatggatttgacttactaatgtactgtcacagacaaatatgggtagttttgtttaaataggtaagca

SEQ ID NO: 10002 - DNA, 272 bp, Homo sapiens
agattttatcctgttgttaaagaaccaaaagccattgatgtaaagagtccaagaaagagaaaaacaaggcatagcacaaatccccctctagagtgtcatgttggttgggtaatggattccagagaccatgggccaggaacatcctctgtcagcacttcaaatgcttcaccttcagaaggcgcaccactagcaggaagttatggatgtactcctcattacattcccaaagttccagaatccttctcatgaacttttgaaggaaaatggcttta

SEQ ID NO: 10003 - DNA, 562 bp, Homo sapiens
  misc_feature (1)...(562): n = a,t,c or g
attttagtgatatttaaatcactatcctagctggcattaagcatggctgaacaacacttgccttgattaggcacttaaacttgacaattaactgaaaataattaagcacataagatgactccattttctaatggagatgagcccttcctaaggaaattaagctggtgctaagtaaaatgaatcctatttcaacactagtttcccattcatcgttgttattcagatgtttcttatgattgccaactaattttcactttctgtacaagcagcaaattagttggcaatcataagaaacatctgaataacaacgatgaatgggaaactagtgttgaaataggattcattttacttagcaccagcttaatttccttaggaagggctcatctccattagaaaatggagtcatcttatgtgcttaattattttcagttaattgtcaagtttaagtgcctaatcaaggcaagtgttgtttcagcctatgcttaatgcaagctaggatagtgattttaaataatccactaaatccgncttagnattttaaaaataaattcacttaaaaatg

SEQ ID NO: 10004 - DNA, 363 bp, Homo sapiens
tttacattatatatacatctcaccatgtacttagaaaatctggtgcagtgagttagcattcttgtgctaacaaaaacttttagcttgcacccaagcctacttgagatggcatatttttgccgtggttcttgtgctgataggctcattccctatgctgaaggatgttaaatgtgttatgcattattcctgtcatcttctccataatatgagcgggacaattcaagcaactcatcaggtggtaagtaaatatttccaaaaaacttcttgtttttatattttatttaaaaatgtatatgcatttgttatttatattgaaaacattccattgttccttgcagtataaataacaaatgcatatacatt

SEQ ID NO: 10005 - DNA, 395 bp, Homo sapiens
  misc_feature (1)...(395): n = a,t,c or g
gcagtcctcaccagtccattcagtcattctacagcaagatggtccctctgtggtgagtgggatataaggcagtgcatctttcatgatcacaaagaaagcctatgttgtggatagcattgcgtctcttgatgtaggcattgttatggcaaataatagcactgtggccacatctgtaaggccattccagcctaaatttagtgtctcccataatcccaacccatgcactaggctgggtgttctctcagaatatagaggcaatgaatcagcttaagaccctgggacacacaaaggaaaaggaagaagaatatttagaagttgttatggaatcctgtgtcccctaaagtgtggtaaccatgttacccattccagctgggttaaagtngggggagggatct

SEQ ID NO: 10006 - DNA, 245 bp, Homo sapiens
gtaaaaagtgttctgtagtgaggttacatatcaggaacatatgagttgagcagagtaatttggtagtgtaagtcgatgcaaaaatacttctatggtacctattacaagctgaccaagataaaaagaagtatgtaacccactgtgctgtcaagcatcatgattccgggcagttttcattttactgtggattttgctatacttatgcacggggacctttaccaccttaaaccttccctgggcttgta

SEQ ID NO: 10007 - DNA, 381 bp, Homo sapiens
  misc_feature (1)...(381): n = a,t,c or g
ttttgcaaatataacaataatagtaataacacaattttgtcatttaaaaaattacccattcatttttcaaacttgactgttagtggaggggtatatgtgtgtctgtgtttccacttatgtaatggctgtctcattatttaaattaatttataattatttttcagtgtacagagtgattagcggcttgtaatgctgttacaatgtaggcattgtaatgtaaggatgaaggaaaaattagggatttaggtggggatttttaaaaatttatccaattcagctactttttaaaggaagtcctattcccaattgggaccnttaaaaatttttattttggggnaatatttccacnttagggtgtttttaaaactggccattcngtgg

SEQ ID NO: 10008 - DNA, 789 bp, Homo sapiens
attcaaacccattttcatatacaaagctaatttattatgtacaaaataaatggacattcttaaaaagtattagaatacaaatttccaagggcctaaaataagtgcaaaattttcaattatctttaatcatgctatacagaaacaaatcaagtattagctcatatacacacaatgaattttttaaaaatagcacttaatgtaataaaacaaaacatacatcttatatatttaattttaaaaggatgaggaaggaaagaatgtattgcaccaaactaacagtaacttaactacaatgagaataatcaaaattatttatacatctttattaaaaattgctcagctttaaaatgtttttggggggcatacaaatatccactgagtcacagtttgcacagtcaataattagatataaataaggcataatattttctttttcatggtcaattccagtagaataagtgagaaggaacattttaagataaatacacaactttctgaattccttcaatatttaagtagcagcacaatttccaagtactttcaaaaaacaagtcattctgaatttttaggttattacgctctgaattgactatgtggcatatacatgcattaaggtcactggtcactctctataacactggaaatgctattggagtcccagaaaaactgacaaaagagatgaattaaatatgtttcatatttttatgcctcagtagattcatttttatagcaatgaatctgagagaaatggctatctagccagatatgattactttttgctatattttt

SEQ ID NO: 10009 - DNA, 1030 bp, Homo sapiens
  misc_feature (1)...(1030): n = a,t,c or g
caggaactccaatgtatcttgtgatttttccagaaggtacaaggtataatccagagcaaacaaaagtcctttcagctagtcaggcatttgctgcccaacgtggccttgcagtattaaaacatgtgctaacaccacgaataaaggcaactcacgttgcttttgattgcatgaagaattatttagatgcaatttatgatgttacggtggtttatgaagggaaagacgatggagggcagcgaagagagtcaccgaccattgacggaatttctctgcaaagaaatgtccaaaaattcatattcacattgatcgtatcgacaaaaaagatgtcccagaagaacnaagaacatatgagaagatggctgcatgaacgtttcgaaatcaaagataagatgcttatagaattttatgagtcaccagatccagaaagaagaaaaagatttcctgggaaaagtgttaattccaaattaagtatcaagaagactttaccatcaatgttgatcttaagtggtttgactgcaggcatgcttatgaccgatgctggaaggaagctgtatgtgaacacctggatatatggaaccctacttggctgcctgtgggttactattaaagcatagacaagtagctgtctccagacagtgggatgtgctacattgtctatttttggcggctgcacatgacatcaaattgtttcctgaatttattaaggagtgtaaataaagccttgttgattgaagattggataatagaatttgtgacgaaagctgatatgcaatggtcttgggcaaacatacctggttgtacaactttagcatcggggctgctggaagggtaaaagctaaatgggagtttctcctgctctgtccatttcctatgaactaatgacaacttggagaaggctgggaggattgtgctattttgccaagtcagatggctgcatttttgagccattaatttgccagcgtatttcacttttnctggtaatttccaatttaattacaacttgacagctcccaanctcttaataccaaag

SEQ ID NO: 10010 - DNA, 1828 bp, Homo sapiens
tgcactatggcctaccccactgtgccttgccctctccatgtatttgagccaagatacagattgatgattcgaagaagtatacagactggaaccaaacagtttggcatgtgtgtcagtgatacacaaaatagttttgcagattatggttgtatgttacaaattagaaacgtgcatttcttaccggacggaaggtctgtggttgatacagttggaggaaagcggtttatgggttttaaaaagaggaatgaaagatggatattgcactgcccgacattgaatatctggaagatgttaagggttgagaatgaagatgagattaagaatctcagagagcttcatgatttggtttactctcaagcctgcagctggtttcagaatttaagagacagatttcgaagccaaattcttcagcatttcggatcaatgcgcgagaggaggaaaaccttcaggcagcccctaatggacctgcatggtgttggtggcttcttgcagttctccctgtagacccacgataccagctgtcggttttgtcaatgaagtctttgaaagaacggttgaccaagatacagcatatactgacctatttttctagagaccaatctaagtaactaactctttggatctccctttaaagtgaccctaatctggctgcattgatggccagattgtctgctgcctttgcacatctagtgctggtttcagaaatttaatgaaacttttctttttccttcgacctcctgaatcatgtggttctgcaaatgaataccttcaactagggatttaggaccactaagaacttgcacagaaaaacacgcattgaatgtgtgtcgaacctctacattgtgaagttgcactatgtaccatactctaaaatgaaataagaactctttatgtctgtgagagagtgtgtgtgtgtgtgtgcgtgcgtgtgtgcttgtgggggttgggtagtgtgtgtgtattttctctggctttaaaattttaaaacaaacaaacaaaaaagccatagagagcagaacttgccgagggtcatttattgcccaagtttacaagagtagcgatacaagtttttgcaaattgaatttgcctcagatatatctgtcctaatgcttatatttgcacaagtatgtaaaatatcgtgttgaggatcattctttgttggaaatactgctcttgctgaactgtcttgaccattgactatgacacagtttcttatttatgtaaatacttgcatcacagtggccgacacgattggatgcagaacctagagccagttttcaggaacaattgtaaacctgacatggtactgtgcatctattcataaaacactcaaaactgtgaaaatatggtttacatttaattgtacataaaggtaaagggagaactcaattcagtaccagttagtttgtacattttagggggcttttcacattaactgcccatttgtgtaatttatagtttgacatgatgtgtttgttttaaaaaaaaatgcatagtataaacccattaaggatctgggaaaagagaagaagtttaatatagaactaagcttttaaagtttgtttttgtttttaattctggtctcggtgcaaatgttagttatgccttattcatatcacagttagatcaccatgctgcaacatggtttatattcatgctgccctagaaacttttgtaattatttgttgcaaatttgtgactgtccttattaactttcttttatgtaagtaatttgtaaaagtttcttaaaatttttgcttttgcttatttaattttgaataaaagctaaattcctaatactttttcttaaaaaaaaaaaaaaaaaaaa

SEQ ID NO: 10011 - DNA, 357 bp, Homo sapiens
gatgttcctttcctttgagtatatggagggcacctctcgaatgagggtcttatgacctgcttcaagggagaagggcaaggggaaggtgagagttggctttcctgctcctgctgttttctcaaatgccaaggtaccatattttggggtggtgtttcttgagccccatcaacatctatacaactgtcacagtaattaataattattgtcatttatggtttttgatatatcatttgtataaatgagaagaaagtgaaataccaaaataccaaccaaaattgtctttctcatagtcctccactttcctaaatcccatgttcactctatgtcctgtctttcatttcaaatggtttcctagta

SEQ ID NO: 10012 - DNA, 224 bp, Homo sapiens
ctccctggggatctggaggaacatcatacatagtaggtgaatcgttttgtagagtgaagaatgctaatgtaaagcaaatagtcacccacgttccttgtaaatccaaatgtttctatatttgtagctttgctttaaaatgggggtcggccccaacttgcatcctcctctttggcgggctggggagcggcccccagccgggacgggagggcagcgaccccgaggct

SEQ ID NO: 10013 - DNA, 617 bp, Homo sapiens
gggaaatattcttactgtgagggagaaaaatcagaagataaactataaagaaagactttatttgcaaatatacccatttactttaaactgtataatggttagttttctaacatgtgcattaaaaacaaaacaagaaacaactaagattcaaatttgttttttttttaactaaaattattttttaaatgaatagatgtgtttaaaaaataagcttacttattgctagactggcaaaatcccctactccatttactgaggtacttaaaaataactagcatgctgtatctctttttttcccagctttgtcttgaattggcattgccatccttgttttatctcaactggctgtagcttttagataatatcataaggattaaccagtaacctcttaacattcattactgttttctagggggaaaatatttggtatttggtttttctgttgcagcaaataaaacctcaggtgtaccaggaaatcgtcctggaagtgtaatccgtgtatatggtgatgaaaacagtgataaagtgactccagggacatttataccctattgttcaatgggcacatgcacagctttgcttccatgggcacccgggatgctgtgaaattctttgtg

SEQ ID NO: 10014 - DNA, 346 bp, Homo sapiens
caggattcgtgtatttaactattattatttggcctcacatcaccagactgatgcttatagccttcttttcagtggcatgctattttgccgtttgacacctcctttatgtcttaatttcttgggtttgacccatatggattcatctatctctcacaagaatactcaaccaactgcttatacatctattatgggttccatgaaagttttatcctttattgcagatggattctatatatattatcctatgttggtggtaattctctgcattgctacttattttagtttgggaacccgttgtttgaatctgctcggtttccagcagtttatgggagatgatgatatgaca

SEQ ID NO: 10015 - DNA, 416 bp, Homo sapiens
cagagaaggacaaaagaagaagatccaataattccctttagtgatggacccatcatctcaaaatggggtgccgatttccagatcttcccgtacaggttaccataccacagatcctgtccaggccactgcttcccaaggaagtgcgactaagcccatcagtgtatcagattatgtcccttatgtcaatgctgttgattcaaggtggagttcatatggcaacgaggccacatcatcagcacactatgttgaaagggacagattcattgttactgatttatctggtcatagaaagcattccagtactggggaccttttgagccttgaacttcagcaggccaagagcaactcattacttcttcagagagaggccaatgctttggccatgcaacagaagtggaattccctggatgaaggcc

SEQ ID NO: 10016 - DNA, 820 bp, Homo sapiens
  misc_feature (1)...(820): n = a,t,c or g
cagtatccaaccatcctctccattctcctctggacctcaccactctcagagctgcttgtcctggcagaatctacaattcaccccaactctatgccttacccctcccaacccaacagcatttgcagtttgcaaaatatacagacccaagtcctgaggggactgaggacatgatgctgggcccaagtctcctgctcagggcttctctccaatgccagccctgccactccttcctcaccctccttggagcctcctctgctgcttgtctatcccaacggccctgctcccctcccttcctgcccttcaccagctttctgggacaccatgccctgaggaagggacctttggttttctctaaacatctttgaagggctgaggcagtcagggctggctgccttgtcactctttatttggaagccactcaaaccattcccaagaagagggacctcagctggcaatctggaaacctggcccaggtctgggcagatgtcttcacttctcctaccttcccagtcttgtgatcctgtgatgagcaccaggatggccctgtggtccctagagcacccctcatgctgtagggtcctgcagccccatcctttctctactgggccctggtatcctggctcctctctcagctctgccactgatctctgtgccttagtttacttctctgcacgggggactcaccccaagaccatttccagcagctttcccaggtgatgttggttgccccaaggttggggctttgcagcttgtggcccagctccttagtgctgcccaggagacaccaggcttgctcagaatgaggtgactngcgggcaac

SEQ ID NO: 10017 - DNA, 277 bp, Homo sapiens
  misc_feature (1)...(277): n = a,t,c or g
tcgctagtccacgttgactcaaagagcagagttggttgccgtcattacagtgttaacaagattttaatcagtctattaacattgtatcagattctgcatatgtagtacaggctacaaaggatattgagagagccctaatcaaatacattatggatgatcagttaaacccgcgtgtttaatttgttacaacaaaatgtaagaaaaaganattcccattttatattctcatntncgagcacacactaatttccnagggctttnacctaagnaaatnaac

SEQ ID NO: 10018 - DNA, 222 bp, Homo sapiens
  misc_feature (1)...(222): n = a,t,c or g
ggtgcagctgctgcccttcctcgtccgctatgccaagaccctctacgaggaggccgaggaggccaatgacctttcccagcaggtggccaacctggccatctcccccaccaccccagggcccacctggccaggagacgctctccggctcctcctgcctggacctgaccgttgaagatgggnccnngggnggannatccttngattaaanggnaagggggcccc

SEQ ID NO: 10019 - DNA, 312 bp, Homo sapiens
ctgacccaagagcaccataacatagctccgaaagggagagcagagatggcagctgaaactcactctgtgctgggctttggtatggtaactctttggtggttttatgatgcttacaaacttgagctttagctccttgtttgggagaacacgtaactgttgaaaaactacctgggaggagtgagttcctccagttaaatgtggctgtagatgttggaggctaaggaggctagtaaatatcaaaaggaaaagggagtgggaattgctatcatgtaaaatatcaaagttaaaatactaaggtgcattttccctgaa

SEQ ID NO: 10020 - DNA, 527 bp, Homo sapiens
gtgctgctggcctggggttgtggttgaggccgggtctccgctcctgtgcccgggaagatggtgctaggtggttgcccggttagttacttacttctgtgcggccaggcggctttgctgctggggaatttacttctgctgcattgtgtgtctcggagccactcgcaaaatgcgaccgctgagcctgagctcacatccgctggcgccgcccagccggagggccccgggggtgctgcgagctgggaatatggcgacccccactctccggtcatcctctgctcttacctacctgatgaatttatagaatgtgaagacccagtggatcatgttggaaatggcaactgcatcccagggaacttggttatggttgtctcaagttcggcggtcaggcctacagcgacgtggaacacacttcagtccagtgccatgccttagatggaattgagtgtgccagtcctaggacctttctacgagaaaataaaccttgtataaagtataaccggacactacttcataaccacttttactct

SEQ ID NO: 10021 - DNA, 1465 bp, Homo sapiens
tccaacgcagagtttgtgatccacagtggttttttctttgacaataactcacacgacagagtgaaaataaagcttggagtgagtaaaagtgacagactctacgccatgaaggccgaggtcttggctcgtgccggcatccccacttccagtgtttttgcattgcattttaccgagccgcccatctctgctcagcttttggcttttctccgagtattctgtatgactgaagaagaactgaaagaacacttgctgggagacagcgctattgatagaatcttcaccttggggaactcggaatttcctgttagctgggacaacgaggtcaaactttggacatttcttgaagatagagcctcacttcttttaaaaacatataaaacaactattgaggaagataaatccgtcttgaaaaaccaccgatctttctgttccgtgcaaaaatggccatcaaattgcgcttaggtgagaaagagattttggaaaaagcagtaaagagtgcagctgtcaaccgggaatactatcgccaacagatggaggaaaaggctccgcttcccaaatatgaagagagtaaccttgggctgttggagagcagcgtgggggactcgaggctccccctggtcttgagaaacctcgaggaggaggctggagtgcaggatgccttgaacatcagagaggcaatcagcaaagcaaaggccacagaaaacgggcttgtaaacggtgaaaactctatccctaatgggaccaggtccgaaaatgaaagtctcaatcaagaaagtaaaagagcagttgaagacgccaaaggatcttcttcagacagcactgctggagttaaggagtagctcgaggtgaagctggatgggggatccagtggagcaggagttgacggacagtccgttcacatcgctgtgtttccttgttaacatttttctttctgcagagaggaagatatgtttttgctgctttatataaaaatggtttttttaagttattttaaaaatctagcttccctttttgattaagattgccatcttgcttttaggcaaaacaaaccaattaacaaacaaccacaagaaagggagaagaggtgcctgtgggagattttgcagacctattgtgggtataggtattttccttcctggggaagaattcagttcccgtctcagctgtacttttgtgggcctgtcatcttgatgaccagaatgaaagcttgctctgcctcctgccagccagaattggtggcgggacttggggatacagcgtgaaggtggggaagttgcacagcagaaaacagaattgaagttgggaaactctagagtctgggcaaaatgtttggttttttctcttaaaaaaaataacaccccattaccaaaagaaaaggtaaggtggcaaccttatttttaatagtttgaaatgatgataatcctaattatataaaaatatatatataaacacacatatatatagt

SEQ ID NO: 10022 - DNA, 219 bp, Homo sapiens
gtataatttgtgatccttcttgtacaagtgttgaaatgagtgctgtaaaatcaaccaaatgttttgaagttttggtgaatatattctgatgtaacttgctttcagttacctacagttcagatcttaggaacttttcagaaaatttttaatggggaattgaggagaaaaatgtctgcaaaattggcactgaaacagtgtttttaattttgcatagttgac

SEQ ID NO: 10023 - DNA, 385 bp, Homo sapiens
  misc_feature (1)...(385): n = a,t,c or g
gaggagatgtatttattccacatttggggccagagatggtatcagaaggaatttgcccaggaaatgacctttaatatcagtagcagcagccgagatcccgaggtgtgcttggacctacgtccgggtaccaactacaatgtcagtctccgggctctgtcttcggaacttcctgtggtcatctccctgacaacccagataacagagcctcccctcccggaagtagaattttttacggtgcacagaggacctctaccacgcctcagactgaggaaagccaaggagaaaaatggaccaatcagttcatatcaggtgttagtgcttcccctggccctccaaagcacattttcttgtgattctgaaggcgcttcgncgaanttattttttt

SEQ ID NO: 10024 - DNA, 229 bp, Homo sapiens
ttttttttttgaggctcacaaagaggcctttatttatctagctcaaagtagacactatcacaatcttgtttgttactccttttactaaaatagttcaaatcaatgtttttaccacactatcaaaaagttctatttcttcttgtctccccacgtcagagtggttgaatagaaggtagaaacaggccgggagtccacgggctcccagctctaaacggcgccagggcaggaa

SEQ ID NO: 10025 - DNA, 715 bp, Homo sapiens
aggatgaagcttgcaacggcgcgcgaatctccctcccagctcccttcggcttctcgctcaggtggctcttgcaacagtcgtcccaggaacttgaggtccaccttccagaagtccatctcgttcttgaagcagatgggcagatgcccttcttcatgtggacctccccgaaatagtacacctcgatgacacacttgaaggcgtccgggtccctgtcaaagtagaactcgcgcttgccggggtcgtagtcgtcgcacagggagaagatggtgtcgtagcccccagccaagcagttgaatgagtccgccagccgggtctcagggtactgactgaggaggtccccgtacagcacctttttagtatgtatgagcaaaatactgttgaatttcacactcaactaatcctttaataattttctttcagccagaatgaaaaaggctagtattaatttcctaataaaattttttttcaaaagttatcgaggatatgactataaccttggaccagtttcaatttctttttattttttctgagaatacaccaaagattaatgtcaatggcaagtgagaaattgtccctagagaactattcaaggactttttcttactacatttgattggactggagtgaactgacattatagcatctttatcatcacctttaaaattctattttctcttagtagcaacagtgaagactttagaactattacttactt

SEQ ID NO: 10026 - DNA, 85 bp, Homo sapiens
agatgcacgggcgaatcaccaagctggagttacagatgaaccagaacatcaaggaaatgaaagcagaagttaatgctgggtttac

SEQ ID NO: 10027 - DNA, 383 bp, Homo sapiens
cttgaagttttgacatagagacatttactctggagatagataggagaactcctggttgtaaaatatgtttttcagatgaggcatataaaaactaaaatggcaggattattgtatagtgtttggaatatgctttgataagttatgatttatatttctcaaggttaaaattctgagtaaaatggtctttgattaataaacttagtttaatctgaatatgtaaatgaatacattttaaagacaaaacttgaaaaatgtattcttgaatagtgaataatttgatcaatgttactgaaatgctgtctcaacttttgttttatgataaaggaagtgtgtgatttccctccctctgagaaatatactgcgcttaatatttgctgtctttt

SEQ ID NO: 10028 - DNA, 386 bp, Homo sapiens
tatcataggagacaaccctaacagcagtgactatccggcaccaagagccgtcctcacaggccatgaccatgaagttgtctgtgtttctgtctgtgcagaacttgggcttgttatcagtggtgctaaagagggcccttgccttgtccacaccatcactggagatttgctgagagcccttgaaggaccagaaaactgcttattcccacgcttgatatctgtctccagcgaaggccactgtatcatatactatgaacgagggcgattcagtaatttcagcattaatgggaaacttttggctcaaatggagatcaatgattcaacacgggccattccctgagcagtgacggcagaactggtcaccggaggacaatggggtagtgaggtct

SEQ ID NO: 10029 - DNA, 672 bp, Homo sapiens
gatttacaccaaatccactggtcaaagaaatgaataaagggaaaaggaaaaatgtggaaggcatgcagggaaaaaaaaaaaaaaaaaaagcccttttctgtaaaaatgtccatgcctacacttgctttagaccatcccatatcctcctgcctccatctcgagtctttgttcacattccacaccacaagacagtgagggaggactgtacttttcagtaccatacagaagggagagcctgttctaaagctgacgtgggtctcaatagtacatgagaagcacaattcccaaatgatctgggatctcctgtttataaatatattaccaaattcaagtgtgggttcttcttctatttccactgtaagattgagggtgttgaaaaaacagtagtccttgagcaaatctgtgagggaatcttgttcagattgtggatctttcctggggactagtttagttgtgagaactacatctgcttgttctgggaataagggtctccccaggtcctgccctcaggtggccctggctgcaggacaggatttcaggtatcagaaactggtgtgtgagccaagcaaatagttatccatttataaaaaggatggtttgcagtgtgttataataattttatatctagcagggacaatgaaaaaaaatgggtttaatggtcctacatttaat

SEQ ID NO: 10030 - DNA, 413 bp, Homo sapiens
cgggacttcagggtctccgcgggacgttaggaggctcaggatctgagttggagagccggaagcaaactccgagccgctgagggactgcgcaggaagaccacagaaataaaccaaagggacaccgcggacagatgtaccagaggacaccactggagtccaggagaatctccaccaaaaccatcagcgttttccttgtagctttctgtccctcgaagtggaaagttgaggtttctgagaagtccacggagagaacctgcagcaaactgaagccacagactccgaaggcatagggagaaaaaatgcttccatccccctttcactttaaacttgatcgcttctgggacttcactggagggcggtggagttgcaccaacctggattaccagggccaggaatccccaagccgaggcact

SEQ ID NO: 10031 - DNA, 1889 bp, Homo sapiens
ttctctttatctttttcttttttactttaaaaatggttttattgaatattaatcatttacaagtacagtgagctagacattaagccaaagcacaattgcaggttaaatataatcacaaagatgtcttaaatagaaacccaccaggcaggcaggttaagttccttgatgccctcctttggaaagaagtggagggtgagggaaaaaggacttccatttcaggtgacgagatgatgactagaggactttaacatgctgtaggtgatttcccatgaccacagctgtaggattgccagatttagaaaaaccaaacaatgagaaaaaccagcatgctcagttaaatttgaatttcagacaaataatgaatgcttttactgtaaatatatgccaaatattgcatgaaacattcttaacgtgaaattgtttctctgaaattcaaacttaactgggcatcttgtacttgatctgacaatcctacaaatagataaatacaaaaaagaaaggagagggggttgtaacccctgccactgttgggtcacacagagactaaaaataaaaacaacacgaataatgaaccaaagagtcactacactggttgctcacacagaccaacatcacaatgagaaaacacaattactactccgagtgctgttgccccggcaacataacattttctcaaagctggttttgtaaatgttttgagaaaccttgataaaagtacctttttagtttgtaggtatcaaagacaaacattactactacaaagataagatgagcttgaaacaatgggagcagaagcaggtgttatatgcacatgaagagtttcagtgttttgtgtcacggagacaatgtttacatactcaaggtcatcttctaggtctaggctatcggcctcaaagatctgtgttctttcctaactttgaatgggttttctagcctttcatcctgaactttgggaggggtgcgcgggtgtgtgagggacaccccactaccagggttcaactgcatttctctgcaaacactctgaatcaacacaagggctttcagggctgcctgcaggaaatgggtagactgatgtaaaagaaatcacagaacaatctgaattctggaacgtgaaagaaacctctttgaaaggatgggaggtagggcaggtgccgaagacgtgaagtgtaaagcaaaaaagaatgtgaaaggaggaaaagccgaaatgcaatctacagtgcgaatgttatttcagaggaggcagaactctctggcaatgtataaaactcgtcatactacgaccatatttggtcgtgcaaagtatataaaatcattagcttcctctaggttttcactttagcataaccataatttacattttaaaacaattaaaaaacacagcttgcatatcactcatattctacaaggtatcacagttgctgtcgtatccccacatacacaactgaataggctttgaaatctttccagcacttctccaaaccagaaatctggtagctgaggaagttccaatatggagaaattgaaatggattaattttaatcagctccattgcatgtaagggaatattacttatgaaatataccatcataaaataagatgaacaggtctgaaacacatggagacatggccgactcactgacacacctttcaaacactaagaaatgggactacaatgttttatttattaaaatataaaaggttaaaaagtttccgccatagttaaggctttctagaggggaaaaatttaatttattaatggcagagtgcacaagttgctgaagaagcctcatgttctagaatagtagttttcgagtgcatttgctttccatatgctagatgtgtacaatagctcaaacatcactttcacaattactttcttttcacttctg

SEQ ID NO: 10032 - DNA, 897 bp, Homo sapiens
gcggcacgaggtagtacaccgcttgttaatggcagccatttcaaaagataagaaaatggaaattaagggaaatctgttcagcaacaaagatcttgaggaattatgcagacatatcaacaacagaaaccaagcagcacagcattctcagaagcagtctactgagctcttccagtgcatgtacttcaaagacaaagaccctgccaccgaggagcgttgcatatctgacggagttatttattcaattataacaaatggtgtgcttctatttataccaaggtttgggattaaaggtgctgcttatctaaaaaataaagatggtttagtcatctcatgtggcccagatagctgttctgaatggaaaccaggatcccttcaacgatttcaaaacaaaattacctctactacaacagatggggaatctgttacgttccatttgtttgaccatgtaaccgtaagaatatccatacaggcctcacgttgccattctgatacaatcagacttgaaataattagtaacaaaccatacaagataccaaatacagaacttattcatcagagttcccccttgctgaagagtgagttagtgaaagaagtaactaaatctgtggaagaagctcagcttgcccaagaagtcaaagtaaacatcattcaggaggaatatcaagaatatcgccaaacaaagggaaggagcctatacacacttctagaggagatacgggacctagctctcctggatgtttcaaacaattatggaatatgagaggctcttacttcactaagagctgtcatatgtgaatgttttacagtcttttcaaacttaacatttaatgtgtgtcactcagtgctctagtcgatcaggactgggtagctatttcgcatatatgtaaaatgttctca

SEQ ID NO: 10033 - DNA, 797 bp, Homo sapiens
aagggtcttctgagctgcagtggcaattagaccagaagatccccgctcctgtctctaaagaggggaaagggcaaggatggtggaggctttctgtgctacctggaagctgaccaacagtcagaactttgatgagtacatgaaggctctaggcgtgggctttgccactaggcaggtgggaaatgtgaccaaaccaacggtaattatcagtcaagaaggagacaaagtggtcatcaggactctcagcacattcaagaacacggagattagttcccagctgggagaagagtttgatgaaaccactgcagatgatagaaactgtaagtctgttgttagcctggatggagacaaacttgttcacatacagaaatgggatggcaaagaaacaaattttgtaagagaaattaaggatggcaaaatggttatgacccttacttttggtgatgtggttgctgttcgccactatgagaaggcataaaaatgttcctggtcggggcttggaagagctcttcagtttttctgtttcctcaagtctcagtgctatcctattacaacatggctgatcattaattagaaggttatccttggtgtggaggtggaaaatggtgatttaaaaacttgttactccaagcaacttgcccaattttaatctgaaaatttatcatgttttataatttgaattaaagttttgtccccccccccttttttttataaacaagtgaatacattttataatttcttttggaatgtaaatcaaatttgaataaaaatcttacacgtgaaaaaaaaaaaaaaaaaaa

SEQ ID NO: 10034 - DNA, 378 bp, Homo sapiens
gggtgtcttgcagtggtcatcaggactggggagaatgacttaacctccgcttccttatctgcaaagtgcgaacgccagtaccacctaccttatagggttttggcaaagacgactcgagagggtatctcctctgagggtgatgctgacccagatggcgggctcgacctggaggaattttcccgctatctgcaggagcgggaacagcgtctgctgctcatgtttcacagtcttgaccggaaccaggatggtcacattgatgtctctgagatccaacagagtttccgagctctgggcatttccatctcgctggagcaggctgagaaaattttgcacagcatggaccgaaccgggcaccaattggacccatttgacttgggc

SEQ ID NO: 10035 - DNA, 660 bp, Homo sapiens
attcagacctagatagatttgcatttggataacaaatccctacctatagccatgtggaagcagcttgtcactgtattttaactgtgtaacaattattgaaggcgaaaatagaagttgggtcatctttgaacacctaccttttatcaatgaatatttttagactgttcttcagtatctgagtcagagtttattgtaatttgttatttacaccaaggtggcatcttagtctaccttcagtgagacttgcgtttcaggggaggggcgtatgtgcatcctcggtctcagttatgtaaacggtctgatctgtaaaatagtggtagcacatgccatgtgggatagttggtggagatgatagatggagttaagcacagggcccagcctgtcagcagtagctactattattgttgcccatttcccctgcaactgaggtgagaggttttcctgagtttgaagctgactggcccacagttaaacgtaacagaccagtttttcagggtgtcagccaacctctattagtgttcttaagtacagtttctgttataaaagttcagattattccttgaaaatttggatctacctcccattattatgagtaatacatgcttatagtaaaaaaaaaaaaattgtaagaaataaatattaagaagattaaaaaaaaaa

SEQ ID NO: 10036 - DNA, 270 bp, Homo sapiens
ctatactttactgaatactgaccaggtaccaagcatggccacatgtagtctctcacttactcctcacagcaaccttacgggataagaactgttattcttcccattaattaaatgagaaaaactgaggagtatgttttatgagtagccaaaggtcctccaaacagtaggaagaggggccaggctccagtgctcacagccctcaccactgctccacactgccgccttcttagggaaaggaaaaagtgccactgcatttaaaaaaaaaaaaaa

SEQ ID NO: 10037 - DNA, 1414 bp, Homo sapiens
tttgttttaatcagtgacatttattaacatgcttcaaaagtgaccaaagtgtccagccagcacaatagccgaggcaatcaacgttctcttagtgtgtgatctcctccaaaacaccaaataaataggtttaggaataacctcaaataaattgtaatttaacttcgcccaaaattatacatcctctactgctcttccctgctcctgtaaagatactagcgggaggggagaaagctcaaatgactctgtaatttagaattacaaccagagaagaaatacttcaagcacaataaagacgttccattgaagagcgacattcattctggaatgtttgttttgaaaacaactcttctgggggaattcaaaaggtactgaacaaagcaacataaagtaagttttgggttgttttgcaaaataaaaatatacaattgagtggaccagatggcaaaaacataccaattacaatctgaatgctatatttaaaacccttaaattctgaaggcctgaatatcaacaaacctatttatgtttatgatcctaaaaagacattaaatattattaaacccccaacttccaaaacatagagacccagcaaactgggctagtggtatctcagtacacagtcacacatgactagactagactagactagactagactagagatctgagtttgcaaccaagtacaagaggtctttaggagctcaggctaagggaggcactttattcaaatggcatggcctgagagaagagggaaagtaccttgtaatcttaaactatgtggtccatcatatattctacctcaaagacaatctagactacggtatctcctcttaaactgccagttcagaacaaaatatactttatttggaagctaaatatttgcttcactcaagtgaagaataatttagcagcgacagagaacacaactcctgttttaaccatgggaaagagaagagagagtggtaagtatctcgctggggaaatcaaaagatttctgggtctgtctgggtgtatcatattatgagcttgattcttcaaccgtcactccatttggtagtcagggagaaagtaagtgtagctgcaaggggaaatggaaagaactaccctgcccttctgcacccccagccaggcccactagctgcggtgctgtgcacaactccagttccaatgcttccctccacagtggaggcatatccagggctgaaccagatgcacgcccacagtgtgtttctggctcagagcctgtcaggaaattcatgtctgggaagaaactaagtgttctggtgatggctacagtcagtagatctaccagcaatttgtccctttttttgtttcagattttaaggcagaaactcaatctcagcagctaatttcatccaattttcttcagaaacattctccaatttagttgagcc

SEQ ID NO: 10038 - DNA, 556 bp, Homo sapiens
  misc_feature (1)...(556): n = a,t,c or g
tttctctccattctcatttttaaactgntacttaatnttcnttnntccntctttaaaaaaaaaaataggggcaacaaaaggggtcccacaagtggaacttgtagaaaatataatcctgaaatgaacagctaacacaaattgttatagattaaaagataaatcaatttataaaactgctattctgaaattgcaacaatctttatcagtcctgactgtacaagattgttgcaatttcagaatagcagttttataaattgatttatcttttaatctataacaatttgtgttagctgttcatttcaggattatattttctacaagttccacttgtgggactccttttgttgcccctattttttttaaagaaggaagaaagaaaaataagtagcagtttaaaaatgagaatggagagaaaagaaaaagaatgaaaaggaaaggcagtaaagagggaaaaaaaaggaaggatggaaggaatgaaggacggacgggaggaaggggngaaggtaggaaganagaaaggatgagaggggaagggaggaatcagagganttagggt

SEQ ID NO: 10039 - DNA, 744 bp, Homo sapiens
tgacacgtatgtactagtgaaccaccgtcctcgatctgtacgaaatgtgaaatgtttagggacatctccatgctgtcacttgtgatttgccctcttatgtattttggtcatattgccaactggaaagtcaaaattttctaacaactttaagtaagttctttgaagacttagtgctgtttttaatccagtttagaaagtaacttaattttaataccgctactaaaaattcgaaaatttcttctttaatcacattcaatatggttaaaagaacaacactaattgacattgcgtgggctttttctccctttgtttaaaatgtcatttgttgagcaagagttgtatagtattatctacttacttgaggctgttaatttttcattacagtgttttgtaaatgtatccacgagaccatgatgcattgttttgtgctcaacttgtgttttgtatttaaagcattttgaatgaagtgtattttataagcatttaatatttatgctctttagaatggaacacagaaaacaaaccttataagtcctgattaatctgaaccaataacctgtgtggcctacaaagtataattctattaaatgttccttaaaacacttttttctaattaaaatctttgcaaatgcttgtgtaacttcctgccttacagctacttgtttgctgtgagccacccgcaactgacaagtggctgttaactgagtcaccatatcccagtaaagctgaattttctcactaaaa

SEQ ID NO: 10040 - DNA, 1002 bp, Homo sapiens
ttttttgtttgttgaaatattttatttctaattttattatttttgaacagttaaaaactcaaagtacaatgaagtttacaatgaaaaggctcactcctgggatccttatcccccaggtatctagttctgctccttggagactaccaatgtgatcaggttcttccatatatgtcttcagagacagtctaccatatacaaacaaataggaatacatacacattttttcttcttatacatcaattgtagcatgccatacagtttgacaccatgcttttctcaataaacattattatgccttagagatcttttcatctcagtacctaaagcacttcttcattcctttttccattgggcaaattagtttcaccaatcctctgtaatttattatctaaagtgagacattgagaatgaaagcactattaataattatccaagaacagcaggtataaactggtagtgttcaaaaagccaaagcatatggttatcctacctatggcagatatttagggttgcttccaattctttgacattaccaagttgcaaagaatatacttgtaaatacatacttttgcacatctatgtgctttgtttggtaggataaatttctagaagtggaattgcagggcaaaaggttatgtatatgaatttaaaagtttcacagactgccaattgctgtacataaagagtataacaagtcacacttccctagcaggcatagagaatgcctgccctacttattgaataatccttttcccattgtgatcccgtctttataacaatgttttaagccctcacatgtatgtactgaagtcttttttctgggtgagtacataccattgatatctagttgtgcattcagttctgtactacctttcaaaaacagttaatctaggtttacattaccctttcaaaaatttcttagcaattttcaccaccttatttttccagatgaactatgggatagtttatctattataccccctcagaaattttaacagtggc

SEQ ID NO: 10041 - DNA, 145 bp, Homo sapiens
agtggagccacagttttagcatatgctccaaaacatcagctactaatatcaggtggcagaaaaggttttacatatgtatttgacctttgtcaacgacaacagaggcagcttttccagagccatgattctcctgttaaagccgatg

SEQ ID NO: 10042 - DNA, 843 bp, Homo sapiens
ttggctcaaatggagaaggaaatgggcagtttaatgctccaacaggtgtagcagtggattcaaatggaaacatcattgtggccgactggggaaacagcaggatccaggtttttgatgggagtggatcatttttgtcctacattaacacatctgctgacccactctatggcccccaaggccttgggccctaacttcagatgggtcatgttgtggttgcagactctggaaatcactgtttcaaagtctatcgatacttacagtaatggtgggcaggtggatacccgcttccatggtcttgcactataaactggaatggatttctcaatgcgggaccagattatgactagagtttttatgccagaaggaatcattggtgaactttccaaggttatttctgaatgtaacaatttccttaaaaatgacttatccaatttctgtatttcacctttagggttaaaaaaaactcttctactgaatctataaaaactgcagttttacatctgtgaactatggcttaagggacaggatttatgtagctaaactaattttgcaaatcaaacagacacttaaaaaactagcatatgtaaaggtattcgttaatcctgtgaatggtagcttttgcacagaacttccaaaagcaaaacaaaaacaaaatctattgtagttatatacttcatttaacctaggtcacaagacccagggaatcttctaacctcacttttacagtaggtattactcttgtgacatttttttggttatcaacaactaaatataaattactttggaaaaagtaaggctgtcttgcaaaatgatcccagctctgattagcagccctctggagtt

SEQ ID NO: 10043 - DNA, 408 bp, Homo sapiens
agagggtgttctctcttgcttggacagaattgaaacacttctgcccaaagaacagattcaaaattgggccttgccgtctcatcagtccttgaaagatttctgctgtggaggatctgttgtttttcagtttttctgttctgagaatggagagctccgtgcgccaggaaaacgtgacggtgtttggatgcttgactcacgaggtgcccttgagcctgggggatgcagcagtgacctgttccaaagagtccctggccggcttcctcctctctgtcagtgccaccaccagggttgccaggctgcgaatcccattcccgcagacggggacctggttcctggccctccgctccctgtgcggggtggggcctcggttcgtgcggtgccgcaacgcgacggccgaggtgcggatgc

SEQ ID NO: 10044 - DNA, 582 bp, Homo sapiens
  misc_feature (1)...(582): n = a,t,c or g
aaatatgtagaatttcatttaaataagtcagtcaacaattttttataaagtatttaacacttcattgtagaaacataggcaaaatgactatattataaccaaaatgaaaaatactgttcaatttaaaaaatgtacttaaacaagaacctgaaaaagtttatgatatgcataacattgttcaagcaaaattgcactagtattacataaatcaatagtttataaaggcctcaatatggcaaagtttagaaataggtagtatgcatgcacatagtacaacaaaaagtcttcttataaaacagcagtttttttaatgcttgtacaaagggataaagagcaaccacatatttaacatatttcatctgttaggttaatacattatgacagctaaaagtcagtcatgtctatcagaggaacaaaaagccctccaaaacttgtgaataaatcttttgtgcctttaaagatatttgtataaaaatgctatccttttatttttatatacaacttaaataaatcgcactcggttccactccaatttggaggataaccaaccaacgtgaatggggtccagcggtcnggtaaacc

SEQ ID NO: 10045 - DNA, 487 bp, Homo sapiens
ttttttttttttttttttgagcacaaggtcttttatgaggcatcaaatatacattcttatatacaaggaggaaaaaagacaatgcctgaaccccagctcctctccatacagcccctcccactgccaccctcccccgcccccaagccccagtggccctggcccttcgtacagccagggtccatctgtctgtctatactgcagcccatggtggagaggggagagggaggcaggagctgagtgaggagctggatatgcggggcaagaagaggagctggggcttgtaaaaaatatatttataataaataaacagggctgcaaaagggctggagaggcagcggagattctgacggacagaaggactcaggcattctggctcccaaccccagctctgatggcttcaatctctgcctcaggaaggatatcttgggctcatggtggccctttgggagcctctctccccagggctgatgctgggtgcccctgcccc

SEQ ID NO: 10046 - DNA, 375 bp, Homo sapiens
cccacgcgtccgggaatttctaaggacttagaagtcccagcgtcatggagttgcttggggtcaacacaagtcacctcttagcttcatgccttagaattctcaactggctgttttcttaccacctgagaaactaaatttctcaattataaaaatctcatgtattattactgttagaagtatttgcacctcatatatatctcatttacagtttgaccttgggatatcgagttgtctcatatttaggtatgaatacaggtttctattttaaacattgattctcacatgcttcttaattattcatggatgacaagccattatagtagtcccttcttatccacggctttgttttctgtggtttcagttacctgaggtctg

SEQ ID NO: 10047 - DNA, 628 bp, Homo sapiens
gcactgatggctgcggtgccgccgggccgtggagccgtggaaccgtgtgagaatccctaaggcggggaaccgcagcgcagtgacagtgcagaaccccggcgcggcccttggttgagcaatgtttaaagcgtttgaaaaacatgaatttggagggctcaattcaagacctgtttgagttgttttcttccaatgaaaatcagcccttaactaccaaagtatgtgttgtccccagtcagccagtggtggagttggtgttgatgaaggttttgggagcctgcaagttgttgctccgcttgttggactgctgctgcaaaacttttcttttgactgtgaaacatctaggtttgcaagagttcattattttaaaccttgtgatggttgggctggtgagcaggttatgggttctctataaaggtgtcttaaaaaggttgattttgttatatgagcctttgtttggattgcttcaagaggtcgctaggattcaaccaatgccttacttcaaagattttacctttccttctgatatcactgaatttttaggacagccatattttgaagcctttaagaaaaaaatgcctatagcttttgcagctaaaggaataaataaattgctaaataaactgttttt

SEQ ID NO: 10048 - DNA, 2115 bp, Homo sapiens
tttttatttcattgagaatttactaacaaaatatagaaaacaagaatttacctcttttaaatggcatgtctgtattacttacaatttgataaatgagttcctttccatacataccttaagatccacaaccttggtggcataaataacatgattaaagggtcaggtacaatgtatattttaatatgggatttgtgtagtgatttagagcataaatatcacacagtgaaaaatttatcacaaactaaatacagtaacaaaaggaaagaaagagcttatgtccacatttccaaggtctttacaataagttatagcgtccaggtccaacacagcatatttgcatacaaagccactgatgtgaacactgaaaggaatctgtcctgtaggtctttcatcttgatttaataaagtttgtacagtatcaaataatatcaaaagtctaaaaaacacaatgagcttttatgtttataaattattgtttttataccataaaaaaaggtcaaaagtgcagtttaaaaaaaagtgggaagttgttattcttgataagagctagaaaaatgtcatgtcccagttaagaagcaatctcaaggctcatccaatttctaaggaattttaactggcatctaaccttggttaccatatgctgtaagcaaaaccaacagaatgggagctatgtaacaatctagcgaagagaaacattgcaaataaatgtaattataggcctctcccaaagtgaatgaaatgattctttactggaatgaatgggctgtcactgaatgtgactatacttggtaaacttcaaaggcttgctagaaatttttatctttttcaaatttttagtcatagctgacaatggtacatatatcccaggattatgaaattttctagtataactgagaaaaatataattgaaaggtaataaatcatatcatctattatttctcacagaaaataaggaataagggcccagtaattaaaaggcagaagtacagagattagccaagaagaaacagatgggtgaaatacaactgggtcttaattggcacagtaactagctgtattttgacacactcaagaacaaatgcctatactgaagtatgtggtacattaaccacttgtacttatgtaagaaaatgaaatggtaaaacgataggcttataaaacaaattaaatttagagaaaggaaaaataaaaggaatgtaaagaaaaatcaagtttattgtggcatcaaaatattgacagagctgttatcagtcaagagcagtcttcttgttgctaaaacgaagaggcagcctgagcctggctccatccaaccacctcttctaatgctctttaactggcagtgcttcctataaatgacaccaagcaatagagatgattattgtttccactgaatagagtaagttccttgattggtttaacatatatagactgcctgagagaataaaaacatcaccatacaataggttaacggtaaatcaaggtcttcgtagttgtgatgggagaaaagggttggctgctggaaacagtatggtgccctggaggctgcgtacgtacacaccctaagaattcacatcaccattagcagaagattagaagtcaatggatatggatgcttgtgcagaatcttctcgccccctgacataaatttcacagggaatctcctccattactcggtcttccagggcctgctcagggcactcatgtccctgtttgaaagtgtaactacttttcttgaaggtgctattaaatgttttcattggctgtggttgtgcaaagtcatttcggaaaggaagttccatggaactgaggttggtcctgctttgtttgacgctggaggcctgcgacccacagtggtggtcgtggatgcagcgggaggcggtggaggagcgccgcatcttctggtagttgtccaattcttccgacaagtctgccaggtctgcagaaatctctttgtcccttagtgaaaacagttcataatgaggaggatcaaacacttcttggaacccggttttattaaaagcggttttgcaagccatgaccttttttcgaggctgtttcacttgtactaaaatagaaataatgagaaggaccaaacaatccctgaacctcgtgcca

SEQ ID NO: 10049 - DNA, 1461 bp, Homo sapiens
gcgtcaccacagaggcaagacaagggtccatatcgcggcatccggctcccgcccgtcttcaggagagaaagaaaaaataaaatatacttggggaagttgtacctgccagaattagtaagagctttctttaagaagacatttgtcaaactcaacaaattgaaggttaacaccttaagagttgtagttactgaccagaaatatggacagacttcttagacttggaggaggtatgcctggactgggccaggggccacctacagatgctcctgcagtggacacagcagaacaagtctatatctcttccctggcactgttaaaaatgttaaaacatggccgtgctggagttccaatggaagttatgggtttgatgcttggagaatttgttgatgattataccgtcagagtgattgatgtgtttgctatgccacagtcaggaacaggtgtcagtgtggaggcagttgatccagtgttccaagctaaaatgttggatatgttgaagcagacaggaaggccggagatggttgttggttggtatcacagtcaccctggctttggttgttggctttctggtgtggatatcaacactcagcagagctttgaagccttgtcggagagagctgtggcagtggttgtggatcccattcagagtgtaaaaggaaaggttgttattgatgccttcagattgatcaatgctaatatgatggtcttaggacatgaaccaagacaaacaacttcgaatctgggtcacttaaacaagccatctatccaggcattaattcatggactaaacagacattattactccattactattaactatcggaaaaatgaactggaacagaagatgttgctaaatttgcataagaagagttggatggaaggtttgacacttcaggactacagtgaacattgtaaacacaatgaatcagtggtaaaagagatgttggaattagccaagaattacaataaggctgtagaagaagaagataagatgacacctgaacagctggcaataaagaatgttggcaagcaggaccccaaacgtcatttggaggaacatgtggatgtacttatgacctcaaatattgtccagtgtttagcagctatgttggatactgtcgtatttaaataaagcaacgaaaaacgctattaatgatgccttcagtgtatattcctctgttgttcctaatgctcaaaatcaagggacctctgaaggtgtacttggctaaatgtaagacatctggcatcatttgcagcactgtaacaccttcagtctcagttgtgcaattacttctgtttctttagtcagggtctttgcagattctaaagttatacatgaatacatcaaagtggacaaattttgttaagatcccatttaatatttgaaaaaatcagtagcacaaatatattttgattgtcacttacaaaataaaatacatttacagtcaaaaaaaaaaaaaa

SEQ ID NO: 10050 - DNA, 443 bp, Homo sapiens
ccgggtctgtcttaactggcagcttcctgtacatactggtacttatttgctgtaaacgtctgtttcatacatttgccatgcagtgactgtgctcgaaaggtgaaatcaatggtaaagaagcctaggattttatggtatgagaaactgatcgcaggattttctcatccatagctattaattgaaaacttctgatagtgctgtaggctctatagtaggcttaagagtgagtcttatactatgaagccagccacaagatactaacaaatgtataaattgaaaagtaccaatactttttgcacatagatcaaaatagagtggagaatttgggctccaaaaatcaggttagtaggctcatttccatgtgcttaaaaatgtttttgttgttatgcattgattaagggctagagcaaatataaaattaaatgtctttttcctccaaaaaa

SEQ ID NO: 10051 - DNA, 590 bp, Homo sapiens
gcgccgtggttggtgggggggcaggaagctgctggatggagctgcagcatccttcagtctcaggcccctgggagggggaggggaaagaaccagggctgagctgtggagtgaaggggagccatttctctccaccgactgcaacctccgtgctcacagctcacggttcaccagaatccaggggcttggtcggcctaggaatccacaatgctggatattttcatcctgatgttctttgccatcataggcctggtcattctgtcctacattatctatctgctctagtggcctggagctgcggccggagcctgctggagaacagctcagaaggaaggatggagctgaatggccgagtgccctgcttgctgacgcaccggtggatttttgcttctgctgttatctcggctcctggtctctccagtccaacaagaggcctctcatccacagaagcagtcctactgcccagcagacctctttcagagccttccagacatggctgacccctggcaagcaaggggctttttgagctgagaggcacttggctgggacttcaggaattcatggacagggctggcagatactgcatatgtttg

SEQ ID NO: 10052 - DNA, 330 bp, Homo sapiens
tggctgcccaaaaatgcctcccctccgtctcaacaaactccgtgagtcgcttcaaacttcgaatggccaaaaagaactatgacctgaggatcctggagcgagccagctcccaataaatggaggaggggaaagggactgtcacagaaggagcaagggcagggtggagggggttgaaggatcctgacagaccatggacagaggcaggaagtaaggaaactgatgttaaactggaacctaagacagtgatgaagatggaaacacagatacctacactggcattggactccttcttgctcccctgccatgggtcctctctttttccctggttga

SEQ ID NO: 10053 - DNA, 2000 bp, Homo sapiens
  misc_feature (1)...(2000): n = a,t,c or g
gacccctgattgtgggaagggttgccggggataaagagcttcctcactggatgggacccgcctttntgtgttgtgttctgccctgtgctcttctctctacgttaacgtttcctgtagtatgtttcttcatctcatcgccaaggtaggcttgtgtttttcagtgtgtgcctccccgagcctcagccccaagctgatttcttatctggaaatggtacactgaattctctgggtggctttcttgtggccccatgggatgcagcgtgggggctgtctgaaggaccctgctttttccaggggccgaggggctgcctttcctttgtgtgtattaagcttttcaaacaatgggaggggatggagagccctggtgtcctgacgggagccaggtcggcctgagagctgtgcccgctcctctgtcttgtcagtggaggtgcctgggtggggagcaggtctcaggcctcttgtcctctccccagtggctccaggcctcactagtggcaagggcaggatgaggctgcaccgctgggaagagtctatctaagctcttggcttggagtcccgtgtcgtctccacccagaggaagttctccagagttcacctttcccttttccttgagttgtgctgaatgccccaccccagctctctttcccttctgggtgtctttgctgggagggggctgtgttgtgagccctcccggttctcacctcgcctggcacttaaccacaccctggttttgtgtagccgccagctctcttctggttgggcctttgaaaggctcagcctcccattgtgcaagtgcttgggtttggaagcttatttgaatggaagaggtcagtttgttcctggctctccatttctggcctcagttgtctacaggacagtggtcagggatgcctggaggcatatatccagctgccaccaaggggcactgtttgttcccacttatgtgagtgaccccatccatccatgaccagaggattattttcctgccttggcagaggaggaggagtcaagggagcagggcagctctaccaggcaaggtgtttccccagcataggcgcagacagttgggacgaaacttcagagcccaggcagtccctgaatgaccaggccagtgttgtcactgagtggtcccctgctggttgggagtgaagagaatccaggctgggcagagctggagccagttggggagcacggttctgggagctctgcaaaatcagtagcaagtgcctggaaaaggcacatgccgaagatactcaagagctcccaagatttgcttgaggctagcccagtgaagaaaaaccagagactcatgtttccaggggtcagtctgtcaggcaggaaggacccaggatttgaacccagcttcagtgtgcaggctctgaggctgcccaggacgggaaagtccaaggaaggggcctggtggtgctccacttgcagttctttaaagaatgctgctttttattctcctaaccctttcaagtgggtgcagacttctcgttagcagctggaagacattcctcccacacttttcccttcctggcccaagagagcatccagaaggcagtaggacctggtttttcaggtactgggagccgggggctcactgcttgcactgtgcttagggtagggatggtaaatatcctccctgcatggctttatcctccctctcatcccaaagcaggtatcttctggttgtcacagagtttcattgagtccagctgcagccacgtggccatctggagctggtgctataggtgaccatctggtacattgaggggacctgtttgcctcctccactctataagcagtcatcttgggagaccgggaggagaaggtggtgggctagtcctgtgtcctcctccacttcccatgcctctatgttacccatctgtgtctcctgtgcagaaggagaggaaggggcattaagagatgaagggtgattatgtattacttatccatttctgaataaacatttgttattcctaaaaaaaaaaaaaaaa

SEQ ID NO: 10054 - DNA, 913 bp, Homo sapiens
ggtcctttaatcccaaatgcctttggtgctcccataagtaaactgtgagtccagaggtgccctcaagtgctggagatgcctgtcacagagaagatcagaatgtgtgaagataaccctgcattacgttcatctcatcagttctgcccaatccacaggggtaaaaaatggatgagatttgatatcttcaacaccagcaactccagcaccaagtcgttccagaggattgaactgcaagagctgttgaatgagtgagcgagcctcttcagagacacattctggcatgttcaaagtagtgtgagtatttattcctgctggatggcattcaaccagagtcttgccagtgagaagttcaaagaggacagcacccaaactccaccaatcacaggcttcagtttcttcagtgattgctccaacctctggggcacagtacattctctctatggcatcgctgtcacaggaatcttcaacctcactccacctgctaaaatacgttagctgaatgtgtcctctatcattcaataagatgttgtttgggttcaaatcgcggcacacaattccctctctatgtaaagcatcaagggctaccaccatttcagctgcccatctttgaatgcagccctctgggatgtaaaacctggaggctagtgctaattttttatcaaggtcctcaaaaatctgatgtatttccttgtctccttctagcactaaaccactttcacccttagtctcagagtctctctggaataaagaagttggttcctctttagccaaatcatcagtctgatctgtaaacagcaatacttcttctgtttttaaagtgtctgtgcttgcaatatattcattagcacctgagagtggactacaaatacggaataagctttcttctgtgttgtttgcagttactgccctcggc

SEQ ID NO: 10055 - DNA, 408 bp, Homo sapiens
attaggaaacaggaagttacttggtaaacacaggtatgagcaaaggaagattgataaattggggtaatatttcagttgtgctgaggtaagacttggagaatttttcctgcttcatcattaattagaatgcttatctctgccaaaatctcatctctttcctagcccatagaggtgccctgatattttatttcctatatccttttcaagttccatgtagttttccttatgttatgacagttttattctgcagcttaccatattatttattcctggtccacgaaagtataaatagtctcatcaggaactcatttgtaagtcatctcccaggggggtttcttcaacagatagtttaactttttgctgacttactggcttcaaattcagatgtctccctatttgggggaggag

SEQ ID NO: 10056 - DNA, 297 bp, Homo sapiens
  misc_feature (1)...(297): n = a,t,c or g
agatatttgggatgaggcagcatgctggtccctcagcagcatccttatcacgtcagctgtgagagaaataaaactgtgagactgtgaagtgtataaaggattctaccgctctcccggggcttggagacccacagattggagaaatctccatctcaatcttctttgccacgtcatgcatgcccttgaagcattagaattccttaaagcttcatgggagaatgccatgggatgatgaagacagagacgcggncagggtcattgccattcttgcaaagccaagaaaatgtacaaagattc

SEQ ID NO: 10057 - DNA, 415 bp, Homo sapiens
gaaaagggaaaaaagtgcccagttcttgatttcttagatactgaagaggacgtagtcatttcatttatcaaatataaggaaaattattcaccattttgaagctcaccctagactatgaaaattatattcactgcagagcaattacttctgtcattacctgaagtgatcagtatctatcttccttgtcatagcatgcatctctcaaaaagcctccactcctttccctcacatctgtgatcatcatgattcttttagttcacttctagatgcatattttgtgttttctaaagcatctgacattatcctcctttccgaccctcttatacatatttctaaaaacaggcacattggtgagatgcaccctttttagttaatagatgcattcctaaggagcttttaattgcttatctttcag

SEQ ID NO: 10058 - DNA, 940 bp, Homo sapiens
ttattaatgccacgctaccacctcaggagcgcatcactgctcaggagattgacagctacttacgccgggagctgatctacaagcggaatgagagaatagggaagcgggtgaaggcccttttggaggagttccctgacaaaggcttcttctttgcctttggagctggtcatttcatgggcaacaacacagtgctggatgttttgcggcgtgaaggctatgaggtagaacacgcccctgctggacgacccatccacaaagggaagagtaaaaagacctccacacggcccactctgtccaccatctttgctccaaaagtccctaccctggaagtaccggcaccagaagccgtatcctcagggcactcaacgctgcctccccttggtgtcccggcctggaagtgccgacacgcccagtgaggccgaacagaggttccggaagaagcggaggcggtcacagcggaggctgcgactccggcaattcagcgatctgtgggtccgcctggaggagagtgacatagtcccgcaactccaggtccctgtcctggacaggcacatctccactgaactgcggctccctcgccgtgggcattcccaccacagccagatggtggccagcagtgcctgcctgtctctctggactcctgtgttctgggtgctggtgctggctttccaaacagagacacccctcctgtaacgactggaagcaccaggctaagaacctgacccctcggacttgaagaatggccattcctgtactccacattctggtctagccttgttgggcccaatccagaagagactgctcttgaaaaagcggcccagtgttgattcttctctttccaaggaatgtgactttgggttatccaactttgggggcaggtgtacagttttgtaacatagtgagttgtgtgaaaataaattataaatgagttgtatgaaaa

SEQ ID NO: 10059 - DNA, 417 bp, Homo sapiens
ggcacgaggcgaaagaaaaactaaactgttactaaggattattaagaaatagttttttaactattaagattttaaaaactttcctgtaaagttgcttttaataagtatcaaattttctgtatgatcatgtaaaattcataatttgtgcaaagcagaggaaaaataaattcttaattttgtttagacttaacctaaaatgacatttataagttttaaatatgcagattttagagttacatattgtacaatgttgataggtttttctagtttttatttttcatctgaatggagactttatttgggaaagtgttttaattgttaaaactgatatttagtttgagaatgactttgtttacttttgtttagactactaaaatgtgacttacatgttttgattggactagtctgcaattttct

SEQ ID NO: 10060 - DNA, 172 bp, Homo sapiens
ccagcaggttctctcctgtgagctccccaatccaacccatgcatggcctcccagccacccggatctccaggcccagcctgtccccaagatgttctttcctttcatcctcagcaagtgctgagtctgtgaataaagccacataaccagcgggaaaaaaaaaaaaaaagttttg

SEQ ID NO: 10061 - DNA, 613 bp, Homo sapiens
  misc_feature (1)...(613): n = a,t,c or g
ggggtatgaaagcctttgtcattttattttacaataaaaaattctaacagcatatgaacactctgttcccggcagaggctaaggacgtacaaagttcattagaaagcgacatttaaaataacaacagctacattcaaagcttctgctcagtactttgcccaatgtgtctaatatggttttaaagactcaccggttggggtttttcacccagagttaaagcacatgtacaagtacttacatatcctccaaatcatagacaacaaggacaataacagcaactccagatgaggctagatcttgtgggcaatttcaaatttaggaatttctttatttttccttggcaaaacatggtgtcatggaacatgtgactgtataaattaattcagcagatagggaggagctaaaatattttcctggataaaaccgaattacaaaactaataatttaagtaaagantggcttcaagtgcttgtcaagccattttcagatacattatgcatgtgctcctcaaaatcaccatgggaagtacagagggtcttatactcatttgacagatgaggaatcagagaccagtttaaagtgagttgatcaaggtctagggatatttatacct

SEQ ID NO: 10062 - DNA, 173 bp, Homo sapiens
gctcgacgtttgacaatttcttatgctaaaaatacacctatcagatgatttagccacttctaggtatttacttaagaaaaaataaggcatacatccatatgaagacttgtaaataaatgttctcattatttttatttgaaatagctaaaactggaaacaacccaaatatccat

SEQ ID NO: 10063 - DNA, 376 bp, Homo sapiens
ccaaaaaggatcaggaacagatccttgaatcagctgtcacttctatagaatgggatttttttttccttcctccttaacctgcgctggaaattgccgttggctttatacatctctatagagagaggctaaagagtcttgcgtgagaaagaagcaatttacaatgcaaatagaggcctgtgaagggacggatgctgctgctcactcgtaacagcttgctgcaccttaatagctggttttattttctgatattaatagatgaattgttggctaacgctgccggagattacttgctgaaaggaaaaagaaaagttcggaataaactctgaaggcaacagatctcgtttggatgttttaccgcgcacacacacaaacagaa

SEQ ID NO: 10064 - DNA, 1783 bp, Homo sapiens
gctttcaaaatatattttgtattgttaatatcttcacattgtgtgaatactggaagctgcagatctttgctaggacgcaataaatttatatactttttgaggggttcttctggggtgctaatcaggcccctgttatgcttagggggagccctggtgctacttgcttgaagttttcagtgtaagtaccctgatgccttttggaccttgggatcagatcaagagttttggagatcaggtaccaaggaaataaggacagtctagctgcctcaagtgaggggccctttgcatagctctccttccccctcactgaagctgggtagcctattggggttgagagggaaaatgtgaaatctcagaatttatctcccttagaagagagccagtaacttatgtacaaggatgaaagaaaggtcgcagcagtagctttggggaaagggaggaagatatggcacttctccaaccccggaaaacattgcttttgaaaactgctgataaaatatgagccggttattacttctgtttgggagactgtgctctctgtggtgcctctcttggctctactccacagataccagacctcttctaagaggatgagcagaccagctttgaggttgacctgtttctctttgtctgccttcccaaaacaccagcccccagggaagacattaagcagccttaagcttaaattcctactccctcttccaaatttggctcacttgccttagatccaaggcagggaaaggaaaagaaggggggtctctggctttattactcccctaagtctttactctgacttccccaaacccagaaagattttctccacagtgttcatttgaaagaggagtattttgtcccattttccccttcctcattatcaaacagccccagtcttccttgtctctgctaagaaagtagaggcatgatgatctgcctctcaactgccctaagtcctagctaagtatcaggggaaaaaaaaaaaaaaaaaaagcctaacaaatgggattagactagggctgcaagtagtgaggattttgttgatacctctgctgggatgtgtgctttcccatatcttgccttcaggaattacactgtgccttttccccagggatatgggctctgtctacccagtgctccagtttcccggtaactgctcttgaacattgtggacaagggcaggtcttcatatttttgatcatccctttctcccagtgaaatcccatagcccttacctaggagtctaggggcacaaaggacttcggggaagatacactgagattgacctgaggagacatctacacacaccagtggcagctgccccagggcctggcttccccttcctaagtctgtcatcctctggaagggatgggtggtgctccaatctctggtgcctaaaaacccaagtttatttctctcttaacactggcaataaccagtccacaccactgttgccttttaaaacctcttaataatctcatgctgtgtttgttttgattccaatccaattatcaccagggctgtgtggggtaaatgcttttaaatgctctcttcatcttgttcttccccctcaccccccactcttaggtatgtatgatgctaatcttgtccctaagtaagtttcttcctgctccttttgtatcttcctttcttgtctttcctcctaccttttgtctcttggtgttttgggactttttttttttttttggccttttgtacaaagattagtttcaatgtagtctgtagcctcctttgtaaaccaattaaaaagttttttaataaaaaaaaa

SEQ ID NO: 10065 - DNA, 248 bp, Homo sapiens
gagaaaagaaaagaaaatttctactaatttcagacctctagagcaattcagtcctgttggaaatttagaacatgaagaaactttgaatgtcttgaccctttttaaagattttttaggcaataacagtaatagggaattcacttattgagaatgaaagtgaaggggatgatcctaatgtcttaaaaagctagattactagtaaggcttccagacttctatcagttctattgattctacatcagacttcc

SEQ ID NO: 10066 - DNA, 522 bp, Homo sapiens
  misc_feature (1)...(522): n = a,t,c or g
atgacacttttgtatgtgaaaatgccagaccagggcagctaatacagactataagtgcagtagacaaagatgaccctttaggtggacagaaattttttttcagtttagctgctgtcaatccaaacttcacagtacaggataatgaagataatactgccagaatcttaaccagaaaaaatggattcaatagacatgaaatcagtacctatctcttgcctgtggtgatatcagacaatgattacccaattcagagcagcacaggcacactgaccattcgagtgtgtgcttgtgacagccaaggcaacatgcaatcctgcagtgctggaagccctggttcctccctgccgggcctcagcactggggccttgatcgccatcctcctctggcatcatcatttctactggttatagtagtactgttttgcagctctggaaaaggacaggcgaaaaaaaaggggcctctggttcttgttcaaaaggaaggatatcnggggacaacntgtggaggntttaacggtggagt

SEQ ID NO: 10067 - DNA, 656 bp, Homo sapiens
attgatttgtgtaacccaaacctggttgatcaatgaagaaaccctaaaaatgtcattaggaaaataaactgtgctatttactgaaggattttttaaaatgaccagtatcttgatgctcaaaatatgtgaaaatacaatgagatttggtagatattttaagagtatgaataatttggtaccaaaacagaacatttaccttacatttcagatactctgttttctcagcattgttcagatactttcctttaccgctcttcacgtacccttttggcattgagtaattctataaatgtttctatccttggtttttaaaccaagttattcatactcttaaaatatctaccaaatctcattgtattttcacatattttgagcatcaagatactggtcattttaaaaaatccttcagtaaatagcacagtttattttcctaatgacatttttagggtttcttcattgatcaaccaggtttggggttacacaaatcaattgtgggggaaaaatcaaataaaacaattgcttattatattttccaaaggactgagcatttatcttttattcacgaagatatcatatgaggatgataatgatctttaacagattttttagagatagaatttataaagaggctgatactaagaatactacactccatc

SEQ ID NO: 10068 - DNA, 443 bp, Homo sapiens
ggcaaaaggaaaaacatttaatacataaaaaagcacaattaaaaagtattaaaagcattacatagtgcaaacaccaaaaagacagagctattaacttagtggtgcttataaggaaaactaggcaagaatgcagaaaatgccttcctctttcctcatctagtgagctggacacattcaataagttgttgttattatgattattattattattattattagcgaaagactgaagttttattattactcaattcagtctcccaaaaagttattttaaattgctgctttcttcccacttgatgaaaccacatttgctgctcttgtgattctctgatcggaaatatttggaaaatttcatgttttctatatattgacagtgcattttatgccacctactcaagtgtatgtagaaagagatgttttgggccaggagcagttgtcacgcc

SEQ ID NO: 10069 - DNA, 200 bp, Homo sapiens
atgtttatgtcctaagagaagatattttttaaatgccttatggataggaattagtactaagcaatgtgtcttgcatttgttttcaataggaaaacaaagttctagataggttaaaagaaaaacaccataaaagtggtagtatatttaagtggaaaattatgtattttaaagtgtgtaactattaaaaatatattgcctgg

SEQ ID NO: 10070 - DNA, 615 bp, Homo sapiens
  misc_feature (1)...(615): n = a,t,c or g
gcggccgcgggtctcactgcaaagagggtgtggcctaaactctggccgccgccgaaactctggggccgcgcttggccgcgagtacaaagcgggctggtggccgctttgcgacttgccccggccgcgcgcctcccggggggcccacacccctgcgttcctgaaacccttcttttgaaaaatgccctttcgaacgcaaccgtccgccccagagccacgcgggcacggctcgagggaagtttgtttcctttttcaaattgctccggtcaccttaacggtttgagtcttccggagtcacgcccgcagcctcgctgcccccaatctgggcttgggcagggccgaagctcgtctcccgctttaagagcggcgccagccatttctctgcctgctcttccaggccggctggggcggnggggcctcccaacggcttcctctccagttttcaaaggctgcacatttcacttaactatttgaagtatttataggcaaatacaatacgcagggaagcttcccgccccgagacagctcctccacgcaacctaccacagactctgtaattagagtggcctgaagaagccgggagaggctccatgaccccggcaggctctggccaaacct

SEQ ID NO: 10071 - DNA, 574 bp, Homo sapiens
ggtaggtaggtaagaaggaaggaaggaagaacagacctggatggagttattgggaacatgtcttatcaatgttgaagggccccctatcactgtagggagacatccacgtgggttgttttcgtctgctgtgaaaatctagggttggaatcatggaagcaaactgcaggaattcttaatcatcctgctcacgtggtgggcatcagagggtgtctgcttggcccccacagcacttgggacagttcagagaggccattgagttggattgacgccctgattcacttgcccttttgcagtccaggaatacctcactgggctggggcataccctgtgccctctggaagacaagcctgcgcacttactatgtgccagatgccatgcacagtgccctagttccttgctgtacaccaacacgtcccacgctggtgcttaaatgcacgcaaacaactttggtggttgtggcccgaaaagctcaaatgttaaagttaagcagtcaggcaagctagaagaggtgaggagctcctagaaaactcattcgatgacacgcgcttccctcacctattcagatacttgccga

SEQ ID NO: 10072 - DNA, 866 bp, Homo sapiens
tttttttttttttcaagattaaatgtgtttattttgagttagttagtgaatacaatggtatattagataccagcactccaagctacacctatgtatttgcctctaactttcacacgttgtcagtttccttccctctaatattccaccactgggccttctatttctagcaaaatcatggttcaaattaaaaagaaaaaaaaatgaaagcaagattggtcaccgtattgtgcttccagtgcccccagaaggattttaattgtctcaaatagatgtttattgttttcattaaaggggggaaaaaaacatgatcactagtaatggcacaactagaagaggaaacagaatgcagattaaaagaagcattttaggctggactagttaatttcccctcagttaaaaatcgacataatatcacggatatagacttcaaggttaaattgttcaattcatgggccacacacttaagcgtattggctagtacatttttgcactgaaacagaagcaatacaagttttatgttctaccattacacttccagatttttcacttatgcatatacctgccaacctaatgattcttgcatgcattagagtttgcttttgtagagttaagtttattttccccatccctcccactcccataaatattgcgccaatgcgaactctgtgcccaattttatgagaatgttgcaaaggacagctctgtggcaccttagtacaggaatgtcctgtctccttcccaggctacagatggatcagtggtatggatctcatctcatcttacatggcaacagacactgttcccttaatttccccatgccagaggcatacgagctggcaggtatgcatacaaaatgggattaaaaa

SEQ ID NO: 10073 - DNA, 620 bp, Homo sapiens
atttcacaattttttttactaaaagaatagatttttattaagcgttgtaagtttctttccatcagcattaacagaacaacagaccaatttccatcacagaacaactcctgaggcattctcattcctttctgaaactcttccattaactcctgaagtttccccaaagaagcatccattcaaacttacattaataaactatggagcttttgtggtgaggtgggccaaaaaggcagggaatttggaatctgggagtgggaaagagaaatacatattatccatccactaaacacactgtcaaaagcacaggagaggagatagtaatacaggaaaaaaacaatgaaataattttttacttttgtcaataacatcatttatcagggagcactaaaagtcactgactccttgcagttaaagtttctttacctagtgtgttattctaaaaccagaatagaacagaatagaacagaacagaatagaacagaatagaatagaatagaatagaatagaatagaatagaatagaaggtaggaggggaagtgctttctgggaagcaattaaaatgaagtcatcagatttggctgggttatgagagattaataaaatctgaaatatttattttg

SEQ ID NO: 10074 - DNA, 594 bp, Homo sapiens
attgaagataagtgaaataactttggagatagcagagaagagcaagaagatgttggacgttggcagtaagccgcagcaaggcagttaggaaagtacgtgagcctgatgacgcgaaggtgatgcctccatctgtccgcttagtggttatgaaattgctgggaaagacctgcctttattttcctatcatcttttccccattactttgcattattcaggaaataattatttattcccaaatgcagttttctaagcagtgaccacaaaaatttcttattctaaggaaaataattaagaaaataaccctatctgtggcattgttttaaaatgtgggatacaaatctggtaagcagatttcaggtcattattgttttcttttaatggtttacatgaaattttcctctcaaaaaacaagtacctcttactgtataacatttgagtttttaaaattgagatagcttctgagagaaaaaaagaaagttgaatttgtagctctctcaactacaaaatcaccacacttttctcaaatctaataggaattcagtgtcattacagatacggtctctagtgaccaggtgaagacaattgaagctttgg

SEQ ID NO: 10075 - DNA, 1330 bp, Homo sapiens
cttgtggcccaattcaagcttgattcaggaattcggcacgagccaagatggccgcccccgtggatctagagctgaagaaggccttcacagagcttcaagccaaagttattgacactcaacagaaggtgaagctcgcagacatacagattgaacagctaaacagaacgaaaaagcatgcacatcttacagatacagagatcatgactttggtagatgagactaacatgtatgaaggtgtaggaagaatgtttattcttcagtccaaggaagcaattcacagtcagctgttagagaagcagaaaatagcagaagaaaaaattaaagaactaggaacagaaaaagtcctacctggagccgaagcgttaaggaagctgaggacaacatccgggagatgctgatggcacgaagggcccagtagggagcctctctgggaagctcttcctcctgcccctcccattcctgggtgggggcagaggagtgtctgcagggaaacagcttctcctctgccccgatggatgctttatttggatggcctgggcaacatcacattttctgcatcaccctgagccccatttgcttcccagccctgggaagtttttacccggctttgccctgccacctctgcccaggacacgcttccctctcgggatgtgtgatgaactcccaggagagggaagatgggagccagggcaagatagggaagctctgcctgagctttccactaggcacgccagccagaccaataaaaagcgtctgtcccactctgctaagcctggttttcttgagcagagggatggaacagagggtgagagaggcagtggccgtctccacctcagctcctgctccctctgcatcagagcccttcctttcttgggggatgggccttgccctcttctcttttcccttcctgtacctttgactaacgctcagcttccgggcctgcatgcagtagacagaagaggaagaaagaacagatgttcacagctgaatctcagtgaacagaatagcagtccctggatggcagtctgcctaaagattcctttccctgccttctcccatacattccaaaaggaagttcaacagtaagcagcacctccaagactgtctccttttggccaatatcataagatggacgccataatcctgaggcctcctagaggctgagggggcaacggtgtgatccagctggctcatcccagcccaggtgggccagttattcaattttcaagaattttgttgcaagccagttgtcaaacacagccattataattatgtaaatttgcaaattatgttaaaaacaagaacaataaatattcaaaatgcatcccca

SEQ ID NO: 10076 - DNA, 420 bp, Homo sapiens
gtcgacttctaaaaatggtatggccattagatctgtgctttttatctctgctctttgaatttctcatattatatagtaaatatattcctacgtaaacctttgatacctagatcaggaatactcttccaggagtacaaaattacattattgatagctaagctcttaattgtgtagcttgcaaaagacagcactttttagttacagatgttttgactttgatgaggatatttagctatcaatctaatagtcacctaaaatatcttttttgttggaaaaaagtttataataaaaaagtttgtcatctctagtgacttcaataaagaaaaaactagaagaggagaaaaaggatttcctcaaattttaaatatgtaacttcaggggattcaatccccaaatgtttattaagtagctaggaaataa

SEQ ID NO: 10077 - DNA, 420 bp, Homo sapiens
gttaactactgaatcagatgttaggagcttgtccctttggggtttgacttatgcccagcagtacagggacggcagcttcattagagtgttagtgtaaactaactccaaagttagggagttaatgtgaaaggatcatccttgaaacaaatctgctgtttgccatgcttgtagtacagaaacttcacatggagttttgggtgggatttgtgttttcacaagtaaaaaatccctcacgattataaaactcagagcatcatctaattttttttttaatgactacaagttccagcacaaaactggcatttctttgccatttcttgccagtaagaagtttgacacggaggtatttgaaagcaatgttatgtgagtcattcttaagtgttccaagtaagtttagaaaccagaaaaggaacttgggaa

SEQ ID NO: 10078 - DNA, 702 bp, Homo sapiens
taaaagtttaatataaagaatgaaataatttcaggtcaagtttattatacagaaattatattaatgggtgggataaatactttacaggagagggtcacactctcagacactttggctcccaaagggcttggagcttttgtgaggctgagcatcttccaaccaggtgcatgcactggtttgccaacatcctcaccacgcccaatccagccccttcacacactgacatcgcctacctgggccctccttgtggccttaagttttatctaaccagtgtacacaacatatttataaccaattaatacgtgtgagtcatgatttgtttaaaatgtcagcttttgtgaactgaaggggatgggcagaaggcaggatgctgtccttggtcaggaatgtgacccagattttaacactgctcctgcacgcggtagccatggttggtgacgctggtgaggtcgtcagacacggagagccagccagctgcggtgttggggtcaaagctgaagggtacagattccacagatgcaagcatcttcttccagacgcggtactgcagggagcccaggtacttgcagacatcgataagcatgccgggctgggctggctctggctccatggtgcagaagagtcggcgttttcggctcttgtgtttcatgagaaaagaaacgtcgtcctccttcatctccatctgcagccgctcgatctcat

SEQ ID NO: 10079 - DNA, 615 bp, Homo sapiens
  misc_feature (1)...(615): n = a,t,c or g
ttttttttttttttttttggagtatgttatttattgtaagacatcatttttattaaatacactgtagtacaagagactttccatgtcaggttgagagaagctggtcacatgatttacaaacaaaacttttttttttttttaaacactgtattcaggtgtcactttgaaatcagccaagatgcagtgggtcttagtaaagcaatggacctcaaaacagattgcaaaagcaagaactggtaagtattagcacagagacatcacattaaaaggaagataagccaaatgaaaaggagagttccaaataccaggtcacgattgaaggggaaatatatctgtagagagatatggaaatgtgtgtgtatacggcctgggatatatacaaacatctctccagatacagaaggcaaatgcaggaatgtccacatctccggggcaggatttgttaaggtcatagggtaatgattcaaaggaacgcgggggaggcattagtttcaccatattttgggtccttttggtccagggggnttacattttttaaattccccctttttatttcaagggccttgtttttttnaaactttttccngccgcttttttaccttttttttaggnctt

SEQ ID NO: 10080 - DNA, 865 bp, Homo sapiens
  misc_feature (1)...(865): n = a,t,c or g
aatgatacatcagtcagattttaggaaggcagtcaattatggatattttaatgttggaagaggccttaatgatcaaatctcaccctttctgcttctgaagtatgaaaatctagtctttttaggactggacacaaggaaaataatctctaaactattgactaaattccagtgagagtatgaatgaagaacaactagatattaatgtcaatcatttaagattaatgggcatgcaattaagtctccatttaagattaatgggcatgcaatgaagtctccagcagacaatcagatgttgttggatgtctagattatataggtttaggttgaagttataaaataaaataaaattcattttccactgggaactctatgacattcagtggagtggtggaaagttaacctcttatacattataggataattctaagacagcacacaaacttatcaataaagccatctccttgtgggccttaccatcttcatcagatttagacccttaaaaaacaagtaaatatgcacttttaaaatgcaatcaaaagactggtggttaagcttgtaaaaccagaacatcttttggcattccactaagtatatattgtaaatttaatgaacaatcaaggttcacaataggaagttgtctttttttgccttccattctgtgagatttgacagatggtgacaataagaaaatgagctgattgtaattactctctgtgtgtttttttattgctagctatccattaccagttaggattaacattaattacaattaacattaattttaggtatgggatgttatggttaccnaaaggggtgtctctacctaatgagctcaggtggtccccccacctcggcnaccagtggg

SEQ ID NO: 10081 - DNA, 522 bp, Homo sapiens
accgccagacttttctcttgtttagaaaacaaacttatatttaatgtacttactacttaaaactccagacagagatataatgtagaaggcaaatattggccaattttttcctctttttaagtggaagacaaatgaacgggatttttaaagtgcttttaaagtgcatgaatggttaataaatcagtatgaattgtaagccttcatcttacatccaagtccttagttggttagggtttcttttctttcttttttaaagagtgtcaattaccttttgaacctgtgaaaatttgatagttgttaacagtctgatggtcctaattctttcttttcattctagaaatgaatgtggttgtaatcatgttcctaattcttgggacaacctgcaagacagtgagacagtttaaaaattacctttcatgttgaaaaagtctgaaacagagaacccaatgatatttaaaataaatgctacataaaactctttttaaaattttgattttaacttaattaaaacaatgtcataaa

SEQ ID NO: 10082 - DNA, 961 bp, Homo sapiens
cttgcttacttctgaggtcagccaaagatgggaagtcgctccttgacaagctccagcgacccttgactcccggcagctccgattccctgacagcctctgccaactactccaaggccgtgcaccatgtccctggatgtcatccacgaggtgctgcaccaccagcggcacgtgagaacaatctggcaacaccgcaagtcccggcctgcatcagaggctgcagctgtgtgttttccagcaggacgttcagcaggtgctagactggatcgagaaccacggagaagcatttctgagcaaacatacaggtgtggggaaatctcttcatcgggccagagcattgcagaaacgtcatgaagattttgaagaagtggcacagaacacatacaccaatgcggataaattactggaagcagcagaacagctggctcagactggggaatgtgaccccgaggagatctacaaggcagctcgacacctggaggtgcgcatccaagacttccgtgcgcagggtcggagcagcggaagcttctcctggacatgtctgtttccttccacacacacaccaaagagttgtggacatggatggaagaccttcagaaggagatgttggaggatgtctgtgcagattctgtggatgcaagtccaggaactgatcaagcagttccagcagcagcagaccgccactctagatgccacactcaatgtcatcaaggaaggcgaagaccttatccagcagctcaggtcagcgcctccctccctcggggagcccagcgaggccaggtcagcatgggcagagctttccagtgggaaatgcctcgggctagacgtgagataagtcctgtcccagtcttgactcagcaaaatcttgctttgtggtcttgtgtgagcttcggtttctttatctgtaagatgtaaaaatgcctgcaccatactcaacttgaatctagaataaaatagtaaatgg

SEQ ID NO: 10083 - DNA, 449 bp, Homo sapiens
cggccggagcaagcgggttgttattgaagatgataggattgatgacgtgctgaaaaatatgaccgacaaggcacctcctggtgtctaactcccccaaagacaatgagttaagggagagaataagaacggcggtaacagttattggcaaaaagcatgaaaagagaaagcactttgaaatttattactagcttgctacccacgatgaaatcaacaacctgtatctggtatcaggccgggagacagatgaggcgagaggaggaggaggaggaggagaaggctctgggctcctctgcaaaaataaaaataaaaaaataaataaaattttaaaaataataaaaattcactatatacacatataaagaaattaaaaagaagtctcagttgcagctatttgtcaaaattaatatccatttctttttatatacggtggaataattgcgcaatttata

SEQ ID NO: 10084 - DNA, 476 bp, Homo sapiens
ttttttttttttgagacacaggaacaattcttttattgtacattggagaaatagccctgtgtgctggttcaaggtgcaacatacagaatattgaattaagaaaagagggaacggggaagggaagggaaacctcttgaggtccaaagttgcaaacaaaaaatggtaaaagatttcctcacgcaagaggcatttttgcaaataccatgcaaaacaggcagctggtgtgccttaagagaatccctataaataacagaaaagacactccaagcattcctgtacgtggactcagagcacagagaaaagaaactaaaatgccttttggcatttcaagatatttggcactcttgtgattacatttttttacagtccattaaagagaataaactgacataatattagagaaataaacaggctgctcacacaacagactgcaaggggaagttagaaaaaggctcaagcatttttttctttgtttt

SEQ ID NO: 10085 - DNA, 501 bp, Homo sapiens
ggccctttgactttgtgaatgagcacaatgaaatgccgcctactgatgcttcttatgatcagaactcttttttaataaaataaataacataaatcgttgaacataatgttccagttgaatgcaaaacaaaaaaaatatggaaaacattttgataaaattttttcctgttaaaaccatgaacattggctatgatgaagattattacatatgaaaaaaaaactcacacaacatatttgtattgactgaaggaaaccatcataatgcatgctagaattctttgaagcagtgatctcagtttccttatgttgtcttcagaataggcatgataaactataattgtagaaaggggtaatttctgtgcacttacaacaagctgagtgttcatgttccatggtgggctgtgcaaataaactccttttagacctgcagtatttctcatggggatgctcattagtaaatctaaagtgttcagatagttcagtattcattatcgtttaactt

SEQ ID NO: 10086 - DNA, 533 bp, Homo sapiens
ttttttttttttttttatgttttttgggtaattttttatttagatataatgccacgtttatagaaaagttgcaggaatcgtacaaaaaactcccatacaacttttcaccaagattatatacattcccctcatttgttttgtgtatatgctaatacatcacaaacacacaaaatactttttgaattctgattgaattataaactttttgagtacagattgtaagcaaattgaggtctgctgaaatgtttgatcaagactacattccatttcatgcttttacattttctttatttctattatttccccataataagagttcggttccagaaagaaaaatgtatttacattttttttccttgtaagtagtgacttaacttcatatatttgtgaggatgtaactatactttctcaaggcctatggcactttccaataataggctgagtggtttattgagtcaaagtcagtcctgtaagatacggggttatcacttagtaaacagcatcattgtaatatctatagtagtacccttgga

SEQ ID NO: 10087 - DNA, 347 bp, Homo sapiens
acagctagagctggcagacatcactgaccctttcccctgctcagcatagagtgaactgatgaagaatctcagctctaagcttctctctggggagagaaagagtcagtgtgaccactgccccaacttttatggggctgcctgaagaacaagcctctatctctcccctggatctcttgataggtcttgtacagtctggccaggagagaacagaggtggtagtctggggtgatagataccataacttccccctactcacccccttcccagcacagaatgaacagacaaaaataacagctgcctgctttttccctccagggaagaaggaaaaggggttggggttaaaagcc

SEQ ID NO: 10088 - DNA, 2270 bp, Homo sapiens
ggcaactccatttccttggactttgagcccagtatagagtaccagtttgtggagcggttggaagagcgctacaaatgtgccttctgccactcggtgcttcacaacccccaccagacaggatgtgggcaccgcttctgccagcactgcatcctgtccctgagagaattaaacacagtgccaatctgccctgtagataaagaggtcatcaaatctcaggaggtttttaaagacaattgttgcaaaagagaagtcctcaacttatatgtatattgcagcaatgctcctggatgtaatgccaaggttattctgggccggtaccaggatcaccttcagcagtgcttatttcaacctgtgcagtgttctaatgagaagtgccgggagccagtcctacggaaagacctgaaagagcatttgagtgcgtcctgtcagtttcgaaaggaaaaatgcctttattgcaaaaaggatgtggtagtcatcaatctacagaatcatgaggaaaacttgtgtcctgaatacccagtattttgtcccaacaattgtgcgaagattattctaaaaactgaggtagatgaacacctggctgtatgtcctgaagctgagcaagactgtccttttaagcactatggctgtgctgtaacggataaacggaggaacctgcagcaacatgagcattcagccttacgggagcacatgcgtttggttttagaaaagaatgtccaattagaagaacagatttctgacttacacaagagcctagaacagaaagaaagtaaaatccagcagctagcagaaactataaagaaacttgaaaaggagttcaagcagtttgcacagttgtttggcaaaaatggaagcttcctcccaaacatccaggtttttgccagtcacattgacaagtcagcttggctagaagctcaagtgcatcaattattacaaatggttaaccagcaacaaaataaatttgacctgagacctttgatggaagcagttgatacagtgaaacagaaaattaccctgctagaaaacaatgatcaaagattagccgttttagaagaggaaactaacaaacatgatacccacattaatattcataaagcacagctgagtaaaaatgaagagcgatttaaactgctggagggtacttgctataatggaaagctcatttggaaggtgacagattacaagatgaagaagagagaggcggtggatgggcacacagtgtccatcttcagccagtccttctacaccagccgctgtggctaccggctctgtgctagagcatacctgaatggggatgggtcagggagggggtcacacctgtccctatactttgtggtcatgcgaggagagtttgactcactgttgcagtggccattcaggcagagggtgaccctgatgcttctggaccagagtggcaaaaagaacattatggagaccttcaaacctgaccccaatagcagcagctttaaaagacctgatggggagatgaacattgcatctggctgtccccgctttgtggctcattctgttttggagaatgccaagaacgcctacattaaagatgacactctgttcttgaaagtggccgtggacttaactgacctggaggatctctagtcactgttatggggtgataagaggacttcttggggccagaactggaggagagcacatttgattatcatattgacctggatttagactcaaagcacatttgtatttgcctttttccttaacgtttgaagtcagtttaaaacttctgaagtgctgtctttttacattttactctgtcccagtttgaaacttaaaactcttagaatattctcttattatttatatttttatatttcttgaaagatggtaagtttcttgaagtttttggggcgtttctcttttactggtgcttagcgcagtgtctcgggcactctaaatattgagtgttatggaggacacagaggtagcagaatcccagttgaaaatgttttgatattttattgtttggcctattgattctagacctggccttaagtctgcaaaagccatctttataaggtaggctgttccagttaagtagtgggtgatgtagttacaaagataatatgctcagtttggacctttttttcagttaaatgctaaatatatgaaaattactatacctctaaagtattttcatgaaattcaccagcagtttgcaagcacagttttgcaaggctgcataagaactggtgaatggggtaagcattttcattcttcctgctgaagtaaagcag

SEQ ID NO: 10089 - DNA, 176 bp, Homo sapiens
  misc_feature (1)...(176): n = a,t,c or g
cccacgcgtccgtactgtttactaattgtgtcatctgtgtctcaccaaagcagaaggtacactcttcttgcaactgggtagttgatgtcaatgaggagttattgcattttctgtgaaaacaactcaaaatcactagggttcaatcccaagctatttcctttcctacaatgntccct

SEQ ID NO: 10090 - DNA, 611 bp, Homo sapiens
attaatataaagttatcaaactgatacttagaagcaaaagaaaagacattgtcatcttggtaatttcattagtttcaataccaaacattatacaaagcataaatttttctcttacagttgtctaatttaactcaattgtgaatcagtattgaggatcaaaaggtaattgccccaattctatttcaagatttgccatttgtcttccattagtgcgaccatatttatgccatttaccttcccttttataaggctgtggctgaaggtgcttctgctcttgttttcgatgcctggagttttcaatatttaccatacgttgctttttatcaggtcgactgaaagcagtaaacacatttttcatctatgttagagttcaatgtatttaaatttaaaacaattttaaatgttttctccattaatctatgatctgaacactgataaaagatattaaatatctgaattacaatcctagtatatccatataaaaataaaggagtctgtattagtttttttgtcctatagaaagaaaaaatagacaataactctactggcaaaaaagggaaacactcaaaagataacaaagaaaagaaatgtgacaataaaataatgagatg

SEQ ID NO: 10091 - DNA, 898 bp, Homo sapiens
gaaatatctttgtctttttttccttttttccgtctggtctcataaccactattgatattttccatggattcagaactacgttttagaacagggcactctgggttttctttgaggcatgcacagtccaccttgtacttacaatttccatagtcaaaatcaaaggcaatagtaatttcagttccctttggaatactgtgtatagaataaatataaagatgtatggttccatcttgaatttcatgcctcacctctgcattgggtgtacaagaccgcctgatgaatcgagcctcattcccaaaagtccttgcatcaacacacatttctagcccatgaaatttagagtagaataacacaaaagggtatggtcttttaaagaaatacccatttgcttcaaactgttctctcagcataaacttccctctgtattcaatgataagtgcatcaggaggcaaatcttttgcagatttaagaattttcttattcttttgtatatggctctctacaggaggtttgaagagcaaaattggttgggtattccaaatcggatttaattcatctcttttttgtcatttcccattgcctaatctcagagctattctttgtgcctccctctgaacaccctcactgtactggttgttatttgcttcttcatatcgatccatccatgctttgatctttgtctcccatccaaaatttgaaccatcagatgaaggatcaatctctggagctgaacccttaactcttgatgacttcctagatccttcacgaaatgcctttttacattttgaaatgtgttgttctttctccccgctttttttccttcttttatcattaactttggaaactcttgaagcaagttaaaagtaacttgatgttggagtactgcttgaaactgcaa

SEQ ID NO: 10092 - DNA, 615 bp, Homo sapiens
gcttgttataaattttattagaatagaaaataatacatacagataaccataggatacacacacaggaattgaaagataaattttatacttttcaatatgaaacaaagtgcatatctcatggagatatattgctagaaacaacatgaaacaatagagcaatcatcttgaaaatgaaaagtataggaacatataggaattactaaataataaaaaggtccaacttcattacatgtagcataaaatacaagtattggagaaagtggaaataacaatggtcatatgaaatctactagtcattcagattgtttcaatatatacagtatatgcggaccttatagagaaagttataaatatttattggtttttgtgtatgatgactttatcttaaatgtaatctctaaatgtaaaatagtgctttatggtgatatcagaatttccctaatttttaatctttcttgttatctgaactgttttctaattctgatattgttggaaatgtgaacaagtttctgcaaaatgtgaaattggtaggaaagaggtaaaaaactgattttgcaatgttgaaaactcaatctgctgattttaatttattctctatatattgctatgaagtca

SEQ ID NO: 10093 - DNA, 661 bp, Homo sapiens
  misc_feature (1)...(661): n = a,t,c or g
tccatgctgccctcatgggggatttcctacctagctgatgtttgaagttttcatgtgtgcctctgtctttgacccacctggctagttcagagcctttgctgaagaaaatgttctttgcttgtccgattgcttcacagcacgcttctctatctgcaactgttgtttcccagccatccatatggtgccacaggatgggacacaggcagggactttactattcacaaaggggtagggcctgggacctcgagtggggcttttcctgcttataaagacaaggaatgaaaatgcagaatccttacctggtaggggaactttcttttccaaatatgcaggtatgtgatatttctgatttccttaggcttggatctgtgcctgggggtgagatggatttcaaagtcattatttaaagtagggagataaagctttagacaaccaccatangagatcctggttgtatttttgaaatgttgagcgaaataacattttagtgatcagtaaaagctaacctttgtacttctgaaaagttgttcttagaaaggcctggattaataattggtttcaatttgcccacagatacactgcctctaggactgggacagatagccactggagtacctgccttcaaatcaccctgcacgttttctcttttgggaaagataag

SEQ ID NO: 10094 - DNA, 629 bp, Homo sapiens
gattgcaattgtgtcatagtcatctgtatatcaaactattttattcccataacttcattggcttggatgcctaagtgtatgatgcttgaagcctcagaaaagaaataagcatatttcaaaagctgcaaaaggtttttcactgcctgcctcttgcggaactgggttacaccctggcactgttctgatcccaagcatatttgcttggggaactaagtgctgactagtttgttttctatgtcaaggggcaatattaaaaaacaatttgcaagaaaatgtgtttcaagagagcaacctaagctaagtcactctgcgatatttcttgaaaataacgaccttgtcttgtatcagtggaagaagtaagttgcttagaaagggaaaagtcaaattgttccagaactgctaaaaatcattttaaaaaccatgatttagtttggaattatgattgtagtctgttgaatagtatttaccatggcatttcatacccatggtattttataccttctgactatcaattttagtattattagatgtttgtgtaaccacttgcttatttaaatgaattttgagtactgcctaattgtcagttatatgaataaattacatgtcattctactgtaacgtaaaaaaaa

SEQ ID NO: 10095 - DNA, 478 bp, Homo sapiens
cgccagaggactctgagacgaggccctgtgtgtggggccctttggctgtctgagccccagcctctgcacttgggctccgctcctgccctgcattccatccatcctcactcagctgctgcctactgggcatcctcagcaagatgctggagactttttaccctcctgtgacagctgttacaacctgtaaccacaatccctcacctctcagagggaactggaaccctcctttctccgtgtgacctaaagccactcaatgaactgcagctcacgagaccttttgcgactctggaatgtcctcacggtatattgatgttcaggtggagctggggtccatgggctaatttcttacacatcttttttctccttagggggtagaacaagaaggcttagagtttggcagctttgttacaaacatccctctggcatttcctggtctctggcacatcataaccaattggaaacctgcagtttggggtag

SEQ ID NO: 10096 - DNA, 618 bp, Homo sapiens
  misc_feature (1)...(618): n = a,t,c or g
ttttttttttttttctgagccatggcaaaagcagtttttttaagcttagtcaagttgaagcagcgggagtggaggaggatcagagaaacctctgtagttgtgattggttccttgtcgcctccactgcgtacccgctgagctgggctttgggcaggtgagcagcacagaggcttccctcctcgtccctccccacaccccaccatcgccacagctccctccgccgccggtggggcacccagatggggaggaagctgaggaggccactgttcacccaaactggttggtccttcgggcaatgctgggaatagggtgggtgctctgggcaagcccgggaggaggagggcctgggctgagttccaggaacatctcacaccacaagggaggatctagctgggtgccctccctgtactgtcaggaagccagagggcccttctccagctcatcagggagggaactgctctggcagggagtagggaaggctgtttgtggcatccctcaagaaagctcctgcctcagaagaggcccaggcaaaaagagcccacaacagtctacctgtggagcagggngagcccacagagcccagggggagcccacagagcccagtgagagctgggggtc

SEQ ID NO: 10097 - DNA, 3472 bp, Homo sapiens
  misc_feature (1)...(3472): n = a,t,c or g
tcccagccggctgaggcgggcagggccgggcggggccgcgccacggagtccacagcccggcgctccctgccgcgccgccgccgcaccgcgccccacaggagaagacgaaccgggcccggcggccgaagcggcccgcgaggcgcgggaggcatgaagttgggcgcgcacgggcctcgaagcggcggggagccgggagccgcccgcatctagagcccgcgaggtgcgtgcgccatggagctagggggccccggagcgccgcggctgctgccgccgctgctgctgcttctggggaccggcctcctgcgcgccagcagccatgtggagacccgggcccacgccgaggagcggctcctgaagaaactcttctccggttacaacaagtggtcccgacccgtggccaacatctcggacgtggtcctcgtccgcttcggcctgtccatcgctcagctcattgacgtggatgagaagaaccagatgatgaccacgaacgtatgggtgaagcaggagtggcacgactacaagctgcgctgggacccagctgactatgagaatgtcacctccatccgcatcccctccgagctcatctggcggccggacatcgtcctctacaacaatgctgacggggacttcgcggtcacccacctgaccaaggcccacctgttccatgacgggcgggtgcagtggactcccccggccatttacaagagctcctgcagcatcgacgtcaccttcttccccttcgaccagcagaactgcaccatgaaattcggctcctggacctacgacaaggccaagatcgacctggtgaacatgcacagccgcgtggaccagctggacttctgggagagtggcgagtgggtcatcgtggacgccgtgggcacctacaacaccaggaagtacgagtgctgcgccgagatctacccggacatcacctatgccttcgtcatccggcggctgccgctcttctacaccatcaacctcatcatcccctgcctgctcatctcctgcctcaccgtgctggtcttctacctgccctccgagtgtggcgagaagatcacgctgtgcatctccgtgctgctgtcgctcaccgtcttcctgctgctcatcaccgagatcatcccgtccacctcactggtcatcccactcatcggcgagtacctgctgttcaccatgatcttcgtcaccctgtccatcgtcatcacggtcttcgtgctcaacgtgcaccaccgctcgccacgcacgcacaccatgcccacctgggtacgcagggtcttcctggacatcgtgccacgcctgctcctcatgaagcggccgtccgtggtcaaggacaattgccggcggctcatcgagtccatgcataagatggccagtgccccgcgcttctggcccgagccagaaggggagccccctgccacgagcggcacccagagcctgcaccctccctcaccgtccttctgcgtccccctggatgtgccggctgagcctgggccttcctgcaagtcaccctccgaccagctccctcctcagcagcccctggaagctgagaaagccagcccccacccctcgcctggaccctgccgcccgccccacggcacccaggcaccagggctggccaaagccaggtccctcagcgtccagcacatgtccagccctggcgaagcggtggaaggcggcgtccggtgccggtctcggagcatccagtactgtgttccccgagacgatgccgcccccgaggcagatggccaggctgccggcgccctggcctctcgcaacacccactcggctgagctcccacccccagaccagccctctccgtgcaaatgcacatgcaagaaggagccctcttcggtgtccccgagcgccacggtcaagacccgcagcaccaaagcgccgcccccgcacctgcccctgtcgccggccctgacccgggcggtggagggcgtccagtacattgcagaccacctgaaggccgaagacacagacttctcggtgaaggaggactggaagtacgtggccatggtcatcgaccgcatcttcctctggatgttcatcatcgtctgcctgctggggacggtgggcctcttcctgccgccctggctggctggcatgatctaggaagggaccgggagcctgcgtggcctggggctgccgtgcacggggccagcatccatgcggccggcctggggccgggctggcttctccctggactctgtggggccacacgtttgccaaattttccttcctgttctgtgtctgctgtaagacggccttggacggggacacggcctctggggagaccgagtgtggagctgcttccagttggactgtggcctcaggaggcagtggcttggagcagaggtgggggtcgccgccttctacctgcaggactcgggctaagtccagctctccccctgcgcagccctccgcggcggacaggaacaccagccccagcgagtctggagaccaggactctgccttccaggcgtagggccagggctctggcaggtggccagggctccacggggggctagtggcttcagcccctggggtacttctgtgttgtgattccccggagctgggaaggtcccgaatggagtccagacctgggccctggttcccccaggaccctgagggtttccaccttggcgcgcagcccgggagatccgccctgggctctgggttcgggaagaaggacttcctgctacagtagctgtggggagctggtgggggcatccttgaggacctccacctgggagatgctgggaccctcggggcaggaagtccctgagaagcctcatgggagtcagggagccctggggtttccacacaggcccatgccctccgtcctggcagggcaggcagagctcagcacagcctcacccctgcaggcggtatccagaggtgagggaggcctgaaatgtttccaggcatgaccctggagcccggcagtgcaccccctaaagatggcgcacccggcagccccccattgtccccagggggcacacttcccccttgggatggggcacaggctngccccacccctccatgattccaagggccaagaggggcggggccaggatggcttttcccctgcctgtgagtgacatcggttcaggaggagacagtcaggaagcctcctgctgagtggtccacattctgctgcccccagaccccatccagccaggggtggggatggggttgggctctgcgtcccactgagtctcattcctctgtccccgagccgagctctcctgggccagggtctcgtcaggaggtgcctgagagcagaatgaataattgaggttaggaacccggcatgccaagtgccccagaaatgccgctgtgttcccgcgggnagtgacgtgagtggggaggagactcaggcccacattgcccacacctgcctctgaactgctgctggtcacccccacccccgggtgcctgtgaccggggtcctgaggctggggctttt

SEQ ID NO: 10098 - DNA, 466 bp, Homo sapiens
ttttttttttttgcagatatgaagctttaattcaccataggcatttctccaaccattctgtacattaaactttcatgtcttcacacatatacatcttttataagacagttttcttagcaatatggtactctgtaccataccaacattccatttaactagttaagggtgtattatataacatgaaccactgattaaatataaatacagaagttgaatacataggttagaaagtttaaattttaaaaaaatttaagaaaggctaaataccatgaaagtttacatgtattctttaattctagacaccgtacaacagtgacaaccaattacaataaaatcacaattgcttttagatgacagtactttcagatttctaatacccaattactttcatttccacaatgtcaacttcatgctgcattttcatttctatagagcagacaagcttccagactggcagaccaagttt

SEQ ID NO: 10099 - DNA, 386 bp, Homo sapiens
  misc_feature (1)...(386): n = a,t,c or g
cccacgcgtccgcccacgcgtccggtctgactgcacctgcatccttagctcagagcatccccggagcatcttaagagctgagcgcagctgacaactaggggccggaccgtcgcaggaggcgtccgctggataccttcccccttccctgacctagagctctacagctgctgcctcggtactgaccgagggttcccagagctgtctcaccattgcaaaaacgttatagcaacagcctctgattacgacatggctgagatcaccaatatccgacctagctttgatgtgtcaccggtggtggccggcctcatcggggcctctgtgcttggtggtgtgtgtttcggtgaccgtcttttgtctggtcatgctgccaccagnagggcngagaa

SEQ ID NO: 10100 - DNA, 286 bp, Homo sapiens
cctcggcaaccatggcctgccagcccctgtcggtagggaaaagatccctggtactgacagatgccccttgttgctagcgcttgtcaccccgcagtgtggtgaactgccccctgtcgctaggaaaaggtggtaacttagcaaccctgtgccacccctctgttgccacagaagtgtcaccccccagaaccagattgttcctgctttgctggggatgccatcctttgctagtggtgggtcaccctctgttgctaggggaaacggttccctagcaacagaacgccactat

SEQ ID NO: 10101 - DNA, 1708 bp, Homo sapiens
gtcgacctatagggcaaaactttttttttttatatattatttttagaaaaacagagcaaagtttattgaaatttcaagctacatttggaaaatcaaaatccaaatcctggaaccatacatcaggataaggtgtcaaaaagtggaaagtgttcactctcacaaaacccgctacagacaagctttctgggcacacctcccaggctccattggatcaaagccatccccttgttcatccctcatccacagtaggacaccatccttcgtgttccacttgaaaagttttcccacaataattacaaaacaaaacaaaaaacgttttcaaatgacactgtgaagcccaaactgatcttctctcaaccccattctatgtagtcagcaccagtgaatggtgggtttggcattcaaaacaggacttcacgtttcagtggacagctggggaaagggttgcagcagcaaggcatccgtggccgcattcagaggctggcccccctccttgcctttactctcgagtcttacttaacctaaaagacaaactgggtcaacttggtaaatgaacacagtcaaagacttagccataagaggtaagggaccagtcaatactcccaaggctggttaggcccttcaacatgtaggtggatgtgtatatgtatacatcgctacactaagatacagatctagccctatgggtatatatacgcatttatggctatatagaaaaactatgccaatactaaccaaacagaactttgtaagcggtcatcccaaagctgtaatcccacactgggctgtgcacaaagccatgcattataccatattaaccaacagaaggctgacttggctcaatctctcccatctgtgtcccctgccttcacgaaacagaggagaagagagaggttgcctctgcttaaaacacaagtggcttcttcataggaacagtcgttgtcaggtgaagctgttgaagatgtccatggagatgagaaacagaccccttaaactttctggagcaaactggtgtcacacctcaaactacccttctcctttgccagttgcagctaagttgcccaggccctgggagcccccaggggcgcagtagcattagaggctcactggcttggtgttaactaggccccatgcaactcagcctccagagacctgctcttgtcaggggtctgtcgctggagtggacccaggtggccatgtccttaggacatctcttggcaccagctgtgctaggtgtaaagttctcctcgtgagatgatgcttggggagccaaaaacaaactggaaagaactaggtaaaacaagtttagtggctctgcccaccctgaggacagagccacttacaccgcagaaccaccaggggcctcgggcacttgtggggattcgggagctggctcttcagggctcagacaggactggaacttctccagctgctctgggcttgccagggtcttcaacagggtgttctcacgctctagctgggagttcttctccaccagctctcggatctgctccttcaggatctccacctcctctctcacagcatacatcagatgattcttcaccagatccatggcctgttcgatcttgttgtctatggccaccacgctggctccggaggcaccggctctgaagctagctaggaattccttctcggctggtaagcttccggccttctcccaagcgcgcacggcgctcggccagccccc

SEQ ID NO: 10102 - DNA, 3826 bp, Homo sapiens
gagcagtgagtcggagctctatggaggtggcagcgggtaccgagtggcggctgcagcagcgactcctctgagctgagtttgaggccgtccccgactccttcctcccccttccctcccccttttttttgttttccgttcccctttcccctcccttccctatccccgacgaccggatcctgaggaggcagctgcggtggcagctgctgagtttctcggtgaaggtatttcatttctactgtcccctcccctccccaccccatctattaatattattcttttgaagattcttcgttgtcaagccgccaaagtggagagtgcgattgcagaagggggtgcttctcgtttcagtgcttcttcgggcggaggaggaagtaggggtgcacctcagcactatcccaagactgctggcaacagcgagttcctggggaaaaccccagggcaaaacgctcagaaatggattcctgcgcgaagcactagacgagatgacaactccgcagcaaacaactccgcaaacgaaaaagaacgacatgatgcaatcttcaggaaagtaagaggcatactaaataagcttactcctgaaaagtttgacaagctatgccttgagctcctcaatgtgggtgtagagtctaaactcatccttaaaggggtcatactgctgattgtggacaaagccctagaggagccaaagtatagctcactgtatgctcagctatgtctgcgattggcagaagatgcaccaaactttgatgggcccagcagcagagggtcaaccaggacagaagcaaagcaccacattcagacgcctcctaattcccaaattacaagatgaatttgaaaaccgaactagaaatgttgatgtctatgataagcgtgaaaatcccctcctccccgaggaggagggaacagagagccattgctaagatcaagatgttgggaaacatcaaattcattggagagcttggcaagcttgatcttattcacgaatctatccttcataagtgcatccaaacacttttggaaaagaagaagagagtccaactccaagatatgggagaggatttggagtgcctctgtcagataatgaggacagtgggacctagattagaccatgaacgagccaagtccttaatggatcagtactttgcccgaatgtgctccttgatgttaagtaaggaattgccagcaaggattcgtttcctgctgcaggataccgtagagttgcgagaacaccattgggttcctcgcaaggcttttcttgacaatggaccaaagacgatcaatcaaattcgtcaagatgcagtaaaagatctaggggtgtttattcctgctcctatggctcaagggatgagaagtgacttccttctggagggaccgttcatgccacccaggatgaaaatggatagggacccacttggaggacttgctgatatgtttggacaaatgccaggtagcggaattggtactggtccaggagttatccaggatagattttcacccaccatgggacgtcatcgttcaaatcaactcttcaatggccatgggggacacatcatgcctcccacacaatcgcagtttggagagatgggaggcaagtttatgaaaagccaggggctaagccagctctaccataaccaggggtcagggactcttatcccagctgcaaggacagtcgaaggatatgccacctcggttttctaagaaaggacagcttaatgcagatgagattagcctgaggcctgctcagtcgttcctaatgaataaaaatcaagtgccaaaggtttaagccccagataactatgattcctcctagtgcacaaccaccacgcactcaaacaccacctctgggacagacacctcagcttggtctcaaaactaatccaccacttatccaggaaaagcctggcaaggaccagcaaaaagccaccaccgtcaaaggaagaactccttaaactaactgaaactgttgtgactgaatatctaaatagtggaaatgcaaatgaggctgtcaatggtgtaagagaaatgagggctcctaaacactttcttcctgagatgttaagcaaagtaatcatcctgtcactagatagaagcgatgaagataaagaaaaagcaagttctttgatcagtttactcaaacaggaagggataggcacaagtgacaacttcatgcaggctttcctgaatgtattggaccagtgtcccaaactggaggttgacatccctttggtgaaatcctatttagcacagtttgcagctcgtgccatcatttcagagctggtgagcatttcagaactagctcaaccactagaaagtggcacccattttcctctcttcctactttgtcttcagcagttagctaaattacaagatcgagaatggttaacagaactttttcaacaaagcaaggtcaatatgcagaaaatgctcccagaaattgatcagaataaggaccgcatgttggagattttggaaggaaagggactgagtttcttattcccactcctcaaattggagaaggaactgttgaagcaaataaagttgggatccatcccctcaaaccatatataaatggattaaagataacatctctcccaaacttcatgtagataaaggatttgtgaacatcttaatgactagcttcttacagtacatttctagtgaagtaaacccccccagcgatgaaacagattcatcctctgctccttccaaagaacagttagagcaggaaaaacaactactactatctttcaagccagtaatgcagaaatttcttcatgatcacgttgatctacaagtcagtgccctgtatgctctccaggtgcactgctataacagcaacttcccaaaaggcatgttacttcgcttttttgtgcacttctatgacatggaaattagtgaagaagaagctttcttggcttggaaagaagatataacccaagagtttccgggaaaaggcaaggctttgttccaggtgaatcagtggctaacctggttagaaactgctgaaggagaagaatcagaggaagaagctgactaaagaaccagccaaagccttaaattgtgcaaaacatactgttgctatgatgtaactgcatttgacctaaccactgcgaaaattcattccgctgtaatggttttcacaatatttaaaggcagaagccacgtcagttaggatttccttctgcataaggtttttttgtagtgtaatgtcttaatcatagtctaccatcaaatattttaggagtatctttaatgtttagatagtatattagcagcatgcaataattacatcataagttctcaagcagaggcagtctattgcaaggaccttctttgctgccagttatcataggctgttttaagttagaaaactgaatagcaacactgaatactgtaggaaatgcactttgctccagtaatacttggagttgttgcaatatttggattatccatttggttgttacagaaaaattcttaactgtaattgatggttgttgccgtaatagtatattgcctgtatttctacctctagtaatgggctttatgtgctagattttaatatccttgagcctgggcaagtgcacaagtctttttaaaagaaacatggtttacttgcacaaaactgatcagttttgagagatcgttaatgcccttgaagtggtttttgtgggtgtgaaacaaatggtgagaatttgaattggtccctcctattatagtattgaaattaagtctacttaatttatcaagtcatgttcatgccctgattttatatacttgtatctatcaataaacattgtgatacttgaaaaaaaaaaagtcgacgcgg

SEQ ID NO: 10103 - DNA, 398 bp, Homo sapiens
gaaggttctattaaggcagtgtttcctaaatgtatttgacctcagtatcctttctatttacatcccacagaactggtgactatgaaacactctggtgaacactgggttagagagtaacaaggaaacaagagatagtgatcaggcatccagagcccccttttttatccatatgaaagccaggggggccagaccttgttcatgtgtgggtctgtcttccttatgccaatcagcagtatatacatcacctctcaccctcacctgctgaaaaaataacctttttacccattattcctactcccttcatcctgcacatacatatatccagctgagagatcacactacaaggctaagagatgatctaatacccccaaatagccctggcccacacagaaaaacag

SEQ ID NO: 10104 - DNA, 2732 bp, Homo sapiens
gaattcggcacgagctgcagggtcaggaggagaatcgtggggccaggagggcagaggcacactccatcttcgtgctcctcacaggccctgcctccctgcctgctaaggacacagggaagggggtccccacctcagtgcctgcctcccttccctgtgcctgtgtacctggcagtcacagccacctggcgtgtcccagaaaccaaccggctgacctcatctcctgcccggccccacctccattggctttggcttttggcgtttgtgctgcccgaccctttctcctgtccggatgcgcagggcagggcctgagccgtcgagctgcacccacagcaggctgcctttgggtgactcaccgggtgaacgggggcattgcgaggcatcccctccctgggtttgggttcctgcccacggggctgacagtagaaatcacaggctgtgagacagctggagcccagctctgcttgaacctattttaggtctctgatccccgcttcctctttagactcccctagagctcagccagtgctcaacctgaggctgggggtctctgaggaagagtgagttggagctgaggggtctggggctgtcccctgagagaggggccagaggcagtgtcaagagccgggcagtctgattgtggctcaccctccatcactcccagggcccctggcccagcagccgcagctcccaaccacaatatcctttggggtttggcctacggagctggggcggatgacccccaaatagccctggcagattccccctagacccgcccgcaccatggtcaggcatgcccctcctcatcgctggcacagcccagagggtataaacagtgctggaggctggcggggcaggccagctgagtcctgagcagcagcccagcggatcctgagaacttcagggtgagtttggggacccttgattgttctttctttttcgctattgtaaaattcatgttatatggagggggcaaagttttcagggtgttgtttagaatgggaagatgtcccttgtatcaccatggaccctcatgataattttgtttctttcactttctactctgttgacaaccattgtctcctcttattttcttttcattttctgtaactttttcgttaaactttagcttgcatttgtaacgaatttttaaattcacttttgtttatttgtcagattgtaagtactttctctaatcacttttttttcaaggcaatcagggtatattatattgtacttcagcacagttttagagaacaattgttataattaaatgataaggtagaatatttctgcatataaattctggctggcgtggaaatattcttattggtagaaacaactacatcctggtcatcatcctgcctttctctttatggttacaatgatatacactgtttgagatgaggataaaatactctgagtccaaaccgggcccctctgctaaccatgttcatgccttcttctttttcctacagctcctgggcaacgtgctggttgttgtgctgtctcatcattttggcaaagaattaattccaactcaaaaatgcaggctcaacagtaccagcagcagcgtcgaaaatttgcagctgccttcttggcattcattttcatactggcagctgtggatactgctgaagcagggaagaaagagaaaccagaaaaaaaagtgaagaagtctgactgtggagaatggcagtggagtgtgtgtgtgcccaccagtggagactgtgggctgggcacacgggagggcactcggactggagctgagtgcaagcaaaccatgaagacccagagatgtaagatcccctgcaactggaagaagccaatttggcgcggagtgcaaataccagttccaggcctggggagaatgtgacctgaacacagccctgaagaccagaactggaagtctgaagcgagccctgcacaatgccgaatgccagaagactgtcaccatctccaagccctgtggcaaactgaccaagcccaaacctcagcaggaatctaagacgcagaaaaaggaggccaagaaaccggagaagatgctggattaaaagatgtcacctgtggaacataaaaaggacatcagcaaacaggatcagttaactattgcatttatatgtaccgtaggctttgtattcaaaaattatctatagctaagtacacaataagcaaaaacaaaaagaaaagaaaatttttgtagtagcgttttttaaatgtatactatagtaccagtaggggcttataataaaggactgtaatcttatttaggaagttgacttatagtacatgataaatgatagacaattgaggtaagttttttgaaattatgtgacattttacattaaattttttttacattttttgggcagcaatttaaatgttatgactatgtaaactacttctcttgttaggtaatttttttcacctagatttttttcccaattgagaaaaatatatactaaacaaaatagcaataaaacataatcactctatttgaagaaaatatcttgttttctgccaatagattttttaaaatgtagtcagcaaaatgggggtggggaagcagagcatgtcctagttcaatgttgactttttttttttttttaaagaaaagcattaagacataaaattctttcactttggcagaagcatttgttttcttgatgaaattatttttccatctgaggaaaaaaatactaggaaaataaatcaaggtgatgctgaaaaaaaaa

SEQ ID NO: 10105 - DNA, 217 bp, Homo sapiens
atcatctattcttctatcagctatcatctgtctatcaatatttcaatcaatctctctatccctatcaattaatctatctacctacctatcaactatccatctatctctatcatctatcatctattcatctatcatttatcatctgtcaatccatcttcctactatctatcaaaagcaacacattttcttcctgactttaaaaatatttaagtgggcc

SEQ ID NO: 10106 - DNA, 386 bp, Homo sapiens
ctaggaaggtgggacgttggaggggtggccgcatggagtgagtactgtctctggccaccgagcagagccagtgacagcagcgtcctggtaggcaggcaggcgtatcaggtttcagaggatgcggctgggaacgggagtagaggtatatgagctccctgaaagcacaaagcagttatttccatcttcagatcattcagagattatgaaggcacaaaccctgccttcaatttgcttatagtcaagtggagcagacacaagtcaatgattgcagtatagccactgaagtaatctaaaagagacttatcagcaggttgcaggtgaacatggccttgaggtagaagatgcctggatgcccagctggcccgtgagaggttgggacagtcttt

SEQ ID NO: 10107 - DNA, 404 bp, Homo sapiens
ttttttttttgccactactcaatgtatatatctatctttatatacatacacatatatatctatagatatgtatctacaaggaactttcatatattttttgatcctcacagctgtcctatgaggtaggcaggtttcaggtattcacactaatgaggtattttccccataaacactgaaggatgccaagaaaagtttgcattcagatctagtttccatgtattcaaaaaatgaataagagtttaaaaagttgttttaccaactttagtttcagaattgacatcaggcatttcttattttaaaagtccacccttcagagaagataagaaatttctgaagtccacctttggaatcttttgggattcattctgactaagtaacatttttagttgagagaagtgtttctt

SEQ ID NO: 10108 - DNA, 505 bp, Homo sapiens
ttttttttttttttgtagaaaattcctttattatagtgcaaattactttcagcagtgacataatgtaacaacacatttagcaacattttacaccacacagtaaataagaaagtgtttctttgaaaatatgtcatcataggaacattatttctacattaatgccagaaaatgccaaggccgtttatctcaaggcaaacagggctccctccttccttttgggtattttctttttaacacaaatgaaatgacttgccattttaacaaatcctcaattctaaaagtgatctctcagggggctttgaactaaggtcggcaagatttgaaatggggcttcaaaattttaaataataattttaaaatacttctggaatagcccaaaaagtagaagtcacttctattaagttttaagtagatatacacactcactccaattttactgtagaaatggacagattgtcctaaagcctgctttctattcccccagagcctgattggttatttatac

SEQ ID NO: 10109 - DNA, 639 bp, Homo sapiens
tttttggaaaatcagcttgctggagccatttattcagctcagctcgaggggtttaattgaaaacagctgaggcacactgacatcaccacaggcctccagactgaaagggacctcagaggaggcgcgctggcttggaggagggaaagcctggcttcaaaagccagagccagtgaagtgaagttttatccgaggaggaaggttttgctgcaaaaatagttcctttagtatgtttttaaaaaacaaagaagcaagaggagctgagcaggcatatttaagagcttacaagagtagggaacagtgaagaactcactgaaactctgaaagcagccttggataggctgtgatgagcaagtgaatggacgtcatgagacagtatggtttctgttatttcctaatttgctgccattttatttatttatggttggagtcttctccccttagcactcttctgtcccccatatttggtgctgaacaattgctttgtgcgattgcgtttctcaggtacatcctgcagcctcctaccttgtgctgcagagacaacatctaatgcacagctgggctccgggacctggtgctcctggtgtggatggcaaatgagatacagttcttcatttgccatccacacctggtgctcctggt

SEQ ID NO: 10110 - DNA, 1075 bp, Homo sapiens
tttttttttttttttttcaattttcaggtcgttttttactagtgtctggaagacatttaggagaattccaactgattaccatttacagtgatcacaatgaaactgctcagagttatcactgaacttcagtaagaaaatacaacagagtgccatcaggacaggggagagggcaggagactgctccatcgctctgctcatgtccacactgccaaggtccccaccacggggggtccccagtgcaaccccagctccggggcagaagaggcagcctgcagatctctgctgccgggaaagagctcctgaagttgtggggtctggactctgctggggacaggggccttccgcgagtctcccacctctcgggggactgcagggaaaggcgtctccagtgggcagccttgtgttcacttccatagctcccccagcggcttctctgtggcagtgccggatggcgtcctcagagagcacgccgatgtcctcatggacagcttcgatgctttggaagcatccaccatcttccagttcaaagtcgtgtctttcatgagctggtggaaaccacccggagcgcccggctccctggaaagccccgttctcatagcgctcatggccaaacgctccccgcttggcagcatccgccagctgtaactggaggaacaggacccaggtcgggtttgggaaggcccacgtctggctgtttacaccaatctagggaaaaattctccttggcaccggtgaaggccacaccagaaaatgcgtatctgtccacgacgagggtcgacgccctggctcaacttttccttaattaacggcacttgttcccagcgatttgcagaaaaaagcaggtgcaccgagtgatcctccacgtcacttttcttttgcaagtaggaactcagaagtttgccgatttcagttgatctttccgggaaccggagcagttcggcgcggtggccccgccggacagcgcttccaccagcttgcggctctgcgtgctcttcccggcgcggtccacgccctccagcactatgagagccccgcgccgggccgccatgactgtccaccgcgccgctggcgaatt

SEQ ID NO: 10111 - DNA, 2966 bp, Homo sapiens
tttttttttgtagaaaagaatattttattgaaacagtttctcaattaacaatggagcaaagtacaatttgactcaaacctgtccaaccagcatcaacagctactgaaagaattcaaacatacagaagaggtgggggtggggtgaggggtgggacccttaggtcccatctctgccaatgtggcaaaaaaaaaaaaaaaaaaggaaaagacaaaatgactgacacagccaggttcattcttgtcttggagctgaggcagcagccctagctcctgctacagacggaatactggaggacgggctccctaggcgtaggtatggtgggtcgggggcccccaacctagcagagtgatgcacagaggaaggccagccctgaccctcctccttcatccacaggcctgcctcagagagagggaggtggcatctctacattcacaccatggtctctcctttccccaggatcttgggatagggactcacagtagaaagcacattttggtcagcccagggggtcagggggtgagggaaaggctctgtctgggaggagcagaacagcagaagagaggaggaggcagggagttacaggaacctggggtaccaggctgctgggaagatgcagattatgacagagcttgcacgatgctggcaccccatgccaaccactctacgtggctttcctcttcggagaggtggtgggctcccttcttcactgtgcctcctccctcctctggccactaggggtgggaaatacgagtgagaatccttccagatttacttccgccaatccagaggtacaggcttttaggcaaggggcagagaactgccccaatttgctgcaggaagccaaggaaacccagggggaaaggagctggatgggaatggggaagggaggctcagagcaagagaagcccgcagagggaggaaagagcacagataggcactcagaaaccaaacctggtaactgaggctctgcagacactggcctgaaaggatgctcatcgcatggtgggagaggaagggagggaaggaacaatcaccagagaagagtggaaactccccggcaacctgatacccttcccatcaccgggacccatccagccactggcagccattctcttcctacccacaggcaaaggattcagaaattaatagtgatttttcccaaatttagggcctatatgggtagggaacagggagtggggctggggaggagaacagtttccatttttaaccacagaggtactgcagaaggaaccagtgagctgtccctcccttccccttctccacacctccaaatcacaggggtgagaaaggaactccagccgagggcaggaccaacccctcccccaaccctcgatgttaaataaatagaagtggtgggggaagggggtggagatgaatggggaaaacagaggtgggggttatagttcgtcgttcttcaaaggccgcttctgtcctgtcgattgttctttctgttcaggttctgctccaggacctcctaactccaaaggctcagtgtctcctggctcggatccagtctctactttctcaggttctgaaatgggctctgcatcttcagtctggcctgctggagggatgaccttctccccctggtcactggcactggcattgaggggtggctctgcccgggtcccattcttgtccttaggccggggccggggcttggtaaacttggccttattgagcagatactgcacctctcggtccagggccatcatcttagcttcaatgtcttttgagagcaacacaggcttctctgtggcgggcagcttagcctgctcggccagagttgcattcttccaggcccaggtctcattgatgactttctctaacgttgtcatctccacctcagtgaagatctggtccatctctgggatgagccgggcccccttgaggaacatgctggaatggttgaggagattatcgagggcagacagccgttcgggccacttcttgcgctcctctacccgaaaaaacagcccttggcacagcttcctcagctcagccagcttctccttcaacatcactgtggtggctccaacaccctcatcctccagccaggtggatgcggcgctgagcttcccagagatctcctcacgctgctcctctgtggacacttcctggtactcgggctggtacagcttgtcctgggtctcaaatatgaacgcttccaagctgttggcagctttttcccgttcctgcttctccaggtctcggagtgtcaagtcctgaagtttctgcaccgactgagccagcttatcctctggcaagtcaggcaggtccagaacaaccagctccaccccgatctcctctaccattcgccgcttcctggcgggcttctgcttcttctctccctctggggctggagcgacgccctcaggccctgcctctgccttctcacttggtttctgggcctcagacttgtccccattttctttttctgtggccttttctccctcaggggttgcatctcccttaggttcagggggtgggggctgagagccatcctccactggggcctcagcttcctccttgagctccacctgctccccaggctcgtccttgctcccctctgcagggctctcctcttcctcctggacagtatcagtaccattctccttggcatctggtgtggtaccgcctccaaacaggctggaaatggtgttgccaagtttggtgagagtagattcctcttctgcgctgtcctctaccagtgtctcaaatacagactccaccctgtctagactgagcacgccactctcatccaggttgaagtgagccttgatgcccttggactcgtagtcaggatacttcttgaagctgtcacccaccccttttagcttcactgtggtcagattctgggagccaaatacccgaagatcttcaggccccaggaagcccaggtcgccgtagttgatgtggaaattgaaatcatggctgtagcggtt

SEQ ID NO: 10112 - DNA, 671 bp, Homo sapiens
attgtaatttagatataacacacttaagttttgctttttaaatctctctgtggagaaaggttgttgttaatcctttccagaatgatctattctgagctttcctggagttaggcccttctagggagagaatttttttattgtcatcaggaaacgaaacctttgtgctctgcagcctttttcttctgaaaggctaagtggggctaaaattatccttttagttttctgctttaacaagaagagaaggacttggtgtgaaagaatttcttctctcagtccaatggtataatttttagcactccgcttcctctgtagggtttagccctacagtttgaacaattattttaatccagctaagcatgtggccaacactgtgaaatacaggagatgttaaggttttgctgacttttagattaaaatcttaaaatttcacattatattttaattacttgaaaagtttaattacctagtaaagattgtttctaatagatgagaacataaatttaatagttttcatccttttttaaagtgtgtgcaacaattaatatgcctgccttatttgaggacatgataaaatgtacccaaaatgacttcgaactgtctaatgcctcagaaaagtaacttaaaatcaaccacttcgtgcttaaatgtttttatattatgaaccgatttcg

SEQ ID NO: 10113 - DNA, 1056 bp, Homo sapiens
tttttttttttttgggaaaattgtttttattttaaaatggaaatggaaatataatatacaggaaaagcttgtgctttccttttttttttttacttcgcataaacaataataatgcaatccaggtcaaagcacgaggcagaaactcgagaaaagaacagttattaaaggtacatggtcttcttttcaaatatccatgaaaacatttaacgacgggatggctagtacctatagaaagctccaaagcaataatctggcctttaagtttcgacgggactattttgaatcttagatttatcagtcactcctttcccattctacttgttctaagaattaagtatataattaaaataaaaaggccacatcctgactttaaatctccactctcctaaaaacctgtttgaggaaacaaaaatggggaagaagatcagaacaaaaatattgttaacactggccgtcctcatgcaggtgggctactaccaacgctggttggttactccaggaaaatcgaggtgaacattattacatttatatcaacaaacccataatcaacaggttaaaaaatcctacattacaaagaatctgatcacttatcagttggtggtctggaatagtttgcctagcctccctctgggctgctacagctcagattcacaagtagaaattacatttacacaacttaagtttgcaaatagctctccataaatagttaaaccaggcctaaccatccagtagttttaaagtattagaggcaattaaatagtgatttattctagctataagtaaaggtttaaaaagaggagagatgatttcagagaaggaatagcagtgatttggtttataaacagcatatttattgtgctctaattcaggtgcagaagcttcgccaatttagcattgcacaagtgttggttttttataaatgctataaaattgtttcctgtcaacattttcttatactgaaaacacaacacaatttataataccttgaaaaatatattcaattcacatcaattcttgaatctctcactggaaggaatgtttgtccctcaactaagc

SEQ ID NO: 10114 - DNA, 1900 bp, Homo sapiens
gcccgccggtccacgccgcgcaccgctccgagggccagcgccacccgctccgcagccggcaccatgcgcgagatcgtgcacatccaggcgggccagtgcggcaaccagatcggcgccaagttttgggaggtcatcagcgatgagcatgggatcgaccccacaggcagttaccatggagacagtgacttgcagctggagagaatcaacgtgtactacaatgaggctgctggtaacaaatatgtacctcgggccatcctggtggatctggagcctggcaccatggactctgtcaggtctggacccttcggccagatcttcagaccagacaacttcgtgttcggccagagtggagccgggaataactggggccaaggcatcttagcacagagggagccgagctggtcgactcggtcctggatgtggtgaggaaggagtcagagagctgtgacctgtctccaggggcttccagctgacccactctctggggggcggcacggggtccgggatggggcaccctgctcatcagcaagatccgggaagagtacccagaccgcatcatgaacaccttcagcgtcatgccctcacccaaggtgtcagacacggtggtggagccctacaacgccaccctctcggttccaccagctggtggaaaacacagatgaaacctactccattgataacgaggccctgtatgacatctgcttccgcaccctgaagctgaccacccccacctacggggacctcaaccacctggtgtcggccaccatgagcggggtcaccacctggcctgcgcttcccgggccagctgaacgcagacctgcgcaagctggcggtgaacatggtgcccttccctcgcctgcacttcttcatggcccggcttcgcgcccctgaccagccggggcagccagcagtaccgggcgctcacggtgcccgagctcacccagcagatgttcgactccaagaacatgatggccgcctgcgacccgcgccacggccgctacctgacggtggctgccatcttccggggccgcatgtccatgaaggaggtggacgaggcagatgctcaacgtgcagaacaagaacagcagctacttcgtggagtgggttccccaacaacgtgaagacggccgtgtgcgacatcccgccccgcggcctgaagatgtcggccaccttcatcggcaacagccacggccatccaggagctgttcaagcgcatctccgagcagttcacggccatgttccggcgcaaggcccttccttgcactggttacacgggcgagggccatggacgagatggagtttcaccgaggccgagagcaacatgaacgacctggtgtccgagtaccagcagtaccaggagcgcacgtccgacgaacaagggggagttcccaggaggaggagggccgaggacgaggcgtagatgcccccgcgagacgggttagggaaagcggaggaggaaagcgagggggtggggggcttcccgggacgataacctggcagtggaaggaaagaagcatggtctactttaggtgtgcgctgggtctctggtgctcttcactgttgcctgtcacttttttttccttttttgtaatattgatgacatcaatgtaacatttgagatatttctgaattactgttgtaatggctaaaatcacataaacgtttgtgtcggaatggtgtcctctctttctcttcctttttctctttattaacgatttaaatgtaactttctgaacacattgcattgaattcttcctttaacaaaaagcaaaggcgtaggtaaaagctcaaatgaatttattctttcggtatggtaaaattgaaccaatcacagttaagatgagagatcaacctgagttttaaaatacctttaataaatattagttgaaaaaatgaaaaa

SEQ ID NO: 10115 - DNA, 367 bp, Homo sapiens
ttttttttaaatttgtaactcctttttttttaatttcacaaaagttttcacaaggacaacgttatagaagaaaacccccagcagtggctaggtcatgcagaaccattaattgtcataccttggcccattctattcatccttgttgcactttagagagagaagtaagctatgtgagttttacaatgcttttaaactgtcatatttcctgttgagcactttaactggcacattcttatagttataaatgttctgagggcgtaactttataacctcctttgcaaagaatgcatgaagagctcttcatgatccaatactaggggatacatatatatagttatatatatagttatatatatataattatata

SEQ ID NO: 10116 - DNA, 457 bp, Homo sapiens
caccttctctctgtgagtgtgcccatctatgtgtacaacctttagttatggatttttaaccctttatgaccttctttctagctctctggcacaggtagggctgtctgggggaggaaactgagaacccccaatggacagcagatgtgccaatatgagaggaatgggcagtgggcagccaggcccacctgggagtcaacacggaacaccccaagcatcaaagtcctgcacgaagcctcttcaaaggtagggggtcaagggggtggtaaccgagtggggcttatgtcagtggctggactgtacagatgggtgaatggctggggtcaggtgctgctgccagatgtgctgtgggcctttcttgctggagactccatctgagtacctggaaattgttcgtgagaaccacgggctgctcccgcccctctataagtctgtcaaaacttacaccgtgtgagcactc

SEQ ID NO: 10117 - DNA, 1357 bp, Homo sapiens
tttttccgggctaggtctgctttttattggccacgcatccagccgccagcctcagggcacacacctggcagggggcaggctcgggtaggctgccctcgctgggtgggcagtgagggggcagcggctgctgggtgtcaccctgcagcccctcaggtggacctgtattgtccccagggcctgcccacgctgggcagcctgggcactgggaggggttttctgttgatgtgatggccaagtttcagctgcagggcagaggcctgggcagtggcagcaaaggcagaccgccccccactccaacttcaggggctggacatgctggaacgggggccagaccccatggggagggggaccctggccctgccatggcactgcctgcccagcttacccctgcccagggcccccaactcagccacctccaagcagtaaagacttgcaaagcattgcattttgattaaaccttgctgggctgaaagggcaggcagagctgtggtggaacactggcaagggttgcctttaggaagcaggtgggaggctggcacttgcagacggtcccaggagggcaccaggcctggcagggcactggtgcctgtcgggttcccagccacaacaccccaagaaggctccaggagggccccggctgggtaaggcacggagttttggtttccgggcccagtcccagcctggcccccagaagagcctctcttggcagaatggcagcatgtcctgtggcctgggctctctcacttggccttgggcctgggcctgaggccttactggatcacacacagtttctttgttttattatcatcagaatcagggggaacctcttcctggctcctggagggacgcttcttccttcgcttcccggtccccttttgaagcccgccccgggccctggggagtgtgcccgaccccgaggagtcggtcaccgcatcctcggagaaggacttgtccagggatgtgtccagtgcggactctggggccgtgtcctcctcgtcctcgtcctcatccccacctgggcctgctgcagggggtctggcaccacggctgtggacagcgtcctccagcccctcacttgtgctgttgcctcggcctggaggacgcccagcaaggacgtgggatccttggcatcttgccttgaacttccggctgcagggggctggttgctggagaacttgaggggcttcagggcctgagcatctcccagagtcaccggccaggccccctccaagggctgggggcactggggatcctcagtggttaggacatcgctggcatccacataccaggaagaacgcctctccaggggccgtggaccaccctcctcccactgctccagggtgggctgagggccggg

SEQ ID NO: 10118 - DNA, 562 bp, Homo sapiens
tttttttgtcatcataacaaaagtgtgatttatttctgagatcttcttactctagatttatttataagttagttacgttaaaatcagtttttcccaaccagcatacataaggtgttgtacaagctccctcagctggttaagatatagaactaccaaaacacatgttccattaggttgactgcgtcatcctcttcagaaatttctgtaactgcagcctgagatcgaagaatagacgtgatgtcattagataatttgtcaaagccattctgtgaacatatatttgccacttcttgccacttttctatggagcaaaaggaatcatttatcataagactttctactgcatctatcccacctttattgatttcttgaagtagcttaatgccaacttttttcatgtctgcagagaacagatgaagtatagcaagaccaaaagataaagatggttgtttctcattcaactctttagtgagacactgaattaattcaacttggggacatgacattaatagctgcaacaggtcatcggtagtaaagtccttcaactgctgtatgtactcca

SEQ ID NO: 10119 - DNA, 84 bp, Homo sapiens
cagattaaaaaaatatatatatatatcccctggaaccctctggtctttgggtttgagccattttgcctcatgggtgtgttgctt

SEQ ID NO: 10120 - DNA, 447 bp, Homo sapiens
gcaacagtcaggacaacagcatgcaacctgagacaagcagccagcagcagctcctgagccccacgctgtcggatagaggaggaagtcggcaagatgcagccgacgcagggaaaccccagaggaaatttgggcagtggcgtctgccatcagccccaaaaccaataagccattcagtgtcctcagtcaacttacggttaggaggaaggacaaccatgaaatctgtcgtgtgcaaaatgaaccccatgactgacgcggcttcctgcggttctgaagttaagaagtggtggacccggcagctgactgtggagagcgacgaaagtggggatgaccttctggatatttaggtggatgtcaatgtagatgaatttctagtggtggaaaccgttttctaataatgtccttgattgtccagtgagcaatctgtaattgatctataactgaattcca

SEQ ID NO: 10121 - DNA, 438 bp, Homo sapiens
tcccccgtattattgttattatttatttttattttttacaaaacaggagaaaagagtgaatcgggttgggggaggtgacacatttctccacaaaggtacaaaattgcctatagaaagtcagcttcggaatgccgagcccaggctgctgagatgaggcgttcctgggcatccctctcccaaatgtccttcagatctggctggggtcactcccacattgagggcagccccccaaggtgagatggagtggcctccttcagcccttgcccaggaggcacaagagcaagcaactgagactgtacagagaaagagaagaggaaggggtgcagcccgggggacacaggtaggggacagccaagccagggcccaggagcctctgggcagatagaagatgggcaggcaggaggctctagccaaagtccctcctgttccttggacatg

SEQ ID NO: 10122 - DNA, 756 bp, Homo sapiens
ttttttttttttggctgtttggtgagttataattaagggcttggctgccttttctggagtactgcatagtttacaaagtgctttcacatacatgatctaatttggtttactgaacttagaaaggtagactttcaaggaaaaaacatcgatttccaccaatagtaaaagctactgcatcagacctgtcactcaacagcgctccttgagggcctagctcctgagatccctctggcgagcccttgcggctccagcatcctcgggacggcacggttcccacgggactggagcaaaggtttcagagactcgggatacagccagatctcttcggtgaggagactcagtcttactcgagtgtatgtgatttttaaaaaagacattgaaacaactatggaagcagaggcaaaggcagcaaggctttgggtttgcgactgggaatccgtgcggcctccctttggtgaagacctgaccccgtggtgggggtgaacagggtttccttgaccccgtcccagggttcccttcaggacagatggatttcactaggggaagcgtgatgctggtagcctccactctcaggctgggcagggtaggctcccagggaggcagctcccagcgcagcctcttccatcactccggctggagctagaaggagagaagtgagctgaggctctagaaagtgctggcactcctgcctttctttttcccaagggtgctctttgacatccggagtgcagtcagcaggtcttttccgagtgggct

SEQ ID NO: 10123 - DNA, 371 bp, Homo sapiens
agacttggggactccaaggctgaaaaccgagcagagataaccgtgctggtgtcggacgtcaatgacaacgcccccgccttcacccaaacctcctacaccctgttcgtccgcgagaacaacagccccgccctgcacatcggcagtgtcagcgccacagacagagactcgggcaccaacgcccaggtcacctactcgctgctgccgccccgggacccgcacctgcccctcacctccctgggtctccattaacacggacaacggccacctgttcgctctccagtcgctggactacgaggccctgcaggctttcgagttccgcgtgggcgccacagaccgcgggtccccggcgcttgagcagcgaggccgctggt

SEQ ID NO: 10124 - DNA, 1093 bp, Homo sapiens
tgaaagcagtacatggataattaaagagagtaatagcttggagatttccttgattaagaagaatgaaggactgacctggccagagctagtaattggagataaacaaggggaacttataagagattcagcccagtgtgctgcaatagctgaacgtttgatgcatttgacctctgaagaactgaatccaaatccagataaagaaaaaccaccttgcaatgctcaagagttagaagaatgtgatattttctttgaagagagctccagtttatgcagatttgatggcaatacattaaaaactactcatgtggtgaatcttggaagcaaccagtaccttttctctgtcatagtggatcctaaagaaatgccctgcttctgtttgcgccatgatgttgatgccctactctggcaaccacactccagcaaacaagatgatatgtgggagcacatcgcaactttcaatgctttaggctatgtccaagcatcaaagagagacaaaaaattttttgcctgtgctccaaattactcgtatgcagccctttgtgagtgccttcgtcgagtattcatctatcgtcagcctgctcccatgtccactgtactttacaacagaaaggaaggcaggcaagtaggacaggttgctaagcagcaagtagcaagcctagaaaccaatgatcctattttaggatttcaggcaacaaatgagagattatttgttcttactaccaaaaacctctttttaataaaagtaaatacagagaattaattattctaacatattggcctctttgtactggaaaagtattcagtggtacctggaggtctggacagttatactgtaacctcttaagttttaatgtgctaaatatatcttgtatgattttttattttttaataacattggaaatatattcaagagattatgattctgtaaagctgtggaatgaagctgcagatttagagaacattggcttctgaaaaaaaaaaagagtgaagatagtactagcaagtatacttattttttaaaacaggctagaatctcatgttttatatgaaagatgtacaattcagtgtttaaaaataaaaatatttattgtgt

SEQ ID NO: 10125 - DNA, 847 bp, Homo sapiens
ggcagtgcgagaaagccgaagatggcggtccccgcggcgctgatcctacgggagagccccagcatgaagaaagcagtgtcactgataaatgcaatagatacaggaagatttccacggttgctcactcggattcttcaaaaacttcacctgaaggctgagagcagtttcagtgaagaagaggaagaaaaacttcaagcggcattttctctagagaaacaagatcttcacctagttcttgaaacaatatcatttattttagaacaggcagtgtatcacaatgtgaagccagcagctttgcagcagcaattagagaacattcatcttagacaagacaaagctgaagcatttgtcaatacgtggtcttctatgggtcaagaaacagttgaaaagttccggcagagaattctggctccctgtaagctagagactgttggatggcagcttaaccttcagatggctcactctgctcaagcaaaactaaaatctcctcaagctgtgttacaactcggagtgaacaatgaagattcaaagagcctggagaaagttcttgtggaattcagtcacaaggagttgtttgatttctataacaagctagagactatacaagcacagctggattcccttacatgatgttttcgaagactgtttttttcatcacgctcctgccacctcattattttgcattgaagatacattgccaggttgtgttttctgaaggattcagtgacttgctttctgtaaattatatggcttatcacttcttagacaaataacaaccaatagagatcattgttaagaatactgaggttctaatatactttctttagttctgtgagccaacagtaat

SEQ ID NO: 10126 - DNA, 582 bp, Homo sapiens
  misc_feature (1)...(582): n = a,t,c or g
cagtccagtttgtttgaagtcaatcttttcatcagaggcagcttaaagatgctttcagttagttttgtcttactttcagatttctctacataaatctagatactcattaagtagccttatgacaaacagtatgagatacttannnnnnnnnnnnnnnnnnnnnnnnnnnnnnnnnnnnnnnnnnnnnnnacagagtgagtttgtcaaaagtatctcatacttataaacagtatgagataggaggattaaaatattattttaaagaaaccactgtttccccctaaaatgtcataagagcactgaagaacttgaaatatttttttcagagtttctcacacactttaaaagtctaacttttttgtgtgtaagcatttagcttgccagcatatttctttttggctccttaaattgcggttgtgtttgcagtattgtcacttttgctctcactgttatgttgaataataattagcatataattgtctacagaagcaagagcaatctggaaggaacaaaaatgttttctgtgattaacagtgaagaccttgtaaatgcagatgtgtgataaagcatttagtcagtccc

SEQ ID NO: 10127 - DNA, 396 bp, Homo sapiens
ttttttttttttagtgaaagaagagatttattgcaaagcaaaaagtacacactcaagaaaggggagcttgggcatacccaagagagaataatgggttctggggtttcatcttgatgggtttctttaaccaagaattggaatattcacgaaaattcctgggtaaaggtggagatttcttggaactgtggtgccatttttacatcaaacactggtctcagaactgtcatggcactggcgggtgtgtgatttagtatgttaatgagcatataatgagggcctaggtaaaacctccatccaatccagcaccacgttgggtccactcagccttagccagcttggtccacaccctggtttttcagcgtcttaacagcccacagcctcaagtcatgtaaatct

SEQ ID NO: 10128 - DNA, 464 bp, Homo sapiens
gttcgctggcactccgttggtcttccagctggtgggagttgacgacgcggtgctgggcgttgggaccctactttatctagttcgggaagttgggttgtggggtcatacctgtctgtctgctcccagctttcttgggtttcttccgacggcgtggggcctcgctaaggaattcccgggcccctcagggccacggctttagcggtgtcttttgcgagttcttcgtaagtacatcttaaagctgtcaagatggttctagcagaccttggaagaaaaataacatcagcattacgctcgttgagcaatgccaccattatcaatgaagaggtattgaatgctatgctaaaagaagtctgtaccgctttgttggaagcagatgttaatattaaactagtgaagcaactaagagaaaatgttaagtctgctattgatcttgaagagatggcatctggtctttaacaaaagaa

SEQ ID NO: 10129 - DNA, 353 bp, Homo sapiens
tttttttatcttaaaatgcatattttatttcagtagtcaatgaccatcaatcaaataaaggaaagaaaactaatttcttgaagaaagacaaatctatggagtggtttacaggaagtgaagaatgagatggcccaactaaaccaatttggaatcattaactacaaaatgtcaaactaactgcaagacaagtgtcaaaatgggatgtttaagcagttttgctatgttatacatcttttagttgttattttcaaaattatatgtataagttatataagtcatagtaatagctaaaaatgccaatctatggaagcagtgattttcaatataaagttctattttgatatttttccatc

SEQ ID NO: 10130 - DNA, 824 bp, Homo sapiens
gacaatacctaaaagtaactgtactaacaaagtgctaacaatgtgaaaatatatagtcccatagtcatgtccccatatttatactcccacagaagaaaaaattggaaaacaaagtctgatgtccttaatctattaacatatttaaatgatataatggttcagttttccatgaaagtaaatcattatgggaagtaaaatgttttaaccatatttttcttaatacacaaagcaggtgtcagctgttgtattctcacccttcttaagaaaaatcattacattattgatattttttaagtaacagaatagatttgaaagagataatatatctcttaataccaaaggaaaactaaaacataattctagtgtacttttctttgttccctcatgtctttttcaatctgtacactaacatacctagcaaatttgttttactttaacttgaaatatttaagaacattaaacaagacatttctttggctttggttgaatttttttgtctcaccaatagtaattgaaagatcaattatcaaagagtttgaatagctaatataaaccccaaagtcaccatacagtttttattccaaatatgttgataaaaagatatttgtttctttatccaccttatttttattacagctaaaaaccaatacaaaccaataaaacctagttaaagctattttctggtttttagttgcaattaatttcccctagggtagaaattaaagctgattaagtcacacacacatactttgttgggggtggggggtgggcaggtgggagagggcagtgttacttggggttaggctacaattaaaaacagtatt

SEQ ID NO: 10131 - DNA, 360 bp, Homo sapiens
aaaccaatccttgtaaagtgtaaaaaggaaccctcctatcgtggaatgaaagattaagtatattaacacttttcagaatgatagtttctgtatttgatgttgctcagaaatgtctgagtatttgagtaagttttacatgacagtgggtactgaaattaagtcattttgttcagcactttaacgctttcttatagaattgtcttaaaacttctggatccttgagcaaatgattatagtctcctgactttcatgaggcttccattaggaacagaatgattgcatgttgtccccagaacactgccaccttgctatgcgaatgatgttctcagcagcacttctaagaaacactcttaaaagtta

SEQ ID NO: 10132 - DNA, 817 bp, Homo sapiens
tgagacagaaggttgtgttggggaactgaagcagtttctgtgggcggacagggaaccctgcgtttctactgtgtgattctgccaccttcctggcccgacgccatgggagtgacttgtgtgtcccagatgcctgtggccgagggcaagagtgttcagcaaaccgtagagctccttacccggaaattggagatgcttggggcagagaagcaaggaacattttgtgtggactgtgagacttaccatacggccgcctctacccttggcagccaaggtcagaccgggaagctgatgtatgtgatgcacaactcagagtacccattgagctgtttcgccctctttgagaatggcccttgccttattgctgacaccaactttgatgtgcttatggtgaagctcaagggctttttccagagtgctaaggccagcaagattgagacccggggcaccaggtaccagtactgtgacttcctggtgaaggtgggcacggtcacaatggggcccagtgccggggatctctgtggaggtggagtatggcccctgtgtggtagctagtgactgctggagtctgctgctcgagttcctacagagttttctaggcagccacacaccaggggctcccgcagtgtttgggaacagacatgatgcggtctacggcccagcagataccatggtccagtacatggaactcttcaacaagatccgcaagcagcagcaggtgccgttgctgggattcttagtgatgagcagctgcagctgagctctgtcacaagggtactccacaggaggagcagtgctgacttcagtcctgacccagaaa

SEQ ID NO: 10133 - DNA, 1050 bp, Homo sapiens
tttaagatctgtgcgttttatttttgtaaactatatctaaaacatacctcaatataaaaaaccagaaacaaaataacaaaaacggggtgagaacaaaaaatacagatgacaggttctgtagttatggtactgaactgagcttcctgtcagccaaaactagaagggaaacatgaccaccacctgacttgttgcagaggctttagatctgagcacttggatctgaaaacagtttctctttagatgccttcaaataagggacagtatccttgatgacaatacagtacatacattcacaattctccaagaccatctctgtgtatatccaaggttaaccttggatgaatatttctgcagcaggcatggggtaggcaggcaatatgaccaaatatgtagtttggaggctcaaatgaaacaggagaaagagctcaggaaccatgaagcatggtgcaggtatcagggtcaagtattctaaccctaagatcagggtgcatgagaactggagaggcctcaatactgagacttagacgaaaggtgtggaattaacttcctagtgtgactaatccaacttagctcaaagcggctctgagatcagcccttctctcaagtcaactcataaacaaatgctttagttacaggaggtattaactgcaaaataacagccaaaagcattcctgggcacgtccattgagctccatgtaacagaagccattaactgcatctcagcaaccaaattgtctttcatcttgtagtcacagaatccctgagttttaactcagcacatgactgcccagataagaggttctatgtcccagcatctctttcagcaaagtgtggccacagtgatctgagcaatgctcagtcatatctttttttaaaaatctgctcttttctctctctctttccccagtggaatgcagatatggagctgatgagtctgctttgatcttatgggtaagaaaacatactgggaatggctgaataagacagaaggaaacaaagttcctgataaccttgtagagttaaatctgccctagaccatctgattacctc

SEQ ID NO: 10134 - DNA, 2875 bp, Homo sapiens
ggaattctttatttgcaccctccctccgagtcccctgctccgccagcctgcgcgcctcctagcaccacttttcactcccaaagaaggatgaagggtggttgtgtctcccagtggaaggcggccgccgggttcctcttctgtgtcatggtttttgcatctgctgagcgaccggtcttcacgaatcattttcttgtggagttgcataaagggggagaggacaaagctcgccaagttgcagcagaacacggctttggagtccgaaagcttccctttgctgaaggtctgtaccacttttatcacaatggccttgcaaaggccaagagaagacgcagcctacaccacaagcagcagctggagagagaccccagggtaaagatggctttgcagcaggaaggatttgaccgaaaaaagcgaggttacagagacatcaatgagatcgacatcaacatgaacgatcctctttttacaaagcagtggtatctgatcaatactgggcaagctgatggcactcctggccttgatttgaatgtggctgaagcctgggagctgggatacacagggaaaggtgttaccattggaattatggatgatgggattgactatctccacccggacctggcctccaactataatgccgaagcaagttacgacttcagcagcaacgacccctatccttaccctcggtacacagatgactggtttaacagccacgggacccgatgtgcaggagaagtttctgctgccgccaacaacaatatctgtggagttggagtagcatacaactccaaggttgcaggcatccggatgctggaccagccattcatgacagacatcatcgaggcctcctccatcagtcatatgccacagctgattgacatctacagcgccagctggggccccacagacaacggcaagacagtggatgggccccgggacgtcacgctgcaggccatggccgatggcgtgaacaagggccgcggcggcaaaggcagcatctacgtgtgggcctccggggacggcggcagctatgacgactgcaactgcgacggctacgcctccagcatgtggaccatctccatcaactcagccatcaacgacggcaggactgccctgtacgacgagagctgctcttccaccttggcttccaccttcagcaacgggaggaaaaggaaccccgaggccggtgtggcaaccacagatttgtacggcaactgcactctgaggcattctgggacatctgcagctgcccccgaggcagctggtgtgtttgcactggctctggaggctaacctgggtctgacctggcgggacatgcagcatctgactgtgctcacctccaaacggaaccagcttcacgacgaggtccatcagtggcggcgcaatggggtcggcctggaatttaatcacctctttggctacggggtccttgatgcaggtgccatggtgaaaatggctaaagactggaaaaccgtgcctgagagattccactgtgtgggaggctccgtgcaggaccctgagaaaataccatccactggcaagttggtgctgacactcacaaccgacgcctgtgaggggaaggaaaattttgtccgctacctggagcatgtccaggctgtcatcacggtcaacgcaaccagaagaggagacctgaacatcaacatgacttcccctatgggcaccaagtccattttgctgagccggcgtccaagggatgacgactccaaggtgggctttgacaagtggcctttcatgaccactcacacgtggggggaagacgcccgaggcacctggaccctggagctgggatttgtcggcagcgccccgcagaagggggtgctgaaggagtggaccctgatgctgcatggcactcagagtgccccgtacatcgaccaggtggtgcgggattaccagtccaagttggccatgtccaagaaagaggagctggaggaagagctggacgaagccgtggagagaagcctgaaaagcatccttaacaagaactagcgctgcacatccgcctttcccaccgccctccctccccagctccgcctctgtcctcgctccacgtttcaggcaggcacctagcaattccatcacccgtacaggcaattccgtcttcttaatctgaagcttcactcactgtcaatgattattttcattacaatggaaacaatcttttttactctatgccccaaatatagcgttcccaacaacatccatgtcctatgtgtgactctaaattctttatttctgtcattcaaatgggtgatatcctgaaaaaaaaaaaaaaaaaaaactgggacagctttcccctcatttttttttttttttctgagaaaagaacgtattttaaaagccacatagagtgactccaagaacaattgtccatggtctcaaacaaggggctgttacataacaagaaaatcaaagctgaggaccagggtgtgagcgccaacatctctgaaagcacaggagacactgtgctataaatcctttggggagcgatgttttgaatttagtgagatttaccagggatgtagattaaggtgatgtgattcaaaagatgccattcatagagagccctagttactgcatggggaaagagatccaggaagcatgagtgctggatattttactaccaatgccaagataattcactctactcagccggcgtggcaaatataaaacttacagagcgtggctgtgctctcaccagctgctgctctgagttatgttaaaatccgctagagcagcccaaatttttctcagtttgtatagagttcatcccagccccaattttctggggctcctcacatagctacccaaaagagaaaaaaaattaagacaagcctggcaacacacctggtgaagagta

SEQ ID NO: 10135 - DNA, 499 bp, Homo sapiens
cttaataaaaacacacagttataatgtgctcggccttcattagcatcctctgcatggggtggttttcatttaacctgaattattttaacattttggctaatttgtttgctggcaatttcatggggtctaaatttttggtttggtttgcaatgtaaatcatattgtatatctggctcctttgttattaggatttactttgtgaataatatcttttaaaaattgagttatcaaaaacttaaattataatgtcatcaactaataccaggtaaatatactaatatatatgtagggcatgattaaattgcatatattttgaaatgtcaaactattttttgtttttttaaaaaaatgaatgcatctcttaaacctgtaccattaattttaaaaaagtttcatttgggtatttcatattatattttaaaatatttttctttatctaggtaggtacagggttttaaaggaaactttttctggattggaaatggataaaatatggcct

SEQ ID NO: 10136 - DNA, 1002 bp, Homo sapiens
ccgagccgggctccaaggcccgggaggtcagaaaaccgggccgcgggcggcaccgacagctggggcccgggtcagggacacgcggaggtcaggccggtgaaggcggcaggaagctggagcacgatcccaggaggaacaatcctgcaccatgactcaacagccacttcgaggagtgaccagcctgcgtttcaaccaagaccaaagctgcttttgctgcgccatggagacaggtgtgcgcatctacaacgtggagcccttgatggagaaggggcatctggaccacgagcaggtgggcagcatgggcttggtggagatgctgcaccgctccaaccttctggccttggtgggcggtggtagtagtcccaagttctcagagatctcagtgctgatctgggacgatgcccgggacgacgcgaactccaaggagaagctggtgctggagttcaccttcaccaagccagtgctttctgtgcgcatgcgcaatgacaagatcgtgatcgtgctgaagaaccgcatctatgtgtactccttccccgacaatccccgaaagctgtttgagtttgatacccgggacaaccccaaggggctctgtgacctctgccccagcctggagaagcaactgctagtgttcccgggacacaagtgtgggagtctgcaacttgtggacctggcgagcacaaagcctggcacctcgtctgctccattcacgatcaatgcacatcagagtgacatagcctgtgtgtctctaaaccagccaggcactgtagtggcctcagcctcccagaagggtacccttattcgcctctttgacacacaatccaaggagaaactggtgggagctgcgccgaggcactgaccctgccaccctctactgcattaacttcagccacgactcctccttcctctgcgcttccagtgataagggtactgtccatatctttgcttcttcaaggatacccgcctcaaccgccgctccgcgctggctcgcgtgggcaaggtggg

SEQ ID NO: 10137 - DNA, 348 bp, Homo sapiens
atggggccagggaaaatgtcaggagtaggaaggttcgggggttaagggaagggaaggaagaccagaactggccatcctcttttataatccattagtagcaccatggctcatttgaaatgaaaatattacacttattccccacccaaccgcagtgaactttctaggtaattgttttgaaaacaatttttgtatctgtgaaagtctttgctttttctttccaccttctagaaaagtctgctaccagtttccttactgaatacagccatactcagcccctctcgcatccagcccgtcagggtcagggtcagggtcaggctccctcaagacgagcaccgcattgccttggcc

SEQ ID NO: 10138 - DNA, 2375 bp, Homo sapiens
ggcctccccgcccgcctgcccctcggaggaggacgagagcctgaagggctgtgagctgtacgtgcagctgcacgggatccagcaggtcctcaaagactgtatcgtccacctctgcatctccaagcccgaacgccccatgaagttcctccgggagcacttcgagaagctggagaaggaagaaaacaggcagattttggcgcggcaaaagtcaaactcacagtcggactcccatgatgaggaggtgtcgcccacccccccgaaccctgtggtgaaggcccgccgccggcgaggaggcgtgagtgccgaggtgtacaccgaggaggacgccgtgtcctacgtcaggaaggtgattcccaaggactacaaaaccatgactgcgctggccaaggccatctccaagaacgtgctcttcgctcacctggatgacaacgagaggagtgacatattcgatgccatgttccctgtcactcacatcgctggggagactgttatacagcaagggaatgaaggagacaacttctatgtcgttgatcaaggggaagtggatgtgtacgtgaacggagagtgggtgaccaacatcagcgagggaggcagcttcggggagctggcgctcatctacggcacccccagggctgcgaccgtgaaagccaagacggacctcaagctctgggggatcgaccgggacagctaccggcgcatccttatgggcagcacgctgaggaaacgcaagatgtacgaggagttcctcagcaaggtctccatcctagagtccctggagaagtgggagcgtctgaccgtggcggatcggctggagcccgtccagtttgaagatggagagaaaattgtggtccagggagagcctggggacgacttttacatcatcacggagggcaccgcgtccgtgctgcagcgccggtcccccaatgaggagtacgtggaggtggggcgcctgggaccctctgactacttcggggagattgcactgctgctgaagccggccccgggcggccactgtcgtggcccgggggcccctcaagtgtgtgaagctggaccggccccgcttcgagcgtgtgctggggccctgctctgaagtcctcaagaggaacattcagcgttacaacagcttcatctccctcaccgtctgagcacagctcccgccctgcagccccagctccccagtgtggtggccgtgccctgctcgtctgtgtcgggggcccgggagccgctgtgtgaggtgtgggccgggtggggctgggtcccggcagcgtgaggactgccccttccccggactcactttttggaataaatgatcaccttgtgcatttccaaatcaaaggacaagcggacaaaatgcatcccaagatcaaggaagggacaggccagcttcctccccacacgcctccccggctgcctctgtgggcttctgcctggggggcccaccccacccctgccagtctcctggagatgcttgaggatcggtcctccccagaaccaggccaggacgttgcccctggggcctggtgaccctgtgaggtcaggtcccccagattgaggtctgagtgtgggcaagtgtgtcaaaaggggctgccccccaggggagatgaggctgagagcagggagttgaggccgaagaagtcaaggcccctcccgcaaatgtgtacccctgcccgcgccactgcaccccgccgcacccccacctcccccgggggccctgctgcggatgccggagtgggagagtctctgagctgtgagattgatcttgcccctaattggagaggaagccgggcgccaagacacacggggctcctgccttgggagccagggccgcggccgcaggtagaccccagtagggggggccgggctcgaagttcctttgggaggggctggcgggactccagcaggccgtcctcacctttcttagaaagtccacccagggcaagttgatgttgggggaaagcagaagtcaagccagccgcggccccacacgccccgacccgctcaaccgacttgtcccttaaatgtgtcttggatcccgcagtgatgacgtgagccagccaggcccgaaagggtgaggccagtgcagagaagcttcccaggggattcctgggttcccccgaaagacaagcgaggtcattgcagttcacccgatgttgctcctgtcccgtgcgtcccggggaggctgtccttggtccgcatggctcgttgcagcccctcccctgctgggcggttacgatgcgtgggggtccccctccccacccagccccggcaccgtcgccgtgtcccgcctgtgcctgtgacgtccctgtggacctgtgagccatcccccccttatctctgctctgaatactgcatgaagcattaaacgtgcaatgaag

SEQ ID NO: 10139 - DNA, 554 bp, Homo sapiens
cttcgacctggcctggcggctgcgtatcaacttcccctacctctacatcgtggcttccatgatgctcaacgtccgcctgcaggttcatattgagatccattgaaggccctcccagactgacgaaggcgtgacctcaggcccaccgtatccaagaacacgaagcatgagggacagaagagggcccctcggcacctgcctggcacaagtgcagcaggccggaggaggtgactcggacaaactatcatgcagccttaagaaaagaatgccggagggcccttggcctgcagatgcaccctcctggatgaataagcctgtggttgatggaaattcacaaagtgaggcattatcactggaaatgagaaaggttccgagcggggctggcctctggcttcacagtggcggcccagtgcttccatatgtaagagaatcagtaagaagaaatccagcctcagcagccactccgagcacagccgtgggtttgttccctgctccaacagagtgttttgctcgggtgtcctgcagtggtgttgaagctctgggggcagcgagactgg

SEQ ID NO: 10140 - DNA, 370 bp, Homo sapiens
aaaaatactctattccattccctttcagggataacattttagaaactgattgtctgttttaatatgaatcctccttgattagcaagttgtaaaatgttatcccctgaaagggaatggaatagagtatttttagctgtaagaacctaccagtctgttttttccctttgaaaaaaactaatgtttgagatttgtgtcttttcatctgaagcagttactccattaatagtaaagatgcctcgggaaagtcagtgaaccagaatagtgctcttgcaccactgagggtgctagactggctttgtgcatcttatttcctaagaatatcagtttttattatgaccttaattataaatacctatatataggagtaggg

SEQ ID NO: 10141 - DNA, 533 bp, Homo sapiens
ttttttttttttatctgtaaacatatgattgatttatgttttaataatgaagaaacaggaaacaaaccatttcaggggaacatacaagtaattttatcaacatagtatttgcagagaaagaattcacttattcaaaatatcacaatactgaatttcacagttaaattcacatgcagattgtaaaattatgttatgggatgttttgatggagtgtgttaaatataaaagtaatccaatgcaatactatttagcacattgtacaaaactaatttttcaatgggattaatacatttactatctttcctataaggtgtgatgtattcaaagtgctctgtagcattgagtttgaaatcaggaaacaaatactgttagagctccacagtaatacagctcagtaataaatgaacttgaatataatgtagatgagatctactcataaaactttaagacagatgatggagatttatgatgtgcagtgagtaatatccttgaatagggagtagggcagagggacttcgtgcatgtatcaatac

SEQ ID NO: 10142 - DNA, 390 bp, Homo sapiens
ctggttcgagactccaatcctgtttcgaattgctgcttgactccccttgggctggggataatggaagttctttcccttcccaactctttccagacccaagcactctgggactcactccatagtccaggagttccaggttccggattatgttccatggcagcagtccaagcaggaaaccaagccatctactctgcctccagtccaacaagccaacagccttcatacaagcaaaatgaagactttgactagggtccaaccagtgtttcacttcaagcccactacggtggtgacaagctgccagccgaagaatccaagagaacttacattagaaggcggaagttggaccctgggaagatgcatgccaaaatctgggttaatgaagacgtcgca

SEQ ID NO: 10143 - DNA, 1269 bp, Homo sapiens
ttagaagaaggaaaacctgttgatctagttcttagctgtgtggacaattttgaagctcgaatgacaataaatacagcttgtaatgaacttggacaaacatggatggaatctggggtcagtgaaaatgcagtttcagggcatatacagcttataattcctggagaatctgcttgttttgcgtgtgctccaccacttgtagttgctgcaaatattgatgaaaagactctgaaacgagaaggtgtttgtgcagccagtcttcctaccactatgggtgtggttgctgggatcttagtacaaaacgtgttaaagtttctgttaaattttggtactgttagtttttaccttggatacaatgcaatgcaggatttttttcctactatgtccatgaagccaaatcctcagtgtgatgacagaaattgcaggaagcagcaggaggaatataagaaaaaggtagcagcactgcctaaacaagaggttatacaagaagaggaagagataatccatgaagataatgaatggggtattgagctggtatctgaggtttcagaagaggaactgaaaaatttttcaggtccagttccagacttacctgaaggaattacagtggcatacacaattccaaaaaagcaagaagattctgtcactgagttaacagtggaagattctggtgaaagcttggaagacctcatggccaaaatgaagaatatgtagataatggactgggatatattgtatttctcatgttaaagcctcttcccttgaaattaaaaaaaaattttaactgataaaacttagggcaacattaattaatgtatattcttacctgaattgttatactttttgaaaatcctgtgacttgcctgtttctccccgctccaacgaaatcattaactctcctaaaatgtgtttcattctagtaagaaaacctcaaaggatattgtaggatataaatcttacttgaaaacatagctgttgaaatgttttggccttttggagtgggggaaggacaaatctgatcctgtaatctttttctttccagtaatcccttgtgtctgttgcatgaggacatggacaataaagtagtatatgatcctcagatacagggagaaggacaaggcatacagcttattgattagagctggcaagcatctgctcattatgtttggaattgctttctataagaaaattgcccactactactaacttgatcaacaatgaattcaaaatagttaacctatgaaataacatcctctcaaatgtttgctgatg

SEQ ID NO: 10144 - DNA, 706 bp, Homo sapiens
ttttttttaacgtttgtttcatattttattgaatttcatttatattaaattaaaaatatatttctgacagattcatgtaacaaaaaggcagaacagttttcaaattgttcagctgggatgatcagtatggaatgaggcaaagcagttcgcattctataattgccttgtacaggtacaattctttcccaagagccaaaagaggatccttgagaactaacggaaaagcctaattacataaatgtaaaatactgtttctccctcattctcaaataacaacaggaatgagggaaaggaaggaggatgggtaaaaggttggaggagaagaaagaataagagaaagtatactaaaaatatgcctaacattaaaaaagttagtatgtgttaggtgcatgatccttcatcaataacatggaaaaaaatcaaaataacattacaccacacacaattggcatatcctattgtgtaagcgagtgcagaggttgaacacatcacaatagtgctgaacacagaatcacaagtaatgtcaaaatgataacttccaaccaaaaaagaaacaatcacaggccaattacttatatacaaatcaaccctaaagacaattatgttccaaataaagatgtccacaaaagaaaatcaaagcaacattatacttatttacaaatgcaactagccatgtctttaacaagctataaaaatacttattcac

SEQ ID NO: 10145 - DNA, 344 bp, Homo sapiens
gggtggggtgaacttgcctgtacttgttcaaacttctatgcactgaaactcttgagtacagtaagacgtgcccatcacgtgagagcatatgcaatcattacaaagctttggcatgcagttttctgcttggatcaagaatatcagtccttaccctaaaaatgaatccccataggcattcatttgaattgccaatacttttagaaaaaggaaatcgttaagtgccaccttgtagccattaaaaccatggccggacagttcactgaagctcagtcatagaaattcagccatgatttggaagcattgttttgcacaagcttaattacatcaagcaattcatctgtaca

SEQ ID NO: 10146 - DNA, 450 bp, Homo sapiens
  misc_feature (1)...(450): n = a,t,c or g
tgaagtcaaatatttagaaaagcttgagaaattcatttgtagaaggaatctgaatgacaggttctgtgtaactttaaattcagcctttctgggtcctaggttaaatgctgaatggacttgaaaacagagagaagctgaggacatttaagaactaagtcagttcctttagctattaggggtgggtagagagctgggtggtgggttaaaagggctgatcaaggtccttaaatatccgatgttaagtaaaggtatcacagagagtaattttanggaaactaattcctctgctttgtttccctgtcagtgtgcttctgcagtttagcatttgatcaaacactttcttttcatctccattttaaagttaacttaacaggcctgnctctaaaaattgacttggtctaatagaacaattgtgtgctgacagctgacctggatttaagacagaaaggg

SEQ ID NO: 10147 - DNA, 344 bp, Homo sapiens
ctgcgtggagtgttcggccaagaacctgaggaacatctcagagctgttctactacgcccagaaggccgtcctgcatcccacagcccccctctatgaccctgaggccaagcagttgaggcccgcgtgcgcccaggcgctgacgcgcatcttcaggctctcagatcaggacctggaccaggcgctcagtgacgaagagctcaacgctttccagaaatcctgctttgggcaccccctggccccgcaggccctggaggacgtgaagacggtggtgtgcaggaacgtggcgggcggcgtgcgggaggaccagctgaccctggatggtttcctcttcctgaacacgctct

SEQ ID NO: 10148 - DNA, 1552 bp, Homo sapiens
aacggcgggcctcacctggacccggggactcttcaacgaggggcgctagcctggcccgactgggcgagtccccgcgtccctgcccgttccgtcgctcagttccacgacacgctcccctgccgccccgcctgttcgcgggtgggtgggcgcttccctcggctccccgtgacactttgcagacgctccccggcgccgggcatgggcgccgccgccgtcggtccccgagccggattccgcgagcggtgcccctgaggccctcggctgctggggtccgcaggaagccgcgccatgaatgaccggagcagtcggaggcggacaatgaaggacgatgagaccttcgagatctccattcccttcgatgaggcaccccacctagacccacagatcttttacagtctgagcccctctcggagaaacttcgaggagcctccggaggctgcgtcctccgccctggctctgatgaacagcgtcaagacccagctgcacatggctctggagaggaactcctggctgcagaagcgcatcgaggacctggaggaagagagggacttcctgcggtgccagctggacaaattcatctcttctgctcggatggaggcagaggaccactgccggatgaagcctgggcccaggcggatggagggggacagccgtggtggggctgggggcgaggcctcggaccctgagtcagcagcctcctccctcagcggagcgtccgaagaaggcagtgccagtgagaggaggcggtagaagcagaagggaggtgctagtcggaggcgctttgggaagcccaaggcccgggagaggcagcgagtgaaggacgccgacggggtcctctgccggtacaagaagatcctgggcaccttccagaagctcaagagcatgtcgcgggccttcgagcaccaccgcgtggacaggaacaccgtggcgctgaccacgcccatcgccgagctgctcattgtggcccccgagaagctggccgaggtgggcgagttcgacccctccaaggagcgcctgctcgagtactcccgccgctgctttctggccctggacgacgagacgctcaagaaggtgcaggcgctcaagaagagcaagctgctgctgcccatcacctaccgcttcaagcggtgatcgcaccacgcctccgcgcctccacccgggccttcctcccccgtggaccccggtggatgacctgcccctctccccgccgcgcccctgcccctcctcctcgctccctgggttgggggctcccttagccgggcccccaagcgcgacggccccggacacgccgcggccccttcccgaacgccggcacccccttccgcttgggctgcccagccctgtcctcgccgggccccttcctcctggaaaaccaggcaggcgggtgcccccccctcgagtgggggactgtacagaccccgtctccgccctggccccgcggaggagctgcccacctgattcccggacagacctccccaactccgcgtgagacagagaattattcagataatttaaattaaaaaacgacgtgaaaatttggaataaaaaaaaa

SEQ ID NO: 10149 - DNA, 368 bp, Homo sapiens
gcctcccaaagtgcatgagccaccatgcctggcctgtttagttttgtttcaagttgaaatacctttcttgtgttttctaattagaaaagtaatatctactcattgtaaaaactcaaacagtgcagaaatgtagaaagtagaaagtgtaagtccctggttgtcccttctgcctgagcacaaccactgctcacagtttgatgtatatccttccagagactctcaaatttaagcaaataatttttattaccatgtctttttatttgaagaccgtacatttgcctccaaagttcaacacaagttcaactgaccatatccttccatgacctgaatagatgctatcctttatcacgatgttcaattgcctttga

SEQ ID NO: 10150 - DNA, 1060 bp, Homo sapiens
ttttttttccataacatcatgctacctagaagaaaaagaaatgaaggtaagcagtcagccaggaaagtcaggaaaaatgatatgctacttgtaaagagctcccctatattgtatcattctgaaatgtccaattttcaaagagtcagagtagtacagaaatgttcaatgttaaatcactactcaacataagcaatctgactttgatggttcacaagctcttccagatcttgtcgtgccttaaagttctcactaacaatatcaattatcagtgcactacagatatataggaaaaggaaaatcccaggtaacagaaaagccagatcacctgcctccaagatgccgggcactgcacggcttttatcagtttttattacatcaggtcaaggaaacaaatggaatctatccacatggtcctgcctcgttgggcatatattctaaacatacatccattttcatacccaatgagaaagaactcaattccaaaggatctcacctttcacaaaattctacccttaagatcctaaaacagtcatatcactgtgcacaaaatttttggcagtcacaagctctaacacaaagcagagcttaaaaacaaatggagaatataatcagtgttcaaatgcaccctcactgggtgggtcagactgcatgaggcagtgtggctgtgtggagggagaggtccggacctgtggcaaactgctgctcctgccaggaggcttaccaaaggccaaggctcttaacatattgaggttcctcagctgccccagtgcctatatctctaacaacagtaaacagtgaaatacctgcaggcaaccatgtctaaataaagagataaatatttgaatcttcaagaagtggccaacttcagaaaggcatctcttggcaccctagaggagactgggatgaaagttgtaccggagactggagaagagcccgatgtgtttcacgaggttcggctccactacataggccctctctcccttggccctcaacagcgagtacagtgccatgtccttgccaaagcccttgtggcagtacacttgggacaggtaggtgaggg

SEQ ID NO: 10151 - DNA, 199 bp, Homo sapiens
ccccttcaaattaaagagaaagtatgttgcaaatgtattttctcattttactgcttagtgtttttgccacctctaagttttctttttattgccaaatccatcttcttatctttggtttcttccttggtgtcatgcttagaaaggttttcatcccctaggttatataaatacttgcttatattttcttgatttttaaaat

SEQ ID NO: 10152 - DNA, 651 bp, Homo sapiens
tcccggcccgtcccgcttagttttcggtttgacaatgccatgaagcagatgagcgggacctgaaagacctgacccacagccgacttccgaaccaagaagaagaagagaaagcagggcggcagtcctgatgagccagatagcaaagccacccgcacggactgctcggacaacagcgactcagacaatgatgagggcaccgagggggaagccacagagggccttgaaggcaccgaggctgtggagaagggctccagagtggtaagtggctctggctgggcattttctgtctgcaggcagggcgagctggcctaaagagtggtgctctccctgggggccagaggcaatgctgtgtcagctctgcgtgcatggtgaccagcatggggaggcagtgtggtctggcagaaagcacaggctgcctagctggaggcacagtttccttgttggaaaatgggatgagcccctgtgcaccaggtagtgggaggatgtgaggtttctggcacatagccgggccttgtcatttaaagccattgtaaataactgggctactctgggccaccctgcctataggatagccctgctctgtctatggagcaagcagctgttttactatataccgttgctctaataaactcggtttcttttaaaaaaaaa

SEQ ID NO: 10153 - DNA, 101 bp, Homo sapiens
cctcttggtagcatcaacactggggataaatcagaaccattctgtggaatgaaatgtttctcaagagcctataatatagtagatagtgcatattaagatgt

SEQ ID NO: 10154 - DNA, 211 bp, Homo sapiens
tcatgcatcaccatggccgtcatttcattcacatcagacacagcggcctctatttggtggtcacaacttcagaaaacgtttctcccttcagcctcctagaactgctctccaggttggccacccttctgggcgattactgtggctccctgggcgaggggaccatctcccgcaatgtggctctggtatacgaactcctgggatgaagtgctgg

SEQ ID NO: 10155 - DNA, 581 bp, Homo sapiens
actcaaaccacggaagaaaggacacaattatatcatgctgaaatagatgcactttataaagatttgacagcaaaaggaaaagtattgattctttcatcagaatttggggaggctgatgctgtctgcaacttaatcttatccttagtttattacttttataatttaatgccactctctcgaggatccagtgtaacttgcttactcggtcatcgtgggagcactgatggcaagtggaaaagaagtagcaggaaaaattcccaaagggaagttagtcgactttgaagctatgacagcccctggttcagaggcctttagcaaagtcgccaaaagctggatgaacttgaaaagtatttcaccttcttataagactcttccatcagtttcagaaacgtttccaacgttaagatcgatgattgaggtgctaaacacagactcttctccacgttgtcttaagaaactctagttctgctgctgtatttatacaagtaaagggccggacctcttgcttcttaagttattttttaaaacatggaattataaagaaattaggtcctctattacttttgataccaattttatag

SEQ ID NO: 10156 - DNA, 164 bp, Homo sapiens
cccagcccctcccccaccccggcatttcagcgtcaagtgcacttagcggggtacccggctcccccagcccccacacccgtcctgggtctcagggtggttccagcttctccttgggcagccagaagttggagtcccatcccccaaggcacatttttttttttttt

SEQ ID NO: 10157 - DNA, 182 bp, Homo sapiens
aaattattataaacttttgctgctgtttaataaaccgtgaagatgtctcgcagtcctgatgcgaaggaagaccctgtggaagtgccctctttgcatggaagcccttggagatagatgatatcaactttttcccttgcacctgtggctaccagatttgccgattttgttggcatcgaattcgc

SEQ ID NO: 10158 - DNA, 104 bp, Homo sapiens
ataggaacctctcctccagggcagtaaatcacctgcatttctggagttgtcggtattgtattcgaaaaggcctggagcccctcctgctcaggaaagaacctttt

SEQ ID NO: 10159 - DNA, 640 bp, Homo sapiens
  misc_feature (1)...(640): n = a,t,c or g
tttttttaaaagtataaataaacagttaacagtttattgtatcagaaaataatttaggaaaatgaaaataaaaccagttttggtatacatgggtgagggggcgggggaataaagttctaaaacattcaatgcaaaacctgtgaaaaaagaggccatgtggccgttgctgtttaatttcttgtcctgtggttcagcttcaggtttgtgaatttctagttccatgggtgagctgaggaggaggggggacaatgggctccatctttaaataaatgcaatgagacctgggtgaattcaagggttatttgaacgcactaggagcatccacacggacctgggtccttctatttctcagatctgtgactcttaggacagatgccccatggggggaaaatcccagtcaatagtttggggtgttttcactgagtatcctgtttattccctnaccattgcccagatacggcccatgggccattgtttgatgttgtggaagtccaaccntccattggttgaccacnttttccanttaattctaggcanttaatgntcatngggagttagtgcttgacagtcagttggcaagtgctttnaagttatcagtttcttaacctncttgggcngttttcccggggtnacctggggg

SEQ ID NO: 10160 - DNA, 764 bp, Homo sapiens
gaggaaagttcttagagttatttatattcttgttttcctcttagttagaatctacagtttaactttatctttaaattatttgaacatatttgatatgtagcttaaatacaaatgtttatagataacctctttaccataaactaatccctggcaagccatggctctctttttttttttggtgtttaaagcctgtaaacagtttttctgaatgatcatgaacttttcttggtttagcactaggatttagctatgaagagagctcataggctttcaggtgctaattgagatctgccctgttagagtcttggggtgctagattggtcacattgacaccagtggcagggaaggcatctatgagtttgatgctttttatcacacacttcagtgtttagaaagttattaccaatacttttaaacaacactccaagaaaatttgctatatttctttctcatcactacagagagagtagatttccccatagagagcacagcctccattagtaaggttggtgactattggtaagaggtggacttcattgacaccaagtgggaggtagggaaagcccagaaatggcaggatgatatggtggttctgtcgttgggaaaggtattgggttttgctgtttgtatttatactgtataatagataccacgctttttcttattatctgtatatgtattgcttttcatgtttgatattttcccatgccaagatttgtttatatatattttcaatgttaaattaaattgatttgggtaaaaaa

SEQ ID NO: 10161 - DNA, 980 bp, Homo sapiens
tttttataaattacattatttattttttagatcatccctcttagtcctgcatgcattgttagcacaaaaagttgaacttgatcacaacttcctttgaagagagagtaggtacacaatgaccatctgaagagtttctccacggagggaccaagaattccagacgctggtaacactgtcagtaacctacacaactttcaatacaaaaaaatttaccaaatatcctgtttaatgtaaacaaggcaggaggcaaaacagagtattacagtaacactattttacagggcccagaaaatgtgattatctaccatgttttaacacataaagtgtcacaatgacatgcatatttgatttactacataacccaaaatataattaccatatagtgtggttttagcacttcactgtaacgtcttctgtcaatactgatggacttcataattaaatggcaattgtatgttaatgcaataatttatgaaaacattaccatgaatttatgaagtaattccataatttgtgccctgtaaaattaagtgtaacaatgtttacactagcaacagtgtaagcgagctaagaattttggtccttatatatatacatatatacatatatacacacacaataatgtacaattaaaccaaaaagctatgaatccactcacagcttccatattgcacaaacagatacattacgagaaagttacatagttataaggtgagtactatatggcaataggctaagacaaatctgagttctatcaagtaaagaatgcggctcataactaaaaacaaatccaaagactatattgttagaaagttttaaaaaatgtgcatatttattgatacaaatgtgaagcaaggctgaaattcactttggaacttgctatggcaatcaattgttatgacggtgctttccactcagcatagtgcattttagttactgtttttgcaagtactgagtaacagaaatattcagctgtcaac

SEQ ID NO: 10162 - DNA, 108 bp, Homo sapiens
cagaaactgttagtgggtttgcataagttcaatgagaaatctgttccttgtaataggggcacaatttgaaaccattgggatatatttaccaaggcttttgactggaat

SEQ ID NO: 10163 - DNA, 492 bp, Homo sapiens
agtccatctggtcgtctcctcctgcaggctgggcagctggccaccacttctccgactcgacccctccaacaagcatcgcagggcactgtcctcgggggtacagaccgtggtcccacattcgctaccactctgttccacgtcatccaggtacacgagctgcgtgtaggccgtgctgtctggggctcgaggctctttctgctggtgctcttggacgggcgggtagttctgctgcagagacaaagcatctccccttcccttccgggctgattttggttcattcatatctacgccagagtccaaactggcatcattacttccgttccttccagctctttggagatcaatgtatgaatgtctaacgtgagcgttggacctgccatccaaggagacgaaccacgcccgggggtgcggaagcggcttcccacccccaagctccatcagggccttttcagtcaggagctgcacctcactgttcatctgagccaaagccgc

SEQ ID NO: 10164 - DNA, 424 bp, Homo sapiens
gaagagctgggtggccctgccatattcttcctcccgccttcctctcgtgtaacctgcggggtaagttaagccaggaccttcgctgcaaacctggttttattgctccttcagtctccagcttccatcctccagttatctagccaggaggtcccaagagttagggaaaaagaatgtctgcctagacctcaaagtctttgagttttagagtctgttagtaaaaatggcactttgattcccatttgggatgagccctctcaggaatcctgtggggaaggggggtgattatagggaaggacgcaggcattcctaggtccccagctctaattccatccatctacccaactgtcaccatctttgcaccaaactgtcaccatctttgcagcagaaggtcactactcacattatagtaagaggggaaaaaaat

SEQ ID NO: 10165 - DNA, 786 bp, Homo sapiens
ggcccctcatcctactaatgtgatgctttcattatggccctgtggattagaatagtgtcagttatttcttaagtaactcagtacccagaacagccagttttactgtgattcagagccacagtctaactgagcaccttttaaacccctccctcttctgccccctaccacttttctgctgttgcctctctttgacacctgttttagtcagttgggaggaagggaaaaatcaagtttaattccctttatctgggttaattcatttggttcaaatagttgacggaattgggtttctgaatgtctgtgaatttcagaggtctctgctagccttggtatcattttctagcaataactgagagccagttaattttaagaatttcacacatttagccaatctttctagatgtctctgaaggtaagatcatttaatatctttgatatgcttacgagtaagtgaatcctgattatttccagacccaccaccagagtggatcttattttcaaagcagtatagacaattatgagtttgccctctttcccctaccaagttcaaaatatatctaagaaagattgtaaatccgaaaacttccattgtagtggcctgtgcttttcagatagtatactctcctgtttggagacagaggaagaaccaggtcagtctgtctctttttcagctcaattgtatctgacccttctttaagttatgtgtgtggggagaaatagaatggtgctcttatctttcttgactttaaaaaaattattaaaaaaaaaaaaaaaaaaagtcgcacc

SEQ ID NO: 10166 - DNA, 488 bp, Homo sapiens
ttttttttttttttagacttgtaaaacaattttaatgtttactcaaaataaatgagatgtcatcattagcccttatctctcacacttgaaaaatggagacagttgttcagaatagaaagggaaacagctattagagtttaagctcaagtttcaagaagaattcagataaggcaggtaaaaactctagatacttttccactgtccaacatcaccaaatattaatttccacatacctctttatttcataaaaatataaatatttattagaaatagtatgtttaagattagtttttctttctaaataacatgatttcttgctttaaaggaagattccctaatagtgccacctatttcataaactgtcctgcagttttgtgctttttaaaaattctaatttactttgatttaaagaataaatatctcatacccatggtgaactattttatcaccccaaaatacaaatggatccggattttacaatgaagaaa

SEQ ID NO: 10167 - DNA, 439 bp, Homo sapiens
  misc_feature (1)...(439): n = a,t,c or g
ttttttttttttaaaatctcagatgctgctttatttaccaaaggtgctggcttggggctggttctgctggccaagccanggatggctgtgggggtcccagctcagtcttccaagggcgagactgtacagccttgctgtgggtaccagcactgccatctcaggaaggcactttcagcttcggggtccccaggaagaactgcaggacgcggtcggccagggagcgccaggcagaagtccaggagcaggacctgggcaatgaccagcttgaactccacagggatgtccacgaggccaaactggctgttgaagtcgggcgaggagcgagggagcaggccaatgatggccagggagtgaaactgccagactccacaccaggggcttgttctcgggcaggcttttccatgaagggcgggctttgtaattnatggcnaaagtnggc

SEQ ID NO: 10168 - DNA, 372 bp, Homo sapiens
gtggaggagaagcacaggtctctaagtcatcttctctggacagacgcctcaaccacaacaattcacaattgcaatgcaaggggtttccaccaaaacttaatgcaaaagtagatgggcttatgattcctgaggttgctagtacctgagctcgctgaaagagagggtcaggtggtagcttctgcaatttatttgatgtcacatctaaccgagtcatcttgtgcaaatgggagaaggtccccttaggaatgttatcaatcatattgtgatccaaactaagggtatgcaagctaaccatcttctcaacagcatcccaaggaatggtttctagattattataggacagatccagctcctcaagggcgaagacatcat

SEQ ID NO: 10169 - DNA, 833 bp, Homo sapiens
aggctgaatagtagatggaatggggggacagtgtgcctggtgtgaggaagacgtaagatccccaatttggaaagcatgcccccctcccttttagtagaagcccatggttgccctttgccaaactggggaggaggcaatgagccttggtggaaggaacctctctgttgatatttaaagaagtgagggctgtgggtattcattgttagaaatgccaatttcactttgaaaccatagtccaagtctctaggttggtagaagggaaaggaaggaagtggtcccagtgattctagatctggttgggaaacttctgcctcatgactctgtcctttgagtcctttggacagcagcacaaaacataacaatttttatttttaaacagacccattctttttgatcccacaggagctgtggttgggtcggccgtagccccgggatgtggtttaagtggattactgcctagctgagccaaaatgtttgcttgtacctgttggaccactacagcaaaccgctgcttacagtgcattgtgtatttctgtagtactgttttgcattttccatagagacagaaaactttgcaagtcaatcactgttgttcccatggtactgtaagaaaaaaaaaaaggaaaaagaaaaaaaaaaagaaaaccagccaatcattgcgtgtacagagctaaaaattgtaattaatagagcctgttgggaaaaaaaagaaaacaactgttgcctttttttcttgtataaaagagaatttatgacaaaatttagctgtgaggaatgtgatacgtggtttatatttctggaatatgggaccaaattgattcatggggggtatt

SEQ ID NO: 10170 - DNA, 1997 bp, Homo sapiens
tttttttttgaggcaattattgcatttattattcaccataaaagtgattaatatcattgtgctcattagtctttccaaggggaagataacttttatcccacagttgttattaaaacattatctatattggacggagtatatagaaacacaatagcaacacaccaagtcagtcacgactaacagtttatgcacacaggtgaacgatagtttctgcaccacattttgtctttgtaataagcatattctttcctcagtggctcactaaaacaagttatattttgtcttcaccactaatttactcagaatttattagtgaaccaaaaggtttcactgttcttattgaactaaatctgagatatcatattgctgttttggcctggcaacaatttcagttactcttttgaaaagcaccttaggttttttcttccaaattgctcgtaattgaaaactttaaaacttctttttttcataatgaagtcataattcttcctttattactatcctacagccaggatgagttttcgtagctttaatgtactaagttgtattataacacatacattgctattaataatcttggtaagctaatcaactttttgctacaatataatccaaaaaagtatgtgattgataaccacattcattactgtgctatggaaaaaaaaacaagatcttttattttgtgaagttttctaagaaaatcatttgcatatctagaattttattttcaaactaagtggcatgaagaactgcttcaaactgcccccaaaggcattttaaactacaccagaatgtggagctacaataaaacaattttagcaacaatgcaggaaatacttggtactatgcctgtgtcaggttttataataaagtggcatgtcctgtggaatatctatttgtgttttgttttggttttatttttaaatcactcaccaagtatttgcttttttatactatcttaaaaactgggaacaaatactccctcaccctgggtctctgtgtgcataaagaggcaaaggcacgtactgtttctctacatacggggtcaacattccactaataatagcaaatctccctttattatagatattagaactctattgccacttgggcaagtcaatcaagagggcttagacgacagctgggcaaattttaatgtgtttatttctacaatttctttttattaaaagtcttgtgaaaaaacggaatcctataaatagtaaaaagggagaaacagtgctccatggcctgaagcaaatggtgtcaatacatgtgtaaacaaggtaagactgctcggactattaaaagcacaaaaataaaactagtcacagatagcaagacttcatttcaggagttgggagtgggaagtaggaagtgtttaatcccaagttttggtgccctaaaatggctagtagtatagttaattctcaattctctagctgtgatcttctgtgccttctatctcttcctaaggaaaaccacattagatgaacccagggctcagtcattttagggagagggttgagacaacactgccagcaacacagctggaatcacccgagtcgggaacattaaagttcctgagagaatatgaaacaactatcaacataatatttctccctacttttacagtaaaatattggaagtaaataaatatagggaatgcaacaactggctaggagtgttttacattcagttgtttggaagcataacacattcagctcctttgaatcttcccgttagaaaatacagaattactctatcaccttttaaggtacagtaagacaagaaaaaaagtcatgtgaggataatacagtctttgcattaaaggtgaatctgcaacatgaaatctgctcgactcacagatctggagattcatagggaagataagctctaagtgaccatgtcacagagatatgcaggtgctgaatttcttagtagatgctgcctgagtaaaccagatgtggctactgggcaaagggaggaaagaaaataaa

SEQ ID NO: 10171 - DNA, 676 bp, Homo sapiens
atgtattgtagttgcctaatttcaaggttctaatttggaaatctgatttattttgtatgtttttatatacataccaattttaagcattatcttgcaaagtagacataggtggtgtttgatttgccataattaacttgaatttgattttgtaaccaaaatgtggctgtccacataattggagatcagtgtctttgggcttttaatggagaacaaatcacattgtgggtgttgctggtttttctgtttcacatttacttttgctctaggaagtatttccgtgagtctgatgactccataagttatgatcctcagtgttaagtaacttaggacggttgggcattacttttaatatttcactttaaggcttctggtatcctttttttctggtatttttcccttaggggaattttaattcggggtcttcccccaaattttacagctttaaaaaaattccatgaatgggttttcctcaacctcagaatatcataataaattacaagatatgaccccctggttcctattaccttgattaaagtggcggcaattaatttactgatgttttgtcagtgaaataaataatagcatcttatgaagtttgtgtatctctgatgaaaatgagtcatgtcagattccctctctgaagggaagttaaataaccaccatttttaaaattctt

SEQ ID NO: 10172 - DNA, 436 bp, Homo sapiens
agctaaaggttttgaaattttccttgtgacatttaagtcttttattgtatgctgatttttatgattatctaactgtttcataatggttattcttgcctccatgaaagggaagactagaacaaaaaactgacaagaacaagttctagctccatcacggacttactgaatgaccctaggcaaatcatgtgggctctttcttgtgttttaagttttacctccaatgaagtaactacctcagactagctgtgaagctctcataaggtgatggatttgaaaatgccttggcaaagtatcagcaattcatacacagaaaatttcacgtacttctatatattggcatgatgcccacccagggttaggttaacagttgttgatccaattatgaaagaaataaaaagaactctttaaaataatgaagtaaaatagctaattttcc

SEQ ID NO: 10173 - DNA, 3146 bp, Homo sapiens
gagtctgtcactgcagaaaaacttccaactccacaggaagaaacaagcctcacattgtgtccagactctcctcagaacttgaaggaagaaggagggctggacctcccctctggcagaaagcctgtagctgcagccacgattgtccccaggcaggctgaagaggacctcaccttaccccaggactccgctatgacaccgcctctgcccctacaagacacagatctctcatcagccccaaagcctgtggctgcagccacgattgtgtcccagcaggctgaagagggcctcaccttaccccaggactccgctatgacaccgcctctgcccctacaagacacagaactctcgtcagccccaaagcctgtggctgcagccacgcttgtgtcccagcaggctgaagagggcctcaccttaccccaggactccgctatgacaccgcctctgcccctacaagacacagatctctcgtcagccccaaagcctgtggctgcagccacgcttgtgtcccagcaggctgaagagggcctcaccttaccccaggactccgctatgacaccgcctctgcccctacaagacacagatctctcgtcagccccaaagcctgtggctgcagccacgcttgtgtcccagcaggctgaagagggcctcaccttaccccaggactccgctatgacaccgcctctgcccctacaagacacagatctctcgtcagccccaaagcctgtggctgcagccacgattgtgtcccagcaggctgaagagggcctcaccttaccccaggactccgctatgacaccgcctctgcccctacaagacacagatctctcgtcagccccaaagcctgtggctgcagccacgattgtgtcccagcaggctgaagagggcctcaccttaccccaggactccgctatgacaccgcctctgcccctacaagacacagatctctcgtcagccccaaagcctgtggctgcagccacgcctgtgtcccagcaggctgaagagggcctcaccttaccccaggactccgctatgacaccgcctctgcccctacaagacacagatctctcgtcagccccaaagcctgtggctgcagccacgcctgtgtcccagcaggctgaagagggcctcaccttaccccaggactccgctatgacagcacctctgcctctgcaagacacaggccccacctcaggtccagagcctctggctgtggccacccctcaaaccttgcaggcagaagcaggctgtgccccagggacagagcctgtggccaccatggctcagcaggaagtaggtgaggccttaggccccaggccagcacctgaggagaagaatgcagccctccctacagtcccggagcctgcagccttggaccaggtccaacaggatgacccacagccagctgcagaagctgggacaccttgggccgcacaggaagatgcggattccactttgggcatggaggccctcagtctccctgagccggcctctggtgctggggaggaaatagcagaagccctttctaggcctggacgggaagcatgtctggaagcgcgagcgcacacaggtgatggggctaagcctgactcaccccaaaaggagaccctggaggttgagaaccagcaggaaggaggcctgaagctactggcacaggaacatggacccaggtcagcacttggaggtgcaagggaggtccccgatgcgcctcctgctgcctgccctgaggtcagccaggcccggctcctgagcccagccagggaggaaagaggcctgagtggcaagtccaccccggagcccacgcttccctcagctgtggccacagaggccagtctggactcctgcccagagtcttcagtaggggctgtgtccagtctggacagaggctgccctgacgcgcctgcccccacgtctgcaccaacctcccagcagccggagcctgtactgggtctgggcagtgttgagcaaccccacgaagtacccagtgtccttggcacccccttgctgcagcccccagaaaaccttgccaagggtcagcccagcacgcccgtggacaggcccctgggccctgacccttctgctcctggtacccttgctggggcagccctacccccactggagcccccagccccctgcctgtgccaggacccccaggaagactctgtggaagacgaggagcccccaggctctctgggcctcccaccgccccaggcaggagtccagcctgccgctgctgctgtctcaggaaccacacagcctctggggactgggccgcgagtcagcctctcgcctcactccccactcctcagccccaaggtggcctccatggatgccaaagacctggccttgcagatcttgccgccttgccaagtgcctcctccctctgggccccagagcccagctggccctcaagggctctcagcccccgagcagcaagaggatgaggacagcctggaggaagactcgcctcgggccctgggctcgggccagcattcggatagccacggggagtcatcagccgagctggacgagcaggacatcttggctcctcagaccgtgcagtgtccagcccaggccccagcaggcggcagtgaggagaccatcgccaaagccaagcagagtcgcagtgagaagaaggcccgaaaggcaatgtcaaagctgggcttgcggcagattcagggagtcaccaggatcaccatccagaagtccaagaacatcctctttgtcatcgccaagcctgatgtcttcaagagcccagcctcagacacttatgtggtctttggcgaggccaagattgaggacctgtcccagcaagtgcacaaagccgcagctgagaagtttaaggtgccctcagagccctcagccttggtccctgagtcagcacccaggccccgggtgaggctggagtgcaaggaagaggaagaggaggaggaggaagaggtggacgaggcggggctggaactgcgtgacattgagctggtgatggcgcaggccaatgtgtccagggccaaggccgtgcgggctctgagagacaaccacagtgacatcgtcaacgccatcatggaactgaccatgtagccactgaccggaagctggagccatcctacgccttccctcagctctgctactcaataaatcggtgtcccttc

SEQ ID NO: 10174 - DNA, 398 bp, Homo sapiens
caagtcccaggtggtggacctcaaggccgaaggtaattgggaggagctgatggataccacacggccggacatcgaggtcaaggactggttcgcagccaggccagattgcgggtccaagtaccagctgtgcgttcagctcctgtcgtccgcgcacgcgcctctggggaccttccagccagacccggcgaccatccagcagaagagcgatgccaagtggagggaggtctcccacacattctccaactacccgcccggcgtccgctacatctggtttcagcacggcggcgtggacactcattactgggccggctggtacggcccgagggtcaccaacagcagcatcaccatcgggcccccgctgccctgacaccccctgagcccccatctgctgaaccctg

SEQ ID NO: 10175 - DNA, 243 bp, Homo sapiens
ccaagtgccgtggaggcagatgatcatggtctgcctcaactgtctggtttcctgtaaaataaacacattgttttatatttttagggaacaaaaagtgctgctatagggttcaaagttttccttctgaacacttttccgaaacaaattaccccaaagacacattttgaatatcctggtcacatctttggatctgtaaaatataccttttagtatggcacctgttaaaatgcaaagcaaaatttt

SEQ ID NO: 10176 - DNA, 444 bp, Homo sapiens
ctctcctaaatccctcgtaatattcaaagtaaaactgatggaatcctttgataagttactacaagtttagcatcactgattaccttcaatgcacttgcaagtgaaccacagctaatctgtaaattaagaattcatctacaaatggaagcaagaaagaaaaaaagttgtttttcttaagcaaagttggaaataaacagaaaatctttttctttaaaggatggtggagtttcaaaaagtgaagttgtctatgcaatttaagtgtagaaattacctgaatcagtaatactaatctctccctccccacaaaatgaaaattttaatttcctagaaaataaccacagacagcagccatgagactttattttgcaacatgtggagctacaagtgaagaaaaaagcaccagaaagtaaaggcaaaaagaaacaaactctcctcgtcccgaat

SEQ ID NO: 10177 - DNA, 817 bp, Homo sapiens
gaaggaggaaggcttataaactggggttgggagaaaggaattgagtgaaattgctgctctgggacttggtgcccccgtcctactctgggcagcccctgcctgcctctcccctaagccccctcccccactatccctccccctggactggactggggtcgtcctccggtccccaggtatctgcgggatggtggccatctcctggtacgccttcaacatcacccgggacttcttcgaccccttgtaccccggaaccaagtacgagctgggccccgccctctacctggggtggagcgcctcactgatctccatcctgggtggcctctgcctctgctccgcctgctgctgcggctctgacgaggacccagccgccagcgcccggcggccctaccaggctcccgtgtccgtgatgcccgtcgccacctcggaccaagaaggcgacagcagctttggcaaatacggcagaaacgcctacgtgtagcagctctggcccgtgggccccgctgtcttcccactgccccaaggagaggggacctggccggggcccattcccctatagtaacctcaggggccggccacgccccgctcccgtagccccgcccacgccacggccccgtgtcttgcactctcatggcccctccaggccaagaactgctcttgggaagtcgcatatctcccctctgaggctggatccctcatcttctgaccctgggttctgggctgtgaaagggacggtgtccccgcacgtttgtattgtgtataaatacattcattaataaatgcatattgtgaccgttcaaaaaaaaaaaaaaaaaaaaaa

SEQ ID NO: 10178 - DNA, 320 bp, Homo sapiens
  misc_feature (1)...(320): n = a,t,c or g
cgctgcctccgtgaaccgctggcatgaagcgcggcctccgccttgacactaagtcaatgggcccgcctacttctncctcgcggcgtcccaggcagatagctggttattcaggtttcgttggaagaaatacgttctcgtccccctgaaaggcccagtccagtcaggtgatggactcctccctgaaactgcacgaggtcacctctcctatccccgtattccgtttggatccttatgccaacgtgttaggaaggccccctctggttgggttttgtactgtctctagcatttgacactttaattatttaaacaccaccaaatga

SEQ ID NO: 10179 - DNA, 1061 bp, Homo sapiens
cattatccatactcatttattaatgtaggggttacttagtgaaaccctgaactaaaataagacagaggacaagaatacgaagaaagaccaatagaaaacacggtaggatgttaggcacgctaaatggaaaatatgtgttataatttttatttcataagtgaacttgataatagaaaatgcatttttttataaataaaaagtaggtgtctgaataaaaatacctctacttgggtagaggtatttaaaattctataattttgttctgctatggctaattcttacagaaccctctttctggttccactgtatattattttaatgacacttctgcagtgggtattaagaatacagcttcacatttattcatcattgtccattcactcattagttcatgcaaccacaaaaaggtattataagaataatatttcatttctgaggtaaggaaattatcatctagtatgtttttatataacctactattcacaatgacatgtagaattctctctgttattcaacatatgttcttgttcttcaaaatctgcaatatctgtagtctgattcttggagactggctcaccgcaattgtctagcagagctttagaccaggaagtgccacacagcaagtagtttccatcacagtcttagctagtttattcctgaatcctcccatatcttacagaaagagcaatgagtcttttgtaaaccactccccggagggtgatggtgagcactattattccccaaaccaggctgaatgcccatcgtggtccccagtgagcatacacttggctgatgaacataggcccaagaatccgggctccacttccagatgctgttaaccagcccatgtatacaccctgaggttttggtccctagaatttttgaatatagagtataggacataagattgcagactggatagcctaatcctattagcacagctgatgtaaggaactgggccagatgaatcaccggggtgtagaggcaccaggcttgttcaatcgagcaaccagttggtctttcattgtcatcttccattggagacttccaaagaccaataa

SEQ ID NO: 10180 - DNA, 370 bp, Homo sapiens
gagatgtatccgtaagatattttgtgtctaatgtctagggtgtacatatctctatctagggtctactgttaataactttcctagtcattagacacaaacaatctggagggagttgtatccgtaagatatttttgtggaatcctaattattctggactgttactccccttttttgggaaatgaccctcctctctccagtctgacacagggtcccaaatataaatcatcctatatgcagaatgattaggcaaggatagtcaccctaactctggctgagctaatccctaatctcattttgccctggctacaatgagtagaatagagaaatgacttcagtgaagtatgtctcttccccaggatttttcagcttg

SEQ ID NO: 10181 - DNA, 1635 bp, Homo sapiens
ttttttttttttaatcttaggaaccagagtaaactttaataatagttcacatattaaaagaataaacctatgaagaatacattctttgtgtatcaaatgaaaaaatatacaatgcagtgaaactcacatatacaaagtgattttttgtgcattttttatcaagaggtttatattctattaaaccatgtaaaagcaatatctggtttttgataaagcaactaaggaactctaaaatgtgcttaaaaataagattgtgatatatataagatgatacagattaaatccagcctgctgagttatgatgctgtgttttaacaaatggctaatgtgaaataatttaaaattttttctgtagaaattaaatgagcatatccaaacgtggaatatcacatgatttaattataacccagtagtagaatttagtaaattcaagcagaacacgtgtactgttatcataaatagacaaatactttataacagcatttttgaagaaaaatcaggaaattgtacatgttaacaaaatagtataaccatgcatacatacatctgcttattaaacactgaagtaaaagaactaatccagtttgcagtctttagaggtgtttagtatttcactccgttctgatggaagcactttgaatgcttgcatggagacataaaactgaatatttaattgacaatagatcatgcgcctgtatttcttaaaatttgcattacatttttttcttttctgattgttcagtagattccgactttggtgtagggaaagcttgatgatacagatgtctgtgggttgctgctgcactgtaaagcttgtacaaagcctggtcccacagagctgcagccacctggtctattacagctcccagctctcggtattctccagagtaccggatatatgcccaagtgcacagggtgataagggtcagtcccattatcatattgcataggctagctatgatgtccaaaccaatgaatccagtcacaccagcaatcacatatgtgataaagatgactacaaacagtgtggctggggtacgagctgcatggaagatatttttgctatcattgtgcttgatatattggatgtaaagttcatctatttcactctccaactgctgcaggtaacgccggctaaattcttccccacccatcttcttcacccctcggaatagcttcacagattcttccttaagttgccaggtgtttggtctgcaagtcatttggggccagaaatggtttgtcaccaccacaaatctcttccatttttttgttgtatgtgtccttggcagttgccacggctgctaaattgttagcttctgctgtggcctgtaacatggatttgggatgtggtaattcttcaccttgatagatctttatataagccttgaagtactccaccagaccccggcaggtgattttattcccattgatctctttaatatctaggctctcgggactaagtagccaaggaatcagtattttcaagtttttgatgaattcatcatctatttctttcaattttccatcaaagtttggattggtagctacttttaagccaggatgaggtagcagaaaacaggaaatgttggtgaaacaggaatggatgtgttttctgacgttctgtagttcttc

SEQ ID NO: 10182 - DNA, 1069 bp, Homo sapiens
aaatcttaaaatttttactataaggatagagatgatacaagtgaactctgcaaaatagttttgtgaaattaaacaaaaaaatctactcttaatgtatatttcatatttgtttaacaaaagcagcttgatgcctttgttctggattatacattaagaacaagcattattttaattatgtagtaacatttactatgactttgaagccagatttcaaaatctggctttgttaaattaattggaaacactcttctattaagttaggtattaaaaaaagccaaatatcaataaagatatttttattaattttttatagaaacaaaatagctactataactctattatagtatattaacagcacttagtattatattgacttaaacatagtagctaataaaactagtttatgacatctattgaaattctcagtctgacagttttaaaatagcttaaaactaagcaccaggtatatgaaaaaggaactggaaattttaattgtccagaaatcataggaatactgggaacctgtagttatgggaaatggctgtttttctgaagttgaaaccagtttcaattacaaaaccctctgaaattttgctaagcctatagttatctccctaagaaccataaaaaaagatcattttattgttaatttcattccagtttagcttcctcattttacatgttgggagtcatgccctttaatatgcctggcactgcacggtggcagtagcagacttgggcttacccagaaccctaagtctctgacgctataggatagcgaaagaggtaggcaatcgtaacagacactgtataggataaatagggaagagaatgagagaaccaaaataaaaataatttaagaaacaattgttttactgtacatgtgaataacaagaaatggtacggggaatgtgaataacacgaaatggtatggggaatgtgtgactagtgaagcatattttaacttttttattactggaggaacagagctaaaggcctaaagaaggccttacagtatataacagtaaatagaagagtaacatctttatacaataaactgttagaaatg

SEQ ID NO: 10183 - DNA, 164 bp, Homo sapiens
agtgaatccactgtttaatcagatccataatctttaacagattcaccacaaattttcatgggcgttgagtgctcagaataatgcttgaacacctcaccttgaaactgtagcagtgtgttctgggcagtatctgtaatgtatgaaatagagtctggaataggtta

SEQ ID NO: 10184 - DNA, 768 bp, Homo sapiens
  misc_feature (1)...(768): n = a,t,c or g
ttttttttgagatggaaaataggatttattgggggaaccgtacaagcagaggagaagcaggggtgcccaggctgtcacagccttgcagtgcatggtgggttccgtggccaacttgccaggggacaggcctgttgctggcactccccccacaattacagggtgggagtgaaggacctcgcggctgcggagcaggtccttgttagtaaggaggaggctctgcagtcccggtggggtcatcttgcctctccggactgctccctctgactggtgaagccacactctgtgaagctgtctgacagaaggggacacgcctttgctgcccaggatggacctgggccacccaggatggccgctggcctgcagccagggcacgtgtgcagtncgctgggctcctggctgaccctctggactggctcccatctcgggaatgacgcctgccgtgggaatcgtggagagggggtttaatttaacttggaaggagcacagaaaggaaagtgtggagtgcggagcgaggcctctggtttggccagctccggttgctggggatggccacaccctggcagcaggcggccagagaccaggaaggcctacccagcacctgtccagaagagattggtgtgggttgacctggcctatgcggggcagctcagtttgaagcaggaacttccccaaacgtgcccaggctccaagacagcagcattcactttgcaccgtgctgagcagagcggggcctcgccaggtggaaagccctaggaaggctgcgtgctc

SEQ ID NO: 10185 - DNA, 379 bp, Homo sapiens
cccctctgaagagcaactcagacagcgccaggctccccatcagctcgggcagcacctcgtccagccgcatctaggcctccagcccacctgcccatgtgatgaagcagagatgcggcctcgtcgcacactgcctgtggcccccgagccaggcccagccccaggccagtcagccgcagactttggaaagcccaacgaccatggagagatgggccgttgccatggtggacggactcccgggctgggcttttgaattggccttggggactactcggctctcactcagctcccacgggactcagaagtgcgccgccatgctgcctagggtactgtccccacatctgtcccaacccagctggaggcctggtctctccttacaacc

SEQ ID NO: 10186 - DNA, 360 bp, Homo sapiens
  misc_feature (1)...(360): n = a,t,c or g
agcttcggcaggcggtgacagagctgtcagagcaggtgctgcagatgcgggaaggactgcagtcacttcgccaggctgtgcagcttgtcctggcgccccacagggagggtccgtgccctcgggcatcgggagaggggccgtgcccagccagcacctccgggcttctgcagcctctgtgtgtggacactggggcatcctcctactgcctgcagcccccagctggctctgtcttgagtgggacttggccccaccctcgtccggggccttctcccctcatggcaccctggccctggggtcccccagcgtctcagaccctggcctngaaccacnagctttctggacctncagctcagntcagag

SEQ ID NO: 10187 - DNA, 518 bp, Homo sapiens
tcagaggagaacaagagtctgatgtggaccctgctgaagcagctacggccaggcatggacctgtcccgcgtggtgctacccacgttcgtacctgagccgcgctccttcctgaacaagctctccgactactactaccacgcagacctgctctccagggctgcggtggaggaggatgcctacagccgcatgaagctggtgctgcggtggtacctgtctggcttctacaagaagcccaagggaatcaagaagccgtacaaccccatcctgggggagaccttgcgctgctgctggttccacccgcagactgacagccgcacattctacatagcagagcagtgtcccaccacccgcccgtgtctgccttccacgtcagcaaccggaaggacggcttctgcatcagtggcagcatcacagccaagtccaggttttatgggaactcgctgtcggcgctgctggacggcaaagccacgctcaccttcctgaaccgagccgaggattacacccttaccatgccccac

SEQ ID NO: 10188 - DNA, 3205 bp, Homo sapiens
  misc_feature (1)...(3205): n = a,t,c or g
agacaggcctcctactggggaggaagagtaggaatttgaggatgctgctttgtcaaatcttttttccttccctgggttctcggctcccccttttcgttaccctttccccaaagctatggtatctcccattccagaaccccaattcccctcgaagatccaagtcattaaaacacaaaaatggggaacttagcaattcggatccttttaagtataacaattcaactgggatcagctatgagaccctggggccggaggagcttcgcagctgctaaccacgcttatattcctcttccagcaatgtggggtgatttctgaacacaccaagaagatgtgcacaaggtccctgcgctgcccacagcacacagatgagcagaggcgaaccgtacggatttattttctcgggccctcggctgtccttccagaggtcgagagctccctggataatgacagctttgacatgactgacaggccaggccctgatcagccggcttcagtggggacggcgtcctctgacctctcaccctctgattcaggctcctccaagacgagtgaaaatcagggatggggtctaggtaccaacagctctgagtcacggaaaaccgagaaaaagaaatcccatctgagcctggtagggactgcctccggcctaggttccaacaagaagaagaagccaaagccaccggcacccccgacgcccagcatctatgatgacatcaactgacttgggtgcaagggatagcctttggntgagcagagccctctctcctgacccccacccaggtggcatagcctggcaaatggacggctgctgggggttggggcttgggaagcttggtgggccaggcaggcagaggatccgattatgcgcccctggggggtgtcaaagtcctctgcaatggagcacgactcctcgcgcgtgcaggactcagacctggacatattatgccttggacataagtttggtggggaggcgggtttcccatatttattctgtgaggttactggatgtcccaagctaggccaggggctgacctgggcactgtgccagggcactgcctgccccccaccccaggaactggactaagccctgctgaggggccaatgtggcgacccgggaggctgtgggttggaagctgagcctggagggggcctgcctcggccgccctcagcaatgtgaatgggtccggtgcttggagctgaggggcaaggctgggcatgtcctgtctgtgtgcagaatcttatcaaatgcccccagtcccaggggtaggcaggcacagagtgctgtctgctgaggtgggcgtccagaactgccgccaccttccctgcccctcacaggggcagccctttcccctcagtccccatgggcctccttggcagcaggagctgtccttttgttgggtgccaggaaagggcctccagcctctacagcttcaaggaatgggaaagggagggtaggaagagggagaagtgtcagaattcctccccctgcctctcctccctgacccagggctggtgaggagtggggccccaaggtgagagggaacggtgctgctttatttgaaatgttttcttacctcattccctgccccaggaagggacccagcctcaccctcctggggtggccccgtgttcctcctgcccaccctgccccactgccctaccggggcagcccaggttcccaactgctgcttccacccccttcaccttgactggcttcagttcctctcagcgctcctgcctccaaagcgtgccctgtttcccttccttagcgcttttaagttatttattctgtacttgtggtttggggctctgaggaaaatcctaatcttgtgcctctccccctttgctaggagttgggtgggaagagagggtggcctctgtgccccaggttgtcagtggaggggaaggggtgtcactgcccctctgtgggactgtcatgccagtgtgcccacctgcctggtctacatcctaaagagatgtaccgtcccccctccatgcgggcaccaccactcccaggtagccaatctggaggaccncnnnctgggctgggagcagagctgactgacacggggtggagttgaccctgagccaagttctctggcacttgctggacatgtcccctaccctcttcccaagaggagccatcccacatttgggtagttagtacccaggactggttggactgatcgggttagggaccctagagggttaagggaacaacagagatggggctgcaatnccctgtctggaactccgctctcccgctggggtggttctgattgtggctcatgcctggttgcaaattggtttttaacccacaaattgtgattattttttaaaaagccaannnnnttttggcaggagttagaataaatcccggggcctgggcttctctattcttggccctccgtagtctccctccgagaggaggccagagngagaggaggatctcagcaggcctctagccgcttccagatgcagtctggggagtgggctgaaggtgaagggaggaaggctgtgggccactctcccttctgagaggcagctgcagctcaggccctaatacactctttgccctgtggcctctcccttttccccccttctggttggaggagggagaagtgggaagtagcttgggaactggtttgtccacataaacttccccattgttccttggcccgccctcagggcagagccccctgcccaggctgggtaagagatgggcttggtccagcagggaccctgagggaacaaacccttttccttctggggagagagtgcccccccctaccatgtagttgaacaggggctaggagctccccactcccctccctctaacagcaggctgtgtgggtttcaattcccatccttcccaccccggctaggtgtcgtccaccctgtatcctgtgtctgagtgtgtgtgggggggttctgtactaatttccatggccggtggcttttccttccatgcatcactcccccccgcatgcccaggggccacccgcctggcattaccgcattctggggtcattgggggaggggagtggggctcacgctgtcctgtggtcttgagatttttatttttgcatatgtaatccattctgtacaggtagctaactttgtaaacgctgtgtattccctctgcccccatggctgctggtgtaaataaactgcatctcccgttggtaaaaaaaaaaaaaaaaaa

SEQ ID NO: 10189 - DNA, 367 bp, Homo sapiens
  misc_feature (1)...(367): n = a,t,c or g
actgcaccctgcctattcttataatcatatatttatatttcaaatggattttaactggttatttaatagtttaattagataaagtaattcatggctgggtgttnnnnnnnnnnnnnnnnnnnnnnnnnnnnnnnnnnnnnnnnnnnnnnnnnnnnnnnnnnnnnnnnnnnnnnnnnnnnnnnnnnnnnnnnnnnnnnnnnnnnnnnnnnnnnnnnnnnnnnnnnnnnnnnnnnnnnnnnnnnnnnnnnnnnnnnnnnnnnnnnnnnnnnnnnnnnnnnnnnnnnnnnnnnnnnnnnnnnnnnnnnnnnnnnnnnnnnnnnnnnnnnnnnnnnnnnnnnnnnnnnnnnnagagaacnaagtccgtctc

SEQ ID NO: 10190 - DNA, 631 bp, Homo sapiens
  misc_feature (1)...(631): n = a,t,c or g
gccctggtgttcccacctcctcaanagccatgaggcaggaatgttctccttatgtgactaggcacaggttccaaatggggaggggactggctcagcatccggagccaaaacaggaatagaactggaagctgagcctggagcggttctgggcttttggttctctgcatcaacacagccagcatgcctatgatttctgtgctgggcaaaatgtttctgtggcagcgtgaagggcctgggaggacgatggacttgtcagacaagtcgcagagtgtcctcggaccccgcttgggctgtggagtggatcgaacttcctcggggtctctctctatcctctttgggatctgctcgaaccctccgaggctggagcaggtcctcccgcccttcctcggtggacagtcaggacttgccagaggtgaatgttggagacacagtcgcgatgctgcccaagtcccggcgagccctaactatccaggagatcgctgcgctggccaggtcctccctgcatggtatttcccaggtggtgaaggaccacgtgaccaagcctaccgccatggcccaggggcgaagtggcttcaccttcatttagtgggaaaggggctgggagcaaagccgagttgatttaaccttgttt

SEQ ID NO: 10191 - DNA, 539 bp, Homo sapiens
ttttttttttttttgtggttccaaatgtcgcctttactgctgagacaatggtggtgcaggaaggggagcctgcagtctgggcggggggccaaggaaggggagcgtgtgcttggcccagtgccgccaccactggggagtgggaggctcaggcagacctagggccctgggaccgtggcccttggctttgttctagggagggcacaagacagcctgcaggtctttgggcagggagccgatgaccgtctcgatgtacagctgtgcccgctgcagcgtagcctccttcacagggagctggtggccctgagcccgcaccagcttctcacgaagtttcaggaccagggtccacgacctccacctcggacttgtctttcatccaggtctcgatgttcgcctcacagatagcctccaggtgcagggcctccagcttcagggccatctccttgtgccgctgccggtaccagccatcaaaatggggggacttgaaaaaccgcctgtagagacccagccagtcgcccttgaggatgcaggtgagctggggc

SEQ ID NO: 10192 - DNA, 1272 bp, Homo sapiens
gagcaggtcagcagtccaaatattctacgacttatttatcaaggacgatttctacatggaaatgtcacattaggagcattaaaacttccttttggcaaaacaacagtgatgcatttggtggccagagagacattaccagagccaaactctcaaggtcagaggaatcgtgagaagactggagagagtaattgttgtgtaatcctgtaaacactgtctgcctagtgtgatgtgatatagtctttgtctttcatgctgctgggacagaaaagacccgacattgcttcagaaaccgttcagaacagtctgcctgtaaacacatggaactgaattaccacatgaacactgtcatcttttctcatgaaagtaaaaagaaccaagaacatttttcactctgattttttatttcttgtattttttgttgagctgttttaacacatattggtttttgaatgcagtcaatctccaggggaaaagttaacaagttatctttcgtagcagaaaccattttgctgccacaaaattttcatcatcagaactaataaatcaagtgttccaaatacaatttgcactaaaaagattggcattattttcctcatcagcagaatttataacagtgtgtggtatctagaaatacttatatatacaattccacactggaagacactcagcaattaatgaagttaattactgggccaacttgagaggaaaaaatggaaaagaaactaaaatgttgggtgaattctaccaaagtcagccgtggtggctgcactggcacagaatactaaactgagtgtgactattttcactgcaacaaatgaaaaaacaaaatgtgcctgtttaaagcactcagtagagggctgatgaaactaattttttttcctttaagacatgcactcttgagtcctacagtaactgagtgtttgtttagacagcacaagaaggggtgagagtgcgtctcctagccttaatgtgggagggtagtttcagtcactcatcggctttcattattgtgcggaaatattagaaaacctcattgatcaattttatgtatttgaatatcagcaaattgaaattttccataattatcattaatttgtaaccacatccagtgtcatgcttactccttagagttcagatgaattcttaaaattaaaaaaaaactccatagtactaattttgtttctttatatagtttgcgtttgatattagtgcctggcaattgtattaaagtcaaaagctgatttttatggcatacacaagaatgccactttt

SEQ ID NO: 10193 - DNA, 239 bp, Homo sapiens
taccaaaccctgctgcagctgcaattcctcgaacgcccctgagcccaagtcctatgaaaacccctcctgcagcagctgtgtcccctatgcagagacattccataagtggaccaatctcaacatccaaacccctgacagccctgtcagataagagaccaaactatggggaaatccctgttcaagagcatctgttaagaacatcttcagccagccggactgcttccctgccaagagtgcct

SEQ ID NO: 10194 - DNA, 1304 bp, Homo sapiens
cggcatgaggaaagaaaagatccctttgctatgagctcgctgtatattgataagtgtaagaattgtgttgcatgaataaccgctttgggctggatttgaagtattttgatgttgtgttttgcaaatattgaagttacaataatggcaacagaaaaggaacagatacacagctttacacttagcagaatgttacatttaaaatctgacaaggcgccaagatggtgactgtctcctctaaaccacgaaagagtaagatttgtgcaaccctcctcctcttccacctccttcaggagaattaaatgaatcaagactttggaaagactggggaagagccgggacttggcagtacttgaaacaggaggaatacaccagcctaaatgtacagactttgtagccgagcccactcgatcggtctgtgccttcacgtgaccaccatctgtgcctccctcgctccatccaaatttgtgtaggctgctccttggacttatgcctaaaatatagctacaccagagccctggaaactgtagtcaagtaacaggcctcactgttttttttctttggattaaaagtgtatatctctctactgaggggtttccagctttacacttctataggttgttctgacagtgagaacacattatgtacatgttttctattcatgtccagggcatgagaatcttaatattcttatacttccctttttgcatgcagtatgtctggaatatgtttataaaattttagcaaggggtgagatcaagggacaaaggtagagtggttatttaaagacaatcagaaatgaacttaaaagctgccctgcaaaaccaatcctttcctatcatgaagagtaccttcatattttctagagattgtctctgaaccgttgctacatagccataaatttctgtaaatcatgttggctatcagttcttgctattctcagagcactctatcatgtttttaggtgtatattgtgtattcaggatagcattaaaaagaactgatggcaaatgtattgactcacagtggaaacattcgtttggatgaagaattagtggtttagcctttgaaatgaataccttgaatcatttcttctgattttctagtagtttattatctcaaatgattattatccccttcaaaaatactggtctgtactttggtgttgtggtttcatttttctggcattgatcaaatagcaaatacaaaataaagcatttctacatgtttgaggtggttgtttttaaaggggatatgtgtaatgcagattttctttattaataaaattttcataatctctgaaaaaa

SEQ ID NO: 10195 - DNA, 333 bp, Homo sapiens
atttcagcagaatggtagctatttgtatattatttcataagccttatggaaagtcaaactgtgaaaatttattatatagaacccttttttatttccatattttagtttcaaaatatacctgaacaaatgcataaataaccaatcctctgttatttaaatatataaccatgctatgttataataagagcacttgtagaattttagtaactataaaaatatttcagtagcaaagccaagattataaatgttttgatcccctacagaatggagtaaaagtgatgaattgcattgtatgagaatcagtaactaaaacaatcttatacctgcagcgaa

SEQ ID NO: 10196 - DNA, 356 bp, Homo sapiens
aaagtcctttcagtcttattgaatatgatgtttacagtgggatgttcatatggcctctattttaggttgtttccttctattcccaattgttgagtttttatcatgaaagggcatgacattgtctcaaatgctttttctccatcaatggagatcacatttttttccttcattctattaatgtaatagacattacatttattgacttgagcatgttgaaacatctttgcataccagctgtaaatcttacttggccatgatgtgtaatcctttcaatgtcccactgaatcctgttggccagtattttgttgaatattgatttaaaaaaatcttgatcaggaatactgatgtgtggtgtt

SEQ ID NO: 10197 - DNA, 1180 bp, Homo sapiens
ttttttttttttttttttaaattcaacattttaattgtgatataacttatgtaaatactttccaaaaagtatctaagatattccactgtacaacacatcaaaactatctgagaagcgggagacaataaagtgtaaataaggcacacagtttacactcgtaattgcatcctaaactgttgaatagttgatatttacaaccccccaataacgtttttgcatcctgaattagtccttcacatcttgatatttggcataatgttcaaacacactttatacacactgaccgctccttaaaccactcacagatttaataaataccgaaaaaattaagagatttgaaggcttgatcttctatttacttcaagatgacagaagagtaggtttcttgtgatgaaatactacaagaatgaagaattaacaaactgttgtgtaattcatcagaaaagcatattaactctgctgaagtaccactgaatgaaacaaaaatgaagctgtgaagtagcaatctgattagcaggctggcttctatgtcccatcactctcgtagtcttctattattatgttttcttccatgtctccttgggctgaaaagggctggggctggctagcaggcagttcactggcactattctgactcaaaggaagagaccaggtttccggcacagtggcttgagtgggttcacccagagattcctctgcagaatgtcctccattaagctggggcttcatctccgctgtcagggtctatcattccatgttccctgtcagtcagggcttccattttcaatcttccaaagtgtccgccttccagagggagccttcccaatatcttggataaaagaaatctgagcttgatttctcattggaatggttagtagagcaaggtatggcaatagctgagtttggaggcataaagctggtaggcagaagtcaggaaaaagtgcttttgctgccaggcaattttcccgatactttttatttattagaaaccactgaggtttgtgcaagggtcgaaaacttgatcctcctccttggcaatgagcatatcctcgggctttgttggaatgcatcacacctctcgtagctatagatgtgctatattccctgagtaaagagcgtgtattccagtcaccactgaggatatctgcaaaactcagaaattcactggctctcacaatat

SEQ ID NO: 10198 - DNA, 1267 bp, Homo sapiens
gggcacaaggaagccttagggtatggggaaaggctgttattacctagagtttactcccaggccagggggctgccatcttcttcacagacatccctgaaaggaagcccctttggggcagggaggtgaggacttcatctcaacatcggctggtggttggtaggggagctttttcttttctttcctttttttttgtttttgtttttgtttttgtttttggtaacatgttaggagttaatgttgcaaagagtagtttacatcttcactttctgaagacacttgaatttaggaccgatgtatctgtgacaagcatgccagaagtggcaggggccatcagggctaaccacttcacacctaccatcgtcccatggggatccaagacctgagataaagcaacagcctgcccagatccctctgttcatcctatcccttccaaggttggtccatgccaacataacctctgggcatcagacatcagcaggtctgtgtggcctcagccctgttaagggggcaggtttctctttagccctcttcctgcacttggggagcaaaggcactaccagtagagaagggccatccagccgtgcccccagccctgggacccctggggcttcagatagaggtgctgagcccctgtgtcaaagttgttaaatgtttttgttttgttccattgtagctcttttttttttttttttccctttcctggtgattgattttacaaaagaaagtaagctgcttagaaggccctggaaggaaagtgaggaggagggacaaggaagatgactagttacggagggtgagggttgttttttgccaaaaagcctgggtagagtgatctgaattatctggcaccctcctgaatggaaccccagagtacctcctgtgtggaagggtccctggattttccctaacacccaccctctcccccttcagccatgctgatggcagagaagataagaacttggagcccatttctcactggagaggaaaacttgtcatctggctttgcggagaaggttccaccttacgctcgtagtacattatctttactatgtgctaggatatcatatttaaaaggacaaaaaaatgtaaaatacttgaatgagcttgtattataacattaatattattgagagtatctgctttccaggctgaagtgattcattcattattctagtcctgctttagtcctttgtaatttgtggtaattatgcttttctttttaatacaaaaaaatgtataaaaataaacacttgaaaaggcaaaaaaa

SEQ ID NO: 10199 - DNA, 387 bp, Homo sapiens
  misc_feature (1)...(387): n = a,t,c or g
tcactggtaaattctataaaacatgtaaggaagagataataccaatcttaaccatactctttcaaaaaacggagaagggaacacttcaactcatcctaggaggagactagcacaattctaataccaaaccagaggaaaaaaaaacttcaaaatggtgtctctcatgaccctgggacaggaaaagtccctttaacaaaaatactggtaaatcagattcaacaatctgtaattcacaaagataacatcagtatatgntntcctgacagtgggtccttagtataatcattgtctacttcatttctttgcaatgctattattnaggcttgatgggatatttatntntnncacagcttaattaggtataatgacatgcatatactgctcata

SEQ ID NO: 10200 - DNA, 71 bp, Homo sapiens
cttctacagtcaaggagctcaagctcgccgggcgaccctgctcctgcctcccacattaatggcggcatcct

SEQ ID NO: 10201 - DNA, 370 bp, Homo sapiens
gtttgaaagaaaattagcacacatgacatgagtttttatgtttctgtattacaggaaaatggaagtgaaattcaaatcctataaacacttatgcttaaaagagataaaaagttttattcaaagaaccagttttttaagagacatacatctgataggccaatagtttacacctagaacctaaattctaggcctggttttgaaatcaagtagaaaaaatttaaaaatagaaaaattaaaactactacttctctaaactacatcaagttatttttggaacaaaacgaacattttcaaatacacatgttgcatgctgatacacaagaaacacactagatgtttagtactttgcaaacatagaacacaaatttct

SEQ ID NO: 10202 - DNA, 382 bp, Homo sapiens
cggacgcgtgggcggacgcgtgggccgtgttcttagcgagcagaagccttggccagggtctgttgttgactctcgaagagcacatagcccacttcctagggactggaggtgccgctactaccatgggtaattcctgtatctgccgagatgacagtggaacagatgacagtgttgacacccaacagcaacaggccgagaacagtgcagtacccactgcttgacacaaggagccaaccacgggaccctgttcggccaccaaggaggggccgaggacctcatgagccaaggagaaagaaacaaaatgtggatgggctagtgttggacacactggcagtaatacggactcttgtagataatgatcaggaaccttcctattcaatga

SEQ ID NO: 10203 - DNA, 771 bp, Homo sapiens
cttttaggttctcgtgaaagaataacttcagttattgttgtaataaagtttgacttgctattaaagaaactaagctattcttttagggtctcgtgaaattctcactgaaagccacattcttagcctaaggcatttcatcttttatgatataaaatgatggctatcaaatgattttccatacattgtactgatcaagttatacacccaggggtatatacactttcttcatgtttcttctttgtatatttggtgactgtatcgtcatagatgtacatattgtgtcggtagggctatgaggcatgttacaggaatgtaattttctcagaatttacactcactcgcagtcatttatttaaaaagataaaacaagataatgggttctttgtattggcactttgcaccagaaacatatcattatttattgatgtgattacttatttgttatccaccttgtactagtaagttttagcactgaattccttcttcactgttgtttgtatttatgaaattctgaaattatggggaatcagcgtaatgattaagttattcatcaccaggctgtaagcaatatcttgagtttgtagcttagaattgggaggatacttaacatctggaagacaagttcatttcatcttgagatcatggtgaaatattttggatatataaattccttaagctattgtaaccatgttttattgcaaagatgtaaaatatgccagatgtgtgtgagttggaaatcaaaaaaagaaaaataaaatatgcaaagaattc

SEQ ID NO: 10204 - DNA, 678 bp, Homo sapiens
ggatgttgatgtcctgcatctaacgcggtgtaacccccgaagccgagcgagctccggaggaatttcagtatctgctacggtaacttcatcagcccgccaagatggcgatgcaagcggccaagagggcgaacattcgacttccacctgaagtaaatcggatattgtatataagaaatttgccatacaaaatcacagctgaagaaatgtatgatatatttgggaaatatggacctattcgtcaaatcagagtggggaacacacctgaaactagaggaacagcttatgtggtctatgaggacatctttgatgccaagaatgcatgtgatcacctatcgggattcaatgtttgtaacagataccttgtggttttgtactataatgccaacagggcatttcagaagatggacacaaagaagaaggaggaacagttgaagcttctcaaggagaaatatggcatcaacacagatccaccaaaataaatgttttctacattttcatttggactaaatcccacgaatgacaactaccacctttttttcctttttaattaatactaaatattgtgatttcttatttgaggttcaaaatgacctgcttgaaactttgatacatattggaatacattatgttaataaacttgtagctttttgtgaaaaaaaaaaaaaaaaaaaaagtcga

SEQ ID NO: 10205 - DNA, 191 bp, Homo sapiens
ccacgcgtccggtctagattcccatgtagaagctttaatttctagaattttatagtactctccaaaatattttttattacatttgtatttgaattttcaaacatctcttttccttggagacagttccctttttgggagttcttcagataaaactgaggaatactgcctgcatttgctttggattttctgtt

SEQ ID NO: 10206 - DNA, 426 bp, Homo sapiens
attctcttgatgaggcacctttaactgatttttctgttaaagttttaacaatttgttcttggaagtcagttcgtgaaggcaagtttgtcagtattttcacaaaactattcagctgaatccagaaagtgaaacagcaagaatttgcattgtaaaattgtgttataaaattggactttgaaatttcaaaaataagaaaaattttcatgtgtatttatactaaataccgttttaggaaactaggatcagggtgtttctgttggcgttggcattaactagctggatgtaaatttgaaaagccactcaagcagcttcctagtctagaaagtcagaggtttagattagatttccgacatcccttccatttctgacctgtagttcttgtctggaattctgctttgttataaactattgttctaaggagtttgt

SEQ ID NO: 10207 - DNA, 205 bp, Homo sapiens
tcgcctgcaggtaccggtccggaattcccggggttttggcaataaataattctcaatggtactacaatatccaattttgtgtattgagaattatttattgccaaaacatataacaaaaaaaactttttagtattaaaaaaaatccaaataccccatcatcttaacaggaagggattttcatttatttgcttttctcttccaaact

SEQ ID NO: 10208 - DNA, 614 bp, Homo sapiens
  misc_feature (1)...(614): n = a,t,c or g
gaagtaggtggtggctttcttcttcttcagattgctagtcatagtggctatgtgcagattgactggaagagagttgaaaaagatgtaaataaagcaaaaagacagattaagaaacgagcgaacaaagcagcacctgaaatcaacaatttaattgaagaagcaatagaatttatcaagcagaacattgtgatatccagtggatttgtgggaggctttttgctcggacctgcatcttaaggncatgaatattctcccataacggattcaactatgagaagagaagtggcagcaataaggcagtctctcaaaagtcatactgccagagtctctagggcaaggagaaacaactagctggacaatactcaattcacaacttagcattttgccatctgaagcttggcaaactagtatctgctgtaaaacaacctatatggtatgtgaaccgtagtattcctgagcaaaacgtggctttcatcgctttgtaaaaatttgcatctgtttagaaactagcctataaaatatcaccattggatgtagatatggagagaaaagaaatatgttgggtttattgcttagcgaaatattctctttttatttaaataaaatgttcttca

SEQ ID NO: 10209 - DNA, 1184 bp, Homo sapiens
atggccatcggcacggggagaacagacatggaggaagcgcaggccggcatggggagaaccggggtgcaaatgatggtcggaatggggaaagcaggaaagaagcttttaatcgtgagagcaagatggagcccaagatggaacccaaagtggacagcagcaagatggacaaggtggacagcaagacagataagacagctgacggctttgctgtcccagagccgcctaaacgcaagaaaagtcgatgggacagttagaggggatgtgctaaagcgtgaaatcagttgtccttaatttttagaaagattttggtaactaggtgtctcagggctgggttggggtccaaagtgtaaggaccccctgcccttagtggagagctggagcttggagacattaccccttcatcagaaggaattttcggatgttttcttgggaagctgttttggtccttggaagcagtgagagctgggaagcttcttttggctctaggtgagttgtcatgcgggtaagttgaggttatcttgggataaagggtcttctagggcacaaaactcactctaggtttatattgtatgtagcttatattttttactaaggtgtcaccttataagcatctataaattgagttctttttcttagttgtatggccaggcagtccccattttaggagttggcttctgcaaattcaatccattgagctaactgttggggagcaatttggtagttgtagacatttgcagggaagggagatgtctgattctaaatgggagttgatgctcaggtccccagccaggtttgcatccagccctgagacatgtaggaaacacctttcagacccaggctctgaagattcccagaagccacaaggattgaagggaaaaggtgatcctggtaactgttccaggattgctccaggtttgagatggtattgctaaatttaaaattaaacaagagacccaacaacagcttttaaagtgtcttctatttcattgtattttttttaacttgccccaatgatagaaaagtcttttgctgaaatgattttgatgatttttgtttatcgtttataaaaaggaaaagaaatatacaaactttgacttttgtgactttgtgaaggtttctttaagatgtgcattcctttctgcttgctctctagtaaatgttttactaccgggaaaaaaaaaaaa

SEQ ID NO: 10210 - DNA, 1143 bp, Homo sapiens
tgaattaacatttggtgattatgcctagcttttttgactaatataaagatcatagctccccttcacttctgtcttaacttgaacatggcgtgtttaaattttcatacatactttacttgaattattgctgttgtcacatatttttgcctctgtgagttcatctgatgattgagcagtagcatttgccttttgggttttttgtttgttattatagaagagatgacttctgctgattttgctttagaatggttaccttagaagaatttgggtggctcatgttgaatttcacttctgcaatagctttcattttctcataggctttataagagatgggttcagtggtatgagcagaggaagagatcccagatagtagccagttaaccaagactcattcatatagcacgtagtttatgttcctgaggcagcacttttagatcctttgtgagcaagttctatttgttcattgcttgccagagatgaacacagaatgttctgtttcattttacaagaactatcctgagtttctgtggatggaaacattacatgtaatgcagatatagtgaacactggaaagatttattaaagaattatatttgtgtatactttataaattagtccctcattagatttttttttcttaagcataagactgaacttaaatgtgttaattttagtagaatcaggcactgctcgcagaaggaacacagattgtagagattaacataaattgttcttgttctaatatatatattttttcatttctgtcgtgcttggaaaactagtaaatattatgtctaagataaaatggaatggcccctggatttacttcttataagaagcagtagtatgtaataaagctattagcatgagcaattaagaggctataaagagattatagttacaaaagaaatactgccatatttttaagttaataacttaaaccttctcaaatgggttaaaagttgaatgaattgacaccctgatgttatgatgttggaattttaacttaaactgggaggcattctgtgagccttcactttaccttctttaattattgtccttgctaaactcaacacagacttttctgttatgtgtttttgagggagttgggggtggggaggggttcagggggggtagggctaa

SEQ ID NO: 10211 - DNA, 1130 bp, Homo sapiens
acataaccagtgaaaagacgttgaaagcctacagctcactgtttttggtgctctggaaatgttgagggtgggtttttaaccagtgatttttaacgtgcagtgaatttgttagacttttaaacaccagctaaggtagtcaaacttgatccccattaaaaatcaaggaattaggggtcgggggagggtttaggagtgatccagaatgacctcccagaattactgtgcgtacaactttatttttcagagttttcattggaatggtaagagttttatgaaagacagttttaaaacttattctgagttaaatattaatactttaaaaaattattgtactagacttatcgcagccttttgaaagtagcagagtttcatcataccacatatataacagagcataaattttctataatcaggcaccttttgctgcttttgagtaagactgttttcctgtttaagtgttaagcatcgccagacataaaaatctattctctcctctcgattgtagcatagcctgacagctctagatacagcatttctatgatgaaaaatgagtatccatcaggaaatctagaagactagccgtgttttctcagactccacctttgtttgcactctgttgcctgtgaggagctttctggcatgtgattatttacttcaaaactagagttccaagcacctacattaattattttatattgtgtgcagaatagtatatcttttaatgtcagatatgatacactgcacatattgcttttgcactcttaaaatttttgtactaaataatagaaaatatttatattctttgagtgtgagctttgaatagatggcattatcactttattgtttttttaacaaaaactttttctcaattattctattgcaatgttattctgagcaagtcctatgccaaatatcttgtataatgtttgtatggaagattaaattttactcttgtgtggtaagactatttcagttactgattttatagttggaatttgatattccagcacaaagtccacagtgtattcagaaatccaagttggtgtcatacatttcattttgatgtgaacttttctttgctttcctttgttctaagactccattttgcaataaacgttttgacagtaaaa

SEQ ID NO: 10212 - DNA, 859 bp, Homo sapiens
ctttggctctgggttttgggatttgggtgtggggtaagttgaagggaaatcaatttaaaggaaagttctattatctgggttttagaaattctataagagacaaagtttggaagtacataaagtaataactgttagaattaggtaatggatatgaaagagaaaatgctttctcatgcatagacaagtgttttgggtttttaaaaaaaatattctgtcattggttacaaatttttactcaggctttctattggcatggatttcctttgacctctcacttttttataaattataatgcatctaaaccacctgtccccagttaatgtgccaaaatgtcaatttttaacttatctccagccaatttcaaagaaaacagaccagcatagttctgcaataacagttttaagatgggcatagggtttggaagaaagggagaaggattcttttttcaatgtactgtattgggacgctggtaactgttaacccagtgttcagcatagagctatatatatatatatatgtatatatttattattttcatataatttgccagacagagatcagaattgaaccgtcaatgtgaaataaagagttctccttgtacttgaataataaccacgattccaacccaggtctgctttggggcttatcagaactcctttctaaggagcactagaatgagaaatcatgttgttcgatcgtttcacatctgtatatcagctctaaagcagagatgtattatggtgatactccaaggtgggcatagccattgcatttacaacttccagatttgagctgcctggagggaatccatatcagctctgcataagattatatacaaagctgttcactcacaaaaggc

SEQ ID NO: 10213 - DNA, 451 bp, Homo sapiens
tgtcttcacttccttggtagtgtcttttaatacacaaagttttaaatttttatgaagtcaaatgtatctacattttcctttggttgctcatgcttttggtgttgcatctaagaatccactgccaaatccaaggtcatgaagatttactcctatgttttcttctaagaattttatagtttttgctattacataaggtctttgagccattaagatctttgacttaacttttgtatatgatgtaaagtcactgtcaaacatcattcttttgcatttggctgtccagggtatcccagcattatttgttgaaatgcctacacttctttatattcccttgactcctctaaccaaggcagttggacctttgctactaccactgccctgaaactgctgtcactgggttactgaggactgggtagcttagttgagtagataatcttttgttgtttcctcc

SEQ ID NO: 10214 - DNA, 288 bp, Homo sapiens
aaaagatcatatacacactctcaaatgtcccttctctcacttactctcgacctgactccctagatctctgccgcctttgcctctccccgtggatctgacactcaattgagctgcatgcacttttcaactgaaagagactccaatgccatccttctgatgaaatttttgctttggatactactgcagaaaaaatgctatcttgtattctgggccatggtggggaagaccctgacgcagaacctggcacctcaagtggagggaggggccagaacattgttcttatgctat

SEQ ID NO: 10215 - DNA, 644 bp, Homo sapiens
ttttgccacttaaaaatttctcaaatttcttctttccacgtaattgtgacataggtattatttgtgttatatcccagatggctcactagggctactaatgtttagagtttgatttgtgtctttagcagtaaacattttaaaagaaacttttagcagttttttagggtaattacatgtcttcctttcaagggtccagattatagactctacaagagtgaaccagagttaacaacagtggcagaagttgatgaatctaatggagaagaaaaatcagaacctgtttcagagatagaaacttcagttgttaaaggttcccactttcctgttggagtagtccctccaagagcaaaatcaccaacacccgaatcttcgacaatagcttcctatgtaaccttgaggaaaactaagaagatgatggatctaagaacggaaagaccaagaagtgcagtggaacagctctgtttggctgaaagtactcgaccaaggatgactgtggaagagcaaatggaaagaataagaagacattcaacaagcgtgcctgagggagaagaaaaaagggttaaaatgtttttcggtgctttcagaccagttcaccctttacaaaggccctttcaacttttaaaggggattattcccttttaggg

SEQ ID NO: 10216 - DNA, 1212 bp, Homo sapiens
ttaagaacatcaacatttatttaacatgataaaaaaagaaatgagatatgaacatttgcatttaaacaatagtaagtagcctttaatacattacatgtgctcattgtataatatatacacaatgaacataattacatttgtacacaaactaagtaccggatttggaaacctgcttattgctgtacacatgtattccaatgaaatataagcccagtacttcaaaatacctacactttgttttttttttttttaagaaaagataagcagtaacatttgtgtttaagctgacaggagtgtggcagtaactgctgacattgcaatctgaccgagaaagaattatagcagaaaacaggacatacttcacttagcaataaaatggcacattttaaatacatatatataaaatttttacaaatcaagtgtgaaacaaaagcactgcagtagctaaaatgggaagaaaaaaagaaaacaagcttcaatggaaataataactaactttagaaaatgaaaagcaaaaaaaatatatatataaattcacctagacttaagaaacatcgaaatctggaaatcagcaactaagtaagctctggaaatagactgcacattaaaaagcacctttacttatgtgctctgaaatcatagcagcaagctggtgtcagaataataaccttgagattacgaagtgtacatatgggccattaaagctgttttggaataaacattttccagaagtgataaaatgatgctctgtgaccaaaagcatcagaactatgaatttcatagatttaaaatatactgtacaatatcttcttacactgctgaaggtccatgtctttagctttgaatggtttcaacagaagtcagtatagttcttctaagactacacacacatgaaatgtgatccttctgtgagctgcggctgagtggatggaactggcgatgccgaggactcaggagatggggacagacttttcactgccattgtttgatttcctctagaaacctcaggagttgattcgtaagaaataacagtttcttcctgttcgtcaacactgttctttgtattttcttcaggatgctcttctggtttatgatttgcggtctgtgtttcatcttgagggctgaatgtaacatcctcaggcattttgtctttgtttctttctttatccatcatttccacagaatttactccatttggctcaggttcaaaaa

SEQ ID NO: 10217 - DNA, 270 bp, Homo sapiens
tttttatagaggggtgtcccttacatttagaaaatgaaataattttgtatttgtgaaaagttacattccatccattttctggaaaaaaaaatgggtattgttctttaaaatgttcatgagctgggaggatgattattctggtttccaggggaaactctcaagcagtacatatgtgatactcagttttgtagactgcagaccataaccagcaattgccagttgcaaaaatgtgaaaaagaaataacttattttaaccactttgtacagcat

SEQ ID NO: 10218 - DNA, 399 bp, Homo sapiens
tgaatctaggagccaatgctttaagttaccctgtcttcttactttcctttaacatgataaaaatagattaatctgccatgaaaaagtgaaaataccaaatcttggtgtgtgatgagaaatgaactcatgaaacactactggacttatgtatcagcacaacaccttagtatagatttatctgcgcctgtgtcctgggccatattttataatttgattaatattgtcctttgggaatccctgattcaataggattagtatccttatgaaaagagactcaacagagcttgctctcattctccctctgccatgtaaggacacagtgagaggacagctgtctacaagccaagagaagaaacctgaatgaaacctatcttggtggtacttgatcttagactttcc

SEQ ID NO: 10219 - DNA, 448 bp, Homo sapiens
  misc_feature (1)...(448): n = a,t,c or g
ctgaaatggtagtggaattatttgaattctacaccaagcacttaccatgtgccaggccctttgcagagtgctctactgaccaagaaagttgttcctgccacattatagatgtggagcctaagggtcacagaaattgtgtgctatgccaaaaaacattgaactgatagatagaaaatgacagagctaggattcaaacctagatctggctgactccagagcctagttttacctggaattgatgttcagtttatcaaaggtttctccttttggtttaaaatcccaatttttgggcctggcattgtggtttacgcctgtaatcccaacactttcggggagaccgaggctgggtggaacacttgaggtcaggaggtttggagaccagcctgggccaacatgggtaaaaccgccgtctcggncaggctcggtggccctcccaaagtactgggga

SEQ ID NO: 10220 - DNA, 701 bp, Homo sapiens
ctttatgacgagtacattcttcccccctgccacattgtggactaccgaaccaggtggagtggtatccggaagcagcacatggtgaatgccacacccttcaagattgctcgaggccagatcttgaagatactcacagggaagatagtggtggggcatgccatccacaacgacttcaaagcccttcagtactttcaccccaagtccctcacccgtgacacctcccatatcccccccctcaaccggaaggctgactgcccggagaatgccaccatgtctctgaagcatctcaccaagaagctgctaaaccgggatatccaggttgggaagagcggacattcctctgtggaagatgcccaggccaccatggagctatataagttggttgaagtcgagtgggaagagcacctagcccggaatccccctacagactagtggcaatggggacgctggtgatatgaggaggcagaggcagcacccaggagaaacagggcagtggaccaatggacagctccaccagctccacatctttggaagctagatttggggagagagaagctctaccccagacttaatacccattgaaatttcacctcaggtgttgtgtcctgtgtctggttaagtgtcccatggaaggggaaagccttcacgtcagaacccaaccctataccttttacttcttaaatggtgctaaccacaggtgt

SEQ ID NO: 10221 - DNA, 654 bp, Homo sapiens
cttttttttcaaacaatcagctttctattgctacttttactgtaggcctgactctcaatacagaaacttcaaaatgggcgcctattcaatcagaatttgaaatttctattttatcctgcctcgtgaattaatgagcacaagttctttataggattccagctaatagatgcagaaggaatgacaagatatcactggttggcaacctctaatggaatcccagatgtgggcaaatatcattaatgatggctaaatccatcaggggaaaagctgatagagaacttttgtaatgaatggagtgggctgggcagcatccaaacccactatcaatcttaatgttacaagatgagagccattatgtgccatgatgtgatacaacatggagcatatatcacctatgaattatttttgtgaaaaagcaaaacagaacaacagaagccctctagatctgtcagtttatagaacatataggggacagaaaaggtgtacatgatcccattagggatacattcagtaaaatccactgaaggacaattctataggacaaacaacttagtttcttcaaaaattaaaaacaggaaagttaaatctatagattatattaacaaaatgcaagatctagatcttgcctggatcttgactcgaataaaccaactg

SEQ ID NO: 10222 - DNA, 449 bp, Homo sapiens
gggaaaagtagatcacttatcttagcaaacggttgaaaatatgtctgtcctctgtggccccaaatccagtgaaagaaattctcccagtaaaaagttgccttcccctaactcctgtttttcctccagaataccctcttaccctttcctcaaagaaagccttcaacccacccatcatcagaaagaaggtggccctaaaaactgacacatggcccagtgcccggaggggtcctggaggcataagtctagatgccccagagagcatcccaggcactgaactgctcagagcttgagatgaaatgacatacaagcttcagggtaaaactgtctactagcaagattacctccctcaattctaccattgcagatttcttctgaccccaaatgcaaccaactatccaagtgttataccaactaaaacccccaataaaccttgaacagtgaaaaaaaaa

SEQ ID NO: 10223 - DNA, 501 bp, Homo sapiens
  misc_feature (1)...(501): n = a,t,c or g
tgatacagattgttataattaaagaatgctgtgctgggaccactctttaacattcagatgctgaccactaaaagtccaacttaaaatgacttaaaaacagtaagaaaatatattgattcacaatacatgaaatctattgacagaatgtgctgcagtgtttctgatccaatgattcagtaatgtcatcaagaaccttgggaacccgcctccacaccccacccccttttcaaccacaacattggcatcatcctaaggctggctaccctcgtggtcatggggatgattgccagtagcagttgggagccttgtgcatcttcatttacatgcaggcggaaggagtcaggctgggattctagggggccctgtcctagtattgaggaaagcttttcccaggatttcacttttcccttattcctttagggtcttcattggttttaaagtaacttaggacccgttcccntccctggaggccagttcactggcaaaggggtcttgggatta

SEQ ID NO: 10224 - DNA, 656 bp, Homo sapiens
tggttctggtagtgacaggtgtatttataatcaagttgaatcaagagtgacaagaagaaatacagctagagttatatttttgccccaggggtattcttttcctagaagagcaagtccatttttagaaaatttaaatgtctttatttgttactttccaaatattttggttaaacaaatatctcttgcaaatgtatcttcaaaatctttgcctacatgcatacaatttgttcttcccaactgcttagggaaattccttcaaaatgcttaggagttctaacacatcaaatctgatcattttgtttacattaggaaacaccagacattgtgggatctcttctttaaaaaaacaggatttttattttactggcattttcaccctcaggacatgtctcgtaaagtctgaggattaagcttagaaagaggaagattcaaagcaacacaattacaaaatgaacatcactggaaatatcacatggctttaagactcatagatttgtaaaaatgttagtgataaatctcatcattttcaaagatggttcttatgtgtgggcttgatctttaaaggttatttggttttcattattagaaacatttttcatctcattttgcccttcttagtgttaagctgttagagccctcgacctagtggcgatgtc

SEQ ID NO: 10225 - DNA, 575 bp, Homo sapiens
ggagttatgggaacctttgatttgtagacaagttggacaaaagtggtatatatcctaatataacatgggaacctgccacttatgattggcgtgtgaaattgggggatggggaagcagtcttgtgggactgagcccttagcctgtggggtctaatgctatcttcaggtaatatcagaactgagttaaattatgggataccagtcagtgtccattggagaattgaattattgtgaggagaaacccacacatttggtggctaaaagtattgatgtgagtagtagcatataggagttttttgctatatacatatgtagtgtaagtttaaagtaaaaagttttgtattgtcaggagtgacttctttgcacctaaatatcactgctataatgcgttactaaggaatagttgcttgcttttatgtatttggcacctgcagctactgttctaaaaagtttgcatgtgttaacctattaattaaatctacaaatgactggctgtacccatgaagtgagttattctaaagacaatggaacatttaaatggtttagaaattttttgattaaaaatacattaataat

SEQ ID NO: 10226 - DNA, 338 bp, Homo sapiens
accccccaaaggtcaggtggccaaggtgttcccacattttttctatataacttgtttcctaatagtctgcctttctacctatgattaaaaataatttttatatacaacattatttacatttcaaacatctctacgaagtcatgccattttaaggagatgaaaacagccacagagttgagtgacttgctccaaatcacataactaagccaggactagaatcccagactttcagattttctctgccctgggttataatctcttgtttttcagtgatagacctgagtcagtctgagatgcttatttatgaaacagtataccatgaatatttattatcattg

SEQ ID NO: 10227 - DNA, 987 bp, Homo sapiens
ctttttatacttaaaacctcagtaaactggcaaagaattgaaggtaatgtgatttgatttgagaataaaacattgtagcattgggtgaaaaatgagtatttgagttaagcttacatatttatttctgatggttatcttattaaaagcaataatccttaatactgtacttgccattagactaggtactcagtaatggaagtttctctcaagggttaaatgttccatttttgaaagttttaaaaaacctgtttgggtggtttattttgaaaacaaaagtaacctattaggattcattttgcctaactcatatgagagatgcagagtatcaacagtgggagccatccataaaatgaattttccaagtggagagggtttttccagtggaagagtaggaagcagccatatgatagtattgactctggacagaattgatgtctttcgtttccaaagtgcagagtagggaactacatttcctaatgtggcattgtaaatatacatctttatattactcttccagcctacgttcctaaatcattgataatttaaatattttttaaagccaccttaatttaggtagctcttggaatcgatgtttgaattcactagccacattttcttcatgatatgcctcgtggcaaacaaagatgtttccttaagatgaatcttacatttcccatagaaaataacccatttcctttggcactgcagttgccctcaaactgcttgcagttgtattcattttagtacaacaaaggttttcataatatgggaggccaagtctatgatactgcctcaaagagaccctattgtgtagatgcatcatcttctctcatttgatccatagagcataggcaaagatgtcaacctcaggccttagagaaaagtggaaatgttattatgacagccgtccatgagttatcgctttgtatgaagttaaatacagtcatgcgttgcttaacagcagggatacattctgaggaaatgcat

SEQ ID NO: 10228 - DNA, 1261 bp, Homo sapiens
ttttttaaataattgcgttttagatttaccctttttgtcatcactttagaatgaaaattcccatttaaatctgaaagttaccttaatagtcctcttgtgttattaggacagtattattatagtacttatttattttattttagatttaaagttatcttctctttttcttttttcttctgctgcttttagggacaattaaaactgggaaactatgaaacatggaacattttatcctacctgaaagtaaacgagtaattgtgaagcataagacactgaggctaatacaactctgtcttcatgtgttgactgcctggcacatagtattcattctcttccctttaacatagaagtgtccagctgcgtacagtctagtaaccagcaactgtaaacgaacctgtgcctctaacaagcgcccccaaaccacctatgagtatttcttttagggctcacttaaatacatgtttgtatatactgtattctagccagaataattttagatctgatcaggtagtagctaaaattagaaaaaaacaaaatagatgcttaaagaatttgcatccatttttgagtctaaatcttttaaaatatactgagatccacatctagtgaaatgtcagtgtcaaaatattatagattatagctaaaatccagattaatactcatttggggttttttatagtggaacttcatagtaatacaaaaagcagattgtcttcctgtctccgctgctcccacagtaggtattgaaactggtaaaatcagttttttgatagtgtgtgtatataagaaaaaatagatacacacattcttttttctcagtcaacacattgattgaacactctggcaaagatgctgtggtggatgaggttggagttcgaaagaagaagcaagcgctggcctggccttgaaagaaccgaagtctttcccattcacttctctagaaagctgccaagacagaggcagaaagaaatggatgatagttctgtcaagcacacttctgttctcttagaacttagaagtgtttctaagagaacagaagtaataagagaaacagttacgtgtggaattcaacatctttggttggaacgcattggctttttttttcttgttttgatagaaatggaattaagcaaaagtagtttttgtcttttctgttgtcttcaaattttatgccttttatttttaatttaatcccgttcaattatttaattgttatacattgacattaactgctgtattttgactttgttcaataattttg

SEQ ID NO: 10229 - DNA, 1466 bp, Homo sapiens
  misc_feature (1)...(1466): n = a,t,c or g
aaattaatacaacgcaatctaaatgcaccataaatttatatttgttaatcttgatattagaacatttttacatttcaaactacataaaaatataacaatataaaatagaaatttgttgacaacttacgtccaaaacatcactatttcttatattgcaactaagcaacaagacagcttacacagctctccagaaaacatagtgttttttgtgttatcaacaaaaatcagcacaatcccacacaataatgtcttcaatttattatcttttccacagtacacatttttcacaaaccgtaaatcctttgcagttattcaaagtgtgtaaacaactgcctgaatccccatatccccccacctcggcttaaggttgtgaatgttttaagtccttcaatcaagtttcaactcttccacttgcataaggaatcaagagccttctctctttaaattatgtgtgttttatcatacagcctgcaatgcagtaaatcacagtgaaagccctgggggaaaacaaaacaacatgatctttacagcgggacttgaaacttcacaatagtaaatgcagttcaagaagcttcccataataaaagcgcgggttttcatttccagaaatcaagtcaattagaaaccctaggttctacttaaaaacccattttgatctaaaagtgaaaacagtcccctatccatagtcattttataaactctatacagtttcacttgcagagattttttttttttttccagtctggaaaacagtagtgcaattacgttttacttcttttaagttatatagtccaggatgtaaatagctctgtggaaagataagaagatgctctggtaaacaagaaatttttgcaagcccatgctggcttacgagtccattaaagcttgtaagtccatcgtggctttcaacaaaatgttgcatatacatcactgagaacaaagcagaaataaataggcagaaatgactgtaaactgtctcatttcaatgatttttcagtaataactggcttgatgaattgattatatatagtcacttaaataagcagacagtagacagttgcccttctggatgttccactatggcatccggcctggaaagccccaatggagttacattcctaaaattaaaccaaaaaaaaggtggggagtggagggtgggggataatagtttacagatgccacttgaacatgattccatcaagtcagccagttcacttagatttcttcttaaaaaggcttttgatttttgatggctttttgcttttctctccattatgacaaaggtcatgtgggatgctgcttattctggcaacacttggggcttccctgaactggtttactgtcgttgcccagctgaggaacatgatgtgtggcgaggtttaggcnccgggatgccactggaaagntggttcatgctacaggatttctccaaaatgccattgtacactttgcttgcaggactgaag

SEQ ID NO: 10230 - DNA, 501 bp, Homo sapiens
  misc_feature (1)...(501): n = a,t,c or g
gttcattttgtatagtatctcacaggtgttctctgaatttcttgaatctggttgtctacctctctaacaagataacaagattagggacactttttgaattattccttcaaatatgttttctgtgttgtatactttttctcctctctcaggaatgccaataatttataggtttggtcactttacataatcccatatttctcaaagattttgtttatttttcttaattctttttttaattttttgtcagacttggttattttgaaagactggtcttcaagctctgaggtttttncttctgcttggaacagtctattgataaaactttcaaatgtgttttgaaaatttcagttgagtttttgaattccagaagctctgattgatttcctaagatgtgtatctcttacttcatttcctgaattgatttagggagtttctttgtgttgactttcaacacactctagtgcctgtgttttaagggctgttgagcaagatggaagagtg

SEQ ID NO: 10231 - DNA, 88 bp, Homo sapiens
tggaagaagaaaaagggggaaaaacgtagtatttaaaattctttagtctttttctactacataggctgcgagatttccttcaaatttt

SEQ ID NO: 10232 - DNA, 426 bp, Homo sapiens
gagaaagctagagaggagagaatatggaaacgtatgacaggatgtatataagcaatacaaacatattgaatgaataaataaagacataaatatgtgggagagtggaccacgcaaggacaaaaagaggagagaaggcagcaagaattatgactaattcaaaactgggtttcctgagatagttaaataaatcctgcaccaaatccccagggggagaaattaacaaacaaaagacagccccacacggaccagtgtgcagaaggctccgggaaccgcagattatggttaatccaattctgtgcacctgaggtccataaataaaagaataagtattgaaatgaaagaatgacagattgaatgaatggacacatgaacgactgaattagaaatggaaatgcctggcacagccaggaaggactgccatgggat

SEQ ID NO: 10233 - DNA, 548 bp, Homo sapiens
attttaactaaaacttgaagaactaaaacaacaatgcaaacctttcagcattgtttggccaaacttgttaaaactgtaatgcaagaaccaaatgcactgtgatgtggcaccaactaattagcaagcatgaatttttcacccaagagtgaaaaaaggaaaatctaccatggcttgaagttaaagagcagaactcctgactaccattctatgactgatcaaaagactaatagttaaaaacctcagcaggccttgttcacgatatgcagaaaaaaaagtgctgcagtttagatacctctggaatttttccacagtgtcacaggtttgtaatacttgaagccctacatttctaagaatatatttcttgctcagttgtttcaggcaagcccaagactttgtaatttttaaagggcccagattttttttttttttttttttttcaaataacagaccagcttctttttcttgcagttacagatgtaatttcctttttgttgtcaaacataaggtaccaaatatgatgcaataaattgttttgaaaaacaaaaaaa

SEQ ID NO: 10234 - DNA, 1094 bp, Homo sapiens
  misc_feature (1)...(1094): n = a,t,c or g
gttattttggggtttatagattatagagggaaaagttagatcacttggaaaaacctaactctcatgttcagtaacttgagtatagaatttataccacaatttatcttcaataaggaacctacatgaacttaatcagttatctgtagtttttgcaaggcattagaaaaaatttcacaattacagaggactgaaaatgtgatttcaaccggctagtctagttgttgaatgtccagtcacattacacatagtcctttgtgaacttatttgtgaagggagttcactttttatggacatacgtgtatatttccttgtgtaatataaagcagatggttattagtatttttagttctttcaagtttaaattattcaattgctagacatcacagaaattagtatatttaagaatttattataaagctcctctacaacttttaaaggtgagagggtctattatgatttttttataaaatcaaacagcatgatttagaacgtcagtctttctacttaaaatgtgtctatattcatggtatttccattcagtgtagatggtaaggaaaacatctagtcattaaagatttacttatagcagactccagaacactacctacaatggggtttcagtgactagaaatcttgaaggtttatgattgcatcaaattgagcctgtactaatatctaaatatctgctcttatgttctgctttatcccttgggattaccttctaaggtttggtcacaccagcaaactggaaacagatcttaatgtacataaaaaatttatactaatattactccatctgtgttacagtattttgaaaaatgtttcaggtgtcatctagtcgtctttcatgggtgtgattagttacaaatgttatgcttatgtttttcatacttaatatcaagctttcctttggtaccttacaagatagtatttttgggttctaaaaaaaacaagcaaacttcatttttgtagtatccagaaattacctggagtcagtatttttantcgccttcnagaacntgtggtccanacatcancccatttataattagnggggaaantatctgccgaaaatcnaattgtaagaaaaggct

SEQ ID NO: 10235 - DNA, 700 bp, Homo sapiens
tttttttttcacatttaacacttgtacattttatttaattaaatcagccattgtacacattgcagctatgtattgttagtgttgtatttttttttccattaactaatacatgccctcatagatatattcaattagtgttatcaccatgggaacaagatgctgattcgtcaactgaaaattcacttcttctcacagtattcaagtttttgataacacagcaaaaatcaaaatcaaaaaaaggtgaataaccattatgttgttacacagacatcatctgcactgcaaataacacaacagaaatgcttttcttgagctccagtgaaggttttgacaagaaggccatagggtgtctcaaaaagtttcaccatcggcctctcttattttggctgccaaagaatgtctcatttcctatccaactgccaaaaagtgctagcatttgaggcttaggagatttggcttgtgggaaacctccctcccaggaaattttttctcttggcaacattactttaaatgatgaagtgccattgtttgtcgcatttgtttttgacattcggagcaatgagtcatttttgcacaacaggaaaagaccagataattggaaaatgttcaatccctggaggatagactctgtccttttttatttaaatttcatcttcattgaatatacttttctttaacaaatgactgattcaaaatgtat

SEQ ID NO: 10236 - DNA, 645 bp, Homo sapiens
tgagattcctctaatggaagaagatccctaatatgggtcaagatccagatgactctcctgctccttcggggaaaggaccttgtatcttggagtgaggtcacagaaggatagagcctgggggcaaaatgtctaacttgtctacatggggaccacagttcacattatgcatctcaggctccacagtgaggctgacaaactgcaatggcagtgcttttaaatgagatttgaggattcaccaagacccatggggaaccggggcagcagggaagccctcgcgtggtcttggatgaggggtgttaaatgtgtatcgtgctgtggaacatgggacaattccacgcacatcccaccgaatcatcacgcatcccattgactggcaagtactccccgccccctctgaaagcatgtcacatcatgtaaatttgcttctaacatctgcttcaaactgtctctggactccaaatttggatgggtcagcctctgcagaaagtttgtgttgagatgctggaagaacagcagagcctcctgcaccctcagcaagggaccagctcccaaaggaaaggtccttgtgtgacatttggagaatcttccttcatccagacaactctactcgaagcaagacgaaagcaggatgtggcagttgcagtg

SEQ ID NO: 10237 - DNA, 653 bp, Homo sapiens
ttttttttactttttcacgatcctttattaatcagaacaggccttgccacaaaaagcagggcccattcccacaaaaatatgattttgcaaagaggaaatcttgctggcttagagggtatgtgtggtggaaaaattttgtatggttctttttttcctgtttttttttgtttcttcagtttttcttcatttctcttcgctgcaaaatttttttttttgtgatggtgggtttttgttttattttttataaaacacttgcactcaagaacatacaaacagtggccaccaatccccacccctggggctccggggagcccccctggcttgtttgtggctgttttcctctgtcccttccctggcatctggtgccagagggcaggtgcgggggtcctggggcgggtggaatttgtacagcactttcatggggagatggtcacaagaaaggaaaccaggacaagataaggactaagtctagggcacccacaaagatggcagacgaagcccatgaaagggcctgcgacagagtgaagagacggatgggcctgcgttggcctcagctagctctggaggctctgtgggggaggggcaggtgggccttgcagtcaggattcggtaattacactttgctcacgggtagcaccttcggagtcctcctg

SEQ ID NO: 10238 - DNA, 1608 bp, Homo sapiens
ttttttttttttttaaaacattgctttaagttttaatgtttatttccccaagacagcctagcctgcactctacttggataaattttacaagctagttttctgctgcttctagttttaaactttaaccatgtttctgatgacaaggaatgctgcaaaaatactctagttcaacaaagagttatgatcacaaaataatttttatccattctacagtgtttcagaattaccagttgatttttaaacacaaagtagatatagatgctaatggtggctaatctggtatgtttcttatagcaaactgttgttcatgcaacacttgtgctcaaaggggaaggcacaggatttcctacaatgagccaccttataaagagttctttttgtacaaattaatttatgtcacatttaatttagtgtgcataacctcaaaactgaggtattattccaatttataaaaaccacttgcataacttttatgcaagttttaaaaatacaaagttttctccctaaagtggctcaaaatagattgttcatggctgcctacatcctaagataaaaagattcctaaaacaattgaacagattaggcatattattaaaggtgttcaaaccattacttgatttgtacatctactcaaacctcttcatcggtctttattcagcagtacatatgcaccaaattccattttagaagtttccatatcattttcatagaaaacaaagtttgaaaacaagtaacatttaaacacagcacggtattctaccacaactgaaacttttttcttcttcttctttacaggactcaacaaaatctaaaaatgaactatgctgtagatttacctcatgcaaagatctttatgttatctctgaaaatgaaaaggatggccttttaagcacattttactgttttatactattatggcaacttgtgtactgcaacacagtctattttgagggaaatttatgatttttttcatgcaaaaatctacacaaattagttttgatgatatggaaagcttttcatagcatcaaacattcatctggtgcaaatgcacaggggaaaccttcctgaaaagttttctgacttgagaagcaactaaaaaaaggcatactaggtaaagtaaataaaaactaaaaaaaaagaaaagaaaagcaaaaaagaaaaaaaaaaggattgggtggggggaaggaggtgggaaagggggaaacagaaaacacaggctgcagagtaaaccaatgtctgctgctaaaccagtctttgttttcatgtccagtgtacattaacacttatgatctcattttgatgatttactaggttatcagccccctgaaggtgaatcaagcttgcatgcggttcacatacagcaccacaaccacgctctcgtacacagtcactccaggactaggagtctgcttcctgagtgaagagccctagatttcaaagatgaacctggctctccatcactgagccagacattcattcaacattgtccattcacacactgcttcatagcaaggcctgggctcattttcctttgacttatatgggcagcctattctcttttatgcttacaaggcttgaagatgacggtactgcactttcccctcaatt

SEQ ID NO: 10239 - DNA, 1453 bp, Homo sapiens
acattcttcaccgatcgccgcagcaagtgcagacgcttctttcctgattatcttatttcattgtgttagcaaaatatgacctccctaaaacactgaaggttattttttattctttgaatttttactttataatttgatagttacagttttctttgtatcataagattgtaagtcccgataatttttttttttttggtctcagtaacagggaagtaagtaacatgttgacctgagctagtattgctgtgtatctactctaaatgagatgatctatttttttgctagccatctctccagctctgcagttttcactgtattcaggaagcataaagtagtatgaaaggtttgaagaatttttttttacaagactagttctaaattaacagcttataaaaaatttgtctaaatttaataattagtataaggatatgacctaataaatgtctccttacctaaagattcatttgctttcttttaatatgagtaggcatacttagtagcttttctgaacctagcctatgtctctgtccccaaaatagctgcccttaaagagttgttagcagagagaaaaataacagtgaatgtgctcctggtgtatatggcagtgaatctcctttctgttctactttagcatactatatatatttgactgtgtacattcttatgcaattttaagtatacactcagcaataattagaaaaaaaggagagagaaaagtgatttaaacagggtggattccactctgtgggagccttcgatggaactcaaggtggagctcagcctttccaatgagctctaagcatgtagatagcctgagctgtgtctaagcctggtgtttaaagatgggtatttgtcatacaatatgggtcctaaatccaaccaactacacattttatctggtgttcaaaccaaagaaacaatgatctactcaaacattggagaaaaaaactgccagaggaggagttgccaattggcagtgtgtcttatctccatgttgtaactggactctgactttagaccattacctattaggaagattaaaaatgactgtatttttaaaggaataaatcccagtgtgcctgatttgacattcttgtcagcaaaaaaaacttaatttctagtaaatctataaaaatgggtaagtccctaaattacaaatgagaaaattgaagcacaaggaaaaaaataactagtttgaaatattttgaaaagtaataacataaaactagtatttgtagaagattatgtgttgtatataacaaattagtatttatagaatatgacctatttatctgaagtttataattgtttatacctaatacagttctttttggagtaagaatgattatataatcgttatccatttgggtataaatctgtatttttagttttttccctttgattagtatgtgttacatataaagacagaaaataaagtataaatcaagagctt

SEQ ID NO: 10240 - DNA, 316 bp, Homo sapiens
ttgtgcttatggaagaaacaatgtcagccaagtccattttatagtttgagtgcaattctttgaacaatagaaatatctgcagtctttcacagatttgtattatgctgaagagtttcatctgacaatctgcttcaagaaatctcagaaaatatgataacattttaactttcattttagagcacgttttggtcatttttaaaaatacctaaagtgccagaccggaacctatagctactgctagaagtcttaaaaaaaccaacagcagcacaggatgtattaagaattatatgaagtcaggtttgtttttttttttttt

SEQ ID NO: 10241 - DNA, 361 bp, Homo sapiens
gatttttttaggactatccttatttttgtgtgttctgtcctattgcctttgtaaactctcttagactatgtgtctttagaaattatggcctcccatatgttaattaattaatgtttataattaatatgcccattatagaaaatttggaaactacagaaaaatataatgaggaaataaaacctataatctcaccagtgataattgaagaatctctttctaggcttttttcttaacattcataaaataacttttcccgaaaagaattaagatcagaagtcttttcatcttttttttcacttaacattgcagcatgtgtgtatactaacatgtttttcataaattataactgatgtttttatac

SEQ ID NO: 10242 - DNA, 864 bp, Homo sapiens
tttttttttatagccaacctttttttttttttaattagagtatattatactttcaaactggatacactagaaattggcaatgcaacataagatgcaaaggaatataccagttactgtcaaaatgaccctgtacagcctcgtaatgcaaaaagctttatacaatacaaattttcagtaatgtacacaaaccttgacagtatgatcatctgaacataatatgaagagttaaaaaaaggatagaagaaagaaagtgctgagaaccctaactgcattactatatggaaaaataagctagttttcattgaagaatgcatagtgacaacaattgaagttagttggtaggtgaatttctcaaagatgttagtgttttatacggaaaggatatctatggaatacatccttccctgagtatcaaactgcaaaccaaattcaggggtacatattttctagggtggagtctgaaaaatgctgtagatttttttctttattaataacaataataatataaaaagtcaaacaaactccaaacacaccttttctcactcagaaaacttttataatttaccagaaagattgatgactctttccaaagtgctaaaaaagttgcccaattatattaagcattactaagtcattcaaatacaagttcagtggcaagcagtgaaatgcatggcatttgagcagtaaacgtctccttccttcacctcctctcgttcttgaaagtttcaaccctagacctcctattgcacaagtggcatgctgtaaaacctatagtctgaattgtcagggccaccctttcaggtttttaacctgctggtgcttaagtgtgattcgccttttctaccagcctctgtgggactactt

SEQ ID NO: 10243 - DNA, 260 bp, Homo sapiens
gaaaaagcaggcagggaagggggtagtaaaggactgagagaggagggaggtggctggagaaggaaaaggaacattgctcgatgctcccatctggtggcggcctcaggaacccacgggaacctggaaggaggctctttgtgagacctgggcaaaggatggggcagctcgtcgatgatttttttgtgtttccaggcttcctgtgtgatcctggccctccggccgctagagagaggattgggaaaccccactgtcagctctgc

SEQ ID NO: 10244 - DNA, 747 bp, Homo sapiens
acggtcgttccttggagaagctgcctgtgcatatgggcctggtgatcaccgaggtggagcaggaacccagcttctcggacatcgcgagcctcgtggtgtggtgtatggccgtggcatctcctacattagcgtctacgaccaccaaggtattttcaaaagaaataattccagattgatggatgaaattttaaaacaacagcaagaacttctgggcctagattgttcaaaatactcaccagaatttgcaaatagtaatgacaaagatgatcaagttttaaattgccatttggcagtgaaggtgctgtctccggaagatggaaaagcagatattgtaagagctgctcaggacttttgccagttagtagcccagaagcaaaggagacccacagatttggatgtagatacgttagccagtttacttagttcaaatggttgtcctgatcctgatttagtattgaagttcggtcctgtggacagcacattaggctttcttccctggcacatcagattgactgagattgtctctttgccttcccacctaaacatcagttatgaggactttttctctgcccttcgtcattatgcagcctgtgaacagcgtctgggaaagtcgtggtcattggttgcataatttgatttgaggcttatggaggaaaggacccaagtgactctgatgtttagaaagcacctatgaaaccctgtacacacctagttcataatcctcataatttatcaacaaacacaaag

SEQ ID NO: 10245 - DNA, 753 bp, Homo sapiens
  misc_feature (1)...(753): n = a,t,c or g
tgatctggcttcaaggggacatgaaatttgactgggtcatgggactcaggagcatcactctcaaaaatagcagtacaggaagaggcgatggcccttaaacagcatttgcaggcagatcccatgttaatcgtaagggtcaggactctctcacttttctgtctctctctctgtctctcctctagggctgaccccacattggacaccactgcatccatgtccatcacacaccacagctgccttttcttctgcctgcttatgggaaagtcccctcctctcctccatttttcttctcttcctgccctatcacaccgtgcacttctccctttccttaaagaaccaccatcaactttaggaggagggaaaggggtggctctggcaggaaaagccagaatcccctctagccagcagagagagagagtcaagggtctgtttgggtggcagggatagccacttctgaaggtagaaagaaaaataagccaccaaattggtatctttctgtgaaatggacatcgtgcttagagtctccattttccccacaacctggaggaataagtattgtcatctgcattttatagctgaggaatctgactcaacaaaattaaattactcacctaagcaattagcaattaaccaagtctttctgattcagaaacccagctgttgcctgttcatatccagcccctgtattgggatcaagattgccctattctcagtgcanaagatcaggcagatcacactggactccagcactga

SEQ ID NO: 10246 - DNA, 421 bp, Homo sapiens
actgccaggtgaaacaattaccaacactggcctaatttttagtagaagacagggtttcacccatgttggccctggctgggagattctttataccattttgttagtggtagggtggtatttcttaggaattttttgtttcattaaatttaaacaaaagtacagtagaaaatgttgccaggcccatcatcgcaccaggatatttgtacggtaaaatgctttgcatgagtcatacttctggtacgcacttctgttgcaggtgacagcacactgccatttgcaacttcatcattttttctttcttgcggctgtacttaataggaattaaatgtgtgaaaataaataataacaataaagttatctataaagtttgaacattctttagcattctttgtttagcaaccacattcttcagcatctacca

SEQ ID NO: 10247 - DNA, 381 bp, Homo sapiens
ttaaattgtcttgatatttaaaaaaaataacttctacattctcaggaagaaatacatgaagtaaatcatatctccatgtctgtttccagatttctctcatctttttactatcccaatacattcctaattcctataaacgtagtggccttaaatactgaatacctggcagctcttaaagatcccttaggcagatgatgataattttcagtgtttcgtcatgtttaataggaaatcaaactgacttgtgttttaaaatacaagttgtctgctaagtaaagttacatgatttagggtgtgttttaaggttttctggcaacaattaagctggtgaacccctaatgtaagctaagttttataccaatttttataatcaaaattatt

SEQ ID NO: 10248 - DNA, 214 bp, Homo sapiens
cccagatgggtggtccagctattctgctgacaacatttttcagggcaaggcttttgctactggaatgatttaaggaagatccctcagtgtttcagagtaaagatatttctaaagaagtacctgtgtcattgccccatcttgaagattgacttttatggattgcctcaaatactgatatcagctcaatgtcaatatatactcctacatataaaaa

SEQ ID NO: 10249 - DNA, 99 bp, Homo sapiens
cagaactaccattgtaatatgactcctgtgttctggacttgcagagtacatgatagcaaaataaagccatttggggctgctgcctgccatcattgtaaa

SEQ ID NO: 10250 - DNA, 465 bp, Homo sapiens
ttttaggacaaaaatctctcctatttaaagttcataccttgtaagtatttagtttgtatattcatgaacaaatctggacatttatactttttttgtttccttatcaactgttcacaattattagttaattggtcttaacagttctacattataattgaaagaaaaattacttgagaaaataattgtttcagaatagtgcctactatatctgtgtcagctaaaaatttgtccagagttttagatataagctagtattttgtggagttttatccaggcgttaatagttcttcctggctgaaatttaatataggtgcagaatcctaaataacactgtgagatgtaatcttaactgccctcaataccttataaaactgctgcatttaacccagtgtgcatttaatgagtggctggtcgttgatacactcatcttagatgctgaaatttctgttttctccagcccttgta

SEQ ID NO: 10251 - DNA, 1078 bp, Homo sapiens
tttttttttgctaccaaactacagaaaaccatttctagaaaagaataagactgatccatttctgcctctcatgtggagcctaggattcttcagatagtaaagacagttggagtctgtcaagacagctactgccacattcttggcagcatttcttaccagattgctgattccatgacttgtattttttttttctttttctggagtcataatttcagaaagagtaaagataaactttcttattaaaaactggttttaggtccaaataatgaaagatgtagaaaaacaacctacagtcccattataacattttgaaattcatttataaaaaatttacagcagctgtaaagtttcagtatcgtaaggacaacgtgatcctacaaacagccaaaggatgtagacaagatgtttttctgtcttccaaataacacaaactgaaaagaaaagcctttgcttttccttggccacataaaactagtatttccacactactggttaataaccccaagaaacctttgcttctcttagtcaatttgctcattatggctacaagactacagctcaacatcacaagcccagaagaaatgctggtaagacatcaatctgagcatttcccgagacccaatcacaacatttcagtgctttccttatttgtcaagagctatcataccagtcattgtgcaaaatgcaaatattccaatgattatttcagtacatttcttaaacgacaagatgaaacccaagaggaatgggagtgtgcatagtgaaatatttaagatgcaaaggcaagtttggagggaagatgcagaaataaacgaacgtgcacacttaaagattataccatctttggggtttttctaatatactttgaagctataacattccaggatatttgtaaatatgaatccagtagatgtcttgtatcatgcttctaaccaggaccttcaatattaaggcatttacattcacgcctaagagtatccacattcttctagattacttgaagagggacaggactgatgaacggaaaccagtcaagaaggcagggtactgaggtcccaggagagcatctcttatgctc

SEQ ID NO: 10252 - DNA, 1371 bp, Homo sapiens
ttttttttttttttttgcactgtgtaattcctttattttctgcatattagtgctttaccaacactacaaccataaagaacacaattccaagtactgtactttttagtttggggagatcacagtctacagactcatttacttatattaaacaagattaacctcattcaaaacttactgcagtttataaattcacataaatacagaaatggatgcaattaaacaacttcaggatcttatttttaaaattcttagataattttttctgcaggctataattacctgctccagtcaccaatggttattgttcaatttaactacatcaattataaacctcttatatccttaaagaaaattttaagtgaaaattacaatttcttaccaaaaggtttagggttttccaaatttcaaatatttgcttccccctcccccctttccagtcaaacatttcaaataaactaaaaataaccacatctcacctgcaacattcaataatagcaatcacttgatgtataaaattttaactatgcccccagttattttaagacacaaaaaaatggctgcctaccaatctgtcttcacaagttagaaatactacatttaagatttaacatgagggtttcaagtttcctccagtttaggcatttatacctttgtgcttgttttgtttcaggatgttactatagcattgatattggataacccatatttatatactttaaaatgcaatcatttgaaacacttaaaaattacatttatggtggagctttggaaattttagaaagcaaccagtgttcttagatgtgtttatcagcctcatttctagagctctttctactaaagtgaaactgagaacttcgtactttagttgtatcctgaaatcaaaaaaatccctctgcaccaacaggagcctacatgagaatacccttttggcatctgctttaagtaaaatgtttgttaagagttttactttgaatagttcatttttttatagtcttacacttctcatacatctttggtaaaagctccattatacaatatggccaaagtgtgaaggaccaatactgtccaactataccatgatatcccgctcaattttagttttcagacaccctcatcaacaaaacccactccaccttttcctgtattactgcctttgcagtctacatttctgaaattccctatttaattccttgaggatcactaaaattaatccttaaggctatataggaaccagatgctgctttacaattctgcatcaagcattaacatttggttcaaaatattatcatagtggtcgcaatccagttactggtcctaaccagctaaccaagtaatcttgttaggatctggatatcaccagcgagcacactg

SEQ ID NO: 10253 - DNA, 392 bp, Homo sapiens
  misc_feature (1)...(392): n = a,t,c or g
ccgccatgttaggagcgcagtggcggcgcaaccagccttctagggcggcggaggagtggagtcaacatatcantggagcaagtcacagtcgtcgatgccagcttcttcttgaaatctacccagaatggaatcctgacaatgatacaggacacacaatgggtgatccattcatgttgcagcagtctacaaatccagcaccaggaattctgggacctccacctccctcatttcatcttgggggaccagcagttggaccaagaggaaatctgggtgctggaaatggaaacctgcaaggacctagacacatgcagaaaggcagagtggaaacttagcagagttgtttcacatcatgggtttttcaacggagggaaaaactttgagataccagctat

SEQ ID NO: 10254 - DNA, 273 bp, Homo sapiens
cttaatttcactacatgctgatttgtcctttgcagtatttagctcagaccaagacagaattgtatgtgctattagatttgcaaattgctgatctcccagtgactttccctcttagatcccagttgagtatggttaccttgagaactgtggtattagccatgttagagcatgctccactggggagttctgtgcagtctatttttaatgctatttaatgaaggagcgagcgcctcacttcagcaataaaagaagcatgagggaagacagagcagt

SEQ ID NO: 10255 - DNA, 359 bp, Homo sapiens
aaacatgattaacatgttttttaagtatttatcaaataattcacatttttgcaggtttaagtgctgttttttaagatattaaacatgttccttgtttcttttttctttttaaccactggagactatgtgaaaatcttgtgttatatggaatttttctaaaacaatttccttttacttttcatgttgcatattttccagtggggataaattggaggttcttattactaataatcctgaaactaaaatttgcttttcctgcatagacatcttttgttagtccatttgagttttgttgccatccagtttcatgatcatgttgtattagtctaatagacaatgagttactgcttgaatgatat

SEQ ID NO: 10256 - DNA, 360 bp, Homo sapiens
gacatctttcctgcaggtggtgaccatgtggataataggatcatagacaaatggtggttccatctacagcatcaccgaaatgctgttgttactgcttctttctgggatcttcttgcatctttgcttctaaaggggcacaccttttatagaagtacgtccaggaatagaagtgacctgctttttcgcaagtaattgcctggaatgtttttatgtacttctctgcactctcaatacatttcatgcttccctctatttttgtatattaactcattgtatttcttaaatttatattttactttatgaatggaagtgagatttgtgtatggtaaatataattaattcaaccccatggataccgtt

SEQ ID NO: 10257 - DNA, 255 bp, Homo sapiens
ctggaattcaaggtaaaagaggtcaccgaggagcacaaggtgatcaaggaccatgtggagaccctggcctgaaagggcagcctggagaatatggtgttcaaggtttgacaggtttccaaggattcccaggccctaaaggtcctgaaggggatgctggcattgttgggatatcaggtcctaaaggtcctattggacacagaggaaacactggtccccttggcagagaaggtattattaggcccaacaggtagaact

SEQ ID NO: 10258 - DNA, 674 bp, Homo sapiens
agtgcaatagtatatttatttttttacagtaattttggttgccatacaagagatttaaggattgggagaaagtgcaaattacaggagcttttttttttttttataaagtctaaaaagaataaaagcacaaaagtaacagcaacatagataatgcgaacacgtgttgttacacaaactatagtgtgaaacatattagtatttaaaaaacaaaaaaaaattgttaatgggaaaatcaatattgtggcccacacacaaaaagtcattgccagatcaactggataatgcttgcttgttcaataactgagaaaaaaatttaccattttattaactaaagtatcacaaataattcactttgtgatatgtaaagttcagcaaatcaacagtcacattgagtaatttttatattatgtgaattaacttaaaatgtgcgcagacaccctggaaaaggtatcttggcaggtatacataatttacattttgagagatttgggttttgtatacacaatattacagaaactaggcatgtaaatgcagtttatttaaattacagtatgtaacaaaagttgatcttaaaacctggaataatatcaactgctcatctaaagatcatgttgatattattccaggttttaagatcaacatgatctttagatgagcagtttaacatttgttcc

SEQ ID NO: 10259 - DNA, 2861 bp, Homo sapiens
  misc_feature (1)...(2861): n = a,t,c or g
cgccgagacgagcagcggccgagcgagcgcgggcgcgggcgcaccgaggcgagggaggcggggaagccccgccgccgccgccccgcccgccccttcccccgccgcccgccccctctccccccgccgcgctcgccgccttcctccctctgccttccttccccacggccggccgcctcctcgcccgcccgcccgcagccgaggagccgaggccgccgcggccgtggcggcggagccctcagccatggcctcgggcgacaccctctacatcgccacggacggctcggagatgccggccgagatcgtggagctgcacgagatcgaggtggagaccatcccggtggagaccatcgagaccacagtggtgggcgaggaggaggaggaggacgacgacgacgaggacggcggcggtggcgaccacggcggcgggggcggccacgggcacgccggccaccaccaccaccaccatcaccaccaccaccacccgcccatgatcgctctgcagccgctggtcaccgacgacccgacccaggtgcaccaccaccaggaggtgatcctggtgcagacgcgcgaggaggtggtgggcggcgacgactcggacgggctgcgcgccgaggacggcttcgaggatcagattctcatcccggtgcccgcgccggccggcggcgacgacgactacattgaacaaacgctggtcaccgtggcggcggccggcaagagcggcggcggcggctcgtcgtcgtcgggaggcggccgcgtcaagaagggcggcggcaagaagagcggcaagaagagttacctcagcggcggggccggcgcctcgcagcgggcggcgggcggcgcacccggcgcaacaagaagtgggagcagaagcaggtgcagatcaagaccctggagggccgagttctcggtcaccatgtggtcctcagatgaaaaaaaagatattgaccatgagacagtggttgaagaacagatcattggagagaactcacctcctgattattcagaatatatgacaggaaagaaacttccctcctggaggaatacctggcattgacctctcagatcccaaacaactggcagaatttgctagaatgaagccaagaaaaattaaagaagatgatgctccaagaacaatagccttgccctcataaaggctgcacaaagatgttcagggataactcggccatgagaaaacatctgcacacccacgggtcccagagttccacgtggtgtgcagaatgtggccaaaggcttttgttgagagttcaaaactaaaacgacaccaactggttcatactggagagaagccctttcagtgcacgttcgaaggctgtgggaaacgcttttcactggacttcaattgtgcgcacacatgtgcggaactccataccggagacaggccctatgtgtgccccttcgatggttgtaataagaagtttgctcagtcaactaacctgaaatctcacatcttaacacatggcaaaggccaaaaacaaccagtgaaaagaagagagaagacccttctcgaccacggggaagcatcttccagaagtgtgattgggaataaatatgcctctcctttgtatattatttctaggaagaattttaaaaatgaatcctacacacctaagggacatgttttgataaagtagtaaaaattaaaaaaaaaaaactttactaagatgacattgctaagatgctctatcttgctctgtaatctcgtttcaaaaacacagtgtttttgtaaagtgtggtcccaacaggaggacaattcatgaacttcgcatcaaaagacaattctttatacaacagtgctaaaaatgggacttcttttcacattcttataaatatgaagctcacctgttgcttacaatttttttaattttgtattttccaagtgtgcatattgtacacttttttggggatatgcttagtaatgctacgtgtgatttttctggaggttgataactttgcttgcagtagattttctttaaaagaatgggcagttacatgcatacttcaaaagtattttcctgtaaaaaaaaaaaagttatataggttttgtttgctatcttaattttggttgtattctttgatgttaacacattttgtataattgtatcgtatagctgtattgaatcatgtagtatcaaatattagatgtgatttaatagtgttaatcaatttaaacccattttagtcactttttttttccaaaaaaatactgccagatgctgatgttcagtgtaatttctttgcctgttcagttacagaaagtggtgctcagttgtagaatgtattgtaccttttaacacctgatgtgtacatcccatgtaacagaaagggcaacaataaaatagcaatcctaaagcaagaatatggcagaacaagatctgtaagcacagtcttattttcttttgttgtccagaatacttataattcttgagcctcccagaaattggaagctaaataaagcaactcaagtttcctttattttgcactcaattacagtgattattgatgaaagcgatgcatggatattttaatacttcctacatgtcctgacttctgaaagagagtaggtaacaggcatcccgagttcaggaactacctcagaacaccccagggccaggttggtcataggctgtgattttagcccccggcaagtgtgagtgaagcatctgtaccaccgcgcaggcttgagcgccttcaagggggtaaggtgccacctgggcagtgggggcacacagaggggaaggccagggctgtnccttcagcccgcttgccttcagaggganttccagcaggacctttggcttttcttgacaggaatngtttttggtcgttnggtatttggtttt

SEQ ID NO: 10260 - DNA, 1275 bp, Homo sapiens
  misc_feature (1)...(1275): n = a,t,c or g
ctcacgcattatctatgattatcggaacagataattttgaagaatccatatttagccaagattatgaggataaatacctggatggaaaaaatattaaggaaaaagaaactgtgataatacccaatgagaaaagtcttcaattacaaaaagatgaggcaataacaccattacctcccaagaaagaaaatgatgaaatgcccacgtgtctgctgtgtgtttgtttaagtggctctgtatactgtgaagaacgttgacattgatgctgtaccacccttaccaaagggatcagcctatctttaccgcacgattcaacaaaattaaaaagctgactgccaaagattttgcagacatacctaacttaagaagactcgattttacaggaaatttgatagaagatatagaagatggtactttttcaaaactttctctgttagaagaactttcacttggctgaaaatcaactactaaaacttccagttcttcctcccaagctcacttttatttaaatgcaaaatacaacaaaatcaagagtaggggaatcaaagcaaatgcattcaaaaaactgaataacctcaccttcctctacttggaccataatgccctggaatccgtgcctcttaatttaccagaaagtctacgtgtaattcatcttcagttcaacaacatagcttcaattacagatgacacattctgcaaggctaatgacaccagttacatccgggaccgcattgaagagatacgcctggagggcaatccaatcgtcctgggaaagcatccaaacagttttatttgcttaaaaagattaccgatagggtcatacttttaacctctattggtacaacatataaatgaaagtacacctacactaatagtctgtctcaacaatgagtaaaggaacttaagtattggtttaatattaaccttgtatctcattttgaaggaatttaatattttaagcaaggatgttcaaaatcttacatataataagtaaaaagtaagactgaatgtctacgttccgaaacaaagtaatatgaaaatatttaaacagcattacaaaatcctagtttatactagactaccatttaaaaatcatgtttttatataaatgcccaaatttgagatgcattattcctattactaatgatgtaagtacgaggataaatccaagaaactttccaactcctttgcctttcctgggcctttactgggatccccaaaagcatttaaggtacatggttcccaaaaccttggaaaagcctaatggnttccccatga

SEQ ID NO: 10261 - DNA, 556 bp, Homo sapiens
ctcaaaggacaatcggatacatatcttcctgaaaagaagtagttaaagttcccttgggaactagctacttggtagttacaattcccaaatgcagaacttgggcttttcatgttaaaagccttaatctcatttgggtactcaaaagagaaatcagagtttattctggttaacttgagaagccaagaaagatcatttttagcaagtatgccttccatccttggcagaggcttcccagcatcctaggctcagcttaccgggtgataggccccataagacacacacatgagcagggtgagaaatgcttgctttatagctgctccaccctcatctccagagattttgtgtctatggttgtgggtctggaaacctggcaggaaccacttctagagtacctttgcctaaactcttttagaattgaggccccaactttgatggcacatttaatacccaatttcttccataatagatatttttaattagcagggacagatggcactgattagatcaagaactatttggaagtgcctcttatgtttttttcctgcattctgtacat

SEQ ID NO: 10262 - DNA, 538 bp, Homo sapiens
  misc_feature (1)...(538): n = a,t,c or g
tttttttgtgtgattcagtggtttttagtaggttcacagacatgcaaccatcaccccaattttaggacattttcatcctttataaagaaactcgcagcctttggtaatcactcccttatcctcccgaaacccagccctagacaaccagcaatctcctttctgcctctacagatctcctgctctggacatctggtgtgaatggaatcacaccgtgtgtgggtcctttgtgtctggtttctttcacttactatgttctcaagtttcctccgcatcgtggtgcatatcatacttcactcctctgtacggcccaaggttacgctgttgtaaggatgggccacgttttgtttatccattcaacccttgatgggcgtttgggtttgtttccactttttgggctattacggaactgtgccgcgatgagggnttcaaagttcaaaatttttggggtggatcaanacatttgcaggttctttgggggggtacacataggaaagtggggaaaagnacagnggtcctnggggaccagacagccgggggg

SEQ ID NO: 10263 - DNA, 1031 bp, Homo sapiens
cagtgagtgtcttcaagtgaattgttcacctaaacaattttattttcatattatccacataactttttctatgttatatttaaatatgaatggcaaattttggtttttagcttttacattttattatcttaattttataaatgctaatatttcttttgtgataagttatagcatctcataaagtttgttctatttgaagttttttagagtacttgagaaatgaatttagtctgcaggtagtaagtatgctactaaaatacgttagatctaaatccttttatttggtataaaaatgcaatattgagaatcaaaacttgtttttaagagaactatagattctacacaacctgatttcaagtaattattcatagtatttatagttgtcttggcaaagtgattgtaaaattctgtaggacctattcacacttcttccttcttccatatacttctctggttttccccatagttcccctataatttcaagtttgttgaaacctgttaattttagtgggggattagaagaaaaacttggtggtttcttagcatgatggtgtatgtatgtggtaatggaaagtctgtaaaagtaaatatagtgtagcaaaaaagatttcactgagtattttagatactagtgcaaataaagatagaaaatcttgatcataatgtcttaagtttgggaactgtgatattaagaaaagaaattcccttctagaggtgctggccaaaaagccttttgggctaacttaagtattaaatttatatatttaaataattatattttaagttgtagaggattttcccaaggattttatgcttacttgaatgttctttgaatgttcagatgcatatcctaactggatgcttctcaaggccttactgcatatttgtgttgcatatttatgttagttgcaccagggccatttgtagtttgggcaaccgaatgccttaattggaaaaaaggcattgtggtttcccctatgatctaaattgttacattttaccatttcattccgaagttggttttactttat

SEQ ID NO: 10264 - DNA, 845 bp, Homo sapiens
cagttcattgcaatttatttaatttaaaaataaaaacagaaacaaaaaccaaaatgaaacaaaaatcagtttccaacgaaaatacaaacactttgggtggttatccagcttgtttttcccctgtaggctgttctgggctcaaaccaatcaaatgagtgaaaaccaattttgacaggagccataaagcatgttgcaccaattaaattacaccaatatattattataatacctttgaaatgcctttcagaccaataaataaaaaagacaaattcaaataaaaaagtcaactttttattaccaaaaaaaatagaaattaaataaaagtcacaatgtggatttttttttttttttaatgtgcagtcaagtttctctctttttttcttctaggaatgataccatgccagtaaatccctacagaacatttccagtttggcaacaagcagtcagtcgatcattcacatttgtactcaagacagcaggcctgggcaaaactcgcctgaatttcaccctgaaaagtgctccccatcatctgaagaagcagcacctggtaacaggcatggccattcagagggtacttagcattttcatttcacctggggtcttgaagcacttcctgaaaactgattgtgccttgacatttacctgtaaaaagaagtgtaattctacccctttggcagatgtgtaaactaagacggtgcaaggcccacagaagtaaggagaggaccaggaaagctgacagtgaatctcctgctttgtccatcaggtcctaaaagtgtctctcacttgtaattccacagaagtgaataaagcataacttctttgactgggattggctggtagggatg

SEQ ID NO: 10265 - DNA, 576 bp, Homo sapiens
ccaggagcttccggttttctgcgcggtgcgcgacctcgtcccgaagcctggggatacaccctctcgagagcccgctgtcgccctccgttaaggtcgaacccctcacagttgctgtgggcaactccagcccaacattccctcgctctggttctcgccccattgggaaactcggccccacgcttcccacttttctggatgaggtgtcccctttctccccactaaaatgtcaaataacctacggagggtcttcctgaaacccgcagaggaaaattcaggcaacgctccgcgttgatccataatgagatggcatcaacatcagataaaggtgcccaaggaagaaatgacaagaaagattctcaaggaagaagtaataaggcattacatctgaagagtgatgctgaatttaaaaagatatttggccttactaaggatttgagagtgtgccttactcgaattcctgaccatttgacctctggagaaggtttcgattcctttagcagtttggtaaagagtggtacttacaaagagacagagtttatggtgaaggaaggagagagaaaacagcagaattttgat

SEQ ID NO: 10266 - DNA, 122 bp, Homo sapiens
tatcgctattatacacctgccaaaagaaaaaaggattttacagatcaacggatagaagctgaaacccagactgaattaagctttaaatctgagttggggacagcttgagactaaaaacatgg

SEQ ID NO: 10267 - DNA, 540 bp, Homo sapiens
cccacgcgtccggttggggtgtttctgtccatctatggtcctgtcccgccatcaagttcatactctcttactcacacttctgggatgcaaggagggcagggggttctgtgtcttccatggaagggggacaatggttatcctgaggttggtttttggaggaaacatgggcgtaggcaaggtgaaccaaggcaggtgcagtcacctaaccgaatgctgcctgtacaggggaagagtcctcttgtgcttgctaacgtgtgctgactccatgtcccaggacctcatttccaggagctctgagaggtggtctagcatgcccgccctggcagctattccccacccgtctcctgctgcaggctctggggttttgcatgttcatgtgaccttccttccatggggtccctggttcctcaccttctccaatgtgtgctattcccacatcacctcttcctgtcgtctcatcctctcagtgcccatatcatacccccagaccacggtgggacagctcacctagtgagtggcgttcattcattacagttcgtt

SEQ ID NO: 10268 - DNA, 577 bp, Homo sapiens
gcacaacacagcccttggtgggaggggaaggccccagcctcctccacctcccactggaaagcagactgcttgggactgcccagctgtgaattgtatagtttctgtacttattagaactgggtaaattattttggttcaaatctattattccatcaattcagttagaattgaattttctaggtgattatgcagaatcttctgccagggcacgatgctgtcgtaagagatttctgttctctgtactgggcccccttgccctgttccttgagtgaagtgggggctgccctcacctgtcccccttgcctgtgaatcccttccttgtacatggtggtcagtggcacggaatccccaatagattgtatatctgaaggagaaaaataaacacttttgctcgaaaacagtgtgaaacaacatctttttcttaccctctatccatataaaatccaaagcaaccagcctcctagggagcacaggagttggggagccagttctggggctcagctggcatccacacctctgggagggaggggtggctggagggggctgtcggggtgctggggctggggctgttccccgg

SEQ ID NO: 10269 - DNA, 383 bp, Homo sapiens
cattatagttggacatttaggtttacaatattaaagcagtggtttatatcaatttcagtggtttaaaatatgaatttctattttggaatgaaagtattaatttaatgtagtgaatctcatattccagaactgagatgattgatttgatgctatttgtgacagacagaacccataataaagcctttctatgcaagttacattttatagaattatcctactaaaagtaacctttcttcagcgaatgcaaaacagacctttggtgttccagtatgattcattttgccattctgaacaactatcattttaattaagaccatttaactgacacttcctggattcagttattaagtttcagattgaaacttgatccagtttaataactg

SEQ ID NO: 10270 - DNA, 922 bp, Homo sapiens
ggaagatatgtatgaatgtatatacaaagactcagctacttcttttcttatatgtacagccttcattctgttgcaattaagttttagtacttgtatgaaaggtgtgaattagaaagtcacatatatacatatgtatcttataatcttttctccctgaaatactcacattcccacatacattcacctattttcacacacacacaccacacacacacacacaccacacacgaatcccacagcaatccatcagatatgctggaagatccaaacgtgcatacagtagcaaatatttattgacaaattgaaaagcaggaaggaagagggttgtgcccaaggtattgatgacaaatggggtgatttgcttcattgagatcttgctcccaggtaaccttaagaagattttagtccctaaagaaatgaacctttccttatcaaatagaatatcactgatatactgctgcatgaataagaaccattatgtgggcaggttatggaagcaaaattggttaatctacaccttaactctggctgctgcaattgaaaactttctttctaataaaataatatatatatctctgaatctgatgtgcatgatgaacatttctggaaagtaaacactttctctcgactaagaaagtatttttcagtaatttttgattctgtattactacccacttaaaaaatcattctctgttaattattgactatgttttaacttttctggttttacatatatatcattaaatatagttttagtttaacacattaagtagtggaaaagtatagattatacacttgttttgcatattattcaatgatgttcacagcaataaattactaatatgagaaggtagtgcaaaaaatgcattattacattgcaagttgatgtttcaggaaaattggttgcattacttgaatacct

SEQ ID NO: 10271 - DNA, 690 bp, Homo sapiens
tttcattgttatttccactatagaacttctactttatactagcggggaaaatttttttatttagaattttaatatttgaattttgtttatgtatcacatactgtgctacagttagcctcaatgaagattctattttgaactaggacatcctgtcaatagtttgtcaagtaacttcattgcttcctttgataggcaattcagtggaaattttttcccaagtggatattttcccccaacttttgtggaggttggataaataggatgagtcttttatattggggaaatactgtgaatggaaaattgccaaatcccttcttagtatattttaagcaccctacaacactttacctccctgcctttagtggtatttaaacatatggccaagttagtatttgggtttgattcctttggtgaagattaaggcatcaaaacatttcttaaaatgtttgagtacaaggctaagttataatgtcaactttcaaagactatgttgtgattcggtttgaatatgctgaagtgagcaattatgatttgcccaagtgcaatacaacaaatctataatgtatatttcacattttctacttgaacacattcatgtatatattttgttaaacttcatatgtatttaaaaagaatcatgaactgtatcaaaattctttcaataaaatttctatttaaaaatctcaaaaa

SEQ ID NO: 10272 - DNA, 649 bp, Homo sapiens
gtgatgtggaattaatgggtgcaacagctgtacagacaatcaataacacacacagttctggaaagaacacatcacttgtgcttgtttgatgagcttgtcacattctaatccctctccccatcctgtttcaattttgggaaacttgtatctgctggtgtcagcaattctgattctgaaataggatcaggcttttactacaacagccttctctttcttatttattgtgtcgactcgtggcttatgaataaaggcaggcaaagtttgcagaactgtcttaaggacatttattttttttccctttttaagtaattttacactttagtatctatttcagagtcatatttaaaactatttattagtgactacagtacatgagacaacaaggttactgagattacaattcttcaaaggttaatgataatgtggtttatactgtgccttaatagtaatgctatttaagatatttatttttaagttttactatgctgcactctaaagaaaggaactttagatgtgacactgtaaaattatgtattcatctcatggcataaattatttagtaagtctagatgtagcgtattaaatattaacctattcaactaaagatgttgacttgggtttatttaaattcatatgtcactgtataaga

SEQ ID NO: 10273 - DNA, 1198 bp, Homo sapiens
attttatatatacataaaaattaagttctgagtgagttctagctaaatataagtgcgactgtaaacgcagccaatttttttaagcagaatatgagaacacctaagtatttctctttcataggcagttcctataaagggattaaacacttatttctgtgttatggttcttattcatatatttttatagcacctttttttggaacctatatttgtgcttgaaggtgtttttgatatttggaaacagtataagccatttggagtcatgattggtggtcaagtggattcaagctaaaatactaagaccagcattcttagtggcgcttataaattagctctcacctggtttccaaactgcttttaacaatggtagtgctcctggaacaatccttccaagctcctctaaggacaatatttaattcagatactaaaggtaagactggttgttacttttgttttgttgtacaattagtactttatagtcacatgttgtatatattaaatagcccagttttattcagacttgtaaatagaactatttcaatgtagttaatctaaaaacaaaaaagaaaaccccagtcacgatttgcatgttctctgtaagcttcatccatgctggttattgcactgaatgatgtattattagggcatgttaacagtataccagtaacagcactttatctcatttatatgaacacctttgaggtgctacttaagtccaagctctgatgtattattcatttgtaaagataaggtacaggaatgaaccttggtttaaaggtatttttatatgaaaatggtgtgttattggaagatgttaaaatgctaatttgagagaagtaggagtgtatctgttttatatgttgggatgtgaaatttattttctaaaattgaggagaaggaagttatatatttgcagaatgttttaaagtgaattgttgtaatgaagttcctgtgaacatcattatggttcgtacaataggaacctctgatgtcattcttcacgtttgttccgtgtgtacaattgtactttgtatgaacagctttatcatttttataggctttccatgagttttgctgtaactactatggcttatttattttctttaaaatatttgtgaaagtcttactcctttgttagttttgtttctgcacaactactgtacttttccatatggaataaagactattaatagaaaaa

SEQ ID NO: 10274 - DNA, 429 bp, Homo sapiens
  misc_feature (1)...(429): n = a,t,c or g
cagctgctggtataaaaacagttgatcctctgcctttgcgggaagattctgaagacaatatccacaaatttgctgaggcaactcttccagtttcaaaaattccaaaatacccaacaaatccccctggacagttgccttctccaccacatgttccatcctactggcatccctctcgacgaattcagggctctcttagagatccagagtttcagcacaatgtgggaaaagcaaggatgaacaatttgcagttacctcaacatgaagcctttaatgatgaagatgaggacagattgtctgagatttctgctcgctctgcagcttctagtctccgggcttttcaaactctgggcacgagctaaaggaaaaggaagggagaatttctgggggtaaaacntaaacctagctgagttggccttatctaaaggaaac

SEQ ID NO: 10275 - DNA, 796 bp, Homo sapiens
  misc_feature (1)...(796): n = a,t,c or g
tttttttttttttttcaagtgttaattttattgtgttttatttcaatacatattaaactatattcttttgtatgtatcacatgttacatcagaagaatgtaatttttaaaaattaaagcaacaaaagaacaattagtttagaagtttggtccttacatttaaaaaaagaagtaaatacaagaaaactaagcattacatgccagcagtacatatttattattattcatgaatggtgaaaagacttacaaggcccattattatgagtataaccacacatatgaaatatcacttagcggcaacatgggatgaaaaggacagttatatatttatattaaaaaaatacacgtttgcattcaatgtttgcctagaaaaaaaatacatgtacacacgctctttcaagtgctccccataaactgctataaaagcaggaggcatcaagctgtagaagttccaatatacataacatgttgaaatatctcaagcataaaaactgtacgtaacttgcaaaaataaagttcctttcttcaaacattttgatctgagctcaggcaaagcaaataatgaacaccaatgatttttatactatttcacacaatttaaaataatcaacatgaaaaggtcaacagcttcaaaaatcctgaaaatatggaggttacgagaatgaacaatttcatctggaaaaggtcttacagcaggttctgctttcatcctggacttcttcaaatattttaaggggtccntaattttactattactccaaactcccagtttaggccggggggccaaaccaaattgg

SEQ ID NO: 10276 - DNA, 1095 bp, Homo sapiens
tttttttttttttttattttatgtaggtaagctttttattattgttttctttacaggaacaataatccaaacaaatcttgaaccaatctataaacagaaaacctgttatataaattattatctatttttgcaatacatcaaaatactgtattgatgaaaataaatagataacaaaaaacaatatacatcatttctatgtttgctatcagaccccacaagtatgtttgtttttacaattcattataggtgaaaaacaaactgaaacacaacaggtacgtacaattacgccactgttaaggactgcagattacacgtgttaaagcttttcttaataaaatgggaacacattgctaggtacacagaaacatgattttgccctaaagaacagctgaactgttgagagaagcaagggcttcctagcggccttccagtgtagcagataatattaccctgtgtaacagagtattacagagttttgcattttccaagtctgtaagtctaaccataaacaaaacaaagacaaacccaaacattaagatatactgacaatcttgttcccatatatgatagaatagttctcatacactgttaagattgatttacttttttattaggagcacttctcaggtttttggcatttcacatgtctacactcagtgtccattggctccttctgagagtatccttgaaggttcggtaaattttgcagtgaacaagtaaaaaagggctggtgtaggtaccaaagccaaaaggggcaaatcttgctcaagtttatccactctggaaatggagattattccataggcatgaagtaaccagtggctgaagagaacaataagtcttttctttctgaccagaagatcatagcagttctctatttcagaagcagacatgtacacagccagagtaaccaaagataacactaatataatgtatgggaaggcgtaatataaaaggcctccaccaactgcctgaagcacggttaaaattgggaagaagtaaagtgcagcataaatacttttaaatcgatcagatttccctaacccacatgcaatcttcttcaccagaagaggtcggagcagcatcattaatacc

SEQ ID NO: 10277 - DNA, 454 bp, Homo sapiens
gtgggactcatcaaacaaatctttctgggaaatgtgcacaacttggattttcacaaatatgtggtaaaactggcagtgtgggttctgacttacaattcctagggacaactagcagtcatcaagaaaaagtgtatgctagcctcaattttggcagtaagacacagcaaacatttggtagtcaaacagagtgtacttcctcaaatggtcaaaatccaagtccaggagcttacatccttccatcctatcctgtctcatcacctcgaactagtccaaagcatacatctcctcttattatatctccaaagaagtctcaagataattctgttaatttctcaaattcctgggcctcttaaaagcttcgaaggactatcaaagccaagtccacagaagaagcttgtcagccaaaaatcgtctgatcctacgggtaggaaatcatgggagaaaattctcaagt

SEQ ID NO: 10278 - DNA, 554 bp, Homo sapiens
ctttatttttctacatcagggtcatgctgatacatattttccccatcctcactttttaaaaatgtagtatctgaaaattttgattacatttttgtaccataccagtcctcagaaaatactacattctttaaatttttaaaaaaatggacagtaatttttaaacaatagaaatggtaagtatgttggtttttaaggtataaaataactaactgtaccataaacaaataaataactgctttccttttccatagcagtacatatagcaatacattctcctaagtcatatagttatcatttacaatagacaacttaattttactaatggatggcaaaaaataatagaatacaaggcacaatcattaaatgggagtttttctttagggtgtatattgacataccagcatgataaggataccgtaaaaagtgcagaaaaaaccacaatgtgcaatgagaccactggtataaaaccatgattgcataaaaagtgatttggcctattttaacctttaataattgaaaataacccatttccccccttaaaattaacctataag

SEQ ID NO: 10279 - DNA, 325 bp, Homo sapiens
ctatgatgcctctgctgatctctttgatgatattgctaaagaaatggacattgcaactgagattaccaaaaaatcacaggatattttgttaaaatggggaacatctttggcagaaagtcacccttcagagtctgatttttcactgagatcactttctgaagacttcatccagccttcacaaaaattatccttgcaaagcctatctgactctaggcattcaagaacatgctctccaacacctcattttcaatcagattcagaatataattttgaaaatagtcaagactttgttccatgttcacagtcaactccaattttcagggtt

SEQ ID NO: 10280 - DNA, 3194 bp, Homo sapiens
agcatttcaggccccggacaggaggcagtgccgcttcggccgaaggccgagccgcccgagggctctgggatggtgtgggaccggcaaaccaagatggagtatgagtggaaacctgacgagcaagggcttcagcaaatcctgcagctgttgaaggagtcccagtccccagacaccaccatccagagaaccgtgcaacaaaaactggaacaacttaatcagtatccagactttaacaactacttgatttttgttcttacaaaattaaaatctgaagatgaacccacaagatcattgagtggtcttatcttgaagaataatgtgaaagcacactttcagaacttcccaaatggtgtaacagactttattaaaagtgaatgtttaaataatattggtgactcctctcctctgattagagccactgttggtattttgatcacaactatagcctccaagggagaattgcagaattggcctgacctcttaccaaaactctgtagcctgttggattctgaagattataatacctgtgagggagcatttggtgcccttcagaagatttgtgaagattctgctgagattttagacagtgatgttttagatcgtcctctcaacatcatgattcccaaatttttacagttcttcaagcatagtagtccaaaaataaggtctcacgctgttgcatgtgtcaatcagtttatcatcagtaggactcaagctctaatgttgcacattgattcttttactgagaatctctttgcattagctggtgatgaagaaccagaggtacggaaaaatgtgtgccgagcacttgtgatgttgctcgaagttcgaatggatcgcctgcttcctcacatgcataatatagttgagtacatgctacagaggactcaagatcaagatgaaaatgtggctttagaagcctgtgaattttggctaactttagctgaacagccaatatgcaaagatgtactcgtaaggcatcttcctaagttgattcctgtgttagtgaatggcatgaagtactcagacatagatattatcctacttaagggtgatgttgaagaagacgaaacgattcctgatagtgaacaggatatacggccacgttttcaccgatcgaggacggtggctcagcagcatgatgaagatggaattgaagaggaagacgatgatgatgatgaaattgatgatgatgatacaatttcagactggaatctaagaaaatgttctgctgctgccctggatgttcttgcaaatgtgtatcgtgatgaactgctgccacatattttgccccttttgaaagaattactttttcatcatgaatgggttgttaaagaatcaggcattttggttttaggagcaattgctgaaggttgcatgcagggcatgattccatacttgcctgagcttattcctcaccttattcagtgcctctctgataaaaaggctcttgtgcgttccataacatgctggactcttagccgctatgcacactgggtggtcagccagccgccagacacgtacctgaagccattaatgacagaattgctaaagcgcatcctggacagcaacaagagagtacaagaagctgcctgcagtgcctttgcctaccctagaagaggaggcttgtacagaacttgttccttaccttgcttatatacttgataccctggtctttgcatttagtaaataccagcataagaacctgctcattctttacgatgccataggaacattagcagattcagtaggacatcatttaaacaaaccagaatatattcagatgctaatgcctccactgatccagaaatggaacatgttaaaggatgaagataaagatctcttccctttacttgagtgcctatcttcagttgccacagcactgcagtctggattccttccgtactgtgaacctgtgtatcagcgttgtgtaaacctagtacagaagactcttgcacaagccatgctaaacaatgctcaaccagatcaatatgaagctccagataaagattttatgatagtggctcttgatttactgagtggcctggctgaaggacttggaggcaacattgaacagctggtagcccgaagtaacatcctgacactaatgtatcagtgcatgcaggataaaatgccagaagttcgacagagttcttttgccctgttaggtgacctcacaaaagcttgctttcagcatgttaagccttgtatagctgatttcatgccaatattgggaaccaacctaaatccagaattcatttcagtctgcaacaatgccacatgggcaattggagaaatctccattcaaatgggtatagagatgcagccttatattcctatgggtgttggcaccagcttgtagaaatcattaacagacccaacacaccaaagacgttgttagagaatacagcaataacaattggtcgtcttggttacgtttgtcctcaagaggtggcccccatgctacagcagtttataagaccctggtgcacctctctgagaaacataagagacaatgaggaaaaggattcagcattccgtggaatttgtaccatgatcagtgtgaatcccagtggcgtaatccaggatttaatatttttttggaatcccgtgcaatcttggattaacccaaaagatgatctcagagacatgttctgtaagatcctgcatggatttaaaaatcaagttggcgatgaaaattggaggcgtttctctgaccagtttcctcttcccttaaaagagcgtcttgcagctttttatggtgtttaatctaatacacttaagctgcagtcccaaaattaggggtccttcagtcttggagactataagggagcctctgcacccagggaaaatgttaccctttacaggggggaagggtaaaccagtagggaatacagtacaatcccaaccctactgggaggggcgggagggaggtgttgccgtcactgtattaagtcgatgttgggaaacgttttaacatctggagcctttgtgggtggaaatatgtctccagttacaactccgcagtggatgtgaagaagcaaaaaaaaaaaatctattcagtctactcacaaaacagtacattgtggaatattatggggaattgtaccaaaacaagaaccatataaatgatgcctagggacaagaaagaggaacaattctatagcgcacaataaaggaaacctaagaatggg

SEQ ID NO: 10281 - DNA, 866 bp, Homo sapiens
gtggcgctggccatgctggtcttggtggtttcgccgtggtctgcggcccggggagtgcttcgaaactactgggagcgactgctacggaagcttccgcagagccggccgggctttcccagtcctccgtggggaccagcattagcagtacagggcccagccatgtttacagagccagcaaatgataccagtggaagtaaagagaattccagccttttggacagtatcttttggatggcagctcccaaaaatagacgcaccattgaagttaaccggtgtaggagaagaaatccgcagaagcttattaaagttaagaacaacatagacgtttgtcctgaatgtggtcacctgaaacagaaacatgtcctttgtgcctactgctatgaaaaggtgtgcaaggagactgcagaaatcagacgacagatagggaagcaagaagggggcccttttaaggctcccaccatagagactgtggtgctgtacacaggagagacaccgtctgaacaagatcagggcaagaggatcattgaacgagacagaaagcgaccatcctggttcacccagaattgacaccaaagatgttaaaaggataacttcacagtaaatcatttctcctgaaatagaggaagattctttacgttgttgtgcttgtttttaaatcatcagtatagtttaacacattctttctaagcagttttgtgtgggataatttgaagaatatattatgagtaaactccgaaaattttgtttatccaaaggctcaatggattatgtttctattatatacaaggttttaagtaaacataaaatttccagaacaaaaataaaaaatttaaaattcatagcaaaaaaaaaaaaaaaagtcgacg

SEQ ID NO: 10282 - DNA, 752 bp, Homo sapiens
  misc_feature (1)...(752): n = a,t,c or g
gcgaaggcagttcttctgatctcagtatctcctcccaactcctctaaaaataggtagagtggcagagaattggggtgcctcttctatagcacaacccatgatgcatccagtcatgcctgaccccactatgcctttcccacaaattgggaggagttggggcagtgagcattttgctagctctgtctgtttcttgcttcttgtgccatttatagtccttggccatggagcaacaaaagtagaatggtgccagtgccttaactaaatttttctcaacctagattttcacctgagacaatatggtaatattattaaattactgtaaagatagcaaattttctgggatactttaaaatcaaagttgtatcaaagatcaagaagcacccataaaagctttataaactttcacaaaaaataagtgaaaattctttgtttttatggccgtgtaaaatgtcatttttataatggaaatgtcttaattttcaaacttaacatatactttaagcaattttagtatttaaacctttgcaaaattgtatttttgaatgtgaagttcaactttggcagtaggttgttgcaatagtgatctggcactatggtgccagtatagccacatagggttatttaaattnnnnnnnnnnnnnnnnnnnnnnnnnnnnnnnnnnnnnnnnnnnnnnnnnnnnnnnnnnnnnnnnnnnnnnnnnnnnnnnnnnnnnnnnnnagtgcagatatagaaagaacatttccatcatcac

SEQ ID NO: 10283 - DNA, 426 bp, Homo sapiens
aacacccactgagggttttctctgaacatccgccccccgccctcaaattaaggacaagttcctggtctctacaacatttccttttcttgggatacatggaggtgttgagggaaagctgagagaatgaaggctctaaatccccagtggaagcatgatatggcgaagcagagctggtgctgaattgttctctctgatggctctatgggagtggatagcactgagtcttcattgctgggttttagcggttgctgctgtttcggatcagcatgccacaagccccttcgactggctcctctctgataagggacccttccatcgctcacaggaatacacagattttgtggacagaagccggcagggatttagcacaagatacaagatatacaggtggagtctctccctgttgccaggcgggaatgcaatggc

SEQ ID NO: 10284 - DNA, 1755 bp, Homo sapiens
  misc_feature (1)...(1755): n = a,t,c or g
ggtcgacaaagctatggaacttgatgggggccagtgaatgtactatttttaagtaatgtggtattgtaccacaaagtagatctaaataagctttatgctgtatttgaactaattggggcatgttattgggaggaggttggggggatttttggttatgttaaatgtttgatgtttaaattgttgcatgttgaattcaaactttttaacaagtccttgatgtttcaatttgaaagtgaccaatggggctgaggctgtgtccactgaggctaagatgactgcctttcctgattggccttggcttttccatacattgtgtgacccttgccctatgaccctttggctgaccttaccggaagccatgacgacagcagccttttgccattagacgcagggtgatggtgaggattccaagggttagacaaaactggttaatctgaactaggtgactgttaccttgcgtgttttgtggccaaaccaccaccaaaaacctcacactgtgatgtggtggaggtggatacagcagtcggagaacatctggcagagacaaatacggaccacctgttcgtacagaatacaggcttattgtagaaaatctttctagtcggtgcagttggcaagatttaaaggattttatgcgacaagcaggtgaagtaacctatgcggatgcccacaaggaacgaacaaatgagggtgtaattgagtttcgctcctactctgacatgaagcgtgctttggacaaactggatggcacagaaataaatggcagaaatattaggcttattgaagataagccacgcacaagccataggcgatcttactctggaagcagatccaggtctcgatctagaagacggtcacgaagtaggagtcgcaggagcagccgcagtagatctcgaagtatctcaaaaagtcgctcccgttccaggtcgcggagcaaaggtcgatcacgttctcgatcaaaaggcaggaaatctagatcaaagagcaaatctaagcccaagtctgatcggggctcccattcacattctcgaagcagatctaaggatgagtatgagaaatctcgaagcaggtctcggtcccgatcccccaaagaaaatggaaagggtgatataaagtcaaaatccagatcaaggagccagtcccgttccaattcgccgctacctgttccaccctcaaaggcccgttctgtgtcccctccaccaaaaagagctacttcaagatcccgttctagatctcgctcaaagtcaagatcaaggtccaggtcgagttccagagattaactcagaactccttgtttgcacattattatggaacactttcctacttaggcagttactcttccatgtttatacttggcctcttctgcaagaggaatctcttgaaaacaggggcacacagaaatttgatttgtggccaaattggatgaaaaagatgaggctctaaggaaatggtggcatgaagaccctctcccttctttgtagaattaagataactttgattttatagcttttgagctaacgtaacttttgtaaagattaagctcatttagnnnnnnnnnnnnnnnnnnnnnnnnnnnnnnnnnnncagcaggatctgctggcagggtttttttgttttatttgtttgcttatttttaaattaactgttttgagctttgaatacttaaggctttagagggagaacccaattttcaattatgttggctttttataaagcttgagttatgtaagatttaaataaaagtttgctaccaaa

SEQ ID NO: 10285 - DNA, 1634 bp, Homo sapiens
  misc_feature (1)...(1634): n = a,t,c or g
ttttccctcagtaagtattttattgagatttaaagcacaaaataggtgaacaaatcgggaggaaggtggttaccncaggaatgggaacgtaaaagtcaaagtaggcaggactcaaactggccataaaggcactacggcatgttcataaacaccatcaagtaaaagaaaggggaatcaagatgttctcacttcttttctgctccaccttaatactccatctagccactggtatggagcatgtcatcaactcattcttctcacaagctaggnaagggaattaaacattttatcagtcaaccctatgctcaccaagtgagcccaatgtttacacagtgattttgtgcatccagtgactggagaactacaggcaaggataggccctgactgttaataaattggtcgtggctattactagaaaattatgggtgcagggcatttacctatacaatgacctgcttactgtggcagctaaccaatatagtcaaaccagtctattaccatatgatgtcctattaacaagagagcccagttgaaggatgtttcatacttttagaaagcctaatttcttactgtaatatcctcccatccctcttttaaaaaggctgtagttcaaaaagcttttatgttctttccctgaaaacaagagaactttggtcaaagccaatttttaagagtcatcacttctgctgagtaggcaaaacaatgaactataacaacagacatcattttctttccttaaattctgaggtttatgctggaaaaataaacccatttctttataaacatctaattaaataaagtatcaaagaaaataagataatggaagaagcatccgccttttggggcactatattcctaaggttgggctttaagattttttaacaggaaacccaggagtttctgaaaaacaaggcctttttcacattaccaagaactcacagctactctgtgaatgccctagatatttgactcaaatttttcactcaatcttattaggtatatttctggattatttgaatctacaaaccaaccctagaatatcatgctttccagtcacacctgtggcacaatgagcagtgtacgaccatgccccatcacaatccaacccttggtaccctacattgtgacacctcctagaaaggtattaaagctgagccaattaatctatattttgatttcagactaagattaataaatgcttttaaataaagtaacttttaaggtatctgaacaaagggatgtaaggttaattcacttctcaaactgcaatttcaactcatcaggcttatggatgtatggactaattgctaacctagtaactcctacaaatttgcagtattcaaatttgggtttccacagtactcattacactttactcgtaataaagtacaaaagttttgcgtttacccatttcactgtttttcaaaccaattacacaaagcattaaaatttacaagtatgatctaaccaattatcaaataatcccactaactacaaaggggactgactactgggtggaacttaactggcaactgactttactgagattaagtgcctgttaaacataatgatctttcagcagaaaatgcagtatgtgcttttacactttgaataaactcaatttcagaacaaaa

SEQ ID NO: 10286 - DNA, 146 bp, Homo sapiens
ggcaaaaccaagatattcttcgagaaaaggtcaatgaggaaatgtatatagaaaagttatttgatcaatggtacagcagttccatgaaagtcatttgcgtgtggttgactgatagattagacctccaactccgtatttaccagctg

SEQ ID NO: 10287 - DNA, 341 bp, Homo sapiens
  misc_feature (1)...(341): n = a,t,c or g
gctatgtgccttgtactaagctgctagtttgtggccacccctgcattggtctctgtggggagccatgccccaagaaatgccggatctgccacatggatgaggtcacccaaatattctttggctttgaggatgaacctgatgcccgctttgtgcagctggaagactgcagccacatctttgaggtgcaagccctagaccgctacatgantgaacagaaggatgatgaagtcgccatcagattgaaagtctgccctatctgccaggtgcccatccgcaaaaacctgaggtatggaactagcataaaacagcggctagaagagattgaaatcatcaagggaaag

SEQ ID NO: 10288 - DNA, 366 bp, Homo sapiens
  misc_feature (1)...(366): n = a,t,c or g
agcaggagcagtggtgctgtcagcgcggccgtcggagnatgcggagacccggggtcggaaataatagaatctgtccctccagctggccctgaggcatctgagtcaacaacggatgaaaatgaagacgacattcagtttgtcagtgaaggaccatcgagacctgttcttgaatacatcgatctggtctgtggtgatgatgaaaaccctagcgcctattatagtgatattctgtttcctaaaatgccaaaacgacagggtgattttttgcattttttaaatgtgaagaaggtgaaaacagacacagaaaataatgaagtgagcaaaaatcactgcagattgtctaaggaaaaggaaccacatttcgag

SEQ ID NO: 10289 - DNA, 526 bp, Homo sapiens
taaatacaacagaacattaataaatatctcttgtgtagcaccttttactgtagattagtgcttaatttcttggcttgcatttgttgattgctaaggcaattttttctaatcttagggaatcattcagtagatgcgattaaaaaactaatgttgggtcaatttttttcttcattttcagcacaagaagtcctcttatatcctactaaatacattcctaaaaatgtatttgaacattggttctgtaaaagataatggactaaaaaagtagagaggagttgtagagatcttaaatcattctggaattcctaattatgcttcaatttttagacataattttagataatttatttccagtgttttctgcatgttctcatttgttctttttctcagttgaatgcaccaactggtttgagtcctgtgagcattcagtcagttgaaattaaagattcctcatttctcctgatttctattcttgtctcaatcttaaatttagagaccagttgtttttatgatatcagccatttga

SEQ ID NO: 10290 - DNA, 581 bp, Homo sapiens
atcatcattcatttatccttttatttagtggcttagatcctagaagatagattccctataaaatcattttagccacgaaatattcataagaaaccaacttcaaatgttaatgaggatactgaagttttttttaacctaaaaaaagtggcaattttaggtaaccataaagctgaggcaaaggcagtttgggttcttggaaagaatcctgcctaccatcttcagtggcctctgggcacaaagcacttatgatcactgcagaggtggagcaaggtaaaggactgtgtcagcagttcatgttgtgacagcagcagcatctgcagaaaacgcaggtcatataccttggcttacacaaggaatgctatgaaaaatgagccaccaggtgggagctttaacataggtaatgattagtgaaagcttcttagaaagtgagaatttgtaatttctttattaaacattacattcagtgtaaaggctttaaccatcataatcaccatgatataatatgtgagtatgtatatgtaaaaaaatacccattgaacataaaattatgttttgaaatctatgcaacatgaaatatagtt

SEQ ID NO: 10291 - DNA, 711 bp, Homo sapiens
tgttttttttttttttctgtagaattttattttgaaaatatttcacttcaagattgatctaaaaaacattttaagatatgaaaatgttatacaacttatctattacaaattaatcagataattctgcaattaggtacactgtgttagctcgcctacataaaaaatattgcacattttattttgtctccagatgtgatcgatgtctaaactatatagaatttcaaactattttaaagttattctgtgaaatgtcatctttataaatatcagaactaaatgcactgtaaacagccattttggtaaacatgcatttattcacagttgatttatttcctttagataaatgtgtaactgctcaaaattatataataatctatgtagaggtacaagagcacactatacaaatctatttctatcttcatgttgaggaaacactgatcttggcaaaaatctggcatgatttttaaaatgaactattgctggtaagaaggcatactttaaaacttttctgtggcctgcacctgttttctttttaaattaaaatgtaaaagcatttgttttcagagattcatttatcactgagtaagtgattacataaaaaaatggaccctaaagcaactgagttaaaatgctttgagagccccattctacttgtaagttatcaatgccttaaactgttagaccactcactaatcataattttaagaaacg

SEQ ID NO: 10292 - DNA, 753 bp, Homo sapiens
  misc_feature (1)...(753): n = a,t,c or g
ttttttttttggacgctatttttattttaacatctcatattgccccaggttctctgagtcaacaccctcaaaggggacagacagaaacagaaaggaacttttgggctgattataaggattcagctggccttgggaaaagtctaaacatctttgaaacacaattggaaagtaatccaaacagcctgtgagctcaggcttcccagttagaactgcctgtcccaagttaatcttgcttagttttttggggggcatcatacctaaagaagaagaagaagaaaaaaggcaagaataagtaaaaggaaaaaaaagaaaaagaaaggcaggcaagaatttttgtccctgtcgggagaagagtctggtctgtggacaccagacacctaagcaagtttcttggaagggaggctttggcaaccctcgcaattcgcattcacaggagacatgccctattttccacaacaggcagcctcgccaccagccccaggagggaggaagctctcttctcagtgtctgcaggtttatccctaaatgctacggaagcagcagctgcccaggggaaggggatactgctcagtcttttaaaactctcgtgtaagcttgatattacagtcatgacctaaaaaggcaaagaccagatatgcggagctcgctgcggatgtagcctgcacacggccgcaggatttgtcaccactcatccatgtttaaaaaagccagtccaggcaagancagccancagttcccgtcccacaagtgatc

SEQ ID NO: 10293 - DNA, 343 bp, Homo sapiens
aagaaatctctctcctctattctgctgaaaagggttggtaaacctgacatcctttcttttattggaagacaaatccaacatttgttagacatccaacatttgttggaagtctaccttacaagaaaccacctcttatctgcaacataaacagaagctacatcaggttgaaaatccacatagaagactggagaaaattgccgtcccctttcgcactaggttttaccaggggcccaagatgtcagaggaaagtccgcggagggccaaacacaggtttacctaattatgaatctcagattagaatgtcttattgtgtggaaaagtcagaactcaggaaatgtgtctg

SEQ ID NO: 10294 - DNA, 392 bp, Homo sapiens
ggcttccccaataagcacagccgcttcaacgtctactgcttccgagactcggcccagccttctgccatccctgaggcctccaacccagcctccaacccagcctctgatggactagaggctatcgtcacagtgacagagaccctggaggaactgcagctgcctcaggaagccacagagagtgaatcccgtggggccatctactccatccccatcatggaggacggaggaggtggaagctccactccagaagacccagcagaggcccctaggacgctcctagaatttgaaacacaatccatggtaccgcccacggggttctcagaagaggaaggtaaggcattggaggaagaagagaaatatgaagatgaagaagaagaaagaggaggaagaag

SEQ ID NO: 10295 - DNA, 373 bp, Homo sapiens
aacacattgatggggatgcagcctttacacacttttaaaaccttcagtggaggacaaaacagtacaaatttaccccacggacattccaccactagagtatagcttttccctatttcccctcctatccctctgcccctactgctcagcaatgtaaaagagacaaataaggagaaagaaaatctccaaaccaggaatgtttttgtgccactgactttagataaaaatgcaaaagggcagtcatcctgtcccagcagacccttctcattggcattttccagtattgtgagatcaatttctgaccatatgaaatgtgaaaagtatatgtttctgttacaatactgctttaagatctaaaccatgccaacagatgttt

SEQ ID NO: 10296 - DNA, 161 bp, Homo sapiens
gtatgtttctgaaatgatgatggggtggggttaaaatctaaagggaaaaacttgaaactacctattttcattggttattcagcagtgcctaaaatgagcttttgaagtaatgtatatgcactttcaatgtcatgtgtatagtgccatctgatatcttgggt

SEQ ID NO: 10297 - DNA, 1605 bp, Homo sapiens
tcaacttatatataatatatataaggtacataatatgcaattatatatcttgatatatattatatataaaataatatacctaagtgtttttttaaactatgggagtgtattataaaatcaataataatatgcaaacagttgtgcctgtgtatttgaactacatacaggtatgttgttattaacagatatatttaacatttatttactatgggagccatttcctaattgaattgcgtaattactagaccagaatgcatatgctactatacattgatttactgcctgtttttacactgccattacctttcatgttatccatgatgttgaacatgggaggcatttttaatggaccaaatttttagaaaaattagtttttggatttttttttaagttctgtatactgttttgaatgaactttatttgcagctattctggatgtcagtttaataattcaggtactgaattttattgcttgctaattgtgcctttccgttgctaaattaagaaatgctatgtgtactgtgatgtaaaaataagacattaactttatcttaagttacatataatcaagcaaatattttaaaaaatgtatgtcagggtgacaggcataaaagtaaattacccttaactctttagcctttatttagaaagaaatgtgggaatgggctaaactttctcaccaatttattagaaagctaaatgggtaaatacttccctttttgtagatatttttctgtgcattgtaagttataggagcaggacatattttttgtacattgtcttgattgtttatactgcaggtaggtatttccagtgaatggaaacgttgaaatttatagatgggacaatgcacatacttcatatgtaaacaaagcatttttctaaataatttgggaaaggattggatttagcaccgttaacttttaatacccatttattgggctatttaaggtaaattataaaacctaaaattagtatcagtattttagatcctattattttttcaactttctattattttcacagtggaaaatttgcgtatagtattaaactattcttttttctgtctacctttatattttgaagtgtggttgtacttacgttaatagtaagtgtatttgtagaaagtttttcataaagaagagattaactttccatataaataaataccaggtatgaaattactgattttagtgcaatatctgtatgattatccagaactatcacttcagatgtttctattttgggcacccttaactatttgagctcatatttttataattctgattgagaatttaggggcatggtaatttttaccaaaactgaagctggtaattttaagtaaaggcaactaaatttaccctttacttattaggttaaaaggaaaccaaggcatgtaggaaaatattggtacgttggaaaatgtgaaaagagctttactttcaaaatgtatgtttaatgaattgaattttagggaccgtttcccataatttgggcctatgctatcctgttgatttttatgtctagcttaaaaggtatttgaaaatgttccatttgtgttttattattttctgtcctatgacagttctatgctaaatgtatttt

SEQ ID NO: 10298 - DNA, 542 bp, Homo sapiens
gaacatgcagcagaaaagctgtgaaggaaggaaatttacgtgattgtaatggaggctaggggtggattgggaggtgagtggaggagagtctctgaccagctgcagagccaacccctatcattttattaacatggaacccacacagataggggagggattaagctaagaacttacagaatgcaaacacgagcacactctcttcgaacccaattgtgggtgtagcaatgaaagcaatatgatatgctgcagtgtgaagctccttctggggttatcgtatgtacaaagtttaccttataatggctcaaattgtatttaatttttttgttttgtttataaatgaagaaaagctataagtataatgtaattattttataggtatactattaaattatagaacaaataaagataatctaggattatatgtgatcccggtgtgacgtgccataaaagtggaatttttgacttgttgcagtgagctgtgaagcagcactatgcgttcagagagtttttgttcaaccatggtgagttcaacctctagctta

SEQ ID NO: 10299 - DNA, 144 bp, Homo sapiens
ttgctttttaatacatttggagctttgggagtattaaagtatttacaccaagcttgtccaacccgtggcatgtgtcccaggacagctttgaatgtggcccaatacaaattttaaactttattaaaacatgagttttggtttttt

SEQ ID NO: 10300 - DNA, 605 bp, Homo sapiens
agaagctgggggtggagccggaggaggaaggcggcggcgacgacgaggaagacgccgaggcctgggccatggaactggcggacgtgggggcggcagccagctcgcagggagttcatgatcaagtgttgcccacaccaaatgcttcatccagagtcatagtacatgtggatctggattgcttttatgcacaagtagaaatgatctcaaatccagagctaaaagacaaacctttaggggttcaacagaaatatttggtggttacctgcaactatgaagctaggaaacttggagttaagaaacttatgaatgtcagagatgcaaaagaaaagtgtccacagttggtattagttaatggagaagacctgacccgctacagagaaatgtcttataaggttacagaattactggaagaatttagtccagttgttgagagacttggatttgatgaaaattttgtggatctaacagaaatggttgagaggagactacagcagctgcaaagtgatgaactttctgcggtgactgtgtcgggtcatgtatacaataatcagtctataaacctgcttgacgtcttgcacatcagactacttgttggctctcagatt

SEQ ID NO: 10301 - DNA, 340 bp, Homo sapiens
gatttcctttgcccctgaaagatcaggaagacttggccacgctggaccttcattctgcccagcagcacttgccttgggctgaactgttgctgccacctcctggccagcttcacttctttcctgcactagtgtctgatttggatcctgatctagattggtatggagcaccctctaatacatgtgcacaagagattatataaggtgtcatggatgcacaacaaaggtggtgacactattccctacaatctgcaaccttccacctggaatgtattgtccatgtgggcatccaaggcgaccttttaagtcctacaggatagggaagatttttcatgtgacaccc

SEQ ID NO: 10302 - DNA, 505 bp, Homo sapiens
gaactggaagatggagttggggagttgcctggagggcgggagggaggcggcggaggaagagggcgagcctgaggtgaaaaagcggcgacttctgtgtgtggagtttgcctcggtcgcaagctgcgatgccgcagtggctcagtgcttcctggccgagaacgactgggagatggaaagggctctgaactcctacttcgagcctccggtggaggagagcgccttggaacgccgacctgaaaccatctctgagcccaagacctatgttgacctaaccaatgaagaaacaactgattccaccacttctaaaatcagcccatctgaagatactcagcaagaaaatggcagcatgttctctctcattacctggaatattgatggattagatctaaacaatctgtcagagagggctcgaggggtgtgttcctacttagctttgtacagcccagatgtgatatttctacaggaagttattcccccatattatagctacctaaagaagagatca

SEQ ID NO: 10303 - DNA, 1526 bp, Homo sapiens
ccaatggcggcctcgacggcctcgcaccggcccatcaaggggatcttgaagaacaagacctctacgacttcctctatggtggcgtcggccgaacagccccgcgggcattgtcgacgaggagctgagccaaaaaatcccagaagtggggatgaaatgaacatcttggcgacgtatcatccagcagacaaagactatggtttaatgaaaatagatgaaccaagcactccttaccatagtatgatgggggatgatgaagatgcctgtagttgacaaccgaggccactgaaggccatggcgccagacatcttagccaggaaattaggttgcagctgaaggcttggagcccaaagtatcggattcaggaacaagaaagcagtggagaggaggatagtgacctctcacctgaagaacgagaaaaaaagcgacaatttgaaatgaaaaggaagcttcactacaatgaaggactcaatatcaaactagccagacaattaatttcaaaagacctacatgatgatgatgaagatgaagaaatgttagagactgcagatggagaaagcatgaatacggaagaatcaaatcaaggatctactccaagtgaccaacagcaaaacaaattacgaagttcatagacgagatttgttcaacactgcaattgtttgttagatgtaaaccctgtgactatagtacgttgcttcttgttcttcacaattcatgacttaagtaccaaaatgcataccagttattatatattgccaagaattaaatgataaacttagagactgattagactgaaaatgcctaatcggatatatatattcttgtgcctagtactttaccacaaatacagtgtaatatcatcagtccaaaactgcattactttcataagaacactggttaatttgtataagatattatagagctttttatgctttagaagttaagcaatatctttgggggggaactaatttattttcatcacttgaaatgtggtagctcttacaaagtttattgatttgatttttttaaaaatcaaaagccaattgaacaacaggatatatagactgataaatatttaggctgaatagtattttaacacttgtcttcaacttgatttgtctgtttaattgaaaagaattataagagttactgttgcattttctgacctactatttttaaaattcctgttgagtttctttgtgtttacaaggaaaggactgaactttttctcatcaaaactagcttttttccccacaaataaattatcaggttaaactttcaccaatgtctgctctgttttttgtttttggggggtttttgtttgtttttgtttttttaatgtttttggtacactgggcagacttcagagcagttttttaaaaaaataaatattctaatgtagctatctcgccattccctttaaatacctgtcttaacctcctgcttttctttcctactcctttccacacatacgcacacaatcttctaccttttaaaggatcattaagactgtcaccacattaggagct

SEQ ID NO: 10304 - DNA, 323 bp, Homo sapiens
ttgaaatggcttcgatgttagccgggacccgactcagatcgatgctatagaagacaaacaagggaaggttttttttccttttgcatcatggctcaatttggaggacagaagaatccgccatgggctactcagtttacagccactgcagtatcacagccagctgcactgggtgttcaacagccatcactccttggagcatctcctaccatttatacacagcaaactgcattggcagcagcaggccttaccacacaaactccagcaaactatcagttaacacaaactgcttgcattgcagaaccaagccgcagctgcagcaagct

SEQ ID NO: 10305 - DNA, 4131 bp, Homo sapiens
cgcgcggcccctgtcctccggcccgagatgaatcctgcggcagaagccgagttcaacatcctcctggccaccgactcctacaaggttactcactataaacaatatccacccaacacaagcaaagtttattcctactttgaatgccgtgaaaagaagacagaaaactccaaattaaggaaggtgaaatatgaggaaacagtattttatgggttgcagtacattcttaataagtacttaaaaggtaaagtagtaaccaaagagaaaatccaggaagccaaagatgtctacaaagaacatttccaagatgatgtctttaatgaaaagggatggaactacattcttgagaagtatgatgggcatcttccaatagaaataaaagctgttcctgagggctttgtcattcccagaggaaatgttctcttcacggtggaaaacacagatccagagtgttactggcttacaaattggattgagactattcttgttcagtcctggtatccaatcacagtggccacaaattctagagagcagaagaaaatattggccaaatatttgttagaaacttctggtaacttagatggtctggaatacaagttacatgattttggctacagaggagtctcttcccaagagactgctggcataggagcatctgctcacttggttaacttcaaaggaacagatacagtagcaggacttgctctaattaaaaaatattatggaacgaaagatcctgttccaggctattctgttccagcagcagaacacagtaccataacagcttgggggaaagaccatgaaaaagatgcttttgaacatattgtaacacagttttcatcagtgcctgtatctgtggtcagcgatagctatgacatttataatgcgtgtgagaaaatatggggtgaagatctaagacatttaatagtatcgagaagtacacaggcaccactaataatcagacctgattctggaaaccctcttgacactgtgttaaaggttttggagattttaggtaagaagtttcctgttactgagaactcaaagggttacaagttgctgccaccttatcttagagttattcaaggggatggagtagatattaataccttacaagagattgtagaaggcatgaaacaaaaaatgtggagtattgaaaatattgccttcggttctggtggaggtttgctacagaagttgacaagagatctcttgaattgttccttcaagtgtagctatgttgtaactaatggccttgggattaacgtcttcaaggacccagttgctgatcccaacaaaaggtccaaaaagggccgattatctttacataggacgccagcagggaattttgttacactggaggaaggaaaaggagaccttgaggaatatggtcaggatcttctccatactgtcttcaagaatggcaaggtgacaaaaagctattcatttgatgaaataagaaaaaatgcacagctgaatattgaactggaagcagcacatcattaggctttatgactgggtgtgtgttgtgtgtatgtaatacataatgtttattgtacagatgtgtggggtttgtgttttatgatacattacagccaaattatttgttggtttatggacatactgccctttcattttttttcttttccagtgtttaggtgatctcaaattaggaaatgcatttaaccatgtaaaagatgagtgctaaagtaagctttttagggccctttgccaataggtagtcattcaatctggtattgatcttttcacaaataacagaactgagaaacttttatatataactgatgatcacataaaacagatttgcataaaattaccatgattgctttatgtttatatttaacttgtatttttgtacaaacaagattgtgtaagatatatttgaagtttcagtgatttaacagtctttccaacttttcatgatttttatgagcacagactttcaagaaaatacttgaaaataaattacattgccttttgtccattaatcagcaaataaaacatggccttaacaaagttgtttgtgttattgtacaatttgaaaattatgtcgggacataccctatagaattactaaccttactgccccttgtagaatatgtattaatcattctacattaaagaaaataatggttcttactggaatgtctaggcactgtacagttattatatatcttggttgttgtattgtaccagtgaaatgccaaatttgaaaggcctgtactgcaattttatatgtcagagattgcctgtggctctaatatgcacctcaagattttaaggagataatgtttttagagagaatttctgcttccactatagaatatatacataaatgtaaaatacttacaaaagtggaagtagtgtattttaaagtaattacacttctgaatttatttttcatattctatagttggtatgacttaaatgaattactggagtgggtagtgagtgtacttaaatgtttcaattctgttatattttttattaagtttttaaaaaattaaattggatattaaattgtatggacatcatttattaattttaaactgaatgccctcaataaggtaatactgaagcacattcttaaatgaagataaattatctccaatgaaaagcatgacatgtgtttcaataggaggaatcttaagttgggctaaattcaaagtgcttgacatcaaaatgttctagagtgattagctactagattctgaatcagacatcacatctgactagagaccagtttctttcgaatgattcttttatgtatgtagatctgttcttctgaggcagcggttggccaactatagcccaaaggccaaatttggacttctttttataaatgcagattgtctatggctgctttcccactactccagcctaaggtaaacagctgcaatagaagccaaatgagaatcgcaaagcccaaaatgtttattaacctgccctttacacaaaatcacacaaaaagtttcctgatctctgttctaagaaaaggagtgtgccttgcatttaaaaggaaatgttggtttctagggaagggaggaggctaaataattgatacggaattttcctcttttgtcttcttttttctcacttaagaatccgatactggaagactgatttagaaaagtttttaacatgacattaaatgtgaaattttaaaaattgaaaagccataaatcatctgttttaaatagttacatgagaaaatgatcactagaataacctaattagaagtgttatcttcattaaatgttttttgtaagtggtattagaaagaatatgtttttcagatggttctttaaacatgtagtgagaacaataagcattattcacttttagtaagtcttctgtaatccatgatataaaataattttaaaatgattttttaatgtatttgagtaaagatgagtagtattaagaaaaacacacatttcttcacaaaatgtgctaaggggcgtgtaaagaatcaaaagaaactattaccaataatagttttgataatcacccataattttgtgtttaaacattgaaattatagtacagacagtattctctgtgttctgtgaatttcagcagcttcagaatagagtttaatttagaaatttgcagtgaaaaaagctatctctttgttcacaaccataaatcaggagatggagattaattctattggctcttagtcacttggaactgattaattctgactttctgtcactaagcacttggtatttggccatctccattctgagcaccaaacggttaacacgaatgtccactagaactctgctgtgtgtcacccttaaatcagtctaaatcttccagacaaaagcaaatggcatttatggatttaagtcattagattttcaactgacattaattaatccctcttgattgattatatcatcaagtatttatatcttaaataggaggtaggatttctgtgttaagactcttatttgtaccctataattaaagtaaaatgttttttatgagtatcccttgttttcccttcttaaattgttatcaaacaatttttataatgaaatctatcttggaaaatttagaaagacaaatggcaaggtatttattgttctgtttgccataatttag

SEQ ID NO: 10306 - DNA, 3538 bp, Homo sapiens
ttttttgtcataggagtgtggtttttttaataccatctgtgccaagcaatatcaaagttgtccatactctccaagtttgtcctatttttaatagacaatattaaaaattttttaagtgtgtgctgataaagagactagtcacacctctgaggggatttaaaaatgagaagccacataaattctcttccttaaaaaacagccatttcaaaagattttctttaatatcataaaatattttcatggacaagtgagctagcaaacacacatgcaccaatgtgccttttgacaagagtaccccctaccccgactcccacaccaaaatggacatgagattggagaaatgaatacagcagatggaacagatagaagaaaaaaaaatcagtaaaaaggatggaatataactttgtgcttggttattttcctatgtcgcaacaaaacaagacatttcggtgcaaatagttaatctttcctctttttttccatttgtctggtggagaaaaaatactttttctataataaaatatgtagttttttggtttttaacgtaacttttttttcttttttgcagaaaataattttgtaaactgtcacttcgcgggcagggaggatcgatgccacgtgggccccagctcacccgggtggaggctgggagctgaaaccgaacccaggcaggagatgggcgacggcggaggtgcaaggcagggcacggcgcacaagacgagggcggccgggcggggtggattagaggtcactctcgccgtacagcgccgtggagaaggacatgtagtccagagcacctggcacggagtcggggccggtgtagggggccatccgcgcgatgcagtactcagcctggtcgggtggcagctcgcggcgcagctcgtccattggtaatgtagttcttggtccccagccaggatcttgaaggaagccatgacttggtctgctgtatctgtgtcggctgtcctcgcgggacatgaagtcaatgaaggcctggaatgtcactacccccaggcggttggggtccacaatgctcatgatgcgggcaaattctgctttctccctgggggtcgttgccaatatcataacccaagcttgatgaggcaggctttgaactcctcggggacccagtgtgccggagtgatcccggtcaaagtggttgaaggaggcccggaactcattcatctgctcctggctgatgcccttggcatcccgggtcaggatctggttctctacctcattgatggtcctggcgatggtggtgagcagctgctcccagccccacacggatgtgctccatggtgtagttggtgtgcttgttgtcgaagatgagcgcctcctggatgagctggtggtcgccctccagctgatcaatctttggcttgtagttgacgatgctcttctcatcctgccgcaggtggctgagctggtcctccagggtcccatgcatctcaatggagaacctcgcgatctcctccatcttggtctggatccagggcccgatgacattggcctgggctccaaactgcttgcgtacgctctcattgtgctgctgtcgggcatgctcctccgtcagagcttggtccctccgaggcaccagctgccgcacgtggtcccatttgccattgatctcctgaggcgtgatggttgtgtaggggttggtgcccgccatattgacgtggtaggtctggacaatcttggacacctcattgtggatgcccaggatggccaggcgctccttgtcggcatcagggagggtggccttgaactgctcatgggctgtggtcagtccctggatctcctcaatggtgtgcacaatgaaggtgtcctgcaggtcctccatggccccctccatccagttgttgaagggtgcagcccgcttggcatactccaagtacagctggtcaatggtctccagcagtttctcggtccgctccagagcttcccttcgcttctgagttagggcccccagattgtcccactggtcacagatctttaggcaccgggcgttgacactgggtgagtcataatagtccagctcattgagctcctgtgcgatggcggcaatctgctccacacggtcctggtgggcagccaggtcactctcgaaggcctcatgcttcttgagcagggccttgatctccgagagggtggcggtctcatagtccttctgtcgcagcatggcctctttgccgtcagtccaggcctcgtggatggaggccttctgccggaacttctctgccaggtggtccagtcgctccagcctccggatctcattcagcaaccactcctcatagcccttctccacctgctccaggcagccccaggcattgttgatgtccgagaccatcctgccctcagagggcatgaaggcaggccggttgctgagccgcagcttggtctgcagcgtgttgaagttgatctccagctggcacttctcctgcaccttgggcggcttgtgcaggcgccggtagtccaggaagtcctccagcttctgttgcatggcatgcatggtgttctcgggcacccggttctccagccacgggattgtgcggcggatccactccaacagatcactggccagcttctcgtagtcttccataagctgctcgttctcctggttgacggccaacaccttgcagatgcgattggctgctgtctccgccttctgggctccagagaaggcgtggtagaagctagacacgtaagtcatgatggctttctcatccggtcgggcagttccaacgatgtcttcggcatccagcatcttggggatgtccaggtacttctctgccacgtcaaaagccgtattcagatttgtgagtggatcatccttccgcagcttcccgtagtcaatcagctcgggccggtgtcggtggatcaaagcacagaagccgaggccatccttccagcttatgtggaagttctggatgttgacatttttgtaaggggctgtctttctctgacaccacaggagcagcccttccttggctgaagtctcttccacggagatgtcctggatggcaaagcgcaggatgatggtccagatcatgcccagggtcatcttcacattcccatccacgatttcttcggctccgatggacaccagtttgacgcctttgctggctatgaaatccagggccttgttgacgttggagatcttgtgcactctcatcttgcctcgctctggcttggccaagcgttcacctgagatgacctccagcagcagcatgagcttcaggccatcccggaagtcctcttcgatgttctcgatctgtgtccccgccttccggaggtgggagttacaccatgccgtgaatgtctttctctgctgcttctcccaggccgggtccaggagcaggtcccggtcccagtcctcttctggctgcatgtaatcgttggtttgctgagaatcataatggtccatgatggtgcgcgcgtgctagggtctggatttcttcctccaccttctctctgagcaacggctgctgccctggcgtggggagggagtagggttgggctgggctgggctggcggg

SEQ ID NO: 10307 - DNA, 305 bp, Homo sapiens
tttttttttttttatgtgtttgtgtatctctttttatttcttccttagaaataaaaagtgtcaagggaatgaatcggaggcatactttaggaagttaatgttagaagggaagccaagatttttttgtccaactgtctcattgtagataggaaaatagagactcagggagggaaaggggctggcctaaggtcagaaacaagtgcatggcagatgcagatttgaacccaggcatccaaattcctggtccagtactctagcgcggcctggatggagatgggtggtgaaatggatgggaagatttgtca

SEQ ID NO: 10308 - DNA, 362 bp, Homo sapiens
tcagcacatctggaaattctgaatacttgttgactgaatttctgatttacagatttgatatgtagagatggtggacatcaccacacgtatagaaaggaaaacaatttttgttaagttatacatcttcatcactattatacttcaaagtagtgaccttgggaaccttattccaaaaatggaaaacatctttggagcctgtgtaaaagccacacaaaagtcagttctatcattttggttaatcttaagtattttaccccattacatattatttacctcaagtacctacttatttttcaagacatagagttaagttactgtattacagttcttgtctacaagcattagaaacattagtaactgac

SEQ ID NO: 10309 - DNA, 347 bp, Homo sapiens
tctaactcctgtggaaattttgccaaaagtttcaatacatagaagattataaatcttaaactaacactgcacagagaaagacaaagctacttctttttttaaatacaaatatcgtctacattctatcatttcaaacccctgagtaatactgtaccaaagtacagatctgaagagaaactgagggttcaggcctcaaacgttaatcttcaattgattccacaccaatggcatgagtctcatgtaacacattcaggctagttaatcctgacagtcagtttccccctaacatagtaatagaaaaaaataatgcaaactccatattcactctccaaagtatatcctcctca

SEQ ID NO: 10310 - DNA, 385 bp, Homo sapiens
cctatactcctgcccaccccctgcaggatggatattaccatttgaaatactttggcgcttgcagtgagatcttgccttaaaagaagaaacccaccaaattctagaatcgcagaggtgggggcacctatgtgacaaatgagggaacagaggcacagagattggcagggacatgctcaaagacatggagagcctgggcagaggatggccccagagtgggtggtgcctggccctgcttcagcctgacattgtccaagcctcccccagcccactcctaaaatggccaggccccacttcttcccaggtgggctacattttctgctgtcccggttcccacttccttaccttttctccttaaatctgatttcactgtgagggtgggaggttg

SEQ ID NO: 10311 - DNA, 394 bp, Homo sapiens
gaggggctgcaagtgggcctgctcccccttaccttttccttcccccccagtgggcatgaaatttaaaaaccttatgaaaagcaaaaatgccccatcctagcttgtcaaagtcgagagtgaccttcaagtatgaagaaagcccaaagtgcccccctctaaacaagtggcacttgccccgtgaaagacacatgcttctcagcctcagagctgggctgtggtgagacagcgctgtctgttaatgtgaacttctatgatgtgacatgtgtaactgcacataactgcgtatgataagacacatagggcccaaagggagaaccacagcacagccccagagcgtctctgtccttcaggccttgagtttctccctctgaaaaagcagcaaaaaaattctggt

SEQ ID NO: 10312 - DNA, 579 bp, Homo sapiens
cgagcccgcaatgtcgggccccaacggagacctggggatgccggtggaggcgggagcggaaggcgaggaggacggcttcggggaagcagaatacgctgccatcaactccatgctggaccagatcaactcctgtttggaccacctggaggagaagaatgaccacctccacgcccgcctccaggagctgctggagtccaaccggcagacacgcctggagttccagcagcagctcggggaggcccccagtgatgccagcccctaggctccaagagcccccaaccgggacccaaccctgcctccctgggctaggctctggcctgggcactcaccccctggcttagacaccttctcaagggctggccttcagggacccctggtgggtctgcctgcctgggccacccttcctgcctgggcctccccttggcctacctgggccagcccccaccacctggcatgccctcctggggccaagagtgggcctgcaacccacccacttgcctgcccacccaactcctgggcgctccccactctgcccaggccttgagtgtccacattaaatgggtctcccacaaaaaaaaa

SEQ ID NO: 10313 - DNA, 460 bp, Homo sapiens
ttttttttttttaggaatgaaaggtcataagccattagaaatagtggcattattatgcaataacaacaccctagctaacctgcttttgtcatctgtagcacttacaataaagaatgatgaccttccaaccctggacactacctcgataaagcaaaccagagatcctctctacactttctatggaagccataaaagttgccatcaatatatccactttcatagttctatacttttatactttctagacttttttatagactttatgatcagatctttttgtctcagaggataggttttgcaagattcaaaggaaaatcaaactccttggttgttccagctttgaagcttttgcttcagtaaatttgtttaaagaaccagatcacataccatttatcaaattctttacttaagtcagaatactttgcagacatacatatttggaaaacaaactgtttcttgt

SEQ ID NO: 10314 - DNA, 470 bp, Homo sapiens
gagagaacacttcagaattcaaaggctcaaaatagttatcttctgagcaatgtgtcttaagaactaaaggttatgcaccaccaagacaagagtaaagtgaagatatgtgatccagcaacttgatgtgtctgagaatacaaacatgcaattctatcagtttgggaatgggtttataacaagtacacagaaaacaaaaaaatgaatagggaggcaatgattagctctaaggaaaacaaacaaaacaaactcactcaagaaaggaaaggcaatccaggcagctgtgagtgcctcccccagcaggacacagcctggaagctgcagccccagggaaccagacccattgctcactcttctctttggttcgctcctgggtgctcagaggaggcagggaaggtggagaccagaagcctccttggtgtgaggcctacatggatccttctgtcttgctgaacaaggtagctggctgggag

SEQ ID NO: 10315 - DNA, 131 bp, Homo sapiens
ccttattgccagtgcatttagtggcacccactctcttcaagttgttgaggtgccagaagagggaaaagcacattgcccatgaaggagccccatcttttggttggagaaagctctatccagcctgcaccact

SEQ ID NO: 10316 - DNA, 753 bp, Homo sapiens
tttttcaagtggcagccaggagaagaaccagcaggctctgtggttcaggactcccgacttgacacgatattttttgctaagcaggtaattaataatgcttgtgctactcaagccatagtgagtgtgttactgaactgtacccaccaggatgtccatttaggcgagacattatcagagtttaaagaattttcacaaagttttgatgcagctatgaaaggcttggcactgagcaattcagatgtgattcgacaagtacacaacagtttcgccagacagcaaatgtttgaatttgatacgaagacatcagcaaaagaagaagatgcttttcactttgtcagttatgttcctgttaatgggagactgtatgaattagatggattaagagaaggaccgattgatttaggtgcatgcaatcaagatgattggttcagtgcagtaaggcctgtcatagaaaaaagggtacaaaagtacagtgaaggtgaaattcgatttaatttaatggccattgtgtctgacagaaaaatgatatatgagcagaagatagcagagttacaaagacaacttgcagaggaacccatggatacagatcaaggtaatagtatgttaagtgctattcagtcagaagttgccaaaaatcagatgcttattgaagaagaagtacagaaattaaaaagatacaagattgagaatatcagaaggaagcataattatctgcctttcattatggaattgttaaagactttagcagaacac

SEQ ID NO: 10317 - DNA, 329 bp, Homo sapiens
ctcagatcatccctaccccacccagttgacaaccatcaaattcttttctctgcttatgcagacaaacatatgtaaatgtaagtacttttatattaagttgggatcatgtcactcattttttttcatttttcaatatactgaagacatggttccatctcctgattctttttaactgctgcacagtattctatgtagtaaggaccaagtttaagcattgccctagtaatggacatttagtgttctcagctttttgctaccacaatgctacaataaatgtgaacacatatccttatacactcaaccttattactaagattcccaggaagggc

SEQ ID NO: 10318 - DNA, 1619 bp, Homo sapiens
tttttttttttttttttattctaatttatattttattgcattatgaaaataatacatttggcaaagtaatctaggctccaagttgaaataaaagaaaatcctgaagagtgtactgatttttaaaatgtgaaatagtaagatgtattctaaccaatacatactagcactcttattaggccaaaacccagcaaacctaatttttataattccatatgaaattacaaggtgttttgcattcattcattttatgattagcacaaatcttgagaactgaccctcacttcatcaaaaccaatgttaaattcctgttcagaagacaatttgaaacactaccgaaaatttttaattcctttggttttgtaagttgcattttcatccttaccatgttacatttttttcataatcaaacattgtagcagctttagattctgcccaagtacctttaagtaaactagtatattacatttacattatttgaaaagttgattttacaaatgcaaaaatgcataaatacatgcctatctacaccagcaaaacaaaatactctgaatctcaatgctttaacaagccacaccttctggccgaggatttctgggatgcctttccaagccacagggcctggctggcaattccactactccaaaacacacgtctgaaaggtgtagttacaataaaccctaagcaggttaaatttatctaataatcaacatttaaaatatgacattttcactacttctgctacatttttcagaactgaaaatatatttttcaaaaatgtacaaggatattttcactttttaaaagggaaaagtgctagaaacataatacatatatatatatatatctcactttcctcatcaccatcttcaaatttttttacatgttgggttatagtctagagaacaggtaagcaatctgctcaaggtcagaaacaaaatatctttaatcactgaggtctccattcttcatttagatcttttaacaggactttgccttgatatatgttaagaaatatgccctaaaatcacttctgttcagaagtgaatcagttactattagaactgacattttcattaagcaaagtctgtgttaagtgcacctatgaatacctgcggaaatttacttccaaatggccatcaatatctaaaaccagctgaacaaggtttcccaatttaactacagaagtattccacctaccctaaagatattccatgagcattctacaattatctgtataaacagcaacaagtttgatctatgatcaacatatgaatatctaataaatattaaaactattaaactatagattaaaatgcagatctctcatagagttaagtgatgtcattttggtacattcaccattattgtactttatttaataaagaaatacatttgcccttgcaaatatagcaattgcaagtttacaaataaaaccacagacctcaaagtcataatgctaaatcttcaacttacaaccaacaaaagtaaatcaatttgtttacaaatggtccatggcactacaattaaaataaaaaatatcaaaaggtcacaggatcttaggtaagtttactgacaatttcataaatattcaaaagaaaatttcaaaatttgtaaactta

SEQ ID NO: 10319 - DNA, 787 bp, Homo sapiens
gttcagtgacatctgctgcttcatcagtaacaatcacaaccaactatgcattctgaagcaaagaagggatcaaaatttgatactgggagctttgttggtggtattgtattaacgctgggagttttatctattctttacattggatgcaaaatgtattactcaagaagaggcattcggtatcgaaccatagatgaacatgatgccatcatttaaggaaatccatggaccaaggatggaatacagattgatgctgccctatcaattaattttggtttattaatagtttaaaacaatattctctttttgaaaatagtataaacaggccatgcatataatgtacagtgtattacgtaaatatgtaaagattcttcaaggtaacaagggtttgggttttgaaataaacatctggatcttatagaccgttcatacaatggttttagcaagttcatagtaagacaaacaagtcctatctttttttttttggctggggtgggggcattggtcacatatgaccagtaattgaaagacgtcatcactgaaagacagaatgccatctgggcatacaaataagaagtttgtcacagcactcaggattttgggtatcttttgtagctcacataaagaacttcagtgcttttcagagctggatatatcttaattactaatgccacacagaaattatacaatcaaactagatctgaagcataatttaagaaaaacatcaacattttttgtgctttaaactgtagtagttggtctagaaacaaaatactccaagaaaaaaaaa

SEQ ID NO: 10320 - DNA, 106 bp, Homo sapiens
ttttgtaaaataagaagacttccatttttaatgaccaacatgtattaagatggacacctactctacgaaacacaaagttctatggtctcgaagaagcccgtgcctg

SEQ ID NO: 10321 - DNA, 733 bp, Homo sapiens
  misc_feature (1)...(733): n = a,t,c or g
accgtaccctagaacttataataaaaataagagcaaacaaaattacttgaatcaatgagaaaacattagaaagaataatagatagccagggtcatcagatatttgaggaaaatataagagaaagagaaaaaataagtaaagagaccacagataggcaggcttctaatgaatatataatagaacagataagagattaaacttagaaatacagaggtaaatagaaagatcaaaaagatttaaaagttgttgcttttgggcagcagggctgaggtgaacngaaatggaaagggaattgctgggttttggtcataaccttttactactatttgattgtttaactgattttatttattagattaataaaaatattaaagagtaaaggccatggatttttaagccctcaaaacattttaattgtgcgatatttttatcatatagatgcttcttattagaaaaaactttccattctgttacattaatttttatcatgtgttgccattacattaccgctgttcttaaagacctcttcctgtttttgacctcactgttgagctgaattaaatacacgttatcatctaactagttttaactttaagaagtaagatatgttctgagaaaagtattctttaacaggttccaatcgttcttaaagattcatagaactttatacatggtgcccaaatgtcttttctgtctatgttaataataagtaaaactattgtttataaaatgc

SEQ ID NO: 10322 - DNA, 1705 bp, Homo sapiens
atggcgggcggagaagctggagtgactctagggcagccgcatctttcgcgtcaggatctcaccaccttggatgttaccaagttgacgccactttcacatgaagttatcagcagacaagccacaattaacataggtacaattggtcatgtagctcatgggaaatccacagtcgtcaaagctatttctggagttcatactgtcaggttcaaaaatgaactagaaagaaatattacaatcaagcttggatatgctaatgctaagatttataagcttgatgacccaagttgccctcggccagaatgttatagatcttgtgggagcagtacacctgacgagtttcctacggacattccagggaccaaagggaacttcaaattagtcagacatgtttcctttgttgactgtcctggccacgatattttgatggctactatgctgaacggtgcagcagtgatggatgcagctcttctgttgatagctggtaatgaatcttgccctcagcctcagacatcggaacacctggctgctatagagatcatgaaactgaagcatattttgattctacaaaataaaattgatttggtaaaagaaagtcaggctaaagaacaatacgagcagatccttgcatttgtccaaggtacagtagcagagggagctcccattattccaatttcagctcagctgaaatacaatattgaagttgtttgtgagtacatagtaaagaaaattccagtacccccaagagactttacttcagagccccggcttattgttattagatcttttgatgtcaacaaacctggctgtgaagttgatgaccttaagggaggtgtagctggtggtagtatcctaaaaggagtattaaaggtgggccaggagatagaagtaagacctggtattgtttccaaagatagtgaaggaaaactcatgtgtaaaccaatcttttccaaaattgtatcactttttgcggagcataatgatctgcaatatgctgctccaggcggtcttattggagttggaacaaaaattgaccccactttgtgccgggctgacagaatggtggggcaagtacttggtgcagtcggagctttacctgagatattcacagaattggaaatttcctatttcctgcttagacggcttctaggtgtacgcactgaaggagacaagaaagcagcaaaggttcaaaagctgtctaagaatgaagtgctcatggtgaacataggatccctgtcaacaggagggagagttagtgctgtcaaggccgatttgggtaaaattgttttgaccaatccagtgtgcacagaggtaggagaaaaaattgcccttagccgaagagttgaaaaacactggcgtttaattggttggggtcagataagaagaggagtgacaatcaagccaacagtagatgatgactgaaggaataccagttaaataatacattcggatggatttggaagttggaattcctcttaacaaccaaggggtttattttcaaagcaatattggggaattgatttcacagttcgttaccttagtaggtaacggtaaggttattcttttttttttttttttttggttatgaaaacttagggactaaaattaatataaaaattggcataatgttggattgaatctacattttggcagaagttaaacattcccacataatgtcaaaattatacatcatgcagttctgtttttt

SEQ ID NO: 10323 - DNA, 1489 bp, Homo sapiens
gggagagaagctgaggcggccgaccttcggcccgaggcaccggggcgccgggacggcgaagatgtcggcttccttagttccgggcaactgtccgggctgtgagcaagaggaagctgcagcccacccgggcagccctcaccctgacaccttcagcagtaaacaagataaaacaacttcttaaagataagcctgagcatgtaggtgtaaaagttggtgtccgaaccaggggctgtaatggcctttcttatactctagaatatacaaagacaaaaggagattctgatgaagaagttattcaagatggagtcagagtattcatcgaaaagaaagcacagctaacacttttaggaacagaaatggactatgttgaagacaaattatccagtgagtttgtgttcaataacccaaacatcaaagggacttgtggctgtggagaaagctttaatatttgaaatctcaggactcttctggccgtaggttccaggaaagctcgtggaagctttggggctcactgcagaaatcatgtgactgtcacgtgctggaaaataaagtgatacatcttgaaaatgaatccagtgtgttggattccagaagaaatgatatttatattctctataggggacagaaaatgagaagccatcactctttttggatcatttaggtctcttgtatcctttgttttagaaccagtttcattaaagttgccttcctgggcacctgtttatccatttcctgaactgtgtgcactccttagatcgctattgatggcttgatcatccctcagcatttctcccaaccagatcggtgactcctaaaatctgagacaggacatcgtggactgctggtagtaatatggtggtgcattgttttttccacccaaacttaacatagcctttttatacatttttatgaaaaatttcattgtcagctgcctcactgcatactctttaatagtaccaggcaaagattttcttcaactatagtacagattagttctgagtgatggtatcaaaaggtgagaaagacgtcatccgccttttttttaatccatttcttttgccaccctatatgtctgttcagagatgggctctcaagctgactttgattcttttagttgagaagtctcttaaagccatctagcccacctccatcaattccctatgtgaggaagcaaaaccccaggggaagccaaagggcttcctgttccaccctgacaccacaggccgggggagagtagggactctacccccctctccccttgtagggtgacacatgctctgccctctgagggcagtgcaggcgaaggcaaatgggtctggacttcttttatgtgggtcaacatttttggataggaattttcttttattaattttggataggaggatttattatttatttttttatttttatttttggagttggggggagggaattttttaaaaacctttttttatggttccattttaccccttctttgtttttcttttca

SEQ ID NO: 10324 - DNA, 308 bp, Homo sapiens
ctttccagccaataaagaatttaagatgcaggttgacacacagcgcacctcataactctaaagaaaatattgcacgattcgctgctgtgcagcgatcttgcagtcctacagacaccgctcctgagacacattcctcagccatcactaagacccctggtttgttcaggcatctcgtccaaatgtggctccccaagcccccaggctcagttactccatcagacgcacccaacctgagtcccattttccaaaggcatcggaaaatccacagaggctcccagatcctcagggcaccccagtgcccatcccct

SEQ ID NO: 10325 - DNA, 806 bp, Homo sapiens
gtatttaaacacgcagtgagctgatgcattttctatagtacgctgaggtgtttaaaatacacattttaaatccctctttacagacactaacataaaagtacatctttctgggttgtaaacatgtggtagtaccagagtattgtatagtcaatgttaaataaaagccaaaactggaatgtgcagaaagtaggctttggttaatttgtggattcatttttatttttgtctttgtttaactttttaaaaaataagatttctggagtagattggtatattctgttaaagacttacagtgatccattttgcttacactgttgcatcacaagggactcacccagggaccatgacctgctggtgtgtgtgtatatttacaaaaacaaaacaaacaaaccacccattgggatataaggtagcaatcacaaactaaagactgcggcttgttgaggtgcaataccctgactcccaaagttagttacagtgggttttattgtttttgtgactgaaggatttattcagactgctgtactcttcatttgatgtaacaaaatgctattaatctaaatatttgtaaataaagtacctgtatctagattaaattaaaattggttgcattattttctgaactataatagggtttttcttcaggtgaacaatttgacgtgtcatcagtttttattgcagcactgtccatattcattggtataaagagaggtctacgtatgtagcattataaaaccacatcactaagtaatagacccacagctttattcttgtggtttacattacccttgaaatgttttcagtcc

SEQ ID NO: 10326 - DNA, 467 bp, Homo sapiens
  misc_feature (1)...(467): n = a,t,c or g
tttatccatcaagaatgcttagttcaatggctgaaacacagtcgaaaagaatactgtgaattatgcaagcacagatttgcttttacaccaatttattctccagatatgccttcacggcttccaattcaagacatatttgctggactggttacaagtattggcactgcaatacgatattggtttcattatacacttgtggcctttgcatggttgggagttgttcctcttacagcatgccgcatctacaagtgcttgtttactggctcccgtganctcactgctgacggctgccattagatatgctgtcaaccggaaaatttgttggcagattgtttgcagggttggtttttgtgggtgacgttgcacactgtgtgcaattccatccagccttgggtgtgggttgaagagagcagatagtccaatggggggagcaccaaatttgggttgggagcangctgncccaccgg

SEQ ID NO: 10327 - DNA, 402 bp, Homo sapiens
tttttttttttgaattcaaatagtctttaatgtcaaagggaattcagtcataaacctctaaattcccatcattactattctcttcaagggcacagctatgtttgcaatggccctgaaactcctcactcccatacatacaagtcccccatacacacaaagtctcaagcaaatgaggctggagctggagtttgatcttcatttatctgacccaaacacccaggctctttccattgttccacactgcaacatttcagagtagccaaaaaaatggacaacattatcataatacttaaaaaataattattgatgagaaaaaatatttaggactcactggtctatactactgaaatagcccttcaaagtttcttagtaaacttgggaagccgataagcacattcagcc

SEQ ID NO: 10328 - DNA, 661 bp, Homo sapiens
  misc_feature (1)...(661): n = a,t,c or g
atagaattaggtaagaagattcttataggtaatgtatgttgaaccagaattttaaggaacaaagaacgtgatgactagtgtggtcatttcaggcataaaaataggactaaaacaggaatcagtcagaaattgaagactatagcccatgagtgatcatacatttatcagtgggtattaacacactcaggtgggttcatgagtagattctggaattnccataatagtctacatatttaaacatagttgaacctaggtttcatgcagttatgctataggccttaggggaagctcttggttattttacatttttaattgagttctgaagttaagcagtaatacctaacaattaaatgttttgagaaacnnttataatgccccatgtgttaccatagtattggacattatcctacctagtaatagtgtagagatagacatgttacagtaataggataaaatttaaaagaataacagtaatcaatcactaatagttgcatacttggcagtgtaactcgtggccctcaccacattttgagaatcactgatgcaagtttcaaaattcatggttggccaaacacagtggcttacacctgtaattcagcnnnnnnnnnnnnnnnnnnnnnnnnnnnnnnnnnaacagcctgggcaacctgggcaactcacc

SEQ ID NO: 10329 - DNA, 541 bp, Homo sapiens
ctgagaccccggattttactttctctttggagggcgctgggacatacatctctcaatccagcttcctccgcatcctcccatcttgccccatttctgccacgtcagacacttcctgagagtctcaccttcaaaatgacaccgctgcccatccattgctcaatggtacagagtgtggggtcagtccaccacccttgacctcccggcagggcaaggtgaggaggcggacccaaagcagtaccagcaggacttgttgccagtgataccaaaacagacttttcccaagcagtgcctcacatgtctgctggtgtggctttgggattctcctgccccacccccccgtccatggcagccccctccccaaggctttgctcacacctgagacaggaaggaggaaggggatccaataggaatatgggccccggaggggaagtcatgcacccccaagccaccaccccccagccttccacgcacatctcctggctggaagagagccctccaaaaaggggacacaggctgccccggcccctcaactgcatccaca

SEQ ID NO: 10330 - DNA, 57 bp, Homo sapiens
caactggtgtagccactttagaaaacagtctggcagtttctcaaaaggctaaatgta

SEQ ID NO: 10331 - DNA, 360 bp, Homo sapiens
gaattagttaaggggaccatattacaaaagatagttgaatattcttcacactcacttctcaccctccccaccccaatttactctcactttctgaatggctttaatgagatacctgattattaatgaagaaaagtagaccaccaccccttttgttatccagactttagaacagccattgttgaaagcaagaagttagctacccacaataatacctttctgagcatactcttctctaacatacatttctgtggaagtagttgaattaaattgagtaactacacaaaggaaaatggcagggctatgaatttctttcccagcttttatatagatgtgcctacatatgacactctttagggttcc

SEQ ID NO: 10332 - DNA, 224 bp, Homo sapiens
caaaattataaatagattacagagatttagaactggttataatttagtaagattaactttgcagtgttagaatttttagcaacaaatttttagaatttttttagcaaaaagaggaaatacacattaacaataaaatatggctagactggcctctggttgcctaaacagagcatcatgtgggttaaagaactgtagaaccggtcgacgcggccgcgaattccggg

SEQ ID NO: 10333 - DNA, 1505 bp, Homo sapiens
caagactatcttgggaagattcatggggcttactcctctgagaaactcagctactttgagcacaatctggagacatggaggcagctgtgcggggtgttagagatgtctgacatcgtcctgcttatcactgatatccgacatccagttgtgaatttcccgccagcactttatgagtatgtgactggagaacttggactggccctggtgctggttttgaacaaggtggatctggccccgccagctcttgtggttgcctggaagcattatttccatcaacactatccccagctccacgtcgtccttttcacctcttttcctcgggacccccgcaccccacaggatcctagtagtgtcttgaagaagagtcggaggcgggggagaggatggactcgggccctggggccagagcagttgctgagagcctgtgaagccatcactgtggggaaagtggacttgagcagctggcgggagaagattgctcgggatgctggggccacctggggtaatggctctggggaggaggaggaagaggaggatggcccagcagtcctggtggagcagcagcagactgattcagcaatggagccaactggcccaacccaagagcgctacaaggatggggtggtgaccatcggctgtgtgggtttccctaatgtgggaaagtcctcgctgatcaatgggctggtggggcggaaagtcgtgagtgtctccagaaccccgggccatacccgatactttcagacctactttcttaccccctctgtgaagctctgtgactgcccaggcctcatcttcccatctcttctgcctaggcagttgcaggttctggcagggatctaccctatcgcccagatccaggagccctacactgctgtgggctacctggcctcccgaattcccgtgcaggccctgctccacttgcgccacccagagtctgaggacccctcagcggaacacccctggtgtgcctgggacatctgtgaagcctgggcagagaaacgtggttacaagacagccaaggcggctcggaatgatgtgtacagagcagccaacagtctcttgcggctggcagtggacggccgcctcagcctgtgttttcatcccccaggctacagtgaacagaaaggcacctgggagtcccatccagagaccacggagctggtggttttgcagggcagggtggggccagcaggtgacgaggaggaggaggaagaggaagagctgagcagctcctgtgaggaggagggagaggaggaccgggatgcggatgaggagggagaaggggatgaggagaccccaacctcggctccagggtccagcctggctggccgaaacccttatgccctgctgggtgaggatgagtgctgagttcctcgcccagcgccatcttccctcccagtatctttgcttttggactgacctgggggtatctcccctctgccaccccaattgtgaataaagattgtttgctttgtaaaaaaaaaaaaaaaaaaaaaaagatctgg

SEQ ID NO: 10334 - DNA, 316 bp, Homo sapiens
acaaagaggtattcagttcttttgctcatgcccaagtctccatcacaaatgaaatctatcagtacctaggagagccagaaactttcctcttctgtcccacaggtattgtatataatggctttacatttaactagtcttcttggaatatataacttataaaggaccatgggccccattctctctccacttccctcctcctttggtgtgtaaaagtaggaatctttttttagaagacatttttcaagatcctaaattggagaaattttaggaactaataaatgacaactgactaggcaaaagatttttatgtattttt

SEQ ID NO: 10335 - DNA, 1098 bp, Homo sapiens
ttttttttaagtgctcttcaaatgctattacacaacgcaagtttcccctcccctccattatctcctaatcattctccctgacaccctccttccacccctaccaaaaggtgctagatgcaaggggggcatgcagaattcaagcactgtttctccccatggaaaaaaatcaggtttcaaggtagtcagtcacatctaatagtgtacttaaacatacccctctactttttgtcgtttatttctatttataacaaactcttgtgttgagggctcttgatggacggcagcaagggagctgctctgctgcatatgaaaccccgacccagagcccctctactcatgcgatgtgtagttgacagccacttcacaaacattttcagctacagaaaatatattcaaggaagaatgttaaaaagtttccttataacctacaaggggttctctctagatgtaaacaaatctggatgaaatattttaatccaagtataccatttcccacgtcgtaaatcttctgggctggtgggagccaatccagttacacactggaaggggagtgagggtcccagggcttccccacacctcacaaggcccacccttgtttccactgaccctctctttgacctgaaacccccaattgcctccacaggcaaaacaaaactcaaatctctctagactcaaagacttaagactatgccaacctatttgtttgtaattacactgctcaaggctcctgtttcctctccttcagccattctccagagcgctcctcaagagattttaagtctctcacagccagactgtatttcccttggtcaagaagcaaccacggaatattctacctgcaggagataacaaatgttgactaatttatgtatgagaccattctatagtacttttgcagcgaattaccccctattctgaaggttaatgtttttccttctgatgatctagacggggtccacacactacagcattcagcccaaatccagcccatgagcagagaatcttttttaaaaacaatcctttaaaaatataaaaacctaagactatgtgacagagatcatatgtggcctgtaaagtctaaaatatttactgtttggc

SEQ ID NO: 10336 - DNA, 389 bp, Homo sapiens
tttttttttacaattttactctttcttagcaccaactccatcatgcaagactgacagggaagaatcacaacatgtaaaagctaaaagaaaccccttatacagtccagtgcttacaacctttaaaacacattaaaagcttgaggaatttgttaacatgcaaattcccaggcctaaccacagagacactgatttagatgatatggggtagatcccagtaaagcagcccaggtgtttttgaaatagatggatcatgaaccaaactttaggaaataacaatatactgcctcacttttagattaagaaatttaaactcagagagcttagtgattttcctgaggccatgtaattagctaggggcaaagaagacattagactagtagcctcctatc

SEQ ID NO: 10337 - DNA, 2671 bp, Homo sapiens
ttttaggggagaagattttatttcacaaggtgaggaacccaggctggtggccgacgcccacacaccaggctccgggacgcatggggtctgcacgtggagagggtgctggccgccccagcaggaagcccgacgtaggtcccagcgtgtctgtcagtcatgctgctgccctgtggggctggagaggcaggacgtgcacccagcctgtggctggcggggcaggggacctgcaggtcaggccaagcagagtggctccggctatgcccccgagcctgcaggctacgccacggtctggcggctgaagagctcgagggtgagcgagctgaggaaggcagggatgctgtcctggcgccgcaggtgcacctcgatgagctcgcccacggtgtgtgagaactctgtctccagtagctgcatcttggaacccgaggggctggtggccttgaagatgagcagtcgcctgggtgctcggcgtacagcgaggtcagccggtactggttctccgtggtgatgtcgatctggtagccggtgagcgtgtagcaggccttgcggaactcctggatcttggtctggaaaacctccttgagccgctggttcttcagctcggcactctccacctgcttcttcagctctgccacctccttggacgatggcagactcgcggcggcagcctcaaggtcggctgggacggtgcctcctctctccatggcgcgcaggagcccgcgcagtcgctcgcactccgcctgcagctggctgtggtcctcgcgcaggcgctgcctggccacactggtggggttcaggctcatgtgcagcactttggtcctgctctggtcatagtcaccctgcagagctcgccgctccagctgtgcctccagcatcctcttttcctcctccagccgactccgctcgccttccagctcctcgaccttcaacctgagcgtgtccgcctcctccctggagaacaggaagctctgttcggcagagctggactgagacttcagcatcttcagctccatctccagcatgtctgctctttgtttctggcctcccagctcctccagggcctgcgacagctgagcctccatctcggcgctgtggctgtgcaccttctgcaccatatcctcagcctcccgcatgcgccgcgtcagctggggtgagtactcggccggggtcagctcgctgtcgtaggaccccaggatggcccgcataccgtcccgctccttggtgagcagcaggacccgtttctggagcctccgggccagcgcctcgtgggtctcgcgcttcttcctctcctccaacagctggccgctgacctgccggagctcctcctgcagctgctgcctggccttctccagcccccgggcgctgctggtgacggcgctgttcttgtccttcaaggcaagctccctctgctgcagctcaaccacgaatctggaaaggtcttctggagtcctgatgctcaggcccatggtctggtccagtctctcccagctttgcagcttggccagcagcctctcgttctccagctccaagccaaccagcgtctcctgcatcttctcctggcgccccagcttcctctgcagcccttccagctcttcctggagcagcccgttggtctctctcatctcccgcagtgcgctctcctcccgcagctgctccagctcccgttccagcctagggagccgtaccagctcagacttcatgttcttcacaatcgctgcatcctgctcttgcagggacagcttctgctccagatccttaatctgctgctcgtggtctgctcttgcttcttggctggcctggagttcctggattttctgattggcttcctggcattttttgtgttgcaggtccagctgctcctgcacgtcctgcttctccgactccaggcgcttcacccgcatctcctggtccatcacgctccactgcagttccgagatcctccccttcagtgcgttgatggtctcgccagcctgggccagactgtcctctttctcacgcagcctcttgctggcagcatccaagttctgctgacactgcctgttgcgctccagctgctcctgcatcttctcctccgccccggcctcccgctcctgaagctgccggatgcgcgtcaggagctcctggttgcggtcgacctcacgctcgtagttcctggcactggtgctggctgctctctccagctccactcgagccctcttgtgactcagctccatctgcattttctcccgctccacctggatgaggtgggacttcgaacggatctgctctgctctttcctccagctgcatgctctgctggtactgcatctgcagagaacctggggccgaggtagaaatatccagtccagagcctccctccacacgctgagagatgaagttgttcaaagatctcagggtggataaaaccatggtgttttcccccaggtcttccatggttgctttcgcgattacagagactgtcccacaacaggccgtctgcaagttggagccctggaagcctggcagtgtggacacagtccaagtctgaaggcctcagagccaggggtccgatggtgtaattctcagttcgaggggctgctgggacaagtcctggagaccaaaggccggcgagcttggagtgctcagccgctcgcagccagcttgccgccgccgctcggatctccctccgctccgcc

SEQ ID NO: 10338 - DNA, 292 bp, Homo sapiens
aacaaacccaattcctggtgtcccctagtcttggcggaggagccttttagatgagccccgaaaggccgggcagggaggacaagctctttggggctaccaaacagaagcagcaatgcctgttgtgtggccaacccttctggatctcagcagggatgaatgcaaaagaattcttcgaaaattcggaattggaggcatatgctggagttatcagtgcacttcgggcacagggggatctcaccaaggaaaagaaagatcttcttggagaactatcaaaagttcttagcatctcaac

SEQ ID NO: 10339 - DNA, 497 bp, Homo sapiens
ttttttttttttttcatacacaagccggtgatactttattatataagagagttgtcaaaaggacagtttcatttctgtttcagaatccccacattccagtgatccatctgttgacacaattaacataaactatttgctgatatttactgagtgcttgcaatgtatcagagtcattaaataagatgcaacttctactgtgaaaactggaatcttcattaggacacagacttagaaaaggcccagtttcaaggattctgacttgcacagactgagcactcccatttccagaagttcgaatacctcctttcttatctcgggaatgtccatcattctcctcaacttctgatctctccagttccagtcaaaaaccagaaattttaaggggctcaaattaaggccaccttgtttaacaagttctttaattctccccggagttcctacacccaggtgcaccacacgcttctccagcaactttacctgcgcctggacctttatgt

SEQ ID NO: 10340 - DNA, 183 bp, Homo sapiens
ttacagaggaaagtacagcttataaatggtagacccaggatttgaattcatagagtctgcttctagaaggtgtgttcttagctccaatgctatgctgtcatattgatttcctgcctgccttctccttccttccttctcccctccctcccttccttccttcctttccttctttttttttttttt

SEQ ID NO: 10341 - DNA, 167 bp, Homo sapiens
aggaactgactgaattaaagcattttttagggcctttaattgtttcagaagagaatggaaattgactaactttaaactcttaagtattcacattcaaagcttgagagtaaactaagaaaataaaagttgaatgtctatctttcgaatgcatagtttagaaaaatgga

SEQ ID NO: 10342 - DNA, 1028 bp, Homo sapiens
ttgtttttttgttgttttttttttgagatgtatgattcctttatttttgacctcaacttactgagcaatgccgtagctatggaatagaagcatttgttgcactctttttgtgagccaggccctgtaggagggattgtggatggcaaaacctcaggttctgcccaaatcctccccttgggggctggagggtctctagttaattggcattccggtgcttaaggccacttttgggtagaggtttggcaaggatggagtgtccagacctatgatcctctaagaactttactttttaaaaacagccacccaaatggtggtggcgtggggagcaggtggtggtgaagggactggggtgtctggccatggccacgtacagaggagactctgtgagccctctccctgcctgagggacacttaactttatagcagctacatagggtcaacgggaggcccaccaagtccctgaaatccagggacagggaaggaagtggtggaggggaggctgacccacctctaaaaggttgtgccactatgagtagagcccccaggggagaggcctcagtagagcccccaggtcccctcaggtaagcagtggctcatcctctgcctcagctacccacacccccggctcagccagtggcaccagtagcacatcgtcctcatcttccagggccaggactgctgtgtggggtccaggggggctccgggttggtcctgggggccccaggctgggcaacaggcggcctcgcagggcctgcaccactccagacaatagtgatggctctaggggcagtgagggcagtggccctggggcttcagggacagtagtgggggctggagacgtgctagcagatgggaggggagccttgatgggcagtgggggtgcctgctccccatcttgcccaccccacctggcccccctcacgggctggacctgtgccaccatctagggcctcaaggggagcagcagaaggtgtgacctgggatctgcctcagaggcccgagccggggtgttggttcgagggagcaag

SEQ ID NO: 10343 - DNA, 328 bp, Homo sapiens
acctaattagatagaagttcaggaatttctatttcttttgggttgatgaaccacaggctagcataagtccactgtcaataaatgtttgttgtggccagacctccataaaagagatattccctgtgttcacaagttccctgaagcttaggttttgagagaatattgttgagtcactaggcagggctcacataggaaactggcaatcacctctgaaactgcttcacagacacctgcttttcctgctctgttcctcagacttctcctcttcaagcgtattccccccacaacaaggacagcagcttggactacatatctggctgatgatgta

SEQ ID NO: 10344 - DNA, 1208 bp, Homo sapiens
atggtcaacaaatatttattgggcatttattgtaaggccagggcaagtcagcagaaacgggcctgagcagtgcccaagagcactcactcactctccctagcaaacaggctcagaactctctcacacatgtcatcctctttcccactcaaaactcccaccccaaccttcctggaagggcagggctaacaggacctcctgcctgcctggttcacgactgattactttcaatcccagctggcaatgcaaactgaaactcattctgtatatcaccactctacaggagaggtctatttctggggcacccaggaagtcagcacacatactgctgggaccaggactcgtaattcgccttggtccaactccttctatgggtttagctgccctcattcctgtgggtaatacaagatcaaacagtccacaactttgcctgtcttctctgctcccctaaggtccctctcccttcgccgtaagatgtgactgaccagtacagtttctcctgaattgacaaactgaactactccttctaccggctaaaccctgacatcagtagaatcaaaccaaaaacaaggtagagtgtttcacagagaagtggtggattgaataaggcagcagaaacacataccatccagcccctgaacctgaattttgccaaaacagagatactttaagtccatttcttttcaaaggggttaatgctcaaagtgggaatagtgactagggtattctagtggttggaataataatttctagaaaaggttcattgctgaggtaccaaaacagacatcatgctaaggaattcttttactgtgcgcttccctgaatagatacgccgtcaaacaaggcagaagctacaaataaagcttacttctactgaactcatgaagctgttcctagtgtcagttttgagtttcaagtgaagactgaatgtcaactgcaggctttccgaattcctcgaccatgtccatccatggattctcttcttgtctagatttccaagcatgaagatgctaactaaagcatttctcaatggggaacacgaaaagatttctattattgtgggttctccggtgttcctaaaggctgagttataactaaaggatttcaacctatttgtgagtttgatggtaacgctggaaaaatgcttgaagttgttactttgctcattataggagtatggtttccctccaggaaggtttctctaaaattaa

SEQ ID NO: 10345 - DNA, 817 bp, Homo sapiens
  misc_feature (1)...(817): n = a,t,c or g
gtgtttttccactcactaattcactatacagagagtctgaaccttagcctctctcttggtcttgcagtgaggaagtttctattagtatatccaatttagcaaaattggtaccaaaatgatttctttggtaattgtgtgaaatataagctttttaacagggcatttaagtggctagcaaatcagtaattaaaaattaagctttctactccaagtatttcacaaacgcatctgccattttcctcatttaaaccttggttatcttggcctgataccacataaaagaatgtagaatggctgaagagatcaagaatttaaagcttctagtcttaacatacttggcatcccacttcaaattcaaaatccaaaagcccagggaaatcctaagtgaaccctaccacttctctgctgagaaccttccagtggttcccctcaccttctgcagaagtctccaatatggagtacatgcacttgggcatttaatatataccactggtgtgtgtgggagggagggaggaggaatactagccctttttatatatttacacaagcaaaacttttaaatatttgaattgacagttacatgtttcataactttgtatgtctattggttgtgcaggtgtaattttttccctttttgattagggttacaaaatttagagaccagtatgattaagttgaagctccttagcctccttcgacctagtctctgcatacctcaacttttacgtaccaatgctactctgctgttcacaattgcctcatgtaatctgcagattcctncctccccactttggttcagtctgtcttgtgcacctgg

SEQ ID NO: 10346 - DNA, 1920 bp, Homo sapiens
  misc_feature (1)...(1920): n = a,t,c or g
tccggggcggcccccggcagccagcgcgacgttccaaaatcgaacctcagtggcggcgctcggaagcggaactctgccggggccgcgccggctacattgtttcctccccccgactccctcccgcccccttcccccgcctttcttccctccgcgacccgggccgtgcgtccgtccccctgcctctgcctggcggtccctcctcccctctccttgcacccatacctctttgtaccgcaccccctggggacccctgcgcccctcccctcccccctgaccgcatggaccgtcccgcaggccgctgatgccgcccgcggcgaggtggcccggaccgcagtgccccaagagagctctaatggtaccaagtgacaggttggctttactgtgactcggggacgccagagctcctgagaagatgtcagcaatacaggccgcctggccatccggtacagaatgtattgccaagtacaacttccacggcactgccgagcaggacctgcccttctgcaaaggagacgtgctcaccattgtggccgtcaccaaggaccccaactggtacaaagccaaaaacaaggtgggccgtgagggcatcatcccagccaactacgtccagaagcgggagggcgtgaaggcgggtaccaaactcagcctcatgccttggttccacggcaagatcacacgggagcaggctgagcggcttctgtacccgccggagacaggcctgttcctggtgcgggagagcaccaactaccccggagactacacgctgtgcgtgagctgcgacggcaaggtggagcactaccgcatcatgtaccatgccagcaagctcagcatcgacgaggaggtgtactttgagaacctcatgcagctggtggagcactacacctcagacgcagatggactctgtacgcgcctcattaaaccaaaggtcatggagggcacagtggcggcccaggatgagttctaccgcagcggctgggccctgaacatgaaggagctgaagctgctgcagaccatcgggaagggggagttcggagacgtgatgctgggcgattaccgagggaacaaagtcgccgtcaagtgcattaagaacgacgccactgcccaggccttcctggctgaagcctcagtcatgacgcaactgcggcatagcaacctgggtgcagctcctgggcgtgatcgtggaggagaagggcgggctctacatcgtcactgagtacatggccaaggggagccttgtggactacctgcggtctaggggtcggtcagtgctgggcggagactgtctcctcaagttctcgctagatgtctgcgaggccatggaatacctggagggcaacaatttcgtgcatcgagacctggctgcccgcaatgtgctggtgtctgaggacaacgtggccaaggtcagcgactttggtctcaccaaggaggcgtccagcacccaggacacgggcaagctgccagtcaagtggacagcccctgaggccctgagagagaagaaattctccactaagtctgacgtgtggagtttcggaatccttctctgggaaatctactcctttgggcgagtgccttatccaagaattcccctgaaggacgtcgtccctcgggtggagaagggctacaagatggatgcccccgacggctgcccgcccgcagtctatgaagtcatgaagaactgctggcacctggacgccgccatgcggccctccttcctacagctccgagagcagcttgagcacatcaaaacccacgagctgcacctgtgacggctggcctccgcctggggtcatggggcctgtgggggattgaacctgggaagattcatgggacctgggtgcccctgcttcattggggcccgagcttgnaatttgaggccccagcggttggcggggcttttttnctggcgttcccagcctgcat

SEQ ID NO: 10347 - DNA, 623 bp, Homo sapiens
agttattgttgttttttttttgttcccagtttaacagaactgattttattagccaatacataccaaagacgggtggaaaagaagtattatttttgtagttttctttcataatggaagccttatgctattacagactgcagttttccagtcttttgattaagccttgccagttgtgtgccgctgcagcaccaaagaaactgttttgcagcctgtcacctcctctggcaggcagccatcctggtctcggagagtggggtcagcaccagactggagcagcagctctacaatatccagaaactcacaggcagaggcataatgtagagctgtttggccttcattgtcctgacagttaatgtcagctctatgttgcagcaacactgtgactagttccttatgtcctcgatcacaggcccagtgaagtagagccctaccctcttcatctttcacattcacatccacatttttcgatttgatggctttggttatatggtcaatgttgttttccctgcagtaatcaaatatatttttgtcttcttccctgatggtttcttcatgatatagagaactaataactggcccaccaaaacctgtatttgcttcttttcctttcttctctggtatct

SEQ ID NO: 10348 - DNA, 383 bp, Homo sapiens
ctagtgtgctatctaaggtctagcagtcacttcactagtgggcagagacaagttctaattgtattacagcacaaacaaaactgactagtttttaaattgcacaattttttttttttaaagcaagaatcattttctgggtatgtaagtgtaaatgtagatgcaaatttggctgcacctctttatcatgcctgtattggcctataggtctgcactttagtgttttttaattgttttatttctgtgtatttacgaacagagaaataactcaaatattatttctgcttagtgtctttatttataaagcccatgagtagtttgtatgcatctttcctacttgtaaagatgagtaaaagtatgcagttttaaatttaaaaaaaaaaaaa

SEQ ID NO: 10349 - DNA, 559 bp, Homo sapiens
actgtaccttgatctccctctcctcctttccgctaacatccacccaacagccttcaacatgttctagtctgttgcatcttaaaacacacaccaataaataggaatttatttaattccatatagctaaccagttgttccctagccccacagagactgcactttaaacaacatgcacgctgttcctattgaggaggcatcaggccagcaacacatcacagtgcctgccctggagtaggggctttacctgatcacctaggcaagtggcataagaactgaaaactagaagcaaccagacaggaatggcctcaactttctgccaccaaaacctccagactcactagcaaatacaccattccagttacgaccctagaactttcctttgaaggcaaattgctctcccagggttctgcatcccatccctgtccacattcttttcacattctctctactgtaccttgacttccctctcctcctctccactaacattcacccaagtcttcaacatgttctagtctgttccatcttaaaacacacaccaaccacagaatgccccctctct

SEQ ID NO: 10350 - DNA, 432 bp, Homo sapiens
ccgccttcccgcgccccgagcgcccgcagagcagtcgagatgggtgagtcaagtgaagacatagaccaaatgttcagcactttgctgggagagatggatcttctgactcagagtttaggagttgacactctccctcctcctgaccctaatccacccagagctgaatttaactacagtgtggggtttaaagatttaaatgagtccttaaatgcactggaagaccaagatttagatgctctcatggcagatctggtagcagacataagtgaggctgagcagaggacaatccaggcacagaaagagtccttgcagaatcaacatcattcagcatctctacaagcatcaattttcagtggtgcagcctctcttggttatggaacaaatgttgctgccactggtatcagccaatatgaggatgacttaccacctccg

SEQ ID NO: 10351 - DNA, 386 bp, Homo sapiens
cgtcgacccacagcagcggagttcatacatgcacgcgcatgggcggcaccgatgctgtcatcactaacgtttcagggtcagtgtcgagtgcaggccgcccagcctccgcatcacccgcccccaatgccaatgcagatggcaccaaaaccagcaggagctctgtagaaaccacaccatccgttattcagcacgtgggccagcccccggccactcctgccaagcacagtagcagcaccagcagcaagggcgccaaagccagcaacccagaaccgagtttcaaagcaaacgagaacggccttccaccaagctctatatttctgtctccaaatgcggcattcaggtccccaccaattcccgtcgacgctttttaatttagtagtagtagc

SEQ ID NO: 10352 - DNA, 457 bp, Homo sapiens
ttaattgcctgtgttaaatctctggtagtcttaatggagttctttgttctgttctgctgccttttacgttttcttgtcctttcaaaagtgttcttgaaagaaacaaagcgaataggcagttagcacagcacagctaccccttaccaagcagtctatggaaacaacccctcatccaaatcatgggttagttaagaatctaactggggcaattaagatgaattccactcacttcctggtcacttcagcagcccagcggcattgagccaaaatatacaattctgtgttattagtgaggaaactttaaaactcatgtttgttattacttactacccaatttcattatcctcccttcctctttccatttctattctctctcacttgaattctggcattatttttagtggcctctactgataatacctaccctaggagtacataaaaaattattatttaaaag

SEQ ID NO: 10353 - DNA, 513 bp, Homo sapiens
cttttttttttttttttttgacaaattaatatattttattgcataattctgatgggaaaaacatagctaaaatagtgcctttggtatcttatttacagtcttctagtccgtcatctccctccttcattttatatcaagtttcaaaattggtttcatggtaataaaatcaaagttgtagacctctggcatgccctgatgtagagttttgttgaaacggtcccagcgaaaaacagggaggccaccttgtactgtgggaccacttatggcataggatgtgtactgagatgctaggtagatatctgccacctttgtgtcataacaacctccaggacttgggttaggtgagttcaggtcctcacggcagcagatggtattacaggggtcacctctactgtaaggatccttcttataattgttgtatcgcatgatatatttcatggatgccgtatcagtcactttcccttggtcacgccggaaaattttggctcgtggagctaaatcataagagtagtc

SEQ ID NO: 10354 - DNA, 202 bp, Homo sapiens
ggaccccaaagtctgtacttccagtttctcccttactattgatcttcagaatgtctctcttgctagctgtgaaaatgagtccatctggatgtcccctagaccttgtctacccaacaagtccaatgatatcacttagttgttcaaggtgaaaaatccaggtaccaatgacccctgaattgcctcatcgcacctttctcctttt

SEQ ID NO: 10355 - DNA, 92 bp, Homo sapiens
ctgattcgcactactctcctcccttgacctattgctttgctggtctgagagcttctctccaatcctagactccctaaggcaaactttgaaga

SEQ ID NO: 10356 - DNA, 437 bp, Homo sapiens
gggtggcagacttttagaaattgtgacaatgaaaagtttagttttgagatgcaaagatcacaataaataagaaattttgaatatcactaacaatagaaagaaaaatgaacaaataatttttacccttggctgtcatttaaggtaactgaaaaattagcataaggtgtttttttctaactaatttatttgcctgttatttcatttataagcactataatgggacttaacaatcttttttttatagggaaaatattctttaaaaaaatcacattacttgtgtatgtagttcttacgagcgtgtttaattccaaaggtaaaattttctaatacctgacttaaaacaatggcatttatttgtaaataaaaataaaagtaaagataatatagtctataatgtatatctctgtctctgattattatgcaaatttctaacaaag

SEQ ID NO: 10357 - DNA, 225 bp, Homo sapiens
cataaacaaaaaataaagtcagaaatgtatgaggaaaaaattgctaaatataagtttttactcttaaaaactgacataattagtaagtacagaaggtcaggagttataaagtcagcacagatataaaacaggtaagatgaaatgtgaaaacaacgtgttacactcacctttgtccttaaacatgtgggccagcatactgtcaggttctttattcactaaagtgct

SEQ ID NO: 10358 - DNA, 481 bp, Homo sapiens
gatttttttacctggaattaataattctattttttttttgttttttttgcttgttgggttttctgtatatgtatcactaattcacctccaaacttctactacatgtgtaagtctcaacacatcaggctatctattggttgtttatttcttgacaacacccctttggagccctgtcttcactcaccaatctggactaactggtgaatgcctacacagctattatcccaagatttctctttaagaattcccttcaccttatcctttgctggattccatgtctgggccaagctttcagggagattaagcaaatgagtaactatattaaggatgagaaccaagattctcactgtcagagacgagagctacaaataaggaaaggaaaagggctaaaatgaatcctatgatgttggatcaaaatggtggcatttgtggtaaaattcatggttatatatatgtgtaggcagagatatagacaataaat

SEQ ID NO: 10359 - DNA, 1060 bp, Homo sapiens
tttgccgcccgagggggcttgaagggtcaagtttacccatgggggaactggttccagccaaaccgcaccaacctgtggcagggaaagttccccaagggagacaaagctgaggatggcttccatggagtctccccagtgaatgctttccccgcccagaacaactacgggctctatgacctcctggggaacgtgtgggagtggacagcatcaccgtaccaggctgctgagcaggacatgcgcgtcctccggggggcatcctggatcgacacagctgatggctctgccaatcaccgggcccgggtcaccaccaggatgggcaacactccagattcagcctcagacaacctcggtttccgctgtgctgcagacgcaaggccggccgccaggggagctgtaagcagccgggtggtgacaaggagaaaagccttctagggtcactgtcattccctggccatgttgcaaacagcgcaattccgaagctcgagagcttcagcctcaggaaagaacttccccttccctgtctcccatccctctgtggcaggcgcctctcaccagggcaggagaggactcagcctcctgtgttttggagaaggggcccaatgtgtgttgacgatggctgggggccaggtgtttctgttagaggccaagtattattgacacaggattgcaaacacacaaacaattggaacagagcactctgaaaggccattttttaagcattttaaaatctattctctccccctttctccctggatgattcaggaagctgacattgtttcctcaaggcagaattttcctggttctgttttctcagccagttgctgtggaaggagaatgctttctttgtggcctcatctgtggtttcgtgtccctctgaaggaaactagtttccactgtgtaacaggcagacatgtaactatttaaagcacagttcagtcctaaaagggtctgggagaaccagatgatgtactaggtgaagcattgcattgtgggaatcacaaagcaaatagtactccagaaagacaaatatcagaagcttcctattctttttttttttttt

SEQ ID NO: 10360 - DNA, 966 bp, Homo sapiens
aacattgtcacacatcagtttattgagaaaatcatgatgctatatgttaattctcttcaagtgattacttttcattatgtcagatgagactccaaaaggccatagccatgaagttagacactttcccatattttgttcaggaacacaaaaaccaaatgcaaagaaatgtttaagagaacatgaaattggcctcttccttcccccaaccaaaggtagtcattaacagtcaggaaggacaaactgaaacatgtaaaaagcaaatatttttgctagattttattttcaaagtttcaaacctttccaattttttttttattttttaccccaaaaaaggtatcaatacttttcattccactcttgtcaactttagccaaagccttctgagctgcagtcattttgctatttttcttttcagtcttcaaatctttagtattaaacttagtgtaatcttcttttgcttctacaggctcatctgataactttattttctttgatggaggatttggcaatgaggctgaaggttctggaagctttaagtatttagataagtcatcacttaattctttagggatgtagtcagatatcagaccatgggcataacgaatataatcctcttccttgtcagtggaagcttggtcaccagagaaaaatgcagttgactgtacccgggaactgacattcacattattggtttttaatgctgccacagtttgattaacctttttttccagccactttaatgtcttctctttgctgtacttgtaatatttcttgttgtctatttctggattacctttttcctctgtcacatgatgaagtaacttctcaagtccaggaagtttcagcaacaagatgcaatttggaaacacgttatccaccacaacttgatcaaggggctgaaacttcccctccttatcagcctttatgaggtagtggagaagcagaaatagaggatccacaggtgcg

SEQ ID NO: 10361 - DNA, 289 bp, Homo sapiens
ccccgggcaacaagagcgaaatggctgtcctcaaaaaaaataaataaaaatgaaataaaataaaatcccctgttttcattcagccttaaatagttgcacccgggtgtgatgggcatacaggagttcattatatattactctacttttctctgtgttttaaactttccataataaaatttaaaaacaaatctctgtttaattccaatagaaaaacaaataaatatcagtggtggtaatgggctctgaaggacattatatatatcaaggtaaggggacagggtattgaagc

SEQ ID NO: 10362 - DNA, 1071 bp, Homo sapiens
tttagtatttggaaaagatgttttttaatgagtagacatattaatcaggtctcttttgacacagaaatgttctatatttcattttcatattcttgtcaaattataaaaataatatcataaatatggacatcgctacaagctattatgtacagtcactgaaaaatcagaaaaaacatgtgagttagaaatgtttatcaaatacaagtctacacaaaactgaataaaatttttattttaaaacatcacaagtaattacaaagacaaatattccaactatacaaactgtttttcacatatacatatatacatacatatatttaaggttggttgatctttcatctttttatctgagtaaaaagaagaacactttcctcattccggagatttttgatgttataatagttacctgaaggaacatagaacgaatccccagtactttaatatataaggtgtttcatgtaaagtacacaaaaggtcaccaaagttaacataaaaaaccaatatatcctggccaacatgctgctttcccttttcttcttgtggtcctaatatcaatttcccagtagaaaaaaagggtgtatccaatgtcttgtataccttcaactcaccatgcttaacaaaaaattgatatgtatcttgtggccttacaagatccatgagaataatctctcttgtttctgggtcctttaccctcgttggctgcaaaggatctccaagaggtatacctagatttaccattaagttagtctttctttcatcgttatcaagacagatccttttcttattagattttttgttgacttttccaatattttcttttgccttccttttagacgatattgtgtctggagatagtactccactaatcacgaatcctcctgatggccttccttgataatctattcgctctcctcgccagtactccaaaggtttcaaacgtgttctcttggtcctgcgaacatttggtgtgttggagggcaatactagtttgtgatggattctgttctttggtatcactttagattgttttgagtcatctgaacttccatcaacttcctcatcatccacatc

SEQ ID NO: 10363 - DNA, 458 bp, Homo sapiens
tttttttttcaaacaaaaaccctgcgattttaatgagaattaaaggaggatgtaaattaaaaggcctgtttgtctgtacagcaatgcagatgcgcaggcccatcctggtggaggacccagatgcagggagcaaatattcgggttgtgttgctaagagtcgcaggaactactgctagtgatactaggcttgctgcaggaggatgtcacgctgagaaagggagatgactaggagcagaaaaagtactctcactgttccagcttccagcccaatcctagcagaatgaatgcattttaaaaccagtccacattcacatgtgctgaggaaggttgttagtgggtccctcatctggggcaaagcaggacccaaggtggtgctgagtgcagagttgcagagcatttctttgtggctcttccccttcatgggctgggaactttctggggttttgcgccccgggtcc

SEQ ID NO: 10364 - DNA, 582 bp, Homo sapiens
ccttatggtggctacatcagttactcgtggtcccaatgaagtataaaagaggatataagctgctgaagatttcacagaagaaacggagatatcagaaacttcatgatcatcaaacttaaaccaccgttgtcttgctgcatttttacaataggctgtgtagtggcctccatccagcccaccgtagtggatttgaaacagaaaacaaattatatttcttcaaattgttctttggaccaataacatactgtgacaagtcaagattttctaacgggaagtccacagatgtctgtaatttttgtttccacctgccatcgtaggaaaaacgtttcagatgcactaaaagcacaggtggtaaccttccagatttctatcttttttagagaatcccgtcgagctctgcaatgactgcagtaaaatctgttgttatctgtgagtttttcttctttggaaaataatctaaggcaatcctgtaatgtacatttacttgtggatgctagtggtagagacaaatacatgaaggcctcaaatgtcctagactttttgtgacatgtgaggcactgtactgtagatttgaattgaccc

SEQ ID NO: 10365 - DNA, 538 bp, Homo sapiens
  misc_feature (1)...(538): n = a,t,c or g
ggatttgggtaggtagtggaaaaattacagttaacgtgcgttttctcttgtgggcaggggtgggggtaacaaggtgcttggtgaggagctcctgagactcattgtccaggagaaggaatgtcacaagatcaattgatcagttagggtggagcaggaacaaatcacaatggtggaatgtcatcagttaaggcaggaactggctatttcacgnnnnnnnnnnnnnnnnnnnnnnnnnnnnnnnnnnnnnnnnnnnnnnnnnnnnnnnnttannnnnnnnnnnnnnnnnnnnnnnnnnnnnnnnttgaggattcttttttatcttcctctgatgctcttctataagaatgaatcggatgaagtgagggtctcaccccaacgcggccttagcttcctcggaaggaccgaacaccttggcggcagccgaggaaaggggttccacagttttaatttatctgtaattcccacgctttactgttgccacggaaaccgctgagcaatagcctctcagaataggaaatcaagacacagtcagaggaag

SEQ ID NO: 10366 - DNA, 501 bp, Homo sapiens
ttttttgctctacacaattctttctgaaaaagtttattattattaaggaaataaagtgtgaaaggatcataggaaatacttgcaataaaaagaataatcattaacattggcaactgccactaggaaggtgtatatgccacatactactgataaaaattgtaggaacccattggtagttcccataaccaccattgatgtgttaattcccacaacatcaaaaataaagaattagttccacaagctgtctgtcaataatactctgaaggcaacctattcatcagcaccagaatcccactgattttcttccacatgttcacaatcttttgccatcagtcatctatcggattctacaactgtttgggagtgtcaggctaacaaaagtcaaaactgggcattgacattaatggtagtttactgatgtttcccctgcaaatctcgtattttctgataccaaaattttgcacagaagttggatttcaaaaggctaattgcatgttctat

SEQ ID NO: 10367 - DNA, 251 bp, Homo sapiens
tttgcaataagagttcaaaatagaaaatttgaatttgtcaatctggggaaaatacaatcatttaattatagtaataaaatgtctcataatattactgaaaaaatcactgcattgtctcttgcctaaccacagtgaggtcagagggatattatttcttttacacagtggaggaacttaagattcagagaatttaagatgctgagaggcaagccacaaacaaagaattgagattgaaactcaggtttgtctca

SEQ ID NO: 10368 - DNA, 123 bp, Homo sapiens
gtaagaattaaaactgaggttgtttactcattttgcctttaaatcttttatccccttttggtgaaggtttccctttaggaaaaaaggtgtcaaacaaccctgatttttttttttgcaccattt

SEQ ID NO: 10369 - DNA, 316 bp, Homo sapiens
cgcacttacgcggagcggtaatgtgaggaagcctcccgccaaacagatgagggaggaggaggaggggagaggccggagagagaagcggctttcgggaaggaaagtgtgatctaggaggtggaatagtcctctccaaactttgacctgagaatgaccctctatttggatttggattacacaaagtttaacgttttttggaaaaatcctacctaggtaatgtgtagttctcaatgcatcatgtcaggcagcttatgatgccaatttgtcccatggccttaaattccacaacctcatcatctaccacctttggtgcttt

SEQ ID NO: 10370 - DNA, 494 bp, Homo sapiens
cttattgatataaatcatactgttccttgattgtcaactagcattttaacgaattccctaaattccaccaatagaattctcaatcttattggtcctacatgcctcaaagaattaaactgaaagaaaaagttctttcggcaacaccaatatacaaaaatacagtgaaaacaggcaaaaagatgataccccctccccatttgcaaaaccaaggtgactattcatggtaggtgatgacaaagacagaggtgtaaagacaaaacccagaggtgttgtaatttagagggaagactattgttcaaatacaatgagacctttccaggagaccactcaccatttcacagaatatccctaagcttttttgacaaatgacctttcagaccaggtccagaaagtgtctttagctgaaatttcatataaagaatattccacctgttaaataagcatcttggtttactagtggccatcaatacaggtttcactattcaagacagcta

SEQ ID NO: 10371 - DNA, 334 bp, Homo sapiens
tttaaatatttaagataaatacatttatgaatgacaaatctgtgggtgatttaaccatggcaccatatccaagggattaaccttaatgcaattttcctgttaattgtcctaagctttttactaatccattttccctgtgggttagtaatggcaacatgctgcttacagatattcccggggaaaaacatccagacaccagcaaacaaagaaatgttgatttctcttttgtttgctctgaaagtaaaataattatttactttaattaacatggaaaatattgtttaaattctgtacgaacctaaacaagataccgttgcagggcttgatttcacag

SEQ ID NO: 10372 - DNA, 318 bp, Homo sapiens
cccgcagccttgctccctggctccaaacccaccaagaatgccccctgggtcattcatccatgtccttctcctcccaggagtaacataacactctgaaagcagagaccaccttccccacctcctagcccagaacctcccaggggctcagcaaagagttgcccaaaacttaaccagtcccagacctgcagccgccaaaccaccaggatggctctccacaaatctttccaaggctctcccagaaaccccaactgtggcccaaagcccagttctcttcactcatttctagtctctagagcaattcaaagaataatgatcaca

SEQ ID NO: 10373 - DNA, 201 bp, Homo sapiens
gggtaacattaatgaaagtaagaatgaagttttaagcatgaaacagtaactataaaaacaaactgctacatggagactcactaatatagctttatattgttttcattttgatagtgggtttaaaatctgtgttcagaactatagaaatatccagagtcaaaaaatatttatctcaaggtctctttctaaaagaatgaattt

SEQ ID NO: 10374 - DNA, 323 bp, Homo sapiens
gtttgtgtgacttttcagcaagaaatctgcttctaaaattctcactatttgtgagggttggagggtaagtaaccagatctgtttgaaattagcttatgtgcttgcattaaggcttttgtaaatattttatgccatttaagttcacagtagaaatggcctaagtatctttttagtagattttagtagaagagtaatccataaaatgtattattaacatgtactcaaattgagcaggcatctttctttgacacttagataacagtcatgagttctatggtttttttcttgtcattgttaaaattttctcttttaataagataata

SEQ ID NO: 10375 - DNA, 72 bp, Homo sapiens
gtcatcttgtagatcctggaatccatttcccatctgttctatgttcccattcaccaaggcggtcactctgtc

SEQ ID NO: 10376 - DNA, 363 bp, Homo sapiens
gcaaaagctattttgatgatgaaagggggtccccgttgagctggccatctagtgcagtgtgctctcagattccatgtttgttgattgtgtgtcttcacaagcccctctctggtgctgaattggatttgaattcttggtgagaggcctcagcatctccttgggctggtctgggccagtaaaaatagctgcctgacatgtttatatattatcatggtcagtagttcaatgaaatttgtacatttttggtaacattggtatacatgatgcccctggacttccttttctgtctggtagtttgtgactctaagatttccactgttatgtgtgttaatttatgaaaataaatttttttgaaaggttttc

SEQ ID NO: 10377 - DNA, 266 bp, Homo sapiens
ggtcgactggatcctcatctcttaccttacatagaaattaactcaagatggaacaaaaacttaaatctaagacctgaaaccacacagattctagaagataaaattggaaaaagtcttctagacattggcttaggcaaagacttcatgaccaggaacccaaaagcaaatgcaacaaaaacaaagatagacatatgggactcaattaaactaaaaagcttctgcacaacaaaagagatcatcagcagagttaacagataaccacagag

SEQ ID NO: 10378 - DNA, 462 bp, Homo sapiens
tttttttttttttttgagctgtgagcataatttattcatgtacttgcatagaaatttgttatacagacattaggaaaaagtataagtgctccctgcaaatattcaattttaggaaaatagtaacaaaaatagcttgagaaaattaatatcatttaaattcgacaatgtacaatgttcccatttacagatttgtgtgagcacaagaagctcctgcatggtagatccctgttctgaagatcgactcgggtccattttagaggcctctggttctctcagccacagcctagattcttcactgctgatgatctttggttatgcttgcttttttttccccacaattcttctttcacacgttccctaacaagaaagggttcagttcaaacactgaaaattgagcttctccacagcaatatccataaacctatgacagttgcaaattcatagttccaaaggctttgtcga

SEQ ID NO: 10379 - DNA, 1022 bp, Homo sapiens
  misc_feature (1)...(1022): n = a,t,c or g
tttatgaagccataagtttttaatgaaaaaaaatgtatgccacagtgtctatatattcatctgaagagtacaaagatggagttctgagaaaaaagggtttatcactatagaaaataaatctggttcttaaattatgttcaaagcaaacattaaaacagtaatgtctcatacactgaaataaagcaattagaggtaataaattataaatacagtagttcaaatattgttttaagcattagtttttctaaacaagttaaattcaaaacattttaaatctgttatattttttcaaagggatgtacaaatgaaagccttcatagaaatctaaaacgataccaccttgtggntcttcatatagaatatgctgaaccttgaccatttttgatttataacatactttggttaatacattatgttccatatgcctttatatttgggaggaatcagattgtgatttgtagcctttacatgcagtttacccaaaccttcttcacatccaggtcttgcttgattctctggagaaggttttgtcagactcataattaaaatgatgcaaactgtaaatgacttcttcagaactgaaaacttcttttttttttaaataaagtgcttttaaattcaaatatatgttgccctaaagaaaactgaaatatactttaaccctgaaatctccgtatcttgacacacacattttaacggaaaaaaaaaaaatcagttttaggccattcatgtccttcaagagttcagattggatctaaattgggttttgcatcatcatcgtgctcatgtttatacatgaaggttaaaagaaaaagggcaacatccaaggatgaccaataggcagtatgcgacgtgacagctgaccaatagcggctctccacaaggccttctctgagttcaaaatcaatcctgtgatccaactccaatgcaggaatcgagggaagccaggaactgctatgtgggaaggggtctgtgtccctacgggtgggtaggcaggaagggtgagggcaactgggcttctt

SEQ ID NO: 10380 - DNA, 361 bp, Homo sapiens
acttggtgttgggatttgttgtgaggtttgctgacaccttgaccatttttcactggctggaaatgaaaggaacttcccacttgctctttgaaggcaattccattctctccagggtccttatttccttcccatattctctcacactcccaaacttcttgaagaagggagcaaactttggccacgaggaaggagtggagctgaaataagagagtccagggtcttggaggtgaagggggaacggccaggtcctctaagtccaatcttctttgctacctcccccctcttctcgctttgcccaagaccacacacctgcctctggacttgacactgcacctgcactgttgaatccacctttcctggg

SEQ ID NO: 10381 - DNA, 175 bp, Homo sapiens
gggtagaagagtatgcctctgagaattttattagtttattcttgtggagaataccaagaaaatgtgtatttgcccattgctaaatatgatatatgccattttgtatttatttgtcccaagtgtctttttgtaagaggagaataaacaataaggaattactgaaaaaaaaaaaaaa

SEQ ID NO: 10382 - DNA, 199 bp, Homo sapiens
atgatggggtgagtgctttggcgggagtcagggcagagcaggtagcaggtaatcggaatgagttagggtggagcaggtgatcagaatgagttagggtggagcaggtgatcagaatgagttagggtggggtaggtaatggaaaaaggttgctttatgaggaagttaagtttaaaagtagaaggccaagaattgaacatac

SEQ ID NO: 10383 - DNA, 187 bp, Homo sapiens
gatcaagaaataaacataaacatctcagaatgctccttcattaccagagtcactacctgattatgtcttaatgggttacataatgacagagggtatctcatatatgtgcttttccaaacataaaataactttttgttttgtttgattgaaaaaaaatttagttcagaaataccacactattaatggg

SEQ ID NO: 10384 - DNA, 336 bp, Homo sapiens
ttcaactttaggaaaagtatgtctgtgtctgtgatcgtagtaccccaaccagagttcgttttgttttctaatttctcccacttagtccatcctctggcttctggatcaaggctctggatattcaaaacaaacaagtaaattacagagtaggtggggcaaactcgctgttagtgcaaggagtcagttcacaaggttttgcataagtatattccattccgaaagaagtaaagctcacaaaaaactccttaacaaggcctttcattctttgaaggagaggagtatggtataccgtgtgacaatcaccaataagaaacctcccaaccctcccttttaaaa

SEQ ID NO: 10385 - DNA, 320 bp, Homo sapiens
ctcaaacttgggctcaagtggtcctgcctctacaggtgcacaccacttcacctggcaaaatctattttcatttccatttataaaacaatattttattttgtggcagtcttaaaacagcattttatactggatatttgcattaaaaattcaattggccaactaaactcttaacttcttcaaggcagtaatgtgttttttactttctctgtatcctccaagtgctaagtactgtgggaatgtatgctaacggctgtgtcaagtatattaacataaaagaaagatacaggagaaatatttgtataaaataatggtatactttg

SEQ ID NO: 10386 - DNA, 3884 bp, Homo sapiens
  misc_feature (1)...(3884): n = a,t,c or g
ggcacgaggccagccgaatccaagccgtgtgtactgcgtgctcagcactgcccgacagtcctagctaaacttcgccaactccgctgcctttgccgccaccatgcccaaaacgatcagtgtgcgtgtgaccaccatggatgcagagctggagtttgccatccagcccaacaccaccgggaagcagctatttgaccaggtggtgaaaactattggcttgagggaagtttggttctttggtctgcagtaccaggacactaaaggtttctccacctggctgaaactcaataagaaggtgactgcccaggatgtgcggaaggaaagccccctgctctttaagttccgtgccaagttctaccctgaggatgtgtccgaggaattgattcaggacatcactcagcgcctgttctttctgcaagtgaaagagggcattctcaatgatgatatttactgccccgcctgagaccgctgtgctgctggcctcgtatgctgtccagtctaagtatggcgacttcaataaggaagtgcataagtctggctacctggccggagacaagttgctcccgcagagagtcctggaacagcacaaactcaacaaggaccagtgggaggagcggatccaggtgtggcatgaggaacaccgtggcatgctcagggaggatgctgtcctggaatatctgaagattgctcaagatctggagatgtatggtgtgaactacttcagcatcaagaacaagaaaggctcagagctgtggctgggggtggatgccctgggtctcaacatctatgagcagaatgacagactaactcccaagataggcttcccctggaagtgaaatcaggaacatctctttcaatgataagaaatttgtcatcaagcccattgacaaaaaagccccggacttcgtcttctatgctccccggctgcggattaacaagcggatcttggccttgtgcatggggaaccatgaactatacatgcgccgtcgcaagcctgataccattgaggtgcagcagatgaaggcacaggcccgggaggagaagcaccagaagcagatggagcgtgctatgctggaaaatgagaagaagaagcgtgaaatggcagagaaggagaaagagaagattgaacgggagaaggaggagctgatggagaggctgaagcagatcgaggaacagactaagaaggctcagcaagaactggaagaacagacccgtagggctctggaacttgagcaggaacggaagcgtgcccagagcgaggctgaaaagctggccaaggagcgtcaagaagctgaagaggccaaggaggccttgctgcaggcctcccgggaccagaaaaagactcaggaacagctggccttggaaatggcagagctgacagctcgaatctcccagctggagatggcccgacagaagaaggagagtgaggctgtggagtggcagcagaaggcccagatggtacaggaagacttggagaagacccgtgctgagctgaagactgccatgagtacacctcatgtggcagagcctgctgagaatgagcaggatgagcaggatgagaatggggcagaggctagtgctgacctacgggctgatgctatggccaaggaccgcagtgaggaggaacgtaccactgaggcagagaagaatgagcgtgtgcagaagcacctgaaggccctcacttcggagctggccaatgccagagatgagtccaagaagactgccaatgacatgatccatgctgagaacatgcgactgggccgagacaaatacaagaccctgcgccagatccggcagggcaacaccaagcagcgcattgacgaatttgagtctatgtaatgggcacccagcctctagggacccctcctccctttttccttgtccccacactcctacacctaactcacctaactcatactgtgctggagccactaactagagcagccctggagtcatgccaagcatttaatgtagccatgggaccaaacctagccccttagcccccacccacttccctgggcaaatgaatggctcactatggtgccaatggaacctcctttctcttctctgttccattgaatctgtatggctagaatatcctacttctccagcctagaggtactttccacttgattttgcaaatgcccttacacttactgttgtcctatgggagtcaagtgtggagtaggttggaagctagctcccctcctctcccctccactgtcttcttcaggtcctgagattacacggtggagtgtatgcggtctaggaatgagacaggacctagatatcttctccagggatgtcaactgacctaaaatttgccctcccatcccgtttagagttatttaggctttgtaacgattgggggataaaaagatgttcagtcatttttgtttctacctcccagatcggatctgttgcaaactcagcctcaataagccttgtcgttgactttagggactcaatttctccccagggtggatgggggaaatggtgccttcaagaccttcaccaaacatactagaagggcattggccattctattgtggcaaggctgagtagaagatcctaccccaattccttgtaggagtataggccggtctaaagtgagctctatgggcagatctaccccttacttattattccagatctgcagtcacttcgtgggatctgcccctccctgcttcaatacccaaatcctctccagctataacagtagggatgagtacccaaaaggttcagccagccccatcaggactcttgtgaaaagagaggatatgttcacacctagcgtcagtattttccctgctaggggttttaggtctcttcccctctcagagctacttgggccatagctcctgctccacagccatcccagccttggcatctagagcttgatgccagtaggctctaactagggagtgagtgcaaaaagctgagtatggtgagagaagcctgtgccctgatccaagtttactcaaacctctcaggtgaccaaaatccccttctcatcactcccctcaaagagggtgactggggccctgcctctgtttgacaaacctctaacccaggtcttgacaccagctgttctgtcccttgggagctgtaaaccagagagctggctgggggattctggcctagtcccttccacacccccaccccttgctctcaacccaggagcatccacctccttctctgtctcatgtgtgctcttcttctttctacagtattatgtactctactgatatctaaatattgatttctgccttccttggntaatgcaccattagaagatattagtcttggggcaggatgattttggcctcattactttaccacccccacacctggaaagcatatactatattacaaaatgacattttgccaaaattattaatataagaagctttcagtattagtgatgtcatctgtcactataggtcatacaatccattcttaaagtacttgttatttgtttttattattactgtttgtcttctccccagggttcagtccctcaaggggccatcctgtcccaccatggcaggtgcccccctaggcttagagcctccctcaattccccctgggccaccaccccccactctgtggcctgaccttgaggagtcttgtgtggcattgcctgtgaattagctcacttggtgatatgtcctatattggctaaattgaaacctggaattgtggggcaatctattaatagctgccttaaagtcagtaacttacccttagggaggctgggggaaaaggttagattttgtattcaggggttttttgtgtactttttgggtttttaaaaaattgtttttggaggggtttatgctcaatccatgttctatttcagtgccaataaaatttaggtgacttca

SEQ ID NO: 10387 - DNA, 211 bp, Homo sapiens
gcaaaattctactttttttagaatctcatgggagagatgagggggaaaaataataagcatttgacatcttttaaataagtctttgagctctctttataattttctcttgagtatttgctcttcctttgtaaaactatggaaacacaaaatacatatgatgctcacaatgctctagcattcaaaaattccagagtagttttaatcattatct

SEQ ID NO: 10388 - DNA, 5814 bp, Homo sapiens
tggagggctactacagaccgagacaacacttggactcagttcatatcagcagaaaagtatatctctctaccgggggaattgcaggcccatacgatttgagccaccaatgctggatttccatgaacaaccagttggaatgccaaaaatggaaaaagtctacttacataatcctagttctgaagaaacgattactttagtatcaatatctgctacaacatcacattttcatgcatcattttttcaaaataggaaaattcttccaggaggaaatacatcatttgatgtagtttttcttgcaagagtagtaggaaatgtagaaaatactttatttattaatacatctaatcatggggtatttacttaccaggtatttggtgttggagttccaaatccatatcgattgaggccgttccttggggccagagtccctgtgaatagcagtttctcacctataataaacatccacaatcctcacagtgagcctttacaggttgtagaaatgtactctagtggaggagaccttcacctagaactcccaacgggtcaacaaggaggtaccagaaaactgtgggaaattcctccttatgaaaccaagggagtgatgagagccagtttttcatctagagaagcagataatcacacagccttcataagaataaagactaatgcttcagacagcacagagtttatcattcttcctgttgaggttgaagttacaacagctcctggaatttattcctcaactgaaatgttagattttggtacactaagaacacaagatctaccaaaagttttaaaccttcatttattaaattcaggaacaaaagatgtaccaataacaagtgttcgacctacaccacaaaaatgatgctataacggtacactttaaaccaattacattaaaagcatcaggaaagtaaatacaccaaggttgcaagcattagttttgatgcatcgaaggcaaaaaagccatctcagttttctgggaaaataacagttaaagcaaaggaaaagagttattctaaacttgaaataccatatcaagcagaagttttagatggttatttgggatttgatcatgctgcaacattatttcacatccgagacagccctgctgatcctgtggaaaggccaatttaccttactaacactttcagttttgcgatcctcattcacgatgtgttgctaccagaagaagccaaaacaatgtttaaagttcacaacttcagcaaaccagtcttaattcttcctaatgaatcaggatacatttttaccctgctttttatgccttccacatcatccatgcacattgataacaacattttacttattaccaatgcttctaaatttcatttacccgtgcgggtatacacaggctttttagattactttgtattgccccccaaaatagaggaacgtttcatagattttggagtactgagtgctacagaagcaagtaatattttatttgcaattataaacagcaatccaattgagttggctataaaaagttggcatatcataggagacggtttatcaatagaacttgtagctgtggaaagaggcaatagaactacaataatttcaagcctgccagagtttgaaaaatcctctttatcagatcaatcatcggtaacattagcttcaggctattttgcagtcttcagagtcaaacttactgcaaaaaaattagaggggattcatgatggagccatccagatcacaacagactatgagatcctgacaatccctgtgaagggctgtgattgcagtaggctcactgacctgcttccctaagcacgtggttcttccaccttcctttccagggaaaatagttcatcaaagtttaaatattatgaattccttctcacagaaggtaaaaatacagcaaatacgatctttgtcagaagatgtgcgattttactataaacgattacggggcaataaggaagacttggagccaggaaaaaaatcaaagattgcaaacatttattttgatcctggactacagtgtggggatcattgctatgttggcttgccttttctatccaaatctgaacccaaagtgcagcctggtgtagccatgcaggaagatatgtgggatgctgactgggatttgcatcaaagcctgttcaagggatggacaggaataaaggaaaattcaggtcatagattgagtgctatatttgaagtaaatacagaccttcaaaaaaatataatatcaaaaatcactgctgagctctcctggccttccatacttagctcaccccggcacttgaaatttccacttactaatacaaactgctcctcagaagaagagattactttagaaaatcctgcagatgttcctgtctatgttcagtttattcctctggctttatattccaacccttcagtgtttgtagataagttagtatcaaggtttaacttgagtaaggtggcaaagatagatttgagaacactagaatttcaagtcttcagaaacagtgctcatccactgcagagttcaacaggatttatggagggcctctctcgacatttaattttaaacctaattttaaaacctggagaaaagaaatctgtcaaagtaaagtttactccagttcacaacagaactgtttcttcacttatcatagtcagaaataacctgactgtgatggatgctgtgatggtccaaggacaaggaacaactgagaacttgagggtggcaggcaagcttccaggtccaggaagctccttacgctttaaaatcacggaagcattgttaaaagattgtacagatagtttaaaactaagagaaccaaatttcacattgaaaagaacatttaaggtagagaatacaggacaacttcaaattcacatagaaaccattgaaatcagtggatactcatgtgaaggatatggctttaaagttgttaattgtcaagagtttactctaagtgccaatgcttctagagatataatcatattgtttactcctgattttacagcttctagagttattcgggaactgaagtttataacaaccagtggctctgagtttgtatttatattgaatgcatcccttccttaccatatgttagcaacctgtgcagaagcccctacccagacctaactgggaactggctctgtatatcatcatctcaggaataatgagtgcactgtttcttttggtcattggaacagcctatttggaagctcaaggaatatgggagccatttcgaaggcggctatcctttgaggcctcgaacccgcccttcgatgtgggaaggccatttgatctcaggagaatcgttggtatttcatctgaaggaaacttgaacacactcagctgtgaccccggtcacagtagggggttctgtggagcaggcggttcatcatcccgacccagtgccgggagtcataagcagtgtggcccatcggtccacccacacagcagtcacagcaatagaaactcagctgacgtggaaaacgtcagagccaaaaacagttcaagtacctctagtaggacttctgctcaagcagcttcttcacagtctgctaacaaaacaagcccccttgtcttagattcgaacacagtgactcaaggtcatacagcgggcagaaagtccaaaggggcaaagcagagccagcacggcagccagcaccatgcccacagcccgctggagcagcaccctcagcctcctctgccaccgccagtgcctcagccccaggagccgcagcctgaaaggctgtctcccgcccccctcgcacacccttcccacccagaacgtgccagcagcgcgaggcacagttccgaggactcggacatcaccagtctcatagaagccatggacaaagactttgaccaccatgactccccagccctagaagtgtttacagagcagcctccatcgccattgccaaaaagcaaagggaaaggaaaacctcttcagcgcaaggtgaaaccacctaagaagcaagaggaaaaggagaagaagggaaagggaaagccacaggaagatgagctgaaggactctttggctgatgatgatagctcctccaccaccacagagacctccaaccctgacacagaaccgctcctcaaggaggatacagaaaagcaaaagggaaaacaagccatgcctgaaaaacatgaaagtgaaatgtctcaagtgaagcaaaaaagcaaaaaactcttaaatattaagaaagaaatcccaacagatgtgaaacccagttcattagaactaccatatactccccctttggaaagtaagcaacgtagaaatctcccaagcaagattcctcttccaactgcaatgacaagtggatccaaatcacgaaatgcccagaaaacaaaaggtacaagtaagttagtggataacagaccacctggccctagcaaaattcctcccgaatagtcaagaattaggcaacaccagtagctcagagggtgaaaaagactctcctccaccggagtggggattccgttccagttcacaaacctggcagctctactgatagtctttataaactttctctgcaaaccctcaacgcagacattttcttaaaacaacgccagacctcaccgacacctgcttccccgtctcccccagctgccccctgcccctttgtggcccggggcagctacagcagcatcgtcaacagcagctccagcagtgaccctaaaataaaacagccaaatggaagcaaacacaagttgacaaaggcagcctcgctcccgggcaagaacggcaaccccacttttgctgcagtcacggctggctacgacaagagcccaggtgggaatggctttgctaaagtttcttcaaacaaaacaggtttctccagcagccttggcatttcacacgctcctgttgacagcgatggctcagacagctcgggtttgtggagtcccgtcagcaacccaagcagccctgacttcactcccctcaattcgttctccgcctttggaaactcttttaatctaactggtgttttcagcaaactcggattatctcgatcgtgcaatcaggcctcacagaggagctggaacgagtttaatagtggcccttcatacctttgggagtcgccagcgacagatcccagtccttcctggccagccagttccggctccccgacccacacagccacatcggtcctcggtaacaccagcggcctgtggtccaccactccattcagcagctccatttggtccagcaaccttagcagcgcccttcccttcaccactccagcaaacacgctggcaagcatcggcctcatgggcacagaaaactcccctgctcctcacgctccctccacctccagtccagctgacgacttgggacagacctacaacccgtggcggatatggagccccacgattggaagaagaagctcggacccttggtctaagttcgcactttcctcacgagaattaaattaagcaaaaaacaaacaaacatagtgggccctcgtctagatcatgatgtgccagtttctgagacatctttttaaggctcttactgcagctcccctccccaccctcctcttctttgcaaaacagacccaagcagggcaggctcagaccactcgcttctttcagatctttcttgcaattatgataacatgagatttgctgttgtgcttttagagaaaagtctggactcagccacaaactctaataagacctgtacatctgagaacctttcccgttactgcgttttcaccacctgtcttccccatgctttatttatctgtatgaacacagatttgacattacagctaaggaaataatttgagttgattcagaaatcctggcatgtgacaatt

SEQ ID NO: 10389 - DNA, 414 bp, Homo sapiens
ttgtagattgaattttctttatttacaaaacaataaaggaggtacagaagcattaagtgatttgcttgaggctgcttcactaacaggtgccagagttaagattcagacctcgtccaattagtcctagagccagagcttcttgcactaccctgcactgccctctgttgcctctgtccttgggtcatctttgtatgagagctgaaacaaggaggcccagggtcaccttatttgaccttagcttggaacgtgcataaggagtgacagatttttcactactgtgtgtatgtccatgaatcaccttgaaagctccacaagtattaatttggagattacaaacacattttagcaagtaagcaaatttgcaaatataggatccacaaataatgaggatcaactgtatttgtaagtgactgc

SEQ ID NO: 10390 - DNA, 303 bp, Homo sapiens
ttttttttcagagacagtagagctttattgtgtaaaagctgagttggtagaagtatgaaacggcaacaatgtttagcccagcccatctatttacaatatataggggttggggtttcccatacacatctgtaccacccgccctcagcctcaagatttatccctatcagcaacattcatttcctggatttgtcactggccacaaaagacacaactcttcagggtgatatcccatcacataaacctacatacacattatctcctagtccctctagctctcttcccagtctttttttttttttttga

SEQ ID NO: 10391 - DNA, 748 bp, Homo sapiens
  misc_feature (1)...(748): n = a,t,c or g
tttttcctggttcgtaaaactcatttattcaacaaagcagtacaagcctccccttcaatcaggacctgcctgcaggggtgggctacttcagtgtcttcagccaatgggagctagagggtttaatactttagtccacttcccttcatctctggccccatcgacaacatggggaaggggagtgagggcctggtagaagggtactaaggccccttatttcgttcgctggtagaactggaagactgctttctcctgctcataggtctcgatggagccgggtcgtagtcgtcggatttcagcaatggcatctcctgcagccaagccccgctccttcaccaggtaacaggccagcatggtgccagtgcggccaaagcccagagcacagtgcactcccacagcctctccccgtgcgttggcctcgtccacgatctgcacgaagcggtcgatctggtcgggggccggcgggcagaagtcggggatgcgcatggcggtgcagggtgaggccgngcngcactgtcgctgtgagggggcccgcgctccgtcagggacaccaggtgccgcacgcccaggtccaacaggaactggtagtgggcggggagccgcggcagcgccagtcccncagccggcccggaagcacccaggagaagttggtggctgcaccgcccatcgctgggaaagggcacaggacagcgggtcatgggggccgaggctggccagccnccgtccgcccacgcgtcccngtcgcccgctc

SEQ ID NO: 10392 - DNA, 425 bp, Homo sapiens
ccaccttgtgattgttgtttttgttctctgaagtgaacgtactcttttatggtagtgttaaagtcttataataagtacttatggagtaagtaaatgtgtaagacacaagagataacagatgaataagctaagtttgtatcctcaagaagtttaaagagtgaagggagtgaagaacttagtaagacaaagatgaatgtttagaacagtgcctggcacttagtgatgttagaaatgaaccttgaaggttggcaaagattttgatagacagttttcttttgattgtgacctactgagaggtcagtataggcagaaagcacagggcacacagagaagacaagttgaaaggtatagggctttggtggcaccatgggaatgggatatgttgaagacatagtattataggtacagatggtaaatgtaatgtg

SEQ ID NO: 10393 - DNA, 2238 bp, Homo sapiens
ggatgaagatgagacgctacaagctctttctcatgttctgtatggccggcctgtgcctcatctccttcctgcacttcttcaagaccctgtcctatgtcaccttcccccgagaactggcctccctcagccctaacctggtgtccagctttttctggaacaatgccccggtcacgccccaggccagccccgagccaggaggccctggacctgctgcgtaccccactctactcccactcgcccctgctgcagccgctgccgcccagcaaggcggccgaggagctccaccgggtggacttggtgctgcccgaggacaccaccgagtatttcgtgcgcaccaaggccggcggcgtctgcttcaaacccggcaccaagatgctggagaggccgcccccgggacggccggaggagaagcctgagggggccaacggctcctcggcccggcggccaccccggtacctcctgagcgcccgggagcgcacggggggccgaggcgcccggcgcaagtgggtggagtgcgtgtgcctgcccggctggcacggacccagctgcggcgtgcccactgtggtgcagtactccaacctgcccaccaaggagcggctggtgcccagggaggctgccgcgccgcgtcatcaacgccatcaacgtcaaccacgagttcgacctgctggacgtgcgcttccacgagctgggcgacgtggtggacgcctttgtggtgtgcgagtccaacttcacggcttatggggagccgcggccgctcaagttccgggagatgctgaccaatggcaccttcgagtacatccgccacaaggtgctctatgtcttcctggaccacttcccgcccggcggccggcaggacggctggatcgccgacgactacctgcgcaccttcctcacccaggacggcgtctcgcggctgcgcaacctgcggcccgacgacgtcttcatcattgacgatgcggacgagatcccggcccgtgacggcgtccttttcctcaagctctacgatggctggaccgagcccttcgccttccacatgcgcacgtcgctctacggcttcttctggaagcagccgggcaccctggaggtggtgtcaggctgcacggtggacatgctgcaggcagtgtatgggctggacggcatccgcctgcgccgccgccagtactacaccatgcccaacttcagacagtatgagaaccgcaccggccacatcctggtgcagtggtcgctgggcagccccctgcacttcgccggctggcactgctcctggtgcttcacgcccgagggcatctacttcaagctcgtgtccgcccagaatggcgacttcccacgctggggtgactacgaggacaagcgggacctgaactacatccgcggcctgatccgcaccgggggctggttcgacggcacgcagcaggagtacccgcctgcagaccccagcgagcacatgtatgcgcccaagtacctgctgaagaactacgaccggttccactacctgctggacaacccctaccaggagcccaggagcacggcggcgggcgggtggcgccacaggggtcccgagggaaggccgcccgcccggggcaaactggacgaggcggaagtctagagctgcatgatctgatagggtttgtgacagggcgggggtggcggcggcccctagcgctatctccctgcctcctgccggctcccttggttcttgaggggaccaggagtgggtggggagtgggggtgggggtagggtttcccctactgaagcccttgtgaatcaagggtcaggcctttgagctcagaaaatatccctcctgttgggagagggcgcaggccgtgacgtctgggtggcccttatgactgccaagactgctgtggccaggaggtgccactggagtgtgcgtggtggtccctgggtagcgggggagggtaggcaggattggggaagagagcctgcaggatctcaccaggcagcctctggggggtggccaggccgggaaaaagcccaccatttggcatccctgggccttgggctccgtgtgggagaccggcctgccaggaggacccagggctctgtaagtagatgcatttgggtccaggaggaagcgtggacacctcgtagggaagagatgaaaaagccacatcctaccaagaggaggtgctgagggatgctttgcagtgtagtcagaagtgctgggccagatggagacagaactccaccccctgccgcaaaggacaggacctggctgc

SEQ ID NO: 10394 - DNA, 1139 bp, Homo sapiens
acatgcggggagccttccccatacccctcagcccccacagcaccagctccacccaccctctccagcctgagctcctgcacacaccccagctgccctcaccctgagctcagtgccctccttgctgaagggaacggctagtacaggaggagctggggcccaggggtctgactccatcaccaaggcaaagcccagagtggttgggctggcgtgagtgcaggctgggccctggtctgaaatgagtgtctttattgcttgtaccgtacaaatatgaagacgaggagaaaggccagtagggacggagaactgtcagataacaacatcgcacacagaggaaaaagaccctcacccacccgaaccaaccccacccctccccaccctgccatgaactgtgtagtacaggagatgggatagggagagcaaacccacaaaagctaaactccaaacacccagaggtgttgctacagggaggggaggcgtgggcagggcagctcatggatcacagtggggctcctcccactaggtcagcacccctcccccacaggatgaaatgctcgggccagggatggggcccaagcccacacaccatgcacactggaggacacgctgccctcacacaaacacacatgcacacacacccacgtgtgcctgcgtcccgccgacacacgcagtccgaggcacgcacaggagtcccacagcactgacatggacgtgcactcatgttcaaccttaaggctgcagaacgtggggccctggggagagggggaagtgggtccgctggtccagctccagtaagcccaggctgtcatagcggtcagggggtgtgattgtgatggactgggcggtaaattcatcatcgaagtaccttgtgtcgacctcggacgtgacctgaggtttgaagggtggcaggagcttcttctggaccacgtcctgccagttgatgctgaggaagaacctgtgctccatgacctccttggcatcgctgggccccccaccaagcctctgcttggggtccttcttaagcagcccagcaagcagggacttggcctcggggctgagcgtgcgcgggaagcggatctcttccatgaggatgagctcgaagaggcgctcgtggtcctggttgtagaagggcaggcggtcgc

SEQ ID NO: 10395 - DNA, 116 bp, Homo sapiens
gataaaatgcaaacacaagcctgtggtacacattctgtatggttatttaagtagtttaggggtattttcaagtcaagaacagactacttatgtataagtaagcacagtctatattg

SEQ ID NO: 10396 - DNA, 70 bp, Homo sapiens
ggtaattgccactgccctttaaaataggtacatttccataatgcccccctaaattttacttaacccacaa

SEQ ID NO: 10397 - DNA, 307 bp, Homo sapiens
ttctggatctttgaccaaggtgatgtcagcttatttctagggaaggtgttgagctcttatacatgaaaatggatataggctattctctgggatgagtgtcatttcaatgctttataaatccatgaagctgcttgtctcataaagtagaactgatacaaattttggttggatatatagagaattttataaatgtattgccttagaatttctgggtggagacccaactacaatgacattgtcatgcaagaactataaagataattagagttaaaagttgtttaaattgtgcccttaaatacagcagaac

SEQ ID NO: 10398 - DNA, 457 bp, Homo sapiens
  misc_feature (1)...(457): n = a,t,c or g
gaggcttctgcccgggtagagaacagcccccaggtggatgggagccccccagggctcgagggtctgctggggggcattggggagaaaggggtgcaccgacctgccccacgcaaccatgagcagcggctggagcacatcatgaggcgagcggcccgggaggaacagcctgagaaggacttctttggacgtgtggtcgtcaggagcacagcagtcccgagtgcaggggacacggccccggagcaggactcagtggagcggcgcatgggcacagcggtgggcaggagcgaggtctggttccgcttcaacgagggtgtctccaacgccgtgcggcgcagctngtacatcagggacttgctctagttctctgagccgcggacatgccctcgcattgcttcccgcagagtgcagagacaggaagctggagatgtctttataaagtcacacctttacagactgt

SEQ ID NO: 10399 - DNA, 677 bp, Homo sapiens
atgaggttcacatattttattgaattaccattctttgacatcagatctttaccagacattaacatttcaatgttatgcttttccccagtgctaccagtggttgaaagaaagaattgtaagtgaagaagggagaaaacagcaaaacaagctaaaagacctttccccaattgcggagcgtctgggatgcacactacctcagctagctgttggtaagaaaattactaagctatggggtggtagagggacttctgctgagatcatagttttctattgctgaccacacccttaccatgataaaatgtctattgcagggacagatgatctctgaagcataaactcctgctaaatataaagtgagttatttgaggttccccagaattttctacatgatagcaaatttttcttacttctttctccttgctcttataacatagtttgaatgagaacatgtcagtgataacatacactatcacagatgtcaggggtgaactgtgtagtgacatccatttcttctggctcaaatttctgtctgttgaaaactaaaccagggttggtgagaagataagatacagggctgtgacaggcccaaggctactgccacatgaaaagctgatcctagagaaatagctacaccctgaaagttcttgaaggccataaacgttgttcttctaatgctg

SEQ ID NO: 10400 - DNA, 315 bp, Homo sapiens
caaaaaagtggtgcagtttttgatgaaattgtagagaactgtggtggtatcatggatacagaaatgtctgaagatatagaccacaacttaactcctacccttgacagcatgtcttatggaatgccgaatcaaacaggatctgaaaattcattgctggatgaagatgattattttttgaactctggggatcttgcaggaattccagtcgttggtagtgacaatgaggatgaacaggattttagttcaaaggacaatcttgtttcttcaattcatactgatgatagcttggaagtagagagaagagtcacacagcat

SEQ ID NO: 10401 - DNA, 290 bp, Homo sapiens
  misc_feature (1)...(290): n = a,t,c or g
cccggtaaccgaggcggcaaggaggccaggtagtcccggcacctctcactctgcagagaccagcggcttcgtgggaggcctgtgggtcacacgtaggggctagagccagcctgcatcctgcccaccgggctccacttggagatcagcaggagggccagtgtgggacccctgctgccacctctcctgggcctgtgtcctttctggaaattaagaaggtgtgctccagagccaagaggagcaataagaaacctcgtgtgccagcttcttaagggtngcagtgcaagacccca

SEQ ID NO: 10402 - DNA, 536 bp, Homo sapiens
  misc_feature (1)...(536): n = a,t,c or g
ggtggtgggctcgggctacagttcaatctcgaatgtcttttgcaggtcgccagaaaaggggttggagggtttctctacagtggctttgccttctaatgccgcccactgggcctcaaaggggtccaactctggagctggggcaggcgctggctcagggggccagggggccccattggggcgagggcgggcctggctcccaggggcactgggtatggcagggggcgggaaggccccagctttcccaagcagagtggcaggctgaggctggagctgggcggctgagcagaaggcgtttgccaccatctgtgagggtgtgatgcccaccacgggcacccggggcatcggtgggtagcccaagcccgggtaggcgggcacaaaagggggctgcatgtgtgggggtggcaggaacacggccacttgggcaggtgcagcgtcaaagggccccacgggggcggggaaaggctgcagggcaggaggcatggtgggcactggggccacngaggctgcttgctgctgttgctgctgctgctgctgct

SEQ ID NO: 10403 - DNA, 605 bp, Homo sapiens
gaggtataaatttttcttttttaaacatcacaatataaaatgttaactggtgatgtagtaaaccaacatgataatttgtcttatttgccttactagcattaccaccatataggcacttttccacgtagtcaaattatgaacagcatttttctataaggcatattccatgcacatcatttacagaaaggtaaattaaaaaatagaaaagattatggagcatgaaatccgcgtgcatgtaatgtaagcatatgttttatatgtatttttctctctgtacagaataataaatatcactatatctgatgcaagtaattcacttccaggattgtgcatattaagcgatcagactaatcccatcattaaattattatcttgcacttatcattaagactccattaccatgtatgtgatatatacaggacatgttccatgtaacatgattttccgctttacaaaatgggtctgatttctgtgtttttacagagctgaacaagtcagcaaagcatctacaaaatgcctctgatttgtataaatacactggtgtgtaaacacaatgaagattttgaagtgggcagtcatttcaacttcagtgagtactattcctt

SEQ ID NO: 10404 - DNA, 485 bp, Homo sapiens
gggagatcgtgtggtaccgggtgacggatggtggcaccatcaagcaaaagatcttcaccttcgacgccatgttctccaccaactactcacacatggagaactaccgcaagcgagaggacctggtgtaccagtccactgtgaggctgcccgaggtccggttctcagacaatggtccctatgagtgccatgtgggcatctacgaccgcgccaccagggagaaggtggtcctggcatcaggcaacatcttcctcaacgtcatggctcctcccacctccattgaagtggtggctgctgacacaccagcccccttcagccgctaccaagcccagaacttcacgctggtctgcatcgtgtctggaggaaaaccagcacccatggtttatttcaaacgagatggggaaccaatcgacgcagtgcccctatcagagccaccagctgcgagctccggccccctacaggacagcaggcccttccgcagccttctg

SEQ ID NO: 10405 - DNA, 750 bp, Homo sapiens
ttttttttttacacagcaattatttttatgtaacaactctaaaaagttcttgacaagttattatgagaaacatttcatctaggagtgatttctaaggcagcatttgagtttccataaaaacagaaccttctgtctcagaaggtatatcaataagaggaccagaatcttctatttccaagtgcattggtttctcctgttcacaactcaggtttgaactgtcgttcatttgaatctcttcctcttccaattccaaagatttatctggggctgaagctaccacttcttcgtcttcattttcatgtagaaagttacaaatcatgttgggtcgataggagaaatcattatcctttatttgcagccattccaccccacctatgttttcttctccttccttcttctctgtcaggagagttcttgtcatgctgagcttcttcattgtatggcatttatattttagcactgttttattattgccttctgtatcagcatgttcaacattttcttcaaatataacacaggtccctagagtgtcttcatactccccagcaaagacacagctgtccacttgcagaatgggcctctcagtgtcaatgcccaaaaccttgcatttattttcacattttgagaggaagtctgaatcaataattcctgataattccaccagaaccaactgctcctcctcttcctcgtcttctccgtcctctggactccgctcgtccgccgccgccgccatggtcccgcggcgcctcc

SEQ ID NO: 10406 - DNA, 493 bp, Homo sapiens
ggaagcctacctagaggaagtgacttcaaaccttattttgaagaatgaaggatttttctctaggtcagaaagagggtcttagctactgtcacatcccgagacaactgagtagtacatactcagtgacctgaaataatagattctctgtctctttttgggtttgtttaaactgcacatttttgtttgtttttctaggtaataaatagcctcgaaatttttgtttaaaatctgacattttgaaccttctccattgttcttgttactggtggagggtgtccaggttcttggcatcttgaacaaagaattggacaaaatgcacaaagcaaggaaagaatgaaacaacaaaagcagagctttattgaaaatgaaagtacactccacagggttggagtggccagagcagccgctcaagggccccagatacagaatcttcttgggtccaaataccccctagaggtttcccattggccacttggtgttcacttcatgtaaa

SEQ ID NO: 10407 - DNA, 448 bp, Homo sapiens
tattgtcaagattaaacaaaatgcgaaacacccaccattaaaaggagacagtgaaaagtgcatataattaaaataggccatgttcaatggccttcatccacaaataaagatgtgctgtccaccaattcctctacacagaatcttgagggacagagattttcatcgcatagtccaaatttcttctttcataggtaaaataattagcctctcagtttttaagtttgtatccaggtgtagtgcacggagttctgttgcagaaagtatagtccactcgtcctctaataattttgtttttctgtctgaagttgaaatattggccggttgaagtttattgcaaggcatacggttgtataatttagttggctagtgtatattatagtggaaagaagcagagttaagtttaaatttccattctcactagtttgtgacctttgccaagttactgaaa

SEQ ID NO: 10408 - DNA, 362 bp, Homo sapiens
gtgtgtgggtgtgtgtgtgtaatgggcctgggaggtgcactgaaagagggaggagccaggggatgattacaaacagacacctgggagatactggaccatctgctcactaaccctcatcaaaccaaacatttccagcaattaacaggtcctgtcacgacgtgactgctctcctcctgacttctctagcccctattttcactgctcacttggcacagtactgttttgtactgttatttaatttgtgagagcccaaatagactacacgatttagaatcacaatatggaattatatatcttggtatggactctagtgcttggcacactgctctgcacacaggtgggattcaataaacttcctaatt

SEQ ID NO: 10409 - DNA, 280 bp, Homo sapiens
atcagtcctttgtactggttggtgagactgggtctggtaaaacaacacagattccacagtggtgtgtggagtacatgcgatcattaccaggacccaagagaggagttgcctgtacccaacccaggagagtggctgcaatgagtgtggctcagagagttgctgatgagatggatgtgatgttgggccaggaggttggttactccattcgatttgaggactgcagtagtgcaaaaaccattcttaagatatgactatggatgtactcgtaagctatgatgat

SEQ ID NO: 10410 - DNA, 506 bp, Homo sapiens
gctcgaccacgtgttgtaccaaagagacatgacgtgcctgtctacaggcgcatgtatgtatattgtaaatatacatctatacatacagactctaactatagactgtagattggtacatgtgcacacatgctacaatatcaaaacatacacctcacttttgtgaatgctagtacttcactttccaagtattcatggcttgtctgtaggcacataggataaggaccctgagaacaggggctggcatctataacccctacattacctctcacatggaaataaagaatatttcccaacttccaaatggaaataaagattacttgggatagggtctaagggagatccttttgggccagcatcttaagctgatagagaaaacatgagatttaaaatgtttgcttctgtttgaaagtagagcacctttaagatttctgaggggtcctgcccagcagagaatgtctcttgacctgcttagggaagggcccctgagatgactgtaacgtcgacgc

SEQ ID NO: 10411 - DNA, 163 bp, Homo sapiens
cgtgtagtctctctaaattatggaaatcagcatgtgaaactgtatcaggtgggataactctgtgcctttctgcttagtggcttgaagtacttgaagaaaaatatgctgttttctttccttggagcctttcagaaatgttttccaaaagtgatacatgcttgtt

SEQ ID NO: 10412 - DNA, 333 bp, Homo sapiens
taaggttctttacttttatttttaaataatgtatcacaaatacgaatattacttgggagtagagaggtaaactacaaaagagagatgcaaatcaatttctctggtgcctatttttaaggggtatgtaagttctaaagcctcaactcagcaactgaaagttgcctgggcatgacagagagagctgggaacaaggtacaggggtcactggtgggaaaattgtcaataaggacagtaacttgaaacaatatcctaaaaattaaagaactgttcaaaataaaccaggggcagtggtgtgtgcctatagtgatgtgatgtgggaggagcatgtgggag

SEQ ID NO: 10413 - DNA, 429 bp, Homo sapiens
  misc_feature (1)...(429): n = a,t,c or g
agaaatttcatttacttgtaatcatgcgttaaaatgggaggcaggtaggtgaagatataatttttagtaaaaactccaatttacattttaagtaattcagtgtattactaaaatactatatatataaacttaaaatacatgggttatcaatttaaaagacaaagtaagtaaaaatacttttagtaggcattcgtggattgtgaacatccaagttatattggtttgtatagaatggcattaagtaaaaattncagctgtataacagtagttttctaaattgagagagtccncattgtaattagagatcactgtgaccaaaatgcttctccttgatttataatgatgtactgtattttgtactgcttatatgaaatttcagcaagattgacgatattataaagatgcttataaagtgtaagtggagacgct

SEQ ID NO: 10414 - DNA, 800 bp, Homo sapiens
ggcacgaggagcccgcttgcacctcggcgatccccgactcccttctttatggcgtcgctcctgtgctgtgggccgaagctggccgcctgcggcatcgtcctcagcgcctggggagtgatcatgttgtaatccacccaccgccacttcaagaagaaatgatatgaagaagtgccggttctccctcccctcttccgcactgtcccgtgatgatgacgcctccagagaggacgataatctgggttcctgggagagatggcttggtcactattcccacccttgcctcgaccacttgtctcaatgtcaccacctcacgccctgttccagataatgctcggaatatttttcaatgtccattccgctgtgttgattgaggacgttcccttcacggagaaagattttgagaatggcccccagaacatatacaacctttacgagcaagtcagctacaactgtttcatcgctgcaggcctttacctcctcctcggaggcttctctttctgccaagttcggctcaataagcgcaaggaatacatggtgcgctagggccccggcgcgtttccccgctccagcccctcctctatttaaagactccctgcaccgtgtcacccaggtcgcgtcccacccttgccggcgccctctgtgggactgggtttcccgggcgagagactgaatcccttctcccatctctggcatccggcccccgtggagagggctgaggctggggggctgttccgtctctccacccttcgctgtgtcccgtatctcaataaagagaatctgctctcttcaaaaaaaaaaaa

SEQ ID NO: 10415 - DNA, 640 bp, Homo sapiens
agcaacccccaatgtaaaactgcttttatctttgaaaattttttgtcaactttgaaactattttagtaacggattctactccaagcattgctatctgaatccactggcatcctggaaaacaattctgcgaagaaaagacatttgccttggtccagggtccatgcaaaaccatttttttaaaaaaatggatccaatttggttctgtattcttagatggcttcttgaaatcttatctttaacctgttcatgattatcccaagtgcatttcttttggtgaccttgacccttcagaactgggtaattgtaaaggcctctcttctcaaggattccatgaagacctagatccaaaatgctgatttcaatggaggtgaagggatagacaccgcaacagtgaggcctagagagatcttttatgccagattacccaggtgcaacctaaatgcaactgttatcaatggtctgggtaacttggacatgtttcttgccctggatgtgcaaggatctattccctccagggattatcctgatgggtttacgaacctcagttgagaaacaacagaagctgagacaattttacgcaaggtgaggagatgctgttttcctctttgcaaggttgctgtcaagttccttggaacttgac

SEQ ID NO: 10416 - DNA, 331 bp, Homo sapiens
cccggtgaggggaaagactcaccagagggtgatggagacagtatgccggctcaccttggtgaccagccaagatgtctcaagtgacggtgctaggtgttcacccagcctgtccttcagataggagtgccttcacgaaagcgtctcatggaccacaaagcaattatgcactgagtcatcttcagtatttaatgcaaaaatgaagcatcatggaatgaaattcccactgtctgtcatgacaagcttagctgtccattgttttaaattgtgtatttatttttttgaccacttggttctagttgggcctgactccttcagagtgctgcaccccgat

SEQ ID NO: 10417 - DNA, 702 bp, Homo sapiens
aaactgatcagcctttgtataatgttttttaaatcatttctaaataaaacagaaatacagagtgtgtcatttccctgggatgagggaacaaagatcaggttccaagagtaaccttaggacgctctgggaagagaaccgggtcctttggggtgtctgggagctgcccacccatctcctctgccagaccggcggtcagatagcctccctctacaacaggctggccctgggggcccagggttattggggttccaggaacacagcctgatgatgcctccttacgatccaggatggagagcagcccccccaggagtatggggagggtcactgtggcacgggcttctccatgacctgggacatgacctgggacacatagtcaagagcacggttatcagcaatacagatattaataaaaggcagacgaagtcaggaggtcagcaactttgcgggcttaccaggaggcctgtcctgcctctggaagccagcgacagagagggatgcccccgacccagccagccggagaaagggatggggtggtcacgaaggtctgagctgggtctgggtgtaggctgggaagcaggctggggtgtagactgcgaaggcggccctgccgggacttctttccagtccccggcgacctcttcgaattctctgctatctctggggagcctcgggtgggagggggtgtaagagacgcagggacgt

SEQ ID NO: 10418 - DNA, 321 bp, Homo sapiens
tgtaaattgatgtccactacctgaacatgtgatgctttctcttttattccttggtatttcctccatattctctgagggccttcagtcaatttttttaaaggaaataataagttcaaatatgtatctatgacttagggttacaaagaatattttctttgcctccagtatactttgtattaaaaaaattataaaaggccataggtattcattttcaaatatttgaaaaaaaaaggcatggcacaattaaagcatatgcagaacctaaagtcgacgcggccgcgaattccagatctatgaatcggaagatactgaaaaaccccg

SEQ ID NO: 10419 - DNA, 337 bp, Homo sapiens
  misc_feature (1)...(337): n = a,t,c or g
tgaggatcagggagagaaggaaagggggagggctgccccctgctttctggactgcccacctctacaagtttggctctttgggtttgttttgtttagacttgtggttttgtacttcgatttttgcacacagaggtatttaccgtgtcccaggcagcctggcctgggaccacatgggtctgagggagggatgggacctcacgccaccttgaaggattttctcttgggtcctttcctggcttgagtctgaatcttgggtggggtgggctgcggagagcagttatgtgcctctgcctttagactggntacccacagcatttccccaggganaggggcttta

SEQ ID NO: 10420 - DNA, 296 bp, Homo sapiens
ccaaatcgtttctgttcttttaaaattaaattgtaagacagttgtttgtcagattttggattccatggaaaaagttttgtttagaggtaggtaacacatgaactttttaaaatcaccttaaataagtagcttcttgcgtaagacaccaaatagtgttccctcctcatttgggaacatttcttctgggtacttgactttctttcatatgttttttcataataatagttccagtttataaaattacgttctcttttctagtcgccgagatgacatgggaatcattaggatatgttttg

SEQ ID NO: 10421 - DNA, 539 bp, Homo sapiens
gaattcttgagcatcatgcctagaacagtttcacagatgcaataaaacacgtctatctggctctcaaaagggaggcctcactgggaggtcagacattggttaagtctcatggttgagggtctggtccttgggaatgcaggtttagaaacatctcaatttattcgttggtgggggtaggaggcagaggaatatcagaagaggggaaggggggcaagccttgaaggtgcattcacttcggtaaaatttacatatctcacaccaaataaaatactgcctgagaaccaaactacttacatgtgtctattcagaatattaaaatgcaaattaggtttttggtaagcatagaacaagggaaagttaatattcttaagggatgtttttgcgaaattatagcagcataactctagtaatgctgttaattttgtataaatcagtgttttccaagtttatgtgatcacagaacacttgttatcaaaaatatcttttaagaccttgtaaaagatcttggcaaattcctataaaattaacaggaaatttac

SEQ ID NO: 10422 - DNA, 347 bp, Homo sapiens
ccagaggtgcctgatgctgttaattcctgagccttttgaagattctgcagagtaaggtcccactgattcttgggattttccttactaccagctttagagtctgctttctcagatctgttaagtcagttaccacttactcatctgcttttcagcttccaaaattaattttattgctgctgattcctctattgtttttcctgttcttgtgttttgtgctttaaaaaatgctattattttagctttagcgatgtctctaagtgggtgaaagaggtatgtgaacaagacccccatctttgcccagatgtcctgatattatttctcccttactaagcttttaatgagtattg

SEQ ID NO: 10423 - DNA, 354 bp, Homo sapiens
gaggcccagcgggagtcgcggaacagcaggcccgagcccaccgcgccgggccccggacgccgcgcggaaaagatgaatttacaaccaattttctggattggactgatcagttcagtttgctgtgtgtttgctcaaacagatgaaaatagatgtttaaaagcaaatgccaaatcatgtggagaatgtatacaagcagggccaaattgtgggtggtgcacaaattcaacatttttacaggaaggaatgcctacttctgcacgatgtgatgatttagaagccttaaaaaagaagggttgccctccagatgacatagaaaatcccagaggctccaaagatataaagaaaaatagaaat

SEQ ID NO: 10424 - DNA, 599 bp, Homo sapiens
tgggaggaaaaccaaggctttaaaacctgtgtgccatttaagagttacttaatgtttggtaacttttatgccttcactttacaaattcaagccttagataaaagaaccgagcaattttctgctaaaaagtccttgatttagcactatttacatacaggccatactttaccaaagtatttgctgaatggggaccttttgagttgaatttattttattatttttattttgtttaatgtctggtgctttctgtcacctcttctaatcttttaatgtatttgtttgcaattttggggtaagactttttttatgagtactttttctttgaagttttagcggtcaatttgcctttttaatgaacatgtgaagttatactgtggctatgcaacagctctcacctacgcgagtcttactttgagttagtgccataacagaccactgtatgtttacttctcaccatttgagttgcccatcttgtttcacactagtcacattcttgttttaagtgcctttagttttaacagttcactttttacagtgctatttactgaagttatttattaaatatgcctaaaatacttaaatcggaaaaaaaaaaaaaa

SEQ ID NO: 10425 - DNA, 121 bp, Homo sapiens
ggaaatttacatttaaaatgcatcatcatttgcaattgctcaaaagaaaatgagattcataggtataaacttaacaaatgttcatggaacaaatcaaagaagacctaagtaaactcgtgcc

SEQ ID NO: 10426 - DNA, 76 bp, Homo sapiens
tttcttcgtaagaaggcttttacttgaaaatccaattctttcgtaggtacagagccattcagtttttttttttttt

SEQ ID NO: 10427 - DNA, 481 bp, Homo sapiens
ttttttttttttacaatatagcatgctgtttattttagcttttacaacaaagcgagggtttaaggagcctgagaagaatttcacaactattgactatacagagtcttcaattccaaaaacagttaatagtaacttggtggcacatacaacatgcattgaatactctgtattattcagtaactaaacaggatcctgcatcattctcttcacagttcacaatcatacattcattctcttttacctgaaacagtccattaatattaaggtgcaaagatcttggacaaaaaccaagaaagaaaacctcatgtccttatttttactaatgtatagctgatgatttctgtgataagctgtaaatttaaaagcgtgactctcatttgaataactgtagagtaagcaaaccagaaattctcaatctattggcaacgggacaggttattgggccagattttagggtacataaactttatatgagagggac

SEQ ID NO: 10428 - DNA, 340 bp, Homo sapiens
attacgatctttaaaaaccacacagtgaaagtaaatatttcatactacatattaacgtgaaataaaaatggtgaaataactctataatgccatgtcaagaagttattctttactcactagctcagctcaacatggattcaccttccttttcttcccaattaaagaatgcaaaattcaatctttctcgtcctcttcctccaaatgtttactgagataagggacaatatgtcacctcccaattataccaaaatgcagcacagccaatcttcaaacaagcatttgcagagacgtgtgcacatcatacaaacactatccaggatcaagctcctagaagaatcaa

SEQ ID NO: 10429 - DNA, 1982 bp, Homo sapiens
ttttttaaagtcagatgagtgtttattgtttgccaggctttttgcatacattagtccatttaattctcagaaacgaccttcatatgaaacaggtactgattttattcctattttataatgagagaaccgagttactgagaggttaaacatctcacatttcttatccactatgttatgctgactcttataaaatgattgtggaaggtgtgttaatacatttcaactggaaaaaaaaggtcagatcccccgaaaatgttgttaggagttgggttaactgctttggaaaaacaatggaaatatttaaattccagttgtactgaaataccttttaacatccagcaggtggcagcactaagtaacaattccatactaggtcatctaacagaaacattaatccattctgcacaaatcaagacttctgtacactccatgccttgatgatttcttcagcagcatccagtgtgctggtctttttttaatgaagcaaaaacgcacaaacttctcaaactgtgatttagtctctgagttacagattgctgaaacgggggatgctgatagtttcttatgtttagccaccattttacaaacttatgggtctaagggccattattcttcaaatcgagagggctcggatccaagcaaggccacttcggggagggggaggtttcctccacccgaaacatggggttttagggcaaaccttttaaggaaagggaccacaccggttccttttttcctctaacccttttggcaagaataaaaaaaaaattctgggtcatccatgcgcttgatgtcaatccagaaagcttgagccaaggcttcctgtaaaggagtttgcacaagtataaatcgtgttttgttgaactgtctgtaaatgttttatcaaatgatttggaccaatggaccagccaagttccagccagttacactgaaagtctttccagcacttcctattgttattgttctctcccacatacctggaaaagtagctatttttaagtgcttatttccagaatatacaagccattcataaacctcatcgctgatgcagagtgtgtcatatttgatgcaaaggtcagcaattacttgcagttcctctctgttatacaccttgccaagtgggttatgtggagtatttagtataatagctttgggtttgggaattaaattttacttttccagttcttgaggatctaatgtccagtcagaactagaccatctttttccataaaccaggtttagatcttcaggggaataaaaacagggtgttgctccagccattcttcaccatgggcttcatagcagtcatagaaaggcactattagtatgacttcatctccctcatcaattaatgcttgaatggtgttaaaaagagatccatatgctcctactgtcacaaggatttctttatttgaatcaatttgcttttgataaagcttttcatacagataggacagagctttcacaagtgatggatggccaaagccctcgtgtatactgattcaggctatcgattgctgcaatctttgataattcttcttttacatatgtaggaggggatatatctggaaagccttggccaagattcacaacagaagggtctgcagccaatttggtaaattcaatccacacattactatcaagtccttcaatccgttttgcatttgtgaatttcagtgacattttagcagaagtagagaatccgaggattttggaagaagaaattgtcttcaggaattttgctctaccgctaagagagcagaggctcctctgggccaaaaacatgctatccggtgcgggaacctcgcctccctaggctcgagtcccgactgggcttgagggcccggctgggcgggattcggacgcggggggcggagccgggacagggattgactctggggtttgcactcagtgcgcgctttggcggaggggtaggccaggatctctaggctggaagagactggatgaggggtgtttttttg

SEQ ID NO: 10430 - DNA, 453 bp, Homo sapiens
agttataatatctaatttattactttagttacacatgcatatttaaaataacattatatatataatacattaatacaaaatattgcttttttcccattctcacatttcaagtaacaattttattcactctctacatgcatcttggacatcaacgtcttcatggtatctacagtccatttctcaaagtgtatctccttcacttgcatctaagctgtctgagatgcagcacttctcaaatacatgtctgactcactggcaagtttgacccaagttaccacattaggaccatcctccccggcccccaatttatcatgtaggtgtatttgtaatccttacaacaaaattacttattgcttttgtaattgctctttgaaaggcagattatgaaacctaactcttgcaatagtgagggaatgattttcctggtataatgacttaagtttcttccttccc

SEQ ID NO: 10431 - DNA, 144 bp, Homo sapiens
gatctaagtcctgcatcccactttcagccaggaggtacaggcaagatgggacaggtttcacaatggccacctcctgcctgacattccttggtgaaatccctgcagccccagcccaagtcctgctgaagtaaaagagcccagtgg

SEQ ID NO: 10432 - DNA, 4152 bp, Homo sapiens
  misc_feature (1)...(4152): n = a,t,c or g
gcaggaacagtgctagtattgctcgagcccgagggctggaggttaggggatgaaggtctgcttccacgctttgcactgaattagggctagaattggggatgggggtaggggcgcattccttcgggagccgaggcttaagtcctcggggtcctgtactcgatgccgtttctcctatctctgagcctcagaactgtcttcagtttccgtacaagggtaaaaaggcgctctctgccccatcccccccgacctcgggaacaagggtccgcattgaaccaggtgcgaatgttctctctcattctgcgccgttcccgcctcccctcccccagccgcggcccccgcctccccccgcactgcaccctcggtgttggctgcagcccgcgagcagttcccgtcaatccctccccccttacacaggatgtccatattaggacatctgcgtcagcaggtttccacggcctttccctgtagccctggggggagccatccccgaaacccctcatcttggggggcccacgagacctctgagacaggaactgcgaaatgctcacgagattaggacacgcgccaaggcgggggcagggagctgcgagcgctggggacgcagccgggcggccgcagaagcgcccaggcccgcgcgccacccctctggcgccaccgtggttgagcccgtgacgtttacactcattcataaaacgcttgttataaaagcagtggctgcggcgcctcgtactccaaccgcatctgcagcgagcaactgagaagccaagactgagccggcggccgcggcgcagcgaagcgagcagtgaccgtgctcctacccagctctgcttcacagcgcccacctgtctccgcccctcggcccctcgcccggctttgcctaaccgccacgatgatgttctcgggcttcaacgcagactacgaggcgtcatcctcccgctgcagcagcgcgtgncccggaccggggatagcctctcttactaccactcacccgcagactccttgctccagcatgggctcgcctgtcaacgcgcaggtaaggctggcttcccgtcgccgcggggccgggggcttggggtcgcggaggaggagacaccgggcgggacgctccagtagatgagtagggggctcccttgtgcctggagggaggctgccgtggccggagcggtgccggctcgggggctcgggacttgctctgagcgcacgcacgcttgccatagtaagaattggttcccccttcgggaggcaggttcgttctgagcaacctctggtctgcactccaggacggatctctgacattagctggagcagacgtgtcccaagcacaaactcgctaactagagcctggcttcttcggggaggtggcagaaagcggcaatcccccctcccccggcagcctggagcacggaggagggatgagggaggagggtgcagcgggcgggtgtgtaaggcagtttcattgataaaaagcgagttcattctggagactccggagcggcgcctgcgtcagcgcagacgtcagggatatttataacaaaccccctttcaagcaagtgatgctgaagggataacgggaacgcagcggcaggatggaagagacaggcactgcgctgcggaatgcctgggaggaaaagggggagacctttcatccaggatgagggacatttaagatgaaatgtccgtggcaggatcgtttctcttcactgctgcatgcggcactgggaactcgccccacctgtgtccggaacctgctcgctcacgtcggctttccccttctgttttgttctaggacttctgcacggacctggccgtctccagtgccaacttcattcccacggtcactgccatctcgaccagtccggacctgcagtggctggtgcagcccgccctcgtctcctctgtggccccatcgcagaccagagcccctcaccctttcggagtccccgccccctccgctggggcttactccagggctggcgttgtgaagaccatgacaggaggccgagcggcagagcattggcaggaggggcaaggtggaacaggtgaggaactctagcgtactcttcctgggaatgtgggggctgggtgggaagcagccccggagatgcaggagcccagtacagaggatgaagccactgatggggctggctgcacatccgtaactgggagccctggctccaagcccattccatcccaactcagactctgagtctcaccctaagaagtactctcatagtttcttccctaagtttcttaccgcatgctttcagactgggctcttctttgttctcttgctgaggatcttattttaaatgcaagtcacacctattctgcaactgcaggtcagaaatggtttcacagtggggtgccaggaagcagggaagctgcaggagccagttctactggggtgggtgaatggaggtgatggcagacacttttactgaatgtcggtctttttttgtgattattctagttatctccagaagaagaagagaaaaggagaatccgaagggaaaggaataagatggctgcagccaaatgccgcaaccggaggagggagctgactgatacactccaagcggtaggtactctgtgggttgctcctttttaaaacttaagggaaagttggagattgagcataagggcccttgagtaagactgtgtcttatgctttcctttatccctctgtatacaggagacagaccaactagaagatgagaagtctgctttgcagaccgagattgccaacctgctgaaggagaaggaaaaactagagttcatcctggcagctcaccgcacctgcctgcaagatccctgatgaccctgggcttcccagaagagatgtctgtggcttcccttgatctgactgggggcctgccagaggttgccaccccggagtctgaggaggccttcaccctgcctctcctcaatgaccctgagcccaagccctcagtggaacctgtcaagaggcatcagcagcatggagctgaagaccgagccctttgatgacttcctgttcccagcatcatccaggcccagtggctctgagacagcccgctccgtgccagacatggacctatctgggtccttctatgcagcagactgggagcctctgcacagtgggcttcctggggatgggggcccatggccacagaggctgggagcccctgtgcactccggtggtcacctgtactcccagctgcactgcttacacgtcttccttcgtcttcacctaccccgaggctgactccttccccagctgtgcagctgcccaccgcaagggcagcagcagcaatgagccttcctctgactcgctcagctcacccacgctgctggccctgtgagggggcagggaaggggaggcagccggcacccacaagttgccactgcccgagctggtgcattacagagaggagaaacacatcttccctagagggttcctgtagacctagggaggaccttatctgtgcgtgaaacacaccaggctgtgggcctcaaggacttgaaagcatccatgtgtggactcaagtccttacctcttccggagatgtagcaaaacgcatggagtgtgtattgttcccagtgacacttcagagagctggtagttagtagcatgttgagccaggcctgggtctgtgtctcttttctctttctccttagtcttctcatagcattaactaatctattgggttcattattggaattaacctggtgctggatattttcaaattgtatctagtgcagctgattttaacaataactactgtgttcctggcaatagtgtgttctgattaggaaatgaccaatattatactaagaaaagatacgactttattttctggtagatagaaataaatagctatatccatgtactgtagtttttcttcaacatcaatgttcattgtaatgttactgatcatgcattgttgaggtggtctgaatgttctgacattaacagttttccatgaaaacgttttattgtgtttttaatttatttattaagatggattctcagatatttatatttttattttatttttttctaccttgaggtcttttgacatgtggaaagtgaatttgaatgaaaaatttaagcattgtttgcttattgttccaagacattgtcaataaaagcatttaagttgaatgcgaaaa

SEQ ID NO: 10433 - DNA, 4684 bp, Homo sapiens
  misc_feature (1)...(4684): n = a,t,c or g
ctgtgctcacagtcatcaattatagaccccacaacatgcgccctgaagacagaatgttccatatcagagctgtgatcttgagagccctctccttggctttcctgctgagtctccgaggagctggggccatcaaggcggaccatgtgtcaacttatgccgcgtttgtacagacgcatagaccaacaggggagtttatgtttgaatttgatgaagatgagatgttctatgtggatctggacaagaaggagaccgtctggcatctggaggagtttggccaagccttttcctttgaggctcagggcgggctggctaacattgctatattgaacaacaacttgaataccttgatccagcgttccaaccacactcaggccaccaacgatccccctgaggtgaccgtgtttcccaaggagcctgtggagctgggccagcccaacaccctcatctgccacattgacaagttcttcccaccagtgctcaacgtcacgtgggctgtgcaatggggagccggtcactgagggtgtcgctgagagcctcttcctgcccagaacagattacagcttccacaagttccattacctgacctttgtgccctcagcagaggacgtctatgactgcagggtggagcactggggcttggaccagccgctcctcaagcactggggtatgcaactgcttttctctccataatctcctggcatcctctattccaaagacctggtgtcctctgcaccagctttccgcactggctgggtctcagtcctctcctcgtcctaacatccaattaactggtccatgaccttcaattcccacaaccatcccaggccatcaccaccctcactgcacctcctgaccctatctcttcattcttcccccagaggcccaagagccaatccagatgcctgagacaacggagactgtgctctgtgccctgggcctggtgctgggcctagtcggcatcatcgtgggcaccgtcctcatcataaagtctctgcgttctggccatgacccccgggcccaggggaccctgtgaaatactgtaaaggtgggaatgtaaagaggaggccctaggatttgtagaatgtaaggaagggaggaaaaattcaatctgataagtgttcattgatcttctaatgggttaaaagcattcagccacataacaacaacaacaccgataactaactgagtagttaatatggtcaggcgctattctgaggannnnnnnnnnnnnnnnnnnnnnnnnnnnnnnnnnnnnnnnnnnnnnnnnnnnnnnnnnnnnnnnnnnnnnnnntgagagatacttacatctttttacatacacagagactttaagcactttgatcaagttcccacagctatgaagtagtagggctagcttccaatccagaaagtctggatccaagactgtttatccactgtcctattcaccctattttgtgaaggaaaagaccaagttcaaattctccagagtccattgccaaataatggagtcagatctatatttctatacataattacaacacagtgtggtgggtgcctgtaactacttactgtctctacttggactcattccatggcaatgttcacacaaaaaatgcccctccagagatcttacaggtttctatttatcataacactcaccatgctttatatttttatatgttttgggaattctcttagcattagacagtgaacttccatgcagatgaccacatctaattcattattattattgttattcatgctggacctcaggtacaaaaggttaagaacttctcagttcattatatgatcatcattggtgcctccgagctctctctctctcccttgatttatttggtcccttttatctccagtccttactcccatatctaacctcttacccctacctcataggtaaacattttaatgaatttgatgtttccttttatttgcatagatcctctgtaatatgtagtagtgtccagtgtacatgtatttttaattaaccaaaatggcattaaattatagatctaattttgtacatccagtttgtttcttccaaatcttccatagtattttactttatatgtccatgcattagtccattttgcattgctataaaggaatatctgaagttaccnnnnnnnnnnnnnnnnnnnnnnnnnnnnnnnnnnnnnnnnnnnnnnnnnnnnnnnnnnnnnnnnnnnnnnnnnnnntctgttgggggattctggaagcttttactcatggtggaaggcaagtggagccagtgcatcacatggtcatagagggagaaagagacatagaaagaggtgccagcctctttttaacaaccaggtttcatgtgcactaatagagtgagaactcactcattacccggagaggggacaaagccattcatgagggtctcctnnnnnnnnnnnnnnnnnnnnnnnnnnnnnnnnnnnnnnnnnnnnnnnnnnnnnnnnnnnnnnnnnnnnnnaagtgacaaatatccaaatcatattaatccacatatctacattgctcctgggatacctggatcattcctggttctctactattgcaagcaatgcttgtatctcacatggaactgcatatacatgtgggcctgacctgcatccctggaatgtatgtatcctagaaaggggttgcagggttgctggagatgcagctccttaatttgactaaacactgctcatcttctcatcagaatggctgtactcatctgaacttcctttgtcagtactctaattgtcctgcaactcctaaatggacttcaacactggacattatccagttttctaacttttgccaatttcatgtgcataaagaaatatgctgttttattttgcatttctttaattactaataattggggctataattaggactgattagccacttgggggttccttttctataaattgcctgttcacattcattgtccatttttgtactatgtgcttccatcattttcttattgatttgcaggtgatccttatatagtcctgctagtagtcccttgtcagttttaggcattgcaaatgttttcctctaatctgacttctggcaactgtctccttggtttcctttattgaagagaaatccttaatattttgtaatgaagtccatcaactgtatttttgtttgtgtgtcttttttaaaagaagtcttccctatactgagatatcaaagatactcttaaaacatctcctacagttttaaatttcacatttactactttaattcatctgggattcatctttgtgtttgatggggatcatgttttatttttctttatataatgggccagtgtgttcccacaactactaaatagttcaccttttccccataggttagtagtgtctcctttgctatactgaaagctcccattataggtgggcctgtgtctgagttccatcttgttccactgttctgtttgtctcttcttgtgccagtgtcctagtattttgattactatgacattgtagtgtgtgttagtatccagtaggacaaattcttgtttatttttcttagttcacacacatttataattatatctataatgatttgtaacagagtgaagtgaatgtagaatgtcagatgttaagaggaagaatggaaaagagggctgggactagggtgatgtaggggatgcacctggcttaggtgcaaaatttgggggataccaaaagaactcagtaataaatcatattttaatgaaatatcttgaaaaggcaaaattaatgcaaagatacatgattaacaaaacatccaaagaggagtatttaacaaaaatggagaagcagagaagcagaagaattaggagaatatgctgtcacatgagccaaggaattaaagaattcaggaaggaggaagtactgctgtcagatgttcaacagaggtcattttagaaaatttaccttggtttttgaaatcctttcaaagagcagtatacacaatgtgagcaagtatccttcgttcattgccgtcattgatatggtttggatatttgtcccttccaattctcattccagggttaagcttcttctctgccctcagtaatgtggcccttccccttgtctgtatattttggagacatgaagcatgtgggatggcctcacagtcagctggggtttgagggtgaaattcaatgactttcgtgaactccttggctcctatgtgctcttcacctggaggaccaggggcatgtgcagggatgaccaccttctccctggggacctgaacagggcagagaaatgggaagctcgggtgcaaagggagtggggaagatgggtccgggcttacagtactgaacccaggaatgacaataactgtgtgtgttgctgcaggtgacaaaatatctgaacagaagaggacttaggagagatctgaactccagctgccctacaaactccatctcagcttttcttctcacttcatgtgaaaactactccagtggctgactgaattgctgacccttcaagctctgtccttatccattacctcaaagcagtcattccttagtaaagtttccaacaaatagaaattaatgacactttggtagcactaatatggagattatcctttcattgagccttttatcctctgttctcctttgaagaacccctcactgtcaccttcccgagaataccctaagaccaataaatacttcagtatttcagaaaaaaaaaaaaaa

SEQ ID NO: 10434 - DNA, 470 bp, Homo sapiens
  misc_feature (1)...(470): n = a,t,c or g
ctccacccctaccccatgcacacagcactcagagcccaggccccctcctcagagcccccaccaaaatcctctctaggggcaggggaaagagcaagacatgtcccccacccagagcaggggctgcggttcagggagctcaggggactcagccactccatggcagagccctgtttaatacaacttgtgtctgggatggcctggatcagagaccctatctaaggagcatgttcagaaaccatgttgctgggatcagacagcagggtccaactgcaggcctgtggtgcaggagctgtgtgaccatggggctgtcaccagggcctctctgtgctgggttcctccagtattagaggagaggcagtatagaggagagggccgcgtccttcacagtgcatttttgtgtttccagcatccccgaccagccccaaggtntttcccgttgaggcntttgcagcacccaggccagatgggga

SEQ ID NO: 10435 - DNA, 2639 bp, Homo sapiens
  misc_feature (1)...(2639): n = a,t,c or g
ggcaccagctcaggactgcatctgcctgccatttcccttccactcctcctttctggagtctgacattagaaagccagcgagaaggaagattcaaacaaccaaccctgatttcctgcttctccttttcatgagtgttcctgtggtctctgcacctcctttctgtcccccggcagagggcagtagagatggccggcccaaggcctcggtggcgcgaccagctgctgttcatgagcatcatagtcctcgtgattgtggtcatctgcctgatgttatacgctcttctctgggaggctggcaacctcactgacctgcccaacctgagaatcggcttctataacttctgcctgtggaatgaggacaccagcaccctacagtgtcaccagttccctgagctggaagccctggggggtgcctcgggttggcctgggcctggccaggcttggcgtgtacgggtccctggtcctcaccctctttgccccccagcctctcctcctagcccagtgcaacagtgatgagagagcgtggcggctggcagtgggcttcctggctgtgtcctctgtgctgctggcaggcggcctgggcctcttcctctcctatgtgtggaagtgggtcaggctctccctcccggggcctgggtttctagctctgggcagcgcccaggccttactcatcctcttgcttatagccatggctgtgttccctctgagggctgagagggctgagagcaagcttgagagctgctaaaggcttacgtgattgcaagggttcagttccaaccatggtcagaggtggcacatctgctcagccatctcattttacagctaacgctgatctccagctccagcgagtggaaacccactacagaggaggtggggcccctgtgtcaaagaggccgaggggcagcaagggcagccagggcacctgtgacttcttagtacaagattgtctgtccttcaggacttccaaggctcccaaagactccctaaaccatgcagctcattgtcacaccaattcctgctttaattaatggatctgagcaaatcttcctctagcttcaggagggtggggagggagtgattgctgtcatggggccagacttccaggctgatttgccaaatgccaaaatgaaacctagcaaagaacttacggcaacaaacgaggacattaaaagagcgagcacctcagtgtctctggggacatggttaaggagcttccactcagcccaccatagtgagtgggccgccataagccatcactggaactccaaccccagaggtccaggagtgatctctgagtgactcaacaaagacaggacacatggggtacaaagacaaagcttgactgcttcaaagcttccctggacctgaagccagacagggcagaggcgtccgctgacaaatcactcccatgatgagaccctggaggactccaaatcctcgctgtgaacaggactggacggttgcgcacaaacaaacgctgccaccctccacttcccaacccagaacttggaaagacattagcacaacttacgcattggggaattgtgtgtattttctagcacttgtgtattggaaaacctgtacggcagtgatttattcatatattcctgtccaaagccacactgaaaacagaggcagagacatgtactctggtgtgatctcttgtcctcagtgtctcttctgggctcctgtccctcttgctttatagctagctgcccggagaccaaggtacaggtgaaagcaaggtagcagcttgcgggaggaggcctgtctggcttaccagtctatacactgtgggcagctcgtttgctttctaggctggctggagaggtgggagctcattgatagactcatgatggaaactatttttgaaacaggcttcctccttcaggagagatcatgcggactaaactgtagcaattccagtgcnacctggcagtgatccttttctttgcaaagtactgtctctttggttccagtaagttggaccaccaacatgacatcattttccctggaacctggtcactgactaacacagacaattgggacttccagagcctcaagagccaggagagggcacagtacatacagagggagtcaaatgggatctcattttgagtcctgccttccgcacactcagaacggcagccccaaggcccggagtgtccaggggcttctggcctgaggtgaatctgccaggcccaagaaggcacaaaggtaggagcacagagagccccattcccacaggcgggcggcccagcagcaccagtggaagctcagctgtcctccagctgctctcggcagacagttcagtgcacagtttatgccctagctgaaaaagatctcccggacgtatttcagcacatcctcttcctcctcctcctcagggctcctgctacaggcagagctggaaccccccggcctctgggaagggctgaggcctggagccagtgcctgtttcccactgtcctcttcctcactgctgctcccagaacttgtgtgaggcgacacggagcagggaggggagtgctctgggttatcagcccccgccagggccggctgctcgcaggccttttcctgtttgcggctctcaatcaggattcccagagcaacatcaactatctcagcctcattcttccc

SEQ ID NO: 10436 - DNA, 727 bp, Homo sapiens
  misc_feature (1)...(727): n = a,t,c or g
ctaaaaataaatgnccaattgtgagttccactttgcccttcccatttcctaaatataatatatatttaaatttggaatttagatccttacccccagatttttagagcattctccataatattctcaaaacaaagaattctgggtattaatcgttgatgttctaagcccagaattcncattaagcctaggaacacaaataaatagagctctttttccatctagttagaatctatgaagatttctgtgatacatcataaaggttcctcaatggttcaatatatttttcaaaaaaataataaatctcatgatgtctgaacattaagataataaagtaggacatttttcttagttaatatctttaattttttatgtagaatatactatttttttctccaccaaaataacaatatatttgcaggcgggaacatgtatgattttaaatgcacttttgaaatcttagagtagaaccactactctagtaatacttgtaataaaattaaaatagttttaaacacttccataaagaattaggggtgcccagctccttgatttccccctagggataaagatatccatgtacaattccagggagcttccctgtaattcctcaaaaaagcactagtaaaactcttaggaggatattagataaagctcacttaggcaatagccctttttccccacatattctgggagggttctacaaaagctatttggatactcattccgg

SEQ ID NO: 10437 - DNA, 531 bp, Homo sapiens
cttgagcataggaatttgaggccagcctgggcaacacagtgagactctcccatctgtttaccaaaaataaataaataaataaataaagaagcagtgtaacccagaaaagggaaaggaactttgcactgctggagaaaaacaaataggaaaatgctgttctcagaacaggaaccaaggctttctgacgaagaagaaaccttggactctgggatgaccgccacaaataccaacaggtttgaggcagcctgggatgtgatccagaggaaagccaccacagtgaatactatgaaaatgactgtgtttccctgcatggctaactggaaactcaggatatttgctggaaaaaacaaaagactctgttgatccttttcattcctgctgactgtgcaacttgtaatctgcagtttgaatgataacagcataagacctgggaaccgcctataataaagcagtgtgccagaaaggggaagaatttgggacataaattggtgtttccgtcattcccaacttgacgctaagaattttaaagag

SEQ ID NO: 10438 - DNA, 1106 bp, Homo sapiens
gcgaggcagaaaaaggatctgttgcagagtgagaggaagcatagggggaaactccattggaacagattttcacacaacgttttaaattgatataagtttaggcagttgtagttcataacttatgttgctcatgttgtgctgtgtcaggatgggataggaagcaagtcccatgcttagaggcatgggatgtgttggaacgggatttacacacactggaggagcagggcaagttggaattctaagatccatgaacccccaactgtatttcctccctgcatattttaccaatatattaaaaaacaatgtaacttttaaaaggcatcattcctgagggttggtcttaatttctgattaagtaatcagaatattttctgcggtttttgccaggaatcacaaagatgattaaagggttggaaaaaaagatctatgatggaaaattaaaggaactgggattattgagcctggagaagagaagactgaggggcaaaccattgatggttttcaagtatatgaagggttggcacagagagggtggcgaccagctgttctccatatgcactaagaatagaacaagaggaaactggcttagactagagtataagggagcatttccttggcaggggccattgttagaatacttcataaaaaaagaagtgtgaaaatctcagtatctctctctctttctaaaaaattagataaaaatttgtctatttaagatggttaaagatgttcttacccaaggaaaagtaacaaattatagaatttcccaaaagatgttttgatcctactagtagtatgcagtgaaaatctttagaactaaataatttggacaaggcttaatttaggcatttccctcttgacctcctaatggagagggattgaaaggggaagagcccaccaaatgctgagctcactgaaatatctctcccttatggcaatcctagcagtattaaagaaaaaaggaaactatttattccaaatgagagtatgatggacagatattttagtatctcagtaatgtcctagtgtggcggtggttttcaatgtttcttcatggtaaaggtataagcctttcatttgttcaatgggatgatgtttcagatttt

SEQ ID NO: 10439 - DNA, 730 bp, Homo sapiens
cggaaaaagcttttacacttacattctacacaggaatcagaaattttggaggtagagcccaacaatctgtgttctaacaagccctctgcaggtctcaatgcattctgatgtttgtgaaccactgaagatactgcctttctttctctaaaatgaagtattgtttgttttccccagtagccgttcattgaaattgtggattattattttggtttcttccaggtgggaaattctttgtgagcacccacgtttccgagtgtttgtggatggacaccaactttttgatttttaccatcgcattcaaaccgttatctgcaattgacaccataaagataaatggagacctccagatcaccaagcttggctgatttaaaccacctctatttcaaataggatcacgtgccacaactatctgactgttggtctggaagaagtgtcctagcaagatctggagacttaaaaagaaaacaaaaacaaatggcaagtttcacttaagggtggtttgcccttaagaagaaagctgttgggacaaagacaccgagccattatacccagaataaaataatacatttatgctggattttattcagaccaaactaaaatggatttgtgatgatttgtgatttggtagcaaattattcatcttttcaaagcaaggcaatgcttagaaacagaagtgctaaagacacttaaaagccaacaacaacggtacagtgaaatcaatgcatttctg

SEQ ID NO: 10440 - DNA, 1110 bp, Homo sapiens
taggtttcaattgtaaagagagagaagtggataaatcagtgctgctttctttaggacgaaagaagtatggagcagtgggatcactttcacaatcaacaggaggacactgatagctgctccgaatctgtgaaatttgatgctcgctcaatgacagctttgcttcctccgaatcctaaaaacagcccttcccttcaagagaaactgaagtccttcaaagctgcactgattgccctttacctcctcgtgtttgcagttctcatccctctcattggaatagtggcagctcaactcctgaagtgggaaacgaagaattgctcagttagttcaactaatgcaaatgatataactcaaagtctcacgggaaaaggaaatgacagcgaagaggaaatgagatttcaagaagtctttatggaacacatgagcaacatggagaagagaatccagcatattttagacatggaagccaacctcatggacacagagcatttccaaaatttcagcatgacaactgatcaaagatttaatgacattcttctgcagctaagtaccttgttttcctcagtccagggacatgggaatgcaatagatgaaatctccaagtccttaataagtttgaataccacattgcttgatttgcagctcaacatagaaaatctgaatggcaaaatccaagagaataccttcaaacaacaagaggaaatcagtaaattagaggagcgtgtttacaatgtatcagcagaaattatggctatgaaagaagaacaagtgcatttggaacaggaaataaaaggagaagtgaaagtactgaataacatcactaatgatctcagactgaaagattgggaacattctcagaccttgagaaatatcactttaattcaaggtcctcctggacccccgggtgaaaaaggagatcgaggtcccactggagaaagtggtccacgaggatttccaggtccaataggtcctccgggtcttaaaggtgatcggggagcaattggctttcctggaagtcgaggactcccaggatatgccggaaggccaggaaattctggaccaaaaggccagaaaggggaaaaggggagtggaaacacatttaacttccatttt

SEQ ID NO: 10441 - DNA, 423 bp, Homo sapiens
gctaggcagtgctgttagaaagtgatttggaagagcgcttccgagccacggcgcgccctccggggagcgaccggagcaggtggtgcgagccccgcccggaggaggtcaggaattccccagccacaccagatccaaccggacgccccagaacggggacggtccccggagtccgcctcccaacctggaagcaccttgaggaagaaattgtcttgtctacagctctatcctcagtacagcaccaagcttacagtggatgctcagtgaagatttgccgatttgccgaatgaatgctttcacccctgcaactgtttactgcctgctaggagctcagagcctctgggatacaggctgggaatgacagtgcctgctcgcttggaaggcctctcttctggagtcaataaaacagcacttctttgcttcttc

SEQ ID NO: 10442 - DNA, 482 bp, Homo sapiens
tttttttttaatactaattctactcaactttcacgctcaagtttttggccctttggcgtgaaggagacgcagtggctggaaatgaccaagcggttggagatctctttgccgcatacctgggaggcactgtcctgacagccaactaagtatgcagaggacttcagacagggcatcgctcccagggctgtacaagccacccaagccatctaccggggggcgaagtcctgaccagatgcggggcgaacgaccgcgcccgcgagatgccaggaacccgttttaccccaaagtgggccagcggggcccggccttcgctccagcggcgcagagctgactcaggacgtggggagggaggaaaggcgcctgctgcggtgtccaccctgacgcgcaccccaatatgcaggttatcgatctgcgccttcgcctcgggatcacctcctttcccaaagagagagggccccaaagtgggcgaagcctcactcctg

SEQ ID NO: 10443 - DNA, 454 bp, Homo sapiens
catattagcaaatttccctgacacactgaaagtaggatattattctaaaatttttcctttatgtatgtagctttttagaaaccctacaaatgtgttttgtgtaaaaggatgtagtctgcaatcattttctgactcttggtgtaataaaaattaagtggcctaattatttaaaagcttgtcgtttgaaattattttttgagaaacagtttaaagcatgatactatttttgcttttcatgtaatgtataagtattcgcagaagctgcttgtatatgtttgtgttccatgtatgaaaatgttgtaaacagggtccatgtatttccccagtgagagttgctgatcttttggctgtaattaccaagtgcttgaggttggggtggctggaaatgaatatcaagcttttcggtgcctggagccaactttgtccaaataaaagagctttgtactgtgaaaaa

SEQ ID NO: 10444 - DNA, 331 bp, Homo sapiens
aagcagtgaaatgggagttaaagttcttttctcttgccaaccttctcccctttaacttttattagggaagaaagctggcaacatacaaatagactccatgtgtaaatagagacaaattgactgtagatagaaccaaaaaacaaacaggatgacacagagcgagactaggtatttgccacaggatcctgcaagtcccgacaatgcaatagatctggtagtgttcaaaggaaaatccataatggtcataaggaagtcataaagaaagcaagatgtcttgctttattaagaaaacttaaacagcacttggaatataattaagttttttttttgg

SEQ ID NO: 10445 - DNA, 380 bp, Homo sapiens
ttttttttaagaattttaagtacattttattaacaatgtatccctttgataagattatgcttcaggaggcttttaatgcccttgacataaactatacacattatacaaaaacaagaaaatcacaacaaaaaaaatcaaggtgagcaaaaccatttggggacaaatcttatttaaattatacacaactcaatgaaatattcttacagaaaaaatataaatactttttctttctatgttacagttatacaatataaatcagatttcaatgtctgttcagtgacctacaaacaccagaacctccaaatatgtagcagcgtattactaaataaaaaaggaaggaaactcatgtggttagagagcattaagtctgagattttttt

SEQ ID NO: 10446 - DNA, 355 bp, Homo sapiens
tttttgcttcaataaattcaatctaagcaatgtttctagttaacaagtgaatagaattgactttcttaaaagggcaattgcataacttaaaatacggtatttgccacccctcccccatgaactttaacacatttaggcaagttctgttattaactcttgcttctataccatgaccctccaattatccatggcaaatggaaacagggataatatggcagcctgaaagaaaatggtactctaaaattctcctggagctattactttcaaccatttaaatgacaaaactttgtagaacttctcaaacaatatgtactgattgcagttctactccctttctttgctctcacttccctac

SEQ ID NO: 10447 - DNA, 344 bp, Homo sapiens
gatccagaagtaaatgtatctgcaagctgatttaaattgtagattttctcttcattgcatattttctgatgttgaataaagtctgagtattaactaaagtttttgcttcttaaatatgtaagaattgtcctcaaaatctctattcttgagcacagtagtaaaaatatttttacatacattgtatttcaagggttctgcataagcaaccttgttttattgtgacaatttatttgggaattgtatcaaatatataatactgagatgttctcattccttttgtgaaaatacttttgtttaaaaaccactgccttcaaatgaaaaccactaggtttgtcaaaaaaaaa

SEQ ID NO: 10448 - DNA, 945 bp, Homo sapiens
tagtctttttattcttcttttattgatcacctctgaagttcagtagcacactgcataattttttgcattagcatgctgttgtttctacctaaaatgaccggggtccttgccttctgcttcccatagagattgtcccaactccataggtccatagtcacaaatgaggacagctttacatgtaacatgaatctaaaaggaaaaaaacaccaccctttaatttaagaggcaaggaagctatgacagatccctcccaaatgcagtaataggtcagctattactataccaacctccagagcttcacacgcatccttcccttagcctaagattatacttcattttacaatttcagagatccaaccatctctgaaacctgtctgaaactagcccacatgccatataccagattacaacatttaggccagcttcactattacttttcctccttttacgaccaccaagaccagtgttcagatccgatgggaaagggatcaggaggattaagctgatcaactttaccttaaagcacagctccagaaacaagctcacctcctcagtatcacacactgccaggaaacttgggggcaaccaggtcccctgcatttcatcactgtcattaccccggaagtcctcgatcaccagaaaaatcaccttctgtcatcttaagagtcttcatctgcttaagtacgccgggatctctgtagactaagtcagtcatcctgtaggccccactgcccacgctgtgccaatagctggtgtgctttttctcagtcttgatgggaccgttttatccgcctgtcagcccagagcgcagcgttgcgcagtccgaagcgagagaagggcgcggcccccgcgggctcccgcccctctcactgccgagggggcctttcggagctcgggcccaccgggttggaaggcccggctcctccgtgccacattcaccaccat

SEQ ID NO: 10449 - DNA, 622 bp, Homo sapiens
ttttttttcgtttttaaaaatctttatttgaaaatttcatataggcattcaaagaacattggctcactgaataggagactttacatctctcatggctgggcagcagctgtgtctggcttccttacttcaagatctgccttgatcacagatcacttaacagtggttaagtttcttattttcaagttcagcaggtaaacctatctcatttttggaggcattttttaagtataaaaagtctgttatttaggaaggttgcacagttcagaggtgaacatttcaatgtatttaaactttcctaaaaatgtaaaaataacaatcaaataggagaggtagcaaatcccacagaggtataaataaaacaagaatggaagaatgctgataactgttaaagctgagtgatggaagttcattatatagtctgtttactttgtatatactaaaacttttccagaattaagtctgctacatcaaacagggattttttcctattaaaaaaattaaattttttaaattaaaaaattttttcttactaatccttaatttttacctattatttgtttactccaaatttatttttatccttcttaaacagaacatcccaaacctataaccttcaggtttc

SEQ ID NO: 10450 - DNA, 299 bp, Homo sapiens
  misc_feature (1)...(299): n = a,t,c or g
attgtcttcacgttgaggaggctaaggaggaggaggaaggggaggggttggtcttgctatctcagggatggcagaggcagaagcataatctgagtataaatggacccgtgcagtttaaatgtgtgttgntcaagggtcagctgtttgttgaataaatgaatgacatgaagtattacagnggcttttgggcggtgtcgaaacttctttgtaaggattttaaggatgaaataatcacttaactgtctggaatgaacactcagataaactgagtcctccagctttctcatcagatggcttgg

SEQ ID NO: 10451 - DNA, 176 bp, Homo sapiens
ctttgagaattatatgaaaaatggaacaaatgactttgcaaagtattaaagagaaatagtgtagaacctaatgggaaccagtgaagtctagactaagatgacaggtgatcctgacctgtcaaacctaaaaactaaactccaccaattttaaaaaataaagaatttgaatttgccaa

SEQ ID NO: 10452 - DNA, 844 bp, Homo sapiens
ttttttttttttttttgtttttgcacatatactttaatacttaggcttgggtaaaatcattttaaataacatattaaaatatgtttggggggacaacccagcaattgcacagcccactagaaaattttaacatctaagtaatataactgttttagggtctgaaagttctccttcagttgttccacagcctctttatcaactaggcaaatatatttaagcttttaaatttcataatgttggtattttttaaaaggcacgggaggttcacttaatattaaatatataacattcactttcataaccaaaacctttttggcaagtgactttcacatagattatgagattctctacatgccttaaaataaatctggcagctcttaactcatatctaaattctctggacaactgtcttgctctctgttttggggccaggggcgtagcagtgaaggccctaacaggcttgctgacctaattggacagtttgttaaatagcaggaaatgtaacaaggcttctctctctcttgcatgttaatgtagtgaacagtgctaatagccagagattgtgcaatttagtcacaatatttcaagccaaaattcagtgttcttatattaaaagataccgaagaaagctatccttgttctttgaattataaaagcacagaggttgcaatgatcagaaccaaactggttaaaagccgaaatgcatcctttcagtattgatttgacagatgccaacaagcattcaaaaatttagagttaatttcttggtgacaggtagcataaaattgatcagactggtttcagctgtatcataagcttcacaaattggagatcttgtccttcc

SEQ ID NO: 10453 - DNA, 399 bp, Homo sapiens
  misc_feature (1)...(399): n = a,t,c or g
ctggaagtaccatttgtagagctgtgctctgctcttctgtcagaggcaagaaaaaacgaggccctgctgactgactgtctttctgccagttggctgctccagcaggaacagggtggcttgttggggtgagccctcccttaagggcactccacctgcaggcccatagaggggcttggagctgagttgggcagtattcaggcaagccagaaatgatagtacagtgtgacctacaactttttttttttttttgagatgggagtttcactcttgtcacccagggctgggagcacagtgggcgtgatctnnnnnnnnnnnnnnnnnnnnnnnnnnnnnnnnnnggcgattctncctgctttcagcctcctgagtagctngggatttacagggtgcctgnccaac

SEQ ID NO: 10454 - DNA, 685 bp, Homo sapiens
ttttttccatcaatagaacagtaaaaactgaattatgatttattaattagtaaaacactacacagcatcaaaaataaactcagccacatgcaacaatacagagaatcttaaagacatagtattgagcaaaataatcagtacacacaaaattccacttatacaaagctcaaaaacaaaattaagcaatatttttagaaatgcacttataaatgatgactgacccactatcaaggaaagtatttaacattgctctgaaagttctggaaattcttgattttcctttctcaatttctacacccatcaccacgcccagtcttccccaactcactaaacagcaccgtcatccatttagcatttcaagccagtgagaagtcatccttaattctgctttttcattaatttccctacttctaatctattacgtgtcttattagatctaagatcaatatatttcctgaatatgtctatttatgtccatttccaacactaccactgaagtctaagccattgtcacctttctttctggattactgcaatagcctcacagcttccactcttgaccacatacactccattctgcactcagccctcatagtgatcattataaaggataaaatggtgtggccagttagctcagttggttagatcatggtactaataaaatgcaaaacatgtcacatcactc

SEQ ID NO: 10455 - DNA, 845 bp, Homo sapiens
cataaggcatccatttttagcagtatttttccctagaattttgtttggcatagtaaacccccttggatatattaaaatagttctggtgaaataaatgtaacataaacaaaccttccctgactgacttcactccaccacggtagcttttagtgaaacccacagtaactgattaagtcagaaaacgatcaagttttttttttatggcatcttgggttacctatactcactcatgcaaaatccaaggtagtgtaatggaaacaatattggtaaaatagatgttgtggctataagcatctccctttatattagacatttagaagcttttaaaactttttagatgctaaaggttgtggcaaaactaggctgtgtagttgttcccatttataagcaccttattacaggacagttacatgaacctataagggagtgtgctttcagttcaaaagagtaataaagtgcctagctatataaaaaccacaagacttcaaattgtaatttaagctaactgcagttatacatttgggttaacaaaatctagaccctgtctatgcagagttagactaattgttcatactgttttaataaccacataaaaaaacttactcttaattgactgaataagtagggtccactactgtatcttaacaatcaaattttattgctttattcatgtggtgttttttgcaaggcactgtggtatggactagaaaacttggaatgactcatgaagaaaccttggaatgacacatgaagcatgataggaaagtcattctgaggcaggatgctttactgaattgttttcaaccagggtatcaaacatcaggaatgagttcaagttaaaattc

SEQ ID NO: 10456 - DNA, 619 bp, Homo sapiens
tttttttttacacgtctaacattccctttattgcttacgtcacatattccaatgaatacaataaactcctttttaaaaaagtaaggcacatgaaaagccttttgtgtaagttccatgttattttaaaattcctattggctaataaaagcatttgcactatagagccagagacatctagaaaagcacatgatagatttttttgcaagcagaatgcctgaaacattacatttacctcatggcacaatgagacagtcaccaaatccaatgtctgcattagaacgatacagctactattacagttgcaaaaccattaatcagcttatccacatatgtacagctgggtccccacgtgacaaaatctaaaggaagaacagcatctaactgcacctgtgctccattccctcacagataggaactgtgacattttggctctttccatgttgtgctgctcttcacgagaggccagggtcatacgatactgaagaccatggacaggtactgttcgtacgacacctgaatccagccgtcctgatccgtgtcgtaacgtctgaatatatccgtcaacctatatgatcgacctgacagtcactggattaaagggagtccacgtgccgttgga

SEQ ID NO: 10457 - DNA, 1884 bp, Homo sapiens
tttttgtctaaatgtttttatttgaaacaaatagttgcaccaagcaagaggttactttgcccactccaaattaaaacagagcacaataggggcaaaatttatttggcaggacagttccagtatgtgaacatcttcctcctcactgtggttggggtaactttactcatatgcagctgttcttacacaaaacattaaccccaaactactagtgtcacataaaagtaagtggtcttgactttgtatgtggggcagcatgttctataaatgctgaaaggtgggagaagcacaaacacaacccactctttaaaaaaaactaaataattcaaagtagaattttctatcccccccatttctccagtaataaaaagtagtgctgggatctgggcacccagatttggtttttatcctgaccatttacaaagtgttcccccatatgacttgcatcattagggttatgggtaagagttcattcactttggagagacctgtgcctattccttcctcctcttcttgccttcatgctcgtgttccttgggggcggctgctatctgagggtcttttagagccaccatggctgtttggcttcttccaaaaacttgtccaaaccaaaaggatcttcctcaaactgaactggtccttctcggcctctctgtccgaggggcggaaccagaaaactccttgtcgggaacaaatctgttggtctttattctggcttctaggtcatcaccatacatgtccttgtccagatttttactgggcctataaatactctgggccatatctttaccacctctccaggcttgatcataaacattataaatttcatcttctccacctgcaaatccactgtccatacccttggattggttgaagagcctttggtcatactgaacttcattggaagtccgaggattaggaacaccgagagcaataacttcactgatatcccgattttcatttctctgaagtttcgacctcttatcaggagctgccctggaaagattccggtcatgctgtctctcttttcgcctgtcatgccggatttcatccctctcacgtgcctccccatcctctttttccacatgagttttgatcccagctcttctctccctggctttctgggccatttctctaagtttctcttcatgtttttccttttctttctgagccatttttctctctacttgggcacgcatttccacagcttcacgagccttccgatcagcaatgtagagggcttctgccaatttggcgaaattttcatttatgtgtactgtctgtagtcctcttccatcagcagccagacgtttgtctaatggaattgtataaccctttgcatttttccagttagaaatacaaggaggaatcttccactcttgttgttcctttacagtcatctttcggctaggagaatgcatgacaggcgcaggaggagaaggtggtccccggggaattttcttattaatcttgaaccttggaggctccattggatctttctgcatttctaccatccgaataaccctctgtttagctccagagttgaatgccactccttgctgagatggtgtgtatcggatatactgagcaggagccaatttgtcagctgctcgaactggcatggctgcggcgaccttctgtgatacagatttttctaaggctactcttgtcttttctgttatctctttaatagcttcttcatcgggcctttgcaggtctggatcatctgcattcataacctcctttggaaccaggtcagtgtatttgctataaatgaccttgtcttttgactgtccttgtcgagcaattgcatcatatttaatttttccacatgagttttgatcccagctcttctttccctggctttctgggccatttctctaagtt

SEQ ID NO: 10458 - DNA, 638 bp, Homo sapiens
tttttttttgttttgcaagatttttgatttttaaatgagaaaatttataaaagaaagaaattcatggtcacaaaattttaacattttaatcctaaacattacagggtaaatagatactggaccctatctccatactccataaaatcctaacttttagtttccatttcaaatgttgctgtaaccactaaaacactagtggttttacaacctctggattatggaaatacacatttctgaaataaatgctacaaaaacaacaatggaagaaagccaaacaaacagtctccatgaaggaaaaaaaagtggaacattttgaagcttttagacacttctctttccatgtcttatgattaacctgtcaattcagtgcattgtatggtcatatgtaatggtccccatggtgaacaaacatctaactagtgtccattgattccaagttagtagatgatgaatctttctggatactttcaaagatagccgccagctcagggttagaactgatctgtgactggaattcactcatcagtggactcttctctgcttctggaatggttagtagtgctgctactgctctcatggcagatcgctttaattcatcttgtttttcaaactcctgctttactgagtttgcctttgcc

SEQ ID NO: 10459 - DNA, 450 bp, Homo sapiens
ttttttttaaaatgaattattgacaattttaatacatgttgcacagtacatattaatatagaaaaatacatgttatcagcagcatgatgttgaccatgttctaatccattccacctgctcaaatattagtgcaaataattatatatttgtaatgcatcactgctgtctagcaaaatctatgccttctgaataaatgactttcctctgaggttgactgctatgtgaagtatgatgtgatatattcctatttaaactggctttgtatggtgaggcagactgcaaccttctaaaccacttagaaaatgggcgagtgtgtttaattactcatctttccccccaaaagtcgataatcacaaaacaaaggttaatggtacctatcaaataataatgataaaatacctcgggtctagttcaaaaataggaattttgttaagcccaggggcagcctaa

SEQ ID NO: 10460 - DNA, 491 bp, Homo sapiens
cccaggccaaaaaaagaaagaaagaaaagtcagcggtaaggtaagcaggacccagaggagctgatattcacagttcttacatgtacaactctttcaggaattatccataaagtactttattttacaacctgcttctcttgtaaaactaaaggtccattttattacacaaaagttttatacagtgttaaaaccagaactgtatgtaaaatactgcatctaaatgtttctaaatagttagtcttgttccattggttcatcggtgacttctgtggcttcgtcatcattttccatggatgattctgaaagaatctctccagttttactgggaattggatcctactaattcttctgtttcacggcagtcagaagaaccacttactttcagggccttcgttttcactaccttccagaatgtagcaaatctttctcagcttgagacacatcagattcctccatttgattattttcctcagaagtctcttcattcacag

SEQ ID NO: 10461 - DNA, 210 bp, Homo sapiens
aaaattactacctttaaattttaactacttaaagtgtacaaattcagtgtcaattaattgttacaccttaaagtggttaaaaatttaaagtggtaaatttttttttttgagacagagttcactcttttgttgtcaattttaaatgtacttaatgtcataaaataattcacagtaattgtgtagttatcaccactatgaatctccagaact

SEQ ID NO: 10462 - DNA, 756 bp, Homo sapiens
tttttttttttttttttttccggttaaattcatccaatatttattgaatcgtgaacggttgcaaacgttgccacaatcagaaacccacccatcctgatgcctctcttggcttccccttgagaaggatgcctgaggcgggatgtccccccaaactccaggggacaactggggaagacatggggtatgcaaagagatatgatgaaaccacgggacaggaggagggtggggtggtgtggattccggggaagacacatacacacagactctcccgctcagaggcaaagaccgggggcgtcaatctctgcccccaacagcagccacgagaacatcaggggaaagaccagggtgtccacaagactttttcagtccttcctatcatgaagcgtctgctgagaggggctgggtcaaggtccctggactctgcctttcagggcgcattagccctgagccaaggcggctttgatggcggccaccaacttcagaaacttgctttctgtgtccacgtagccatcgcctttcttcttagagtgaatcaacttcccggctaccatcacttcaaagaacccggtggcctggggagttccctcgccgcagatgtccaggcggccgggaactcatcttctaacttcttcttgagctgaagatacttggacttgtagcctcaagcgccacaataaacgactcggacggcgagagccatggctcggggctgcaacatccgctgaggagcggacgcccgggccacactaacctccc

SEQ ID NO: 10463 - DNA, 522 bp, Homo sapiens
ttttttttttttttcagaaagaatttgacatgtattttcaaatgcagtgagttaggcagaatgaaagcagagtaacaagattttacctactgcttactttttcattttacatgtgtatttaatatgttcaatgcagcaagaattgctgatattattactgtgagatgacgtgtaaaaataacactaggaacaggtagtatacatcaagaccaacacgaatgcattgataaagatggaaaacacaagagaaaaacattaaatagtcttattacaagaaaaaaggataagggttaaatgattcaaaatctaaacaaaaattaatatacagatatactgtcttccattcagtgcatgaaagaattatctggatataaaaatcaagtatccttacattctgggtttcttggatacaattttctcctcaaaaataatttttcaactatttcaggaaatttttaaatctaaaataactctttttaatctgggctccaagaagaaaaaagaaataaatacttataatca

SEQ ID NO: 10464 - DNA, 773 bp, Homo sapiens
  misc_feature (1)...(773): n = a,t,c or g
ttttttttcagaaggaaatcatttccaataaaactcaaaatttctattaacatttaaattataaaccaaacattggcaacccacatatatatatacacacacacacacatatgtttgctatggacaaatgaagactgtgaggtcatactttcaaatacaactttggaattagtcacaaaaaatcaacatatattctcagaaattgtaccatttcctttggtctacaatccacgctatagggaggttttaattataatattaaattaatgtccccatttacccctaaaagtaggttctagaaaactattaggattgaataacaaggctttaatggctcaattttcttatgattatacaaacatataaatcttgaaaaggtaacgccatttagtaaaatccataaaaataacagttttgccacagtgcagagaaaagttcattcagtttgattccccatgccctcgacaagcagctttctgattagagctggaagacacaggctgggtgcagtggcgaccccgtaggtcccagctactggggaggttnnnnnnnnnnnnnnnnnnnnnnnnnnnnnnnnnnnnnnnnnnnnnnnnnnnnnnnnnnnnnnnnnnnnnnnnnnnnnnnnnnnnnnnnnnnnnnnnnnnnnnnnnnnnnnnnnngctttgtccatttattgtcaaccaaggattatggcccattcctgtgagtggcctgacccagccagcaagacccccggcattaggaggcaaagacatcaggccttgaaccatgtc

SEQ ID NO: 10465 - DNA, 424 bp, Homo sapiens
tttttaagtttgttttggaaataacagaaaagatatttattggccaggaagttggtgctgctaagaccgagaaatttaaagaatcggacagatggacgcagagaaccagagggcaatgtgggaccttctcttgccatggcctcaggtcttgagggaaggctcgggcctaggtttctggactgcaaaggggacccccaggtgggaggggcaggaagcagccggagtgagcccttcgcccctgagtgcctgggctcgcacctctcgagctgtgccctgggcatcactgagcagaggggtgcggcactttcaggaggcggaaacgagaggggtgggagatccacaggaccaaagggtgcagtgatgggctgggtggcgggcccagggaaatggggtggggatgggcttaggtaagacctggccctcc

SEQ ID NO: 10466 - DNA, 2471 bp, Homo sapiens
gaaaaccaggatcacacttccccctccctgttccttaatcccttttctaaaaaggggggaaaatccggatggattttagggattggtctggtgtcagctgtgttttattgcacacctaaatcctgattataggcttttcatttctccgcaaagcctttattttggcagttaagccaaatgtgttttccagaaagttagttattttctcctctttctttcctttctttcctccctttttcccgtctgaccccaaacgttattgtccaaacatgactggacagcagcttttgtttcttgaccctgtaatatgacagtctgctaatattgcacagaaggtgcagtttttgggttatagtcgtgattttcgctaatcaatcatattagcaggaaaaaaaatgacttgtttctgttgtacttgagtcttaagaaaaagtgcccatagtttagtgacaatttccaaaggctttagtaccacctgtatttcaaaatgggggacccaaactcccggaagaaacaagctctgaacagactacgtgctcagcttagaaagaaaaaagaatctctagctgaccagtttgacttcaagatgtatattgcctttgtattcaaggagaagaagaaaaaagtcagcactttttgaagtgtctgaggttataccagtcatgacaaataattatgaagaaaatatcctgaaaggtgtgcgagattccagctattccttggaaagttccctagagcttttacagaaggatgtggtacagctccatgctcctcgatatcagtctatgagaagggatgtaattggctgtactcaggagatggatttcattctttggcctcggaatgatattgaaaaaatcgtctgtctcctgttttctaggtggaaagaatctgatgagccttttaggcctgttcaggccaaatttgagtttcatcatggtgactatgaaaaacagtttctgcatgtactgagccgcaaggacaagactggaatcgttgtcaacaatcctaaccagtcagtgtttctcttcattgacagacagcacttgcagactccaaaaaacaaagctacaatcttcaagttatgcagcatctgccctctaccctgccacaggaacagctcacccactgggcagttggcaccatagaggatcacctcccgtccttatatgccagagtagagtactgaccagcaaaatggagaagatcagagaatgcagcagcagttttttttcttgttttcttaccactttattctttcagagtttaaagaaaatggactcatgcacagaacactatgcattttgaaacttgttcatcctggatttttttaaatcatttttatctcagaacttaaacaaaaattagatgtcgtgcacggactgtgtgaaagaagatgctttgcatatttgctgcactgcatcagtatcttactaaaaatgtgaaatgaaaggactattgtacactgaaatgcttaaatgtatctgaaagcacaaggtgatactcatttttatggtcttcccatttgtgctggtttttgcctctttgacatctgtcatcagtatttagagggtgagaagtgaatgtaacaggtataaataacatttttaaaaacaataactttgctataatcacagttgttccagagcactgtcagatacattctaatgaccagaactggtttaaaaaaagaaaatacaaccatgggaaagaaatcttaaatgaaaaacgcatctcattgtagggcatttttgcctcatattttactgggccatgtttgtttcctggtactcatgtattttttttttccagatctctttccccaagttgctattgtaagagtattctgctgcgtgtggatgcagttatacacattaaagcagatctggagtctgaagtagctataaagcagctataaaacagaaatacatgcatagctgcagaaaccatgataggtagaggacttttcttttggttttgttttgttttgtcttgtattgtgtttggctttacagagaagagatttttattacaaagaaaaaaattccagtgaattgtgcagaaatgctggtttttacaccatcctaaagaaaaactttacaagggtgttttggagtagaaaaaaggttataaagttggaatcttaaattgtaaaattaaccattgagtgtcaaagttctaaaagcagaactcattttgtgcaatgaacataaggaaagactactgtataggttttttttttttttttctccttttaaatgaagaaaagctttgccttaagggttgcatacttttattggagtaaatctgaatgatcctactcctttggagtaaaactagtgcttaccagtttccaattgtatttagcttctggttggaatttgaaaaaaaaagaaaaaaagaaaaaggaaaacctaaataaaataggtgaaagttccctgactattcaggtgaattacacaaaaaaaaaa

SEQ ID NO: 10467 - DNA, 576 bp, Homo sapiens
aaaaggaatgttttggaaaataagcaaacaaaaaaacctcaaaaaatagataaaaccagaaacataattcaggaacaataattagtaaaacgtgtcaaaaacattggcaaaggttcatacaaattctttatttaataacaattttcctatttaaccacaccaagtaccagcaggtgtatttaagaggataaccattaagaaaaacctgttgcagcaatagttaagttgttctttgacttgtatacatataactatctgtttcacaattctcaaataatacatatttaggcagcttgcactatgttataaaaaatttaaattcgttacatgccaatagtagagaattcaagaattatgtgttagaattcactaaactaaaagtgaaaatacacttaccaataacactgcataatgaataattcaaccacattttcatggcacttaactgcagagaccaaaatgttaagtctggaaatgtttggtaggcatcattgcaataaaatctaacaaattctaacaaatttctattttatgtaaaactcaaattatggattgtgcatgaatgtatctgtcatg

SEQ ID NO: 10468 - DNA, 428 bp, Homo sapiens
ttatttttgtgtttaattcttcaatgattgtctccttttcctgtatttcttctttatttgagttttctacttttttatcttgttccatttcatatactttaattttctcttgcaagaaactaatttgcattgtgaagtcttctttctttttctgataatcttctaataagtggtcttgttcttcaagctgctgttgatgagtgaggatctgttgtttggcttgtagtaagtctgcagctgtgctactatgagtgctgtttctcagagtttcactagcctgtaattgctgaaattgaatctgtaatttttgactctgttctgtcaactctaaaaattctctcattgtctcatccttttctcttcttgcttgttgtaaattagcagtgagctgggttataatgccatctctttgtttaatggcagcttca

SEQ ID NO: 10469 - DNA, 565 bp, Homo sapiens
tgccattagtccatttctttattaattttgacattggttcggctggtgaagggagaatggtctatacatcagagtagggtaggggattctctcccataacagagcatgtgggagagtcaagaaaagatccattttcataacaattaaaaaaatcaaggtaatttcaaaacttctaaaaagcgtctaatgtgcagactgcagcattctctaggcatcgtgtggagaccccaaactcctcccctaacggctcctactagcagccggagcgtgcagccatgccagccggagcagaggtgccaaagcggagtctggagcttcggggtccgcgggggcgctaagggggctactggggtggctgcttctacccccggagctcagctgatcttcccttccagactacgaggtgtgaatttcaaacttccgtaatggagttagcccacagtttattgctaaatgaagaagctttggctcaaatcaccgaagcaaaaagaccagttttcatctttgaatggttgcgatttcttgataaagtcttggttgctgccaacaagaccgatgtaaagga

SEQ ID NO: 10470 - DNA, 336 bp, Homo sapiens
ttgagctcaaagagagttctcattttccctattcaaactaatacccatgccgtgttttttaccttggatttaaagtcaccttaggttggggcaacagattctcactcatgtttaagatcttgttatttcagcttcataagatcaaagaggagtctttcccttttctcttttaccctcaggattctcatcccttacagctgactcttccaggcaatttccatagatctgcagtcctgcctctgccacagtctctctgttgtccccacatctacccaacttcctgtactgttgcccttctgatgttaataaaagcagctgttactcccacaaaaaaaa

SEQ ID NO: 10471 - DNA, 1702 bp, Homo sapiens
gaattccggtaaggagagtgcggcgcttcccgaggcgtgcagctgggaactgcaactcatctgggttgtgcgcagaaggctggggcaagcgagtagagaagtggagcgtaagccagggggcttgggggccgtgcgggcgggtcgcgtgcagccccgcggggtgaagtcggagcgcggggcctgctggagagaggagcgctgcgaccgagtaatggcaatgcagatgcagcttgaagcaaatgcagatacttcagtggaagaagaaagctttggcccacaacccatttcacggttagagcagtgtggcataaatgccaacgatgtgaagaaattggaagaagctggattccatactgtggaggctgttgcctatgcgccaaagaaggagctaataaatattaagggaattagtgaagccaaagctgataaaattctggctgaggcagctaaattagttccaatgggtttcaccactgcaactgaattccaccaaaggcggtcagagatcatacagattactactggctccaaagagcttgacaaactacttcaaggtggaattgagactggatctatcacagaaatgtttggagaattccgaactgggaagacccagatctgtcatacgctagctgtcacctgccagcttcccattgaccggggtggaggtgaaggaaaggccatgtacattgacactgagggtacctttaggccagaacggctgctggcagtggctgagaggtatggtctctctggcagtgatgtcctggataatgtagcatatgctcgagcgttcaacacagaccaccagacccagctcctttatcaagcatcagccatgatggtagaatctaggtatgcactgcttattgtagacagtgccaccgccctttacagaacagactactcgggtcgaggtgagctttcagccaggcagatgcacttggccaggtttctgcggatgcttctgcgactcgctgatgagtttggtgtagcagtggtaatcactaatcaggtggtagctcaagtggatggagcagcgatgtttgctgctgatcccaaaaaacctattggaggaaatatcatcgcccatgcatcaacaaccagattgtatctgaggaaaggaagaggggaaaccagaatctgccaaatctacgactctccctgtcttcctgaagctgaagctatgttcgccattaatgcagatggagtgggagatgccaaagactgaatcattgggtttttcctctgttaaaaaccttaagtgctgcagcctaatgagagtgcactgctccctggggttctctacaggcctcttcctgttgtgactgccaggataaagcttccgggaaaacagctattatatcagcttttctgatggtataaacaggagacaggtcagtagtcacaaactgatctaaaatggtttattccttctgtagtgtattaatctctgtgtgttttctttggttttggaggaggggtatgaagtatctttgacatggtgccttaggaatgacttgggtttaacaagctgtctactggacaatcttatgtttccaagagaactaaagctggagagacctgacccttctctcacttctaaattaatggtaaaataaaatgcctcagctatgtagcaaagggaatgggtatgcacagattctttttttctgtcagtaaaactctcaagcaggaaaaa

SEQ ID NO: 10472 - DNA, 166 bp, Homo sapiens
ataaaacatattttattaattttaaactctatcttgcagtctgatcattcagaaaggtcaacctagaaaaaagacatggctaagtaaactattttaagccataactaagtattttggaaagccttcattaacacataaagaattttggccaagtactgtggcttat

SEQ ID NO: 10473 - DNA, 519 bp, Homo sapiens
ttttttttttgtttcatcattacaaatagactcatagctctttaatttttccatttaacactttaattttccataggcctagattttcaagaagtccaatatctctcacttgaagtgtcttttccctggagtagattgggagatttgagggatatctgtccaaagatgagacagtctgtttctagtttcccatccagcctgatggggcgtctacagtttttaccacaaggtgtcgctgttgaacagattctggtgcagtctagtgcatagctgtccacttctagagtgatcacttgctgggccaagttcctctccttaagtggtgtctcacattaaggttcccaaattacagactcattaattcaccctaataagctcatccaggcagtttaggtcttcaggggcttccagcctccaacacacattgggccaaaaccagcctgtaccaccagctccaagccctgtgttgaatctaggtcattggtccagatgccccttcattctgggcctgtggtgtcc

SEQ ID NO: 10474 - DNA, 356 bp, Homo sapiens
ttttatatatatgcatgtattaccgatacctctcttttttatctgcaggaaatggacaggctactagcatggtcccactgccaggtgggagattcctgatgggaacaaattctccagatgacagagatggtgaagggcctgtgcgggaggcgacagtgaaaccctttgccatcgacatatttcctgtcaccaacaaagatttcagggattttgtcagggagaaaaagtatcggacagaagctgagatgtttggatggagctttgtctttgaggactttgtctctgatgagctgagaaacaaagccacccagccaatgaagtctgtactctggtggcttccagtggaaaaggcattt

SEQ ID NO: 10475 - DNA, 487 bp, Homo sapiens
tgcttcagtctctttattcgagagaaactttgtcctcaaagggaagaagtaagaagaccccctgctgaattatttcacagtagaaatagtagattcctctctggtcctagataccacccccagcagcaattttccaaacccaggatttggtaaccttgggcctagggcatcccagccccaacaagagcataacatgttagggaggaacgagagagggaggcagggcaggagttgaggaatcaccgaccactttcatccaaaccagacaccacctcgttttgcagagtcctcaggggaagctctcaaaacctcagttccctcatctgtgaaatgggagacatctgggcaagatgagtttgaaggtcccttatggttttcacgattggattctatcttctcccacccatccaggctcccaaccccaccagagctgactctggggtcgaatttgagccaatcccctccctttgtcagtgcccagtttcct

SEQ ID NO: 10476 - DNA, 330 bp, Homo sapiens
agacactcctgttccagcaggtggaaaccaaggtgcacagaagtcactggttcatagcaattctgaaatccatttgagtacaggtttgcagttctacactcaaagcctgggaataactccctatggcttttggttccaccttctgggctcttggttttatcctctaagtcatccttttttgtgtgaaagggagatgtgtttggacctaaatagttttcttagcctgcttcctgttttgtagaaatgcgtttgtagaaagggtccaaaggcccctttcccttttttggtactctttttcagctcaagctgaccagtaatttctgacaatac

SEQ ID NO: 10477 - DNA, 719 bp, Homo sapiens
  misc_feature (1)...(719): n = a,t,c or g
aattcggcacgagaccaaaggaggaaaatgggttgcagaaaacgaagacaaaacagtcgaatagagcaaagtgtttggccaaaagaaaaattgcacagatgacagaagaagaacagtttgctctggctctcaaaatgagtgagcaggaagctagggaggtgaacagccaggaggaggaagaagaggagctcttgaggaaagccattgctgaaagcctgaattcttcccaagggattgttgaagaaacttctgaagagggaaactctgtacctgcttcacaaagtgttgctgctttgaccagtaagagaagcttagtccttatgctagagagttctgcagaagaaatcactgtttgtcctgagacacagctaagttcctctgaaacttttgaccttgaaagagaagtctctccaggtagcagagatatcttggatggagtcagaataataatggcagataaggaggttggtaacaaggaagatgctgagaaggaagtnnctatttctaccttctccatccagtaaccaggtatcctgcccgctatgtgaccaatgctttccacccacaaagattgaacnacatgccctgttactgccatggtctgatgggaggaanatacngtnttgacccggagaccaaaangaagccnnaaccnnnattgaccnttgggacacctgccccnaacttctcttanaacntttgaccaanaaatganaaat

SEQ ID NO: 10478 - DNA, 377 bp, Homo sapiens
  misc_feature (1)...(377): n = a,t,c or g
tcatatgaattttgagggaacacaaacatgcagtctgtagcagatggtaataggctgacatattacacttgttgatgtaaatctgataggttcttctctccaaggacagctttttaaatatttaacagtatcaataatttttcaggtctgtgagaattttataatttataatttgcagcttaatgtataactattttgtcctaacaattcaaatatatttttattccagattgtatatatcctccagatggagataattccantttgaaattttattttccatttattcnacattgcattaattttatggcacatatactgtcaatatatgggggngaatggagtttaatccatgncccatgtgaatgncaaccggg

SEQ ID NO: 10479 - DNA, 394 bp, Homo sapiens
  misc_feature (1)...(394): n = a,t,c or g
gatctgtctcttccacgtggtaactatgctcggtttcatgttctgcgtgtaccatttcatggagaagggactgaatttgttcttttgcttcatcttcgatattctggggttctgcctccacaggaacctgctcctcgggctcaatgcgggcagcagcancccggggcccggagagagacaaagcatggaggacacaagaatgngaggaaaggcggactctnangaacttcattcttcacgtggttatgtgattnatagctggcnatggactntgnnctgcnntngnaactntgctatnnnganntcanaancnanaatnngtctnaangncaananantnnaancngntctactcaaaaaccnnnactnnncnangncaccntttnnganaaat

SEQ ID NO: 10480 - DNA, 2688 bp, Homo sapiens
  misc_feature (1)...(2688): n = a,t,c or g
gcacgagaggtgtgcaggcggtgctgaggcacagggtctgctgcaggagcacgggcccgaacccgctccagcgcnccgccgcgccagcgtacnccgcgtacgctgtgtacccccgcgcactgaaggaggtccaccagccctcaccagcccccgcggaccgtgcaatggcccagcgtaagaatgccaagagcagcggcaacagcagcagcagcggctccggcagcggtagcacgagtgcgggcagcagcagccccggggcccggagagagacaaagcatggaggacacaagaatgggaggaaaggcggactctcaggaacttcattcttcacgtggtttatggtgattgcattgctgggcgtctggacatctgtagctgtcgtttggtttgatcttgttgactatgaggaagttctaggaaaactaggaatctatgatgctgatggtgatggagattttgatgtggatgatgccaaagttttattaggacttaaagagagatctacttcagagccagcagtcccgccagaagaggctgagccacacactgagcccgaggagcaggttcctgtggaggcagaaccccagaatatcgaagatgaagcaaaagaacaaattcagtcccttctccatgaaatggtacacgcagaacatgttgagggagaagacttgcaacaagaagatggacccacaggagaaccacaacaagaggatgatgagtttcttatggcgactgatgtagatgatagatttgagaccctggaacctgaagtatctcatgaagaaaccgagcatagttaccacgtggaagagacagtttcacaagactgtaatcaggatatggaagagatgatgtctgagcaggaaaatccagattccagtgaaccagtagtagaagatgaaagattgcaccatgatacagatgatgtaacataccaagtctatgaggaacaagcagtatatgaacctctagaaaatgaagggatagaaatcacagaagtaactgctccccctgaggataatcctgtagaagattcacaggtaattgtagaagaagtaagcatttttcctgtggaagaacagcaggaagtaccaccagaaacaaatagaaaaacagatgatccagaacaaaaagcaaaagttaagaaaaagaagcctaaacttttaaataaatttgataagactattaaagctgaacttgatgctgcagaaaaactccgtaaaaggggaaaaattgaggaagcagtgaatgcatttaaagaactagtacgcaaataccctcagagtccacgagcaagatatgggaaggcgcagtgtgaggatgatttggctgagaagaggagaagtaatgaggtgctacgtggagccatcgagacctaccaagaggtggccagcctacctgatgtccctgcagacctgctgaagctgagtttgaagcgtcgctcagacaggcaacaatttctaggtcatatgagaggttccctgcttaccctgcagagattagttcaactatttcccaatgatacttccttaaaaaatgaccttggcgtgggatacctcttgataggagataatgacaatgcaaagaaagtttatgaagaggtgctgagtgtgacacctaatgatggctttgctaaagtccattatggcttcatcctgaaggcacagaacaaaattgctgagagcatcccatatttaaaggaaggaatagaatccggagatcctggcactgatgatgggagattttatttccacctgggggatgccatgcagagggttgggaacaaagaggcatataagtggtatgagcttgggcacaagagaggacactttgcatctgtctggcaacgctcactctacaatgtgaatggactgaaagcacagccttggtggaccccaaaagaaacgggctacacagagttagtaaagtctttagaaagaaactggaagttaatccgagatgaaggccttgcagtgatggataaagccaaaggtctcttcctgcctgaggatgaaaacctgagggaaaaaggggactggagccagttcacgctgtggcagcaaggaagaagaaatgaaaatgcctgcaaaggagctcctaaaacctgtaccttactagaaaagttccccgagacaacaggatgcagaagaggacagatcaaatattccatcatgcaccccgggactcacgtgtggccgcacacagggcccacaaactgcaggctccgaatgcacctgggcttggtgattcccaaggaaggctgcaagattcgatgtgccaacgagaccaagacctgggaggaaggcaaggtgctcatctttgatgactcctttgagcacgaggtatggcaggatgcctcatctttccggctgatattcatcgtggatgtgtggcatccggaactgacaccacagcagagacgcagccttccagcaatttagcatgaattcatgcaagcttgggaaactctggagagaggctgcctttctggttccatctccttgggtgtgaggatagaatttcgaacaccaagagtcaattcccttgacttgcagcccgagtaattcaaaagcctcctccctagggtcaagaagacactaaagggaatatttggctccgcttgcaattccatttaggaaacaccctgctgtgttgtcatcttcaatgaaagaatggtcttcctgccag

SEQ ID NO: 10481 - DNA, 412 bp, Homo sapiens
ctagaatatctgagatctgatatctccaggttaatgatacaggtcactgtattaattccaaaagaacacactgatgggagtggggtggaaggaagacattgaatgctaggtattacaatttagatacttgtttttttctatttatgtgaattggggaacgggatgtataatatatgtacttgcacagctgcatttcaatgctttaaaatgtgttatccaccaaagcacataaacaactgagcactatcacacgcaggcattaccagtgagaccaccaccatgtcagtgtgtcattcattataatctgaaccgttgggtctaaagcacccattctgcactgggtcaaccaggcaagtgtgaccttacccatcattcacagcctggcagatcacatgtccctgagcattgaact

SEQ ID NO: 10482 - DNA, 893 bp, Homo sapiens
ctctttacatgaaactactcatacttaagcaaaagtcagtcttatagcaagactgttagccctcaaacttgactctactgatctgaccatttccctctcatcgccagacaactgacgatttccctggttttagtctgcgtctctgctttaaagttattgtgatatccttctagatcatacacaagtctaacagttaattagttaacagtttttaaactaggtttgtgggtatttttttggtagcacatgtatgctattacatacaaatttttatttctaaaatataagatctgagattgaatattttcattaaaagctacagttttgtgaatctttgtgcttcaacattctttgcaagatgatacggtatttaggcatttgccttatttttgcatctcacaaacataagtgcaatagatcttttcattgaacagcaaagtaggattcatcattccatatgacttgagttacaccagacctattctgcccaatgcctttttgattacagtgtagcttgcccaccgcatttgtcgttttagatactttgctagccggccactttggatttcatcagacagtcctaacaatattgtctgaacggctgaatatgaatagatacagcagaggcactcctgatatatgatttttatccatgcgtcagtttttcccacccagtgtagcatcctaaagataaagccagaagctaagctgccagtgaggctgtggattggggcgtagaagtggggagccattggggacctcacattacacacacgaggaggatcattaaccatgtggaaaagggcaaaaagcatgtgtttgccaacatctggataacttcatgggcctttggataaaatgtatattatggtatatgtgcctgggactgtgtt

SEQ ID NO: 10483 - DNA, 330 bp, Homo sapiens
cagttaataatcaactgtacctaattgggcattcacttgtggacctcttttctgccaactaaagaaaaattgagctgctttactcctctgccttcccacccagaaaccgtgtcagcatggttgcctggctacctgctcatgaaggacttgattaatagcaaattggcaatttaacgagccacttccatgatctccaaagaaaccaaaatacaaacacaatatttaatcttgccaaccgaagacgatgtgactgcatgaagtgcccttcgttttaaaagaaagattattggattaaaagatgagttttacaaccgctacataatgaaaagt

SEQ ID NO: 10484 - DNA, 221 bp, Homo sapiens
tacaactttgctgtaaacctaaaatttttcaaaaataaaaagtatattgaaaaaaattcctgggcatgtaaataagaaaatatgattacataggagaaaaaaaagtcaatcaaaagctacccagaattgacacagaaggcaaaattagtagatggagacatgaaatcgtgtaactcagttcctccccacggtcaaaaactaaaaacacggaagctaggaaa

SEQ ID NO: 10485 - DNA, 763 bp, Homo sapiens
  misc_feature (1)...(763): n = a,t,c or g
cccgtccccaagcctccgccccttagcccccgcccccagctgccagtccccagcagctcagtcctgcagtgagagtcttgggagtccatagctaagcaccaggagctgagcactgcccgctgtgcctgcctgcaagtctgacatggctcaggagaaaatggagctggaccttgagcctgacacatcttatgggggaaccctgaggagatccagcagcgctcccctaatccatgggctcagtgacctttcacaggttttccaaccttacacacttagaactcggaggaatagtacaacaattatgagccgtcacagcctggaagaaggcctggatatggtggaacagagaaactgcacatgaaagggaaatgcaaacggcaatgcagataagccaatcatgggatgagagcttgagcctgagtgacagtgattttgacaagccggagaaattatattctcctaagagaattgacttcactccagtttctccagcaccttcacccaccaggggattcggaaagatgttccgtgagcagcagtggattgccaccaagtccagttcccangtccaagaccgattttcaagcaggagaagtcagagtccaagtcaagtgcattaagacccaagtgttcttgggtcctcttaaaaagaaaaaggtgaaatggagaccagaaagtcagccccaagagactctttccaaaggcacttancaatatngttatctccagatgccgcgcaactgtctgatctcagttcatgttt

SEQ ID NO: 10486 - DNA, 1226 bp, Homo sapiens
gtgtaaatgtgacatcctcacacttcccatatctttaactttgaaaaatcttcttgtaaacttaaagcctagaagtattccaaagcaagggttacagcagtctttattctcaggctcactgaattaaacccaggactaattccacagcacaggcacaagaagcctgttgtgtagtgtactctgccagtaccttggatttaggagctccatggggaactgactaaaccgggagagagaggatttggagctagtcagtcctggtaatctatgaaatgctcatttatacccaggtttcataagcttccaattctatagcaaacccaggctctgagtgttttagaatttcctaattcatggaagtgtttcttgtcttgatcccgtgaccaacagttgaaggttggtaaggacttttctacagtctgaacacaagctaaagccctctttcattgttcacacactaactcctactgccgacgaaccgaaaaataattaatgcagaggagatttatgtcttagccataactccagttgtacaactcaatcgccccattctcttttacggttcaaaatgtactgctgaccttgggtttgtttttgttttgttttgtgtttcctgttaggatttatttggggacttttggtagtttaaactctttaaccttttcctcgccgtttatgagtaaagctaaagctgttatcaacttcttattctacgatactaacacgggttttcagtgtttggttggttttattattattattaattttgcgtgatgtgaataccctctcccatcaatatttgtattatggtgctatatattggtaatgatcctttaatattgggaagggattttaaaaatactgtgattaaactgggtttcttcctttgattttcatattttaaataaagccacagtcatttatacaaaagaaaagcatctgtccctgggcaaatcttttgaggacagaggtcaaagtaaactgcataaggtttttacatcatttctgtatgtatttgatatatagatcaatatctgtacaaatttaatcttttattttcttggtaactcgtgatcattgaggaaagtgtttgaaactttctcatgaaggtgtatatataatgggcgtggaaaaattccctttgggaaaaatttatggttccctttccatttttacccaaattgccaaattttcagccagggatgtggaaaagccattaaaattat

SEQ ID NO: 10487 - DNA, 720 bp, Homo sapiens
tttttttttcacagttctgacatttttattcactgatcataaatatagtctcatgagcattaaggtgatcatgaatgatgtactagcacctggaacatgaccatcatggagcactcactgattccccatcactggccaaagaagtcggggcatcttcctttcaccaagtgttcaactttggagggaccctccttctggtgcagcaattttattcttggcttgttctcaacaattaaaaaatcataaaagactgagtgtttgcaataaaatatcaaagaggataagaagattttctgttcttcttaaagtctaaagtaaaaaggggaggtagggaagaaggaaaggaaaggggaaagatgtcagggatctgccacgtttcttccttcctccagagcattttacaaaaacaaaaccggggaggtatttattaatgctgtttggagatgggttgcgtctctctgatgagccactcgagagcttcctggcggccctgtttctgcaattccttcccaatcacatccctgcaggtcaggtggtaattgttgagccagtcgcactctttgtctgtaagagaatccacatctatcattttggtctgaattggaaccaatgttagaggttcaaaggtcaggcttccccggttattaaaattatacttggtcttcacaggaaccacaaggacaacattctcaatgcgaattccaaaagccccatcttcat

SEQ ID NO: 10488 - DNA, 320 bp, Homo sapiens
ggaaatgccgagcaagggaagggacccatcctcgcgcagattgttagggcggcgggaagggaggattggaagggagccatcctctgggagattgctgaaggatttttgactgtcaggggaagaatttaatagtccctcacttttacgaatggttctttcttacggtttggagctttcgagagcttctggtcttggttcatcagtgtacgttgtcatcaagaaatgttggcctgtttcaggtctgactcaaaggttattttctttctaaaataagtgttattactattatgcagcttttcctacagatgttatcctggaaa

SEQ ID NO: 10489 - DNA, 498 bp, Homo sapiens
tagaaaagaacttggcattatttattcaagtttatgatacatattacactcccaggtatatgttatacagaaactgacgtagatgtgatggaatacatatatgaagaatgttcacattagcatttataacaatcctaaactggaaacaacccagatgtccatcagcaatagaatggctaaacatattgtcacatattgttataatgggacactgtaatatgcagcaatgaaaatgcacaaattacagctataggaacaacctgaacaacatatgaattaaaaacaatgttgagcaaaagcagcaagaacaacagattacatattatattgttccagttacataaagttcaaaagaaagagtgagactaaacaatatattgtttagggatgcatgcttgcgacaaagcgacaaagaaaagcagggaaatgattatcacaaatgttagaataatgactacacttaggagggagggaaagagttgtgttcgggaaggtcat

SEQ ID NO: 10490 - DNA, 208 bp, Homo sapiens
aagaaatctgctagaaaataaactttattcaaacaaaaaaatgactagagaaacttcagcaatttagcattaaatatacttaattgcaaatctaagatcaaaattaaggtgagaacagggtataataataataggttatatgataatgctatttgttttgtgctgtatgttctgatgaataaaaaatgatgcaactaaaaataggaag

SEQ ID NO: 10491 - DNA, 127 bp, Homo sapiens
  misc_feature (1)...(127): n = a,t,c or g
tatctttgaagataaaaaataacttcttattttctaattctgagaatgatttaagttcactttctaacctatccggggctgttttagttatttttgaacttccaggaatctggcnttcgaacccaaa

SEQ ID NO: 10492 - DNA, 474 bp, Homo sapiens
  misc_feature (1)...(474): n = a,t,c or g
caagaagctctcatagagatttatttagtgtgagaaatatgagaacaatagttgtaaagaacaaatcaataacccgcagtgtgcattttggaaaaccaaataacttcttcaaatttctgagtacacagagggtacctgccttgaaatttaaatgtctaaggaaaatgggagatgattaagagttggtgtggcctagtcacaccaaaatgtatttattacatcctgctcctttctagttgacaggaaagaaagctgctgtggggaaaggagggataaatactgaagggatttactaaacaaatgtccatcacagagttttcctttttttttttttgagacagagtcttgctctgtcccccaggcttgggattgaagtgggtatggatcctcagttggaatggcaacctccacctcctagggntcaaggcgatttntcaagcctcagcctcccgaggcagctgggggctttagggc

SEQ ID NO: 10493 - DNA, 325 bp, Homo sapiens
gggatccaagccagtgacttgtgcgctgcgcgtctctcagaaacttcttgggaatgcggtgtctgtgaaaacctgcttcctctccttttgaaaatgaaacttgctttactgcgtaggtgaaaagccacggcaagtgggtcgactcggacggataccggtgcggctgccccgggaggtgtcgcagttcggggactcccttcgcactggtcgcgaggcaggagggagcagggtgggaggcgagtcagaggagggtgacttacctgaagaatacaggttggtagcctgcacacctgaactcaacgctggcgggcgagaaaaccaagca

SEQ ID NO: 10494 - DNA, 567 bp, Homo sapiens
ttttttttttttttaggtttcagttaatacatttattacagcaggtctttagtcattattgccattaaaaagttttcatgaaatttcacaaaatcttttaggctattagtattagctttctttttatggagtgacactttgttaatttatgaaatatttacagcatttacaaaaagtaagagaatgtctaataaaatttcttatacttacaaaattcatacattatactactgtatttgagatgtcttacttggtagaccaattaaactatgacataaaataatttacaaagatatatttaatctttcttaattcattgaaaacaaaaccatattagttataaatagtcctttacaaatcattgtaaaacacttcattgttttaactcgagccttagcttttacaaatatacttaataaatgaattagttcagatagcaaatagaactgtgcatttaaaatttcacttaatactataaaacaaaacaacctgaaaaagcaaacggcctggtacttcaagtaaaaatttgtagaaccagtttttatgcacgcgtggggtggggagggg

SEQ ID NO: 10495 - DNA, 400 bp, Homo sapiens
  misc_feature (1)...(400): n = a,t,c or g
gaaaaaaaaaaaagaaaaggaatttgaaaagttgattaaaatgaaattttagtgaagaaaactcagtcttaagggaaatctgaaatgagaaaaacgtttttatttgaagacagtgcagtgtattttgggttgcaagcataagtgattgcttgatgtttattcttctttccagagctgaaaaataatatttttgaggaaaacagcaactattaatggaatgctacatttcttttttttatttattatttactgttgattaaaaaaaattaatagagatggggtctcgccatgttacccaaggctgggtttccnnnnnnnnnnnnnnnnnnnnnnnnnnnnnnnnnnnnnnnnnnnnnnnnnnnnnnnnnnnntgggagccaccacgcctggcctagaatgc

SEQ ID NO: 10496 - DNA, 650 bp, Homo sapiens
gctttaatttactggcagaggaagataagcatatggccggctttgacccaggttgccatccagtatctaagttgccccatgtgtagttggcaatctgaatgtatctttactaaaaatagccactttcatccaaaacagatcatgagcctggactttgacaatatagaacaactgatgtttctgaaaatgaacttgaaaaatgttaactacgattattctacgttggttctgagctgggatcctgagcagaatgaagttgttcaaagcagtgaaaaagaaatactgccttaatttctttttctccatttaaaatgggcaactttttgctgtgttactgtatcttaatagctgtagttgttaaatataatcattatctttataaacacatctggggaaacctgaaatcacacaagggctgaaaattcctcagaggcaatataattttgataaaatgaagattaaagatttcatagctataactgtggcgctacgacttggaaaattttgcttataccaatgagagagaagatatttttaattaaaaaaaatatagtgcagcattgaaagccttaggctttcttcctggtagattgaactagtaattggttttaagtaaaacttcccccaccatgggaaattttattgctctg

SEQ ID NO: 10497 - DNA, 446 bp, Homo sapiens
  misc_feature (1)...(446): n = a,t,c or g
actacaccccactnnnnnnnnnnnnnnnnnnnnnnnnnnnnnnnnnnnnnnnnnnnnnnnnnnnnnnnnnnnnnnnnnnnnnnnnnnnnnnnnnnnnnnnnnnnnnnnnnnnnnnnnnnnnnnnnnnnnnnnnnnnnnnnnnnnnngaaatttaaattcttgaaagctttaggtgatgcaaccattgaagaactttaaatagggtcatggtatgatcgaggtgttgtgttgttttgtttggggaagaggggctgggagatcccagctagtactgttgaggttgatttgaagttagagcagtgcagggggcatgcagctatgatggggctaagagtcactttanggcagctgtttgcacaatgatggattcccctgttcgttgggggcacctcgccagatttctgtttcctgtctaatcttttagggatccccgtttnaaaagtttg

SEQ ID NO: 10498 - DNA, 738 bp, Homo sapiens
ttttaaagtagtcaagatttccttttactcaaaaaaaatcacttcagaggtgacctccatgtacaaaaggcaagatcaatcacatttatcactggacacaaaggatatttcaaaggtatttaaaaatggtaatttcaaaaagaaaaattaattttaatttttctaatgcattatcaagaccatacttgcttaacaagttaattatgctattgatacaaaacatacaatatttacacttaactgtacaaaataatttaatgtttacaaaaatattagaatgtttagttgactgacacagtcttaagtaatctcttctagagaagtatatagtaagaccactgattcccatttcatttcttttttaataagtcaaagaaaggatgctgcaatgcttcatccaaggtaattctttgagttggatcatattctaacattcttcgaaccaggtcaaacagtttctcatgttcttcatcatgacaaagcataaattccttcaacggtttgcagcgtctcctaacatatctaccagcagaactgtgttcatcccaatctaggctgggttatgggtgaaaatacttgcgttttcttgttttctggaatcatgtgttgtgggtatggggtcctaatattcgttccatcattgccaggtgctctttactatcatgagtctgaagactgtgaaaccaaggtaatattcattaagatgccacctatgctccaaacatcacaaggctgagg

SEQ ID NO: 10499 - DNA, 1307 bp, Homo sapiens
ttttttttttttttttcccttgaaaaaactaggcatttttaatatataggagtggcacagcaaaggataaaaaataaactaatgtcatcaagacaaagaattagaaaaataagcatactagaagttatttatgtttaatgcttaaaagtctgaattcacaaacaatctaccattatagaagtactggtggtcaatacaatgcattagaactatgtacaacgcacagtttagtatcaaaatctttctacactgtagagttttacgaaactgttaatgacatcaaacactaagcacttaagacaccatttttttttttctgctaccacattaggaacgtcaatggacagtccatttcaacttgcagcatccatccatttctagtatgaaattaagtaattttctacttatacaataaagtatatctacacggttcttttgattttgatccatagcagcaaaggcactgtacatcagcagatccacagacttaaaagatttttaaagcattcaaacaaaaaataataaaaaaagaagtcacatattatagtttaacagcaacaacaacaacataaaagataacacaatgtttctggcacaatggcacagcctgtgtccatttcagggacatccaactaagacatgggaaagaaccggaggtaaagaaagcaagtcctcatcccaggagagagtccattctttgtgtttttcagagggaggtctctgcaaaccctcctctgctgtccttgttttgtaaaagacttaacttgcacagcagtgggagtcctccccataactgtgcagctcccaaagagcatgccacaaaataacccataatttctcataacaacaaaactgactaaagatatatatatctccttttgcaaagaaatgtggcaaaaatatccagaagggagtaagttctctctttgaggccaaatttaatttgttcatctgcctataatacaacaaaaaaagggaactaaaaacatattacaaagacacttgtcaacgagtcaaaaaaagaaaaaaagtccaattacttttatcgaatataatctaaagctatagatatattggttaacgttgtctaaatagatccaaatgagtatgagttggcctgttgtgttctaattgttcagccaaatttccaaaagtctttaaaagatgtagaaaacaaaaacaaaaaaacctaataacaacacagcaacatattgcttccatgtgtaattatacatttcacatctctatacagtcatcagtctatacttagtgacattttaaattaattattttaaaccttcctttcc

SEQ ID NO: 10500 - DNA, 324 bp, Homo sapiens
tgagtatacaggtttgctaaattggtgaaatattattttaaaaggtttttccaagatgagaggttaattttttatttcttccattcccttaggattccaagaggcaactgaacctgccatttttatatataaatacttagaactcaacaagtgatttagcatgaactgaggtcctctatgtctgtatgtatatgtgcaagtgcagacatggatacatggttaaaatagatataaactttgtaattgcaataacaacagagtttggtagaactaaaatgccaaaaactcgtttgctttttctgtaatgggatctgaggcctactg

SEQ ID NO: 10501 - DNA, 340 bp, Homo sapiens
tcatgaaggagaatgatcactgtgggctgagttagtgcaagaatgcttcagagacatttccttgacactaacctcctaagaactgcatcttgagatatgctgccctgatctgtgttgtttttgctacacagctgaggaaaagaggtacatatcctcctctaaagagctgggcacagggaactcaccaaaggggcattttgttacatattggaaaaacaggcaccttcataaggaccaactacatttagacttctccagaaatcccatttatgcccctttttgcagaggaaggggctggattgactcccaaatccaaatttaacttcagccacaaactaat

SEQ ID NO: 10502 - DNA, 441 bp, Homo sapiens
tttatattgattattatttttatatatctatttctgcatctgaaataccacagtaaggaaacaggaaagtcttgttgctacagatattatttatggcaatcatagtatccatttaatagtcaaaccatgcaaatatatcctggcaggaataagcatactttaaaaatcatttgaaaaggaaaacttattctttttcttactttttgaagctgatgtggtatagataggtaaagctcttgctgctcttctcaaaatttcttgttgtctttcttggctgaattcttttttcataacgttccttttcagaattggacaagtagaactctttggagggggaagcgggagatgtgaaaattgtcatccaataggaccatacaaacataacaaagaacagatggaaagccacaaggtaaacaacggtctttccattttcttcatttc

SEQ ID NO: 10503 - DNA, 413 bp, Homo sapiens
tttttttttatagatgaaagagggtttatttattaatatatgatagccttggctcaaaaaagacaaatgagggctcaaaaaggaattacagtaactttaaaaaatatattaaacatatccaagatcctaaatatattattctccccaaaagctagctgcttccaaacttgatttgatattttgcatgttttccctacgttgcttggtaaatatatttgcttctcctttctgcaatcgacgtctgacagctgatttttgctgttttgtcaactgacgtttcaccttctgtttcaccagttctggaggaattgttgaacagcttacagcactgcctgaagaagtgatactcagagttcttgttctatactgattcatagctcccacattttcttcatctctgaaaggcctgaatt

SEQ ID NO: 10504 - DNA, 331 bp, Homo sapiens
  misc_feature (1)...(331): n = a,t,c or g
ctcgcctgggtggctttcccatcttggcctctggcgtccctgggactactcagaccttcttcctctgttttccttctaagcccacttttagtttgtttccacggtactcagaatggtttgctgttttcttcttttctctatttttctatgctccttcctgcacgatgaagttgatcttttagatttctgtcacactctagcctgggtgtgacaaattgagaaagagagagagaggagaaaatcttcattgtgataatcttcattgtgataattatcttttacctttgttcactcccacttatttatttattggtccttaatattgntatta

SEQ ID NO: 10505 - DNA, 595 bp, Homo sapiens
tgtctttccacaatgtcaggcttttattgaaggtatttcaatcacaaaagccatgagctacatggagttcccaagaaggcaattctccatcacacttcccatgcactagggagtcacgggcacatagtcctgagcacacaggctcaaaccacttcacaactcagtcaatattgcaaaccatatataatagtatacttaatcaatatgtcaaatgttcataggtttaacatttcacaacaaacaaactaacatttaacacaagaaggaaaagggataggagaaaggatcacaaaccagtccaaggggagagaagaagagaaaagcggtcctgggtccagggccgggtgggtccattggtcttgcaaggaaagagtctctgaggtgggcagagacttcagcaggcagatgcccaagttttcatcaccagtgactgcaagatggcatcagttaacatggctatttcgagctgctgaaggcctgctcttttacggttacagagtcctcccatgagaactgatcatggaagagtgtgcttgtttgagtccttatctggttggatacagtcttttattttttaatttgtttagtagacaac

SEQ ID NO: 10506 - DNA, 720 bp, Homo sapiens
aagtaccaccatccaatgagaatataaacatcactattcagtcttgaaggttaagacaccagttctgtaatgagctaggtttgttataacaaaaacccccacttccttcaacaaattctcaggagaaaaataacattcctttttaaaagtatgtttatgcaaacaatgggtttaaagggtggtttgatcacttttttaaaataaacttaaaactgagctctgagtttcagagactgggcaagatcatagtaacacaataagggagtgaattggatgaattggtgcctcatgcctttttgatcagcagaatttagtcactaatcctttcaatagaagattaatctgaaggtttcatttccctgaaggaagtttgcttctttcaaagtttgtgctttttcactgaggttagaaactgaaacatcctaacttcctaatacaacagatatctactgctggaggctcaccagctccttccttcacttcactatttgcccaacgaagacagattctgatcaaagagggacaagccagttgagaaattgctgcagcacattctccccatgcccttagaaattgttatgattgtcccagaaatccaggcttaaatgatactcaggtgtaatattcaagataagggtctgggagaatataaaatattaatttgagggtgaatcaatctaattcagtcattgtcttggattgtccgactaagtataatgt

SEQ ID NO: 10507 - DNA, 353 bp, Homo sapiens
gtccttctgttgcagcgttccacgtcatccttgctgatggggtctgacaggaagcacaggccccaagccagcctgaccttctgccagaaggagagcgctgcgatggccctcttgaaggtgacggggatgggtcggtcacccaggtggaacttgcagaaaggcaccttgctggcctccttgaaggcctccctgaactcgccacctggggccatgcccagctgctcggtgatgtgtgcagacaccttcagcagcagcatctgcatcagccccgacatgagcccgttctcgtcacggcctgctgcagcttctccaggctgagctcctgggcctccgcagcagcgtgctctcgtcca

SEQ ID NO: 10508 - DNA, 919 bp, Homo sapiens
ttccagtggacctgggctgttgttgcggttgttttccttctctccgtgcaacgctggcaagtctcaaagtcgccacagaaacatgcccctgattcagtgcctctgcttagctgtaacatgttaatcagaactacctggcatcttcctgaacaagactttcaataggggccagtatgcttcgcttcatccagaagttttctcaagcatcttcaaagatactgaagtactctttcccagtgggactaagaaccagcagaacagatatactttctctcaagatgtctctccagcaaaacttttccccatgtccaaggccttggctttcctcatcatttccagcgtatatgagcaagacacagtgctatcatacatccccctgcagctttaaaaagcagcagaagcaagcacttctagccagaccctcaagcaccatcacttacctaactgacagcccaaagccagcattatgtgtaactctggcaggactaatccccttcgttgctccaccactggtcatgctgatgacaaaaacttatattcccatattagcttttactcagatggcttatggagccagtttcctatctttcttgggtgggatcagatggggttttgctctaccagaaggtagtccagccaaaccagactaccttaatttagctagcagtgcagctcctcttttcttttcatggtttgccttccttatttctgaaagacttagtgaagccatagtcacagtaataatgggtatgggagtagcattccaccttgaactttttctcttaccacattatcccaactggtttaaagccctgaggatagtagtcactttattgggccactttttcatttataatcactttagtagttaaaaagtagttttccaggaaaaaggacataagagaccgggtcaagtata

SEQ ID NO: 10509 - DNA, 409 bp, Homo sapiens
ctcctcactccagtgtaaaaatataaagaaatgaagaatgttgaaccctcacaaagagataaaggttatttgatacatgttggtggcctctgcccttcagtatctgaggccgatttaaggtctcatttccaaaaataccaagtttctgaaatttcaatttatgattctactaattacagggtgtcaagaagaattgtaagcagattgaatctgctaaattattacctgatacacccgttcaattcatacctccaaatacattgaaccttcgtagctttaccaagatcataaagagactggctgaactgcatccagaagtcagcagagaccatattataaatgcacttcaggaagtgagaataagacataaaggttttctgaatggcttatctattactactattgtgga

SEQ ID NO: 10510 - DNA, 637 bp, Homo sapiens
catttgtatcatattcatttattctcaatacctgggacatttaaggcattcaataatgaattaaagctgtgccttattttggtctgcattaaaggagtggtctaaatattacaagatatattttgcatcagaaaatcaaacttcagcagtttaacatgctggcatccatcaccaaggcatgaagcaacacatttgctaatgattcctaatcactacagtgctacatcatttacttaataaatactgattcagtacttatatatacagatagtctgatggatgagtaaccacatgtgatgttgttcaggacatgatgtaaagttgaaaggtgcatattgctatgttttaaaggctgcctttacagtagaagcagcaaagtgtgcttaatcgactgctgtcctctgatgaccaagcaaatgcaacaaatgaaatatgcacaaggctgtccttggacagtacttgtttgctttgctcacaaaggagaaaaggaaagaaacaattgaaaatatgtatatggtgaaagtatgtgagtccgagcagaaataacaaaggcaaaaggatgaggagagatggagtaagtctagagaagaaaataaatggatgagatagagagctgtttaagcaaaaaaggtgtcag

SEQ ID NO: 10511 - DNA, 594 bp, Homo sapiens
cttattccaaaatgttgagatactggggagagataccaatatcatcaagccagaccaacagaagttccttcgatttgctcccacgggagttccgtctggtggaagtccatgacccacccctgcaccaaccctcagccaacaagccgaagccccccactatgctggacatcccctcagagccatgtagtctcaccatccatacgattcagttgattcagcacaaccgacgtcttcgcaaccttattgccacagctcaggcccagaatcagcagcagacagaaggtgtaaaaactgaagagagtgaacctcttccctcgtgccctgggtcacctcctctccctgatgacctcctgcctttagattgtaagaatcccaatgcaccattccagatccggcacagtgacccagagagtgacttttatcgtgggaaaggggaacctgtgactgaactcagctgggcactcctgtcggcagctcctctaccagggcagtggccacaatcctggccaacggcggggttttgactgtgctaatgagagtgtcctggaagaccctaacttgatgttggcacatgagtattgccttaagttacca

SEQ ID NO: 10512 - DNA, 1099 bp, Homo sapiens
gtaacagacttcatcaaaggaatactctcttcagtaatggtgattttaaaatactcggcaatttttgtttttcattgactcagacacagttctgtctaattctgaccttatctattcctatcatcctgttgttcaaagtaaatgtatttttaccaactgtttgagagaggaaatcctgggataattagctgaaggatatagtgtaataaaaaaataccaagttttgatattttgaagcctctgatctactagggatgtttacgatacagtacaagcctgagtcagagctgaacttctcaaagttctttttcagacttgggattctgtggtatattctgaaactggaaaataggcttctagggagattcacaggtccccaccaccactggcccattggcgccactgggccaaagtgaaggggcctaggaacagctcacacctttttctgagagctataggcacagctttaagaagagagattggtccgcagccagtgacccatatcggggtactcatagagaggggttttgtttaataggattacccttgaccagatatccatgatctgtttcacatttttccgttagattatttggcacagatgtgatcaaattgcccttaagatgctctttgttctgtgtactatttttcccctctcctaacacaagcatcattaaaaaagtcttggagcattgatacatcaaaagattcttctttctacctactttatccaaaatcactatgaacactttggtgtatgttcttctagactcttttctttgttaaaaaaacaaacaaacaaacaaacaaaaagcctagttttgcacagagtatcacagcgtgcacttccttgttaacctgttatttccccctacaaacaatgtgttgtgaacaccttcctatgttagcagattgatttctacagcatttaaaattggctgtagagttttgcattgtatggataaaataccttccaagttttcactgtttcatactgtgatgtatgttttcatacattgttctaaaatatcttaagccacatcgtacatattgccagtttggttctctgtgaattttactggtaacaatacaacctaga

SEQ ID NO: 10513 - DNA, 431 bp, Homo sapiens
atggcataattgaaccaattactggattcaactatattaagactatttccttaaatcctacttcagactaaattattttacctacattcttttccatattttggaacttctgagtcattattttccatcttgcacattaaaataatttaaaattacatgtatcccttctcaataagtttaatcagctaaccctaagctagaggtcaaaatctacttcctctaatatcaaaacgaaaatttaaagttttccaaatattaattcaatattaattgaatattcaatgaattcatttaatgttagattaattcattgaatattaattcgatgaatgactaattaatagtattttaacaagattttggtatatttaacaacattttggtaataaagacaataatttgagagtgtgtggaagtccccctaatagaag

SEQ ID NO: 10514 - DNA, 352 bp, Homo sapiens
cttgggcctgtctctatatgcttattagaggaatctgacaagtaaaataaaatgagtagtgtgtctgcatctgtgtctctgtttctctgtcttttaaataaccagtaaccataactacacagccctgcactgaatgaccttatttcagtttgcctaaaactgaacaagaggtgatggtttgagatgagtttctcattaggagcagcaacatcccaaccaatatataatgagttgatcaactcaggaaaaattaggactttaaagaaggttgtatttggatattctaagattcaagtgccaaatttaaaatgctagaaatgtattctacaagtagcatttctaaaactttaag

SEQ ID NO: 10515 - DNA, 828 bp, Homo sapiens
taaaagacactactggtttgagggtagactcgtctaggaatattttgtccttctgtgacagcaccactatccatcccaatgtaacatttctacaaagggaagatatcttaaccaggcatacttatatttgctagttggaaaatcattctgaacagttttaattccattctattgaatggattattgtatgagctatttggggatcagatataaatgacaatcacacagaaccacttttattcaacatagataaaatgtgatgagtgttaacattttaaataagcaatctgcttaatggacattggtatgaaggggaagtgtcattctttacctcactcctcaaacacttttctatccaaaggttggtttgagtcagtattggcatcatacaaccacttactgtaaaataagtttattagtggtaacgtgatagaatttattcccgatatctgatgttacaaactttagggtccttgagatatgcaggatccttgtatgtaactggcataaaccccattatttgagctctcttaattgcttttgtgatttctttctgtttcttcccacaaagacctgtaatgtgccttccataaatgcatccagtaaatggagaaacaaactgggacaaaagcaggtcctcattgctggatacctgttgtgaacaacctcttctccaaagcaccgtgtgagtcccgggatgtgtaaggctgacagcagccgttaccaagtgtgtcaacttcttcctccctagaccaccgcaaacagcaaccacagcggccatggttccgcgtttcttccacttcctttcgttccaaatcgttccgaaag

SEQ ID NO: 10516 - DNA, 678 bp, Homo sapiens
gatctgaagtggaagaaacgcggaaccatggccgctgtggttgctgtttgcggtggtctagggaggaagaagttgacacacttggtaacggctgctgtcagccttacacatcccgggactcacacggtgctttggagaagaggttgttcacaacaggtatccagcaatgaggacctgcccatttcaatggaaaatccttataaagaacctcttaagaaatgtatcttgtgtggaaagcatgtagattataagaatgtacagcttttgtcccagtttgtttctccatttactggatgcatttatggaaggcacattacaggtctttgtgggaagaaacagaaagaaatcacaaaagcaattaagagagctcaaataatggggtttatgccagttacatacaaggatcctgcatatctcaaggaccctaaagtttgtaacatcagatatcgggaataaattctatcacgttaccactaataaacttattttacagtaagtggttgtatgatgccaatactgactcaaaccaacctttggatagaaaagtgtttgaggagtgaggtaaagaatgacacttccccttcataccaatgtccattaagcagattgcttatttaaaatgttaacactcatcacattttatctatgttgaataaaagtggttctgtgtgattgtca

SEQ ID NO: 10517 - DNA, 308 bp, Homo sapiens
gcctgcctctgccccagactgtaccccagtcaactctgcaaccacactcaagaacaggcctctctcggtcgtggtcacaggcaaaggcactgtactccagaaagccaaggaatgggagaagaaaggagcaagttagaaaacaagcttcatctaaagactctcatgtcaatgtggaccttggtgacaatcctgctttgttaaagcaaaaactatgcgaaagggtgagtctgtttagaagaaaaagcaaagactgaggtactgtgaatggagagcttcagctaagaggaggctctgtcccttttcagagc

SEQ ID NO: 10518 - DNA, 635 bp, Homo sapiens
tttttttttttttttcaaatacaatgaacattttattttaaaaaacctaactcaccacttggtaaaaggtcaccaaatgtttatgagagaggaaataagaataaaaaagacatttagttctcaggaacaagtgttagagaactgatacacaaccctccagaaatgaggcagagataatagatgaaatgtttcaacctgtgttaaaaaaaaaaaaaaaaaaaaaatgccatcagaggaaaagacaggggcagcacaaggaacagcactgccaattttaagagggcgatcaccctaaccaaaaatcaaccactttgttcttggaaggagaatgaacattaaacagaacttaaaatcagagactatttatattaaataactcttcccttaaaaatggcctgaccacagcaatgaatctgtaaacacagagtaatatttttcctacagtaaagagtcactttaatctcaaaagatacttttcactgttctaaatgacaggattttaagcattttttcctatatataatacagcatcacttaaaattttatttaaagacagttgattcaggcctgccttggactggaaagaagtctttaacttagtgggattagtgcttcagcttggtcccaaatatttt

SEQ ID NO: 10519 - DNA, 462 bp, Homo sapiens
atgttttagccacaagggtaacctcattctacaccagcatggccacactgatggctaataaggctgcccttctgactaaaagatttcccgcactcctcacagggataagctgtctttccagtgtggactcgctgatgttgaataaggctgctctttcgactataagatttcccacactctccacaatcataaggtccttttgcagtgtgatctcgctgatgattactgaagctgacatatctgctaaaggattttccacaatcactgcacacataacatccatctctagtgaaaagtttctggtgtggaataactgagtgtttggtgctgaaggcttttgtgcgttttccacaactgtaattaagtttttccctcctgaaagggtgggccatgcatagtttcactgtctgtcttctctacagcagcttcttcttggcacaatcctgaactgggcagaacgtc

SEQ ID NO: 10520 - DNA, 478 bp, Homo sapiens
cgcatagtaaaataattttaaccttaatttgtttttagtagtgtttagattgaagattgagtgaaatattttcttggcagatattccgtatctggtggaaagctacaatgcaatgtcgttgtagttttgcatggcttgctttataaacaagattttttctccctccttttgggccagttttcattacgagtaactcacactttttgattaaagaacttgaaattacgttatcacttagtataattgacattatatagagactatgtaacatgcaatcattagaatcaaaattagtactttggtcaaaatatttacaacattcacatacttgtcaaatattcatgtaattaactgaatttaaaaccttcaactattatgaagtgctcgtctgtacaatcgctaatttactcagtttagagtagctacaactcttcgatactatcatcaatatttgacatcttttccaatttgtgtatga

SEQ ID NO: 10521 - DNA, 2095 bp, Homo sapiens
gaattccgggagctgagactgtccaggcagccaggttaggccaggaggaccatgtgaatggggccagagggctcccgggctgggcagggaccatgggctgtggctgcagctcacacccggaagatgactggatggaaaacatcgatgtgtgtgagaactgccattatcccatagtcccactggatggcaagggcacgctgctcatccgaaatggctctgaggtgcgggacccactggttacctacgaaggctccaatccgccggcttccccactgcaagacaacctggttatcgctctgcacagctatgagccctctcacgacggagatctgggctttgagaagggggaacagctccgcatcctggagcagagcggcgagtggtggaaggcgcagtccctgaccacgggccaggaaggcttcatccccttcaattttgtggccaaagcgaacagcctggagcccgaaccctggttcttcaagaacctgagccgcaaggacgcggagcggcagctcctggcgcccgggaacactcacggctccttcctcatccgggagagcgagagcaccgcgggatcgttttcactgtcggtccgggacttcgaccagaaccagggagaggtggtgaaacattacaagatccgtaatctggacaacggtggcttctacatctcccctcgaatcacttttcccggcctgcatgaactggcctccgccattacaccaatcgcttcagatgggctgtgcacacggttgagccgcccctgccagacccagaagccccagaagccgtggtgggaggacgagtgggaggttcccagggagacgctgaagctggtggagcggctgggggctggacagttcgggaggtgtggatggggtactacaacgggcacaacgaaggtggcggtgaagagcctgaagcagggcagcatgtccgccggacgccttcctggccgaggccaacctcatgaagcagctgcaacaccagcggctggttcggctctacgctgtggtcacccaggagcccatctacatcatcactgaatacatggagaatgggagtctagtggattttctcaagaccccttcaggcatcaagttgaccatcaacaaactcctggacatggcagcccaaattgcagaaggcatggcattcattgaagagcggaattatattcatcgtgaccttcgggctgccaacattctggtgtctgacaccctgagctgcaagattgcagactttggcctagcacgcctcattgaggacaacgagtacacagccagggagggggccaagtttcccattaagtggacagcgccagaagccattaactacgggacattcaccatcaagtcagatgtgtggtcttttgggatcctgctgacggaaatttttaccccacggccgcatcccttacccagggaatacccaacccggagttgattcagaaactggagcgaggctaccgcatggtgcgcccttactaactgtccagagaagctttaccaactcatgaggctgtgctggaaggaaccgccagaggacccggcccacctttgactacctgcgcagtgtgctggaggacttcttcacagccacagagggccagtaccagcctcagccttgagaggccttgagaggccctggggttctccccctttctctccagcctgacttggggagatggagttcttgtgccatagtcacatggcctatgcacatatggactctgcacatgaatcccacccacatgtgacacatatgcaccttgtgtctgtacacgtgtcctgtagttgcgtggactctgcacatgtcttgtacatgtgtagcctgtgcatgtatgtcttggacactgtacaaggtacccctttctggctctcccatttcctgagaccacagagagaggggagaagcctgggattgacagaagcttctgcccacctacttttctttcctcagatcatccagaagttcctcaagggccaggactttatctaatacctctgtgtgctcctccttggtgcctggcctggcacacatcaggagttcaataaatgtctgttgatgactgttgtacacaacaacaaaacaa

SEQ ID NO: 10522 - DNA, 2746 bp, Homo sapiens
  misc_feature (1)...(2746): n = a,t,c or g
ccgccgaccgagcctgctgctttcttgctactgcttcggcttcccggctaccccccggacggtgaaggcggcccagctgtggatggtcagatagcccttgtctcccgccgccaatctctggcccctagcagcacggagcagacggcggcagcagcagcagcaggcgaggaggaagatggcgggacggctgccggcctgtgtggtggactgtggcacggggtatacaaaactaggatatgctggaaatacagaaccacagtttatcatcccttcctgtattgctattaaggagtcagcaaaagtgggtgatcaagctcaaaggagggtgatgaaaggtgttgatgacctagacttcttcattggtgatgaagcaatagaaaaacctacatatgcaacaaagtggccaatccgccatggtatagttgaagattgggacttaatggaaaggtttatggagcaagtgatctttaaatatttaagggcagaacctgaagaccattattttcttttgactgaacctccattgaatactccagaaaacagggaatatactgctgaaataatgtttgagtccttcaatgttccaggcttgtacattgctgtgcaggctgttcttgccttagctgcatcttggacctcaagacaagtaggagaacggacgttgaccggtacggtaatagacagtggagatggtgtcactcatgtcattcctgtggctgaagggtatgtgattggcagctgtattaaacacattccaatcgcaggacgagatataacatattttattcagcaactgctgagagaccgagaagtaggaatccctccagaacaatccttggaaactgctaaggcagtaaaggagcgctatagttatgtctgcccagatttagtaaaagaatttaacaagtatgatacagatgggtcaaaatggattaaacagtatactggaatcaatgctatctcaaagaaagagttttctatcgatgttggttatgagagatttttgggacctgaaatcttttttcatccagagtttgctaatccagactttacacaacctatctcagaagttgtagatgaagtaattcagaattgtcctattgatgtcagacgtcctctctacaagaatattgtcctctctggaggttcaaccatgttcagggactttggacgtcgcttgcaaagagatttgaaaagaactgtagatgcccggctgaaattaagtgaggaattgagtggtggtagattgaagccaaaacctattgatgtacaagtcattacacaccacatgcagcgatatgcagtttggtttggaggatcaatgctggcttccacgcctgagttctaccaagtatgccacaccaaaaaggattatgaagaaattggacctagcatttgtcgtcacaatccagtgtttggagtcatgtcgtaaaattggcttcatagttattggggttagggaggtggggaagagataatctttctgattacctgttttgtctggatggctggttttgaggttttaaacctgacttgaaatagtaacaccaaacatgattatacaggaatattttaataagtgtatcaccatgcagatgtagaagagagcgaaagtgattgtgtttttctttagattgaatatttgaatcttatgtgtaaccaaaaagaagtgggttttagttctttctgtgccctgatattttgtatattaatgaattatccaagattcgatgggatttatcagtgtgtagatagctctataatgcttgaattgtacacttctaagtgtgcagtgcaagagcttgtttatatttcatactttttatactttgaggaaaaaaagtcaaagaaaaattgtatttgagggaaaaaaccatgaccaagtaaaggataaattcaaaaaatagcctcatgaggacttggcatacacactcgtgggattccagttattatggagtgcttccatccctctccaccccttccccccaaaaggttttctttgcaagtgcttttggaactaagagctagtatcttggattaactgatgcctgctagtgctttctgattactcgcattctgtttcttgctttaaaagaagagtaaagacaagagtgttggaccagtattgcagttctgtagtgtcatttcttataaaaaacaaaacaacaacaataatttatcaaaattggcatatttaaagcctaacattctaataaaggcacaaatttctttttaatacttgtttcagcctctttaatctctttataagttaactaataaatctattttcttcagacttctgcaatagttctttaaaatcacaacagttagcaagctgacttttgtaatgtgctcaatacaaatacttgtgaacttttaatatgttgagtgctttcattttgataactggatctccatttgatattttcatttgtataactcatttgcagtctgaaaattttttttagtgccagtccctgaacatatcattgaaagttaattttctttgcattttaaaatatctggattatgaagaaaaagtgatgaaaataaattaaaactgaattaccttttctaatgtttttttttttaaggtaatgtaattctattttgtttttatggtatggtggatatctgtttctgttggaggnttggggggagttattggaaatctccggtaatgtgtaggggngggggaaattcctgtggacccctaaaatttacccccgttatttataggggaggg

SEQ ID NO: 10523 - DNA, 706 bp, Homo sapiens
  misc_feature (1)...(706): n = a,t,c or g
atttgagtaaaatttatggatacagaagttttggagtatgttagaatattactaagtctttttatagttgtaatcccaacactggggttatatatatttaataccaacctgagtatatttcctgaataatatctgttttggagacttggacaaagttaacttttttncttttttaaaagttgctgtttaaattaacttcctgcatttctaatgtagaaaaaatatggcacagtgatttgaattttgtttatggtttattatcttcctaaattatcagctctttaaaatatgggtctctggcctgtataccatctgataaattaggttgggtaaatttttcacctgaaaaaattcattcttttgacccaggttgtttggcttggaaaaaaaaaatcacatactcattgcatgattaaacttgtccatcagattgtgattttgtgcgttatgaggattgtagctggggtaattttaaaatgttggtatttggatagaactgccagcccaggattttgataaagatcaaaatatatactgtatctaaagtttcttttttaaaacgttatttcacttataatcaaaaggtttaaataagtttagtgtatattttatgattagtattattttgtatcgattcagagagaggaaaactgcattcccatagacagggagacttgggtgcattaatatcccaaagcctaggttt

SEQ ID NO: 10524 - DNA, 231 bp, Homo sapiens
acaatttcaattctctgttcataagttttcacttcttttttctgctagaactattaagttcacagggctcagacagagacttgaggactcttacagttattgattgtgactgcacaagatgagggtaatgtttatttgtcattataaatctggaaagataaaccctgtgctttccctgttaaggggctggataggaatacgtgttcagcaagtcagtaaaaaaaaaaaaaa

SEQ ID NO: 10525 - DNA, 387 bp, Homo sapiens
  misc_feature (1)...(387): n = a,t,c or g
tttttacactcaaaattggcacattttattacatgtaagtcatacctcaaaaaagctgatttggtgacaaagatttatatatgttgttgacagaagaacaaatccaaatgcttattaaacatggaaatatatttatccccataaataagggaagtacaaattaaaacaaaaaagcatatcacagccatcgtaagagtaaaaatcacagggtctgacaattcaaaatctaataaggatatgagaaaattctagacagcagtgtgaactgctacatttgcttcagacagcaatttagcagtatctggtaaagctgaaaaagctcacactctntancaccaattccacttcttgggtgtatatcctnggncaaantattgcncatntccg

SEQ ID NO: 10526 - DNA, 717 bp, Homo sapiens
ttttttttttttttttttgtgtttataacaggttttactttttttcttaaaatagagatttcttactaaataccattttatttcatttcttcacagatcttctggttcttgatcatcttaattatcaagtgtcgtatatagggaacaagtattgatgttcactatgattcaaactattactgttccatagtcagtggagctttttcaatgtccagaaagaatactttcaatctttatgaacagcctaggattttgcagttgtttctgaaggctcaaattgtcctgcttcaaatttttctttgaattttaagtagtctcttcttttatcaaaatattttatccactgttggggacaacttgattcgaaagagcttcttaacttcttgcattgagaagcatcctctaagttctcatctaaacacttccagtactcatcccgggccccccagcagacctgtctttccttcatagatggggctgccattcctactgcgatgaagctctctgcccgcccacgtccggcttcctttcgatgtcgacgggaggaaactgtcacgcaggccaccaaccggcggtggagggcgcggtgccgagtcctgccactgcagggtcgccccgctggctcaagctctagaagcgtagacctccccagccgcaaaaagcaactcacgcggcgaaaccgcggactcttttgacccttccgagctaccatttacc

SEQ ID NO: 10527 - DNA, 72 bp, Homo sapiens
ctactttccttcaactgcaggtgtaaactttgctactttataatgttcgggaaccaaaacctgaagtcgagc

SEQ ID NO: 10528 - DNA, 178 bp, Homo sapiens
cctttctccttcttttaaagaaatcaatgatacactttaagatattcttatcttactgtgaattaatttttttttctaattaagctttttgggtgaccttgagcaaatgaaaagcttgactttttcctctgctttaccgtattgtgatttccttggggttggcagagatttggaaagg

SEQ ID NO: 10529 - DNA, 1158 bp, Homo sapiens
cttcaggctttccttcaccaagaataaggttctttctggagcctgcaagaagacagttgcccaacactttgacacttgctagtaggtcctttgatcaagagtgtctgaggctgtcaaatgtgtgccaccctttataatacagctatgaaaagttacttctccattaatttctccattctgtttatatcttacagttggacccaaattccaaattatcagttaatcgaaactacattgcaagtcaacattattttctcttcttcctcagcttctccatgtttaggaactgagaaagaacctgcctaagcagcacttccccatgtcctttcaccttcatgttaacgtcccttctgatggtctcactcttcacaggtagttcacactctgagacttgaagtaagctcatggttcagtactctgggggcgcaggtgccaggacccttggaaatgttgcaagtgttactagtaccagtttcactttttgttgtcacaatttactgtattttttactttttctgttacagttttgctaatttatcagaaggtccaaaagtctgacataactatttcattttgcattatttatttatgatgcttttttcattgtcttttatacatttgggattataaattatgtaaatgttaaaatgagcatctcaaagaagtctgttaaatcatgactgaaaaaaatcaatcagatgtatcttcaaaaaagtggagtccccagttttatggaatcagagatataaaccagaaattctataactgatcatagaagaagaatccagtaattgaacaaatcctatttaatgacatccttgtagcatagatggtctataatgctgaccacagatttcttagaaatgctgctctctctatttaactaacattttgttcagttttgcctccagtggaagcagaaagggttttttcagctgttaaatcctaaaaatcaatataatttatttatgtaagaaaaataactcaatcaatatatttttgaaccttttaagtactaattttctttttatcaagtagaaaaaaaaatgtatttgccctaaatccttaaaatacaaatgctataaaaattcctgtatcttgaaagccttactgcaaatgagtattatagacatccagcatagaaaaaaaaaaaaaaaa

SEQ ID NO: 10530 - DNA, 1036 bp, Homo sapiens
ggaggggtaacaagatggcgaccgagacggtggagctccataagctaaagcttgccgaactaaagcaagaatgtcttgctcgtggtttggagaccaagggaataaagcaagatcttatccacagactccaggcatatcttgaagaacatgctgaagaggaggcaaatgaagaagatgtactgggagatgaaacagaggaagaagaaacaaagcccattgagctccctgtcaaagaggaagaaccccctgaaaaaactgttgatgtggcagcagagaagaaagtggtgaaaattacatctgaaataccacagactgagagaatgcagaagagggctgaaccgattcaatgtacctgtgagcttggagagtaagaaagctgctcgggcagctaggtttgggatttcttcagttccaacaaaaggtctgtcatctgataacaaacctatggttaacttggataagctgaaggaaagagctcaaagatttggtttgaatgtctcttcaatctccagaaagtctgaagatgatgagaaactgaaaaagaggaaggagcgatttgggattgtcacaagttcagctggaactggaaccacagaggatacagaggcaaagaagaggaaaagagcagagcgctttgggattgcctgatgaaaagttcctgatactttctgttctccagtgttttccatttctctccttcttcttggtcacatatatgcctaaatgcacagtcatgtgcctacgtcctgcctcgcaatgagggagcatgtaccccaggttcaagtgctggattgtgtcatgtgaccatcccaaaactcagagcaccctatggccgtctttgccctctgtcacataacttgaaaactgcctgatggcctttttgcagtggttccctccaggaagccttgatctcagttgaagaagttctttcctggcattccaatgcccctgtcagctccatactcctcagacacccttaacaaaggctgtcatgcacacaatgtgacaaatacacaaaataaatgataattacact

SEQ ID NO: 10531 - DNA, 417 bp, Homo sapiens
  misc_feature (1)...(417): n = a,t,c or g
cataatcttcattcctgggttctccacttcaatagtcgtggcagtgctgctgaatttgcagtttttcacatcatgaccaggattctggaagctacaaacagtttgtttttacctctgcctcctggttttcatactctgcacaccatcctcggggtccagtgtctccctttgcataacctgctgcattgcattgacagtgggagtgttgcttctcactgaaacagctgtcataaggctcatgaaagatctgggataatacagaggaaaaatgaaaaactggaaattcagtattcattgtgcgggctttcctccgcttattgggcagaagatttgtagactttgggatcatcctatgagttctaacatcatttcgcgggaaccacgtgacggatcntgcttcagaactataagaaacag

SEQ ID NO: 10532 - DNA, 1428 bp, Homo sapiens
atatttcagatataagatttcagttctcagtgagtctaagtgacagaaggaatggagaccctcttgggcctgcttatcctttggctgcagctgcaatgggtgagcagcaaacaggaggtgacgcagattcctgcagctctgagtgtcccagaaggagaaaacttggttctcaactgcagtttcactgatagcgctatttacaacctccagtggtttaggcaggaccctgggaaaggtctcacatctctgttgcttattcagtcaagtcagagagagcaaacaagtggaagacttaatgcctcgctggataaatcatcaggacgtagtactttatacattgcagcttctcagcctggtgactcagccacctacctctgtgctgtgagggacaatgacatgcgctttggagcagggaccagactgacagtaaaaccaaatatccagaaccctgaccctgccgtgtaccagctgagagactctaaatccagtgacaagtctgtctgcctattcaccgattttgattctcaaacaaatgtgtcacaaagtaaggattctgatgtgtatatcacagacaaaactgtgctagacatgaggtctatggacttcaagagcaacagtgctgtggcctggagcaacaaatctgactttgcatgtgcaaacgccttcaacaacagcattattccagaagacaccttcttccccagcccagaaagttcctgtgatgtcaagctggtcgagaaaagctttgaaacagatacgaacctaaactttcaaaacctgtcagtgattgggttccgaatcctcctcctgaaagtggccgggtttaatctgctcatgacgctgcggctgtggtccagctgaagatctgcaagactgtaagacagcctgtgctccctcgctccttccttctggcatatgcccctcttctccctctccaaacagaggggaactctcctacccccaaggaggtgaaagctgctaccacctctgtggcccccccggcaatgccaccaactggatcctacccgaatttatgattaagattgctgaagagctgccaaacactgctgccaccccctctgttcccttattgctgcttgtcactgcctgacattcacggcagaggcaaggctgctgcagcctcccctggctgtgcacattccctcctgctccccagagactgcctccgccatcccacagatgatggatcttcagtgggttctcttgggctctaggtcctgcagaatgttgtgaggggtttatttttttttaatagtgttcataaagaaatacatagtattcttcttctcaagacgtggggggaaattatctcattatcgaggccctgctatgctgtgtgtctgggcgtgttgtatgtcctgctgccgatgccttcattaaaatgatttggaagagcagaaaaaaaaa

SEQ ID NO: 10533 - DNA, 349 bp, Homo sapiens
atcacaactaaatttccatacagtgagaagatttttgaaaaatagtgaggtaagtggatagagagtgaggacaagccaagggctgaatttagtgaatgtcctaagcaagcttgttaaagtgctaattagatgatgtgagatggacttgataacgcttaataatgttgtatgttgtatacatttgtgactgacgactgactttttaagactactgtttgcgagatattttgagatttttttccattaaagaaaatttaagaccctagagtcgtcagctttcttatttatttatttttttagacagtcacatttagtagtggggggttgtataccaactttagtgacgcta

SEQ ID NO: 10534 - DNA, 670 bp, Homo sapiens
ttttttttttttttttttctggtaccagttttatttataattaaccacatacaaatcacttttctacaaaataatggttaacatctattccttaattcacagaaatatcacaaaaccaaaatccttcccacgatatattactatttagtctaagttttaattcaaaggttgagaatgacgaattcaagaatttctttcatacataaattgctttccttagttctgcagatgggtaatctgtttgagataagcactgtcatgtttcaaccttagagaacaaaaagctatcaacaagatagtggtaaagaaaatgctagccaaaaaataacactattgagaaataggtgcgtattaagtgcaatacttacaacatctctgatgtcaaatgaccaaaatttagccttagggcactaaagcacatttgcccttttgaagcacatactagtatggcacattttatttcactaaaagtgatgttaaacgtgaatgtcttgtagactatttaaagagccagtcaaatggctaaaaaaaccattgtttttttgttataactctttgtgtctccctctttccattctcatcttatgatatttcactcaaaaatttagttacccaccccaaaacacatttctctcccttctgccagggtgtaagaaatgttagcattctg

SEQ ID NO: 10535 - DNA, 362 bp, Homo sapiens
tatatatataaactgaagatataaaacaagtatgatcttgcctttgaaatcataaatgtttggggtacctgttctttgccagttaagatacatatcttattatctttgtttttttcaagtctatgctcctgtttgaagcttttcctgtaatttaggttgtctgtgaaatacctataacatataattcctatagagtatgccacattttttttctaactcatttcaaatgaaattctctcagattctagtttttgagcttgtccactagatctgaaaataaagcatcctttcctgagtccacttgaactaattgtggaatttgttacttaatttactggcatcttgggaaacaagttttgctg

SEQ ID NO: 10536 - DNA, 849 bp, Homo sapiens
tttttttttaattttgaaaagactgttgatgtcactgtggtttattaggtaaatacaaagtataggctcttgcattttttaaaaagcaaaaccaaagagattagaaaccaagtacacatatcctctttagaagagaaacataaatcagttttaacaattaggcacttaaaaatgtaaatgtaagacaacattatagaagtataaactatagttacactcctaaattcctcctgaaatgtttacaaacacaaaatcacaagcatggaaaacaaatttcctctttatcaaaaaaggaacctgaatttgaatccaatgtgataaaccaatgattaaggtactggtgggtaggaaaaaagagcttctgaaatttacatatttgattaaaatgtaagcatttcataaaactatcacaatagcatacagtagatatcataatgaaaaatatatgtcaggaaaataatggaatcctagacttaaaattttactttacaacaaggcacttaacacattggaaacagtacagtaaatttcccaaaagaatgcaattggctacctctgaaaccttgtaataatatttcttttgtgaatatacggtaacataaccatacattttgcagcattaatcattgcataggaggtaaattaaataatgaattctaacttggcaattagattagtttttgttcatcgtttcctctttttcttttaaaggacagttttaaataatttcacaataaagcactcttctcattcatgatttatttagaacacagcataatgagtaagaaaataaatcagaacttataaggtgtgtatctgtataaaaacttatctttgggtaacattgac

SEQ ID NO: 10537 - DNA, 1336 bp, Homo sapiens
agcggtcgccagtcggcggacgaggggcccccgggaggttgctggactgagacatgagcctccaactgtgtggttgggctcggtagcacatcgtgggacttgggtgtgcgcccacagatggtttggccctgcagtgaccagagcagcccaagcccgccaccatggtgaaattgctagtggccaaaatcctgtgcatggtgggcgtgttcttcttcatgctgctcggctccctgctccccgtgaagatcatcgagacagattttgagaaggcccatgcgctcgaaaaagatcctctctctctgcaacacctttggaggaggggtgtttctggccacgtgcttcaacagctctgctgcccgctgtgagggaaaagctccagaaggtcctgagcctcggccacatcagcaccgactacccgctgggccgaaaccatcctcctgctgggcttcttcatgaccgtcttcctggagcagctgatcctgaccttccgcaaggagaagccgtccttcatcgacctggagaccttcaacgccggatcggacgtgggcagcgactcggagtatgagagccccttcatggggggcgcgcggggccacgccgtgtacgtggagccccacggccacggcccagcctgagcgtgcagggcctctcgcgcgccacgcccgtgcgcctgctcagcctggccttcgcgctgtcggcccactcggtctttgagggcctggcctgggctgcaggaggagggggagaaagtggtgagcctgttcgtgggggtggccgtccaagagacactggtggccgtggcctgggcatcagcatggcccggagtgctacgcatcgtcgatcagccaagctggcggtcaccgtaagcgccatgatcccctggcatcggctgggcctgggcattgagtagccccagggcgtgccgggcagcgtggcgtccgtgctgctgcagggcctggcgggcggcaccttcctcttcatcaccttcctggagatcctggccaaggagctggaggagaagagtgaccgtctgctcaaggtcctcttcctggtgctgggctacaccgtcctggccgggatggtcttcctcaagtggtgagcggcctcgccattgtccctgccgccggagcccgccgggagccccgggccggacacacggccgtcccccggccgcgcgtcccccaagagcgagcactgtggccctgggccaccacctgtgcacaaggggcctcccgggaccaggctgtgcccccgatcctacaccctgagcctcagagcactgctactttttaaaatacttctttctcttaaaagtctttaccaaaaaaaaaaaaaa

SEQ ID NO: 10538 - DNA, 485 bp, Homo sapiens
tttttttttttaatgttaattaactttattcacatttttccaagtaaatacaatattaactataagctaaaaacaatacatagttcttagaaaatacaaccccgaattattgtgtggcctgggctttgtgattatgtgcccagcctttgttcctccagaattttaaagtgaatgcagtgctcaaaacaaacttacgatagcacagggaaaccttccctaaataaagttttgttattagaagagaaatccaaaaagaggcctctactgccttcattcaagtgtcgagaatttcaaaatggaaataatattaaaagagcaatcgatttttttccatctcacactagtaggcttgaaggaggcaaatttggaccaaaaatctagacatagctccttgcatagggtttgatattaagcacacacttgcactgaataactccatatccaccctatagtacaaaaattcatttcaaatggcaaacgttgtc

SEQ ID NO: 10539 - DNA, 431 bp, Homo sapiens
ataataaaaaattagatgggcacgagcacagtaaggacttcgggttttcagatctcgattcatagatctgaattccggccggtcgacttgcactggttttttgccctgacatctcttcgtcttgtgtttttacttgcatttggcttgatgatcattgtgtgtattgatcaatggaagaacaaaatctggcctgaaataaaaggtgagtttggtagcatttagaacaatctgaactgaagatggcctttcctataatttgtacctttagtattaggggtttatgaggaggtgtatggagctggggactgtcttttgaagtctgaatcatttgctttaggaggcacttgaagggcttgtgccccaattatggttccttagagctgggttctgcccttcccattgttactaagcacaggaaatctgtactcacc

SEQ ID NO: 10540 - DNA, 338 bp, Homo sapiens
ctaatttagaactaggaagattatatttcaatgttaatataatttagaagcatcgtgggccgttatcttttttatgaagtatcattgaactttgttatataaccaagtattcaggcatgtataatgaaatttagtcagtaatatgatcatagtatctgccttctcaaaatttgctcattcttttggaaagaatgagggatggagaatgatggaaagatttgtgtaatttaatgatggtggtgtggtgggggagtagacagatgcacatataaaggaataacactagcacactgaacatttactgtggcagtcactgttctaagaagtttcatgtattt

SEQ ID NO: 10541 - DNA, 242 bp, Homo sapiens
ccagttttgtccaaaataatttatttaccagccttacaaaaaacatgtcggcaagagaagaatcagtcccgtaggagccaggcaaacctctccttccttccggtggctcccctaggacctgccggagagtggagagtccggtgggggggtcccaagcccagggtggacgaggaaaaggtcaggaaatagaggattgtcctgagccctcctggccatgggggccgacccagtgggcactgagg

SEQ ID NO: 10542 - DNA, 228 bp, Homo sapiens
aaacattgaaattttttattacaaatttaaatctaaattttactataatttaaacaaaaagcaatggctagactgaggagagccagtttcaatgcttcactaggcccccgaccagctgtgagcagatctggaagatggacggttgtgctgtcttctaaatgtaaaattgcgcaattttgggcatttgctatcccacttactcctcacaataattatgtgagatacgta

SEQ ID NO: 10543 - DNA, 199 bp, Homo sapiens
ggcaattgaaccaatgagatgtaaaggtaacagctctaaaaattcagacatttgccttattaagctcttttctacaagagacttcattacattgaaaaatgaaacctggcacccatcctaggagaattatctgtgcagaagttctgatttacagatttgtgatcttagggaacagtgtgcacacccagggtgaaatttc

SEQ ID NO: 10544 - DNA, 324 bp, Homo sapiens
caaattagctgccttatttcaaaagtcagtgaaattacctgcaccttgatgagggtcacaaaaataccacttgattgtttctttagttgagaatgctgggattcagactcgaatagtggatagatacacacaaatgcaaggacttttttgtttactccagatttggggtttattttgagtggcatgcttcaaatagttcataaagatccttgcattaaatttctgaaccatttcttcaaacttcttagtgtgtttagacaaggagaacaaaaattgaaaccaaagccctttctgttattttttcaatgaaggtgagaaagaaat

SEQ ID NO: 10545 - DNA, 338 bp, Homo sapiens
acattttctttttggtgtgagagaccctcccattccttagtaaaaacgtatttacttgcatgttattattgtccttacaaacttgtttttccctagagcaattgattttgctttaggtactagctgaaggtctagaggcaatacaatttaggatccttgtctagaaatcaatatgattcaattcttttcaagccaaatgatatctgtagactccagttgtgtgcaagccctgtgtggagcctcaagtcatctgcgttagtccagcttcctattcttggaaatcagctttgcttgattggacctatattggcatgttaatgtttgatggtggcctggcc

SEQ ID NO: 10546 - DNA, 492 bp, Homo sapiens
aaaactgtgcaggtgtccacagtagatgcttttcagggagctgaaaaggagatcattattctgtcctgtgtaaggacaagacaagtaggattcattgattcagaaaaaagaatgaatgttgcattgactagaggaaagaggcatttgttgattgtgggaaatttagcctgtttgaggaaaaatcaactttggggacgagtgatccaacactgcgaaggaagggaagatggattgcaacatgcaaaccagtatgaaccacagctgaaccatctccttaaagattattttgaaaaacaagtggaagaaaaacagaagaaaaagagtgaaaaagagaaatctaaagataaatctcattcataaaaagacatggtgtaaatattttgtatttatgtaaattcagactcattttacatgatatattttttatatttttattactctaaaccctcttattaaaaatatgatatttaaataacatagtaaaaaaaaaaa

SEQ ID NO: 10547 - DNA, 320 bp, Homo sapiens
aaatgaacatgttacaaaaactaagtcccttttcccaacaaaattctgtgtttctacagagttggtgcacactatctaataaaaatacttagaactacataagtacttctcttcaactgagccacatatgaagaatctcttcctagggttcctttaatgttccatgcacttagcacagtaaaagacaaacaaaaatggtctataacatttgcagtgtaggacaaggtaaacttgaacttaggatttccactggataaaaggaaaaaggatgagggacccagtttgactttaaaacatggggtttctctggcttcatggaa

SEQ ID NO: 10548 - DNA, 343 bp, Homo sapiens
  misc_feature (1)...(343): n = a,t,c or g
gaacttctcactttaaaatagttaattttatgttatgtgaagtttacctcaataaaaaaattcttaaaaaaaaaaactcagtgatatccaaccattaaaaaatataaggttacatagctcgtatataatcaacttacttattactgcactatgagggggcncccagatatgtaagacagagtcccaacctttggttgttggaggactatctaaggatacagagattaataaaaataaaagaactaccacgaaagaagtgccctccaagtacaaagagagttcaaatatgtacatctggttgcgganaaaggaaaaacttntcaaagaagaatttgaagngagc

SEQ ID NO: 10549 - DNA, 406 bp, Homo sapiens
ttttttttttcagactttgtagctgtttttattattaatattatcttctcctttaagcatccctttaagggtgaaatgaaatccaaccatttacagagaaaatgatttcagaatgtacatattgattttcccttacaaaaaaaataatactattattgatgtccttacattatgcatttcccagggtcctgccttctgcttggacaagtcccgtctccccacccagactctccctgttgcccccaaagatctcccatgctgcccctgggaaccgacgtgacccatgggtggataaggccagccatgcttcccggatgcttggcatggacaggcctccttgggtctaggggtctcagggccagttattcccgggggagaaaggtggacatgggacatggcagcagtg

SEQ ID NO: 10550 - DNA, 373 bp, Homo sapiens
gtgtactggaaccaaagaatattctctttcaaagaataggtctcctggtcgattactaagtaatagaagaaaaagttcttcttcatctgtctgtgaaactgctttaatcctcaggaaataactacctgttatgatttaagtgtgtccctcaaaagttcacgtgttggaaccttaatccctcattgctgcagtgttcagaggtagggcttagtgggaagtgtttgggtccttcacaaagagatgaatgcagttttcacaacactgggtttatttctctggagagcaggttatgataaagcaggtcagggcactttgtctcctctctgcttttggaggcactcacttgcccttctgttcttccagaagcaactat

SEQ ID NO: 10551 - DNA, 1049 bp, Homo sapiens
ccgtatacgtcttatataaaaatatacattccattaatcttatatcctctccctaaccactaaaatgcaaatgaaaatattcttcagactccagcaccagcagaattgttctgtatgagcaattcaagagctgtctgaggcaaaaagatatttcagctaccaaattaaacttgggtagcttacgcatgggtgagtaaccctgggaattcttatttcttaatgcacctgggagaggttgattttttttctacaacataattttataaggcataaatttaattgggaatcttccctaacctttggaaaattagtgttaaagcttctttttttaacccacacatgaacattccaacctttccatttttattaaatagtttatatataaaaagaaatgtcaaggtgttcctacattcatataaacaatcagggtaacatttgaaattgtaaagaaacgcactgaggaaaatatagacttaaagagttacaatgctaagctaagcacaagtgatcatcctagagtatcttttaaatatataaacacaggtttgtgccacttcagaaggcaagcacaggagaaatacactaatgttatctttcttctttactttttcaccataagacaggatggtccagtttggaaaaaccaagatcttttctaagttccaaataggtgccgttgctcacccaagagtcatcgtcggatttcctgaaaaaccgaggctggtgctccacatgattttcttctaagacccgccgcctttctctctgcagttgttcaatcctctgcttttgtatttcagcttcttctaagttcccttcctctagaaacctctggtctggcctaaatcgagtgtcagtaggtggcaataaagactttgatgatggatccatttcatttaattccagcgcaaactgtgtgaagctatagtattgctcgtagcctttcggcatagggatttgctctccatacacaggcagaagagggagccgccgccacagtagatgctttcatgccatttcccaaacagccgatggaaccgtttttccac

SEQ ID NO: 10552 - DNA, 395 bp, Homo sapiens
  misc_feature (1)...(395): n = a,t,c or g
taacaaggttccctgagttggcagttcctttgtccaactgtgtagcgtcattccacttttttctacttctgcttgtgtggtaaggaagattgccctggtgtcggtttggttctttttctttgtatgcaacttggtctttcatatggaagcttacaggatttttactttttccttggaattcagggattttgccagactctgcataggtgtttgtgtgtttccctcacttctctcctggctagacaacagccagctgttctgatctgcagtctcaagtctntcttcatcccatctattatttagttattgcttgtccacctggttttttattttccccttcagaacttcttgtaagtctctaatcgtcttctcttgattttatctgttagtacttt

SEQ ID NO: 10553 - DNA, 469 bp, Homo sapiens
cttttgtccctaacttgtgtattgatggcagtccactctgttttctaaaaatgtattttactgtggtgcttaacttcttattaattaaatcccgtatcagaaaccttgcctgtgactttagaaagggcttttgattattgatttttcttcttgctcttgaaagtaatctggtcccagggaattactggtttaactgaacatctccagaattatttaaggtgtcaaaatatataaccttcacattgaaagataattttaatttatgggcataataaaaatttgaatcattcaggtaattttcaaaaaatggagaccatttgtctttacctgaaggtatatgtttaagatcatagtctcccctagtatggtgctttccacacagtgatttctgaggaatggttctctttaagataatgacttcatatgatcattgtttcatgttacttgccacaaatacctttaatttagg

SEQ ID NO: 10554 - DNA, 590 bp, Homo sapiens
  misc_feature (1)...(590): n = a,t,c or g
cccagaggctgtttctgtctcatttgagctctccttcatgtggcagagctggctgtggcgtttaggagcctacattttagaaaagcttacctcaaagttctgcattgagcctgagactggaaaggagataaaataaaacagctgacaggagctttggtagtcacacatgcctgatggggtgcacagggccacagtctctgaaaggcaatttggcattgtctgtccacaatatacttttatccattggtccagcaatcctactctaggaatttttcctacatataaacctgtatgcaatacaaaatgatagacatacaaggttattactcttgaaaaagcaaaagattggaaacaaaccaagtgactggctacaggggacttggtgaaatagagtatgttccnatcacacagtggaattctgttcagcagtgaaaaaaggatgagagtgctttccaagtgttgttatggaaagagctccaggataaattaagtggaaaaaaaccccaagatacaggtacattaaaccgaaggaaattggttcagaggatagctgcaccatttttagagaaaaagcttcctttctctcttca

SEQ ID NO: 10555 - DNA, 1075 bp, Homo sapiens
  misc_feature (1)...(1075): n = a,t,c or g
aaagtttttaataaacttttattttatattcaagataaagcatatacacaattcaatgtggaaataaattactagaaatactctggaaacttttccatttccctctcaaactcacttttttttaagctcataagtctttttacttgattttaagaaacatggcaactataatactaagaaagaactacagctttgcnacagaaacatagagccttgtcttgactataaggtttagttggtgttttaataacaacaaaaaagcacaaaagacacaaacactcttcaacaggtttactcaaacagcttcgctcaagaacgaaaaaggcacagatttaaagggatgacaataatccattaagaatggaagtaaatgggagactcagtccaaaaaatggatactttcctggaattaagtcaagaaaaacaaaagtctttcaaattatctgtcttccttaaaaatggaatttttaaattaaatggtataaaccatatgatataaagttggtactttaggaagcgtctttgtatattttttatgtacaaaatctttgtatacaatttcgatgttccttatatattccctatatagcaaaccgagccaggacctcccaactgcatgcctcaagtccctgtggagcactctggcagctggatggccctacttgctttctgacaaaatagctggaaaggaggagggaccaattaaatgtagtcatcttcaactggctctccattgacatcacaatagtggataaaaattgccactactcgctgaaatacacccttcttcatctgacgcatctctgaaatttcctctcctattgtttccatacagatgtctgcagacagctgtcctttccttctaggagcatagatagtgctttcttcatcgtcttcaaagtcgtatcgagcgaagctgttgggctctgcagctcgtaatgacctcagccaagggaagtcagaaatcatggaatatggagctccatccacaacaccttctaaagtatagatttctcctccccaggggtacttggggtatttctttaagtcttcttcacttcgncctgtgccgaat

SEQ ID NO: 10556 - DNA, 567 bp, Homo sapiens
gcacgagggcggctctcgctgtggctgtttcccggcttcatttctcccgactcagcttcccaccctgggctttccgaggtgctgtcgccgctgtccccaccactgcagccatgatctccttaacggacacgcagaaaattggaatgggattaacaggatttggagtgtttttcctgttctttggaatgattctcttttttgacaaagcactactggctattggaaatgttttatttgtagccggcttggcttttgtaattggtttagaaagaacattcagattcttcttccaaaaacataaaatgaaagctacaggtttttttctgggtggtgtatttgtagtccttattggttggcctttgataggcatgatcttcgaaatttatggattttttctcttgttcaggggcttctttcctgtcgttgttggctttattagaagagtgccagtccttggatccctcctaaatttacctggaattagatcatttgtagataaagttggagaaagcaacaatatggtataacaacaagtgaaatttggaagactcatttaaaataattgtg

SEQ ID NO: 10557 - DNA, 348 bp, Homo sapiens
  misc_feature (1)...(348): n = a,t,c or g
ctaatgtactcgaatggaatcatcatcgaatagaatagaatggaatcaccgaatggaatcgaatggaatcatcatcgaatggaatcgaatgggatcatcgaatggactcgaatggaatcatcattgaatggcatcgaatgtaatctttgaatgcactcgaatggaatcatcattgaatgcaatcgaatggaatcatcatcaaatggaatcgaatggagtcctcatcaaatggaatcgaatagaagcatccagttgttaataggaattgaatcatcatccaaatgggaatcgnattagcatttattgaatgggatccgaatgggantccntcaaccggatggaatccga

SEQ ID NO: 10558 - DNA, 282 bp, Homo sapiens
  misc_feature (1)...(282): n = a,t,c or g
tagtgtcttactagttggtcagtacaggtatgacttatgttgaattttgcctagttacgaagatatgaatcttaataataggatctcttagtattagcactcattggattttctaagtggaaatgtaatgggcagtgcaatgatttaacattgtttactacagacgtttcttgaagacttctgagttatcgtaagcatgtactaaaggtgatttcttaaagcttgcatttaaaatgcgtttacttctgatgatcctattnannnctnttattggaatnttac

SEQ ID NO: 10559 - DNA, 553 bp, Homo sapiens
tcattttttaaactttctttttaatagagccttgcattggtcagttcgaaaattaaattaagtattataaacccttaataatagcattcgagaggcaagagcagctccagcttgggagagaacatttgcaaatcgtggtggccatggcttaatgccatcactggcgtgtgcgtgcattcatgctggaggctgctacataaaggaaaagaaaggaaccaacagaattcagggtgtctaaaagtttcatctagtgcactgactggaggcgctacagtttaatacagctgaggttcaaggtccctcacacatccttcatccaggaaggatgcaccacacattcaaatataatcccatggtacgccctgatggactggccacaaaatgcactcaaatgcagcagagaactacgagattgtcagcaagcagtgctccagaaattgtttttaagtcatgtctagttttaaatcctttgggaataaaactgatttttaataccctccaactaacatacatacaattgcctccggaaatgggacagatttggtgtgtgtgt

SEQ ID NO: 10560 - DNA, 336 bp, Homo sapiens
  misc_feature (1)...(336): n = a,t,c or g
gtgccatcatggccgagttctggtgagggccctcttctgggatgcagcggccacttctcatgttctcacagtgggtggagggtaagcttgctctctggcctcctcttaaaaaggcactaatcccattcatgagggctccaccttcatgacctaattacctcccaaagatgccatctccaaacaccatcattctggggattccatttcaacataatttgggggatacatcagaccataacacttttctttttcttcaacctttcacatccagttgggttctcaaggcctgggganttttacgcgctagatagggtcttaagttcatcttttacggct

SEQ ID NO: 10561 - DNA, 51 bp, Homo sapiens
  misc_feature (1)...(51): n = a,t,c or g
cctcatgtttcagagatgcagatataacttgtcacttaataattgnaagaa

SEQ ID NO: 10562 - DNA, 523 bp, Homo sapiens
ctgtgaatttttttttttttttttttttttacttgaagtagattgtctgaataggcatcctcatctatatttacccaaaacctcgcttactgtcatgtgcactacaaattgcaatttggaaacctactgtattgaaattctgtcagtttatggttcttgaagactgatgtcctttcccaaacactggttactgcagcagcatttttaatgtgtaagtgaagaaaaaaggccactaaggccaaagattttttaagaatcattgtacaaatcattatgttaaactatctaagctttgctgtaatactgttttctcttcaatatgtgatggtacaggaaggatgttaaatgaaggggtggtattgcaggagagcattttaaatggcagaagtaaaaagttataatatttataattttgatgggtttaagtttatttttgtagggaagatttttctcccctaaaatagtttctagaatggcaaaattgtttccattattaaaaattgaagttattagttaaaaaaaa

SEQ ID NO: 10563 - DNA, 225 bp, Homo sapiens
cagaatttcctcctttgagatgcataaagaaaacaattacagctataaaatctgacaactaaagactattttttatacttttatacttctaataaactacaaacaatagaatacatgtttggaagaataaaattaagtcaaaagaaaccaaaatttttactagtaactacaaaaatcccagaaattttagtttaatttattgtaatacttgaattaaatggaagg

SEQ ID NO: 10564 - DNA, 306 bp, Homo sapiens
tttttttttgtctataccaaatatttgttgatattttatttatccatatcacccagtgatttaaaggactcaagaaagttccctttgtcctaaaatgcacctctgcacacaaagagtaggcaattactcttccaacaagtagacctccataagaattagatcattacattttgacacaaggaaatgtaagttttcccaccctcttgctgtatcactcacaagaacaatatcactgtaaaacagacccaaacacacagtactgtaaatatgcaaaaagtctagtcaaagaaactatattggtgacaa

SEQ ID NO: 10565 - DNA, 475 bp, Homo sapiens
tagcaattactagccatgattacctaggacaagaaactttgacagaaatccaaacctcaccagaaacatcaatgagagaggtgaaagcggacggagctagcacccccaggttaagagaacaggactgtggtgaacctgcctcgccagcagcatccatctccagactctctggggaacaggtcgacgggaagggccaggcaggcagtgtatctgaaagtgcgcggagtgaaggaaggattagtccaaagagtgatattactgacactggcctgggcacagagcaacaatttgcaggtccccagttcttcagaaccaagcagcctcaaaggttccacatctctgcttgttcacccggtttcaggagtgagaaaagagcagggaggtggttgtcattcagatacttgaagaacattttctctcggttactcaagaagccaattttgtggtacacctggaagtgacctatgcactgttt

SEQ ID NO: 10566 - DNA, 1104 bp, Homo sapiens
gaacataaaaattctttatttaacctaatccagccagtattgagatagtttgctatattaaaaacaagacgtttaaaaaaattacagcaaagttagcaaggcagtgactaattaagtcactaagtttaattttatattcttcacagtcatttcataatcatgtaatggtaaacaatattttcagccactttggagataagttaacttttgaaaagaatagaattctagtagtcgtcattgaattttataaaagaggtttaaaacattaaagtttccagaaataacacagtaaagaaatatgaaaataaactggaaaataaaatatacccacccatccgaaaaatctacatcatctctttcatttgtccccaatgcctttcttttacctctccatttacttttcctagagtgccaacagattacttagcaattaagaaacaactactggctttggtaggggcgattttgagcctaagtgcctgcctgttccctttaatctcctcagttaaccctagaaatagtcttcctgagataaacattatttgcatttcaaagattaagaaaactgcagttgagagaaagtcaaatcctttagccaaaatcatacatacagttattgaaagctgaactatgatttgaacccaggtctatccaactttaagtctgcctatgctcttttgttgcttcatggtcaggcaggtcaccttcctgggaagactggcatgtggtatttctcgagctaataataataaggctctttaggtttaaaagtgttcaattcggggctagaggccactctggtcctcaggcacttgcagttccctccccgcaaccctaaaaaaaccctccctcctgccccaaaaggattagagttgttccccggccttcatgagccctaatacctataaaaccaagcagctactccctgtcaagggcattaatgtagtaaatggggaactgtgtgtttgcataactttagtaaaggctgcctaaaaactgttctatacaacaaaattttgcaagatatgtgtccatttaatgtatctttcacattgaaaacaaaagccaatatattttataattacagcctataatctaagtttt

SEQ ID NO: 10567 - DNA, 309 bp, Homo sapiens
ttttttttctttatttttaaaaaatatattttcacaggggtacaagcgatccatgattatacccactatgtttgtttcttctccactcaaagttactcattccctgtagctgaagattgaggacctgatatcatttggacatttctgctggatcaaatggtatcttctcaaaatgaaagtccttccacttcgagtacagtgtctgaactccagttgcaatatcctccaccacaaaactttcaatttttataactggaatctcaaatgtcttgtacttcacatggattccccagtcatggctgcagttct

SEQ ID NO: 10568 - DNA, 295 bp, Homo sapiens
gtcttattgttagtttgtatctgtcaggttataggattagaaatataactatttttgggagttgggtagcagacaaactgaggattctacctgggactttcttctgtgtactgtgctctgctgaacccaacactgggcacaaacaggaaactgaggctcaagcggaggaggagtggcctgcccaaggttgacttgcagaaggaatgaggatatatccctgttttctcctggaattagaatttcagatctctgttggtcttactgaagtctttgtgggttggtggaatttagggtg

SEQ ID NO: 10569 - DNA, 494 bp, Homo sapiens
gaaaactgaactatagtagtcatcataggaccatagtcctctttgtggcaacagatctcagatatcctacggtgagaagcttaccataagcttggctcctataccttgaatatctgctatcaagccaaatacctggttttccttatcatgctgcacccagagcaactcttgagaaagatttaaaatgtgtctaatacactgatatgaagcagttcaactttttggatgaataaggaccagaaatcgtgagatgtggattttgaacccaactctacctttcattttcttaagaccaatcacagcttgtgcctcagatcatccacctgtgtgagtccatcactgtgaaattgactgtgtccatgtgatgatgccctttgtcccattatttggagcagaaaattcgtcatttggaagtagtacaactcattgctggaattgtgaaattattcaaggcgtgatctctgtcactttattttaatgtaggaaaccctatg

SEQ ID NO: 10570 - DNA, 284 bp, Homo sapiens
gtttctgttaatgctgcagtctgtcaaacgagcttttgccattaacagtaataacccatggttacatgaatgtttaattagattttctaaatctgtgtctaatcatagtaatcttccagacattgtgagcaaagttctatctcaagaaatgcagaaaatatttgtcaaaaaggatttggaaagttttaatgaggattttctgaaacgtaacgctacctctcttcagcatctactttcaggtttgtttgtagcccccagggttaaaatacttatggaaaaagcga

SEQ ID NO: 10571 - DNA, 316 bp, Homo sapiens
catcgtttactacttgccgggtagaactggaggatagactttagaacaagaaatcatataattgaaaactacctttgctacttttggaattttaaaactgaaataattttagaaataattcgacctccctcatttgtaaatgatgaaagacttaaacaatttcacacaatgagaaaatgccagaaccagggctcgtaccgctaactcacatgttcaaccatcaaagtacacagtccctattggttttagttctgcccttttagattgggtgggccctgcagatatttaaagacaggcattatttttatcctcaatc

SEQ ID NO: 10572 - DNA, 465 bp, Homo sapiens
aaaaatgccttcttctacatttgcactggaatttgcgcttgtctccaagaatttaatcccatagtcaattgctagcttctcccctctttcttttgacacttgtcttttgtcattcatatcacatttgttacccaggatcattctttcgacatcggaagaggcatgctcttcaatgtttctgatccaatttttaatattgtcaaaggatttttcatttgtgatgtcatagaccagcataatgcccatggctcctctgtagtacgctgtcgtgattgttcggaatctttcctgacccgctgtgtcccatatctgaagcttaattttctttccatctagttctatcgttctaattttaaaatcaattccgatggtggagatgaaggtggtgttgaaggcgtcctctgagaagcggaacaggaggcaggtcttgcctacccccgagtcgccgatcagcaggagcttgaa

SEQ ID NO: 10573 - DNA, 455 bp, Homo sapiens
ttttttttgaaaaatatttatgtggagtttttaatccatattagaattcagttgttgtaacttgaccataaatttaaacagaaaccatcttctgagacatacattctaataaatgtatcaacagtactgatagtcaacgaagggtcaatttaaacttattagtaacatttcatttttctatccaacagaaatctatagtggtttgccccattacatatctgaaacattgtcttatgaaaacaaaatgaaacaaaattaaataaaattgaagataaaaatactctggaagcacaggatatctgacaagaatcttcagcacaaagcacatgtttgaaaacgtgaaacgatgactctttggaggacaatagctaaatatccaagaatcatcaggtttgagaaatattgcttaatcactttccaaaacacagctgcaagaattgaagatttcattaaaa

SEQ ID NO: 10574 - DNA, 264 bp, Homo sapiens
cattacgtatgtcttgccacaatgaaaacaaaatgcttttgtttgttcactgctgttatgataaagatctcaacacctgacatcccctacaaggcccaatatgatcagacctaccattccaccccgaggtttttatactccagttacactaactgtcttttttcaagttattgatgacactagattccttcttactttaaacttcccttaacgttctttctggaatgaaatgctcctcctctcttttcacctggccaggtacta

SEQ ID NO: 10575 - DNA, 351 bp, Homo sapiens
cgagcccttcctcttcgccgtctttttctccgaatgcgaactgtcaccttttgtttttctctgtcggaagtgagcaagcttcgtcctcccggcctcccttcctttgactgtggatggaagaaagtgtgcagtttttagggattttacttaggttcgtctttagttttcctcagtaagatagttgttttttgatacctgagtttgggattaattcatatcaaattcaggtatttgtatattactcttgatttttgtctgaaattcactttgctatgacagcctagtagttgggtcttcactccttaagtatatgtttttcccatggtgaaaatacatgaactttagttctag

SEQ ID NO: 10576 - DNA, 392 bp, Homo sapiens
gccggggcgggtgtggtgagaaaagttttaaggcaagagtagatggccatgttcaactttacaaaatttcttggaaaactggcagtattttgaactgcatcttctttggtaccggaacctgcagaaacagtgtgagaaattaagtcctggttcactgcgcagtagcaaagatggtcaaggccatggaaaaagcagaaatttaccaagaaagctgatacccatgtatagttcccactcatctcaaatacatctgctatctttttaagctaagtcctagacatatcggggataacatgggggttgattagtgaccacagttatcagaaagcagagaaatgtaattccatattttatttgaaacttattccatattttaattggatattgagtga

SEQ ID NO: 10577 - DNA, 814 bp, Homo sapiens
ttttttaaaaaaaaaacatgaagggagacatgactttattagaaaaataaaaaacaactgaggtgatgggttggtcttcagcggatgccttggtggatgaggctgcttttggctgcactggccttctcccgctcccgccgccgcgcagggtccaactcaaaacagcgccatagcctcagggtctcatctgctgctgcggatgccactgtggccccatctgggctcatggtcagactcaggacccgggatgtgtgacctttgagttcagccaccttggccatggttgggtacttccaaataactagctggttctgtgcaaagccatggcctgagatgagctccttgtaatggggagaccagaggatggagcacacctgggaatgggcatccacggcactcagacaggccccagagcacacattccagatgcgaatgtgtcgatcactggtgccccctcctgttgccaggacattggactgccagggacaccatgctacggccttgacagccccttgatgctgggtgaatgtctgcagaggaacccagccaccctctccaggagcactaggccacacattgaccaagttatcattaccaccactggccaaatgtcgtcccatctggggcccagcgcagcccacacacttcctggctgtggccactcagtgtggccattggttgtttctgctacccgaacatcatggtggtggatgtggccagagcgttaaccactggacaggatatagctgttccagcttagggaggccattcgggaagagtgactggtcatatttcaaggccgtttctgctgttg

SEQ ID NO: 10578 - DNA, 265 bp, Homo sapiens
tagacaaccaatttcctgggcaagctgctccacctggattcccagtgtatcccgcgtttagcccactgcagatgctatggtggcaacagatgtatgctcatcagtattatatgcagtaacaccaagctggatggtttccttttaggcaagaaggaggtcatcagcaggctcccaacaataatgccgaagttaacaatgatgggcaaaatgcaaacaacttggaacttgaagaaatggagcgtcttatggatggtcgacgcggccc

SEQ ID NO: 10579 - DNA, 586 bp, Homo sapiens
acctcacagaggtggggacctaagaggactcatgattatgcagagaattggattgggtctctgtcatagattgagtaatctcttcccttacctcaattccatctccacccatctctacatctgggcacagcaacccagagatggccaaaagcattcaagcctgggggaagatgtttgactattgctgctcttcaccagaacctcacacctctcctgggactggaacccttcagtgggtgtgtggccagttttggaggctggaatgatgggccagggtgtaggattcattctccatgtaaagtttcctttcatcctgcctagccatccccaaggtttatttccagaagaaaggaatatctctacttggatcaattctggtcatttcaagaggatggaggcctcaagtgtgggaacttcccctactccctggatgtgtgtacctagcacacttccttctcccacccctttttccagttggatttgtttttctgttctcttctgtcctgtcttatactgcaactgtgtctcctaggggacagatggccttctttgtcatcttcactctccacccccagagaggagtcag

SEQ ID NO: 10580 - DNA, 539 bp, Homo sapiens
ttttgagtgaaacacatactttatttctgtataaagattctttccaggagaccaggctggaaaacacggaaacctcaggaatggcccctctccacttatactcctctcctcacaaatcaggccaatgaggtcagttcctgagtcccctttctccaggattccactcagtccttgtctcttagtgtcctgttgggggataaggaggagaaggactcttgttctctagcttctccgataaaggcccccccaccgcccctcaattactgtggtctaggaactgtgagttcatgatatacatcagggctcctccctgagaaagcatgaggaggaagaggaggaagagattcacacaatacaaatatcacagtgacagcaatgagatctcacattttggaagtcacgtaacaaagatggttccttgatatttcatattctattactactggacattacaccaagtaaacacacttggataaacacagggtgatgcatttctagaataagaatgtgacccatgcacagtacaaatcatggtgttt

SEQ ID NO: 10581 - DNA, 449 bp, Homo sapiens
tctggccatttctcttgaaactgcggctcgggacctgcggtacctgctgtagtcacgagggacgggcggcggcctggtcggcagagagtagcctgcaacattcggccgtggttacgatgagtttacccctcaatcccaaacctttcctcaatggactaacaggaaagccagtgatggtgaaacttaagtggggaatggagtacaagggctatctggtatctgtagatggctacatgaacatgcagcttgcaaatacagaagaatacatagatggagctttgtctggacatctgggtgaagttttaataaggtgtaataatgtcctttatatcagaggtgtggaagaagaggaagaagatggggaaatgagagaatagcatcttttgtgggggattttttttatatatatttctagacaataaagatttgtttgtttttcaacttgaaaa

SEQ ID NO: 10582 - DNA, 368 bp, Homo sapiens
ataaatctctctgtggtatgaaccttagggaccaactcttaaatgctggaaaggacaaatactatattttgtgcagaatggtaattaaacattgtaaccatttcttagagaatcattattaaatcagggaatcttgttatatttttgaaaatatattagaaattatttttgaatttttttaggtattagaatatttaaatgatctgaaacaatattggaaaagaggatatgggtatactattaacagtcgatccagctgcaccttgtttcaggatatctttcagcacttggacaaagcagttgaacagaaacaaaggtctcagccaatttcttctccagtcatcctccagtttggtcatgcagagact

SEQ ID NO: 10583 - DNA, 318 bp, Homo sapiens
cagcctgcccaggccacagtccacgtagtcaaatggctctcactggaatctctcctcccttggcacaaagtcctccagaggtccctaaacaacagctcttgagttatgagttaggtcaaggtcatgctcaggcttcacctgagatcaggttcacaccctttgctaacccaactcataagcctctggccaaaccaaagagttcccaagagacaccagctcattcctctggacagcctcccagggatgctaagttagaggccaagacagcaaaagcctccccttcggggcagaacatttcttacatccattctagctcag

SEQ ID NO: 10584 - DNA, 314 bp, Homo sapiens
ctcacttacagctaagtggagtggactcttagtagcaccagaatctgattcttcaaatccactgtttgttctttccaaaagcaattccagacactgcctgtgcccataggcggcagcataatgtatgctattgtaaccttccttgtcccggatagatggatttgcatcattttgaagcagaaactctagacattttctatccatgtctgatgcagcggcgtaatgcaaagctgtgcgtccccagtcatctgtttcattaacgttggcccctgtggtcactaatgtctcaatacagtggaaatgacaattcgcag

SEQ ID NO: 10585 - DNA, 321 bp, Homo sapiens
  misc_feature (1)...(321): n = a,t,c or g
ctgaactcaaaggccacgttgatttttccacccacaacttgattctgatttttctagagtcattcataagaacaagaagtagtggatcctttcttcctccttagtatctgaaaattctgaactctgaagagaaattccatttggtttgtcattttcacctctgtgcatttcggcagctcttaacttttcttcaattctttatgtgtcatagattctgagcctagtctgaagtcctgggacttgntcttattgattgattgcttttgaggagctggagatttttctattttagttttttcctcaanggcttaaaggaggggg

SEQ ID NO: 10586 - DNA, 549 bp, Homo sapiens
  misc_feature (1)...(549): n = a,t,c or g
agcatgctgatcccattttcaatgaagaattgcttccagttactttgtaactgccaggtcccagcagctggctttaaaaaaacagtaaaaaatgggctcattttacagtcaatttccaatgatgtctatcaaaatctggctgtggaagactggatccatgaccatatgaatctagaaggcaaaccaattctattcttttggcagaattctccctctgttgtaattggtaggcatcaaaatccttggcaggaatgtaacctgaatctaatgagagaagaaggtataaaactggctcggagaagaagtggaggaggaacagtctaccatgatatggggtaatatcaatttgactttctttacaaccaaaaaaaagtatgatagaatggaaaatctgaaattaattgtgagagctctgaatgctgtccaaccccagctggatgtgcaggctaccaaaaggtttgacctttttacttggatgggacagtttaaaatctcagggacagcttcttaaggtccggnccggactactgcctattcaccattgcactt

SEQ ID NO: 10587 - DNA, 766 bp, Homo sapiens
tttttttttttggaaatgtaaaaaattcagtatctatatttaatttcattgcttcaaaacatatatatgtatgtatatacataaatttaaaaactgacagaatgacaaagatttttcagcaatacataatcatggtgggagagtttaacatacctctctcaataaatgctagatcacagatcaacatttataaatgtgtagatggtttttaaacacatttgcttgatctagcagacatttgtagaatacaatacattgatttcaaccatccatgaagcatttataaaaactgacatatactaagtgcatcagttaggaattatattcaggtgaaataaacctcccaccaaaaacaaaaacaaacaaaagaaaactgtaccagtaagaagtgcatatttttcatgtatgggacatccagaaataaatagtccagggctgctgcaatcacataaatatgccaattctattaaatctatcctaaatattttttagattacagaagcaagatggttatgacttccggccaccctcttcttagcttgcggcttttacccttatggtcacaggagggctcctctaggtctagaaatcatgtctacttgtccaaaaggcaagaagtggagagatgtggctacatgaaaccatccctgaacacaatatcttccccagagtcacatccagtgacttctcatattcatactagccaggaccggaggaaatggcctgcccttgcttgcaagaagggctgggagatggaagctttttt

SEQ ID NO: 10588 - DNA, 371 bp, Homo sapiens
ttttttttctgaggacacagaaaaggagccagggattcagaaggcaggtttgggaactagacttctaccagtttaggaagcagagccttttgtaattggttcctagcttttggtattcgaaatcaacctctgaagcaatttttcaaggcctagctgaaaagcaccagttgcctcttccactgctgttgccaaacgtctgactgcgatgacagcatccctgcggagctcattggcagtatcttgctgagcactggcctcctcaccaatagcaatcagcctgtccagtttttcttcctcccgctttgagagttctcgtgccaatcgcctgttttctgccaactcggctgcgatagtcctggccactgaccgcc

SEQ ID NO: 10589 - DNA, 529 bp, Homo sapiens
  misc_feature (1)...(529): n = a,t,c or g
tccagtgttggctgacttacagctcttataaactagtggcaatttctgaacccagccggctccatctcagcttctggtttctaagtccatgtgccaaagntgccaggaaggagacgccttcctgagtcctggatctttcttccttctggaaatctttgactgtgggtagttatttatttctgaataagagcgtccacgcatcatggacctcgcgggactgctgaagtctcagttcctgtgccacctggtcttctgctacgtctttattgcctcagggctaatcatcaacaccattcagctcttcactctcctcctctggcccattaacaagcagctcttcccggaagatcaactgcaagactgttcctattgcatctcaaggccagctgggtgaatgcttgctggagtggtggtcgggcacggaatgcaccatcttcacggacccgcgcgcctacctcaagtatggggaaggaaaatgccatcgtggttctcaaccacaagtttggaaatttgactttctgtgtgggtt

SEQ ID NO: 10590 - DNA, 2721 bp, Homo sapiens
  misc_feature (1)...(2721): n = a,t,c or g
cacgtggctgcagcggggccagagcagcaatggcggcgggcggcggcggtagctgcgaccccctggcccctgctggggtcccttgcgccttctccccgcacagccaggcctacttcgctttggcctctaccgacggtcacttacgagtatgggagacggccaacaaccggctgcaccaggagtacgtgccttccgcgcacctcagtggtacctgcacctgtctggcctgggcgccagcgcggctgcaggccaaggaaagtccccagaggaaaaaaaggaaatcagaagctgtaggaatgagtaaccagactgacttattggctcttggcacagcagttggtagcattttattatacagcacagtaaaaggagagttacacagtaaattaataagtggtggacatgacaacagagtcaactgcatacagtggcatcaagacagtggctgtttatatagttgttcagatgataaacatattgtggaatggaacgtacagacatgcaaagtaaagtgcaaatggaaaggggacaatagcagtgtcagttccctatgtatcagcccagatggaaagatgttgctttcagctggtcgaacaatcaaactatgggttttggagaccaaagaagtctacaggcatttcacaggacatgcaacgccagtttcgtcactgatgttcactaccatcagacctcctaatgagagccagccctttgatggaattacaggtctttatttcttatctggagcagtacatgaccggttacttaatgtctggcaggtccgatcagaaaacaaagaaaagagtgcagtgatgtcatttacagttaccgatgaacctgtctatattgacttaactttgtcagaaaacaaagaagagcctgtcaagttggctgttgtttgcagagatggtcaagtccatctttttgaacacatattaaatgggtactgcaaaaagcctttgacttcaaactgcacaattcagatagcaacacctgggaaaggcaagaagtcaacaccaaaacccatccctattctagctgctggtttttgctcagacaaaatgtcattgttgcttgtatatggcagttggtttcagcctactattgagcgagtggctttaaactccagagaacctcatatgtgtttagtaagagatatttcaaactgctgggcccccaaagtagaaacagctataacaaaggtgaggacaccagtgatgaattctgaagcaaaagttctggtgcctgggattcctggtcatcatgcagctatcaagcccgctcctccacaaaccgagcaagtagagagcaagaggaagtcagggggaaatgaggttagcattgaagaacgtctgggagcaatggatatagacacacacaaaaaaggaaaggaagacctccagacgaatagctttccagttcttcttacccagggcttagaaagtaacgattttgaaatgctaaataaagtacttcaaactaggaatgtaaaccttataaagaagactgtattaaggatgcccctgcatactattattccgttgttacaagagcttacaaagaggttacaaggacatcctaatagtgctgtgctaatggttcagtggctaaaatgtgtgttaacagttcatgcatcatacctgtccacgttgcctgacctggtaccccagctggggacactctaccagttaatggaaagcagagtcaaaacttttcagaaactttcacaccttcatggaaagcttattcttctaattacacaagtaacagcatcagagaagacaaagggagcaacttcccctggacagaaggcaaagttggtgtatgaagaagagtcttctgaagaggagtctgatgatgaaatagcagataaggattctgaagataattgggatgaagatgaggaggagagtgaaagtgaaaaagatgaggacgttgaagaggaagatgaggatgccgaaggaaaagatgaagaaaatggcgaggacagagatacagcaagtgaaaaagaattaaatggagattctgacttagatcctgaaaatgaaagtgaagaagaatgaagacagcaaagcaagccggtcaaactatataaactctggctcaccttgcccagtggtgagggctgcctctgtgccaggatgccaaggaccgctgcacatttccaaattcacagcagtggatcccatgccactttgctgtcctgagcaccccagacttgactgtgtaaataagagtgtttcattcaaatgttaataaactttacacagtatatagacacattttctgcaatgtactgacatcagtgtccaatatatggtatatttttataatgtaatatcctagtatgattggttatatcaagaattgacaagtgcagataaagacctttcccataggagttcaagaactggactgttgtgaagaagtcagctcttatctcaggttggtatctttcatcaaatccagatgcaaagcagcactagtgaaaatttttttaatttagtacatttaatttggtacattttcataaaatatgaagggataactacaaactggagtaaaaatgatggtaattaaaaanaatcctcagtatccctagcttgtctattaactgtgataatctgacttgagtcagattgaatatttggagtgcttccccagaataaccacttatttttgaagctatcatgtgaagtatttttttaaaacaaaacaaaa

SEQ ID NO: 10591 - DNA, 446 bp, Homo sapiens
tttttccatttcttttttaaaaaaatggtatgttcaaatatctttctcatcaataaatatttatcttcatcattcttcctaatgacattcccttgtatgaatgtgccaatgtggaataaccagttccgtcttgttgggctttcagatgttttctttttgtaaatgataaacaatgcagttataactatctttatatataaactttgcaatagtatgagtattttcctagaataaatactggaaagtgaaattgcgtggtcaaaggccagacacatttttaaaagctgcctctttcccaatcacacatttcccacatccatttatttgctgaggatcttcacaaaatttggactgagattaaacacagaatcagagaagccctatgctggaaagatcttagtatatacctcttgaactaaaccagtcttactttagaaaaaaaaaaa

SEQ ID NO: 10592 - DNA, 501 bp, Homo sapiens
gggagtggaacctcgatattggtggtgtccatcgtgggcagcggactaataaaggccatggcgccagcagaaatcctgaacgggaaggagatctccgcgcaaataagggcgagactgaaaaatcaagtcactcagttgaaggagcaagtacctggtttcacaccacgcctggcaatattacaggttggcaacagagatgattccaatctttatataaatgtgaagctgaaggctgctgaagagattgggatcaaagccactcacattaagttaccaagaacaaccacagaatctgaggtgatgaagtacattacatctttgaatgaagactctactgtacatgggttcttagtgcagctacctttagattcagagaattccattaacactgaagaagtgatcaatgctattgcacccgagaaggatgtggatggattgactagcatcaatgctgggagacttgctagaggtgacctcaatgactgtttcattccttgtacg

SEQ ID NO: 10593 - DNA, 472 bp, Homo sapiens
tcgtgcgcaagcaccagccttcagggacaagaaacagggggtctcagccaagaatcaaggtgcccatgacccagactatgagaatatcaccttggccttcaaaaatcaggaccatgcaaagggtggtcattcacgacccacgagccaagtcccagcccagtgcaggccgccctcagactccacccaggtcccctgctggttgtacagagccatcctgagcctgtacatcctcctggccctggctgttgtcctctgcatcatcctgtcagccttcatcatggtgaagaatgctgagatgtccaaggagctgctgggctttaaaagggagctttggaatgtctcaaactccgtacaagcatgcgaagagagacagaagagaggctgggattccgttcagcagagcatcaccatggtcaggagcaagattgatagattagagacgacattagcaggcataaaaaacattgacaca

SEQ ID NO: 10594 - DNA, 147 bp, Homo sapiens
atctctttcagcatcatactttaagtcatttgaaacactaaacctgccaaaatattaaaaagcacaaattaaatacaaattatatcattctagaattcaggaataaaattaataaagccaggtcttgacacttaaaaaaaaaaaaaa

SEQ ID NO: 10595 - DNA, 131 bp, Homo sapiens
gggtgaaccctgctctaagcacttaatatttttatcacatttgagagagagttaactattactaccacccctactttacagatgatgaaacagatttggacaggtagagtgacttggctaaggcatacagg

SEQ ID NO: 10596 - DNA, 136 bp, Homo sapiens
ctacactattatgtcaccccagaaagtgaactctcagtcttcccagccagtctctttcttatcataggttagcttgcttattctggaatttcgcgtatacagatgcatgccatgccataggtactcttttgtgtct

SEQ ID NO: 10597 - DNA, 379 bp, Homo sapiens
ccggctgatttcctggactattccaatttatttaaacagcaagcataacaacaaaaccccctcatatactctatatttggtaattttactgtcctagtagaataatgaatattattacactaagaaaaagttgaaaaggctacctcagaagaacatatatcagacataagtgcattaacacgtctcgctctagaaaacagctgttaacaaaatatcagtgttaacacagatccaaatagcttgaacataaagaaaacaagagctatgcaacttactccatcagaaattgacataagtaattatccattgattatcctacctgaagctgcataaagctgtatgagctttgtttcccaaattttaggccattaaatccttt

SEQ ID NO: 10598 - DNA, 287 bp, Homo sapiens
acattcttttttataaaaaaaaaatacaaagaagagcatttcattttaatactctgtcaaatagtaaatatgatactaattctttatcagcctacccaataactacgaatgaaatctatatacattatccacccactgaggaaaaagagacatccataaaatttaaataggtgttgttcaacatgtctgtcacacttgagctactttaccttgtatgaaagaccaatttaaaaatcctcaaagacaacctttattttatttgattaattcaccatgggtaaaatgta

SEQ ID NO: 10599 - DNA, 115 bp, Homo sapiens
tccaaatcctttctaaacactaggacttttcatgaaaagaaaaaagctatgccagttagacacacacagaaatctcatgattttattttgaatttctttgactaaattgaactta

SEQ ID NO: 10600 - DNA, 314 bp, Homo sapiens
caacttccgcctcccgggttcaagcgattggtctgtcattttcagaccccacagaaacacaggtgctcctgccaggcccccggggactgcctccaggagtcatttgtaatgacagggtgcgttctgcgcacggtttcagagtctgtccaaagggccaatgctggggctggggcagaaacggtccaaggcctgtgagctgtgcagctttataggcaaatgaagatcgtttacccagaattgcctgctggagaagagcatagaggaagtggcggcagcttcaccagttccaggaagcccaggcagcctggtccccc

SEQ ID NO: 10601 - DNA, 304 bp, Homo sapiens
ccgctttgagcacctggtgacacaaatgaagtggcggctccaggagggacgtggtgaggccgtctaccagattggggtagaggacaatgggctgctggtggggctggctgaggaggaaatgcgagcttcgctcaagaccctgcaccggatggcagagaaggttggggcagacataaccgttcttcgagagcgagaagtggattatgatagcgacatgccccggaagatcaccgaggtgctagtacgaaaggtccctgacaaccaacagttcctagacctccgtgtggccgtcctggggaatgtg

SEQ ID NO: 10602 - DNA, 401 bp, Homo sapiens
ccaccagtggcattcgatcctgttgtgcggctctggaacccccgaccagagagtgaagaccttcacaggccgagtcgtggaagatatggagggtgcttcacaggccaaccagcggcgcatgaatgcagacccgttggaggtgatgctgctcaacatgggctaccggatcacgggcctgagcagtgggggtgccggggcctctgatgatgaggacagctctgagggccaggtgcagtgccggcccagctagaccctccagccctggtccccagcccctgctactggctggaccctctgccctgggcaggaggtcaggggattctgttttggtttgtcttccccaccaccctttttttttcatttcccctgttttgtttgttaagtttgggcgttaggggtgg

SEQ ID NO: 10603 - DNA, 462 bp, Homo sapiens
ggcagggaagaggacttggaatttattagggtcacaagcacccctgcttcccatattcagcattcctgaaccatacactgccaccccttttgtatcctgggaacttagagtcctcatcagcaggaggccaggcagagtggtgggggggtgagcagagtccagggtccttgaggcagttacatgaaaagacctccagtgacttccactgaggtccctgtgatgtatccactatcttcagatgccaagaatgcgaccacatctgccacatcctcagggtcccccaagtgtcccatcgggatcatttcagctcgtgccgaattcggacagggcctgggtgctactattggatgtgaaataaaagcctgtgttaagacttaccattaccactgtggagtacaagacaaagctaaatacattgaaaatatgtcacgaggaatttacaaactatactgtaaaaatcat

SEQ ID NO: 10604 - DNA, 95 bp, Homo sapiens
ttttttttttaagacaagggttgcaaagtcaaatgcctataaggcagaacgtaagacggtaggaagcaaagtctatagggagctatataatagag
